United States Patent Application Publication US 2014/0004565 A1 - sequence listing, part 105

SEQ ID NO: 2617324 - RNA, 19 nt, Artificial Sequence
  Description of Artificial Sequence: Synthetic oligonucleotide
ccuguuuaaagggaaauca

SEQ ID NO: 2617325 - RNA, 19 nt, Artificial Sequence
  Description of Artificial Sequence: Synthetic oligonucleotide
aaaagggcucacacaaaua

SEQ ID NO: 2617326 - RNA, 19 nt, Artificial Sequence
  Description of Artificial Sequence: Synthetic oligonucleotide
cuacgcucugcagaauagc

SEQ ID NO: 2617327 - RNA, 19 nt, Artificial Sequence
  Description of Artificial Sequence: Synthetic oligonucleotide
cagccagcgccaccgauag

SEQ ID NO: 2617328 - RNA, 19 nt, Artificial Sequence
  Description of Artificial Sequence: Synthetic oligonucleotide
agugggcgugccuggaacu

SEQ ID NO: 2617329 - RNA, 19 nt, Artificial Sequence
  Description of Artificial Sequence: Synthetic oligonucleotide
gugacacagacaugagaga

SEQ ID NO: 2617330 - RNA, 19 nt, Artificial Sequence
  Description of Artificial Sequence: Synthetic oligonucleotide
gaacuaaguggcagccgug

SEQ ID NO: 2617331 - RNA, 19 nt, Artificial Sequence
  Description of Artificial Sequence: Synthetic oligonucleotide
gugccaaggugaaagagaa

SEQ ID NO: 2617332 - RNA, 19 nt, Artificial Sequence
  Description of Artificial Sequence: Synthetic oligonucleotide
uggcagccgugacacagac

SEQ ID NO: 2617333 - RNA, 19 nt, Artificial Sequence
  Description of Artificial Sequence: Synthetic oligonucleotide
uugguuuguaaguccccuu

SEQ ID NO: 2617334 - RNA, 19 nt, Artificial Sequence
  Description of Artificial Sequence: Synthetic oligonucleotide
gauaauacauacaguuguu

SEQ ID NO: 2617335 - RNA, 19 nt, Artificial Sequence
  Description of Artificial Sequence: Synthetic oligonucleotide
gccagcgccaccgauaggc

SEQ ID NO: 2617336 - RNA, 19 nt, Artificial Sequence
  Description of Artificial Sequence: Synthetic oligonucleotide
gcagccgugacacagacau

SEQ ID NO: 2617337 - RNA, 19 nt, Artificial Sequence
  Description of Artificial Sequence: Synthetic oligonucleotide
cugccggccuccucuacgc

SEQ ID NO: 2617338 - RNA, 19 nt, Artificial Sequence
  Description of Artificial Sequence: Synthetic oligonucleotide
gccaaggugaaagagaacu

SEQ ID NO: 2617339 - RNA, 19 nt, Artificial Sequence
  Description of Artificial Sequence: Synthetic oligonucleotide
ugccaaggugaaagagaac

SEQ ID NO: 2617340 - RNA, 19 nt, Artificial Sequence
  Description of Artificial Sequence: Synthetic oligonucleotide
gacacagacaugagagaaa

SEQ ID NO: 2617341 - RNA, 19 nt, Artificial Sequence
  Description of Artificial Sequence: Synthetic oligonucleotide
ggccuuuccaaaccccugc

SEQ ID NO: 2617342 - RNA, 19 nt, Artificial Sequence
  Description of Artificial Sequence: Synthetic oligonucleotide
gcagaauagcugcucccag

SEQ ID NO: 2617343 - RNA, 19 nt, Artificial Sequence
  Description of Artificial Sequence: Synthetic oligonucleotide
uccaaaccccugccggccu

SEQ ID NO: 2617344 - RNA, 19 nt, Artificial Sequence
  Description of Artificial Sequence: Synthetic oligonucleotide
cccagcaaaccacagccag

SEQ ID NO: 2617345 - RNA, 19 nt, Artificial Sequence
  Description of Artificial Sequence: Synthetic oligonucleotide
gacaugagagaaaaugcuu

SEQ ID NO: 2617346 - RNA, 19 nt, Artificial Sequence
  Description of Artificial Sequence: Synthetic oligonucleotide
ggaaaaugugaaccaucuc

SEQ ID NO: 2617347 - RNA, 19 nt, Artificial Sequence
  Description of Artificial Sequence: Synthetic oligonucleotide
agaaaaugcuugguuugua

SEQ ID NO: 2617348 - RNA, 19 nt, Artificial Sequence
  Description of Artificial Sequence: Synthetic oligonucleotide
gcucacacaaauagcaaga

SEQ ID NO: 2617349 - RNA, 19 nt, Artificial Sequence
  Description of Artificial Sequence: Synthetic oligonucleotide
ugccuggaacuaaguggca

SEQ ID NO: 2617350 - RNA, 19 nt, Artificial Sequence
  Description of Artificial Sequence: Synthetic oligonucleotide
cagugggcgugccuggaac

SEQ ID NO: 2617351 - RNA, 19 nt, Artificial Sequence
  Description of Artificial Sequence: Synthetic oligonucleotide
ccuuuccaaaccccugccg

SEQ ID NO: 2617352 - RNA, 19 nt, Artificial Sequence
  Description of Artificial Sequence: Synthetic oligonucleotide
acuucacagcaagauuuau

SEQ ID NO: 2617353 - RNA, 19 nt, Artificial Sequence
  Description of Artificial Sequence: Synthetic oligonucleotide
uguccgugcucugaaugua

SEQ ID NO: 2617354 - RNA, 19 nt, Artificial Sequence
  Description of Artificial Sequence: Synthetic oligonucleotide
ccgugcucugaauguaugg

SEQ ID NO: 2617355 - RNA, 19 nt, Artificial Sequence
  Description of Artificial Sequence: Synthetic oligonucleotide
ccucaucuccccaaaugug

SEQ ID NO: 2617356 - RNA, 19 nt, Artificial Sequence
  Description of Artificial Sequence: Synthetic oligonucleotide
aaccccugccggccuccuc

SEQ ID NO: 2617357 - RNA, 19 nt, Artificial Sequence
  Description of Artificial Sequence: Synthetic oligonucleotide
cucugcagaauagcugcuc

SEQ ID NO: 2617358 - RNA, 19 nt, Artificial Sequence
  Description of Artificial Sequence: Synthetic oligonucleotide
auggcauaugaagcauacu

SEQ ID NO: 2617359 - RNA, 19 nt, Artificial Sequence
  Description of Artificial Sequence: Synthetic oligonucleotide
cucuacgcucugcagaaua

SEQ ID NO: 2617360 - RNA, 19 nt, Artificial Sequence
  Description of Artificial Sequence: Synthetic oligonucleotide
caccgauaggccuuuccaa

SEQ ID NO: 2617361 - RNA, 19 nt, Artificial Sequence
  Description of Artificial Sequence: Synthetic oligonucleotide
ggugaaagagaacuucuuu

SEQ ID NO: 2617362 - RNA, 19 nt, Artificial Sequence
  Description of Artificial Sequence: Synthetic oligonucleotide
cuucacagcaagauuuauu

SEQ ID NO: 2617363 - RNA, 19 nt, Artificial Sequence
  Description of Artificial Sequence: Synthetic oligonucleotide
aggugaaagagaacuucuu

SEQ ID NO: 2617364 - RNA, 19 nt, Artificial Sequence
  Description of Artificial Sequence: Synthetic oligonucleotide
ccgauaggccuuuccaaac

SEQ ID NO: 2617365 - RNA, 19 nt, Artificial Sequence
  Description of Artificial Sequence: Synthetic oligonucleotide
gccuggaacuaaguggcag

SEQ ID NO: 2617366 - RNA, 19 nt, Artificial Sequence
  Description of Artificial Sequence: Synthetic oligonucleotide
aaguccccuuuaagcagcu

SEQ ID NO: 2617367 - RNA, 19 nt, Artificial Sequence
  Description of Artificial Sequence: Synthetic oligonucleotide
ucacaaccaaaagccccuc

SEQ ID NO: 2617368 - RNA, 19 nt, Artificial Sequence
  Description of Artificial Sequence: Synthetic oligonucleotide
cgauaggccuuuccaaacc

SEQ ID NO: 2617369 - RNA, 19 nt, Artificial Sequence
  Description of Artificial Sequence: Synthetic oligonucleotide
gcgugccuggaacuaagug

SEQ ID NO: 2617370 - RNA, 19 nt, Artificial Sequence
  Description of Artificial Sequence: Synthetic oligonucleotide
cuugguuuguaaguccccu

SEQ ID NO: 2617371 - RNA, 19 nt, Artificial Sequence
  Description of Artificial Sequence: Synthetic oligonucleotide
cgugcucugaauguauggc

SEQ ID NO: 2617372 - RNA, 19 nt, Artificial Sequence
  Description of Artificial Sequence: Synthetic oligonucleotide
ccaauccauuauuauuuca

SEQ ID NO: 2617373 - RNA, 19 nt, Artificial Sequence
  Description of Artificial Sequence: Synthetic oligonucleotide
guauggcauaugaagcaua

SEQ ID NO: 2617374 - RNA, 19 nt, Artificial Sequence
  Description of Artificial Sequence: Synthetic oligonucleotide
aaguggcagccgugacaca

SEQ ID NO: 2617375 - RNA, 19 nt, Artificial Sequence
  Description of Artificial Sequence: Synthetic oligonucleotide
cagaauagcugcucccagu

SEQ ID NO: 2617376 - RNA, 19 nt, Artificial Sequence
  Description of Artificial Sequence: Synthetic oligonucleotide
gguuuguaaguccccuuua

SEQ ID NO: 2617377 - RNA, 19 nt, Artificial Sequence
  Description of Artificial Sequence: Synthetic oligonucleotide
caaaccccugccggccucc

SEQ ID NO: 2617378 - RNA, 19 nt, Artificial Sequence
  Description of Artificial Sequence: Synthetic oligonucleotide
uccuguccgugcucugaau

SEQ ID NO: 2617379 - RNA, 19 nt, Artificial Sequence
  Description of Artificial Sequence: Synthetic oligonucleotide
ggagaccaauccauuauua

SEQ ID NO: 2617380 - RNA, 19 nt, Artificial Sequence
  Description of Artificial Sequence: Synthetic oligonucleotide
gcuugguuuguaagucccc

SEQ ID NO: 2617381 - RNA, 19 nt, Artificial Sequence
  Description of Artificial Sequence: Synthetic oligonucleotide
ccccucaucuccccaaaug

SEQ ID NO: 2617382 - RNA, 19 nt, Artificial Sequence
  Description of Artificial Sequence: Synthetic oligonucleotide
ccccaaauguguccucccc

SEQ ID NO: 2617383 - RNA, 19 nt, Artificial Sequence
  Description of Artificial Sequence: Synthetic oligonucleotide
ccugccggccuccucuacg

SEQ ID NO: 2617384 - RNA, 19 nt, Artificial Sequence
  Description of Artificial Sequence: Synthetic oligonucleotide
acagccagcgccaccgaua

SEQ ID NO: 2617385 - RNA, 19 nt, Artificial Sequence
  Description of Artificial Sequence: Synthetic oligonucleotide
ugggcgugccuggaacuaa

SEQ ID NO: 2617386 - RNA, 19 nt, Artificial Sequence
  Description of Artificial Sequence: Synthetic oligonucleotide
gugaaccaucucuuccugu

SEQ ID NO: 2617387 - RNA, 19 nt, Artificial Sequence
  Description of Artificial Sequence: Synthetic oligonucleotide
ccaccgauaggccuuucca

SEQ ID NO: 2617388 - RNA, 19 nt, Artificial Sequence
  Description of Artificial Sequence: Synthetic oligonucleotide
agccccucaucuccccaaa

SEQ ID NO: 2617389 - RNA, 19 nt, Artificial Sequence
  Description of Artificial Sequence: Synthetic oligonucleotide
guaauacaguacauucauu

SEQ ID NO: 2617390 - RNA, 19 nt, Artificial Sequence
  Description of Artificial Sequence: Synthetic oligonucleotide
agcgccaccgauaggccuu

SEQ ID NO: 2617391 - RNA, 19 nt, Artificial Sequence
  Description of Artificial Sequence: Synthetic oligonucleotide
agccagcgccaccgauagg

SEQ ID NO: 2617392 - RNA, 19 nt, Artificial Sequence
  Description of Artificial Sequence: Synthetic oligonucleotide
cagccgugacacagacaug

SEQ ID NO: 2617393 - RNA, 19 nt, Artificial Sequence
  Description of Artificial Sequence: Synthetic oligonucleotide
acugugugccaaggugaaa

SEQ ID NO: 2617394 - RNA, 19 nt, Artificial Sequence
  Description of Artificial Sequence: Synthetic oligonucleotide
aaaccccugccggccuccu

SEQ ID NO: 2617395 - RNA, 19 nt, Artificial Sequence
  Description of Artificial Sequence: Synthetic oligonucleotide
guacauucauugagauaua

SEQ ID NO: 2617396 - RNA, 19 nt, Artificial Sequence
  Description of Artificial Sequence: Synthetic oligonucleotide
aguccccuuuaagcagcug

SEQ ID NO: 2617397 - RNA, 19 nt, Artificial Sequence
  Description of Artificial Sequence: Synthetic oligonucleotide
gcugcucccagugggcgug

SEQ ID NO: 2617398 - RNA, 19 nt, Artificial Sequence
  Description of Artificial Sequence: Synthetic oligonucleotide
cuccuguccgugcucugaa

SEQ ID NO: 2617399 - RNA, 19 nt, Artificial Sequence
  Description of Artificial Sequence: Synthetic oligonucleotide
ccccuuuaagcagcugccc

SEQ ID NO: 2617400 - RNA, 19 nt, Artificial Sequence
  Description of Artificial Sequence: Synthetic oligonucleotide
gggcgugccuggaacuaag

SEQ ID NO: 2617401 - RNA, 19 nt, Artificial Sequence
  Description of Artificial Sequence: Synthetic oligonucleotide
ccgugacacagacaugaga

SEQ ID NO: 2617402 - RNA, 19 nt, Artificial Sequence
  Description of Artificial Sequence: Synthetic oligonucleotide
guggcagccgugacacaga

SEQ ID NO: 2617403 - RNA, 19 nt, Artificial Sequence
  Description of Artificial Sequence: Synthetic oligonucleotide
gcaagauaacacagcaaau

SEQ ID NO: 2617404 - RNA, 19 nt, Artificial Sequence
  Description of Artificial Sequence: Synthetic oligonucleotide
gcauacugugugccaaggu

SEQ ID NO: 2617405 - RNA, 19 nt, Artificial Sequence
  Description of Artificial Sequence: Synthetic oligonucleotide
gccgugacacagacaugag

SEQ ID NO: 2617406 - RNA, 19 nt, Artificial Sequence
  Description of Artificial Sequence: Synthetic oligonucleotide
gggcucacacaaauagcaa

SEQ ID NO: 2617407 - RNA, 19 nt, Artificial Sequence
  Description of Artificial Sequence: Synthetic oligonucleotide
gugggcgugccuggaacua

SEQ ID NO: 2617408 - RNA, 19 nt, Artificial Sequence
  Description of Artificial Sequence: Synthetic oligonucleotide
cccuuuaagcagcugcccu

SEQ ID NO: 2617409 - RNA, 19 nt, Artificial Sequence
  Description of Artificial Sequence: Synthetic oligonucleotide
guccgugcucugaauguau

SEQ ID NO: 2617410 - RNA, 19 nt, Artificial Sequence
  Description of Artificial Sequence: Synthetic oligonucleotide
ccaaggugaaagagaacuu

SEQ ID NO: 2617411 - RNA, 19 nt, Artificial Sequence
  Description of Artificial Sequence: Synthetic oligonucleotide
cacagccagcgccaccgau

SEQ ID NO: 2617412 - RNA, 19 nt, Artificial Sequence
  Description of Artificial Sequence: Synthetic oligonucleotide
ccuccuguccgugcucuga

SEQ ID NO: 2617413 - RNA, 19 nt, Artificial Sequence
  Description of Artificial Sequence: Synthetic oligonucleotide
ggcagccgugacacagaca

SEQ ID NO: 2617414 - RNA, 19 nt, Artificial Sequence
  Description of Artificial Sequence: Synthetic oligonucleotide
ccagugggcgugccuggaa

SEQ ID NO: 2617415 - RNA, 19 nt, Artificial Sequence
  Description of Artificial Sequence: Synthetic oligonucleotide
ggcgugccuggaacuaagu

SEQ ID NO: 2617416 - RNA, 19 nt, Artificial Sequence
  Description of Artificial Sequence: Synthetic oligonucleotide
cccugccggccuccucuac

SEQ ID NO: 2617417 - RNA, 19 nt, Artificial Sequence
  Description of Artificial Sequence: Synthetic oligonucleotide
gccccucaucuccccaaau

SEQ ID NO: 2617418 - RNA, 19 nt, Artificial Sequence
  Description of Artificial Sequence: Synthetic oligonucleotide
cccagugggcgugccugga

SEQ ID NO: 2617419 - RNA, 19 nt, Artificial Sequence
  Description of Artificial Sequence: Synthetic oligonucleotide
ccacagccagcgccaccga

SEQ ID NO: 2617420 - RNA, 19 nt, Artificial Sequence
  Description of Artificial Sequence: Synthetic oligonucleotide
ccccugccggccuccucua

SEQ ID NO: 2617421 - RNA, 19 nt, Artificial Sequence
  Description of Artificial Sequence: Synthetic oligonucleotide
ccucuacgcucugcagaau

SEQ ID NO: 2617422 - RNA, 19 nt, Artificial Sequence
  Description of Artificial Sequence: Synthetic oligonucleotide
gcgccaccgauaggccuuu

SEQ ID NO: 2617423 - RNA, 19 nt, Artificial Sequence
  Description of Artificial Sequence: Synthetic oligonucleotide
cgccaccgauaggccuuuc

SEQ ID NO: 2617424 - RNA, 19 nt, Artificial Sequence
  Description of Artificial Sequence: Synthetic oligonucleotide
uuagccauaggaaaagggg

SEQ ID NO: 2617425 - RNA, 19 nt, Artificial Sequence
  Description of Artificial Sequence: Synthetic oligonucleotide
auaggaaaaggggacagac

SEQ ID NO: 2617426 - RNA, 19 nt, Artificial Sequence
  Description of Artificial Sequence: Synthetic oligonucleotide
uuauuagccauaggaaaag

SEQ ID NO: 2617427 - RNA, 19 nt, Artificial Sequence
  Description of Artificial Sequence: Synthetic oligonucleotide
uagccauaggaaaagggga

SEQ ID NO: 2617428 - RNA, 19 nt, Artificial Sequence
  Description of Artificial Sequence: Synthetic oligonucleotide
agccauaggaaaaggggac

SEQ ID NO: 2617429 - RNA, 19 nt, Artificial Sequence
  Description of Artificial Sequence: Synthetic oligonucleotide
gccauaggaaaaggggaca

SEQ ID NO: 2617430 - RNA, 19 nt, Artificial Sequence
  Description of Artificial Sequence: Synthetic oligonucleotide
aagaagaugacacaaaugg

SEQ ID NO: 2617431 - RNA, 19 nt, Artificial Sequence
  Description of Artificial Sequence: Synthetic oligonucleotide
aacaaggaaagcuacgagc

SEQ ID NO: 2617432 - RNA, 19 nt, Artificial Sequence
  Description of Artificial Sequence: Synthetic oligonucleotide
aagauuaggaacaaaauuc

SEQ ID NO: 2617433 - RNA, 19 nt, Artificial Sequence
  Description of Artificial Sequence: Synthetic oligonucleotide
auuagauccaacucugucc

SEQ ID NO: 2617434 - RNA, 19 nt, Artificial Sequence
  Description of Artificial Sequence: Synthetic oligonucleotide
agggaagaaguucagagcc

SEQ ID NO: 2617435 - RNA, 19 nt, Artificial Sequence
  Description of Artificial Sequence: Synthetic oligonucleotide
aacucaaagacuugacugg

SEQ ID NO: 2617436 - RNA, 19 nt, Artificial Sequence
  Description of Artificial Sequence: Synthetic oligonucleotide
cauagugauguucugaggg

SEQ ID NO: 2617437 - RNA, 19 nt, Artificial Sequence
  Description of Artificial Sequence: Synthetic oligonucleotide
aagacauagucacccaugg

SEQ ID NO: 2617438 - RNA, 19 nt, Artificial Sequence
  Description of Artificial Sequence: Synthetic oligonucleotide
gaacucaaagacuugacug

SEQ ID NO: 2617439 - RNA, 19 nt, Artificial Sequence
  Description of Artificial Sequence: Synthetic oligonucleotide
auggugaucccacugaugg

SEQ ID NO: 2617440 - RNA, 19 nt, Artificial Sequence
  Description of Artificial Sequence: Synthetic oligonucleotide
uuuccuuaagauuaggaac

SEQ ID NO: 2617441 - RNA, 19 nt, Artificial Sequence
  Description of Artificial Sequence: Synthetic oligonucleotide
ucuauuagauccaacucug

SEQ ID NO: 2617442 - RNA, 19 nt, Artificial Sequence
  Description of Artificial Sequence: Synthetic oligonucleotide
aauuccaacaaagaagaug

SEQ ID NO: 2617443 - RNA, 19 nt, Artificial Sequence
  Description of Artificial Sequence: Synthetic oligonucleotide
aaagugaacaaggaaagcu

SEQ ID NO: 2617444 - RNA, 19 nt, Artificial Sequence
  Description of Artificial Sequence: Synthetic oligonucleotide
uuccuuaagauuaggaaca

SEQ ID NO: 2617445 - RNA, 19 nt, Artificial Sequence
  Description of Artificial Sequence: Synthetic oligonucleotide
ugaaucuugucucaucacc

SEQ ID NO: 2617446 - RNA, 19 nt, Artificial Sequence
  Description of Artificial Sequence: Synthetic oligonucleotide
agauuaggaacaaaauucc

SEQ ID NO: 2617447 - RNA, 19 nt, Artificial Sequence
  Description of Artificial Sequence: Synthetic oligonucleotide
aaagcuacgagcagaguac

SEQ ID NO: 2617448 - RNA, 19 nt, Artificial Sequence
  Description of Artificial Sequence: Synthetic oligonucleotide
uaagauuaggaacaaaauu

SEQ ID NO: 2617449 - RNA, 19 nt, Artificial Sequence
  Description of Artificial Sequence: Synthetic oligonucleotide
uuagagaggucccugcagg

SEQ ID NO: 2617450 - RNA, 19 nt, Artificial Sequence
  Description of Artificial Sequence: Synthetic oligonucleotide
uucauagugauguucugag

SEQ ID NO: 2617451 - RNA, 19 nt, Artificial Sequence
  Description of Artificial Sequence: Synthetic oligonucleotide
uuaagaaagugaacaagga

SEQ ID NO: 2617452 - RNA, 19 nt, Artificial Sequence
  Description of Artificial Sequence: Synthetic oligonucleotide
ugaucauggcccgagaugg

SEQ ID NO: 2617453 - RNA, 19 nt, Artificial Sequence
  Description of Artificial Sequence: Synthetic oligonucleotide
agcagaguacaucaggcac

SEQ ID NO: 2617454 - RNA, 19 nt, Artificial Sequence
  Description of Artificial Sequence: Synthetic oligonucleotide
agauucaugagaccaguuc

SEQ ID NO: 2617455 - RNA, 19 nt, Artificial Sequence
  Description of Artificial Sequence: Synthetic oligonucleotide
uuagauccaacucuguccu

SEQ ID NO: 2617456 - RNA, 19 nt, Artificial Sequence
  Description of Artificial Sequence: Synthetic oligonucleotide
auuccaacaaagaagauga

SEQ ID NO: 2617457 - RNA, 19 nt, Artificial Sequence
  Description of Artificial Sequence: Synthetic oligonucleotide
agagguuacaucuggagca

SEQ ID NO: 2617458 - RNA, 19 nt, Artificial Sequence
  Description of Artificial Sequence: Synthetic oligonucleotide
ugucucaucaccaggggcc

SEQ ID NO: 2617459 - RNA, 19 nt, Artificial Sequence
  Description of Artificial Sequence: Synthetic oligonucleotide
uuaggcagcacauccuugg

SEQ ID NO: 2617460 - RNA, 19 nt, Artificial Sequence
  Description of Artificial Sequence: Synthetic oligonucleotide
agccugacaucuuagagag

SEQ ID NO: 2617461 - RNA, 19 nt, Artificial Sequence
  Description of Artificial Sequence: Synthetic oligonucleotide
uaagaaagugaacaaggaa

SEQ ID NO: 2617462 - RNA, 19 nt, Artificial Sequence
  Description of Artificial Sequence: Synthetic oligonucleotide
acaucaggcacuuucuguc

SEQ ID NO: 2617463 - RNA, 19 nt, Artificial Sequence
  Description of Artificial Sequence: Synthetic oligonucleotide
aacaucuuaagaaagugaa

SEQ ID NO: 2617464 - RNA, 19 nt, Artificial Sequence
  Description of Artificial Sequence: Synthetic oligonucleotide
ugacaggugaaucuugucu

SEQ ID NO: 2617465 - RNA, 19 nt, Artificial Sequence
  Description of Artificial Sequence: Synthetic oligonucleotide
aaucuugucucaucaccag

SEQ ID NO: 2617466 - RNA, 19 nt, Artificial Sequence
  Description of Artificial Sequence: Synthetic oligonucleotide
cuagaauggagcaugcgug

SEQ ID NO: 2617467 - RNA, 19 nt, Artificial Sequence
  Description of Artificial Sequence: Synthetic oligonucleotide
auugacauccaguggcugg

SEQ ID NO: 2617468 - RNA, 19 nt, Artificial Sequence
  Description of Artificial Sequence: Synthetic oligonucleotide
uaagacauagucacccaug

SEQ ID NO: 2617469 - RNA, 19 nt, Artificial Sequence
  Description of Artificial Sequence: Synthetic oligonucleotide
ugcaggagcccaaugauga

SEQ ID NO: 2617470 - RNA, 19 nt, Artificial Sequence
  Description of Artificial Sequence: Synthetic oligonucleotide
acucugcuaagacauaguc

SEQ ID NO: 2617471 - RNA, 19 nt, Artificial Sequence
  Description of Artificial Sequence: Synthetic oligonucleotide
caugguuucuucugaagcc

SEQ ID NO: 2617472 - RNA, 19 nt, Artificial Sequence
  Description of Artificial Sequence: Synthetic oligonucleotide
auucacacucugcuaagac

SEQ ID NO: 2617473 - RNA, 19 nt, Artificial Sequence
  Description of Artificial Sequence: Synthetic oligonucleotide
gaugguuccaaugaucaug

SEQ ID NO: 2617474 - RNA, 19 nt, Artificial Sequence
  Description of Artificial Sequence: Synthetic oligonucleotide
ugcucuacuugacagguga

SEQ ID NO: 2617475 - RNA, 19 nt, Artificial Sequence
  Description of Artificial Sequence: Synthetic oligonucleotide
caugagaccaguucuggag

SEQ ID NO: 2617476 - RNA, 19 nt, Artificial Sequence
  Description of Artificial Sequence: Synthetic oligonucleotide
uauuagauccaacucuguc

SEQ ID NO: 2617477 - RNA, 19 nt, Artificial Sequence
  Description of Artificial Sequence: Synthetic oligonucleotide
agaaagugaacaaggaaag

SEQ ID NO: 2617478 - RNA, 19 nt, Artificial Sequence
  Description of Artificial Sequence: Synthetic oligonucleotide
uuguucaggaacucaaaga

SEQ ID NO: 2617479 - RNA, 19 nt, Artificial Sequence
  Description of Artificial Sequence: Synthetic oligonucleotide
ugcuaagacauagucaccc

SEQ ID NO: 2617480 - RNA, 19 nt, Artificial Sequence
  Description of Artificial Sequence: Synthetic oligonucleotide
ugaacaaggaaagcuacga

SEQ ID NO: 2617481 - RNA, 19 nt, Artificial Sequence
  Description of Artificial Sequence: Synthetic oligonucleotide
aaagaagaugacacaaaug

SEQ ID NO: 2617482 - RNA, 19 nt, Artificial Sequence
  Description of Artificial Sequence: Synthetic oligonucleotide
gagagguuacaucuggagc

SEQ ID NO: 2617483 - RNA, 19 nt, Artificial Sequence
  Description of Artificial Sequence: Synthetic oligonucleotide
augaugagucaccuucacc

SEQ ID NO: 2617484 - RNA, 19 nt, Artificial Sequence
  Description of Artificial Sequence: Synthetic oligonucleotide
ugucuauuagauccaacuc

SEQ ID NO: 2617485 - RNA, 19 nt, Artificial Sequence
  Description of Artificial Sequence: Synthetic oligonucleotide
aucuuagagaggucccugc

SEQ ID NO: 2617486 - RNA, 19 nt, Artificial Sequence
  Description of Artificial Sequence: Synthetic oligonucleotide
aagcccgcuccccagcucc

SEQ ID NO: 2617487 - RNA, 19 nt, Artificial Sequence
  Description of Artificial Sequence: Synthetic oligonucleotide
aauggagcaugcgugcuuc

SEQ ID NO: 2617488 - RNA, 19 nt, Artificial Sequence
  Description of Artificial Sequence: Synthetic oligonucleotide
caucuuaagaaagugaaca

SEQ ID NO: 2617489 - RNA, 19 nt, Artificial Sequence
  Description of Artificial Sequence: Synthetic oligonucleotide
ugacaucuuagagaggucc

SEQ ID NO: 2617490 - RNA, 19 nt, Artificial Sequence
  Description of Artificial Sequence: Synthetic oligonucleotide
aagaugacacaaaugguga

SEQ ID NO: 2617491 - RNA, 19 nt, Artificial Sequence
  Description of Artificial Sequence: Synthetic oligonucleotide
acauccuugggguugauau

SEQ ID NO: 2617492 - RNA, 19 nt, Artificial Sequence
  Description of Artificial Sequence: Synthetic oligonucleotide
uaggaacaaaauuccaaca

SEQ ID NO: 2617493 - RNA, 19 nt, Artificial Sequence
  Description of Artificial Sequence: Synthetic oligonucleotide
aggaacaaaauuccaacaa

SEQ ID NO: 2617494 - RNA, 19 nt, Artificial Sequence
  Description of Artificial Sequence: Synthetic oligonucleotide
aaugaucauggcccgagau

SEQ ID NO: 2617495 - RNA, 19 nt, Artificial Sequence
  Description of Artificial Sequence: Synthetic oligonucleotide
augagaccaguucuggagg

SEQ ID NO: 2617496 - RNA, 19 nt, Artificial Sequence
  Description of Artificial Sequence: Synthetic oligonucleotide
gaguacaucaggcacuuuc

SEQ ID NO: 2617497 - RNA, 19 nt, Artificial Sequence
  Description of Artificial Sequence: Synthetic oligonucleotide
agugaacaaggaaagcuac

SEQ ID NO: 2617498 - RNA, 19 nt, Artificial Sequence
  Description of Artificial Sequence: Synthetic oligonucleotide
gaaagcuacgagcagagua

SEQ ID NO: 2617499 - RNA, 19 nt, Artificial Sequence
  Description of Artificial Sequence: Synthetic oligonucleotide
ucauagugauguucugagg

SEQ ID NO: 2617500 - RNA, 19 nt, Artificial Sequence
  Description of Artificial Sequence: Synthetic oligonucleotide
aggucauucacacucugcu

SEQ ID NO: 2617501 - RNA, 19 nt, Artificial Sequence
  Description of Artificial Sequence: Synthetic oligonucleotide
gaacaaggaaagcuacgag

SEQ ID NO: 2617502 - RNA, 19 nt, Artificial Sequence
  Description of Artificial Sequence: Synthetic oligonucleotide
gauggcaagggcucccagg

SEQ ID NO: 2617503 - RNA, 19 nt, Artificial Sequence
  Description of Artificial Sequence: Synthetic oligonucleotide
acgagcagaguacaucagg

SEQ ID NO: 2617504 - RNA, 19 nt, Artificial Sequence
  Description of Artificial Sequence: Synthetic oligonucleotide
gacaggugaaucuugucuc

SEQ ID NO: 2617505 - RNA, 19 nt, Artificial Sequence
  Description of Artificial Sequence: Synthetic oligonucleotide
gauguucugagggaagaag

SEQ ID NO: 2617506 - RNA, 19 nt, Artificial Sequence
  Description of Artificial Sequence: Synthetic oligonucleotide
ugagaccaguucuggaggg

SEQ ID NO: 2617507 - RNA, 19 nt, Artificial Sequence
  Description of Artificial Sequence: Synthetic oligonucleotide
uuacaucuggagcagucac

SEQ ID NO: 2617508 - RNA, 19 nt, Artificial Sequence
  Description of Artificial Sequence: Synthetic oligonucleotide
cuuugguggagucuccucc

SEQ ID NO: 2617509 - RNA, 19 nt, Artificial Sequence
  Description of Artificial Sequence: Synthetic oligonucleotide
ugauaucauugacauccag

SEQ ID NO: 2617510 - RNA, 19 nt, Artificial Sequence
  Description of Artificial Sequence: Synthetic oligonucleotide
gauucaugagaccaguucu

SEQ ID NO: 2617511 - RNA, 19 nt, Artificial Sequence
  Description of Artificial Sequence: Synthetic oligonucleotide
uagaauggagcaugcgugc

SEQ ID NO: 2617512 - RNA, 19 nt, Artificial Sequence
  Description of Artificial Sequence: Synthetic oligonucleotide
ucuguccuagaauggagca

SEQ ID NO: 2617513 - RNA, 19 nt, Artificial Sequence
  Description of Artificial Sequence: Synthetic oligonucleotide
uucaugagaccaguucugg

SEQ ID NO: 2617514 - RNA, 19 nt, Artificial Sequence
  Description of Artificial Sequence: Synthetic oligonucleotide
acuuucugucuauuagauc

SEQ ID NO: 2617515 - RNA, 19 nt, Artificial Sequence
  Description of Artificial Sequence: Synthetic oligonucleotide
ucacuguuguucaggaacu

SEQ ID NO: 2617516 - RNA, 19 nt, Artificial Sequence
  Description of Artificial Sequence: Synthetic oligonucleotide
aaggaaagcuacgagcaga

SEQ ID NO: 2617517 - RNA, 19 nt, Artificial Sequence
  Description of Artificial Sequence: Synthetic oligonucleotide
ucuggagcagucacuguug

SEQ ID NO: 2617518 - RNA, 19 nt, Artificial Sequence
  Description of Artificial Sequence: Synthetic oligonucleotide
acaggcaaggucauguggg

SEQ ID NO: 2617519 - RNA, 19 nt, Artificial Sequence
  Description of Artificial Sequence: Synthetic oligonucleotide
ggcaaugaggggcugaucc

SEQ ID NO: 2617520 - RNA, 19 nt, Artificial Sequence
  Description of Artificial Sequence: Synthetic oligonucleotide
ucuacuugacaggugaauc

SEQ ID NO: 2617521 - RNA, 19 nt, Artificial Sequence
  Description of Artificial Sequence: Synthetic oligonucleotide
cugaugguuccaaugauca

SEQ ID NO: 2617522 - RNA, 19 nt, Artificial Sequence
  Description of Artificial Sequence: Synthetic oligonucleotide
gguuccaaugaucauggcc

SEQ ID NO: 2617523 - RNA, 19 nt, Artificial Sequence
  Description of Artificial Sequence: Synthetic oligonucleotide
uugggguugauaucauuga

SEQ ID NO: 2617524 - RNA, 19 nt, Artificial Sequence
  Description of Artificial Sequence: Synthetic oligonucleotide
uugucucaucaccaggggc

SEQ ID NO: 2617525 - RNA, 19 nt, Artificial Sequence
  Description of Artificial Sequence: Synthetic oligonucleotide
uuucugucuauuagaucca

SEQ ID NO: 2617526 - RNA, 19 nt, Artificial Sequence
  Description of Artificial Sequence: Synthetic oligonucleotide
uccuuuuccuuaagauuag

SEQ ID NO: 2617527 - RNA, 19 nt, Artificial Sequence
  Description of Artificial Sequence: Synthetic oligonucleotide
auuaggaacaaaauuccaa

SEQ ID NO: 2617528 - RNA, 19 nt, Artificial Sequence
  Description of Artificial Sequence: Synthetic oligonucleotide
ucuuagagaggucccugca

SEQ ID NO: 2617529 - RNA, 19 nt, Artificial Sequence
  Description of Artificial Sequence: Synthetic oligonucleotide
ucugagggaagaaguucag

SEQ ID NO: 2617530 - RNA, 19 nt, Artificial Sequence
  Description of Artificial Sequence: Synthetic oligonucleotide
acacaaauggugaucccac

SEQ ID NO: 2617531 - RNA, 19 nt, Artificial Sequence
  Description of Artificial Sequence: Synthetic oligonucleotide
agucuccucccuuccaugg

SEQ ID NO: 2617532 - RNA, 19 nt, Artificial Sequence
  Description of Artificial Sequence: Synthetic oligonucleotide
uuugguggagucuccuccc

SEQ ID NO: 2617533 - RNA, 19 nt, Artificial Sequence
  Description of Artificial Sequence: Synthetic oligonucleotide
uuccaaugaucauggcccg

SEQ ID NO: 2617534 - RNA, 19 nt, Artificial Sequence
  Description of Artificial Sequence: Synthetic oligonucleotide
auagugauguucugaggga

SEQ ID NO: 2617535 - RNA, 19 nt, Artificial Sequence
  Description of Artificial Sequence: Synthetic oligonucleotide
acucaaagacuugacuggg

SEQ ID NO: 2617536 - RNA, 19 nt, Artificial Sequence
  Description of Artificial Sequence: Synthetic oligonucleotide
acaucuuaagaaagugaac

SEQ ID NO: 2617537 - RNA, 19 nt, Artificial Sequence
  Description of Artificial Sequence: Synthetic oligonucleotide
ucagagccugacaucuuag

SEQ ID NO: 2617538 - RNA, 19 nt, Artificial Sequence
  Description of Artificial Sequence: Synthetic oligonucleotide
gaaagugaacaaggaaagc

SEQ ID NO: 2617539 - RNA, 19 nt, Artificial Sequence
  Description of Artificial Sequence: Synthetic oligonucleotide
ucauucacacucugcuaag

SEQ ID NO: 2617540 - RNA, 19 nt, Artificial Sequence
  Description of Artificial Sequence: Synthetic oligonucleotide
cucuguccuagaauggagc

SEQ ID NO: 2617541 - RNA, 19 nt, Artificial Sequence
  Description of Artificial Sequence: Synthetic oligonucleotide
ugaggggcugauccaagcc

SEQ ID NO: 2617542 - RNA, 19 nt, Artificial Sequence
  Description of Artificial Sequence: Synthetic oligonucleotide
gagccugacaucuuagaga

SEQ ID NO: 2617543 - RNA, 19 nt, Artificial Sequence
  Description of Artificial Sequence: Synthetic oligonucleotide
ucacccaugguuucuucug

SEQ ID NO: 2617544 - RNA, 19 nt, Artificial Sequence
  Description of Artificial Sequence: Synthetic oligonucleotide
ccaacucuguccuagaaug

SEQ ID NO: 2617545 - RNA, 19 nt, Artificial Sequence
  Description of Artificial Sequence: Synthetic oligonucleotide
ucccauccccauuaggcag

SEQ ID NO: 2617546 - RNA, 19 nt, Artificial Sequence
  Description of Artificial Sequence: Synthetic oligonucleotide
auccccauuaggcagcaca

SEQ ID NO: 2617547 - RNA, 19 nt, Artificial Sequence
  Description of Artificial Sequence: Synthetic oligonucleotide
aacucuguccuagaaugga

SEQ ID NO: 2617548 - RNA, 19 nt, Artificial Sequence
  Description of Artificial Sequence: Synthetic oligonucleotide
gucuauuagauccaacucu

SEQ ID NO: 2617549 - RNA, 19 nt, Artificial Sequence
  Description of Artificial Sequence: Synthetic oligonucleotide
cuuagagaggucccugcag

SEQ ID NO: 2617550 - RNA, 19 nt, Artificial Sequence
  Description of Artificial Sequence: Synthetic oligonucleotide
acugaugguuccaaugauc

SEQ ID NO: 2617551 - RNA, 19 nt, Artificial Sequence
  Description of Artificial Sequence: Synthetic oligonucleotide
gaaucuugucucaucacca

SEQ ID NO: 2617552 - RNA, 19 nt, Artificial Sequence
  Description of Artificial Sequence: Synthetic oligonucleotide
ggcacuuucugucuauuag

SEQ ID NO: 2617553 - RNA, 19 nt, Artificial Sequence
  Description of Artificial Sequence: Synthetic oligonucleotide
caccaaaggaggcacuugc

SEQ ID NO: 2617554 - RNA, 19 nt, Artificial Sequence
  Description of Artificial Sequence: Synthetic oligonucleotide
cucaaagacuugacugggg

SEQ ID NO: 2617555 - RNA, 19 nt, Artificial Sequence
  Description of Artificial Sequence: Synthetic oligonucleotide
agauccaacucuguccuag

SEQ ID NO: 2617556 - RNA, 19 nt, Artificial Sequence
  Description of Artificial Sequence: Synthetic oligonucleotide
gagaggucccugcaggagc

SEQ ID NO: 2617557 - RNA, 19 nt, Artificial Sequence
  Description of Artificial Sequence: Synthetic oligonucleotide
uguucugagggaagaaguu

SEQ ID NO: 2617558 - RNA, 19 nt, Artificial Sequence
  Description of Artificial Sequence: Synthetic oligonucleotide
cuacgagcagaguacauca

SEQ ID NO: 2617559 - RNA, 19 nt, Artificial Sequence
  Description of Artificial Sequence: Synthetic oligonucleotide
gucauucacacucugcuaa

SEQ ID NO: 2617560 - RNA, 19 nt, Artificial Sequence
  Description of Artificial Sequence: Synthetic oligonucleotide
cuugucucaucaccagggg

SEQ ID NO: 2617561 - RNA, 19 nt, Artificial Sequence
  Description of Artificial Sequence: Synthetic oligonucleotide
gacauagucacccaugguu

SEQ ID NO: 2617562 - RNA, 19 nt, Artificial Sequence
  Description of Artificial Sequence: Synthetic oligonucleotide
gucaugugggccugguagg

SEQ ID NO: 2617563 - RNA, 19 nt, Artificial Sequence
  Description of Artificial Sequence: Synthetic oligonucleotide
ccaaugaugagucaccuuc

SEQ ID NO: 2617564 - RNA, 19 nt, Artificial Sequence
  Description of Artificial Sequence: Synthetic oligonucleotide
gaugacacaaauggugauc

SEQ ID NO: 2617565 - RNA, 19 nt, Artificial Sequence
  Description of Artificial Sequence: Synthetic oligonucleotide
uguuguucaggaacucaaa

SEQ ID NO: 2617566 - RNA, 19 nt, Artificial Sequence
  Description of Artificial Sequence: Synthetic oligonucleotide
uugauaucauugacaucca

SEQ ID NO: 2617567 - RNA, 19 nt, Artificial Sequence
  Description of Artificial Sequence: Synthetic oligonucleotide
acaucuggagcagucacug

SEQ ID NO: 2617568 - RNA, 19 nt, Artificial Sequence
  Description of Artificial Sequence: Synthetic oligonucleotide
aggugaaucuugucucauc

SEQ ID NO: 2617569 - RNA, 19 nt, Artificial Sequence
  Description of Artificial Sequence: Synthetic oligonucleotide
gacacaaauggugauccca

SEQ ID NO: 2617570 - RNA, 19 nt, Artificial Sequence
  Description of Artificial Sequence: Synthetic oligonucleotide
gagcaugcgugcuuccucc

SEQ ID NO: 2617571 - RNA, 19 nt, Artificial Sequence
  Description of Artificial Sequence: Synthetic oligonucleotide
cacaggcaaggucaugugg

SEQ ID NO: 2617572 - RNA, 19 nt, Artificial Sequence
  Description of Artificial Sequence: Synthetic oligonucleotide
acuugcugcuucagaagcc

SEQ ID NO: 2617573 - RNA, 19 nt, Artificial Sequence
  Description of Artificial Sequence: Synthetic oligonucleotide
ucugucuauuagauccaac

SEQ ID NO: 2617574 - RNA, 19 nt, Artificial Sequence
  Description of Artificial Sequence: Synthetic oligonucleotide
ggagagguuacaucuggag

SEQ ID NO: 2617575 - RNA, 19 nt, Artificial Sequence
  Description of Artificial Sequence: Synthetic oligonucleotide
uacaucuggagcagucacu

SEQ ID NO: 2617576 - RNA, 19 nt, Artificial Sequence
  Description of Artificial Sequence: Synthetic oligonucleotide
ggugaaucuugucucauca

SEQ ID NO: 2617577 - RNA, 19 nt, Artificial Sequence
  Description of Artificial Sequence: Synthetic oligonucleotide
ucaugagaccaguucugga

SEQ ID NO: 2617578 - RNA, 19 nt, Artificial Sequence
  Description of Artificial Sequence: Synthetic oligonucleotide
gacaucuuagagagguccc

SEQ ID NO: 2617579 - RNA, 19 nt, Artificial Sequence
  Description of Artificial Sequence: Synthetic oligonucleotide
uacgagcagaguacaucag

SEQ ID NO: 2617580 - RNA, 19 nt, Artificial Sequence
  Description of Artificial Sequence: Synthetic oligonucleotide
ugauccaagccuggggugc

SEQ ID NO: 2617581 - RNA, 19 nt, Artificial Sequence
  Description of Artificial Sequence: Synthetic oligonucleotide
agucaccuucaccaaagga

SEQ ID NO: 2617582 - RNA, 19 nt, Artificial Sequence
  Description of Artificial Sequence: Synthetic oligonucleotide
auccuugggguugauauca

SEQ ID NO: 2617583 - RNA, 19 nt, Artificial Sequence
  Description of Artificial Sequence: Synthetic oligonucleotide
cuucagccacuucauagug

SEQ ID NO: 2617584 - RNA, 19 nt, Artificial Sequence
  Description of Artificial Sequence: Synthetic oligonucleotide
aggagcccaaugaugaguc

SEQ ID NO: 2617585 - RNA, 19 nt, Artificial Sequence
  Description of Artificial Sequence: Synthetic oligonucleotide
aggaacucaaagacuugac

SEQ ID NO: 2617586 - RNA, 19 nt, Artificial Sequence
  Description of Artificial Sequence: Synthetic oligonucleotide
cugucuauuagauccaacu

SEQ ID NO: 2617587 - RNA, 19 nt, Artificial Sequence
  Description of Artificial Sequence: Synthetic oligonucleotide
acaggugaaucuugucuca

SEQ ID NO: 2617588 - RNA, 19 nt, Artificial Sequence
  Description of Artificial Sequence: Synthetic oligonucleotide
agaagaugacacaaauggu

SEQ ID NO: 2617589 - RNA, 19 nt, Artificial Sequence
  Description of Artificial Sequence: Synthetic oligonucleotide
gggaaacaucuuaagaaag

SEQ ID NO: 2617590 - RNA, 19 nt, Artificial Sequence
  Description of Artificial Sequence: Synthetic oligonucleotide
aguacaucaggcacuuucu

SEQ ID NO: 2617591 - RNA, 19 nt, Artificial Sequence
  Description of Artificial Sequence: Synthetic oligonucleotide
cucugcuaagacauaguca

SEQ ID NO: 2617592 - RNA, 19 nt, Artificial Sequence
  Description of Artificial Sequence: Synthetic oligonucleotide
ucuccucccuuccaugggu

SEQ ID NO: 2617593 - RNA, 19 nt, Artificial Sequence
  Description of Artificial Sequence: Synthetic oligonucleotide
aggaaagcuacgagcagag

SEQ ID NO: 2617594 - RNA, 19 nt, Artificial Sequence
  Description of Artificial Sequence: Synthetic oligonucleotide
auucaugagaccaguucug

SEQ ID NO: 2617595 - RNA, 19 nt, Artificial Sequence
  Description of Artificial Sequence: Synthetic oligonucleotide
uccaugggucugcaggcug

SEQ ID NO: 2617596 - RNA, 19 nt, Artificial Sequence
  Description of Artificial Sequence: Synthetic oligonucleotide
auguucugagggaagaagu

SEQ ID NO: 2617597 - RNA, 19 nt, Artificial Sequence
  Description of Artificial Sequence: Synthetic oligonucleotide
caggucauucacacucugc

SEQ ID NO: 2617598 - RNA, 19 nt, Artificial Sequence
  Description of Artificial Sequence: Synthetic oligonucleotide
uccuagaauggagcaugcg

SEQ ID NO: 2617599 - RNA, 19 nt, Artificial Sequence
  Description of Artificial Sequence: Synthetic oligonucleotide
uucugaagccuuccuuuuc

SEQ ID NO: 2617600 - RNA, 19 nt, Artificial Sequence
  Description of Artificial Sequence: Synthetic oligonucleotide
gagguuacaucuggagcag

SEQ ID NO: 2617601 - RNA, 19 nt, Artificial Sequence
  Description of Artificial Sequence: Synthetic oligonucleotide
acauccaguggcugguugu

SEQ ID NO: 2617602 - RNA, 19 nt, Artificial Sequence
  Description of Artificial Sequence: Synthetic oligonucleotide
guuucuucugaagccuucc

SEQ ID NO: 2617603 - RNA, 19 nt, Artificial Sequence
  Description of Artificial Sequence: Synthetic oligonucleotide
ggucccauccccauuaggc

SEQ ID NO: 2617604 - RNA, 19 nt, Artificial Sequence
  Description of Artificial Sequence: Synthetic oligonucleotide
agaugacacaaauggugau

SEQ ID NO: 2617605 - RNA, 19 nt, Artificial Sequence
  Description of Artificial Sequence: Synthetic oligonucleotide
gacauccaguggcugguug

SEQ ID NO: 2617606 - RNA, 19 nt, Artificial Sequence
  Description of Artificial Sequence: Synthetic oligonucleotide
gagcagaguacaucaggca

SEQ ID NO: 2617607 - RNA, 19 nt, Artificial Sequence
  Description of Artificial Sequence: Synthetic oligonucleotide
uagagaggucccugcagga

SEQ ID NO: 2617608 - RNA, 19 nt, Artificial Sequence
  Description of Artificial Sequence: Synthetic oligonucleotide
uggggugcucuacuugaca

SEQ ID NO: 2617609 - RNA, 19 nt, Artificial Sequence
  Description of Artificial Sequence: Synthetic oligonucleotide
augguuucuucugaagccu

SEQ ID NO: 2617610 - RNA, 19 nt, Artificial Sequence
  Description of Artificial Sequence: Synthetic oligonucleotide
uccccauuaggcagcacau

SEQ ID NO: 2617611 - RNA, 19 nt, Artificial Sequence
  Description of Artificial Sequence: Synthetic oligonucleotide
ugaucccacugaugguucc

SEQ ID NO: 2617612 - RNA, 19 nt, Artificial Sequence
  Description of Artificial Sequence: Synthetic oligonucleotide
ggagcagucacuguuguuc

SEQ ID NO: 2617613 - RNA, 19 nt, Artificial Sequence
  Description of Artificial Sequence: Synthetic oligonucleotide
uagugauguucugagggaa

SEQ ID NO: 2617614 - RNA, 19 nt, Artificial Sequence
  Description of Artificial Sequence: Synthetic oligonucleotide
aagccuggggugcucuacu

SEQ ID NO: 2617615 - RNA, 19 nt, Artificial Sequence
  Description of Artificial Sequence: Synthetic oligonucleotide
gagcccaaugaugagucac

SEQ ID NO: 2617616 - RNA, 19 nt, Artificial Sequence
  Description of Artificial Sequence: Synthetic oligonucleotide
agaccaguucuggagggag

SEQ ID NO: 2617617 - RNA, 19 nt, Artificial Sequence
  Description of Artificial Sequence: Synthetic oligonucleotide
gaugagucaccuucaccaa

SEQ ID NO: 2617618 - RNA, 19 nt, Artificial Sequence
  Description of Artificial Sequence: Synthetic oligonucleotide
auggagcaugcgugcuucc

SEQ ID NO: 2617619 - RNA, 19 nt, Artificial Sequence
  Description of Artificial Sequence: Synthetic oligonucleotide
gagcagucacuguuguuca

SEQ ID NO: 2617620 - RNA, 19 nt, Artificial Sequence
  Description of Artificial Sequence: Synthetic oligonucleotide
uuccaacaaagaagaugac

SEQ ID NO: 2617621 - RNA, 19 nt, Artificial Sequence
  Description of Artificial Sequence: Synthetic oligonucleotide
gugaaucuugucucaucac

SEQ ID NO: 2617622 - RNA, 19 nt, Artificial Sequence
  Description of Artificial Sequence: Synthetic oligonucleotide
uugacaggugaaucuuguc

SEQ ID NO: 2617623 - RNA, 19 nt, Artificial Sequence
  Description of Artificial Sequence: Synthetic oligonucleotide
agucacccaugguuucuuc

SEQ ID NO: 2617624 - RNA, 19 nt, Artificial Sequence
  Description of Artificial Sequence: Synthetic oligonucleotide
ggagggagagguuacaucu

SEQ ID NO: 2617625 - RNA, 19 nt, Artificial Sequence
  Description of Artificial Sequence: Synthetic oligonucleotide
cugcuaagacauagucacc

SEQ ID NO: 2617626 - RNA, 19 nt, Artificial Sequence
  Description of Artificial Sequence: Synthetic oligonucleotide
cacuucauagugauguucu

SEQ ID NO: 2617627 - RNA, 19 nt, Artificial Sequence
  Description of Artificial Sequence: Synthetic oligonucleotide
caaugaugagucaccuuca

SEQ ID NO: 2617628 - RNA, 19 nt, Artificial Sequence
  Description of Artificial Sequence: Synthetic oligonucleotide
cugcaggagcccaaugaug

SEQ ID NO: 2617629 - RNA, 19 nt, Artificial Sequence
  Description of Artificial Sequence: Synthetic oligonucleotide
aagcuacgagcagaguaca

SEQ ID NO: 2617630 - RNA, 19 nt, Artificial Sequence
  Description of Artificial Sequence: Synthetic oligonucleotide
ggaagaaguucagagccug

SEQ ID NO: 2617631 - RNA, 19 nt, Artificial Sequence
  Description of Artificial Sequence: Synthetic oligonucleotide
acauagucacccaugguuu

SEQ ID NO: 2617632 - RNA, 19 nt, Artificial Sequence
  Description of Artificial Sequence: Synthetic oligonucleotide
ucauggcccgagauggcaa

SEQ ID NO: 2617633 - RNA, 19 nt, Artificial Sequence
  Description of Artificial Sequence: Synthetic oligonucleotide
acucuguccuagaauggag

SEQ ID NO: 2617634 - RNA, 19 nt, Artificial Sequence
  Description of Artificial Sequence: Synthetic oligonucleotide
uacuugacaggugaaucuu

SEQ ID NO: 2617635 - RNA, 19 nt, Artificial Sequence
  Description of Artificial Sequence: Synthetic oligonucleotide
auccaguggcugguugucc

SEQ ID NO: 2617636 - RNA, 19 nt, Artificial Sequence
  Description of Artificial Sequence: Synthetic oligonucleotide
aggucccauccccauuagg

SEQ ID NO: 2617637 - RNA, 19 nt, Artificial Sequence
  Description of Artificial Sequence: Synthetic oligonucleotide
cugauccaagccuggggug

SEQ ID NO: 2617638 - RNA, 19 nt, Artificial Sequence
  Description of Artificial Sequence: Synthetic oligonucleotide
gagucuccucccuuccaug

SEQ ID NO: 2617639 - RNA, 19 nt, Artificial Sequence
  Description of Artificial Sequence: Synthetic oligonucleotide
ucaccaaaggaggcacuug

SEQ ID NO: 2617640 - RNA, 19 nt, Artificial Sequence
  Description of Artificial Sequence: Synthetic oligonucleotide
acaucuuagagaggucccu

SEQ ID NO: 2617641 - RNA, 19 nt, Artificial Sequence
  Description of Artificial Sequence: Synthetic oligonucleotide
guuacaucuggagcaguca

SEQ ID NO: 2617642 - RNA, 19 nt, Artificial Sequence
  Description of Artificial Sequence: Synthetic oligonucleotide
cuacuugacaggugaaucu

SEQ ID NO: 2617643 - RNA, 19 nt, Artificial Sequence
  Description of Artificial Sequence: Synthetic oligonucleotide
ugauguucugagggaagaa

SEQ ID NO: 2617644 - RNA, 19 nt, Artificial Sequence
  Description of Artificial Sequence: Synthetic oligonucleotide
caucuuagagaggucccug

SEQ ID NO: 2617645 - RNA, 19 nt, Artificial Sequence
  Description of Artificial Sequence: Synthetic oligonucleotide
ggcugauccaagccugggg

SEQ ID NO: 2617646 - RNA, 19 nt, Artificial Sequence
  Description of Artificial Sequence: Synthetic oligonucleotide
uggcccgagauggcaaggg

SEQ ID NO: 2617647 - RNA, 19 nt, Artificial Sequence
  Description of Artificial Sequence: Synthetic oligonucleotide
uggagucuccucccuucca

SEQ ID NO: 2617648 - RNA, 19 nt, Artificial Sequence
  Description of Artificial Sequence: Synthetic oligonucleotide
cgagcagaguacaucaggc

SEQ ID NO: 2617649 - RNA, 19 nt, Artificial Sequence
  Description of Artificial Sequence: Synthetic oligonucleotide
gucugcaggcugcagguca

SEQ ID NO: 2617650 - RNA, 19 nt, Artificial Sequence
  Description of Artificial Sequence: Synthetic oligonucleotide
uaggucccauccccauuag

SEQ ID NO: 2617651 - RNA, 19 nt, Artificial Sequence
  Description of Artificial Sequence: Synthetic oligonucleotide
uucaccaaaggaggcacuu

SEQ ID NO: 2617652 - RNA, 19 nt, Artificial Sequence
  Description of Artificial Sequence: Synthetic oligonucleotide
cauccuugggguugauauc

SEQ ID NO: 2617653 - RNA, 19 nt, Artificial Sequence
  Description of Artificial Sequence: Synthetic oligonucleotide
acuugacaggugaaucuug

SEQ ID NO: 2617654 - RNA, 19 nt, Artificial Sequence
  Description of Artificial Sequence: Synthetic oligonucleotide
gauccaacucuguccuaga

SEQ ID NO: 2617655 - RNA, 19 nt, Artificial Sequence
  Description of Artificial Sequence: Synthetic oligonucleotide
uugguggagucuccucccu

SEQ ID NO: 2617656 - RNA, 19 nt, Artificial Sequence
  Description of Artificial Sequence: Synthetic oligonucleotide
auuaggcagcacauccuug

SEQ ID NO: 2617657 - RNA, 19 nt, Artificial Sequence
  Description of Artificial Sequence: Synthetic oligonucleotide
gcagucacuguuguucagg

SEQ ID NO: 2617658 - RNA, 19 nt, Artificial Sequence
  Description of Artificial Sequence: Synthetic oligonucleotide
augcgugcuuccuccaggu

SEQ ID NO: 2617659 - RNA, 19 nt, Artificial Sequence
  Description of Artificial Sequence: Synthetic oligonucleotide
ggguugauaucauugacau

SEQ ID NO: 2617660 - RNA, 19 nt, Artificial Sequence
  Description of Artificial Sequence: Synthetic oligonucleotide
agaauggagcaugcgugcu

SEQ ID NO: 2617661 - RNA, 19 nt, Artificial Sequence
  Description of Artificial Sequence: Synthetic oligonucleotide
gggugcucuacuugacagg

SEQ ID NO: 2617662 - RNA, 19 nt, Artificial Sequence
  Description of Artificial Sequence: Synthetic oligonucleotide
uucugucuauuagauccaa

SEQ ID NO: 2617663 - RNA, 19 nt, Artificial Sequence
  Description of Artificial Sequence: Synthetic oligonucleotide
aucauggcccgagauggca

SEQ ID NO: 2617664 - RNA, 19 nt, Artificial Sequence
  Description of Artificial Sequence: Synthetic oligonucleotide
cuugacaggugaaucuugu

SEQ ID NO: 2617665 - RNA, 19 nt, Artificial Sequence
  Description of Artificial Sequence: Synthetic oligonucleotide
uggugaucccacugauggu

SEQ ID NO: 2617666 - RNA, 19 nt, Artificial Sequence
  Description of Artificial Sequence: Synthetic oligonucleotide
auccaacucuguccuagaa

SEQ ID NO: 2617667 - RNA, 19 nt, Artificial Sequence
  Description of Artificial Sequence: Synthetic oligonucleotide
guggagucuccucccuucc

SEQ ID NO: 2617668 - RNA, 19 nt, Artificial Sequence
  Description of Artificial Sequence: Synthetic oligonucleotide
cuucagaagcccgcucccc

SEQ ID NO: 2617669 - RNA, 19 nt, Artificial Sequence
  Description of Artificial Sequence: Synthetic oligonucleotide
ggaacucaaagacuugacu

SEQ ID NO: 2617670 - RNA, 19 nt, Artificial Sequence
  Description of Artificial Sequence: Synthetic oligonucleotide
cugacaucuuagagagguc

SEQ ID NO: 2617671 - RNA, 19 nt, Artificial Sequence
  Description of Artificial Sequence: Synthetic oligonucleotide
cauugacauccaguggcug

SEQ ID NO: 2617672 - RNA, 19 nt, Artificial Sequence
  Description of Artificial Sequence: Synthetic oligonucleotide
gaagaaguucagagccuga

SEQ ID NO: 2617673 - RNA, 19 nt, Artificial Sequence
  Description of Artificial Sequence: Synthetic oligonucleotide
ggccugguaggucccaucc

SEQ ID NO: 2617674 - RNA, 19 nt, Artificial Sequence
  Description of Artificial Sequence: Synthetic oligonucleotide
gggguugauaucauugaca

SEQ ID NO: 2617675 - RNA, 19 nt, Artificial Sequence
  Description of Artificial Sequence: Synthetic oligonucleotide
uccucccuuccaugggucu

SEQ ID NO: 2617676 - RNA, 19 nt, Artificial Sequence
  Description of Artificial Sequence: Synthetic oligonucleotide
aucaggcacuuucugucua

SEQ ID NO: 2617677 - RNA, 19 nt, Artificial Sequence
  Description of Artificial Sequence: Synthetic oligonucleotide
ugguuccaaugaucauggc

SEQ ID NO: 2617678 - RNA, 19 nt, Artificial Sequence
  Description of Artificial Sequence: Synthetic oligonucleotide
cacuuucugucuauuagau

SEQ ID NO: 2617679 - RNA, 19 nt, Artificial Sequence
  Description of Artificial Sequence: Synthetic oligonucleotide
gaucauggcccgagauggc

SEQ ID NO: 2617680 - RNA, 19 nt, Artificial Sequence
  Description of Artificial Sequence: Synthetic oligonucleotide
cagcacauccuugggguug

SEQ ID NO: 2617681 - RNA, 19 nt, Artificial Sequence
  Description of Artificial Sequence: Synthetic oligonucleotide
aggggcugauccaagccug

SEQ ID NO: 2617682 - RNA, 19 nt, Artificial Sequence
  Description of Artificial Sequence: Synthetic oligonucleotide
uccaaugaucauggcccga

SEQ ID NO: 2617683 - RNA, 19 nt, Artificial Sequence
  Description of Artificial Sequence: Synthetic oligonucleotide
gguggagucuccucccuuc

SEQ ID NO: 2617684 - RNA, 19 nt, Artificial Sequence
  Description of Artificial Sequence: Synthetic oligonucleotide
aggcacuuucugucuauua

SEQ ID NO: 2617685 - RNA, 19 nt, Artificial Sequence
  Description of Artificial Sequence: Synthetic oligonucleotide
aagggcucccagguggcaa

SEQ ID NO: 2617686 - RNA, 19 nt, Artificial Sequence
  Description of Artificial Sequence: Synthetic oligonucleotide
ccaaugaucauggcccgag

SEQ ID NO: 2617687 - RNA, 19 nt, Artificial Sequence
  Description of Artificial Sequence: Synthetic oligonucleotide
gguuacaucuggagcaguc

SEQ ID NO: 2617688 - RNA, 19 nt, Artificial Sequence
  Description of Artificial Sequence: Synthetic oligonucleotide
gcuucagaagcccgcuccc

SEQ ID NO: 2617689 - RNA, 19 nt, Artificial Sequence
  Description of Artificial Sequence: Synthetic oligonucleotide
gcuacgagcagaguacauc

SEQ ID NO: 2617690 - RNA, 19 nt, Artificial Sequence
  Description of Artificial Sequence: Synthetic oligonucleotide
gcuaagacauagucaccca

SEQ ID NO: 2617691 - RNA, 19 nt, Artificial Sequence
  Description of Artificial Sequence: Synthetic oligonucleotide
guccuagaauggagcaugc

SEQ ID NO: 2617692 - RNA, 19 nt, Artificial Sequence
  Description of Artificial Sequence: Synthetic oligonucleotide
cuaagacauagucacccau

SEQ ID NO: 2617693 - RNA, 19 nt, Artificial Sequence
  Description of Artificial Sequence: Synthetic oligonucleotide
guggcugguuguccuucag

SEQ ID NO: 2617694 - RNA, 19 nt, Artificial Sequence
  Description of Artificial Sequence: Synthetic oligonucleotide
gguugauaucauugacauc

SEQ ID NO: 2617695 - RNA, 19 nt, Artificial Sequence
  Description of Artificial Sequence: Synthetic oligonucleotide
ccacugaugguuccaauga

SEQ ID NO: 2617696 - RNA, 19 nt, Artificial Sequence
  Description of Artificial Sequence: Synthetic oligonucleotide
gaucccacugaugguucca

SEQ ID NO: 2617697 - RNA, 19 nt, Artificial Sequence
  Description of Artificial Sequence: Synthetic oligonucleotide
auggcccgagauggcaagg

SEQ ID NO: 2617698 - RNA, 19 nt, Artificial Sequence
  Description of Artificial Sequence: Synthetic oligonucleotide
agcacauccuugggguuga

SEQ ID NO: 2617699 - RNA, 19 nt, Artificial Sequence
  Description of Artificial Sequence: Synthetic oligonucleotide
cccaugguuucuucugaag

SEQ ID NO: 2617700 - RNA, 19 nt, Artificial Sequence
  Description of Artificial Sequence: Synthetic oligonucleotide
agccuuccuuuuccuuaag

SEQ ID NO: 2617701 - RNA, 19 nt, Artificial Sequence
  Description of Artificial Sequence: Synthetic oligonucleotide
cauccaguggcugguuguc

SEQ ID NO: 2617702 - RNA, 19 nt, Artificial Sequence
  Description of Artificial Sequence: Synthetic oligonucleotide
agcaugcgugcuuccucca

SEQ ID NO: 2617703 - RNA, 19 nt, Artificial Sequence
  Description of Artificial Sequence: Synthetic oligonucleotide
gcugauccaagccuggggu

SEQ ID NO: 2617704 - RNA, 19 nt, Artificial Sequence
  Description of Artificial Sequence: Synthetic oligonucleotide
cuauuagauccaacucugu

SEQ ID NO: 2617705 - RNA, 19 nt, Artificial Sequence
  Description of Artificial Sequence: Synthetic oligonucleotide
uccaagccuggggugcucu

SEQ ID NO: 2617706 - RNA, 19 nt, Artificial Sequence
  Description of Artificial Sequence: Synthetic oligonucleotide
caagccuggggugcucuac

SEQ ID NO: 2617707 - RNA, 19 nt, Artificial Sequence
  Description of Artificial Sequence: Synthetic oligonucleotide
ccugacaucuuagagaggu

SEQ ID NO: 2617708 - RNA, 19 nt, Artificial Sequence
  Description of Artificial Sequence: Synthetic oligonucleotide
cacccaugguuucuucuga

SEQ ID NO: 2617709 - RNA, 19 nt, Artificial Sequence
  Description of Artificial Sequence: Synthetic oligonucleotide
ggagcaugcgugcuuccuc

SEQ ID NO: 2617710 - RNA, 19 nt, Artificial Sequence
  Description of Artificial Sequence: Synthetic oligonucleotide
cuccucccuuccauggguc

SEQ ID NO: 2617711 - RNA, 19 nt, Artificial Sequence
  Description of Artificial Sequence: Synthetic oligonucleotide
ugguggagucuccucccuu

SEQ ID NO: 2617712 - RNA, 19 nt, Artificial Sequence
  Description of Artificial Sequence: Synthetic oligonucleotide
cugguaggucccaucccca

SEQ ID NO: 2617713 - RNA, 19 nt, Artificial Sequence
  Description of Artificial Sequence: Synthetic oligonucleotide
ccuucaccaaaggaggcac

SEQ ID NO: 2617714 - RNA, 19 nt, Artificial Sequence
  Description of Artificial Sequence: Synthetic oligonucleotide
cccgagauggcaagggcuc

SEQ ID NO: 2617715 - RNA, 19 nt, Artificial Sequence
  Description of Artificial Sequence: Synthetic oligonucleotide
caaugaucauggcccgaga

SEQ ID NO: 2617716 - RNA, 19 nt, Artificial Sequence
  Description of Artificial Sequence: Synthetic oligonucleotide
ucccacugaugguuccaau

SEQ ID NO: 2617717 - RNA, 19 nt, Artificial Sequence
  Description of Artificial Sequence: Synthetic oligonucleotide
gcaggucauucacacucug

SEQ ID NO: 2617718 - RNA, 19 nt, Artificial Sequence
  Description of Artificial Sequence: Synthetic oligonucleotide
ccaugggucugcaggcugc

SEQ ID NO: 2617719 - RNA, 19 nt, Artificial Sequence
  Description of Artificial Sequence: Synthetic oligonucleotide
gagaccaguucuggaggga

SEQ ID NO: 2617720 - RNA, 19 nt, Artificial Sequence
  Description of Artificial Sequence: Synthetic oligonucleotide
ugcgugcuuccuccagguc

SEQ ID NO: 2617721 - RNA, 19 nt, Artificial Sequence
  Description of Artificial Sequence: Synthetic oligonucleotide
gucacccaugguuucuucu

SEQ ID NO: 2617722 - RNA, 19 nt, Artificial Sequence
  Description of Artificial Sequence: Synthetic oligonucleotide
gagauggcaagggcuccca

SEQ ID NO: 2617723 - RNA, 19 nt, Artificial Sequence
  Description of Artificial Sequence: Synthetic oligonucleotide
cccauccccauuaggcagc

SEQ ID NO: 2617724 - RNA, 19 nt, Artificial Sequence
  Description of Artificial Sequence: Synthetic oligonucleotide
cacuguuguucaggaacuc

SEQ ID NO: 2617725 - RNA, 19 nt, Artificial Sequence
  Description of Artificial Sequence: Synthetic oligonucleotide
uagauccaacucuguccua

SEQ ID NO: 2617726 - RNA, 19 nt, Artificial Sequence
  Description of Artificial Sequence: Synthetic oligonucleotide
cauuaggcagcacauccuu

SEQ ID NO: 2617727 - RNA, 19 nt, Artificial Sequence
  Description of Artificial Sequence: Synthetic oligonucleotide
gaauggagcaugcgugcuu

SEQ ID NO: 2617728 - RNA, 19 nt, Artificial Sequence
  Description of Artificial Sequence: Synthetic oligonucleotide
ggugcucuacuugacaggu

SEQ ID NO: 2617729 - RNA, 19 nt, Artificial Sequence
  Description of Artificial Sequence: Synthetic oligonucleotide
gcaugcgugcuuccuccag

SEQ ID NO: 2617730 - RNA, 19 nt, Artificial Sequence
  Description of Artificial Sequence: Synthetic oligonucleotide
caaggucaugugggccugg

SEQ ID NO: 2617731 - RNA, 19 nt, Artificial Sequence
  Description of Artificial Sequence: Synthetic oligonucleotide
ggucauucacacucugcua

SEQ ID NO: 2617732 - RNA, 19 nt, Artificial Sequence
  Description of Artificial Sequence: Synthetic oligonucleotide
ccuggggugcucuacuuga

SEQ ID NO: 2617733 - RNA, 19 nt, Artificial Sequence
  Description of Artificial Sequence: Synthetic oligonucleotide
gaagcccgcuccccagcuc

SEQ ID NO: 2617734 - RNA, 19 nt, Artificial Sequence
  Description of Artificial Sequence: Synthetic oligonucleotide
agguuacaucuggagcagu

SEQ ID NO: 2617735 - RNA, 19 nt, Artificial Sequence
  Description of Artificial Sequence: Synthetic oligonucleotide
caugugggccugguagguc

SEQ ID NO: 2617736 - RNA, 19 nt, Artificial Sequence
  Description of Artificial Sequence: Synthetic oligonucleotide
gguuucuucugaagccuuc

SEQ ID NO: 2617737 - RNA, 19 nt, Artificial Sequence
  Description of Artificial Sequence: Synthetic oligonucleotide
ccacuucauagugauguuc

SEQ ID NO: 2617738 - RNA, 19 nt, Artificial Sequence
  Description of Artificial Sequence: Synthetic oligonucleotide
ggcccgagauggcaagggc

SEQ ID NO: 2617739 - RNA, 19 nt, Artificial Sequence
  Description of Artificial Sequence: Synthetic oligonucleotide
ggaggcacuugcugcuuca

SEQ ID NO: 2617740 - RNA, 19 nt, Artificial Sequence
  Description of Artificial Sequence: Synthetic oligonucleotide
aucccacugaugguuccaa

SEQ ID NO: 2617741 - RNA, 19 nt, Artificial Sequence
  Description of Artificial Sequence: Synthetic oligonucleotide
gccuuccuuuuccuuaaga

SEQ ID NO: 2617742 - RNA, 19 nt, Artificial Sequence
  Description of Artificial Sequence: Synthetic oligonucleotide
gcgugcuuccuccaggucu

SEQ ID NO: 2617743 - RNA, 19 nt, Artificial Sequence
  Description of Artificial Sequence: Synthetic oligonucleotide
auccaagccuggggugcuc

SEQ ID NO: 2617744 - RNA, 19 nt, Artificial Sequence
  Description of Artificial Sequence: Synthetic oligonucleotide
gugcucuacuugacaggug

SEQ ID NO: 2617745 - RNA, 19 nt, Artificial Sequence
  Description of Artificial Sequence: Synthetic oligonucleotide
ggggcugauccaagccugg

SEQ ID NO: 2617746 - RNA, 19 nt, Artificial Sequence
  Description of Artificial Sequence: Synthetic oligonucleotide
aggucaugugggccuggua

SEQ ID NO: 2617747 - RNA, 19 nt, Artificial Sequence
  Description of Artificial Sequence: Synthetic oligonucleotide
caccaggggccacaggcaa

SEQ ID NO: 2617748 - RNA, 19 nt, Artificial Sequence
  Description of Artificial Sequence: Synthetic oligonucleotide
cugaagccuuccuuuuccu

SEQ ID NO: 2617749 - RNA, 19 nt, Artificial Sequence
  Description of Artificial Sequence: Synthetic oligonucleotide
ggucuuugguggagucucc

SEQ ID NO: 2617750 - RNA, 19 nt, Artificial Sequence
  Description of Artificial Sequence: Synthetic oligonucleotide
gcagaguacaucaggcacu

SEQ ID NO: 2617751 - RNA, 19 nt, Artificial Sequence
  Description of Artificial Sequence: Synthetic oligonucleotide
agcuacgagcagaguacau

SEQ ID NO: 2617752 - RNA, 19 nt, Artificial Sequence
  Description of Artificial Sequence: Synthetic oligonucleotide
ucccuuccaugggucugca

SEQ ID NO: 2617753 - RNA, 19 nt, Artificial Sequence
  Description of Artificial Sequence: Synthetic oligonucleotide
cacugaugguuccaaugau

SEQ ID NO: 2617754 - RNA, 19 nt, Artificial Sequence
  Description of Artificial Sequence: Synthetic oligonucleotide
cuucaccaaaggaggcacu

SEQ ID NO: 2617755 - RNA, 19 nt, Artificial Sequence
  Description of Artificial Sequence: Synthetic oligonucleotide
cucuacuugacaggugaau

SEQ ID NO: 2617756 - RNA, 19 nt, Artificial Sequence
  Description of Artificial Sequence: Synthetic oligonucleotide
gccacaggcaaggucaugu

SEQ ID NO: 2617757 - RNA, 19 nt, Artificial Sequence
  Description of Artificial Sequence: Synthetic oligonucleotide
cacacucugcuaagacaua

SEQ ID NO: 2617758 - RNA, 19 nt, Artificial Sequence
  Description of Artificial Sequence: Synthetic oligonucleotide
ggagcccaaugaugaguca

SEQ ID NO: 2617759 - RNA, 19 nt, Artificial Sequence
  Description of Artificial Sequence: Synthetic oligonucleotide
gcaaggucaugugggccug

SEQ ID NO: 2617760 - RNA, 19 nt, Artificial Sequence
  Description of Artificial Sequence: Synthetic oligonucleotide
gauccaagccuggggugcu

SEQ ID NO: 2617761 - RNA, 19 nt, Artificial Sequence
  Description of Artificial Sequence: Synthetic oligonucleotide
caugggucugcaggcugca

SEQ ID NO: 2617762 - RNA, 19 nt, Artificial Sequence
  Description of Artificial Sequence: Synthetic oligonucleotide
gcaagggcucccagguggc

SEQ ID NO: 2617763 - RNA, 19 nt, Artificial Sequence
  Description of Artificial Sequence: Synthetic oligonucleotide
gggagagguuacaucugga

SEQ ID NO: 2617764 - RNA, 19 nt, Artificial Sequence
  Description of Artificial Sequence: Synthetic oligonucleotide
ggagucuccucccuuccau

SEQ ID NO: 2617765 - RNA, 19 nt, Artificial Sequence
  Description of Artificial Sequence: Synthetic oligonucleotide
ugggccugguaggucccau

SEQ ID NO: 2617766 - RNA, 19 nt, Artificial Sequence
  Description of Artificial Sequence: Synthetic oligonucleotide
cagaguacaucaggcacuu

SEQ ID NO: 2617767 - RNA, 19 nt, Artificial Sequence
  Description of Artificial Sequence: Synthetic oligonucleotide
ccgagauggcaagggcucc

SEQ ID NO: 2617768 - RNA, 19 nt, Artificial Sequence
  Description of Artificial Sequence: Synthetic oligonucleotide
caucuggagcagucacugu

SEQ ID NO: 2617769 - RNA, 19 nt, Artificial Sequence
  Description of Artificial Sequence: Synthetic oligonucleotide
gggaagaaguucagagccu

SEQ ID NO: 2617770 - RNA, 19 nt, Artificial Sequence
  Description of Artificial Sequence: Synthetic oligonucleotide
gccugacaucuuagagagg

SEQ ID NO: 2617771 - RNA, 19 nt, Artificial Sequence
  Description of Artificial Sequence: Synthetic oligonucleotide
cgagauggcaagggcuccc

SEQ ID NO: 2617772 - RNA, 19 nt, Artificial Sequence
  Description of Artificial Sequence: Synthetic oligonucleotide
cuguccuagaauggagcau

SEQ ID NO: 2617773 - RNA, 19 nt, Artificial Sequence
  Description of Artificial Sequence: Synthetic oligonucleotide
agaguacaucaggcacuuu

SEQ ID NO: 2617774 - RNA, 19 nt, Artificial Sequence
  Description of Artificial Sequence: Synthetic oligonucleotide
ccucccuuccaugggucug

SEQ ID NO: 2617775 - RNA, 19 nt, Artificial Sequence
  Description of Artificial Sequence: Synthetic oligonucleotide
cuggagggagagguuacau

SEQ ID NO: 2617776 - RNA, 19 nt, Artificial Sequence
  Description of Artificial Sequence: Synthetic oligonucleotide
ccuuaagauuaggaacaaa

SEQ ID NO: 2617777 - RNA, 19 nt, Artificial Sequence
  Description of Artificial Sequence: Synthetic oligonucleotide
gggccugguaggucccauc

SEQ ID NO: 2617778 - RNA, 19 nt, Artificial Sequence
  Description of Artificial Sequence: Synthetic oligonucleotide
cacauccuugggguugaua

SEQ ID NO: 2617779 - RNA, 19 nt, Artificial Sequence
  Description of Artificial Sequence: Synthetic oligonucleotide
caagggcucccagguggca

SEQ ID NO: 2617780 - RNA, 19 nt, Artificial Sequence
  Description of Artificial Sequence: Synthetic oligonucleotide
cauccccauuaggcagcac

SEQ ID NO: 2617781 - RNA, 19 nt, Artificial Sequence
  Description of Artificial Sequence: Synthetic oligonucleotide
caggugaaucuugucucau

SEQ ID NO: 2617782 - RNA, 19 nt, Artificial Sequence
  Description of Artificial Sequence: Synthetic oligonucleotide
gcucuacuugacaggugaa

SEQ ID NO: 2617783 - RNA, 19 nt, Artificial Sequence
  Description of Artificial Sequence: Synthetic oligonucleotide
ccccauuaggcagcacauc

SEQ ID NO: 2617784 - RNA, 19 nt, Artificial Sequence
  Description of Artificial Sequence: Synthetic oligonucleotide
cccuuccaugggucugcag

SEQ ID NO: 2617785 - RNA, 19 nt, Artificial Sequence
  Description of Artificial Sequence: Synthetic oligonucleotide
ggucugcaggcugcagguc

SEQ ID NO: 2617786 - RNA, 19 nt, Artificial Sequence
  Description of Artificial Sequence: Synthetic oligonucleotide
ggaaagcuacgagcagagu

SEQ ID NO: 2617787 - RNA, 19 nt, Artificial Sequence
  Description of Artificial Sequence: Synthetic oligonucleotide
gugggccugguagguccca

SEQ ID NO: 2617788 - RNA, 19 nt, Artificial Sequence
  Description of Artificial Sequence: Synthetic oligonucleotide
gggcucccagguggcaaug

SEQ ID NO: 2617789 - RNA, 19 nt, Artificial Sequence
  Description of Artificial Sequence: Synthetic oligonucleotide
guucagagccugacaucuu

SEQ ID NO: 2617790 - RNA, 19 nt, Artificial Sequence
  Description of Artificial Sequence: Synthetic oligonucleotide
caggcacuuucugucuauu

SEQ ID NO: 2617791 - RNA, 19 nt, Artificial Sequence
  Description of Artificial Sequence: Synthetic oligonucleotide
ccauccccauuaggcagca

SEQ ID NO: 2617792 - RNA, 19 nt, Artificial Sequence
  Description of Artificial Sequence: Synthetic oligonucleotide
ccuugggguugauaucauu

SEQ ID NO: 2617793 - RNA, 19 nt, Artificial Sequence
  Description of Artificial Sequence: Synthetic oligonucleotide
ccaagccuggggugcucua

SEQ ID NO: 2617794 - RNA, 19 nt, Artificial Sequence
  Description of Artificial Sequence: Synthetic oligonucleotide
gauguuguagaccagcucg

SEQ ID NO: 2617795 - RNA, 19 nt, Artificial Sequence
  Description of Artificial Sequence: Synthetic oligonucleotide
gaaauugacugccaggugg

SEQ ID NO: 2617796 - RNA, 19 nt, Artificial Sequence
  Description of Artificial Sequence: Synthetic oligonucleotide
aacagccacagccagacac

SEQ ID NO: 2617797 - RNA, 19 nt, Artificial Sequence
  Description of Artificial Sequence: Synthetic oligonucleotide
uucauugugugucagcagg

SEQ ID NO: 2617798 - RNA, 19 nt, Artificial Sequence
  Description of Artificial Sequence: Synthetic oligonucleotide
acucuugauguacaaagcc

SEQ ID NO: 2617799 - RNA, 19 nt, Artificial Sequence
  Description of Artificial Sequence: Synthetic oligonucleotide
uucuucuugagcaaggaca

SEQ ID NO: 2617800 - RNA, 19 nt, Artificial Sequence
  Description of Artificial Sequence: Synthetic oligonucleotide
gacacuuugcugcucaugg

SEQ ID NO: 2617801 - RNA, 19 nt, Artificial Sequence
  Description of Artificial Sequence: Synthetic oligonucleotide
aaagcccggacauucugcc

SEQ ID NO: 2617802 - RNA, 19 nt, Artificial Sequence
  Description of Artificial Sequence: Synthetic oligonucleotide
uugauaguagacuucaccu

SEQ ID NO: 2617803 - RNA, 19 nt, Artificial Sequence
  Description of Artificial Sequence: Synthetic oligonucleotide
aaacuugcggcgcuugcgc

SEQ ID NO: 2617804 - RNA, 19 nt, Artificial Sequence
  Description of Artificial Sequence: Synthetic oligonucleotide
uaguucuucaggcugaucu

SEQ ID NO: 2617805 - RNA, 19 nt, Artificial Sequence
  Description of Artificial Sequence: Synthetic oligonucleotide
guggacuugagccugacgg

SEQ ID NO: 2617806 - RNA, 19 nt, Artificial Sequence
  Description of Artificial Sequence: Synthetic oligonucleotide
aagaaauugacugccaggu

SEQ ID NO: 2617807 - RNA, 19 nt, Artificial Sequence
  Description of Artificial Sequence: Synthetic oligonucleotide
ucauccgucaucuucacgu

SEQ ID NO: 2617808 - RNA, 19 nt, Artificial Sequence
  Description of Artificial Sequence: Synthetic oligonucleotide
cuucacguggccaacagcc

SEQ ID NO: 2617809 - RNA, 19 nt, Artificial Sequence
  Description of Artificial Sequence: Synthetic oligonucleotide
uuuccagaaacuugcggcg

SEQ ID NO: 2617810 - RNA, 19 nt, Artificial Sequence
  Description of Artificial Sequence: Synthetic oligonucleotide
cuugauaguagacuucacc

SEQ ID NO: 2617811 - RNA, 19 nt, Artificial Sequence
  Description of Artificial Sequence: Synthetic oligonucleotide
ugaucagggacucggaggc

SEQ ID NO: 2617812 - RNA, 19 nt, Artificial Sequence
  Description of Artificial Sequence: Synthetic oligonucleotide
gauacgugggaucugcuug

SEQ ID NO: 2617813 - RNA, 19 nt, Artificial Sequence
  Description of Artificial Sequence: Synthetic oligonucleotide
uugaucagggacucggagg

SEQ ID NO: 2617814 - RNA, 19 nt, Artificial Sequence
  Description of Artificial Sequence: Synthetic oligonucleotide
uuuucauugugugucagca

SEQ ID NO: 2617815 - RNA, 19 nt, Artificial Sequence
  Description of Artificial Sequence: Synthetic oligonucleotide
gauaguagacuucaccuca

SEQ ID NO: 2617816 - RNA, 19 nt, Artificial Sequence
  Description of Artificial Sequence: Synthetic oligonucleotide
cugaucugcaacuccaccg

SEQ ID NO: 2617817 - RNA, 19 nt, Artificial Sequence
  Description of Artificial Sequence: Synthetic oligonucleotide
accguuuccagaaacuugc

SEQ ID NO: 2617818 - RNA, 19 nt, Artificial Sequence
  Description of Artificial Sequence: Synthetic oligonucleotide
cucuugauguacaaagccc

SEQ ID NO: 2617819 - RNA, 19 nt, Artificial Sequence
  Description of Artificial Sequence: Synthetic oligonucleotide
cuuguuuaggccugggccc

SEQ ID NO: 2617820 - RNA, 19 nt, Artificial Sequence
  Description of Artificial Sequence: Synthetic oligonucleotide
uauugggugcccuaguaca

SEQ ID NO: 2617821 - RNA, 19 nt, Artificial Sequence
  Description of Artificial Sequence: Synthetic oligonucleotide
aacguuuguccuucugggg

SEQ ID NO: 2617822 - RNA, 19 nt, Artificial Sequence
  Description of Artificial Sequence: Synthetic oligonucleotide
agucagguuuauugggugc

SEQ ID NO: 2617823 - RNA, 19 nt, Artificial Sequence
  Description of Artificial Sequence: Synthetic oligonucleotide
caagaaauugacugccagg

SEQ ID NO: 2617824 - RNA, 19 nt, Artificial Sequence
  Description of Artificial Sequence: Synthetic oligonucleotide
cacaccgagaacuuggggc

SEQ ID NO: 2617825 - RNA, 19 nt, Artificial Sequence
  Description of Artificial Sequence: Synthetic oligonucleotide
ucuggaacuugauaguaga

SEQ ID NO: 2617826 - RNA, 19 nt, Artificial Sequence
  Description of Artificial Sequence: Synthetic oligonucleotide
aacuugauaguagacuuca

SEQ ID NO: 2617827 - RNA, 19 nt, Artificial Sequence
  Description of Artificial Sequence: Synthetic oligonucleotide
cauguuuucauuguguguc

SEQ ID NO: 2617828 - RNA, 19 nt, Artificial Sequence
  Description of Artificial Sequence: Synthetic oligonucleotide
ugccaguucuucuugagca

SEQ ID NO: 2617829 - RNA, 19 nt, Artificial Sequence
  Description of Artificial Sequence: Synthetic oligonucleotide
acaccgagaacuuggggcg

SEQ ID NO: 2617830 - RNA, 19 nt, Artificial Sequence
  Description of Artificial Sequence: Synthetic oligonucleotide
ucauugugugucagcaggg

SEQ ID NO: 2617831 - RNA, 19 nt, Artificial Sequence
  Description of Artificial Sequence: Synthetic oligonucleotide
uucuucagcgccucgaugu

SEQ ID NO: 2617832 - RNA, 19 nt, Artificial Sequence
  Description of Artificial Sequence: Synthetic oligonucleotide
uugacugccagguggaugu

SEQ ID NO: 2617833 - RNA, 19 nt, Artificial Sequence
  Description of Artificial Sequence: Synthetic oligonucleotide
uagacuucaccucaucaac

SEQ ID NO: 2617834 - RNA, 19 nt, Artificial Sequence
  Description of Artificial Sequence: Synthetic oligonucleotide
caucauauuucuuggccag

SEQ ID NO: 2617835 - RNA, 19 nt, Artificial Sequence
  Description of Artificial Sequence: Synthetic oligonucleotide
agguggauguuguagacca

SEQ ID NO: 2617836 - RNA, 19 nt, Artificial Sequence
  Description of Artificial Sequence: Synthetic oligonucleotide
ugauguacaaagcccggac

SEQ ID NO: 2617837 - RNA, 19 nt, Artificial Sequence
  Description of Artificial Sequence: Synthetic oligonucleotide
aaggacaccaagaaauuga

SEQ ID NO: 2617838 - RNA, 19 nt, Artificial Sequence
  Description of Artificial Sequence: Synthetic oligonucleotide
uucgucgcagugcugcugg

SEQ ID NO: 2617839 - RNA, 19 nt, Artificial Sequence
  Description of Artificial Sequence: Synthetic oligonucleotide
ucauaguucuucaggcuga

SEQ ID NO: 2617840 - RNA, 19 nt, Artificial Sequence
  Description of Artificial Sequence: Synthetic oligonucleotide
ugcuugaucagggacucgg

SEQ ID NO: 2617841 - RNA, 19 nt, Artificial Sequence
  Description of Artificial Sequence: Synthetic oligonucleotide
agcaaggacaccaagaaau

SEQ ID NO: 2617842 - RNA, 19 nt, Artificial Sequence
  Description of Artificial Sequence: Synthetic oligonucleotide
agaaacuugcggcgcuugc

SEQ ID NO: 2617843 - RNA, 19 nt, Artificial Sequence
  Description of Artificial Sequence: Synthetic oligonucleotide
uuauugggugcccuaguac

SEQ ID NO: 2617844 - RNA, 19 nt, Artificial Sequence
  Description of Artificial Sequence: Synthetic oligonucleotide
ucgucauccgucaucuuca

SEQ ID NO: 2617845 - RNA, 19 nt, Artificial Sequence
  Description of Artificial Sequence: Synthetic oligonucleotide
cuugauguacaaagcccgg

SEQ ID NO: 2617846 - RNA, 19 nt, Artificial Sequence
  Description of Artificial Sequence: Synthetic oligonucleotide
cuaguacagacgcuggggc

SEQ ID NO: 2617847 - RNA, 19 nt, Artificial Sequence
  Description of Artificial Sequence: Synthetic oligonucleotide
ugaucugcaacuccaccgu

SEQ ID NO: 2617848 - RNA, 19 nt, Artificial Sequence
  Description of Artificial Sequence: Synthetic oligonucleotide
ugauaguagacuucaccuc

SEQ ID NO: 2617849 - RNA, 19 nt, Artificial Sequence
  Description of Artificial Sequence: Synthetic oligonucleotide
uuuauugggugcccuagua

SEQ ID NO: 2617850 - RNA, 19 nt, Artificial Sequence
  Description of Artificial Sequence: Synthetic oligonucleotide
uccgucaucuucacguggc

SEQ ID NO: 2617851 - RNA, 19 nt, Artificial Sequence
  Description of Artificial Sequence: Synthetic oligonucleotide
augucuacggccuuggcuu

SEQ ID NO: 2617852 - RNA, 19 nt, Artificial Sequence
  Description of Artificial Sequence: Synthetic oligonucleotide
ucaucuggaacuugauagu

SEQ ID NO: 2617853 - RNA, 19 nt, Artificial Sequence
  Description of Artificial Sequence: Synthetic oligonucleotide
uuucauugugugucagcag

SEQ ID NO: 2617854 - RNA, 19 nt, Artificial Sequence
  Description of Artificial Sequence: Synthetic oligonucleotide
uuggcuucgucgcagugcu

SEQ ID NO: 2617855 - RNA, 19 nt, Artificial Sequence
  Description of Artificial Sequence: Synthetic oligonucleotide
aacuuuggccaccauguuu

SEQ ID NO: 2617856 - RNA, 19 nt, Artificial Sequence
  Description of Artificial Sequence: Synthetic oligonucleotide
gaaacuugcggcgcuugcg

SEQ ID NO: 2617857 - RNA, 19 nt, Artificial Sequence
  Description of Artificial Sequence: Synthetic oligonucleotide
ucgcgggacacuuugcugc

SEQ ID NO: 2617858 - RNA, 19 nt, Artificial Sequence
  Description of Artificial Sequence: Synthetic oligonucleotide
auguacaaagcccggacau

SEQ ID NO: 2617859 - RNA, 19 nt, Artificial Sequence
  Description of Artificial Sequence: Synthetic oligonucleotide
uugccugccuuguuuaggc

SEQ ID NO: 2617860 - RNA, 19 nt, Artificial Sequence
  Description of Artificial Sequence: Synthetic oligonucleotide
uggggcuugcccaugguac

SEQ ID NO: 2617861 - RNA, 19 nt, Artificial Sequence
  Description of Artificial Sequence: Synthetic oligonucleotide
ggcaucauauuucuuggcc

SEQ ID NO: 2617862 - RNA, 19 nt, Artificial Sequence
  Description of Artificial Sequence: Synthetic oligonucleotide
gauguacaaagcccggaca

SEQ ID NO: 2617863 - RNA, 19 nt, Artificial Sequence
  Description of Artificial Sequence: Synthetic oligonucleotide
uggauguuguagaccagcu

SEQ ID NO: 2617864 - RNA, 19 nt, Artificial Sequence
  Description of Artificial Sequence: Synthetic oligonucleotide
caugguacucuugauguac

SEQ ID NO: 2617865 - RNA, 19 nt, Artificial Sequence
  Description of Artificial Sequence: Synthetic oligonucleotide
cuugaucagggacucggag

SEQ ID NO: 2617866 - RNA, 19 nt, Artificial Sequence
  Description of Artificial Sequence: Synthetic oligonucleotide
uacggccuuggcuucgucg

SEQ ID NO: 2617867 - RNA, 19 nt, Artificial Sequence
  Description of Artificial Sequence: Synthetic oligonucleotide
aaauugacugccaggugga

SEQ ID NO: 2617868 - RNA, 19 nt, Artificial Sequence
  Description of Artificial Sequence: Synthetic oligonucleotide
ucugcaacuccaccguuuc

SEQ ID NO: 2617869 - RNA, 19 nt, Artificial Sequence
  Description of Artificial Sequence: Synthetic oligonucleotide
guugagcuucuucagcgcc

SEQ ID NO: 2617870 - RNA, 19 nt, Artificial Sequence
  Description of Artificial Sequence: Synthetic oligonucleotide
aggacaccaagaaauugac

SEQ ID NO: 2617871 - RNA, 19 nt, Artificial Sequence
  Description of Artificial Sequence: Synthetic oligonucleotide
ggugcccuaguacagacgc

SEQ ID NO: 2617872 - RNA, 19 nt, Artificial Sequence
  Description of Artificial Sequence: Synthetic oligonucleotide
aucauauuucuuggccagc

SEQ ID NO: 2617873 - RNA, 19 nt, Artificial Sequence
  Description of Artificial Sequence: Synthetic oligonucleotide
ggggucauaguucuucagg

SEQ ID NO: 2617874 - RNA, 19 nt, Artificial Sequence
  Description of Artificial Sequence: Synthetic oligonucleotide
ucguacagggugucgcggg

SEQ ID NO: 2617875 - RNA, 19 nt, Artificial Sequence
  Description of Artificial Sequence: Synthetic oligonucleotide
ccuuguuuaggccugggcc

SEQ ID NO: 2617876 - RNA, 19 nt, Artificial Sequence
  Description of Artificial Sequence: Synthetic oligonucleotide
agcccggacauucugccag

SEQ ID NO: 2617877 - RNA, 19 nt, Artificial Sequence
  Description of Artificial Sequence: Synthetic oligonucleotide
uugagccugacggugcccg

SEQ ID NO: 2617878 - RNA, 19 nt, Artificial Sequence
  Description of Artificial Sequence: Synthetic oligonucleotide
ugcaggaccucccgcacug

SEQ ID NO: 2617879 - RNA, 19 nt, Artificial Sequence
  Description of Artificial Sequence: Synthetic oligonucleotide
cugacggugcccgagaaac

SEQ ID NO: 2617880 - RNA, 19 nt, Artificial Sequence
  Description of Artificial Sequence: Synthetic oligonucleotide
uuggccaccauguuuucau

SEQ ID NO: 2617881 - RNA, 19 nt, Artificial Sequence
  Description of Artificial Sequence: Synthetic oligonucleotide
caaagcccggacauucugc

SEQ ID NO: 2617882 - RNA, 19 nt, Artificial Sequence
  Description of Artificial Sequence: Synthetic oligonucleotide
aggacgcacaccgagaacu

SEQ ID NO: 2617883 - RNA, 19 nt, Artificial Sequence
  Description of Artificial Sequence: Synthetic oligonucleotide
uucagcgccucgaugucca

SEQ ID NO: 2617884 - RNA, 19 nt, Artificial Sequence
  Description of Artificial Sequence: Synthetic oligonucleotide
uccaccguuuccagaaacu

SEQ ID NO: 2617885 - RNA, 19 nt, Artificial Sequence
  Description of Artificial Sequence: Synthetic oligonucleotide
cuuugcugcucauggcugc

SEQ ID NO: 2617886 - RNA, 19 nt, Artificial Sequence
  Description of Artificial Sequence: Synthetic oligonucleotide
ugcccuaguacagacgcug

SEQ ID NO: 2617887 - RNA, 19 nt, Artificial Sequence
  Description of Artificial Sequence: Synthetic oligonucleotide
cucgucauccgucaucuuc

SEQ ID NO: 2617888 - RNA, 19 nt, Artificial Sequence
  Description of Artificial Sequence: Synthetic oligonucleotide
acaaagcccggacauucug

SEQ ID NO: 2617889 - RNA, 19 nt, Artificial Sequence
  Description of Artificial Sequence: Synthetic oligonucleotide
ugggaucugcuugaucagg

SEQ ID NO: 2617890 - RNA, 19 nt, Artificial Sequence
  Description of Artificial Sequence: Synthetic oligonucleotide
ugucgcgggacacuuugcu

SEQ ID NO: 2617891 - RNA, 19 nt, Artificial Sequence
  Description of Artificial Sequence: Synthetic oligonucleotide
aucuucacguggccaacag

SEQ ID NO: 2617892 - RNA, 19 nt, Artificial Sequence
  Description of Artificial Sequence: Synthetic oligonucleotide
auccgucaucuucacgugg

SEQ ID NO: 2617893 - RNA, 19 nt, Artificial Sequence
  Description of Artificial Sequence: Synthetic oligonucleotide
ucacguggccaacagccac

SEQ ID NO: 2617894 - RNA, 19 nt, Artificial Sequence
  Description of Artificial Sequence: Synthetic oligonucleotide
aacuugccugccuuguuua

SEQ ID NO: 2617895 - RNA, 19 nt, Artificial Sequence
  Description of Artificial Sequence: Synthetic oligonucleotide
ugacggugcccgagaaacg

SEQ ID NO: 2617896 - RNA, 19 nt, Artificial Sequence
  Description of Artificial Sequence: Synthetic oligonucleotide
uugauguacaaagcccgga

SEQ ID NO: 2617897 - RNA, 19 nt, Artificial Sequence
  Description of Artificial Sequence: Synthetic oligonucleotide
auacgugggaucugcuuga

SEQ ID NO: 2617898 - RNA, 19 nt, Artificial Sequence
  Description of Artificial Sequence: Synthetic oligonucleotide
auugugugucagcagggaa

SEQ ID NO: 2617899 - RNA, 19 nt, Artificial Sequence
  Description of Artificial Sequence: Synthetic oligonucleotide
gaugucuacggccuuggcu

SEQ ID NO: 2617900 - RNA, 19 nt, Artificial Sequence
  Description of Artificial Sequence: Synthetic oligonucleotide
ucuugagcaaggacaccaa

SEQ ID NO: 2617901 - RNA, 19 nt, Artificial Sequence
  Description of Artificial Sequence: Synthetic oligonucleotide
uaguacagacgcuggggcu

SEQ ID NO: 2617902 - RNA, 19 nt, Artificial Sequence
  Description of Artificial Sequence: Synthetic oligonucleotide
caccguuuccagaaacuug

SEQ ID NO: 2617903 - RNA, 19 nt, Artificial Sequence
  Description of Artificial Sequence: Synthetic oligonucleotide
cuuggcuucgucgcagugc

SEQ ID NO: 2617904 - RNA, 19 nt, Artificial Sequence
  Description of Artificial Sequence: Synthetic oligonucleotide
guggauguuguagaccagc

SEQ ID NO: 2617905 - RNA, 19 nt, Artificial Sequence
  Description of Artificial Sequence: Synthetic oligonucleotide
guuguagaccagcucguca

SEQ ID NO: 2617906 - RNA, 19 nt, Artificial Sequence
  Description of Artificial Sequence: Synthetic oligonucleotide
uucacguggccaacagcca

SEQ ID NO: 2617907 - RNA, 19 nt, Artificial Sequence
  Description of Artificial Sequence: Synthetic oligonucleotide
acuuuggccaccauguuuu

SEQ ID NO: 2617908 - RNA, 19 nt, Artificial Sequence
  Description of Artificial Sequence: Synthetic oligonucleotide
gucagguuuauugggugcc

SEQ ID NO: 2617909 - RNA, 19 nt, Artificial Sequence
  Description of Artificial Sequence: Synthetic oligonucleotide
guacaaagcccggacauuc

SEQ ID NO: 2617910 - RNA, 19 nt, Artificial Sequence
  Description of Artificial Sequence: Synthetic oligonucleotide
aacuugcggcgcuugcgcu

SEQ ID NO: 2617911 - RNA, 19 nt, Artificial Sequence
  Description of Artificial Sequence: Synthetic oligonucleotide
gaacuugauaguagacuuc

SEQ ID NO: 2617912 - RNA, 19 nt, Artificial Sequence
  Description of Artificial Sequence: Synthetic oligonucleotide
auugacugccagguggaug

SEQ ID NO: 2617913 - RNA, 19 nt, Artificial Sequence
  Description of Artificial Sequence: Synthetic oligonucleotide
uacagggugucgcgggaca

SEQ ID NO: 2617914 - RNA, 19 nt, Artificial Sequence
  Description of Artificial Sequence: Synthetic oligonucleotide
acgcacaccgagaacuugg

SEQ ID NO: 2617915 - RNA, 19 nt, Artificial Sequence
  Description of Artificial Sequence: Synthetic oligonucleotide
aucugcuugaucagggacu

SEQ ID NO: 2617916 - RNA, 19 nt, Artificial Sequence
  Description of Artificial Sequence: Synthetic oligonucleotide
guagaccagcucgucaucc

SEQ ID NO: 2617917 - RNA, 19 nt, Artificial Sequence
  Description of Artificial Sequence: Synthetic oligonucleotide
uuuaggccugggcccagga

SEQ ID NO: 2617918 - RNA, 19 nt, Artificial Sequence
  Description of Artificial Sequence: Synthetic oligonucleotide
cuugaccagcuucuuguuc

SEQ ID NO: 2617919 - RNA, 19 nt, Artificial Sequence
  Description of Artificial Sequence: Synthetic oligonucleotide
ucagguuuauugggugccc

SEQ ID NO: 2617920 - RNA, 19 nt, Artificial Sequence
  Description of Artificial Sequence: Synthetic oligonucleotide
gcaucauauuucuuggcca

SEQ ID NO: 2617921 - RNA, 19 nt, Artificial Sequence
  Description of Artificial Sequence: Synthetic oligonucleotide
acuugccugccuuguuuag

SEQ ID NO: 2617922 - RNA, 19 nt, Artificial Sequence
  Description of Artificial Sequence: Synthetic oligonucleotide
cacugccucguacagggug

SEQ ID NO: 2617923 - RNA, 19 nt, Artificial Sequence
  Description of Artificial Sequence: Synthetic oligonucleotide
uguagaccagcucgucauc

SEQ ID NO: 2617924 - RNA, 19 nt, Artificial Sequence
  Description of Artificial Sequence: Synthetic oligonucleotide
auugggugcccuaguacag

SEQ ID NO: 2617925 - RNA, 19 nt, Artificial Sequence
  Description of Artificial Sequence: Synthetic oligonucleotide
ugccgugcaggaccucccg

SEQ ID NO: 2617926 - RNA, 19 nt, Artificial Sequence
  Description of Artificial Sequence: Synthetic oligonucleotide
uaguagacuucaccucauc

SEQ ID NO: 2617927 - RNA, 19 nt, Artificial Sequence
  Description of Artificial Sequence: Synthetic oligonucleotide
uuguuuaggccugggccca

SEQ ID NO: 2617928 - RNA, 19 nt, Artificial Sequence
  Description of Artificial Sequence: Synthetic oligonucleotide
ugggugcccuaguacagac

SEQ ID NO: 2617929 - RNA, 19 nt, Artificial Sequence
  Description of Artificial Sequence: Synthetic oligonucleotide
ucuucagcgccucgauguc

SEQ ID NO: 2617930 - RNA, 19 nt, Artificial Sequence
  Description of Artificial Sequence: Synthetic oligonucleotide
gacuugagccugacggugc

SEQ ID NO: 2617931 - RNA, 19 nt, Artificial Sequence
  Description of Artificial Sequence: Synthetic oligonucleotide
gguuuauugggugcccuag

SEQ ID NO: 2617932 - RNA, 19 nt, Artificial Sequence
  Description of Artificial Sequence: Synthetic oligonucleotide
gucauccgucaucuucacg

SEQ ID NO: 2617933 - RNA, 19 nt, Artificial Sequence
  Description of Artificial Sequence: Synthetic oligonucleotide
ggugucgcgggacacuuug

SEQ ID NO: 2617934 - RNA, 19 nt, Artificial Sequence
  Description of Artificial Sequence: Synthetic oligonucleotide
cauccgucaucuucacgug

SEQ ID NO: 2617935 - RNA, 19 nt, Artificial Sequence
  Description of Artificial Sequence: Synthetic oligonucleotide
gacauucugccaguucuuc

SEQ ID NO: 2617936 - RNA, 19 nt, Artificial Sequence
  Description of Artificial Sequence: Synthetic oligonucleotide
ucccgcacugccucguaca

SEQ ID NO: 2617937 - RNA, 19 nt, Artificial Sequence
  Description of Artificial Sequence: Synthetic oligonucleotide
ugucagcagggaagggaac

SEQ ID NO: 2617938 - RNA, 19 nt, Artificial Sequence
  Description of Artificial Sequence: Synthetic oligonucleotide
guugccgugcaggaccucc

SEQ ID NO: 2617939 - RNA, 19 nt, Artificial Sequence
  Description of Artificial Sequence: Synthetic oligonucleotide
gggaagggaacuugccugc

SEQ ID NO: 2617940 - RNA, 19 nt, Artificial Sequence
  Description of Artificial Sequence: Synthetic oligonucleotide
ccuaguacagacgcugggg

SEQ ID NO: 2617941 - RNA, 19 nt, Artificial Sequence
  Description of Artificial Sequence: Synthetic oligonucleotide
cgugggaucugcuugauca

SEQ ID NO: 2617942 - RNA, 19 nt, Artificial Sequence
  Description of Artificial Sequence: Synthetic oligonucleotide
cagguggauguuguagacc

SEQ ID NO: 2617943 - RNA, 19 nt, Artificial Sequence
  Description of Artificial Sequence: Synthetic oligonucleotide
aagcccggacauucugcca

SEQ ID NO: 2617944 - RNA, 19 nt, Artificial Sequence
  Description of Artificial Sequence: Synthetic oligonucleotide
gaacuuggggcgaggggug

SEQ ID NO: 2617945 - RNA, 19 nt, Artificial Sequence
  Description of Artificial Sequence: Synthetic oligonucleotide
cuccaccguuuccagaaac

SEQ ID NO: 2617946 - RNA, 19 nt, Artificial Sequence
  Description of Artificial Sequence: Synthetic oligonucleotide
cuugcggcgcuugcgcugg

SEQ ID NO: 2617947 - RNA, 19 nt, Artificial Sequence
  Description of Artificial Sequence: Synthetic oligonucleotide
aggccugggcccaggauac

SEQ ID NO: 2617948 - RNA, 19 nt, Artificial Sequence
  Description of Artificial Sequence: Synthetic oligonucleotide
uugccgugcaggaccuccc

SEQ ID NO: 2617949 - RNA, 19 nt, Artificial Sequence
  Description of Artificial Sequence: Synthetic oligonucleotide
uguuguagaccagcucguc

SEQ ID NO: 2617950 - RNA, 19 nt, Artificial Sequence
  Description of Artificial Sequence: Synthetic oligonucleotide
uguacaaagcccggacauu

SEQ ID NO: 2617951 - RNA, 19 nt, Artificial Sequence
  Description of Artificial Sequence: Synthetic oligonucleotide
aguacagacgcuggggcuu

SEQ ID NO: 2617952 - RNA, 19 nt, Artificial Sequence
  Description of Artificial Sequence: Synthetic oligonucleotide
gagcaaggacaccaagaaa

SEQ ID NO: 2617953 - RNA, 19 nt, Artificial Sequence
  Description of Artificial Sequence: Synthetic oligonucleotide
cucguacagggugucgcgg

SEQ ID NO: 2617954 - RNA, 19 nt, Artificial Sequence
  Description of Artificial Sequence: Synthetic oligonucleotide
aucagggacucggaggcca

SEQ ID NO: 2617955 - RNA, 19 nt, Artificial Sequence
  Description of Artificial Sequence: Synthetic oligonucleotide
gucgcgggacacuuugcug

SEQ ID NO: 2617956 - RNA, 19 nt, Artificial Sequence
  Description of Artificial Sequence: Synthetic oligonucleotide
ucuugaccagcuucuuguu

SEQ ID NO: 2617957 - RNA, 19 nt, Artificial Sequence
  Description of Artificial Sequence: Synthetic oligonucleotide
cuugcccaugguacucuug

SEQ ID NO: 2617958 - RNA, 19 nt, Artificial Sequence
  Description of Artificial Sequence: Synthetic oligonucleotide
gcugaucugcaacuccacc

SEQ ID NO: 2617959 - RNA, 19 nt, Artificial Sequence
  Description of Artificial Sequence: Synthetic oligonucleotide
ugcccgagaaacguuuguc

SEQ ID NO: 2617960 - RNA, 19 nt, Artificial Sequence
  Description of Artificial Sequence: Synthetic oligonucleotide
acgugggaucugcuugauc

SEQ ID NO: 2617961 - RNA, 19 nt, Artificial Sequence
  Description of Artificial Sequence: Synthetic oligonucleotide
acagggugucgcgggacac

SEQ ID NO: 2617962 - RNA, 19 nt, Artificial Sequence
  Description of Artificial Sequence: Synthetic oligonucleotide
auggcugcggaggccgcgc

SEQ ID NO: 2617963 - RNA, 19 nt, Artificial Sequence
  Description of Artificial Sequence: Synthetic oligonucleotide
uugggugcccuaguacaga

SEQ ID NO: 2617964 - RNA, 19 nt, Artificial Sequence
  Description of Artificial Sequence: Synthetic oligonucleotide
auaguucuucaggcugauc

SEQ ID NO: 2617965 - RNA, 19 nt, Artificial Sequence
  Description of Artificial Sequence: Synthetic oligonucleotide
ugguugccgugcaggaccu

SEQ ID NO: 2617966 - RNA, 19 nt, Artificial Sequence
  Description of Artificial Sequence: Synthetic oligonucleotide
uuaggccugggcccaggau

SEQ ID NO: 2617967 - RNA, 19 nt, Artificial Sequence
  Description of Artificial Sequence: Synthetic oligonucleotide
cuucagcgccucgaugucc

SEQ ID NO: 2617968 - RNA, 19 nt, Artificial Sequence
  Description of Artificial Sequence: Synthetic oligonucleotide
gcccaugguacucuugaug

SEQ ID NO: 2617969 - RNA, 19 nt, Artificial Sequence
  Description of Artificial Sequence: Synthetic oligonucleotide
aauugacugccagguggau

SEQ ID NO: 2617970 - RNA, 19 nt, Artificial Sequence
  Description of Artificial Sequence: Synthetic oligonucleotide
aggcugaucugcaacucca

SEQ ID NO: 2617971 - RNA, 19 nt, Artificial Sequence
  Description of Artificial Sequence: Synthetic oligonucleotide
agggguggacuugagccug

SEQ ID NO: 2617972 - RNA, 19 nt, Artificial Sequence
  Description of Artificial Sequence: Synthetic oligonucleotide
ugccugccuuguuuaggcc

SEQ ID NO: 2617973 - RNA, 19 nt, Artificial Sequence
  Description of Artificial Sequence: Synthetic oligonucleotide
gacuucaccucaucaacuu

SEQ ID NO: 2617974 - RNA, 19 nt, Artificial Sequence
  Description of Artificial Sequence: Synthetic oligonucleotide
auguuguagaccagcucgu

SEQ ID NO: 2617975 - RNA, 19 nt, Artificial Sequence
  Description of Artificial Sequence: Synthetic oligonucleotide
cagacacagcaccuucuuc

SEQ ID NO: 2617976 - RNA, 19 nt, Artificial Sequence
  Description of Artificial Sequence: Synthetic oligonucleotide
ggcuucgucgcagugcugc

SEQ ID NO: 2617977 - RNA, 19 nt, Artificial Sequence
  Description of Artificial Sequence: Synthetic oligonucleotide
cuucuugagcaaggacacc

SEQ ID NO: 2617978 - RNA, 19 nt, Artificial Sequence
  Description of Artificial Sequence: Synthetic oligonucleotide
gacgcacaccgagaacuug

SEQ ID NO: 2617979 - RNA, 19 nt, Artificial Sequence
  Description of Artificial Sequence: Synthetic oligonucleotide
ucgcagugcugcugguccc

SEQ ID NO: 2617980 - RNA, 19 nt, Artificial Sequence
  Description of Artificial Sequence: Synthetic oligonucleotide
agguuuauugggugcccua

SEQ ID NO: 2617981 - RNA, 19 nt, Artificial Sequence
  Description of Artificial Sequence: Synthetic oligonucleotide
ugucuacggccuuggcuuc

SEQ ID NO: 2617982 - RNA, 19 nt, Artificial Sequence
  Description of Artificial Sequence: Synthetic oligonucleotide
ggauguuguagaccagcuc

SEQ ID NO: 2617983 - RNA, 19 nt, Artificial Sequence
  Description of Artificial Sequence: Synthetic oligonucleotide
ugccuuguuuaggccuggg

SEQ ID NO: 2617984 - RNA, 19 nt, Artificial Sequence
  Description of Artificial Sequence: Synthetic oligonucleotide
cguuuccagaaacuugcgg

SEQ ID NO: 2617985 - RNA, 19 nt, Artificial Sequence
  Description of Artificial Sequence: Synthetic oligonucleotide
gaacuugccugccuuguuu

SEQ ID NO: 2617986 - RNA, 19 nt, Artificial Sequence
  Description of Artificial Sequence: Synthetic oligonucleotide
cugcaacuccaccguuucc

SEQ ID NO: 2617987 - RNA, 19 nt, Artificial Sequence
  Description of Artificial Sequence: Synthetic oligonucleotide
gugucagcagggaagggaa

SEQ ID NO: 2617988 - RNA, 19 nt, Artificial Sequence
  Description of Artificial Sequence: Synthetic oligonucleotide
gaccucccgcacugccucg

SEQ ID NO: 2617989 - RNA, 19 nt, Artificial Sequence
  Description of Artificial Sequence: Synthetic oligonucleotide
guuuauugggugcccuagu

SEQ ID NO: 2617990 - RNA, 19 nt, Artificial Sequence
  Description of Artificial Sequence: Synthetic oligonucleotide
cauugugugucagcaggga

SEQ ID NO: 2617991 - RNA, 19 nt, Artificial Sequence
  Description of Artificial Sequence: Synthetic oligonucleotide
uguuuaggccugggcccag

SEQ ID NO: 2617992 - RNA, 19 nt, Artificial Sequence
  Description of Artificial Sequence: Synthetic oligonucleotide
gagggguggacuugagccu

SEQ ID NO: 2617993 - RNA, 19 nt, Artificial Sequence
  Description of Artificial Sequence: Synthetic oligonucleotide
caucuggaacuugauagua

SEQ ID NO: 2617994 - RNA, 19 nt, Artificial Sequence
  Description of Artificial Sequence: Synthetic oligonucleotide
cagccacagccagacacag

SEQ ID NO: 2617995 - RNA, 19 nt, Artificial Sequence
  Description of Artificial Sequence: Synthetic oligonucleotide
gaucagggacucggaggcc

SEQ ID NO: 2617996 - RNA, 19 nt, Artificial Sequence
  Description of Artificial Sequence: Synthetic oligonucleotide
gagccugacggugcccgag

SEQ ID NO: 2617997 - RNA, 19 nt, Artificial Sequence
  Description of Artificial Sequence: Synthetic oligonucleotide
gcacaccgagaacuugggg

SEQ ID NO: 2617998 - RNA, 19 nt, Artificial Sequence
  Description of Artificial Sequence: Synthetic oligonucleotide
guuuaggccugggcccagg

SEQ ID NO: 2617999 - RNA, 19 nt, Artificial Sequence
  Description of Artificial Sequence: Synthetic oligonucleotide
gggaugucuacggccuugg

SEQ ID NO: 2618000 - RNA, 19 nt, Artificial Sequence
  Description of Artificial Sequence: Synthetic oligonucleotide
gacggugcccgagaaacgu

SEQ ID NO: 2618001 - RNA, 19 nt, Artificial Sequence
  Description of Artificial Sequence: Synthetic oligonucleotide
uugcgcugguugccgugca

SEQ ID NO: 2618002 - RNA, 19 nt, Artificial Sequence
  Description of Artificial Sequence: Synthetic oligonucleotide
gucuacggccuuggcuucg

SEQ ID NO: 2618003 - RNA, 19 nt, Artificial Sequence
  Description of Artificial Sequence: Synthetic oligonucleotide
ccugccuuguuuaggccug

SEQ ID NO: 2618004 - RNA, 19 nt, Artificial Sequence
  Description of Artificial Sequence: Synthetic oligonucleotide
cacguggccaacagccaca

SEQ ID NO: 2618005 - RNA, 19 nt, Artificial Sequence
  Description of Artificial Sequence: Synthetic oligonucleotide
cccuaguacagacgcuggg

SEQ ID NO: 2618006 - RNA, 19 nt, Artificial Sequence
  Description of Artificial Sequence: Synthetic oligonucleotide
cccaugguacucuugaugu

SEQ ID NO: 2618007 - RNA, 19 nt, Artificial Sequence
  Description of Artificial Sequence: Synthetic oligonucleotide
gccuuguuuaggccugggc

SEQ ID NO: 2618008 - RNA, 19 nt, Artificial Sequence
  Description of Artificial Sequence: Synthetic oligonucleotide
ucuacggccuuggcuucgu

SEQ ID NO: 2618009 - RNA, 19 nt, Artificial Sequence
  Description of Artificial Sequence: Synthetic oligonucleotide
cuugagccugacggugccc

SEQ ID NO: 2618010 - RNA, 19 nt, Artificial Sequence
  Description of Artificial Sequence: Synthetic oligonucleotide
guacagacgcuggggcuug

SEQ ID NO: 2618011 - RNA, 19 nt, Artificial Sequence
  Description of Artificial Sequence: Synthetic oligonucleotide
gguacucuugauguacaaa

SEQ ID NO: 2618012 - RNA, 19 nt, Artificial Sequence
  Description of Artificial Sequence: Synthetic oligonucleotide
cuucgucgcagugcugcug

SEQ ID NO: 2618013 - RNA, 19 nt, Artificial Sequence
  Description of Artificial Sequence: Synthetic oligonucleotide
caggacgcacaccgagaac

SEQ ID NO: 2618014 - RNA, 19 nt, Artificial Sequence
  Description of Artificial Sequence: Synthetic oligonucleotide
ccaccauguuuucauugug

SEQ ID NO: 2618015 - RNA, 19 nt, Artificial Sequence
  Description of Artificial Sequence: Synthetic oligonucleotide
aucugcaacuccaccguuu

SEQ ID NO: 2618016 - RNA, 19 nt, Artificial Sequence
  Description of Artificial Sequence: Synthetic oligonucleotide
ccguuuccagaaacuugcg

SEQ ID NO: 2618017 - RNA, 19 nt, Artificial Sequence
  Description of Artificial Sequence: Synthetic oligonucleotide
cagggaagggaacuugccu

SEQ ID NO: 2618018 - RNA, 19 nt, Artificial Sequence
  Description of Artificial Sequence: Synthetic oligonucleotide
gcagggaagggaacuugcc

SEQ ID NO: 2618019 - RNA, 19 nt, Artificial Sequence
  Description of Artificial Sequence: Synthetic oligonucleotide
cuuggggcgagggguggac

SEQ ID NO: 2618020 - RNA, 19 nt, Artificial Sequence
  Description of Artificial Sequence: Synthetic oligonucleotide
guacagggugucgcgggac

SEQ ID NO: 2618021 - RNA, 19 nt, Artificial Sequence
  Description of Artificial Sequence: Synthetic oligonucleotide
cugccuuguuuaggccugg

SEQ ID NO: 2618022 - RNA, 19 nt, Artificial Sequence
  Description of Artificial Sequence: Synthetic oligonucleotide
ggaccucccgcacugccuc

SEQ ID NO: 2618023 - RNA, 19 nt, Artificial Sequence
  Description of Artificial Sequence: Synthetic oligonucleotide
uggccaccauguuuucauu

SEQ ID NO: 2618024 - RNA, 19 nt, Artificial Sequence
  Description of Artificial Sequence: Synthetic oligonucleotide
ggaagggaacuugccugcc

SEQ ID NO: 2618025 - RNA, 19 nt, Artificial Sequence
  Description of Artificial Sequence: Synthetic oligonucleotide
agggacucggaggccaaaa

SEQ ID NO: 2618026 - RNA, 19 nt, Artificial Sequence
  Description of Artificial Sequence: Synthetic oligonucleotide
cugcuugaucagggacucg

SEQ ID NO: 2618027 - RNA, 19 nt, Artificial Sequence
  Description of Artificial Sequence: Synthetic oligonucleotide
ccucgauguccaugugggg

SEQ ID NO: 2618028 - RNA, 19 nt, Artificial Sequence
  Description of Artificial Sequence: Synthetic oligonucleotide
aggaccucccgcacugccu

SEQ ID NO: 2618029 - RNA, 19 nt, Artificial Sequence
  Description of Artificial Sequence: Synthetic oligonucleotide
gguggauguuguagaccag

SEQ ID NO: 2618030 - RNA, 19 nt, Artificial Sequence
  Description of Artificial Sequence: Synthetic oligonucleotide
caucuucacguggccaaca

SEQ ID NO: 2618031 - RNA, 19 nt, Artificial Sequence
  Description of Artificial Sequence: Synthetic oligonucleotide
cgagaaacguuuguccuuc

SEQ ID NO: 2618032 - RNA, 19 nt, Artificial Sequence
  Description of Artificial Sequence: Synthetic oligonucleotide
gcggaggccgcgcgcaccg

SEQ ID NO: 2618033 - RNA, 19 nt, Artificial Sequence
  Description of Artificial Sequence: Synthetic oligonucleotide
ggaugucuacggccuuggc

SEQ ID NO: 2618034 - RNA, 19 nt, Artificial Sequence
  Description of Artificial Sequence: Synthetic oligonucleotide
gcccuaguacagacgcugg

SEQ ID NO: 2618035 - RNA, 19 nt, Artificial Sequence
  Description of Artificial Sequence: Synthetic oligonucleotide
gcgagggguggacuugagc

SEQ ID NO: 2618036 - RNA, 19 nt, Artificial Sequence
  Description of Artificial Sequence: Synthetic oligonucleotide
cgccucgauguccaugugg

SEQ ID NO: 2618037 - RNA, 19 nt, Artificial Sequence
  Description of Artificial Sequence: Synthetic oligonucleotide
uggcuucgucgcagugcug

SEQ ID NO: 2618038 - RNA, 19 nt, Artificial Sequence
  Description of Artificial Sequence: Synthetic oligonucleotide
gagaaacguuuguccuucu

SEQ ID NO: 2618039 - RNA, 19 nt, Artificial Sequence
  Description of Artificial Sequence: Synthetic oligonucleotide
uacgugggaucugcuugau

SEQ ID NO: 2618040 - RNA, 19 nt, Artificial Sequence
  Description of Artificial Sequence: Synthetic oligonucleotide
aggauacgugggaucugcu

SEQ ID NO: 2618041 - RNA, 19 nt, Artificial Sequence
  Description of Artificial Sequence: Synthetic oligonucleotide
ggugcccgagaaacguuug

SEQ ID NO: 2618042 - RNA, 19 nt, Artificial Sequence
  Description of Artificial Sequence: Synthetic oligonucleotide
cgcacaccgagaacuuggg

SEQ ID NO: 2618043 - RNA, 19 nt, Artificial Sequence
  Description of Artificial Sequence: Synthetic oligonucleotide
agggugucgcgggacacuu

SEQ ID NO: 2618044 - RNA, 19 nt, Artificial Sequence
  Description of Artificial Sequence: Synthetic oligonucleotide
ggggaugucuacggccuug

SEQ ID NO: 2618045 - RNA, 19 nt, Artificial Sequence
  Description of Artificial Sequence: Synthetic oligonucleotide
gacgcuggggcuugcccau

SEQ ID NO: 2618046 - RNA, 19 nt, Artificial Sequence
  Description of Artificial Sequence: Synthetic oligonucleotide
ucgucgcagugcugcuggu

SEQ ID NO: 2618047 - RNA, 19 nt, Artificial Sequence
  Description of Artificial Sequence: Synthetic oligonucleotide
gugucgcgggacacuuugc

SEQ ID NO: 2618048 - RNA, 19 nt, Artificial Sequence
  Description of Artificial Sequence: Synthetic oligonucleotide
gcggcgcuugcgcugguug

SEQ ID NO: 2618049 - RNA, 19 nt, Artificial Sequence
  Description of Artificial Sequence: Synthetic oligonucleotide
ccgucaucuucacguggcc

SEQ ID NO: 2618050 - RNA, 19 nt, Artificial Sequence
  Description of Artificial Sequence: Synthetic oligonucleotide
gccugccuuguuuaggccu

SEQ ID NO: 2618051 - RNA, 19 nt, Artificial Sequence
  Description of Artificial Sequence: Synthetic oligonucleotide
gugcccgagaaacguuugu

SEQ ID NO: 2618052 - RNA, 19 nt, Artificial Sequence
  Description of Artificial Sequence: Synthetic oligonucleotide
cccgcacugccucguacag

SEQ ID NO: 2618053 - RNA, 19 nt, Artificial Sequence
  Description of Artificial Sequence: Synthetic oligonucleotide
ucagcgccucgauguccau

SEQ ID NO: 2618054 - RNA, 19 nt, Artificial Sequence
  Description of Artificial Sequence: Synthetic oligonucleotide
ccauguuuucauugugugu

SEQ ID NO: 2618055 - RNA, 19 nt, Artificial Sequence
  Description of Artificial Sequence: Synthetic oligonucleotide
cccgagaaacguuuguccu

SEQ ID NO: 2618056 - RNA, 19 nt, Artificial Sequence
  Description of Artificial Sequence: Synthetic oligonucleotide
gggcccaggauacguggga

SEQ ID NO: 2618057 - RNA, 19 nt, Artificial Sequence
  Description of Artificial Sequence: Synthetic oligonucleotide
gcccaggauacgugggauc

SEQ ID NO: 2618058 - RNA, 19 nt, Artificial Sequence
  Description of Artificial Sequence: Synthetic oligonucleotide
ccaggacgcacaccgagaa

SEQ ID NO: 2618059 - RNA, 19 nt, Artificial Sequence
  Description of Artificial Sequence: Synthetic oligonucleotide
ggauacgugggaucugcuu

SEQ ID NO: 2618060 - RNA, 19 nt, Artificial Sequence
  Description of Artificial Sequence: Synthetic oligonucleotide
gccgugcaggaccucccgc

SEQ ID NO: 2618061 - RNA, 19 nt, Artificial Sequence
  Description of Artificial Sequence: Synthetic oligonucleotide
accucccgcacugccucgu

SEQ ID NO: 2618062 - RNA, 19 nt, Artificial Sequence
  Description of Artificial Sequence: Synthetic oligonucleotide
ccggacauucugccaguuc

SEQ ID NO: 2618063 - RNA, 19 nt, Artificial Sequence
  Description of Artificial Sequence: Synthetic oligonucleotide
cuacggccuuggcuucguc

SEQ ID NO: 2618064 - RNA, 19 nt, Artificial Sequence
  Description of Artificial Sequence: Synthetic oligonucleotide
aggccgcgcgcaccggaaa

SEQ ID NO: 2618065 - RNA, 19 nt, Artificial Sequence
  Description of Artificial Sequence: Synthetic oligonucleotide
ccgugcaggaccucccgca

SEQ ID NO: 2618066 - RNA, 19 nt, Artificial Sequence
  Description of Artificial Sequence: Synthetic oligonucleotide
cauaguucuucaggcugau

SEQ ID NO: 2618067 - RNA, 19 nt, Artificial Sequence
  Description of Artificial Sequence: Synthetic oligonucleotide
gugcaggaccucccgcacu

SEQ ID NO: 2618068 - RNA, 19 nt, Artificial Sequence
  Description of Artificial Sequence: Synthetic oligonucleotide
caccgagaacuuggggcga

SEQ ID NO: 2618069 - RNA, 19 nt, Artificial Sequence
  Description of Artificial Sequence: Synthetic oligonucleotide
cugcggaggccgcgcgcac

SEQ ID NO: 2618070 - RNA, 19 nt, Artificial Sequence
  Description of Artificial Sequence: Synthetic oligonucleotide
ggggcgagggguggacuug

SEQ ID NO: 2618071 - RNA, 19 nt, Artificial Sequence
  Description of Artificial Sequence: Synthetic oligonucleotide
cccaggacgcacaccgaga

SEQ ID NO: 2618072 - RNA, 19 nt, Artificial Sequence
  Description of Artificial Sequence: Synthetic oligonucleotide
gaggccgcgcgcaccggaa

SEQ ID NO: 2618073 - RNA, 19 nt, Artificial Sequence
  Description of Artificial Sequence: Synthetic oligonucleotide
ugacugccagguggauguu

SEQ ID NO: 2618074 - RNA, 19 nt, Artificial Sequence
  Description of Artificial Sequence: Synthetic oligonucleotide
cgucauccgucaucuucac

SEQ ID NO: 2618075 - RNA, 19 nt, Artificial Sequence
  Description of Artificial Sequence: Synthetic oligonucleotide
ggaggccgcgcgcaccgga

SEQ ID NO: 2618076 - RNA, 19 nt, Artificial Sequence
  Description of Artificial Sequence: Synthetic oligonucleotide
gggcuugcccaugguacuc

SEQ ID NO: 2618077 - RNA, 19 nt, Artificial Sequence
  Description of Artificial Sequence: Synthetic oligonucleotide
acggugcccgagaaacguu

SEQ ID NO: 2618078 - RNA, 19 nt, Artificial Sequence
  Description of Artificial Sequence: Synthetic oligonucleotide
gggaacuugccugccuugu

SEQ ID NO: 2618079 - RNA, 19 nt, Artificial Sequence
  Description of Artificial Sequence: Synthetic oligonucleotide
gcaaggacaccaagaaauu

SEQ ID NO: 2618080 - RNA, 19 nt, Artificial Sequence
  Description of Artificial Sequence: Synthetic oligonucleotide
ccgcacugccucguacagg

SEQ ID NO: 2618081 - RNA, 19 nt, Artificial Sequence
  Description of Artificial Sequence: Synthetic oligonucleotide
cccaggauacgugggaucu

SEQ ID NO: 2618082 - RNA, 19 nt, Artificial Sequence
  Description of Artificial Sequence: Synthetic oligonucleotide
ccaugguacucuugaugua

SEQ ID NO: 2618083 - RNA, 19 nt, Artificial Sequence
  Description of Artificial Sequence: Synthetic oligonucleotide
cgggacacuuugcugcuca

SEQ ID NO: 2618084 - RNA, 19 nt, Artificial Sequence
  Description of Artificial Sequence: Synthetic oligonucleotide
cggcgcuugcgcugguugc

SEQ ID NO: 2618085 - RNA, 19 nt, Artificial Sequence
  Description of Artificial Sequence: Synthetic oligonucleotide
ggaacuugccugccuuguu

SEQ ID NO: 2618086 - RNA, 19 nt, Artificial Sequence
  Description of Artificial Sequence: Synthetic oligonucleotide
ggcgagggguggacuugag

SEQ ID NO: 2618087 - RNA, 19 nt, Artificial Sequence
  Description of Artificial Sequence: Synthetic oligonucleotide
uugcggcgcuugcgcuggu

SEQ ID NO: 2618088 - RNA, 19 nt, Artificial Sequence
  Description of Artificial Sequence: Synthetic oligonucleotide
acgcuggggcuugcccaug

SEQ ID NO: 2618089 - RNA, 19 nt, Artificial Sequence
  Description of Artificial Sequence: Synthetic oligonucleotide
gggcgagggguggacuuga

SEQ ID NO: 2618090 - RNA, 19 nt, Artificial Sequence
  Description of Artificial Sequence: Synthetic oligonucleotide
cgcagugcugcuggucccc

SEQ ID NO: 2618091 - RNA, 19 nt, Artificial Sequence
  Description of Artificial Sequence: Synthetic oligonucleotide
gcuucgucgcagugcugcu

SEQ ID NO: 2618092 - RNA, 19 nt, Artificial Sequence
  Description of Artificial Sequence: Synthetic oligonucleotide
gugcccuaguacagacgcu

SEQ ID NO: 2618093 - RNA, 19 nt, Artificial Sequence
  Description of Artificial Sequence: Synthetic oligonucleotide
ccgagaaacguuuguccuu

SEQ ID NO: 2618094 - RNA, 19 nt, Artificial Sequence
  Description of Artificial Sequence: Synthetic oligonucleotide
gcgccucgauguccaugug

SEQ ID NO: 2618095 - RNA, 19 nt, Artificial Sequence
  Description of Artificial Sequence: Synthetic oligonucleotide
cagggugucgcgggacacu

SEQ ID NO: 2618096 - RNA, 19 nt, Artificial Sequence
  Description of Artificial Sequence: Synthetic oligonucleotide
ccagacacagcaccuucuu

SEQ ID NO: 2618097 - RNA, 19 nt, Artificial Sequence
  Description of Artificial Sequence: Synthetic oligonucleotide
caucaacuuuggccaccau

SEQ ID NO: 2618098 - RNA, 19 nt, Artificial Sequence
  Description of Artificial Sequence: Synthetic oligonucleotide
cagggacucggaggccaaa

SEQ ID NO: 2618099 - RNA, 19 nt, Artificial Sequence
  Description of Artificial Sequence: Synthetic oligonucleotide
gggacacuuugcugcucau

SEQ ID NO: 2618100 - RNA, 19 nt, Artificial Sequence
  Description of Artificial Sequence: Synthetic oligonucleotide
ggcccaggauacgugggau

SEQ ID NO: 2618101 - RNA, 19 nt, Artificial Sequence
  Description of Artificial Sequence: Synthetic oligonucleotide
gccugggcccaggauacgu

SEQ ID NO: 2618102 - RNA, 19 nt, Artificial Sequence
  Description of Artificial Sequence: Synthetic oligonucleotide
cgucgcagugcugcugguc

SEQ ID NO: 2618103 - RNA, 19 nt, Artificial Sequence
  Description of Artificial Sequence: Synthetic oligonucleotide
cguggccaacagccacagc

SEQ ID NO: 2618104 - RNA, 19 nt, Artificial Sequence
  Description of Artificial Sequence: Synthetic oligonucleotide
gcccggacauucugccagu

SEQ ID NO: 2618105 - RNA, 19 nt, Artificial Sequence
  Description of Artificial Sequence: Synthetic oligonucleotide
ggacgcacaccgagaacuu

SEQ ID NO: 2618106 - RNA, 19 nt, Artificial Sequence
  Description of Artificial Sequence: Synthetic oligonucleotide
gcuugcccaugguacucuu

SEQ ID NO: 2618107 - RNA, 19 nt, Artificial Sequence
  Description of Artificial Sequence: Synthetic oligonucleotide
gcgggacacuuugcugcuc

SEQ ID NO: 2618108 - RNA, 19 nt, Artificial Sequence
  Description of Artificial Sequence: Synthetic oligonucleotide
gguugccgugcaggaccuc

SEQ ID NO: 2618109 - RNA, 19 nt, Artificial Sequence
  Description of Artificial Sequence: Synthetic oligonucleotide
cggugcccgagaaacguuu

SEQ ID NO: 2618110 - RNA, 19 nt, Artificial Sequence
  Description of Artificial Sequence: Synthetic oligonucleotide
cgcgggacacuuugcugcu

SEQ ID NO: 2618111 - RNA, 19 nt, Artificial Sequence
  Description of Artificial Sequence: Synthetic oligonucleotide
ccagaaacuugcggcgcuu

SEQ ID NO: 2618112 - RNA, 19 nt, Artificial Sequence
  Description of Artificial Sequence: Synthetic oligonucleotide
ccagcucgucauccgucau

SEQ ID NO: 2618113 - RNA, 19 nt, Artificial Sequence
  Description of Artificial Sequence: Synthetic oligonucleotide
gcucgucauccgucaucuu

SEQ ID NO: 2618114 - RNA, 19 nt, Artificial Sequence
  Description of Artificial Sequence: Synthetic oligonucleotide
cggaggccgcgcgcaccgg

SEQ ID NO: 2618115 - RNA, 19 nt, Artificial Sequence
  Description of Artificial Sequence: Synthetic oligonucleotide
gggugucgcgggacacuuu

SEQ ID NO: 2618116 - RNA, 19 nt, Artificial Sequence
  Description of Artificial Sequence: Synthetic oligonucleotide
cccggacauucugccaguu

SEQ ID NO: 2618117 - RNA, 19 nt, Artificial Sequence
  Description of Artificial Sequence: Synthetic oligonucleotide
aauacaaacuaucugucgc

SEQ ID NO: 2618118 - RNA, 19 nt, Artificial Sequence
  Description of Artificial Sequence: Synthetic oligonucleotide
aauacuaagaauuuucaug

SEQ ID NO: 2618119 - RNA, 19 nt, Artificial Sequence
  Description of Artificial Sequence: Synthetic oligonucleotide
cauguuuuaacuuaaauac

SEQ ID NO: 2618120 - RNA, 19 nt, Artificial Sequence
  Description of Artificial Sequence: Synthetic oligonucleotide
auacuaagaauuuucaugg

SEQ ID NO: 2618121 - RNA, 19 nt, Artificial Sequence
  Description of Artificial Sequence: Synthetic oligonucleotide
aauaaacucauguuuuaac

SEQ ID NO: 2618122 - RNA, 19 nt, Artificial Sequence
  Description of Artificial Sequence: Synthetic oligonucleotide
ucuauuaaacaaaacaaug

SEQ ID NO: 2618123 - RNA, 19 nt, Artificial Sequence
  Description of Artificial Sequence: Synthetic oligonucleotide
uuuauuuguagauacagac

SEQ ID NO: 2618124 - RNA, 19 nt, Artificial Sequence
  Description of Artificial Sequence: Synthetic oligonucleotide
gaucaaucaaaucugaggc

SEQ ID NO: 2618125 - RNA, 19 nt, Artificial Sequence
  Description of Artificial Sequence: Synthetic oligonucleotide
aacaaugauauccacaaga

SEQ ID NO: 2618126 - RNA, 19 nt, Artificial Sequence
  Description of Artificial Sequence: Synthetic oligonucleotide
auuuuaauuacucuggaca

SEQ ID NO: 2618127 - RNA, 19 nt, Artificial Sequence
  Description of Artificial Sequence: Synthetic oligonucleotide
aauuuuaauuacucuggac

SEQ ID NO: 2618128 - RNA, 19 nt, Artificial Sequence
  Description of Artificial Sequence: Synthetic oligonucleotide
ugauauuaaauauauacaa

SEQ ID NO: 2618129 - RNA, 19 nt, Artificial Sequence
  Description of Artificial Sequence: Synthetic oligonucleotide
aagagcacuaauuuguguc

SEQ ID NO: 2618130 - RNA, 19 nt, Artificial Sequence
  Description of Artificial Sequence: Synthetic oligonucleotide
aaauauccacaguaagucc

SEQ ID NO: 2618131 - RNA, 19 nt, Artificial Sequence
  Description of Artificial Sequence: Synthetic oligonucleotide
aaauguuucuauuaaacaa

SEQ ID NO: 2618132 - RNA, 19 nt, Artificial Sequence
  Description of Artificial Sequence: Synthetic oligonucleotide
uauuuguagauacagacuc

SEQ ID NO: 2618133 - RNA, 19 nt, Artificial Sequence
  Description of Artificial Sequence: Synthetic oligonucleotide
uguagauuucuuauuauug

SEQ ID NO: 2618134 - RNA, 19 nt, Artificial Sequence
  Description of Artificial Sequence: Synthetic oligonucleotide
uuuacauugaacaccuuug

SEQ ID NO: 2618135 - RNA, 19 nt, Artificial Sequence
  Description of Artificial Sequence: Synthetic oligonucleotide
uuucuuauuauugaguuug

SEQ ID NO: 2618136 - RNA, 19 nt, Artificial Sequence
  Description of Artificial Sequence: Synthetic oligonucleotide
uuuacuauccauauggaua

SEQ ID NO: 2618137 - RNA, 19 nt, Artificial Sequence
  Description of Artificial Sequence: Synthetic oligonucleotide
ugaacuuuauaaauuaaaa

SEQ ID NO: 2618138 - RNA, 19 nt, Artificial Sequence
  Description of Artificial Sequence: Synthetic oligonucleotide
acuggaaucucuucgaguc

SEQ ID NO: 2618139 - RNA, 19 nt, Artificial Sequence
  Description of Artificial Sequence: Synthetic oligonucleotide
ugaaguacuuuuacuaucc

SEQ ID NO: 2618140 - RNA, 19 nt, Artificial Sequence
  Description of Artificial Sequence: Synthetic oligonucleotide
ucugaauccaguugaagag

SEQ ID NO: 2618141 - RNA, 19 nt, Artificial Sequence
  Description of Artificial Sequence: Synthetic oligonucleotide
aacuuaaauacaaacuauc

SEQ ID NO: 2618142 - RNA, 19 nt, Artificial Sequence
  Description of Artificial Sequence: Synthetic oligonucleotide
acauugaacaccuuuggag

SEQ ID NO: 2618143 - RNA, 19 nt, Artificial Sequence
  Description of Artificial Sequence: Synthetic oligonucleotide
aacuaauuucucuugaaau

SEQ ID NO: 2618144 - RNA, 19 nt, Artificial Sequence
  Description of Artificial Sequence: Synthetic oligonucleotide
uuauuauugaguuugccau

SEQ ID NO: 2618145 - RNA, 19 nt, Artificial Sequence
  Description of Artificial Sequence: Synthetic oligonucleotide
uucagaugcaguaagagua

SEQ ID NO: 2618146 - RNA, 19 nt, Artificial Sequence
  Description of Artificial Sequence: Synthetic oligonucleotide
uuacauugaacaccuuugg

SEQ ID NO: 2618147 - RNA, 19 nt, Artificial Sequence
  Description of Artificial Sequence: Synthetic oligonucleotide
uuauuucagaugcaguaag

SEQ ID NO: 2618148 - RNA, 19 nt, Artificial Sequence
  Description of Artificial Sequence: Synthetic oligonucleotide
uuuuaauuacucuggacac

SEQ ID NO: 2618149 - RNA, 19 nt, Artificial Sequence
  Description of Artificial Sequence: Synthetic oligonucleotide
uacaaauauccacaguaag

SEQ ID NO: 2618150 - RNA, 19 nt, Artificial Sequence
  Description of Artificial Sequence: Synthetic oligonucleotide
gacacuuuagaaaauaaac

SEQ ID NO: 2618151 - RNA, 19 nt, Artificial Sequence
  Description of Artificial Sequence: Synthetic oligonucleotide
uuuaacuaauuucucuuga

SEQ ID NO: 2618152 - RNA, 19 nt, Artificial Sequence
  Description of Artificial Sequence: Synthetic oligonucleotide
uucuacuccauuuacugcc

SEQ ID NO: 2618153 - RNA, 19 nt, Artificial Sequence
  Description of Artificial Sequence: Synthetic oligonucleotide
auaaacucauguuuuaacu

SEQ ID NO: 2618154 - RNA, 19 nt, Artificial Sequence
  Description of Artificial Sequence: Synthetic oligonucleotide
uguagauacagacuccuac

SEQ ID NO: 2618155 - RNA, 19 nt, Artificial Sequence
  Description of Artificial Sequence: Synthetic oligonucleotide
cuuuggagagcgaauaggg

SEQ ID NO: 2618156 - RNA, 19 nt, Artificial Sequence
  Description of Artificial Sequence: Synthetic oligonucleotide
uucuauuaaacaaaacaau

SEQ ID NO: 2618157 - RNA, 19 nt, Artificial Sequence
  Description of Artificial Sequence: Synthetic oligonucleotide
uuucaucuguugcucaugg

SEQ ID NO: 2618158 - RNA, 19 nt, Artificial Sequence
  Description of Artificial Sequence: Synthetic oligonucleotide
auugaguuugccaugguac

SEQ ID NO: 2618159 - RNA, 19 nt, Artificial Sequence
  Description of Artificial Sequence: Synthetic oligonucleotide
uagauuucuuauuauugag

SEQ ID NO: 2618160 - RNA, 19 nt, Artificial Sequence
  Description of Artificial Sequence: Synthetic oligonucleotide
aaaacuggaaucucuucga

SEQ ID NO: 2618161 - RNA, 19 nt, Artificial Sequence
  Description of Artificial Sequence: Synthetic oligonucleotide
aagguugaacuuuauaaau

SEQ ID NO: 2618162 - RNA, 19 nt, Artificial Sequence
  Description of Artificial Sequence: Synthetic oligonucleotide
uucugaauccaguugaaga

SEQ ID NO: 2618163 - RNA, 19 nt, Artificial Sequence
  Description of Artificial Sequence: Synthetic oligonucleotide
ucucuugaaauacuaagaa

SEQ ID NO: 2618164 - RNA, 19 nt, Artificial Sequence
  Description of Artificial Sequence: Synthetic oligonucleotide
uucucuugaaauacuaaga

SEQ ID NO: 2618165 - RNA, 19 nt, Artificial Sequence
  Description of Artificial Sequence: Synthetic oligonucleotide
uugaacuuuauaaauuaaa

SEQ ID NO: 2618166 - RNA, 19 nt, Artificial Sequence
  Description of Artificial Sequence: Synthetic oligonucleotide
aaauacuaagaauuuucau

SEQ ID NO: 2618167 - RNA, 19 nt, Artificial Sequence
  Description of Artificial Sequence: Synthetic oligonucleotide
cuaucugucgcuuuauuug

SEQ ID NO: 2618168 - RNA, 19 nt, Artificial Sequence
  Description of Artificial Sequence: Synthetic oligonucleotide
ugcagaaacucaugcaagg

SEQ ID NO: 2618169 - RNA, 19 nt, Artificial Sequence
  Description of Artificial Sequence: Synthetic oligonucleotide
aaagcuggcuuccagagua

SEQ ID NO: 2618170 - RNA, 19 nt, Artificial Sequence
  Description of Artificial Sequence: Synthetic oligonucleotide
augaaguacuuuuacuauc

SEQ ID NO: 2618171 - RNA, 19 nt, Artificial Sequence
  Description of Artificial Sequence: Synthetic oligonucleotide
aacuguagagaucuucuga

SEQ ID NO: 2618172 - RNA, 19 nt, Artificial Sequence
  Description of Artificial Sequence: Synthetic oligonucleotide
uuacuauccauauggauau

SEQ ID NO: 2618173 - RNA, 19 nt, Artificial Sequence
  Description of Artificial Sequence: Synthetic oligonucleotide
ggaucaaucaaaucugagg

SEQ ID NO: 2618174 - RNA, 19 nt, Artificial Sequence
  Description of Artificial Sequence: Synthetic oligonucleotide
uuucucaugcauuucaaaa

SEQ ID NO: 2618175 - RNA, 19 nt, Artificial Sequence
  Description of Artificial Sequence: Synthetic oligonucleotide
guagagaucuucugaaucc

SEQ ID NO: 2618176 - RNA, 19 nt, Artificial Sequence
  Description of Artificial Sequence: Synthetic oligonucleotide
uguagagaucuucugaauc

SEQ ID NO: 2618177 - RNA, 19 nt, Artificial Sequence
  Description of Artificial Sequence: Synthetic oligonucleotide
uuuuacauugaacaccuuu

SEQ ID NO: 2618178 - RNA, 19 nt, Artificial Sequence
  Description of Artificial Sequence: Synthetic oligonucleotide
aauguuucuauuaaacaaa

SEQ ID NO: 2618179 - RNA, 19 nt, Artificial Sequence
  Description of Artificial Sequence: Synthetic oligonucleotide
auuauugaguuugccaugg

SEQ ID NO: 2618180 - RNA, 19 nt, Artificial Sequence
  Description of Artificial Sequence: Synthetic oligonucleotide
aaacucauguuuuaacuua

SEQ ID NO: 2618181 - RNA, 19 nt, Artificial Sequence
  Description of Artificial Sequence: Synthetic oligonucleotide
uaacuuaaauacaaacuau

SEQ ID NO: 2618182 - RNA, 19 nt, Artificial Sequence
  Description of Artificial Sequence: Synthetic oligonucleotide
aaguccaugaaguacuuuu

SEQ ID NO: 2618183 - RNA, 19 nt, Artificial Sequence
  Description of Artificial Sequence: Synthetic oligonucleotide
aagaauuuucaugggcugg

SEQ ID NO: 2618184 - RNA, 19 nt, Artificial Sequence
  Description of Artificial Sequence: Synthetic oligonucleotide
uauccauauggauauuuug

SEQ ID NO: 2618185 - RNA, 19 nt, Artificial Sequence
  Description of Artificial Sequence: Synthetic oligonucleotide
uaaagucacaggaucaauc

SEQ ID NO: 2618186 - RNA, 19 nt, Artificial Sequence
  Description of Artificial Sequence: Synthetic oligonucleotide
uaagaauuuucaugggcug

SEQ ID NO: 2618187 - RNA, 19 nt, Artificial Sequence
  Description of Artificial Sequence: Synthetic oligonucleotide
ugaauccaguugaagagca

SEQ ID NO: 2618188 - RNA, 19 nt, Artificial Sequence
  Description of Artificial Sequence: Synthetic oligonucleotide
uaacuaauuucucuugaaa

SEQ ID NO: 2618189 - RNA, 19 nt, Artificial Sequence
  Description of Artificial Sequence: Synthetic oligonucleotide
aaacuggaaucucuucgag

SEQ ID NO: 2618190 - RNA, 19 nt, Artificial Sequence
  Description of Artificial Sequence: Synthetic oligonucleotide
uauuauugaguuugccaug

SEQ ID NO: 2618191 - RNA, 19 nt, Artificial Sequence
  Description of Artificial Sequence: Synthetic oligonucleotide
guagauuucuuauuauuga

SEQ ID NO: 2618192 - RNA, 19 nt, Artificial Sequence
  Description of Artificial Sequence: Synthetic oligonucleotide
gguaccaaguuucucaugc

SEQ ID NO: 2618193 - RNA, 19 nt, Artificial Sequence
  Description of Artificial Sequence: Synthetic oligonucleotide
uuucagaugcaguaagagu

SEQ ID NO: 2618194 - RNA, 19 nt, Artificial Sequence
  Description of Artificial Sequence: Synthetic oligonucleotide
ucaucuguugcucauggua

SEQ ID NO: 2618195 - RNA, 19 nt, Artificial Sequence
  Description of Artificial Sequence: Synthetic oligonucleotide
aguaacuguagagaucuuc

SEQ ID NO: 2618196 - RNA, 19 nt, Artificial Sequence
  Description of Artificial Sequence: Synthetic oligonucleotide
aauuacucuggacacuuua

SEQ ID NO: 2618197 - RNA, 19 nt, Artificial Sequence
  Description of Artificial Sequence: Synthetic oligonucleotide
gaagguugaacuuuauaaa

SEQ ID NO: 2618198 - RNA, 19 nt, Artificial Sequence
  Description of Artificial Sequence: Synthetic oligonucleotide
auuucagaugcaguaagag

SEQ ID NO: 2618199 - RNA, 19 nt, Artificial Sequence
  Description of Artificial Sequence: Synthetic oligonucleotide
acuuuaacuaauuucucuu

SEQ ID NO: 2618200 - RNA, 19 nt, Artificial Sequence
  Description of Artificial Sequence: Synthetic oligonucleotide
uuuuacuauccauauggau

SEQ ID NO: 2618201 - RNA, 19 nt, Artificial Sequence
  Description of Artificial Sequence: Synthetic oligonucleotide
uauuucagaugcaguaaga

SEQ ID NO: 2618202 - RNA, 19 nt, Artificial Sequence
  Description of Artificial Sequence: Synthetic oligonucleotide
ucgcuuuauuuguagauac

SEQ ID NO: 2618203 - RNA, 19 nt, Artificial Sequence
  Description of Artificial Sequence: Synthetic oligonucleotide
agaaacucaugcaaggaag

SEQ ID NO: 2618204 - RNA, 19 nt, Artificial Sequence
  Description of Artificial Sequence: Synthetic oligonucleotide
agagcaagagcacuaauuu

SEQ ID NO: 2618205 - RNA, 19 nt, Artificial Sequence
  Description of Artificial Sequence: Synthetic oligonucleotide
uugaguuugccaugguacc

SEQ ID NO: 2618206 - RNA, 19 nt, Artificial Sequence
  Description of Artificial Sequence: Synthetic oligonucleotide
ugaacaccuuuggagagcg

SEQ ID NO: 2618207 - RNA, 19 nt, Artificial Sequence
  Description of Artificial Sequence: Synthetic oligonucleotide
uacauugaacaccuuugga

SEQ ID NO: 2618208 - RNA, 19 nt, Artificial Sequence
  Description of Artificial Sequence: Synthetic oligonucleotide
acacuuuagaaaauaaacu

SEQ ID NO: 2618209 - RNA, 19 nt, Artificial Sequence
  Description of Artificial Sequence: Synthetic oligonucleotide
aaguacuuuuacuauccau

SEQ ID NO: 2618210 - RNA, 19 nt, Artificial Sequence
  Description of Artificial Sequence: Synthetic oligonucleotide
uaaacucauguuuuaacuu

SEQ ID NO: 2618211 - RNA, 19 nt, Artificial Sequence
  Description of Artificial Sequence: Synthetic oligonucleotide
uuuguagauacagacuccu

SEQ ID NO: 2618212 - RNA, 19 nt, Artificial Sequence
  Description of Artificial Sequence: Synthetic oligonucleotide
aguaaguccaugaaguacu

SEQ ID NO: 2618213 - RNA, 19 nt, Artificial Sequence
  Description of Artificial Sequence: Synthetic oligonucleotide
aauuugugucaugagauuu

SEQ ID NO: 2618214 - RNA, 19 nt, Artificial Sequence
  Description of Artificial Sequence: Synthetic oligonucleotide
uuacucuggacacuuuaga

SEQ ID NO: 2618215 - RNA, 19 nt, Artificial Sequence
  Description of Artificial Sequence: Synthetic oligonucleotide
ucugucgcuuuauuuguag

SEQ ID NO: 2618216 - RNA, 19 nt, Artificial Sequence
  Description of Artificial Sequence: Synthetic oligonucleotide
uuucuacuccauuuacugc

SEQ ID NO: 2618217 - RNA, 19 nt, Artificial Sequence
  Description of Artificial Sequence: Synthetic oligonucleotide
auuuguagauacagacucc

SEQ ID NO: 2618218 - RNA, 19 nt, Artificial Sequence
  Description of Artificial Sequence: Synthetic oligonucleotide
ugaggcaagccuuucuuca

SEQ ID NO: 2618219 - RNA, 19 nt, Artificial Sequence
  Description of Artificial Sequence: Synthetic oligonucleotide
ggaagguugaacuuuauaa

SEQ ID NO: 2618220 - RNA, 19 nt, Artificial Sequence
  Description of Artificial Sequence: Synthetic oligonucleotide
uguuucuauuaaacaaaac

SEQ ID NO: 2618221 - RNA, 19 nt, Artificial Sequence
  Description of Artificial Sequence: Synthetic oligonucleotide
uccacaagaagcugcagaa

SEQ ID NO: 2618222 - RNA, 19 nt, Artificial Sequence
  Description of Artificial Sequence: Synthetic oligonucleotide
uuuauuucagaugcaguaa

SEQ ID NO: 2618223 - RNA, 19 nt, Artificial Sequence
  Description of Artificial Sequence: Synthetic oligonucleotide
gauacagacuccuacaaau

SEQ ID NO: 2618224 - RNA, 19 nt, Artificial Sequence
  Description of Artificial Sequence: Synthetic oligonucleotide
augcaaggaagguugaacu

SEQ ID NO: 2618225 - RNA, 19 nt, Artificial Sequence
  Description of Artificial Sequence: Synthetic oligonucleotide
ugcaguaagaguacucaaa

SEQ ID NO: 2618226 - RNA, 19 nt, Artificial Sequence
  Description of Artificial Sequence: Synthetic oligonucleotide
caugguaccaaguuucuca

SEQ ID NO: 2618227 - RNA, 19 nt, Artificial Sequence
  Description of Artificial Sequence: Synthetic oligonucleotide
gugaucuccaacgugacug

SEQ ID NO: 2618228 - RNA, 19 nt, Artificial Sequence
  Description of Artificial Sequence: Synthetic oligonucleotide
ugccaugguaccaaguuuc

SEQ ID NO: 2618229 - RNA, 19 nt, Artificial Sequence
  Description of Artificial Sequence: Synthetic oligonucleotide
uccagaguaacuguagaga

SEQ ID NO: 2618230 - RNA, 19 nt, Artificial Sequence
  Description of Artificial Sequence: Synthetic oligonucleotide
acaaauauccacaguaagu

SEQ ID NO: 2618231 - RNA, 19 nt, Artificial Sequence
  Description of Artificial Sequence: Synthetic oligonucleotide
cauugaacaccuuuggaga

SEQ ID NO: 2618232 - RNA, 19 nt, Artificial Sequence
  Description of Artificial Sequence: Synthetic oligonucleotide
cacaggaucaaucaaaucu

SEQ ID NO: 2618233 - RNA, 19 nt, Artificial Sequence
  Description of Artificial Sequence: Synthetic oligonucleotide
uuuggagagcgaauaggga

SEQ ID NO: 2618234 - RNA, 19 nt, Artificial Sequence
  Description of Artificial Sequence: Synthetic oligonucleotide
acuguagagaucuucugaa

SEQ ID NO: 2618235 - RNA, 19 nt, Artificial Sequence
  Description of Artificial Sequence: Synthetic oligonucleotide
aacuggaaucucuucgagu

SEQ ID NO: 2618236 - RNA, 19 nt, Artificial Sequence
  Description of Artificial Sequence: Synthetic oligonucleotide
ucuccaacgugacuguaga

SEQ ID NO: 2618237 - RNA, 19 nt, Artificial Sequence
  Description of Artificial Sequence: Synthetic oligonucleotide
uccaugaaguacuuuuacu

SEQ ID NO: 2618238 - RNA, 19 nt, Artificial Sequence
  Description of Artificial Sequence: Synthetic oligonucleotide
ucagaugcaguaagaguac

SEQ ID NO: 2618239 - RNA, 19 nt, Artificial Sequence
  Description of Artificial Sequence: Synthetic oligonucleotide
uucaucagaugagaggggc

SEQ ID NO: 2618240 - RNA, 19 nt, Artificial Sequence
  Description of Artificial Sequence: Synthetic oligonucleotide
auacaaacuaucugucgcu

SEQ ID NO: 2618241 - RNA, 19 nt, Artificial Sequence
  Description of Artificial Sequence: Synthetic oligonucleotide
uagauacagacuccuacaa

SEQ ID NO: 2618242 - RNA, 19 nt, Artificial Sequence
  Description of Artificial Sequence: Synthetic oligonucleotide
uaucugucgcuuuauuugu

SEQ ID NO: 2618243 - RNA, 19 nt, Artificial Sequence
  Description of Artificial Sequence: Synthetic oligonucleotide
agcaagagcacuaauuugu

SEQ ID NO: 2618244 - RNA, 19 nt, Artificial Sequence
  Description of Artificial Sequence: Synthetic oligonucleotide
uggauauuuugauauuaaa

SEQ ID NO: 2618245 - RNA, 19 nt, Artificial Sequence
  Description of Artificial Sequence: Synthetic oligonucleotide
gauuucuuauuauugaguu

SEQ ID NO: 2618246 - RNA, 19 nt, Artificial Sequence
  Description of Artificial Sequence: Synthetic oligonucleotide
uauggauauuuugauauua

SEQ ID NO: 2618247 - RNA, 19 nt, Artificial Sequence
  Description of Artificial Sequence: Synthetic oligonucleotide
uggagagcgaauagggaga

SEQ ID NO: 2618248 - RNA, 19 nt, Artificial Sequence
  Description of Artificial Sequence: Synthetic oligonucleotide
caaugauauccacaagaag

SEQ ID NO: 2618249 - RNA, 19 nt, Artificial Sequence
  Description of Artificial Sequence: Synthetic oligonucleotide
ucuuauuauugaguuugcc

SEQ ID NO: 2618250 - RNA, 19 nt, Artificial Sequence
  Description of Artificial Sequence: Synthetic oligonucleotide
gaugcaguaagaguacuca

SEQ ID NO: 2618251 - RNA, 19 nt, Artificial Sequence
  Description of Artificial Sequence: Synthetic oligonucleotide
uacuuuuacuauccauaug

SEQ ID NO: 2618252 - RNA, 19 nt, Artificial Sequence
  Description of Artificial Sequence: Synthetic oligonucleotide
uucuuauuauugaguuugc

SEQ ID NO: 2618253 - RNA, 19 nt, Artificial Sequence
  Description of Artificial Sequence: Synthetic oligonucleotide
acucaugcaaggaagguug

SEQ ID NO: 2618254 - RNA, 19 nt, Artificial Sequence
  Description of Artificial Sequence: Synthetic oligonucleotide
agagcacuaauuuguguca

SEQ ID NO: 2618255 - RNA, 19 nt, Artificial Sequence
  Description of Artificial Sequence: Synthetic oligonucleotide
uauugaguuugccauggua

SEQ ID NO: 2618256 - RNA, 19 nt, Artificial Sequence
  Description of Artificial Sequence: Synthetic oligonucleotide
uuaauuacucuggacacuu

SEQ ID NO: 2618257 - RNA, 19 nt, Artificial Sequence
  Description of Artificial Sequence: Synthetic oligonucleotide
auuuucaugggcuggugau

SEQ ID NO: 2618258 - RNA, 19 nt, Artificial Sequence
  Description of Artificial Sequence: Synthetic oligonucleotide
aguacuuuuacuauccaua

SEQ ID NO: 2618259 - RNA, 19 nt, Artificial Sequence
  Description of Artificial Sequence: Synthetic oligonucleotide
uacucuggacacuuuagaa

SEQ ID NO: 2618260 - RNA, 19 nt, Artificial Sequence
  Description of Artificial Sequence: Synthetic oligonucleotide
uguugcucaugguaaacuc

SEQ ID NO: 2618261 - RNA, 19 nt, Artificial Sequence
  Description of Artificial Sequence: Synthetic oligonucleotide
uuuaauuacucuggacacu

SEQ ID NO: 2618262 - RNA, 19 nt, Artificial Sequence
  Description of Artificial Sequence: Synthetic oligonucleotide
guagauacagacuccuaca

SEQ ID NO: 2618263 - RNA, 19 nt, Artificial Sequence
  Description of Artificial Sequence: Synthetic oligonucleotide
gagcaagagcacuaauuug

SEQ ID NO: 2618264 - RNA, 19 nt, Artificial Sequence
  Description of Artificial Sequence: Synthetic oligonucleotide
uaacuguagagaucuucug

SEQ ID NO: 2618265 - RNA, 19 nt, Artificial Sequence
  Description of Artificial Sequence: Synthetic oligonucleotide
aacgugacuguagauuucu

SEQ ID NO: 2618266 - RNA, 19 nt, Artificial Sequence
  Description of Artificial Sequence: Synthetic oligonucleotide
uggacacuuuagaaaauaa

SEQ ID NO: 2618267 - RNA, 19 nt, Artificial Sequence
  Description of Artificial Sequence: Synthetic oligonucleotide
aucucuucgaguccccgag

SEQ ID NO: 2618268 - RNA, 19 nt, Artificial Sequence
  Description of Artificial Sequence: Synthetic oligonucleotide
cuaagaauuuucaugggcu

SEQ ID NO: 2618269 - RNA, 19 nt, Artificial Sequence
  Description of Artificial Sequence: Synthetic oligonucleotide
augauauccacaagaagcu

SEQ ID NO: 2618270 - RNA, 19 nt, Artificial Sequence
  Description of Artificial Sequence: Synthetic oligonucleotide
gacaacggggugucuaaag

SEQ ID NO: 2618271 - RNA, 19 nt, Artificial Sequence
  Description of Artificial Sequence: Synthetic oligonucleotide
uugaagagcaagagcacua

SEQ ID NO: 2618272 - RNA, 19 nt, Artificial Sequence
  Description of Artificial Sequence: Synthetic oligonucleotide
ugucgcuuuauuuguagau

SEQ ID NO: 2618273 - RNA, 19 nt, Artificial Sequence
  Description of Artificial Sequence: Synthetic oligonucleotide
aauuucucuugaaauacua

SEQ ID NO: 2618274 - RNA, 19 nt, Artificial Sequence
  Description of Artificial Sequence: Synthetic oligonucleotide
gacuguagauuucuuauua

SEQ ID NO: 2618275 - RNA, 19 nt, Artificial Sequence
  Description of Artificial Sequence: Synthetic oligonucleotide
aaaagcuggcuuccagagu

SEQ ID NO: 2618276 - RNA, 19 nt, Artificial Sequence
  Description of Artificial Sequence: Synthetic oligonucleotide
ugcuuucuacuccauuuac

SEQ ID NO: 2618277 - RNA, 19 nt, Artificial Sequence
  Description of Artificial Sequence: Synthetic oligonucleotide
aaucucuucgaguccccga

SEQ ID NO: 2618278 - RNA, 19 nt, Artificial Sequence
  Description of Artificial Sequence: Synthetic oligonucleotide
cuaauuugugucaugagau

SEQ ID NO: 2618279 - RNA, 19 nt, Artificial Sequence
  Description of Artificial Sequence: Synthetic oligonucleotide
ucuaaagucacaggaucaa

SEQ ID NO: 2618280 - RNA, 19 nt, Artificial Sequence
  Description of Artificial Sequence: Synthetic oligonucleotide
agaggggcuugcuuucuac

SEQ ID NO: 2618281 - RNA, 19 nt, Artificial Sequence
  Description of Artificial Sequence: Synthetic oligonucleotide
aacaccuuuggagagcgaa

SEQ ID NO: 2618282 - RNA, 19 nt, Artificial Sequence
  Description of Artificial Sequence: Synthetic oligonucleotide
aagccuuucuucaucagau

SEQ ID NO: 2618283 - RNA, 19 nt, Artificial Sequence
  Description of Artificial Sequence: Synthetic oligonucleotide
acuaucugucgcuuuauuu

SEQ ID NO: 2618284 - RNA, 19 nt, Artificial Sequence
  Description of Artificial Sequence: Synthetic oligonucleotide
cugcagaaacucaugcaag

SEQ ID NO: 2618285 - RNA, 19 nt, Artificial Sequence
  Description of Artificial Sequence: Synthetic oligonucleotide
aacggggugucuaaaguca

SEQ ID NO: 2618286 - RNA, 19 nt, Artificial Sequence
  Description of Artificial Sequence: Synthetic oligonucleotide
cucuggacacuuuagaaaa

SEQ ID NO: 2618287 - RNA, 19 nt, Artificial Sequence
  Description of Artificial Sequence: Synthetic oligonucleotide
aggggcuugcuuucuacuc

SEQ ID NO: 2618288 - RNA, 19 nt, Artificial Sequence
  Description of Artificial Sequence: Synthetic oligonucleotide
agauuucuuauuauugagu

SEQ ID NO: 2618289 - RNA, 19 nt, Artificial Sequence
  Description of Artificial Sequence: Synthetic oligonucleotide
acaacggggugucuaaagu

SEQ ID NO: 2618290 - RNA, 19 nt, Artificial Sequence
  Description of Artificial Sequence: Synthetic oligonucleotide
auuacucuggacacuuuag

SEQ ID NO: 2618291 - RNA, 19 nt, Artificial Sequence
  Description of Artificial Sequence: Synthetic oligonucleotide
cuggcuuccagaguaacug

SEQ ID NO: 2618292 - RNA, 19 nt, Artificial Sequence
  Description of Artificial Sequence: Synthetic oligonucleotide
aguugaagagcaagagcac

SEQ ID NO: 2618293 - RNA, 19 nt, Artificial Sequence
  Description of Artificial Sequence: Synthetic oligonucleotide
aaacucaugcaaggaaggu

SEQ ID NO: 2618294 - RNA, 19 nt, Artificial Sequence
  Description of Artificial Sequence: Synthetic oligonucleotide
aagucacaggaucaaucaa

SEQ ID NO: 2618295 - RNA, 19 nt, Artificial Sequence
  Description of Artificial Sequence: Synthetic oligonucleotide
ucuacuccauuuacugccu

SEQ ID NO: 2618296 - RNA, 19 nt, Artificial Sequence
  Description of Artificial Sequence: Synthetic oligonucleotide
uaccaaguuucucaugcau

SEQ ID NO: 2618297 - RNA, 19 nt, Artificial Sequence
  Description of Artificial Sequence: Synthetic oligonucleotide
cuggugaucuccaacguga

SEQ ID NO: 2618298 - RNA, 19 nt, Artificial Sequence
  Description of Artificial Sequence: Synthetic oligonucleotide
cuucaucagaugagagggg

SEQ ID NO: 2618299 - RNA, 19 nt, Artificial Sequence
  Description of Artificial Sequence: Synthetic oligonucleotide
acuguagauuucuuauuau

SEQ ID NO: 2618300 - RNA, 19 nt, Artificial Sequence
  Description of Artificial Sequence: Synthetic oligonucleotide
uuuuagacaacgggguguc

SEQ ID NO: 2618301 - RNA, 19 nt, Artificial Sequence
  Description of Artificial Sequence: Synthetic oligonucleotide
caugcaaggaagguugaac

SEQ ID NO: 2618302 - RNA, 19 nt, Artificial Sequence
  Description of Artificial Sequence: Synthetic oligonucleotide
uugaaauacuaagaauuuu

SEQ ID NO: 2618303 - RNA, 19 nt, Artificial Sequence
  Description of Artificial Sequence: Synthetic oligonucleotide
ucaucagaugagaggggcu

SEQ ID NO: 2618304 - RNA, 19 nt, Artificial Sequence
  Description of Artificial Sequence: Synthetic oligonucleotide
agagcgaauagggagaguu

SEQ ID NO: 2618305 - RNA, 19 nt, Artificial Sequence
  Description of Artificial Sequence: Synthetic oligonucleotide
caaucaaaucugaggcaag

SEQ ID NO: 2618306 - RNA, 19 nt, Artificial Sequence
  Description of Artificial Sequence: Synthetic oligonucleotide
aguccccgagauuucaucu

SEQ ID NO: 2618307 - RNA, 19 nt, Artificial Sequence
  Description of Artificial Sequence: Synthetic oligonucleotide
gguugaacuuuauaaauua

SEQ ID NO: 2618308 - RNA, 19 nt, Artificial Sequence
  Description of Artificial Sequence: Synthetic oligonucleotide
accuuuggagagcgaauag

SEQ ID NO: 2618309 - RNA, 19 nt, Artificial Sequence
  Description of Artificial Sequence: Synthetic oligonucleotide
caguaaguccaugaaguac

SEQ ID NO: 2618310 - RNA, 19 nt, Artificial Sequence
  Description of Artificial Sequence: Synthetic oligonucleotide
agaauuuucaugggcuggu

SEQ ID NO: 2618311 - RNA, 19 nt, Artificial Sequence
  Description of Artificial Sequence: Synthetic oligonucleotide
cuacaaauauccacaguaa

SEQ ID NO: 2618312 - RNA, 19 nt, Artificial Sequence
  Description of Artificial Sequence: Synthetic oligonucleotide
uccuacaaauauccacagu

SEQ ID NO: 2618313 - RNA, 19 nt, Artificial Sequence
  Description of Artificial Sequence: Synthetic oligonucleotide
ccauuuacugccuucucag

SEQ ID NO: 2618314 - RNA, 19 nt, Artificial Sequence
  Description of Artificial Sequence: Synthetic oligonucleotide
uugcuuucuacuccauuua

SEQ ID NO: 2618315 - RNA, 19 nt, Artificial Sequence
  Description of Artificial Sequence: Synthetic oligonucleotide
caguaagaguacucaaauc

SEQ ID NO: 2618316 - RNA, 19 nt, Artificial Sequence
  Description of Artificial Sequence: Synthetic oligonucleotide
guccaugaaguacuuuuac

SEQ ID NO: 2618317 - RNA, 19 nt, Artificial Sequence
  Description of Artificial Sequence: Synthetic oligonucleotide
uccaacgugacuguagauu

SEQ ID NO: 2618318 - RNA, 19 nt, Artificial Sequence
  Description of Artificial Sequence: Synthetic oligonucleotide
cuuuuacuauccauaugga

SEQ ID NO: 2618319 - RNA, 19 nt, Artificial Sequence
  Description of Artificial Sequence: Synthetic oligonucleotide
aacucauguuuuaacuuaa

SEQ ID NO: 2618320 - RNA, 19 nt, Artificial Sequence
  Description of Artificial Sequence: Synthetic oligonucleotide
aggcaagccuuucuucauc

SEQ ID NO: 2618321 - RNA, 19 nt, Artificial Sequence
  Description of Artificial Sequence: Synthetic oligonucleotide
gaaguacuuuuacuaucca

SEQ ID NO: 2618322 - RNA, 19 nt, Artificial Sequence
  Description of Artificial Sequence: Synthetic oligonucleotide
gaaucucuucgaguccccg

SEQ ID NO: 2618323 - RNA, 19 nt, Artificial Sequence
  Description of Artificial Sequence: Synthetic oligonucleotide
uccccgagauuucaucugu

SEQ ID NO: 2618324 - RNA, 19 nt, Artificial Sequence
  Description of Artificial Sequence: Synthetic oligonucleotide
ucaugggcuggugaucucc

SEQ ID NO: 2618325 - RNA, 19 nt, Artificial Sequence
  Description of Artificial Sequence: Synthetic oligonucleotide
caacggggugucuaaaguc

SEQ ID NO: 2618326 - RNA, 19 nt, Artificial Sequence
  Description of Artificial Sequence: Synthetic oligonucleotide
ccuacaaauauccacagua

SEQ ID NO: 2618327 - RNA, 19 nt, Artificial Sequence
  Description of Artificial Sequence: Synthetic oligonucleotide
uuagacaacggggugucua

SEQ ID NO: 2618328 - RNA, 19 nt, Artificial Sequence
  Description of Artificial Sequence: Synthetic oligonucleotide
auauggauauuuugauauu

SEQ ID NO: 2618329 - RNA, 19 nt, Artificial Sequence
  Description of Artificial Sequence: Synthetic oligonucleotide
cuuucuucaucagaugaga

SEQ ID NO: 2618330 - RNA, 19 nt, Artificial Sequence
  Description of Artificial Sequence: Synthetic oligonucleotide
agcacuaauuugugucaug

SEQ ID NO: 2618331 - RNA, 19 nt, Artificial Sequence
  Description of Artificial Sequence: Synthetic oligonucleotide
ugaucuccaacgugacugu

SEQ ID NO: 2618332 - RNA, 19 nt, Artificial Sequence
  Description of Artificial Sequence: Synthetic oligonucleotide
cagaguaacuguagagauc

SEQ ID NO: 2618333 - RNA, 19 nt, Artificial Sequence
  Description of Artificial Sequence: Synthetic oligonucleotide
ucagaugagaggggcuugc

SEQ ID NO: 2618334 - RNA, 19 nt, Artificial Sequence
  Description of Artificial Sequence: Synthetic oligonucleotide
aacuaucugucgcuuuauu

SEQ ID NO: 2618335 - RNA, 19 nt, Artificial Sequence
  Description of Artificial Sequence: Synthetic oligonucleotide
caucuguugcucaugguaa

SEQ ID NO: 2618336 - RNA, 19 nt, Artificial Sequence
  Description of Artificial Sequence: Synthetic oligonucleotide
ugcaaggaagguugaacuu

SEQ ID NO: 2618337 - RNA, 19 nt, Artificial Sequence
  Description of Artificial Sequence: Synthetic oligonucleotide
agucacaggaucaaucaaa

SEQ ID NO: 2618338 - RNA, 19 nt, Artificial Sequence
  Description of Artificial Sequence: Synthetic oligonucleotide
aguuugccaugguaccaag

SEQ ID NO: 2618339 - RNA, 19 nt, Artificial Sequence
  Description of Artificial Sequence: Synthetic oligonucleotide
ugacuguagauuucuuauu

SEQ ID NO: 2618340 - RNA, 19 nt, Artificial Sequence
  Description of Artificial Sequence: Synthetic oligonucleotide
gaugagaggggcuugcuuu

SEQ ID NO: 2618341 - RNA, 19 nt, Artificial Sequence
  Description of Artificial Sequence: Synthetic oligonucleotide
aggaucaaucaaaucugag

SEQ ID NO: 2618342 - RNA, 19 nt, Artificial Sequence
  Description of Artificial Sequence: Synthetic oligonucleotide
ugaagagcaagagcacuaa

SEQ ID NO: 2618343 - RNA, 19 nt, Artificial Sequence
  Description of Artificial Sequence: Synthetic oligonucleotide
uagacaacggggugucuaa

SEQ ID NO: 2618344 - RNA, 19 nt, Artificial Sequence
  Description of Artificial Sequence: Synthetic oligonucleotide
aagaagcugcagaaacuca

SEQ ID NO: 2618345 - RNA, 19 nt, Artificial Sequence
  Description of Artificial Sequence: Synthetic oligonucleotide
uuauugaguuugccauggu

SEQ ID NO: 2618346 - RNA, 19 nt, Artificial Sequence
  Description of Artificial Sequence: Synthetic oligonucleotide
augguaccaaguuucucau

SEQ ID NO: 2618347 - RNA, 19 nt, Artificial Sequence
  Description of Artificial Sequence: Synthetic oligonucleotide
ucuggacacuuuagaaaau

SEQ ID NO: 2618348 - RNA, 19 nt, Artificial Sequence
  Description of Artificial Sequence: Synthetic oligonucleotide
cuucugaauccaguugaag

SEQ ID NO: 2618349 - RNA, 19 nt, Artificial Sequence
  Description of Artificial Sequence: Synthetic oligonucleotide
cuggaaucucuucgagucc

SEQ ID NO: 2618350 - RNA, 19 nt, Artificial Sequence
  Description of Artificial Sequence: Synthetic oligonucleotide
ugggcuggugaucuccaac

SEQ ID NO: 2618351 - RNA, 19 nt, Artificial Sequence
  Description of Artificial Sequence: Synthetic oligonucleotide
auauccacaagaagcugca

SEQ ID NO: 2618352 - RNA, 19 nt, Artificial Sequence
  Description of Artificial Sequence: Synthetic oligonucleotide
ucuguugcucaugguaaac

SEQ ID NO: 2618353 - RNA, 19 nt, Artificial Sequence
  Description of Artificial Sequence: Synthetic oligonucleotide
uugccaugguaccaaguuu

SEQ ID NO: 2618354 - RNA, 19 nt, Artificial Sequence
  Description of Artificial Sequence: Synthetic oligonucleotide
gucuaaagucacaggauca

SEQ ID NO: 2618355 - RNA, 19 nt, Artificial Sequence
  Description of Artificial Sequence: Synthetic oligonucleotide
acuauccauauggauauuu

SEQ ID NO: 2618356 - RNA, 19 nt, Artificial Sequence
  Description of Artificial Sequence: Synthetic oligonucleotide
ccuuucuucaucagaugag

SEQ ID NO: 2618357 - RNA, 19 nt, Artificial Sequence
  Description of Artificial Sequence: Synthetic oligonucleotide
ucacaggaucaaucaaauc

SEQ ID NO: 2618358 - RNA, 19 nt, Artificial Sequence
  Description of Artificial Sequence: Synthetic oligonucleotide
gaauuuucaugggcuggug

SEQ ID NO: 2618359 - RNA, 19 nt, Artificial Sequence
  Description of Artificial Sequence: Synthetic oligonucleotide
aaaucugaggcaagccuuu

SEQ ID NO: 2618360 - RNA, 19 nt, Artificial Sequence
  Description of Artificial Sequence: Synthetic oligonucleotide
gcugcagaaacucaugcaa

SEQ ID NO: 2618361 - RNA, 19 nt, Artificial Sequence
  Description of Artificial Sequence: Synthetic oligonucleotide
guaacuguagagaucuucu

SEQ ID NO: 2618362 - RNA, 19 nt, Artificial Sequence
  Description of Artificial Sequence: Synthetic oligonucleotide
uggugaucuccaacgugac

SEQ ID NO: 2618363 - RNA, 19 nt, Artificial Sequence
  Description of Artificial Sequence: Synthetic oligonucleotide
aggaagguugaacuuuaua

SEQ ID NO: 2618364 - RNA, 19 nt, Artificial Sequence
  Description of Artificial Sequence: Synthetic oligonucleotide
auggauauuuugauauuaa

SEQ ID NO: 2618365 - RNA, 19 nt, Artificial Sequence
  Description of Artificial Sequence: Synthetic oligonucleotide
aaacuaucugucgcuuuau

SEQ ID NO: 2618366 - RNA, 19 nt, Artificial Sequence
  Description of Artificial Sequence: Synthetic oligonucleotide
guacuuuuacuauccauau

SEQ ID NO: 2618367 - RNA, 19 nt, Artificial Sequence
  Description of Artificial Sequence: Synthetic oligonucleotide
augcaguaagaguacucaa

SEQ ID NO: 2618368 - RNA, 19 nt, Artificial Sequence
  Description of Artificial Sequence: Synthetic oligonucleotide
cagaaacucaugcaaggaa

SEQ ID NO: 2618369 - RNA, 19 nt, Artificial Sequence
  Description of Artificial Sequence: Synthetic oligonucleotide
ugguaaacucugagagccu

SEQ ID NO: 2618370 - RNA, 19 nt, Artificial Sequence
  Description of Artificial Sequence: Synthetic oligonucleotide
uuguagauacagacuccua

SEQ ID NO: 2618371 - RNA, 19 nt, Artificial Sequence
  Description of Artificial Sequence: Synthetic oligonucleotide
caagccuuucuucaucaga

SEQ ID NO: 2618372 - RNA, 19 nt, Artificial Sequence
  Description of Artificial Sequence: Synthetic oligonucleotide
agccuuucuucaucagaug

SEQ ID NO: 2618373 - RNA, 19 nt, Artificial Sequence
  Description of Artificial Sequence: Synthetic oligonucleotide
agcgaauagggagaguuuu

SEQ ID NO: 2618374 - RNA, 19 nt, Artificial Sequence
  Description of Artificial Sequence: Synthetic oligonucleotide
agguugaacuuuauaaauu

SEQ ID NO: 2618375 - RNA, 19 nt, Artificial Sequence
  Description of Artificial Sequence: Synthetic oligonucleotide
guugaacuuuauaaauuaa

SEQ ID NO: 2618376 - RNA, 19 nt, Artificial Sequence
  Description of Artificial Sequence: Synthetic oligonucleotide
ccgagauuucaucuguugc

SEQ ID NO: 2618377 - RNA, 19 nt, Artificial Sequence
  Description of Artificial Sequence: Synthetic oligonucleotide
acaaacuaucugucgcuuu

SEQ ID NO: 2618378 - RNA, 19 nt, Artificial Sequence
  Description of Artificial Sequence: Synthetic oligonucleotide
caaacuaucugucgcuuua

SEQ ID NO: 2618379 - RNA, 19 nt, Artificial Sequence
  Description of Artificial Sequence: Synthetic oligonucleotide
cuuccagaguaacuguaga

SEQ ID NO: 2618380 - RNA, 19 nt, Artificial Sequence
  Description of Artificial Sequence: Synthetic oligonucleotide
caugaaguacuuuuacuau

SEQ ID NO: 2618381 - RNA, 19 nt, Artificial Sequence
  Description of Artificial Sequence: Synthetic oligonucleotide
ggauauuuugauauuaaau

SEQ ID NO: 2618382 - RNA, 19 nt, Artificial Sequence
  Description of Artificial Sequence: Synthetic oligonucleotide
ucucuucgaguccccgaga

SEQ ID NO: 2618383 - RNA, 19 nt, Artificial Sequence
  Description of Artificial Sequence: Synthetic oligonucleotide
uauccacaagaagcugcag

SEQ ID NO: 2618384 - RNA, 19 nt, Artificial Sequence
  Description of Artificial Sequence: Synthetic oligonucleotide
uacaaacuaucugucgcuu

SEQ ID NO: 2618385 - RNA, 19 nt, Artificial Sequence
  Description of Artificial Sequence: Synthetic oligonucleotide
gaguccccgagauuucauc

SEQ ID NO: 2618386 - RNA, 19 nt, Artificial Sequence
  Description of Artificial Sequence: Synthetic oligonucleotide
ggggugucuaaagucacag

SEQ ID NO: 2618387 - RNA, 19 nt, Artificial Sequence
  Description of Artificial Sequence: Synthetic oligonucleotide
ccacaguaaguccaugaag

SEQ ID NO: 2618388 - RNA, 19 nt, Artificial Sequence
  Description of Artificial Sequence: Synthetic oligonucleotide
ccaugaaguacuuuuacua

SEQ ID NO: 2618389 - RNA, 19 nt, Artificial Sequence
  Description of Artificial Sequence: Synthetic oligonucleotide
gauuucaucuguugcucau

SEQ ID NO: 2618390 - RNA, 19 nt, Artificial Sequence
  Description of Artificial Sequence: Synthetic oligonucleotide
ccuuuggagagcgaauagg

SEQ ID NO: 2618391 - RNA, 19 nt, Artificial Sequence
  Description of Artificial Sequence: Synthetic oligonucleotide
guccccgagauuucaucug

SEQ ID NO: 2618392 - RNA, 19 nt, Artificial Sequence
  Description of Artificial Sequence: Synthetic oligonucleotide
agaugagaggggcuugcuu

SEQ ID NO: 2618393 - RNA, 19 nt, Artificial Sequence
  Description of Artificial Sequence: Synthetic oligonucleotide
uaauuacucuggacacuuu

SEQ ID NO: 2618394 - RNA, 19 nt, Artificial Sequence
  Description of Artificial Sequence: Synthetic oligonucleotide
gggugucuaaagucacagg

SEQ ID NO: 2618395 - RNA, 19 nt, Artificial Sequence
  Description of Artificial Sequence: Synthetic oligonucleotide
agcuggcuuccagaguaac

SEQ ID NO: 2618396 - RNA, 19 nt, Artificial Sequence
  Description of Artificial Sequence: Synthetic oligonucleotide
acggggugucuaaagucac

SEQ ID NO: 2618397 - RNA, 19 nt, Artificial Sequence
  Description of Artificial Sequence: Synthetic oligonucleotide
caaggaagguugaacuuua

SEQ ID NO: 2618398 - RNA, 19 nt, Artificial Sequence
  Description of Artificial Sequence: Synthetic oligonucleotide
guaccaaguuucucaugca

SEQ ID NO: 2618399 - RNA, 19 nt, Artificial Sequence
  Description of Artificial Sequence: Synthetic oligonucleotide
cucuugaaauacuaagaau

SEQ ID NO: 2618400 - RNA, 19 nt, Artificial Sequence
  Description of Artificial Sequence: Synthetic oligonucleotide
caacgugacuguagauuuc

SEQ ID NO: 2618401 - RNA, 19 nt, Artificial Sequence
  Description of Artificial Sequence: Synthetic oligonucleotide
cauuuacugccuucucaga

SEQ ID NO: 2618402 - RNA, 19 nt, Artificial Sequence
  Description of Artificial Sequence: Synthetic oligonucleotide
gcacuaauuugugucauga

SEQ ID NO: 2618403 - RNA, 19 nt, Artificial Sequence
  Description of Artificial Sequence: Synthetic oligonucleotide
uucgaguccccgagauuuc

SEQ ID NO: 2618404 - RNA, 19 nt, Artificial Sequence
  Description of Artificial Sequence: Synthetic oligonucleotide
ucaugcaaggaagguugaa

SEQ ID NO: 2618405 - RNA, 19 nt, Artificial Sequence
  Description of Artificial Sequence: Synthetic oligonucleotide
ucgaguccccgagauuuca

SEQ ID NO: 2618406 - RNA, 19 nt, Artificial Sequence
  Description of Artificial Sequence: Synthetic oligonucleotide
gcuuccagaguaacuguag

SEQ ID NO: 2618407 - RNA, 19 nt, Artificial Sequence
  Description of Artificial Sequence: Synthetic oligonucleotide
gcuggugaucuccaacgug

SEQ ID NO: 2618408 - RNA, 19 nt, Artificial Sequence
  Description of Artificial Sequence: Synthetic oligonucleotide
ucuucgaguccccgagauu

SEQ ID NO: 2618409 - RNA, 19 nt, Artificial Sequence
  Description of Artificial Sequence: Synthetic oligonucleotide
auacagacuccuacaaaua

SEQ ID NO: 2618410 - RNA, 19 nt, Artificial Sequence
  Description of Artificial Sequence: Synthetic oligonucleotide
cugucgcuuuauuuguaga

SEQ ID NO: 2618411 - RNA, 19 nt, Artificial Sequence
  Description of Artificial Sequence: Synthetic oligonucleotide
ggcaagccuuucuucauca

SEQ ID NO: 2618412 - RNA, 19 nt, Artificial Sequence
  Description of Artificial Sequence: Synthetic oligonucleotide
cuguagauuucuuauuauu

SEQ ID NO: 2618413 - RNA, 19 nt, Artificial Sequence
  Description of Artificial Sequence: Synthetic oligonucleotide
ggacacuuuagaaaauaaa

SEQ ID NO: 2618414 - RNA, 19 nt, Artificial Sequence
  Description of Artificial Sequence: Synthetic oligonucleotide
ggagagcgaauagggagag

SEQ ID NO: 2618415 - RNA, 19 nt, Artificial Sequence
  Description of Artificial Sequence: Synthetic oligonucleotide
gucgcuuuauuuguagaua

SEQ ID NO: 2618416 - RNA, 19 nt, Artificial Sequence
  Description of Artificial Sequence: Synthetic oligonucleotide
aguccaugaaguacuuuua

SEQ ID NO: 2618417 - RNA, 19 nt, Artificial Sequence
  Description of Artificial Sequence: Synthetic oligonucleotide
gcaguaagaguacucaaau

SEQ ID NO: 2618418 - RNA, 19 nt, Artificial Sequence
  Description of Artificial Sequence: Synthetic oligonucleotide
gcaagagcacuaauuugug

SEQ ID NO: 2618419 - RNA, 19 nt, Artificial Sequence
  Description of Artificial Sequence: Synthetic oligonucleotide
uuuagacaacggggugucu

SEQ ID NO: 2618420 - RNA, 19 nt, Artificial Sequence
  Description of Artificial Sequence: Synthetic oligonucleotide
guugcucaugguaaacucu

SEQ ID NO: 2618421 - RNA, 19 nt, Artificial Sequence
  Description of Artificial Sequence: Synthetic oligonucleotide
cuggacacuuuagaaaaua

SEQ ID NO: 2618422 - RNA, 19 nt, Artificial Sequence
  Description of Artificial Sequence: Synthetic oligonucleotide
uacugccuucucagaaaua

SEQ ID NO: 2618423 - RNA, 19 nt, Artificial Sequence
  Description of Artificial Sequence: Synthetic oligonucleotide
cuauccauauggauauuuu

SEQ ID NO: 2618424 - RNA, 19 nt, Artificial Sequence
  Description of Artificial Sequence: Synthetic oligonucleotide
cucaugcaaggaagguuga

SEQ ID NO: 2618425 - RNA, 19 nt, Artificial Sequence
  Description of Artificial Sequence: Synthetic oligonucleotide
aaggaagguugaacuuuau

SEQ ID NO: 2618426 - RNA, 19 nt, Artificial Sequence
  Description of Artificial Sequence: Synthetic oligonucleotide
cccgagauuucaucuguug

SEQ ID NO: 2618427 - RNA, 19 nt, Artificial Sequence
  Description of Artificial Sequence: Synthetic oligonucleotide
caagagcacuaauuugugu

SEQ ID NO: 2618428 - RNA, 19 nt, Artificial Sequence
  Description of Artificial Sequence: Synthetic oligonucleotide
gaagagcaagagcacuaau

SEQ ID NO: 2618429 - RNA, 19 nt, Artificial Sequence
  Description of Artificial Sequence: Synthetic oligonucleotide
cuucgaguccccgagauuu

SEQ ID NO: 2618430 - RNA, 19 nt, Artificial Sequence
  Description of Artificial Sequence: Synthetic oligonucleotide
caugggcuggugaucucca

SEQ ID NO: 2618431 - RNA, 19 nt, Artificial Sequence
  Description of Artificial Sequence: Synthetic oligonucleotide
acucauguuuuaacuuaaa

SEQ ID NO: 2618432 - RNA, 19 nt, Artificial Sequence
  Description of Artificial Sequence: Synthetic oligonucleotide
gucacaggaucaaucaaau

SEQ ID NO: 2618433 - RNA, 19 nt, Artificial Sequence
  Description of Artificial Sequence: Synthetic oligonucleotide
gcagaaacucaugcaagga

SEQ ID NO: 2618434 - RNA, 19 nt, Artificial Sequence
  Description of Artificial Sequence: Synthetic oligonucleotide
uucaugggcuggugaucuc

SEQ ID NO: 2618435 - RNA, 19 nt, Artificial Sequence
  Description of Artificial Sequence: Synthetic oligonucleotide
gaggggcuugcuuucuacu

SEQ ID NO: 2618436 - RNA, 19 nt, Artificial Sequence
  Description of Artificial Sequence: Synthetic oligonucleotide
gugucuaaagucacaggau

SEQ ID NO: 2618437 - RNA, 19 nt, Artificial Sequence
  Description of Artificial Sequence: Synthetic oligonucleotide
ccauauggauauuuugaua

SEQ ID NO: 2618438 - RNA, 19 nt, Artificial Sequence
  Description of Artificial Sequence: Synthetic oligonucleotide
ccagaguaacuguagagau

SEQ ID NO: 2618439 - RNA, 19 nt, Artificial Sequence
  Description of Artificial Sequence: Synthetic oligonucleotide
cuguagagaucuucugaau

SEQ ID NO: 2618440 - RNA, 19 nt, Artificial Sequence
  Description of Artificial Sequence: Synthetic oligonucleotide
cuguugcucaugguaaacu

SEQ ID NO: 2618441 - RNA, 19 nt, Artificial Sequence
  Description of Artificial Sequence: Synthetic oligonucleotide
ggaaucucuucgagucccc

SEQ ID NO: 2618442 - RNA, 19 nt, Artificial Sequence
  Description of Artificial Sequence: Synthetic oligonucleotide
augggcuggugaucuccaa

SEQ ID NO: 2618443 - RNA, 19 nt, Artificial Sequence
  Description of Artificial Sequence: Synthetic oligonucleotide
aagcuggcuuccagaguaa

SEQ ID NO: 2618444 - RNA, 19 nt, Artificial Sequence
  Description of Artificial Sequence: Synthetic oligonucleotide
gagaggggcuugcuuucua

SEQ ID NO: 2618445 - RNA, 19 nt, Artificial Sequence
  Description of Artificial Sequence: Synthetic oligonucleotide
gagcacuaauuugugucau

SEQ ID NO: 2618446 - RNA, 19 nt, Artificial Sequence
  Description of Artificial Sequence: Synthetic oligonucleotide
agacaacggggugucuaaa

SEQ ID NO: 2618447 - RNA, 19 nt, Artificial Sequence
  Description of Artificial Sequence: Synthetic oligonucleotide
cuaaagucacaggaucaau

SEQ ID NO: 2618448 - RNA, 19 nt, Artificial Sequence
  Description of Artificial Sequence: Synthetic oligonucleotide
cgagauuucaucuguugcu

SEQ ID NO: 2618449 - RNA, 19 nt, Artificial Sequence
  Description of Artificial Sequence: Synthetic oligonucleotide
uacuauccauauggauauu

SEQ ID NO: 2618450 - RNA, 19 nt, Artificial Sequence
  Description of Artificial Sequence: Synthetic oligonucleotide
cucuucgaguccccgagau

SEQ ID NO: 2618451 - RNA, 19 nt, Artificial Sequence
  Description of Artificial Sequence: Synthetic oligonucleotide
ccaacgugacuguagauuu

SEQ ID NO: 2618452 - RNA, 19 nt, Artificial Sequence
  Description of Artificial Sequence: Synthetic oligonucleotide
gaucuccaacgugacugua

SEQ ID NO: 2618453 - RNA, 19 nt, Artificial Sequence
  Description of Artificial Sequence: Synthetic oligonucleotide
caucagaugagaggggcuu

SEQ ID NO: 2618454 - RNA, 19 nt, Artificial Sequence
  Description of Artificial Sequence: Synthetic oligonucleotide
gcaaggaagguugaacuuu

SEQ ID NO: 2618455 - RNA, 19 nt, Artificial Sequence
  Description of Artificial Sequence: Synthetic oligonucleotide
ggugaucuccaacgugacu

SEQ ID NO: 2618456 - RNA, 19 nt, Artificial Sequence
  Description of Artificial Sequence: Synthetic oligonucleotide
gguaaacucugagagccuu

SEQ ID NO: 2618457 - RNA, 19 nt, Artificial Sequence
  Description of Artificial Sequence: Synthetic oligonucleotide
gaacaccuuuggagagcga

SEQ ID NO: 2618458 - RNA, 19 nt, Artificial Sequence
  Description of Artificial Sequence: Synthetic oligonucleotide
cagaugcaguaagaguacu

SEQ ID NO: 2618459 - RNA, 19 nt, Artificial Sequence
  Description of Artificial Sequence: Synthetic oligonucleotide
guaaguccaugaaguacuu

SEQ ID NO: 2618460 - RNA, 19 nt, Artificial Sequence
  Description of Artificial Sequence: Synthetic oligonucleotide
gagcgaauagggagaguuu

SEQ ID NO: 2618461 - RNA, 19 nt, Artificial Sequence
  Description of Artificial Sequence: Synthetic oligonucleotide
guaaacucugagagccuuu

SEQ ID NO: 2618462 - RNA, 19 nt, Artificial Sequence
  Description of Artificial Sequence: Synthetic oligonucleotide
ccaugguaccaaguuucuc

SEQ ID NO: 2618463 - RNA, 19 nt, Artificial Sequence
  Description of Artificial Sequence: Synthetic oligonucleotide
acgugacuguagauuucuu

SEQ ID NO: 2618464 - RNA, 19 nt, Artificial Sequence
  Description of Artificial Sequence: Synthetic oligonucleotide
cuccaacgugacuguagau

SEQ ID NO: 2618465 - RNA, 19 nt, Artificial Sequence
  Description of Artificial Sequence: Synthetic oligonucleotide
gagagcgaauagggagagu

SEQ ID NO: 2618466 - RNA, 19 nt, Artificial Sequence
  Description of Artificial Sequence: Synthetic oligonucleotide
cuacuccauuuacugccuu

SEQ ID NO: 2618467 - RNA, 19 nt, Artificial Sequence
  Description of Artificial Sequence: Synthetic oligonucleotide
gccaugguaccaaguuucu

SEQ ID NO: 2618468 - RNA, 19 nt, Artificial Sequence
  Description of Artificial Sequence: Synthetic oligonucleotide
gaguaacuguagagaucuu

SEQ ID NO: 2618469 - RNA, 19 nt, Artificial Sequence
  Description of Artificial Sequence: Synthetic oligonucleotide
cggggugucuaaagucaca

SEQ ID NO: 2618470 - RNA, 19 nt, Artificial Sequence
  Description of Artificial Sequence: Synthetic oligonucleotide
ccccgagauuucaucuguu

SEQ ID NO: 2618471 - RNA, 19 nt, Artificial Sequence
  Description of Artificial Sequence: Synthetic oligonucleotide
cgaguccccgagauuucau

SEQ ID NO: 2618472 - RNA, 19 nt, Artificial Sequence
  Description of Artificial Sequence: Synthetic oligonucleotide
agauagaaaacacucaggc

SEQ ID NO: 2618473 - RNA, 19 nt, Artificial Sequence
  Description of Artificial Sequence: Synthetic oligonucleotide
uaaaacuugggcaugaugc

SEQ ID NO: 2618474 - RNA, 19 nt, Artificial Sequence
  Description of Artificial Sequence: Synthetic oligonucleotide
uuuuaaguaagacagcuga

SEQ ID NO: 2618475 - RNA, 19 nt, Artificial Sequence
  Description of Artificial Sequence: Synthetic oligonucleotide
cacaauauaagugagagag

SEQ ID NO: 2618476 - RNA, 19 nt, Artificial Sequence
  Description of Artificial Sequence: Synthetic oligonucleotide
uucacuuucacaauauaag

SEQ ID NO: 2618477 - RNA, 19 nt, Artificial Sequence
  Description of Artificial Sequence: Synthetic oligonucleotide
auauaagugagagagcugc

SEQ ID NO: 2618478 - RNA, 19 nt, Artificial Sequence
  Description of Artificial Sequence: Synthetic oligonucleotide
uugcuugugaugcagauag

SEQ ID NO: 2618479 - RNA, 19 nt, Artificial Sequence
  Description of Artificial Sequence: Synthetic oligonucleotide
acuuucacaauauaaguga

SEQ ID NO: 2618480 - RNA, 19 nt, Artificial Sequence
  Description of Artificial Sequence: Synthetic oligonucleotide
uguguuuucgaccacugca

SEQ ID NO: 2618481 - RNA, 19 nt, Artificial Sequence
  Description of Artificial Sequence: Synthetic oligonucleotide
acaguagucacaguaaaac

SEQ ID NO: 2618482 - RNA, 19 nt, Artificial Sequence
  Description of Artificial Sequence: Synthetic oligonucleotide
uaaguaagacagcugacca

SEQ ID NO: 2618483 - RNA, 19 nt, Artificial Sequence
  Description of Artificial Sequence: Synthetic oligonucleotide
ucacaguaaaacuugggca

SEQ ID NO: 2618484 - RNA, 19 nt, Artificial Sequence
  Description of Artificial Sequence: Synthetic oligonucleotide
uuaaguaagacagcugacc

SEQ ID NO: 2618485 - RNA, 19 nt, Artificial Sequence
  Description of Artificial Sequence: Synthetic oligonucleotide
aggagcaggucccacaggc

SEQ ID NO: 2618486 - RNA, 19 nt, Artificial Sequence
  Description of Artificial Sequence: Synthetic oligonucleotide
aaacacucaggcucagcac

SEQ ID NO: 2618487 - RNA, 19 nt, Artificial Sequence
  Description of Artificial Sequence: Synthetic oligonucleotide
uuugcucuuaucugucugg

SEQ ID NO: 2618488 - RNA, 19 nt, Artificial Sequence
  Description of Artificial Sequence: Synthetic oligonucleotide
aacuugggcaugaugcucc

SEQ ID NO: 2618489 - RNA, 19 nt, Artificial Sequence
  Description of Artificial Sequence: Synthetic oligonucleotide
guuguuuugucaaucaggc

SEQ ID NO: 2618490 - RNA, 19 nt, Artificial Sequence
  Description of Artificial Sequence: Synthetic oligonucleotide
ucauagggcgagcaggagg

SEQ ID NO: 2618491 - RNA, 19 nt, Artificial Sequence
  Description of Artificial Sequence: Synthetic oligonucleotide
auacaaaacugaaauagag

SEQ ID NO: 2618492 - RNA, 19 nt, Artificial Sequence
  Description of Artificial Sequence: Synthetic oligonucleotide
aaaacuugggcaugaugcu

SEQ ID NO: 2618493 - RNA, 19 nt, Artificial Sequence
  Description of Artificial Sequence: Synthetic oligonucleotide
gucacaguaaaacuugggc

SEQ ID NO: 2618494 - RNA, 19 nt, Artificial Sequence
  Description of Artificial Sequence: Synthetic oligonucleotide
guaguagucuuucacauuc

SEQ ID NO: 2618495 - RNA, 19 nt, Artificial Sequence
  Description of Artificial Sequence: Synthetic oligonucleotide
gaggucucaucauuggagg

SEQ ID NO: 2618496 - RNA, 19 nt, Artificial Sequence
  Description of Artificial Sequence: Synthetic oligonucleotide
ucuguagguaggaagggga

SEQ ID NO: 2618497 - RNA, 19 nt, Artificial Sequence
  Description of Artificial Sequence: Synthetic oligonucleotide
uuuccuuguugaaaugcag

SEQ ID NO: 2618498 - RNA, 19 nt, Artificial Sequence
  Description of Artificial Sequence: Synthetic oligonucleotide
ugucacaguagucacagua

SEQ ID NO: 2618499 - RNA, 19 nt, Artificial Sequence
  Description of Artificial Sequence: Synthetic oligonucleotide
uggugaaacaaaacaagaa

SEQ ID NO: 2618500 - RNA, 19 nt, Artificial Sequence
  Description of Artificial Sequence: Synthetic oligonucleotide
ugagguacgugucacagua

SEQ ID NO: 2618501 - RNA, 19 nt, Artificial Sequence
  Description of Artificial Sequence: Synthetic oligonucleotide
cacuuucacaauauaagug

SEQ ID NO: 2618502 - RNA, 19 nt, Artificial Sequence
  Description of Artificial Sequence: Synthetic oligonucleotide
agagucgugggugagguac

SEQ ID NO: 2618503 - RNA, 19 nt, Artificial Sequence
  Description of Artificial Sequence: Synthetic oligonucleotide
uagaaaacacucaggcuca

SEQ ID NO: 2618504 - RNA, 19 nt, Artificial Sequence
  Description of Artificial Sequence: Synthetic oligonucleotide
uuuaaguaagacagcugac

SEQ ID NO: 2618505 - RNA, 19 nt, Artificial Sequence
  Description of Artificial Sequence: Synthetic oligonucleotide
gaaggggaagccuugcuug

SEQ ID NO: 2618506 - RNA, 19 nt, Artificial Sequence
  Description of Artificial Sequence: Synthetic oligonucleotide
uuucacaauauaagugaga

SEQ ID NO: 2618507 - RNA, 19 nt, Artificial Sequence
  Description of Artificial Sequence: Synthetic oligonucleotide
uuuugcucuuaucugucug

SEQ ID NO: 2618508 - RNA, 19 nt, Artificial Sequence
  Description of Artificial Sequence: Synthetic oligonucleotide
uuuaaccccacuucucccc

SEQ ID NO: 2618509 - RNA, 19 nt, Artificial Sequence
  Description of Artificial Sequence: Synthetic oligonucleotide
uccuggugaaacaaaacaa

SEQ ID NO: 2618510 - RNA, 19 nt, Artificial Sequence
  Description of Artificial Sequence: Synthetic oligonucleotide
uggggugcaggcaucaugc

SEQ ID NO: 2618511 - RNA, 19 nt, Artificial Sequence
  Description of Artificial Sequence: Synthetic oligonucleotide
cagauagaaaacacucagg

SEQ ID NO: 2618512 - RNA, 19 nt, Artificial Sequence
  Description of Artificial Sequence: Synthetic oligonucleotide
aguagucuuucacauucuc

SEQ ID NO: 2618513 - RNA, 19 nt, Artificial Sequence
  Description of Artificial Sequence: Synthetic oligonucleotide
acaggcaucaucccaggag

SEQ ID NO: 2618514 - RNA, 19 nt, Artificial Sequence
  Description of Artificial Sequence: Synthetic oligonucleotide
aagacagcugaccauuuau

SEQ ID NO: 2618515 - RNA, 19 nt, Artificial Sequence
  Description of Artificial Sequence: Synthetic oligonucleotide
uagucacaguaaaacuugg

SEQ ID NO: 2618516 - RNA, 19 nt, Artificial Sequence
  Description of Artificial Sequence: Synthetic oligonucleotide
uuuguguuuucgaccacug

SEQ ID NO: 2618517 - RNA, 19 nt, Artificial Sequence
  Description of Artificial Sequence: Synthetic oligonucleotide
uaagugagagagcugcacu

SEQ ID NO: 2618518 - RNA, 19 nt, Artificial Sequence
  Description of Artificial Sequence: Synthetic oligonucleotide
agugggcaccaucauaggg

SEQ ID NO: 2618519 - RNA, 19 nt, Artificial Sequence
  Description of Artificial Sequence: Synthetic oligonucleotide
auaagugagagagcugcac

SEQ ID NO: 2618520 - RNA, 19 nt, Artificial Sequence
  Description of Artificial Sequence: Synthetic oligonucleotide
ugggcaccaucauagggcg

SEQ ID NO: 2618521 - RNA, 19 nt, Artificial Sequence
  Description of Artificial Sequence: Synthetic oligonucleotide
uuuuaaccccacuucuccc

SEQ ID NO: 2618522 - RNA, 19 nt, Artificial Sequence
  Description of Artificial Sequence: Synthetic oligonucleotide
gcucuuaucugucuggccg

SEQ ID NO: 2618523 - RNA, 19 nt, Artificial Sequence
  Description of Artificial Sequence: Synthetic oligonucleotide
aaugcagccguuguuuugu

SEQ ID NO: 2618524 - RNA, 19 nt, Artificial Sequence
  Description of Artificial Sequence: Synthetic oligonucleotide
caggcaucaucccaggagg

SEQ ID NO: 2618525 - RNA, 19 nt, Artificial Sequence
  Description of Artificial Sequence: Synthetic oligonucleotide
agucaugccaggccgagug

SEQ ID NO: 2618526 - RNA, 19 nt, Artificial Sequence
  Description of Artificial Sequence: Synthetic oligonucleotide
acaauauaagugagagagc

SEQ ID NO: 2618527 - RNA, 19 nt, Artificial Sequence
  Description of Artificial Sequence: Synthetic oligonucleotide
uuuucgaccacugcagugu

SEQ ID NO: 2618528 - RNA, 19 nt, Artificial Sequence
  Description of Artificial Sequence: Synthetic oligonucleotide
ugggcuugcucuuccaucc

SEQ ID NO: 2618529 - RNA, 19 nt, Artificial Sequence
  Description of Artificial Sequence: Synthetic oligonucleotide
cauuuauuuucacuuucac

SEQ ID NO: 2618530 - RNA, 19 nt, Artificial Sequence
  Description of Artificial Sequence: Synthetic oligonucleotide
guagucacaguaaaacuug

SEQ ID NO: 2618531 - RNA, 19 nt, Artificial Sequence
  Description of Artificial Sequence: Synthetic oligonucleotide
ucuuccucacagauggaga

SEQ ID NO: 2618532 - RNA, 19 nt, Artificial Sequence
  Description of Artificial Sequence: Synthetic oligonucleotide
gagcagagaauggagcugg

SEQ ID NO: 2618533 - RNA, 19 nt, Artificial Sequence
  Description of Artificial Sequence: Synthetic oligonucleotide
cauuccaggagcagguccc

SEQ ID NO: 2618534 - RNA, 19 nt, Artificial Sequence
  Description of Artificial Sequence: Synthetic oligonucleotide
ucaucggcaucaugggagg

SEQ ID NO: 2618535 - RNA, 19 nt, Artificial Sequence
  Description of Artificial Sequence: Synthetic oligonucleotide
ugucaaucaggcucugggc

SEQ ID NO: 2618536 - RNA, 19 nt, Artificial Sequence
  Description of Artificial Sequence: Synthetic oligonucleotide
caggcaucaugccagggcg

SEQ ID NO: 2618537 - RNA, 19 nt, Artificial Sequence
  Description of Artificial Sequence: Synthetic oligonucleotide
cagcugaccauuuauuuuc

SEQ ID NO: 2618538 - RNA, 19 nt, Artificial Sequence
  Description of Artificial Sequence: Synthetic oligonucleotide
aucaugggcaugugacccc

SEQ ID NO: 2618539 - RNA, 19 nt, Artificial Sequence
  Description of Artificial Sequence: Synthetic oligonucleotide
aucaucggcaucaugggag

SEQ ID NO: 2618540 - RNA, 19 nt, Artificial Sequence
  Description of Artificial Sequence: Synthetic oligonucleotide
ucacaguagucacaguaaa

SEQ ID NO: 2618541 - RNA, 19 nt, Artificial Sequence
  Description of Artificial Sequence: Synthetic oligonucleotide
guaaaacuugggcaugaug

SEQ ID NO: 2618542 - RNA, 19 nt, Artificial Sequence
  Description of Artificial Sequence: Synthetic oligonucleotide
ugguaguagucuuucacau

SEQ ID NO: 2618543 - RNA, 19 nt, Artificial Sequence
  Description of Artificial Sequence: Synthetic oligonucleotide
uauaagugagagagcugca

SEQ ID NO: 2618544 - RNA, 19 nt, Artificial Sequence
  Description of Artificial Sequence: Synthetic oligonucleotide
aaguaagacagcugaccau

SEQ ID NO: 2618545 - RNA, 19 nt, Artificial Sequence
  Description of Artificial Sequence: Synthetic oligonucleotide
uuauuuucacuuucacaau

SEQ ID NO: 2618546 - RNA, 19 nt, Artificial Sequence
  Description of Artificial Sequence: Synthetic oligonucleotide
caucaugggcaugugaccc

SEQ ID NO: 2618547 - RNA, 19 nt, Artificial Sequence
  Description of Artificial Sequence: Synthetic oligonucleotide
cucuuuguguuuucgacca

SEQ ID NO: 2618548 - RNA, 19 nt, Artificial Sequence
  Description of Artificial Sequence: Synthetic oligonucleotide
ucacaauauaagugagaga

SEQ ID NO: 2618549 - RNA, 19 nt, Artificial Sequence
  Description of Artificial Sequence: Synthetic oligonucleotide
ugaaaugcagccguuguuu

SEQ ID NO: 2618550 - RNA, 19 nt, Artificial Sequence
  Description of Artificial Sequence: Synthetic oligonucleotide
aguagucacaguaaaacuu

SEQ ID NO: 2618551 - RNA, 19 nt, Artificial Sequence
  Description of Artificial Sequence: Synthetic oligonucleotide
guagguaggaaggggaagc

SEQ ID NO: 2618552 - RNA, 19 nt, Artificial Sequence
  Description of Artificial Sequence: Synthetic oligonucleotide
uguugaaaugcagccguug

SEQ ID NO: 2618553 - RNA, 19 nt, Artificial Sequence
  Description of Artificial Sequence: Synthetic oligonucleotide
aggucucaucauuggaggg

SEQ ID NO: 2618554 - RNA, 19 nt, Artificial Sequence
  Description of Artificial Sequence: Synthetic oligonucleotide
ucauuggagggccuggcau

SEQ ID NO: 2618555 - RNA, 19 nt, Artificial Sequence
  Description of Artificial Sequence: Synthetic oligonucleotide
ucuccuggugaaacaaaac

SEQ ID NO: 2618556 - RNA, 19 nt, Artificial Sequence
  Description of Artificial Sequence: Synthetic oligonucleotide
ccuggugaaacaaaacaag

SEQ ID NO: 2618557 - RNA, 19 nt, Artificial Sequence
  Description of Artificial Sequence: Synthetic oligonucleotide
ucauggccccagcaggagg

SEQ ID NO: 2618558 - RNA, 19 nt, Artificial Sequence
  Description of Artificial Sequence: Synthetic oligonucleotide
ggaucauggccccagcagg

SEQ ID NO: 2618559 - RNA, 19 nt, Artificial Sequence
  Description of Artificial Sequence: Synthetic oligonucleotide
uguuuucgaccacugcagu

SEQ ID NO: 2618560 - RNA, 19 nt, Artificial Sequence
  Description of Artificial Sequence: Synthetic oligonucleotide
agguacgugucacaguagu

SEQ ID NO: 2618561 - RNA, 19 nt, Artificial Sequence
  Description of Artificial Sequence: Synthetic oligonucleotide
cuccuggugaaacaaaaca

SEQ ID NO: 2618562 - RNA, 19 nt, Artificial Sequence
  Description of Artificial Sequence: Synthetic oligonucleotide
uacgugucacaguagucac

SEQ ID NO: 2618563 - RNA, 19 nt, Artificial Sequence
  Description of Artificial Sequence: Synthetic oligonucleotide
guuuucgaccacugcagug

SEQ ID NO: 2618564 - RNA, 19 nt, Artificial Sequence
  Description of Artificial Sequence: Synthetic oligonucleotide
caauauaagugagagagcu

SEQ ID NO: 2618565 - RNA, 19 nt, Artificial Sequence
  Description of Artificial Sequence: Synthetic oligonucleotide
agcaccguaaucuccuggu

SEQ ID NO: 2618566 - RNA, 19 nt, Artificial Sequence
  Description of Artificial Sequence: Synthetic oligonucleotide
ucuggccgagucaugccag

SEQ ID NO: 2618567 - RNA, 19 nt, Artificial Sequence
  Description of Artificial Sequence: Synthetic oligonucleotide
uggguggccucauuccagg

SEQ ID NO: 2618568 - RNA, 19 nt, Artificial Sequence
  Description of Artificial Sequence: Synthetic oligonucleotide
guguuuucgaccacugcag

SEQ ID NO: 2618569 - RNA, 19 nt, Artificial Sequence
  Description of Artificial Sequence: Synthetic oligonucleotide
aguaagacagcugaccauu

SEQ ID NO: 2618570 - RNA, 19 nt, Artificial Sequence
  Description of Artificial Sequence: Synthetic oligonucleotide
uaaucuccuggugaaacaa

SEQ ID NO: 2618571 - RNA, 19 nt, Artificial Sequence
  Description of Artificial Sequence: Synthetic oligonucleotide
guggccucauuccaggagc

SEQ ID NO: 2618572 - RNA, 19 nt, Artificial Sequence
  Description of Artificial Sequence: Synthetic oligonucleotide
agucacaguaaaacuuggg

SEQ ID NO: 2618573 - RNA, 19 nt, Artificial Sequence
  Description of Artificial Sequence: Synthetic oligonucleotide
ugcagugugucuuccucac

SEQ ID NO: 2618574 - RNA, 19 nt, Artificial Sequence
  Description of Artificial Sequence: Synthetic oligonucleotide
guacgugucacaguaguca

SEQ ID NO: 2618575 - RNA, 19 nt, Artificial Sequence
  Description of Artificial Sequence: Synthetic oligonucleotide
uuaaccccacuucuccccu

SEQ ID NO: 2618576 - RNA, 19 nt, Artificial Sequence
  Description of Artificial Sequence: Synthetic oligonucleotide
gugggcaccaucauagggc

SEQ ID NO: 2618577 - RNA, 19 nt, Artificial Sequence
  Description of Artificial Sequence: Synthetic oligonucleotide
uucuccccucuguagguag

SEQ ID NO: 2618578 - RNA, 19 nt, Artificial Sequence
  Description of Artificial Sequence: Synthetic oligonucleotide
uuucgaccacugcagugug

SEQ ID NO: 2618579 - RNA, 19 nt, Artificial Sequence
  Description of Artificial Sequence: Synthetic oligonucleotide
cguuguuuugucaaucagg

SEQ ID NO: 2618580 - RNA, 19 nt, Artificial Sequence
  Description of Artificial Sequence: Synthetic oligonucleotide
accaucauagggcgagcag

SEQ ID NO: 2618581 - RNA, 19 nt, Artificial Sequence
  Description of Artificial Sequence: Synthetic oligonucleotide
aggcucagcaccguaaucu

SEQ ID NO: 2618582 - RNA, 19 nt, Artificial Sequence
  Description of Artificial Sequence: Synthetic oligonucleotide
uaucugucuggccgaguca

SEQ ID NO: 2618583 - RNA, 19 nt, Artificial Sequence
  Description of Artificial Sequence: Synthetic oligonucleotide
ucccauguggggugcaggc

SEQ ID NO: 2618584 - RNA, 19 nt, Artificial Sequence
  Description of Artificial Sequence: Synthetic oligonucleotide
accguaaucuccuggugaa

SEQ ID NO: 2618585 - RNA, 19 nt, Artificial Sequence
  Description of Artificial Sequence: Synthetic oligonucleotide
ucuccccucuguagguagg

SEQ ID NO: 2618586 - RNA, 19 nt, Artificial Sequence
  Description of Artificial Sequence: Synthetic oligonucleotide
cuuguugaaaugcagccgu

SEQ ID NO: 2618587 - RNA, 19 nt, Artificial Sequence
  Description of Artificial Sequence: Synthetic oligonucleotide
cccucuguagguaggaagg

SEQ ID NO: 2618588 - RNA, 19 nt, Artificial Sequence
  Description of Artificial Sequence: Synthetic oligonucleotide
cucuguagguaggaagggg

SEQ ID NO: 2618589 - RNA, 19 nt, Artificial Sequence
  Description of Artificial Sequence: Synthetic oligonucleotide
uaguagucuuucacauucu

SEQ ID NO: 2618590 - RNA, 19 nt, Artificial Sequence
  Description of Artificial Sequence: Synthetic oligonucleotide
ggugcaggcaucaugccag

SEQ ID NO: 2618591 - RNA, 19 nt, Artificial Sequence
  Description of Artificial Sequence: Synthetic oligonucleotide
auuuucacuuucacaauau

SEQ ID NO: 2618592 - RNA, 19 nt, Artificial Sequence
  Description of Artificial Sequence: Synthetic oligonucleotide
ggaggucucaucauuggag

SEQ ID NO: 2618593 - RNA, 19 nt, Artificial Sequence
  Description of Artificial Sequence: Synthetic oligonucleotide
guaaucuccuggugaaaca

SEQ ID NO: 2618594 - RNA, 19 nt, Artificial Sequence
  Description of Artificial Sequence: Synthetic oligonucleotide
uaagacagcugaccauuua

SEQ ID NO: 2618595 - RNA, 19 nt, Artificial Sequence
  Description of Artificial Sequence: Synthetic oligonucleotide
ucaaucaggcucugggcuu

SEQ ID NO: 2618596 - RNA, 19 nt, Artificial Sequence
  Description of Artificial Sequence: Synthetic oligonucleotide
ucaggcucagcaccguaau

SEQ ID NO: 2618597 - RNA, 19 nt, Artificial Sequence
  Description of Artificial Sequence: Synthetic oligonucleotide
cauuggagggccuggcauc

SEQ ID NO: 2618598 - RNA, 19 nt, Artificial Sequence
  Description of Artificial Sequence: Synthetic oligonucleotide
caucauagggcgagcagga

SEQ ID NO: 2618599 - RNA, 19 nt, Artificial Sequence
  Description of Artificial Sequence: Synthetic oligonucleotide
aggucccacaggcaucauc

SEQ ID NO: 2618600 - RNA, 19 nt, Artificial Sequence
  Description of Artificial Sequence: Synthetic oligonucleotide
cacaguaaaacuugggcau

SEQ ID NO: 2618601 - RNA, 19 nt, Artificial Sequence
  Description of Artificial Sequence: Synthetic oligonucleotide
ucuuaucugucuggccgag

SEQ ID NO: 2618602 - RNA, 19 nt, Artificial Sequence
  Description of Artificial Sequence: Synthetic oligonucleotide
aggaggacccgggagacug

SEQ ID NO: 2618603 - RNA, 19 nt, Artificial Sequence
  Description of Artificial Sequence: Synthetic oligonucleotide
uagguaggaaggggaagcc

SEQ ID NO: 2618604 - RNA, 19 nt, Artificial Sequence
  Description of Artificial Sequence: Synthetic oligonucleotide
aaucaggcucugggcuugc

SEQ ID NO: 2618605 - RNA, 19 nt, Artificial Sequence
  Description of Artificial Sequence: Synthetic oligonucleotide
ggugagguacgugucacag

SEQ ID NO: 2618606 - RNA, 19 nt, Artificial Sequence
  Description of Artificial Sequence: Synthetic oligonucleotide
ucgaccacugcaguguguc

SEQ ID NO: 2618607 - RNA, 19 nt, Artificial Sequence
  Description of Artificial Sequence: Synthetic oligonucleotide
uggagagucgugggugagg

SEQ ID NO: 2618608 - RNA, 19 nt, Artificial Sequence
  Description of Artificial Sequence: Synthetic oligonucleotide
agucuuucacauucucuuu

SEQ ID NO: 2618609 - RNA, 19 nt, Artificial Sequence
  Description of Artificial Sequence: Synthetic oligonucleotide
ggcaucaugggcaugugac

SEQ ID NO: 2618610 - RNA, 19 nt, Artificial Sequence
  Description of Artificial Sequence: Synthetic oligonucleotide
gaaaacacucaggcucagc

SEQ ID NO: 2618611 - RNA, 19 nt, Artificial Sequence
  Description of Artificial Sequence: Synthetic oligonucleotide
agccguuguuuugucaauc

SEQ ID NO: 2618612 - RNA, 19 nt, Artificial Sequence
  Description of Artificial Sequence: Synthetic oligonucleotide
gggagggccucccaugugg

SEQ ID NO: 2618613 - RNA, 19 nt, Artificial Sequence
  Description of Artificial Sequence: Synthetic oligonucleotide
gucaaucaggcucugggcu

SEQ ID NO: 2618614 - RNA, 19 nt, Artificial Sequence
  Description of Artificial Sequence: Synthetic oligonucleotide
ucuuuguguuuucgaccac

SEQ ID NO: 2618615 - RNA, 19 nt, Artificial Sequence
  Description of Artificial Sequence: Synthetic oligonucleotide
uggagggccuggcaucaug

SEQ ID NO: 2618616 - RNA, 19 nt, Artificial Sequence
  Description of Artificial Sequence: Synthetic oligonucleotide
ucugggcuugcucuuccau

SEQ ID NO: 2618617 - RNA, 19 nt, Artificial Sequence
  Description of Artificial Sequence: Synthetic oligonucleotide
agcaggaggucucaucauu

SEQ ID NO: 2618618 - RNA, 19 nt, Artificial Sequence
  Description of Artificial Sequence: Synthetic oligonucleotide
ccaucauagggcgagcagg

SEQ ID NO: 2618619 - RNA, 19 nt, Artificial Sequence
  Description of Artificial Sequence: Synthetic oligonucleotide
aagccuugcuugugaugca

SEQ ID NO: 2618620 - RNA, 19 nt, Artificial Sequence
  Description of Artificial Sequence: Synthetic oligonucleotide
uggccucauuccaggagca

SEQ ID NO: 2618621 - RNA, 19 nt, Artificial Sequence
  Description of Artificial Sequence: Synthetic oligonucleotide
ccaucaucggcaucauggg

SEQ ID NO: 2618622 - RNA, 19 nt, Artificial Sequence
  Description of Artificial Sequence: Synthetic oligonucleotide
ggcaccaucauagggcgag

SEQ ID NO: 2618623 - RNA, 19 nt, Artificial Sequence
  Description of Artificial Sequence: Synthetic oligonucleotide
cauagggcgagcaggaggu

SEQ ID NO: 2618624 - RNA, 19 nt, Artificial Sequence
  Description of Artificial Sequence: Synthetic oligonucleotide
ugcagccguuguuuuguca

SEQ ID NO: 2618625 - RNA, 19 nt, Artificial Sequence
  Description of Artificial Sequence: Synthetic oligonucleotide
cugggcuugcucuuccauc

SEQ ID NO: 2618626 - RNA, 19 nt, Artificial Sequence
  Description of Artificial Sequence: Synthetic oligonucleotide
ucagcaccguaaucuccug

SEQ ID NO: 2618627 - RNA, 19 nt, Artificial Sequence
  Description of Artificial Sequence: Synthetic oligonucleotide
caccguaaucuccugguga

SEQ ID NO: 2618628 - RNA, 19 nt, Artificial Sequence
  Description of Artificial Sequence: Synthetic oligonucleotide
caugccaggccgagugggc

SEQ ID NO: 2618629 - RNA, 19 nt, Artificial Sequence
  Description of Artificial Sequence: Synthetic oligonucleotide
gagucgugggugagguacg

SEQ ID NO: 2618630 - RNA, 19 nt, Artificial Sequence
  Description of Artificial Sequence: Synthetic oligonucleotide
gucaugccaggccgagugg

SEQ ID NO: 2618631 - RNA, 19 nt, Artificial Sequence
  Description of Artificial Sequence: Synthetic oligonucleotide
ucugucuggccgagucaug

SEQ ID NO: 2618632 - RNA, 19 nt, Artificial Sequence
  Description of Artificial Sequence: Synthetic oligonucleotide
cagcaccguaaucuccugg

SEQ ID NO: 2618633 - RNA, 19 nt, Artificial Sequence
  Description of Artificial Sequence: Synthetic oligonucleotide
guuuugucaaucaggcucu

SEQ ID NO: 2618634 - RNA, 19 nt, Artificial Sequence
  Description of Artificial Sequence: Synthetic oligonucleotide
gaucauggccccagcagga

SEQ ID NO: 2618635 - RNA, 19 nt, Artificial Sequence
  Description of Artificial Sequence: Synthetic oligonucleotide
ggaggcgggaucauggccc

SEQ ID NO: 2618636 - RNA, 19 nt, Artificial Sequence
  Description of Artificial Sequence: Synthetic oligonucleotide
gcaggcaucaugccagggc

SEQ ID NO: 2618637 - RNA, 19 nt, Artificial Sequence
  Description of Artificial Sequence: Synthetic oligonucleotide
auuggagggccuggcauca

SEQ ID NO: 2618638 - RNA, 19 nt, Artificial Sequence
  Description of Artificial Sequence: Synthetic oligonucleotide
gguggccucauuccaggag

SEQ ID NO: 2618639 - RNA, 19 nt, Artificial Sequence
  Description of Artificial Sequence: Synthetic oligonucleotide
guaggaaggggaagccuug

SEQ ID NO: 2618640 - RNA, 19 nt, Artificial Sequence
  Description of Artificial Sequence: Synthetic oligonucleotide
ccuuguugaaaugcagccg

SEQ ID NO: 2618641 - RNA, 19 nt, Artificial Sequence
  Description of Artificial Sequence: Synthetic oligonucleotide
gagggccucccaugugggg

SEQ ID NO: 2618642 - RNA, 19 nt, Artificial Sequence
  Description of Artificial Sequence: Synthetic oligonucleotide
gucacaguagucacaguaa

SEQ ID NO: 2618643 - RNA, 19 nt, Artificial Sequence
  Description of Artificial Sequence: Synthetic oligonucleotide
ugcuugugaugcagauaga

SEQ ID NO: 2618644 - RNA, 19 nt, Artificial Sequence
  Description of Artificial Sequence: Synthetic oligonucleotide
cauggccccagcaggagga

SEQ ID NO: 2618645 - RNA, 19 nt, Artificial Sequence
  Description of Artificial Sequence: Synthetic oligonucleotide
caucauuggagggccuggc

SEQ ID NO: 2618646 - RNA, 19 nt, Artificial Sequence
  Description of Artificial Sequence: Synthetic oligonucleotide
uuguugaaaugcagccguu

SEQ ID NO: 2618647 - RNA, 19 nt, Artificial Sequence
  Description of Artificial Sequence: Synthetic oligonucleotide
cucuuaucugucuggccga

SEQ ID NO: 2618648 - RNA, 19 nt, Artificial Sequence
  Description of Artificial Sequence: Synthetic oligonucleotide
cacaguagucacaguaaaa

SEQ ID NO: 2618649 - RNA, 19 nt, Artificial Sequence
  Description of Artificial Sequence: Synthetic oligonucleotide
gaggcgggaucauggcccc

SEQ ID NO: 2618650 - RNA, 19 nt, Artificial Sequence
  Description of Artificial Sequence: Synthetic oligonucleotide
caguagucacaguaaaacu

SEQ ID NO: 2618651 - RNA, 19 nt, Artificial Sequence
  Description of Artificial Sequence: Synthetic oligonucleotide
aucugucuggccgagucau

SEQ ID NO: 2618652 - RNA, 19 nt, Artificial Sequence
  Description of Artificial Sequence: Synthetic oligonucleotide
agccuugcuugugaugcag

SEQ ID NO: 2618653 - RNA, 19 nt, Artificial Sequence
  Description of Artificial Sequence: Synthetic oligonucleotide
aggccgagugggcaccauc

SEQ ID NO: 2618654 - RNA, 19 nt, Artificial Sequence
  Description of Artificial Sequence: Synthetic oligonucleotide
ugcaggcaucaugccaggg

SEQ ID NO: 2618655 - RNA, 19 nt, Artificial Sequence
  Description of Artificial Sequence: Synthetic oligonucleotide
ugccagggcgaggaggacc

SEQ ID NO: 2618656 - RNA, 19 nt, Artificial Sequence
  Description of Artificial Sequence: Synthetic oligonucleotide
ucucaucauuggagggccu

SEQ ID NO: 2618657 - RNA, 19 nt, Artificial Sequence
  Description of Artificial Sequence: Synthetic oligonucleotide
uuuugucaaucaggcucug

SEQ ID NO: 2618658 - RNA, 19 nt, Artificial Sequence
  Description of Artificial Sequence: Synthetic oligonucleotide
uagggcgagcaggaggucu

SEQ ID NO: 2618659 - RNA, 19 nt, Artificial Sequence
  Description of Artificial Sequence: Synthetic oligonucleotide
cauggguggccucauucca

SEQ ID NO: 2618660 - RNA, 19 nt, Artificial Sequence
  Description of Artificial Sequence: Synthetic oligonucleotide
uucgaccacugcagugugu

SEQ ID NO: 2618661 - RNA, 19 nt, Artificial Sequence
  Description of Artificial Sequence: Synthetic oligonucleotide
ccauuuauuuucacuuuca

SEQ ID NO: 2618662 - RNA, 19 nt, Artificial Sequence
  Description of Artificial Sequence: Synthetic oligonucleotide
augcagccguuguuuuguc

SEQ ID NO: 2618663 - RNA, 19 nt, Artificial Sequence
  Description of Artificial Sequence: Synthetic oligonucleotide
ggggaucuuuccuuguuga

SEQ ID NO: 2618664 - RNA, 19 nt, Artificial Sequence
  Description of Artificial Sequence: Synthetic oligonucleotide
ugucuuccucacagaugga

SEQ ID NO: 2618665 - RNA, 19 nt, Artificial Sequence
  Description of Artificial Sequence: Synthetic oligonucleotide
gucuggccgagucaugcca

SEQ ID NO: 2618666 - RNA, 19 nt, Artificial Sequence
  Description of Artificial Sequence: Synthetic oligonucleotide
ggagggccuggcaucaugg

SEQ ID NO: 2618667 - RNA, 19 nt, Artificial Sequence
  Description of Artificial Sequence: Synthetic oligonucleotide
caaucaggcucugggcuug

SEQ ID NO: 2618668 - RNA, 19 nt, Artificial Sequence
  Description of Artificial Sequence: Synthetic oligonucleotide
aguaaaacuugggcaugau

SEQ ID NO: 2618669 - RNA, 19 nt, Artificial Sequence
  Description of Artificial Sequence: Synthetic oligonucleotide
auggguggccucauuccag

SEQ ID NO: 2618670 - RNA, 19 nt, Artificial Sequence
  Description of Artificial Sequence: Synthetic oligonucleotide
aucauagggcgagcaggag

SEQ ID NO: 2618671 - RNA, 19 nt, Artificial Sequence
  Description of Artificial Sequence: Synthetic oligonucleotide
gaccauuuauuuucacuuu

SEQ ID NO: 2618672 - RNA, 19 nt, Artificial Sequence
  Description of Artificial Sequence: Synthetic oligonucleotide
gugcaggcaucaugccagg

SEQ ID NO: 2618673 - RNA, 19 nt, Artificial Sequence
  Description of Artificial Sequence: Synthetic oligonucleotide
aucauggccccagcaggag

SEQ ID NO: 2618674 - RNA, 19 nt, Artificial Sequence
  Description of Artificial Sequence: Synthetic oligonucleotide
cuguagguaggaaggggaa

SEQ ID NO: 2618675 - RNA, 19 nt, Artificial Sequence
  Description of Artificial Sequence: Synthetic oligonucleotide
ggaagccuugcuugugaug

SEQ ID NO: 2618676 - RNA, 19 nt, Artificial Sequence
  Description of Artificial Sequence: Synthetic oligonucleotide
agcaggucccacaggcauc

SEQ ID NO: 2618677 - RNA, 19 nt, Artificial Sequence
  Description of Artificial Sequence: Synthetic oligonucleotide
caucaugggagggccuccc

SEQ ID NO: 2618678 - RNA, 19 nt, Artificial Sequence
  Description of Artificial Sequence: Synthetic oligonucleotide
gcuugugaugcagauagaa

SEQ ID NO: 2618679 - RNA, 19 nt, Artificial Sequence
  Description of Artificial Sequence: Synthetic oligonucleotide
agguaggaaggggaagccu

SEQ ID NO: 2618680 - RNA, 19 nt, Artificial Sequence
  Description of Artificial Sequence: Synthetic oligonucleotide
gcagccguuguuuugucaa

SEQ ID NO: 2618681 - RNA, 19 nt, Artificial Sequence
  Description of Artificial Sequence: Synthetic oligonucleotide
gaaaugcagccguuguuuu

SEQ ID NO: 2618682 - RNA, 19 nt, Artificial Sequence
  Description of Artificial Sequence: Synthetic oligonucleotide
agggcgagcaggaggucuc

SEQ ID NO: 2618683 - RNA, 19 nt, Artificial Sequence
  Description of Artificial Sequence: Synthetic oligonucleotide
ggcgaggaggacccgggag

SEQ ID NO: 2618684 - RNA, 19 nt, Artificial Sequence
  Description of Artificial Sequence: Synthetic oligonucleotide
gcagagaauggagcugggg

SEQ ID NO: 2618685 - RNA, 19 nt, Artificial Sequence
  Description of Artificial Sequence: Synthetic oligonucleotide
cauguggggugcaggcauc

SEQ ID NO: 2618686 - RNA, 19 nt, Artificial Sequence
  Description of Artificial Sequence: Synthetic oligonucleotide
agggccucccauguggggu

SEQ ID NO: 2618687 - RNA, 19 nt, Artificial Sequence
  Description of Artificial Sequence: Synthetic oligonucleotide
gcaggaggucucaucauug

SEQ ID NO: 2618688 - RNA, 19 nt, Artificial Sequence
  Description of Artificial Sequence: Synthetic oligonucleotide
auggagagucgugggugag

SEQ ID NO: 2618689 - RNA, 19 nt, Artificial Sequence
  Description of Artificial Sequence: Synthetic oligonucleotide
aucaugggagggccuccca

SEQ ID NO: 2618690 - RNA, 19 nt, Artificial Sequence
  Description of Artificial Sequence: Synthetic oligonucleotide
cucaggcucagcaccguaa

SEQ ID NO: 2618691 - RNA, 19 nt, Artificial Sequence
  Description of Artificial Sequence: Synthetic oligonucleotide
ccccucuguagguaggaag

SEQ ID NO: 2618692 - RNA, 19 nt, Artificial Sequence
  Description of Artificial Sequence: Synthetic oligonucleotide
agcugaccauuuauuuuca

SEQ ID NO: 2618693 - RNA, 19 nt, Artificial Sequence
  Description of Artificial Sequence: Synthetic oligonucleotide
ugccaggccgagugggcac

SEQ ID NO: 2618694 - RNA, 19 nt, Artificial Sequence
  Description of Artificial Sequence: Synthetic oligonucleotide
gccguuguuuugucaauca

SEQ ID NO: 2618695 - RNA, 19 nt, Artificial Sequence
  Description of Artificial Sequence: Synthetic oligonucleotide
ggcaucaucccaggaggag

SEQ ID NO: 2618696 - RNA, 19 nt, Artificial Sequence
  Description of Artificial Sequence: Synthetic oligonucleotide
ccguuguuuugucaaucag

SEQ ID NO: 2618697 - RNA, 19 nt, Artificial Sequence
  Description of Artificial Sequence: Synthetic oligonucleotide
caucggcaucaugggaggg

SEQ ID NO: 2618698 - RNA, 19 nt, Artificial Sequence
  Description of Artificial Sequence: Synthetic oligonucleotide
uggccgagucaugccaggc

SEQ ID NO: 2618699 - RNA, 19 nt, Artificial Sequence
  Description of Artificial Sequence: Synthetic oligonucleotide
cuuuguguuuucgaccacu

SEQ ID NO: 2618700 - RNA, 19 nt, Artificial Sequence
  Description of Artificial Sequence: Synthetic oligonucleotide
gggaggcgggaucauggcc

SEQ ID NO: 2618701 - RNA, 19 nt, Artificial Sequence
  Description of Artificial Sequence: Synthetic oligonucleotide
ggccgagucaugccaggcc

SEQ ID NO: 2618702 - RNA, 19 nt, Artificial Sequence
  Description of Artificial Sequence: Synthetic oligonucleotide
cagggcgaggaggacccgg

SEQ ID NO: 2618703 - RNA, 19 nt, Artificial Sequence
  Description of Artificial Sequence: Synthetic oligonucleotide
gggugcaggcaucaugcca

SEQ ID NO: 2618704 - RNA, 19 nt, Artificial Sequence
  Description of Artificial Sequence: Synthetic oligonucleotide
ccacuucuccccucuguag

SEQ ID NO: 2618705 - RNA, 19 nt, Artificial Sequence
  Description of Artificial Sequence: Synthetic oligonucleotide
ggcucagcaccguaaucuc

SEQ ID NO: 2618706 - RNA, 19 nt, Artificial Sequence
  Description of Artificial Sequence: Synthetic oligonucleotide
aggggaagccuugcuugug

SEQ ID NO: 2618707 - RNA, 19 nt, Artificial Sequence
  Description of Artificial Sequence: Synthetic oligonucleotide
auagggcgagcaggagguc

SEQ ID NO: 2618708 - RNA, 19 nt, Artificial Sequence
  Description of Artificial Sequence: Synthetic oligonucleotide
gcugaccauuuauuuucac

SEQ ID NO: 2618709 - RNA, 19 nt, Artificial Sequence
  Description of Artificial Sequence: Synthetic oligonucleotide
auuccaggagcagguccca

SEQ ID NO: 2618710 - RNA, 19 nt, Artificial Sequence
  Description of Artificial Sequence: Synthetic oligonucleotide
uaaccccacuucuccccuc

SEQ ID NO: 2618711 - RNA, 19 nt, Artificial Sequence
  Description of Artificial Sequence: Synthetic oligonucleotide
ggggaagccuugcuuguga

SEQ ID NO: 2618712 - RNA, 19 nt, Artificial Sequence
  Description of Artificial Sequence: Synthetic oligonucleotide
cucacagauggagagucgu

SEQ ID NO: 2618713 - RNA, 19 nt, Artificial Sequence
  Description of Artificial Sequence: Synthetic oligonucleotide
augccaggccgagugggca

SEQ ID NO: 2618714 - RNA, 19 nt, Artificial Sequence
  Description of Artificial Sequence: Synthetic oligonucleotide
gguacgugucacaguaguc

SEQ ID NO: 2618715 - RNA, 19 nt, Artificial Sequence
  Description of Artificial Sequence: Synthetic oligonucleotide
gcaccguaaucuccuggug

SEQ ID NO: 2618716 - RNA, 19 nt, Artificial Sequence
  Description of Artificial Sequence: Synthetic oligonucleotide
agucgugggugagguacgu

SEQ ID NO: 2618717 - RNA, 19 nt, Artificial Sequence
  Description of Artificial Sequence: Synthetic oligonucleotide
gcgaggaggacccgggaga

SEQ ID NO: 2618718 - RNA, 19 nt, Artificial Sequence
  Description of Artificial Sequence: Synthetic oligonucleotide
cccauggguggccucauuc

SEQ ID NO: 2618719 - RNA, 19 nt, Artificial Sequence
  Description of Artificial Sequence: Synthetic oligonucleotide
cuugcuugugaugcagaua

SEQ ID NO: 2618720 - RNA, 19 nt, Artificial Sequence
  Description of Artificial Sequence: Synthetic oligonucleotide
aggcaucaucccaggagga

SEQ ID NO: 2618721 - RNA, 19 nt, Artificial Sequence
  Description of Artificial Sequence: Synthetic oligonucleotide
gggaucuuuccuuguugaa

SEQ ID NO: 2618722 - RNA, 19 nt, Artificial Sequence
  Description of Artificial Sequence: Synthetic oligonucleotide
caccaucauagggcgagca

SEQ ID NO: 2618723 - RNA, 19 nt, Artificial Sequence
  Description of Artificial Sequence: Synthetic oligonucleotide
ggcgggaucauggccccag

SEQ ID NO: 2618724 - RNA, 19 nt, Artificial Sequence
  Description of Artificial Sequence: Synthetic oligonucleotide
augccagggcgaggaggac

SEQ ID NO: 2618725 - RNA, 19 nt, Artificial Sequence
  Description of Artificial Sequence: Synthetic oligonucleotide
gugagguacgugucacagu

SEQ ID NO: 2618726 - RNA, 19 nt, Artificial Sequence
  Description of Artificial Sequence: Synthetic oligonucleotide
uccccucuguagguaggaa

SEQ ID NO: 2618727 - RNA, 19 nt, Artificial Sequence
  Description of Artificial Sequence: Synthetic oligonucleotide
ggcaucaugggagggccuc

SEQ ID NO: 2618728 - RNA, 19 nt, Artificial Sequence
  Description of Artificial Sequence: Synthetic oligonucleotide
ggggugcaggcaucaugcc

SEQ ID NO: 2618729 - RNA, 19 nt, Artificial Sequence
  Description of Artificial Sequence: Synthetic oligonucleotide
gucgugggugagguacgug

SEQ ID NO: 2618730 - RNA, 19 nt, Artificial Sequence
  Description of Artificial Sequence: Synthetic oligonucleotide
gugagagagcugcacuuuu

SEQ ID NO: 2618731 - RNA, 19 nt, Artificial Sequence
  Description of Artificial Sequence: Synthetic oligonucleotide
ggccgagugggcaccauca

SEQ ID NO: 2618732 - RNA, 19 nt, Artificial Sequence
  Description of Artificial Sequence: Synthetic oligonucleotide
gguaguagucuuucacauu

SEQ ID NO: 2618733 - RNA, 19 nt, Artificial Sequence
  Description of Artificial Sequence: Synthetic oligonucleotide
ggagagucgugggugaggu

SEQ ID NO: 2618734 - RNA, 19 nt, Artificial Sequence
  Description of Artificial Sequence: Synthetic oligonucleotide
gguaggaaggggaagccuu

SEQ ID NO: 2618735 - RNA, 19 nt, Artificial Sequence
  Description of Artificial Sequence: Synthetic oligonucleotide
gcgagcaggaggucucauc

SEQ ID NO: 2618736 - RNA, 19 nt, Artificial Sequence
  Description of Artificial Sequence: Synthetic oligonucleotide
gagagucgugggugaggua

SEQ ID NO: 2618737 - RNA, 19 nt, Artificial Sequence
  Description of Artificial Sequence: Synthetic oligonucleotide
cuccccucuguagguagga

SEQ ID NO: 2618738 - RNA, 19 nt, Artificial Sequence
  Description of Artificial Sequence: Synthetic oligonucleotide
ggccucauuccaggagcag

SEQ ID NO: 2618739 - RNA, 19 nt, Artificial Sequence
  Description of Artificial Sequence: Synthetic oligonucleotide
guaagacagcugaccauuu

SEQ ID NO: 2618740 - RNA, 19 nt, Artificial Sequence
  Description of Artificial Sequence: Synthetic oligonucleotide
ggagcaggucccacaggca

SEQ ID NO: 2618741 - RNA, 19 nt, Artificial Sequence
  Description of Artificial Sequence: Synthetic oligonucleotide
cuucuccccucuguaggua

SEQ ID NO: 2618742 - RNA, 19 nt, Artificial Sequence
  Description of Artificial Sequence: Synthetic oligonucleotide
gcccaucaucggcaucaug

SEQ ID NO: 2618743 - RNA, 19 nt, Artificial Sequence
  Description of Artificial Sequence: Synthetic oligonucleotide
ggguggccucauuccagga

SEQ ID NO: 2618744 - RNA, 19 nt, Artificial Sequence
  Description of Artificial Sequence: Synthetic oligonucleotide
ccuggcaucaugggcaugu

SEQ ID NO: 2618745 - RNA, 19 nt, Artificial Sequence
  Description of Artificial Sequence: Synthetic oligonucleotide
gggcuugcucuuccaucca

SEQ ID NO: 2618746 - RNA, 19 nt, Artificial Sequence
  Description of Artificial Sequence: Synthetic oligonucleotide
gcaccaucauagggcgagc

SEQ ID NO: 2618747 - RNA, 19 nt, Artificial Sequence
  Description of Artificial Sequence: Synthetic oligonucleotide
gcgggaucauggccccagc

SEQ ID NO: 2618748 - RNA, 19 nt, Artificial Sequence
  Description of Artificial Sequence: Synthetic oligonucleotide
cgagucaugccaggccgag

SEQ ID NO: 2618749 - RNA, 19 nt, Artificial Sequence
  Description of Artificial Sequence: Synthetic oligonucleotide
gagucaugccaggccgagu

SEQ ID NO: 2618750 - RNA, 19 nt, Artificial Sequence
  Description of Artificial Sequence: Synthetic oligonucleotide
gccuugcuugugaugcaga

SEQ ID NO: 2618751 - RNA, 19 nt, Artificial Sequence
  Description of Artificial Sequence: Synthetic oligonucleotide
cuuaucugucuggccgagu

SEQ ID NO: 2618752 - RNA, 19 nt, Artificial Sequence
  Description of Artificial Sequence: Synthetic oligonucleotide
cccacuucuccccucugua

SEQ ID NO: 2618753 - RNA, 19 nt, Artificial Sequence
  Description of Artificial Sequence: Synthetic oligonucleotide
gccaggccgagugggcacc

SEQ ID NO: 2618754 - RNA, 19 nt, Artificial Sequence
  Description of Artificial Sequence: Synthetic oligonucleotide
ccuugcuugugaugcagau

SEQ ID NO: 2618755 - RNA, 19 nt, Artificial Sequence
  Description of Artificial Sequence: Synthetic oligonucleotide
gcaggaggaggagcagaga

SEQ ID NO: 2618756 - RNA, 19 nt, Artificial Sequence
  Description of Artificial Sequence: Synthetic oligonucleotide
cagccguuguuuugucaau

SEQ ID NO: 2618757 - RNA, 19 nt, Artificial Sequence
  Description of Artificial Sequence: Synthetic oligonucleotide
ggcuugcucuuccauccau

SEQ ID NO: 2618758 - RNA, 19 nt, Artificial Sequence
  Description of Artificial Sequence: Synthetic oligonucleotide
ccucccauguggggugcag

SEQ ID NO: 2618759 - RNA, 19 nt, Artificial Sequence
  Description of Artificial Sequence: Synthetic oligonucleotide
ccauguggggugcaggcau

SEQ ID NO: 2618760 - RNA, 19 nt, Artificial Sequence
  Description of Artificial Sequence: Synthetic oligonucleotide
ccgagucaugccaggccga

SEQ ID NO: 2618761 - RNA, 19 nt, Artificial Sequence
  Description of Artificial Sequence: Synthetic oligonucleotide
ggccucccauguggggugc

SEQ ID NO: 2618762 - RNA, 19 nt, Artificial Sequence
  Description of Artificial Sequence: Synthetic oligonucleotide
aggcgggaucauggcccca

SEQ ID NO: 2618763 - RNA, 19 nt, Artificial Sequence
  Description of Artificial Sequence: Synthetic oligonucleotide
cgggaucauggccccagca

SEQ ID NO: 2618764 - RNA, 19 nt, Artificial Sequence
  Description of Artificial Sequence: Synthetic oligonucleotide
gggcgagcaggaggucuca

SEQ ID NO: 2618765 - RNA, 19 nt, Artificial Sequence
  Description of Artificial Sequence: Synthetic oligonucleotide
gggcaccaucauagggcga

SEQ ID NO: 2618766 - RNA, 19 nt, Artificial Sequence
  Description of Artificial Sequence: Synthetic oligonucleotide
ccagggcgaggaggacccg

SEQ ID NO: 2618767 - RNA, 19 nt, Artificial Sequence
  Description of Artificial Sequence: Synthetic oligonucleotide
ccguaaucuccuggugaaa

SEQ ID NO: 2618768 - RNA, 19 nt, Artificial Sequence
  Description of Artificial Sequence: Synthetic oligonucleotide
gccuggcaucaugggcaug

SEQ ID NO: 2618769 - RNA, 19 nt, Artificial Sequence
  Description of Artificial Sequence: Synthetic oligonucleotide
ccccacuucuccccucugu

SEQ ID NO: 2618770 - RNA, 19 nt, Artificial Sequence
  Description of Artificial Sequence: Synthetic oligonucleotide
ccaggccgagugggcacca

SEQ ID NO: 2618771 - RNA, 19 nt, Artificial Sequence
  Description of Artificial Sequence: Synthetic oligonucleotide
cgaccacugcagugugucu

SEQ ID NO: 2618772 - RNA, 19 nt, Artificial Sequence
  Description of Artificial Sequence: Synthetic oligonucleotide
ggcccaucaucggcaucau

SEQ ID NO: 2618773 - RNA, 19 nt, Artificial Sequence
  Description of Artificial Sequence: Synthetic oligonucleotide
caggccgagugggcaccau

SEQ ID NO: 2618774 - RNA, 19 nt, Artificial Sequence
  Description of Artificial Sequence: Synthetic oligonucleotide
cggcaucaugggagggccu

SEQ ID NO: 2618775 - RNA, 19 nt, Artificial Sequence
  Description of Artificial Sequence: Synthetic oligonucleotide
ccccauggguggccucauu

SEQ ID NO: 2618776 - RNA, 19 nt, Artificial Sequence
  Description of Artificial Sequence: Synthetic oligonucleotide
aaaauguacaacuaaauac

SEQ ID NO: 2618777 - RNA, 19 nt, Artificial Sequence
  Description of Artificial Sequence: Synthetic oligonucleotide
uacaaaauaacucugacca

SEQ ID NO: 2618778 - RNA, 19 nt, Artificial Sequence
  Description of Artificial Sequence: Synthetic oligonucleotide
uauaauaguaaauaaauac

SEQ ID NO: 2618779 - RNA, 19 nt, Artificial Sequence
  Description of Artificial Sequence: Synthetic oligonucleotide
acuaaauacauuuuaaauc

SEQ ID NO: 2618780 - RNA, 19 nt, Artificial Sequence
  Description of Artificial Sequence: Synthetic oligonucleotide
aauaaauacaaaauaacuc

SEQ ID NO: 2618781 - RNA, 19 nt, Artificial Sequence
  Description of Artificial Sequence: Synthetic oligonucleotide
uuugauuacauauaaauac

SEQ ID NO: 2618782 - RNA, 19 nt, Artificial Sequence
  Description of Artificial Sequence: Synthetic oligonucleotide
gaaaauuauauacaaaccc

SEQ ID NO: 2618783 - RNA, 19 nt, Artificial Sequence
  Description of Artificial Sequence: Synthetic oligonucleotide
acauuuuaaaucuuuaagg

SEQ ID NO: 2618784 - RNA, 19 nt, Artificial Sequence
  Description of Artificial Sequence: Synthetic oligonucleotide
uauauuuucaaaauagcug

SEQ ID NO: 2618785 - RNA, 19 nt, Artificial Sequence
  Description of Artificial Sequence: Synthetic oligonucleotide
aaauauauuuucaaaauag

SEQ ID NO: 2618786 - RNA, 19 nt, Artificial Sequence
  Description of Artificial Sequence: Synthetic oligonucleotide
aauacaaaauaacucugac

SEQ ID NO: 2618787 - RNA, 19 nt, Artificial Sequence
  Description of Artificial Sequence: Synthetic oligonucleotide
auaaauacaaaauaacucu

SEQ ID NO: 2618788 - RNA, 19 nt, Artificial Sequence
  Description of Artificial Sequence: Synthetic oligonucleotide
aauauauuuucaaaauagc

SEQ ID NO: 2618789 - RNA, 19 nt, Artificial Sequence
  Description of Artificial Sequence: Synthetic oligonucleotide
ucaucuagguacaacaugg

SEQ ID NO: 2618790 - RNA, 19 nt, Artificial Sequence
  Description of Artificial Sequence: Synthetic oligonucleotide
accauuauacuucaugugc

SEQ ID NO: 2618791 - RNA, 19 nt, Artificial Sequence
  Description of Artificial Sequence: Synthetic oligonucleotide
aaauaaagucuucauuggg

SEQ ID NO: 2618792 - RNA, 19 nt, Artificial Sequence
  Description of Artificial Sequence: Synthetic oligonucleotide
uuccauuccauaaauaaag

SEQ ID NO: 2618793 - RNA, 19 nt, Artificial Sequence
  Description of Artificial Sequence: Synthetic oligonucleotide
gaacuugugaacuuaacag

SEQ ID NO: 2618794 - RNA, 19 nt, Artificial Sequence
  Description of Artificial Sequence: Synthetic oligonucleotide
uuuuaaaucuuuaaggaau

SEQ ID NO: 2618795 - RNA, 19 nt, Artificial Sequence
  Description of Artificial Sequence: Synthetic oligonucleotide
auauuaaagugucagcugg

SEQ ID NO: 2618796 - RNA, 19 nt, Artificial Sequence
  Description of Artificial Sequence: Synthetic oligonucleotide
aaaagacaaaugugcaagc

SEQ ID NO: 2618797 - RNA, 19 nt, Artificial Sequence
  Description of Artificial Sequence: Synthetic oligonucleotide
auauuuucaaaauagcugu

SEQ ID NO: 2618798 - RNA, 19 nt, Artificial Sequence
  Description of Artificial Sequence: Synthetic oligonucleotide
uaauaguaaauaaauacaa

SEQ ID NO: 2618799 - RNA, 19 nt, Artificial Sequence
  Description of Artificial Sequence: Synthetic oligonucleotide
auacaaaauaacucugacc

SEQ ID NO: 2618800 - RNA, 19 nt, Artificial Sequence
  Description of Artificial Sequence: Synthetic oligonucleotide
uguacaacuaaauacauuu

SEQ ID NO: 2618801 - RNA, 19 nt, Artificial Sequence
  Description of Artificial Sequence: Synthetic oligonucleotide
aaaucuuuaaggaauaacu

SEQ ID NO: 2618802 - RNA, 19 nt, Artificial Sequence
  Description of Artificial Sequence: Synthetic oligonucleotide
uuauauacaaacccaauau

SEQ ID NO: 2618803 - RNA, 19 nt, Artificial Sequence
  Description of Artificial Sequence: Synthetic oligonucleotide
aagacaaaugugcaagcac

SEQ ID NO: 2618804 - RNA, 19 nt, Artificial Sequence
  Description of Artificial Sequence: Synthetic oligonucleotide
cauauaaauacaaauuaac

SEQ ID NO: 2618805 - RNA, 19 nt, Artificial Sequence
  Description of Artificial Sequence: Synthetic oligonucleotide
uacauauaaauacaaauua

SEQ ID NO: 2618806 - RNA, 19 nt, Artificial Sequence
  Description of Artificial Sequence: Synthetic oligonucleotide
aacuuaacaguagugcugc

SEQ ID NO: 2618807 - RNA, 19 nt, Artificial Sequence
  Description of Artificial Sequence: Synthetic oligonucleotide
auuucuuuugauuacauau

SEQ ID NO: 2618808 - RNA, 19 nt, Artificial Sequence
  Description of Artificial Sequence: Synthetic oligonucleotide
auaacucugaccauuauac

SEQ ID NO: 2618809 - RNA, 19 nt, Artificial Sequence
  Description of Artificial Sequence: Synthetic oligonucleotide
gaucuuggaauucacagag

SEQ ID NO: 2618810 - RNA, 19 nt, Artificial Sequence
  Description of Artificial Sequence: Synthetic oligonucleotide
uuuucguagauauaaauau

SEQ ID NO: 2618811 - RNA, 19 nt, Artificial Sequence
  Description of Artificial Sequence: Synthetic oligonucleotide
ucauugggaaauauuaaag

SEQ ID NO: 2618812 - RNA, 19 nt, Artificial Sequence
  Description of Artificial Sequence: Synthetic oligonucleotide
uucauucucaucuagguac

SEQ ID NO: 2618813 - RNA, 19 nt, Artificial Sequence
  Description of Artificial Sequence: Synthetic oligonucleotide
uuuuggaaaauuauauaca

SEQ ID NO: 2618814 - RNA, 19 nt, Artificial Sequence
  Description of Artificial Sequence: Synthetic oligonucleotide
aaaauuauauacaaaccca

SEQ ID NO: 2618815 - RNA, 19 nt, Artificial Sequence
  Description of Artificial Sequence: Synthetic oligonucleotide
auucacagaguuuaccagc

SEQ ID NO: 2618816 - RNA, 19 nt, Artificial Sequence
  Description of Artificial Sequence: Synthetic oligonucleotide
uaaauacaaaauaacucug

SEQ ID NO: 2618817 - RNA, 19 nt, Artificial Sequence
  Description of Artificial Sequence: Synthetic oligonucleotide
ucuagguacaacauggaga

SEQ ID NO: 2618818 - RNA, 19 nt, Artificial Sequence
  Description of Artificial Sequence: Synthetic oligonucleotide
aucuuaaauacacacaacu

SEQ ID NO: 2618819 - RNA, 19 nt, Artificial Sequence
  Description of Artificial Sequence: Synthetic oligonucleotide
ucuuaaauacacacaacug

SEQ ID NO: 2618820 - RNA, 19 nt, Artificial Sequence
  Description of Artificial Sequence: Synthetic oligonucleotide
uuaaauacacacaacugaa

SEQ ID NO: 2618821 - RNA, 19 nt, Artificial Sequence
  Description of Artificial Sequence: Synthetic oligonucleotide
uaaaauauuuguuuucccu

SEQ ID NO: 2618822 - RNA, 19 nt, Artificial Sequence
  Description of Artificial Sequence: Synthetic oligonucleotide
auuuguuuucccuaacuuc

SEQ ID NO: 2618823 - RNA, 19 nt, Artificial Sequence
  Description of Artificial Sequence: Synthetic oligonucleotide
aaucuuuaaggaauaacuc

SEQ ID NO: 2618824 - RNA, 19 nt, Artificial Sequence
  Description of Artificial Sequence: Synthetic oligonucleotide
uuacauauaaauacaaauu

SEQ ID NO: 2618825 - RNA, 19 nt, Artificial Sequence
  Description of Artificial Sequence: Synthetic oligonucleotide
aauauuuguuuucccuaac

SEQ ID NO: 2618826 - RNA, 19 nt, Artificial Sequence
  Description of Artificial Sequence: Synthetic oligonucleotide
uuuggaaaauuauauacaa

SEQ ID NO: 2618827 - RNA, 19 nt, Artificial Sequence
  Description of Artificial Sequence: Synthetic oligonucleotide
aacacaacaugccuucggg

SEQ ID NO: 2618828 - RNA, 19 nt, Artificial Sequence
  Description of Artificial Sequence: Synthetic oligonucleotide
aauucacagaguuuaccag

SEQ ID NO: 2618829 - RNA, 19 nt, Artificial Sequence
  Description of Artificial Sequence: Synthetic oligonucleotide
ugugcaagcacuuugccca

SEQ ID NO: 2618830 - RNA, 19 nt, Artificial Sequence
  Description of Artificial Sequence: Synthetic oligonucleotide
aagcacuuugcccaguaac

SEQ ID NO: 2618831 - RNA, 19 nt, Artificial Sequence
  Description of Artificial Sequence: Synthetic oligonucleotide
aaugugcaagcacuuugcc

SEQ ID NO: 2618832 - RNA, 19 nt, Artificial Sequence
  Description of Artificial Sequence: Synthetic oligonucleotide
ucuucauugggaaauauua

SEQ ID NO: 2618833 - RNA, 19 nt, Artificial Sequence
  Description of Artificial Sequence: Synthetic oligonucleotide
ugaacuugugaacuuaaca

SEQ ID NO: 2618834 - RNA, 19 nt, Artificial Sequence
  Description of Artificial Sequence: Synthetic oligonucleotide
uagauauaaauauauuuuc

SEQ ID NO: 2618835 - RNA, 19 nt, Artificial Sequence
  Description of Artificial Sequence: Synthetic oligonucleotide
uggaguugaacccauauaa

SEQ ID NO: 2618836 - RNA, 19 nt, Artificial Sequence
  Description of Artificial Sequence: Synthetic oligonucleotide
uaaaauguacaacuaaaua

SEQ ID NO: 2618837 - RNA, 19 nt, Artificial Sequence
  Description of Artificial Sequence: Synthetic oligonucleotide
uaaggaauaacucucugau

SEQ ID NO: 2618838 - RNA, 19 nt, Artificial Sequence
  Description of Artificial Sequence: Synthetic oligonucleotide
ucuuuaaggaauaacucuc

SEQ ID NO: 2618839 - RNA, 19 nt, Artificial Sequence
  Description of Artificial Sequence: Synthetic oligonucleotide
aaaauauuuguuuucccua

SEQ ID NO: 2618840 - RNA, 19 nt, Artificial Sequence
  Description of Artificial Sequence: Synthetic oligonucleotide
ucucugauuaaaauauuug

SEQ ID NO: 2618841 - RNA, 19 nt, Artificial Sequence
  Description of Artificial Sequence: Synthetic oligonucleotide
ugucagcugguuuauaggg

SEQ ID NO: 2618842 - RNA, 19 nt, Artificial Sequence
  Description of Artificial Sequence: Synthetic oligonucleotide
aaaugugcaagcacuuugc

SEQ ID NO: 2618843 - RNA, 19 nt, Artificial Sequence
  Description of Artificial Sequence: Synthetic oligonucleotide
uauacaaacccaauauuuc

SEQ ID NO: 2618844 - RNA, 19 nt, Artificial Sequence
  Description of Artificial Sequence: Synthetic oligonucleotide
uucuaaaauauauauuuau

SEQ ID NO: 2618845 - RNA, 19 nt, Artificial Sequence
  Description of Artificial Sequence: Synthetic oligonucleotide
guugaacccauauaaaaug

SEQ ID NO: 2618846 - RNA, 19 nt, Artificial Sequence
  Description of Artificial Sequence: Synthetic oligonucleotide
uuuugauuacauauaaaua

SEQ ID NO: 2618847 - RNA, 19 nt, Artificial Sequence
  Description of Artificial Sequence: Synthetic oligonucleotide
uucacagaguuuaccagcg

SEQ ID NO: 2618848 - RNA, 19 nt, Artificial Sequence
  Description of Artificial Sequence: Synthetic oligonucleotide
aacuugugaacuuaacagu

SEQ ID NO: 2618849 - RNA, 19 nt, Artificial Sequence
  Description of Artificial Sequence: Synthetic oligonucleotide
ucuaaaauauauauuuauu

SEQ ID NO: 2618850 - RNA, 19 nt, Artificial Sequence
  Description of Artificial Sequence: Synthetic oligonucleotide
cuaaauacauuuuaaaucu

SEQ ID NO: 2618851 - RNA, 19 nt, Artificial Sequence
  Description of Artificial Sequence: Synthetic oligonucleotide
auaauaguaaauaaauaca

SEQ ID NO: 2618852 - RNA, 19 nt, Artificial Sequence
  Description of Artificial Sequence: Synthetic oligonucleotide
cauuuuaaaucuuuaagga

SEQ ID NO: 2618853 - RNA, 19 nt, Artificial Sequence
  Description of Artificial Sequence: Synthetic oligonucleotide
aaacccaauauuucuuuug

SEQ ID NO: 2618854 - RNA, 19 nt, Artificial Sequence
  Description of Artificial Sequence: Synthetic oligonucleotide
aucuuuaaggaauaacucu

SEQ ID NO: 2618855 - RNA, 19 nt, Artificial Sequence
  Description of Artificial Sequence: Synthetic oligonucleotide
cuuaaauacacacaacuga

SEQ ID NO: 2618856 - RNA, 19 nt, Artificial Sequence
  Description of Artificial Sequence: Synthetic oligonucleotide
ucugauuaaaauauuuguu

SEQ ID NO: 2618857 - RNA, 19 nt, Artificial Sequence
  Description of Artificial Sequence: Synthetic oligonucleotide
uuuucauucucaucuaggu

SEQ ID NO: 2618858 - RNA, 19 nt, Artificial Sequence
  Description of Artificial Sequence: Synthetic oligonucleotide
aggaauaacucucugauua

SEQ ID NO: 2618859 - RNA, 19 nt, Artificial Sequence
  Description of Artificial Sequence: Synthetic oligonucleotide
aaauauuuguuuucccuaa

SEQ ID NO: 2618860 - RNA, 19 nt, Artificial Sequence
  Description of Artificial Sequence: Synthetic oligonucleotide
ugaacuuaacaguagugcu

SEQ ID NO: 2618861 - RNA, 19 nt, Artificial Sequence
  Description of Artificial Sequence: Synthetic oligonucleotide
uucucaucuagguacaaca

SEQ ID NO: 2618862 - RNA, 19 nt, Artificial Sequence
  Description of Artificial Sequence: Synthetic oligonucleotide
uuucccuaacuucuuuucg

SEQ ID NO: 2618863 - RNA, 19 nt, Artificial Sequence
  Description of Artificial Sequence: Synthetic oligonucleotide
auauaaauacaaauuaacu

SEQ ID NO: 2618864 - RNA, 19 nt, Artificial Sequence
  Description of Artificial Sequence: Synthetic oligonucleotide
ugaccauuauacuucaugu

SEQ ID NO: 2618865 - RNA, 19 nt, Artificial Sequence
  Description of Artificial Sequence: Synthetic oligonucleotide
ugauuacauauaaauacaa

SEQ ID NO: 2618866 - RNA, 19 nt, Artificial Sequence
  Description of Artificial Sequence: Synthetic oligonucleotide
uaaccuuccauguagacuu

SEQ ID NO: 2618867 - RNA, 19 nt, Artificial Sequence
  Description of Artificial Sequence: Synthetic oligonucleotide
uuaaggaauaacucucuga

SEQ ID NO: 2618868 - RNA, 19 nt, Artificial Sequence
  Description of Artificial Sequence: Synthetic oligonucleotide
uucuuuugauuacauauaa

SEQ ID NO: 2618869 - RNA, 19 nt, Artificial Sequence
  Description of Artificial Sequence: Synthetic oligonucleotide
uuugcugugcuaacgacac

SEQ ID NO: 2618870 - RNA, 19 nt, Artificial Sequence
  Description of Artificial Sequence: Synthetic oligonucleotide
aauauuucuuuugauuaca

SEQ ID NO: 2618871 - RNA, 19 nt, Artificial Sequence
  Description of Artificial Sequence: Synthetic oligonucleotide
ugggaaauauuaaaguguc

SEQ ID NO: 2618872 - RNA, 19 nt, Artificial Sequence
  Description of Artificial Sequence: Synthetic oligonucleotide
uacaacuaaauacauuuua

SEQ ID NO: 2618873 - RNA, 19 nt, Artificial Sequence
  Description of Artificial Sequence: Synthetic oligonucleotide
ugauuaaaauauuuguuuu

SEQ ID NO: 2618874 - RNA, 19 nt, Artificial Sequence
  Description of Artificial Sequence: Synthetic oligonucleotide
auuuuaaaucuuuaaggaa

SEQ ID NO: 2618875 - RNA, 19 nt, Artificial Sequence
  Description of Artificial Sequence: Synthetic oligonucleotide
aauaacucugaccauuaua

SEQ ID NO: 2618876 - RNA, 19 nt, Artificial Sequence
  Description of Artificial Sequence: Synthetic oligonucleotide
uuaacaguagugcugcaaa

SEQ ID NO: 2618877 - RNA, 19 nt, Artificial Sequence
  Description of Artificial Sequence: Synthetic oligonucleotide
uuuaaggaauaacucucug

SEQ ID NO: 2618878 - RNA, 19 nt, Artificial Sequence
  Description of Artificial Sequence: Synthetic oligonucleotide
aacucugaccauuauacuu

SEQ ID NO: 2618879 - RNA, 19 nt, Artificial Sequence
  Description of Artificial Sequence: Synthetic oligonucleotide
uuuaaaucuuuaaggaaua

SEQ ID NO: 2618880 - RNA, 19 nt, Artificial Sequence
  Description of Artificial Sequence: Synthetic oligonucleotide
aacccaauauuucuuuuga

SEQ ID NO: 2618881 - RNA, 19 nt, Artificial Sequence
  Description of Artificial Sequence: Synthetic oligonucleotide
aacucucugauuaaaauau

SEQ ID NO: 2618882 - RNA, 19 nt, Artificial Sequence
  Description of Artificial Sequence: Synthetic oligonucleotide
auacaaacccaauauuucu

SEQ ID NO: 2618883 - RNA, 19 nt, Artificial Sequence
  Description of Artificial Sequence: Synthetic oligonucleotide
augugcaagcacuuugccc

SEQ ID NO: 2618884 - RNA, 19 nt, Artificial Sequence
  Description of Artificial Sequence: Synthetic oligonucleotide
uucauugggaaauauuaaa

SEQ ID NO: 2618885 - RNA, 19 nt, Artificial Sequence
  Description of Artificial Sequence: Synthetic oligonucleotide
cuucgcaucuuaaauacac

SEQ ID NO: 2618886 - RNA, 19 nt, Artificial Sequence
  Description of Artificial Sequence: Synthetic oligonucleotide
aaauacaaaauaacucuga

SEQ ID NO: 2618887 - RNA, 19 nt, Artificial Sequence
  Description of Artificial Sequence: Synthetic oligonucleotide
gacuucgcaucuuaaauac

SEQ ID NO: 2618888 - RNA, 19 nt, Artificial Sequence
  Description of Artificial Sequence: Synthetic oligonucleotide
ugugggaacacaacaugcc

SEQ ID NO: 2618889 - RNA, 19 nt, Artificial Sequence
  Description of Artificial Sequence: Synthetic oligonucleotide
agugucagcugguuuauag

SEQ ID NO: 2618890 - RNA, 19 nt, Artificial Sequence
  Description of Artificial Sequence: Synthetic oligonucleotide
aaauuauauacaaacccaa

SEQ ID NO: 2618891 - RNA, 19 nt, Artificial Sequence
  Description of Artificial Sequence: Synthetic oligonucleotide
uuuugcugugcuaacgaca

SEQ ID NO: 2618892 - RNA, 19 nt, Artificial Sequence
  Description of Artificial Sequence: Synthetic oligonucleotide
uuugguuacuugaacuugu

SEQ ID NO: 2618893 - RNA, 19 nt, Artificial Sequence
  Description of Artificial Sequence: Synthetic oligonucleotide
cuaacgacacccacaaccc

SEQ ID NO: 2618894 - RNA, 19 nt, Artificial Sequence
  Description of Artificial Sequence: Synthetic oligonucleotide
agguacaacauggagauug

SEQ ID NO: 2618895 - RNA, 19 nt, Artificial Sequence
  Description of Artificial Sequence: Synthetic oligonucleotide
uauauacaaacccaauauu

SEQ ID NO: 2618896 - RNA, 19 nt, Artificial Sequence
  Description of Artificial Sequence: Synthetic oligonucleotide
uucaaaauagcuguguuuu

SEQ ID NO: 2618897 - RNA, 19 nt, Artificial Sequence
  Description of Artificial Sequence: Synthetic oligonucleotide
uaaagugucagcugguuua

SEQ ID NO: 2618898 - RNA, 19 nt, Artificial Sequence
  Description of Artificial Sequence: Synthetic oligonucleotide
gcuaacgacacccacaacc

SEQ ID NO: 2618899 - RNA, 19 nt, Artificial Sequence
  Description of Artificial Sequence: Synthetic oligonucleotide
uugaacccauauaaaaugu

SEQ ID NO: 2618900 - RNA, 19 nt, Artificial Sequence
  Description of Artificial Sequence: Synthetic oligonucleotide
ucugugggaacacaacaug

SEQ ID NO: 2618901 - RNA, 19 nt, Artificial Sequence
  Description of Artificial Sequence: Synthetic oligonucleotide
ucuuggaauucacagaguu

SEQ ID NO: 2618902 - RNA, 19 nt, Artificial Sequence
  Description of Artificial Sequence: Synthetic oligonucleotide
aagugguuauaauaguaaa

SEQ ID NO: 2618903 - RNA, 19 nt, Artificial Sequence
  Description of Artificial Sequence: Synthetic oligonucleotide
auggagauugcgcugagcu

SEQ ID NO: 2618904 - RNA, 19 nt, Artificial Sequence
  Description of Artificial Sequence: Synthetic oligonucleotide
uauuuucaaaauagcugug

SEQ ID NO: 2618905 - RNA, 19 nt, Artificial Sequence
  Description of Artificial Sequence: Synthetic oligonucleotide
uuggaauucacagaguuua

SEQ ID NO: 2618906 - RNA, 19 nt, Artificial Sequence
  Description of Artificial Sequence: Synthetic oligonucleotide
cauuccauaaauaaagucu

SEQ ID NO: 2618907 - RNA, 19 nt, Artificial Sequence
  Description of Artificial Sequence: Synthetic oligonucleotide
uccauaaauaaagucuuca

SEQ ID NO: 2618908 - RNA, 19 nt, Artificial Sequence
  Description of Artificial Sequence: Synthetic oligonucleotide
caugugcuggaguugaacc

SEQ ID NO: 2618909 - RNA, 19 nt, Artificial Sequence
  Description of Artificial Sequence: Synthetic oligonucleotide
uuucuuuugauuacauaua

SEQ ID NO: 2618910 - RNA, 19 nt, Artificial Sequence
  Description of Artificial Sequence: Synthetic oligonucleotide
ugguuauaauaguaaauaa

SEQ ID NO: 2618911 - RNA, 19 nt, Artificial Sequence
  Description of Artificial Sequence: Synthetic oligonucleotide
uagacuucgcaucuuaaau

SEQ ID NO: 2618912 - RNA, 19 nt, Artificial Sequence
  Description of Artificial Sequence: Synthetic oligonucleotide
ugugcuaacgacacccaca

SEQ ID NO: 2618913 - RNA, 19 nt, Artificial Sequence
  Description of Artificial Sequence: Synthetic oligonucleotide
uaaaucuuuaaggaauaac

SEQ ID NO: 2618914 - RNA, 19 nt, Artificial Sequence
  Description of Artificial Sequence: Synthetic oligonucleotide
ucuuuucguagauauaaau

SEQ ID NO: 2618915 - RNA, 19 nt, Artificial Sequence
  Description of Artificial Sequence: Synthetic oligonucleotide
uauuuguuuucccuaacuu

SEQ ID NO: 2618916 - RNA, 19 nt, Artificial Sequence
  Description of Artificial Sequence: Synthetic oligonucleotide
auaacucucugauuaaaau

SEQ ID NO: 2618917 - RNA, 19 nt, Artificial Sequence
  Description of Artificial Sequence: Synthetic oligonucleotide
auuauacuucaugugcugg

SEQ ID NO: 2618918 - RNA, 19 nt, Artificial Sequence
  Description of Artificial Sequence: Synthetic oligonucleotide
aguaaccuuccauguagac

SEQ ID NO: 2618919 - RNA, 19 nt, Artificial Sequence
  Description of Artificial Sequence: Synthetic oligonucleotide
caauauuucuuuugauuac

SEQ ID NO: 2618920 - RNA, 19 nt, Artificial Sequence
  Description of Artificial Sequence: Synthetic oligonucleotide
gugaacuuaacaguagugc

SEQ ID NO: 2618921 - RNA, 19 nt, Artificial Sequence
  Description of Artificial Sequence: Synthetic oligonucleotide
ucgcaucuuaaauacacac

SEQ ID NO: 2618922 - RNA, 19 nt, Artificial Sequence
  Description of Artificial Sequence: Synthetic oligonucleotide
auauuuguuuucccuaacu

SEQ ID NO: 2618923 - RNA, 19 nt, Artificial Sequence
  Description of Artificial Sequence: Synthetic oligonucleotide
aaagacaaaugugcaagca

SEQ ID NO: 2618924 - RNA, 19 nt, Artificial Sequence
  Description of Artificial Sequence: Synthetic oligonucleotide
agauauaaauauauuuuca

SEQ ID NO: 2618925 - RNA, 19 nt, Artificial Sequence
  Description of Artificial Sequence: Synthetic oligonucleotide
agcacuuugcccaguaacc

SEQ ID NO: 2618926 - RNA, 19 nt, Artificial Sequence
  Description of Artificial Sequence: Synthetic oligonucleotide
uuauacuucaugugcugga

SEQ ID NO: 2618927 - RNA, 19 nt, Artificial Sequence
  Description of Artificial Sequence: Synthetic oligonucleotide
gaacacaacaugccuucgg

SEQ ID NO: 2618928 - RNA, 19 nt, Artificial Sequence
  Description of Artificial Sequence: Synthetic oligonucleotide
aaagugguuauaauaguaa

SEQ ID NO: 2618929 - RNA, 19 nt, Artificial Sequence
  Description of Artificial Sequence: Synthetic oligonucleotide
auugcgcugagcucugugg

SEQ ID NO: 2618930 - RNA, 19 nt, Artificial Sequence
  Description of Artificial Sequence: Synthetic oligonucleotide
uaaauacacacaacugaaa

SEQ ID NO: 2618931 - RNA, 19 nt, Artificial Sequence
  Description of Artificial Sequence: Synthetic oligonucleotide
uugugaacuuaacaguagu

SEQ ID NO: 2618932 - RNA, 19 nt, Artificial Sequence
  Description of Artificial Sequence: Synthetic oligonucleotide
uaacucucugauuaaaaua

SEQ ID NO: 2618933 - RNA, 19 nt, Artificial Sequence
  Description of Artificial Sequence: Synthetic oligonucleotide
aucuagguacaacauggag

SEQ ID NO: 2618934 - RNA, 19 nt, Artificial Sequence
  Description of Artificial Sequence: Synthetic oligonucleotide
cauuccauuccauaaauaa

SEQ ID NO: 2618935 - RNA, 19 nt, Artificial Sequence
  Description of Artificial Sequence: Synthetic oligonucleotide
uuuugguuacuugaacuug

SEQ ID NO: 2618936 - RNA, 19 nt, Artificial Sequence
  Description of Artificial Sequence: Synthetic oligonucleotide
caugccuucgggaucuugg

SEQ ID NO: 2618937 - RNA, 19 nt, Artificial Sequence
  Description of Artificial Sequence: Synthetic oligonucleotide
cuugugaacuuaacaguag

SEQ ID NO: 2618938 - RNA, 19 nt, Artificial Sequence
  Description of Artificial Sequence: Synthetic oligonucleotide
acccauauaaaauguacaa

SEQ ID NO: 2618939 - RNA, 19 nt, Artificial Sequence
  Description of Artificial Sequence: Synthetic oligonucleotide
caaaugugcaagcacuuug

SEQ ID NO: 2618940 - RNA, 19 nt, Artificial Sequence
  Description of Artificial Sequence: Synthetic oligonucleotide
gaacccauauaaaauguac

SEQ ID NO: 2618941 - RNA, 19 nt, Artificial Sequence
  Description of Artificial Sequence: Synthetic oligonucleotide
aaaagugguuauaauagua

SEQ ID NO: 2618942 - RNA, 19 nt, Artificial Sequence
  Description of Artificial Sequence: Synthetic oligonucleotide
cugaccauuauacuucaug

SEQ ID NO: 2618943 - RNA, 19 nt, Artificial Sequence
  Description of Artificial Sequence: Synthetic oligonucleotide
acccuccacaaccaugucc

SEQ ID NO: 2618944 - RNA, 19 nt, Artificial Sequence
  Description of Artificial Sequence: Synthetic oligonucleotide
aaauacauuuuaaaucuuu

SEQ ID NO: 2618945 - RNA, 19 nt, Artificial Sequence
  Description of Artificial Sequence: Synthetic oligonucleotide
uuucguagauauaaauaua

SEQ ID NO: 2618946 - RNA, 19 nt, Artificial Sequence
  Description of Artificial Sequence: Synthetic oligonucleotide
gaguugaacccauauaaaa

SEQ ID NO: 2618947 - RNA, 19 nt, Artificial Sequence
  Description of Artificial Sequence: Synthetic oligonucleotide
aauacauuuuaaaucuuua

SEQ ID NO: 2618948 - RNA, 19 nt, Artificial Sequence
  Description of Artificial Sequence: Synthetic oligonucleotide
gaccauuauacuucaugug

SEQ ID NO: 2618949 - RNA, 19 nt, Artificial Sequence
  Description of Artificial Sequence: Synthetic oligonucleotide
acucugaccauuauacuuc

SEQ ID NO: 2618950 - RNA, 19 nt, Artificial Sequence
  Description of Artificial Sequence: Synthetic oligonucleotide
ugcugugcuaacgacaccc

SEQ ID NO: 2618951 - RNA, 19 nt, Artificial Sequence
  Description of Artificial Sequence: Synthetic oligonucleotide
uccauuccauaaauaaagu

SEQ ID NO: 2618952 - RNA, 19 nt, Artificial Sequence
  Description of Artificial Sequence: Synthetic oligonucleotide
gaacuuaacaguagugcug

SEQ ID NO: 2618953 - RNA, 19 nt, Artificial Sequence
  Description of Artificial Sequence: Synthetic oligonucleotide
agaguuuaccagcgucugc

SEQ ID NO: 2618954 - RNA, 19 nt, Artificial Sequence
  Description of Artificial Sequence: Synthetic oligonucleotide
aauuauauacaaacccaau

SEQ ID NO: 2618955 - RNA, 19 nt, Artificial Sequence
  Description of Artificial Sequence: Synthetic oligonucleotide
gggaucuuggaauucacag

SEQ ID NO: 2618956 - RNA, 19 nt, Artificial Sequence
  Description of Artificial Sequence: Synthetic oligonucleotide
uauuaaagugucagcuggu

SEQ ID NO: 2618957 - RNA, 19 nt, Artificial Sequence
  Description of Artificial Sequence: Synthetic oligonucleotide
auauacaaacccaauauuu

SEQ ID NO: 2618958 - RNA, 19 nt, Artificial Sequence
  Description of Artificial Sequence: Synthetic oligonucleotide
aacccauauaaaauguaca

SEQ ID NO: 2618959 - RNA, 19 nt, Artificial Sequence
  Description of Artificial Sequence: Synthetic oligonucleotide
ugcccaguaaccuuccaug

SEQ ID NO: 2618960 - RNA, 19 nt, Artificial Sequence
  Description of Artificial Sequence: Synthetic oligonucleotide
aaauacaaauuaacuauuu

SEQ ID NO: 2618961 - RNA, 19 nt, Artificial Sequence
  Description of Artificial Sequence: Synthetic oligonucleotide
uuucaaaauagcuguguuu

SEQ ID NO: 2618962 - RNA, 19 nt, Artificial Sequence
  Description of Artificial Sequence: Synthetic oligonucleotide
ucuuuugauuacauauaaa

SEQ ID NO: 2618963 - RNA, 19 nt, Artificial Sequence
  Description of Artificial Sequence: Synthetic oligonucleotide
aacgacacccacaacccuc

SEQ ID NO: 2618964 - RNA, 19 nt, Artificial Sequence
  Description of Artificial Sequence: Synthetic oligonucleotide
acaacaugccuucgggauc

SEQ ID NO: 2618965 - RNA, 19 nt, Artificial Sequence
  Description of Artificial Sequence: Synthetic oligonucleotide
uugcgcugagcucuguggg

SEQ ID NO: 2618966 - RNA, 19 nt, Artificial Sequence
  Description of Artificial Sequence: Synthetic oligonucleotide
aauaacucucugauuaaaa

SEQ ID NO: 2618967 - RNA, 19 nt, Artificial Sequence
  Description of Artificial Sequence: Synthetic oligonucleotide
cacaaccauguccugauag

SEQ ID NO: 2618968 - RNA, 19 nt, Artificial Sequence
  Description of Artificial Sequence: Synthetic oligonucleotide
uuuucccuaacuucuuuuc

SEQ ID NO: 2618969 - RNA, 19 nt, Artificial Sequence
  Description of Artificial Sequence: Synthetic oligonucleotide
uccauguagacuucgcauc

SEQ ID NO: 2618970 - RNA, 19 nt, Artificial Sequence
  Description of Artificial Sequence: Synthetic oligonucleotide
uuuuccauuccauuccaua

SEQ ID NO: 2618971 - RNA, 19 nt, Artificial Sequence
  Description of Artificial Sequence: Synthetic oligonucleotide
cauuauacuucaugugcug

SEQ ID NO: 2618972 - RNA, 19 nt, Artificial Sequence
  Description of Artificial Sequence: Synthetic oligonucleotide
acauauaaauacaaauuaa

SEQ ID NO: 2618973 - RNA, 19 nt, Artificial Sequence
  Description of Artificial Sequence: Synthetic oligonucleotide
ucauucucaucuagguaca

SEQ ID NO: 2618974 - RNA, 19 nt, Artificial Sequence
  Description of Artificial Sequence: Synthetic oligonucleotide
cuuuucguagauauaaaua

SEQ ID NO: 2618975 - RNA, 19 nt, Artificial Sequence
  Description of Artificial Sequence: Synthetic oligonucleotide
uuucauucucaucuaggua

SEQ ID NO: 2618976 - RNA, 19 nt, Artificial Sequence
  Description of Artificial Sequence: Synthetic oligonucleotide
uccauuccauuccauaaau

SEQ ID NO: 2618977 - RNA, 19 nt, Artificial Sequence
  Description of Artificial Sequence: Synthetic oligonucleotide
aacauggagauugcgcuga

SEQ ID NO: 2618978 - RNA, 19 nt, Artificial Sequence
  Description of Artificial Sequence: Synthetic oligonucleotide
uuccauguagacuucgcau

SEQ ID NO: 2618979 - RNA, 19 nt, Artificial Sequence
  Description of Artificial Sequence: Synthetic oligonucleotide
uucgcaucuuaaauacaca

SEQ ID NO: 2618980 - RNA, 19 nt, Artificial Sequence
  Description of Artificial Sequence: Synthetic oligonucleotide
uucccuaacuucuuuucgu

SEQ ID NO: 2618981 - RNA, 19 nt, Artificial Sequence
  Description of Artificial Sequence: Synthetic oligonucleotide
agacaaaugugcaagcacu

SEQ ID NO: 2618982 - RNA, 19 nt, Artificial Sequence
  Description of Artificial Sequence: Synthetic oligonucleotide
uacaaacccaauauuucuu

SEQ ID NO: 2618983 - RNA, 19 nt, Artificial Sequence
  Description of Artificial Sequence: Synthetic oligonucleotide
ugaacccauauaaaaugua

SEQ ID NO: 2618984 - RNA, 19 nt, Artificial Sequence
  Description of Artificial Sequence: Synthetic oligonucleotide
gauuacauauaaauacaaa

SEQ ID NO: 2618985 - RNA, 19 nt, Artificial Sequence
  Description of Artificial Sequence: Synthetic oligonucleotide
gugucagcugguuuauagg

SEQ ID NO: 2618986 - RNA, 19 nt, Artificial Sequence
  Description of Artificial Sequence: Synthetic oligonucleotide
uuaaagugucagcugguuu

SEQ ID NO: 2618987 - RNA, 19 nt, Artificial Sequence
  Description of Artificial Sequence: Synthetic oligonucleotide
cucaucuagguacaacaug

SEQ ID NO: 2618988 - RNA, 19 nt, Artificial Sequence
  Description of Artificial Sequence: Synthetic oligonucleotide
cuucuuuucguagauauaa

SEQ ID NO: 2618989 - RNA, 19 nt, Artificial Sequence
  Description of Artificial Sequence: Synthetic oligonucleotide
aaaauaacucugaccauua

SEQ ID NO: 2618990 - RNA, 19 nt, Artificial Sequence
  Description of Artificial Sequence: Synthetic oligonucleotide
uuccauuccauuccauaaa

SEQ ID NO: 2618991 - RNA, 19 nt, Artificial Sequence
  Description of Artificial Sequence: Synthetic oligonucleotide
acaacuaaauacauuuuaa

SEQ ID NO: 2618992 - RNA, 19 nt, Artificial Sequence
  Description of Artificial Sequence: Synthetic oligonucleotide
uauuucuuuugauuacaua

SEQ ID NO: 2618993 - RNA, 19 nt, Artificial Sequence
  Description of Artificial Sequence: Synthetic oligonucleotide
uugaacuugugaacuuaac

SEQ ID NO: 2618994 - RNA, 19 nt, Artificial Sequence
  Description of Artificial Sequence: Synthetic oligonucleotide
acacccacaacccuccaca

SEQ ID NO: 2618995 - RNA, 19 nt, Artificial Sequence
  Description of Artificial Sequence: Synthetic oligonucleotide
gugguuauaauaguaaaua

SEQ ID NO: 2618996 - RNA, 19 nt, Artificial Sequence
  Description of Artificial Sequence: Synthetic oligonucleotide
aguugaacccauauaaaau

SEQ ID NO: 2618997 - RNA, 19 nt, Artificial Sequence
  Description of Artificial Sequence: Synthetic oligonucleotide
guagauauaaauauauuuu

SEQ ID NO: 2618998 - RNA, 19 nt, Artificial Sequence
  Description of Artificial Sequence: Synthetic oligonucleotide
auucucaucuagguacaac

SEQ ID NO: 2618999 - RNA, 19 nt, Artificial Sequence
  Description of Artificial Sequence: Synthetic oligonucleotide
auuccauaaauaaagucuu

SEQ ID NO: 2619000 - RNA, 19 nt, Artificial Sequence
  Description of Artificial Sequence: Synthetic oligonucleotide
aaauaacucugaccauuau

SEQ ID NO: 2619001 - RNA, 19 nt, Artificial Sequence
  Description of Artificial Sequence: Synthetic oligonucleotide
acaaccauguccugauagu

SEQ ID NO: 2619002 - RNA, 19 nt, Artificial Sequence
  Description of Artificial Sequence: Synthetic oligonucleotide
ucucaucuagguacaacau

SEQ ID NO: 2619003 - RNA, 19 nt, Artificial Sequence
  Description of Artificial Sequence: Synthetic oligonucleotide
cucugauuaaaauauuugu

SEQ ID NO: 2619004 - RNA, 19 nt, Artificial Sequence
  Description of Artificial Sequence: Synthetic oligonucleotide
uucuuuucguagauauaaa

SEQ ID NO: 2619005 - RNA, 19 nt, Artificial Sequence
  Description of Artificial Sequence: Synthetic oligonucleotide
uacuucaugugcuggaguu

SEQ ID NO: 2619006 - RNA, 19 nt, Artificial Sequence
  Description of Artificial Sequence: Synthetic oligonucleotide
cugauuaaaauauuuguuu

SEQ ID NO: 2619007 - RNA, 19 nt, Artificial Sequence
  Description of Artificial Sequence: Synthetic oligonucleotide
ucguagauauaaauauauu

SEQ ID NO: 2619008 - RNA, 19 nt, Artificial Sequence
  Description of Artificial Sequence: Synthetic oligonucleotide
aaggaauaacucucugauu

SEQ ID NO: 2619009 - RNA, 19 nt, Artificial Sequence
  Description of Artificial Sequence: Synthetic oligonucleotide
gaguuuaccagcgucugca

SEQ ID NO: 2619010 - RNA, 19 nt, Artificial Sequence
  Description of Artificial Sequence: Synthetic oligonucleotide
acaaacccaauauuucuuu

SEQ ID NO: 2619011 - RNA, 19 nt, Artificial Sequence
  Description of Artificial Sequence: Synthetic oligonucleotide
cuagguacaacauggagau

SEQ ID NO: 2619012 - RNA, 19 nt, Artificial Sequence
  Description of Artificial Sequence: Synthetic oligonucleotide
agacuucgcaucuuaaaua

SEQ ID NO: 2619013 - RNA, 19 nt, Artificial Sequence
  Description of Artificial Sequence: Synthetic oligonucleotide
uuaaaucuuuaaggaauaa

SEQ ID NO: 2619014 - RNA, 19 nt, Artificial Sequence
  Description of Artificial Sequence: Synthetic oligonucleotide
uuccauaaauaaagucuuc

SEQ ID NO: 2619015 - RNA, 19 nt, Artificial Sequence
  Description of Artificial Sequence: Synthetic oligonucleotide
acuuugcccaguaaccuuc

SEQ ID NO: 2619016 - RNA, 19 nt, Artificial Sequence
  Description of Artificial Sequence: Synthetic oligonucleotide
uguagacuucgcaucuuaa

SEQ ID NO: 2619017 - RNA, 19 nt, Artificial Sequence
  Description of Artificial Sequence: Synthetic oligonucleotide
gguuauaauaguaaauaaa

SEQ ID NO: 2619018 - RNA, 19 nt, Artificial Sequence
  Description of Artificial Sequence: Synthetic oligonucleotide
uaacucugaccauuauacu

SEQ ID NO: 2619019 - RNA, 19 nt, Artificial Sequence
  Description of Artificial Sequence: Synthetic oligonucleotide
uccacaaccauguccugau

SEQ ID NO: 2619020 - RNA, 19 nt, Artificial Sequence
  Description of Artificial Sequence: Synthetic oligonucleotide
agugguuauaauaguaaau

SEQ ID NO: 2619021 - RNA, 19 nt, Artificial Sequence
  Description of Artificial Sequence: Synthetic oligonucleotide
uggaauucacagaguuuac

SEQ ID NO: 2619022 - RNA, 19 nt, Artificial Sequence
  Description of Artificial Sequence: Synthetic oligonucleotide
acaaaauaacucugaccau

SEQ ID NO: 2619023 - RNA, 19 nt, Artificial Sequence
  Description of Artificial Sequence: Synthetic oligonucleotide
ccauauaaaauguacaacu

SEQ ID NO: 2619024 - RNA, 19 nt, Artificial Sequence
  Description of Artificial Sequence: Synthetic oligonucleotide
ugggaacacaacaugccuu

SEQ ID NO: 2619025 - RNA, 19 nt, Artificial Sequence
  Description of Artificial Sequence: Synthetic oligonucleotide
ccaguaaccuuccauguag

SEQ ID NO: 2619026 - RNA, 19 nt, Artificial Sequence
  Description of Artificial Sequence: Synthetic oligonucleotide
uaacaguagugcugcaaaa

SEQ ID NO: 2619027 - RNA, 19 nt, Artificial Sequence
  Description of Artificial Sequence: Synthetic oligonucleotide
cccacaacccuccacaacc

SEQ ID NO: 2619028 - RNA, 19 nt, Artificial Sequence
  Description of Artificial Sequence: Synthetic oligonucleotide
cuucauugggaaauauuaa

SEQ ID NO: 2619029 - RNA, 19 nt, Artificial Sequence
  Description of Artificial Sequence: Synthetic oligonucleotide
uucgggaucuuggaauuca

SEQ ID NO: 2619030 - RNA, 19 nt, Artificial Sequence
  Description of Artificial Sequence: Synthetic oligonucleotide
gucagcugguuuauagggg

SEQ ID NO: 2619031 - RNA, 19 nt, Artificial Sequence
  Description of Artificial Sequence: Synthetic oligonucleotide
acuugugaacuuaacagua

SEQ ID NO: 2619032 - RNA, 19 nt, Artificial Sequence
  Description of Artificial Sequence: Synthetic oligonucleotide
auuccauuccauaaauaaa

SEQ ID NO: 2619033 - RNA, 19 nt, Artificial Sequence
  Description of Artificial Sequence: Synthetic oligonucleotide
ccaauauuucuuuugauua

SEQ ID NO: 2619034 - RNA, 19 nt, Artificial Sequence
  Description of Artificial Sequence: Synthetic oligonucleotide
acagaguuuaccagcgucu

SEQ ID NO: 2619035 - RNA, 19 nt, Artificial Sequence
  Description of Artificial Sequence: Synthetic oligonucleotide
auacuucaugugcuggagu

SEQ ID NO: 2619036 - RNA, 19 nt, Artificial Sequence
  Description of Artificial Sequence: Synthetic oligonucleotide
acgacacccacaacccucc

SEQ ID NO: 2619037 - RNA, 19 nt, Artificial Sequence
  Description of Artificial Sequence: Synthetic oligonucleotide
gauugcgcugagcucugug

SEQ ID NO: 2619038 - RNA, 19 nt, Artificial Sequence
  Description of Artificial Sequence: Synthetic oligonucleotide
aaagugucagcugguuuau

SEQ ID NO: 2619039 - RNA, 19 nt, Artificial Sequence
  Description of Artificial Sequence: Synthetic oligonucleotide
acccacaacccuccacaac

SEQ ID NO: 2619040 - RNA, 19 nt, Artificial Sequence
  Description of Artificial Sequence: Synthetic oligonucleotide
guagacuucgcaucuuaaa

SEQ ID NO: 2619041 - RNA, 19 nt, Artificial Sequence
  Description of Artificial Sequence: Synthetic oligonucleotide
acacaacaugccuucggga

SEQ ID NO: 2619042 - RNA, 19 nt, Artificial Sequence
  Description of Artificial Sequence: Synthetic oligonucleotide
caacauggagauugcgcug

SEQ ID NO: 2619043 - RNA, 19 nt, Artificial Sequence
  Description of Artificial Sequence: Synthetic oligonucleotide
gagaguaggguuuauucuu

SEQ ID NO: 2619044 - RNA, 19 nt, Artificial Sequence
  Description of Artificial Sequence: Synthetic oligonucleotide
gaauaacucucugauuaaa

SEQ ID NO: 2619045 - RNA, 19 nt, Artificial Sequence
  Description of Artificial Sequence: Synthetic oligonucleotide
uugcccaguaaccuuccau

SEQ ID NO: 2619046 - RNA, 19 nt, Artificial Sequence
  Description of Artificial Sequence: Synthetic oligonucleotide
ucaugugcuggaguugaac

SEQ ID NO: 2619047 - RNA, 19 nt, Artificial Sequence
  Description of Artificial Sequence: Synthetic oligonucleotide
guacaacauggagauugcg

SEQ ID NO: 2619048 - RNA, 19 nt, Artificial Sequence
  Description of Artificial Sequence: Synthetic oligonucleotide
cuuugcccaguaaccuucc

SEQ ID NO: 2619049 - RNA, 19 nt, Artificial Sequence
  Description of Artificial Sequence: Synthetic oligonucleotide
ggaauucacagaguuuacc

SEQ ID NO: 2619050 - RNA, 19 nt, Artificial Sequence
  Description of Artificial Sequence: Synthetic oligonucleotide
ucccuaacuucuuuucgua

SEQ ID NO: 2619051 - RNA, 19 nt, Artificial Sequence
  Description of Artificial Sequence: Synthetic oligonucleotide
ccauuccauaaauaaaguc

SEQ ID NO: 2619052 - RNA, 19 nt, Artificial Sequence
  Description of Artificial Sequence: Synthetic oligonucleotide
aacccuccacaaccauguc

SEQ ID NO: 2619053 - RNA, 19 nt, Artificial Sequence
  Description of Artificial Sequence: Synthetic oligonucleotide
cuuuaaggaauaacucucu

SEQ ID NO: 2619054 - RNA, 19 nt, Artificial Sequence
  Description of Artificial Sequence: Synthetic oligonucleotide
ggaucuuggaauucacaga

SEQ ID NO: 2619055 - RNA, 19 nt, Artificial Sequence
  Description of Artificial Sequence: Synthetic oligonucleotide
gugcuaacgacacccacaa

SEQ ID NO: 2619056 - RNA, 19 nt, Artificial Sequence
  Description of Artificial Sequence: Synthetic oligonucleotide
uacuugaacuugugaacuu

SEQ ID NO: 2619057 - RNA, 19 nt, Artificial Sequence
  Description of Artificial Sequence: Synthetic oligonucleotide
cuuccauguagacuucgca

SEQ ID NO: 2619058 - RNA, 19 nt, Artificial Sequence
  Description of Artificial Sequence: Synthetic oligonucleotide
auuaaagugucagcugguu

SEQ ID NO: 2619059 - RNA, 19 nt, Artificial Sequence
  Description of Artificial Sequence: Synthetic oligonucleotide
ucgggaucuuggaauucac

SEQ ID NO: 2619060 - RNA, 19 nt, Artificial Sequence
  Description of Artificial Sequence: Synthetic oligonucleotide
ucacagaguuuaccagcgu

SEQ ID NO: 2619061 - RNA, 19 nt, Artificial Sequence
  Description of Artificial Sequence: Synthetic oligonucleotide
auguagacuucgcaucuua

SEQ ID NO: 2619062 - RNA, 19 nt, Artificial Sequence
  Description of Artificial Sequence: Synthetic oligonucleotide
uuguuuucccuaacuucuu

SEQ ID NO: 2619063 - RNA, 19 nt, Artificial Sequence
  Description of Artificial Sequence: Synthetic oligonucleotide
uggagauugcgcugagcuc

SEQ ID NO: 2619064 - RNA, 19 nt, Artificial Sequence
  Description of Artificial Sequence: Synthetic oligonucleotide
gggaacacaacaugccuuc

SEQ ID NO: 2619065 - RNA, 19 nt, Artificial Sequence
  Description of Artificial Sequence: Synthetic oligonucleotide
acccaauauuucuuuugau

SEQ ID NO: 2619066 - RNA, 19 nt, Artificial Sequence
  Description of Artificial Sequence: Synthetic oligonucleotide
aaccauguccugauaguuu

SEQ ID NO: 2619067 - RNA, 19 nt, Artificial Sequence
  Description of Artificial Sequence: Synthetic oligonucleotide
cuucaugugcuggaguuga

SEQ ID NO: 2619068 - RNA, 19 nt, Artificial Sequence
  Description of Artificial Sequence: Synthetic oligonucleotide
acuucaugugcuggaguug

SEQ ID NO: 2619069 - RNA, 19 nt, Artificial Sequence
  Description of Artificial Sequence: Synthetic oligonucleotide
gacacccacaacccuccac

SEQ ID NO: 2619070 - RNA, 19 nt, Artificial Sequence
  Description of Artificial Sequence: Synthetic oligonucleotide
ugcgcugagcucuguggga

SEQ ID NO: 2619071 - RNA, 19 nt, Artificial Sequence
  Description of Artificial Sequence: Synthetic oligonucleotide
acuugaacuugugaacuua

SEQ ID NO: 2619072 - RNA, 19 nt, Artificial Sequence
  Description of Artificial Sequence: Synthetic oligonucleotide
accuuccauguagacuucg

SEQ ID NO: 2619073 - RNA, 19 nt, Artificial Sequence
  Description of Artificial Sequence: Synthetic oligonucleotide
cagaguuuaccagcgucug

SEQ ID NO: 2619074 - RNA, 19 nt, Artificial Sequence
  Description of Artificial Sequence: Synthetic oligonucleotide
acaacccuccacaaccaug

SEQ ID NO: 2619075 - RNA, 19 nt, Artificial Sequence
  Description of Artificial Sequence: Synthetic oligonucleotide
ugagcucugugggaacaca

SEQ ID NO: 2619076 - RNA, 19 nt, Artificial Sequence
  Description of Artificial Sequence: Synthetic oligonucleotide
cccauauaaaauguacaac

SEQ ID NO: 2619077 - RNA, 19 nt, Artificial Sequence
  Description of Artificial Sequence: Synthetic oligonucleotide
cugugcuaacgacacccac

SEQ ID NO: 2619078 - RNA, 19 nt, Artificial Sequence
  Description of Artificial Sequence: Synthetic oligonucleotide
acauggagauugcgcugag

SEQ ID NO: 2619079 - RNA, 19 nt, Artificial Sequence
  Description of Artificial Sequence: Synthetic oligonucleotide
cuuaacaguagugcugcaa

SEQ ID NO: 2619080 - RNA, 19 nt, Artificial Sequence
  Description of Artificial Sequence: Synthetic oligonucleotide
caucuagguacaacaugga

SEQ ID NO: 2619081 - RNA, 19 nt, Artificial Sequence
  Description of Artificial Sequence: Synthetic oligonucleotide
caacccuccacaaccaugu

SEQ ID NO: 2619082 - RNA, 19 nt, Artificial Sequence
  Description of Artificial Sequence: Synthetic oligonucleotide
ugccuucgggaucuuggaa

SEQ ID NO: 2619083 - RNA, 19 nt, Artificial Sequence
  Description of Artificial Sequence: Synthetic oligonucleotide
cucugaccauuauacuuca

SEQ ID NO: 2619084 - RNA, 19 nt, Artificial Sequence
  Description of Artificial Sequence: Synthetic oligonucleotide
guaaccuuccauguagacu

SEQ ID NO: 2619085 - RNA, 19 nt, Artificial Sequence
  Description of Artificial Sequence: Synthetic oligonucleotide
cucucugauuaaaauauuu

SEQ ID NO: 2619086 - RNA, 19 nt, Artificial Sequence
  Description of Artificial Sequence: Synthetic oligonucleotide
aaccuuccauguagacuuc

SEQ ID NO: 2619087 - RNA, 19 nt, Artificial Sequence
  Description of Artificial Sequence: Synthetic oligonucleotide
gcucugugggaacacaaca

SEQ ID NO: 2619088 - RNA, 19 nt, Artificial Sequence
  Description of Artificial Sequence: Synthetic oligonucleotide
ccuaacuucuuuucguaga

SEQ ID NO: 2619089 - RNA, 19 nt, Artificial Sequence
  Description of Artificial Sequence: Synthetic oligonucleotide
uugcugugcuaacgacacc

SEQ ID NO: 2619090 - RNA, 19 nt, Artificial Sequence
  Description of Artificial Sequence: Synthetic oligonucleotide
acaaaugugcaagcacuuu

SEQ ID NO: 2619091 - RNA, 19 nt, Artificial Sequence
  Description of Artificial Sequence: Synthetic oligonucleotide
gguacaacauggagauugc

SEQ ID NO: 2619092 - RNA, 19 nt, Artificial Sequence
  Description of Artificial Sequence: Synthetic oligonucleotide
ggagaguaggguuuauucu

SEQ ID NO: 2619093 - RNA, 19 nt, Artificial Sequence
  Description of Artificial Sequence: Synthetic oligonucleotide
acuuaacaguagugcugca

SEQ ID NO: 2619094 - RNA, 19 nt, Artificial Sequence
  Description of Artificial Sequence: Synthetic oligonucleotide
ggaauaacucucugauuaa

SEQ ID NO: 2619095 - RNA, 19 nt, Artificial Sequence
  Description of Artificial Sequence: Synthetic oligonucleotide
gugggaacacaacaugccu

SEQ ID NO: 2619096 - RNA, 19 nt, Artificial Sequence
  Description of Artificial Sequence: Synthetic oligonucleotide
auguacaacuaaauacauu

SEQ ID NO: 2619097 - RNA, 19 nt, Artificial Sequence
  Description of Artificial Sequence: Synthetic oligonucleotide
ucugaccauuauacuucau

SEQ ID NO: 2619098 - RNA, 19 nt, Artificial Sequence
  Description of Artificial Sequence: Synthetic oligonucleotide
uucaugugcuggaguugaa

SEQ ID NO: 2619099 - RNA, 19 nt, Artificial Sequence
  Description of Artificial Sequence: Synthetic oligonucleotide
cacaacaugccuucgggau

SEQ ID NO: 2619100 - RNA, 19 nt, Artificial Sequence
  Description of Artificial Sequence: Synthetic oligonucleotide
cuaacuucuuuucguagau

SEQ ID NO: 2619101 - RNA, 19 nt, Artificial Sequence
  Description of Artificial Sequence: Synthetic oligonucleotide
ggagauugcgcugagcucu

SEQ ID NO: 2619102 - RNA, 19 nt, Artificial Sequence
  Description of Artificial Sequence: Synthetic oligonucleotide
gugcaagcacuuugcccag

SEQ ID NO: 2619103 - RNA, 19 nt, Artificial Sequence
  Description of Artificial Sequence: Synthetic oligonucleotide
caguaaccuuccauguaga

SEQ ID NO: 2619104 - RNA, 19 nt, Artificial Sequence
  Description of Artificial Sequence: Synthetic oligonucleotide
agaguaggguuuauucuuu

SEQ ID NO: 2619105 - RNA, 19 nt, Artificial Sequence
  Description of Artificial Sequence: Synthetic oligonucleotide
cccuaacuucuuuucguag

SEQ ID NO: 2619106 - RNA, 19 nt, Artificial Sequence
  Description of Artificial Sequence: Synthetic oligonucleotide
ggaacacaacaugccuucg

SEQ ID NO: 2619107 - RNA, 19 nt, Artificial Sequence
  Description of Artificial Sequence: Synthetic oligonucleotide
cauggagauugcgcugagc

SEQ ID NO: 2619108 - RNA, 19 nt, Artificial Sequence
  Description of Artificial Sequence: Synthetic oligonucleotide
agucuucauugggaaauau

SEQ ID NO: 2619109 - RNA, 19 nt, Artificial Sequence
  Description of Artificial Sequence: Synthetic oligonucleotide
cguagauauaaauauauuu

SEQ ID NO: 2619110 - RNA, 19 nt, Artificial Sequence
  Description of Artificial Sequence: Synthetic oligonucleotide
ccuuccauguagacuucgc

SEQ ID NO: 2619111 - RNA, 19 nt, Artificial Sequence
  Description of Artificial Sequence: Synthetic oligonucleotide
acuucgcaucuuaaauaca

SEQ ID NO: 2619112 - RNA, 19 nt, Artificial Sequence
  Description of Artificial Sequence: Synthetic oligonucleotide
ugcuaacgacacccacaac

SEQ ID NO: 2619113 - RNA, 19 nt, Artificial Sequence
  Description of Artificial Sequence: Synthetic oligonucleotide
cuggaguugaacccauaua

SEQ ID NO: 2619114 - RNA, 19 nt, Artificial Sequence
  Description of Artificial Sequence: Synthetic oligonucleotide
gagauugcgcugagcucug

SEQ ID NO: 2619115 - RNA, 19 nt, Artificial Sequence
  Description of Artificial Sequence: Synthetic oligonucleotide
guuuaccagcgucugcacu

SEQ ID NO: 2619116 - RNA, 19 nt, Artificial Sequence
  Description of Artificial Sequence: Synthetic oligonucleotide
cucugugggaacacaacau

SEQ ID NO: 2619117 - RNA, 19 nt, Artificial Sequence
  Description of Artificial Sequence: Synthetic oligonucleotide
aucuuggaauucacagagu

SEQ ID NO: 2619118 - RNA, 19 nt, Artificial Sequence
  Description of Artificial Sequence: Synthetic oligonucleotide
cuuggaauucacagaguuu

SEQ ID NO: 2619119 - RNA, 19 nt, Artificial Sequence
  Description of Artificial Sequence: Synthetic oligonucleotide
ggaguugaacccauauaaa

SEQ ID NO: 2619120 - RNA, 19 nt, Artificial Sequence
  Description of Artificial Sequence: Synthetic oligonucleotide
gagcucugugggaacacaa

SEQ ID NO: 2619121 - RNA, 19 nt, Artificial Sequence
  Description of Artificial Sequence: Synthetic oligonucleotide
gacaaaugugcaagcacuu

SEQ ID NO: 2619122 - RNA, 19 nt, Artificial Sequence
  Description of Artificial Sequence: Synthetic oligonucleotide
acucucugauuaaaauauu

SEQ ID NO: 2619123 - RNA, 19 nt, Artificial Sequence
  Description of Artificial Sequence: Synthetic oligonucleotide
cuccacaaccauguccuga

SEQ ID NO: 2619124 - RNA, 19 nt, Artificial Sequence
  Description of Artificial Sequence: Synthetic oligonucleotide
cugagcucugugggaacac

SEQ ID NO: 2619125 - RNA, 19 nt, Artificial Sequence
  Description of Artificial Sequence: Synthetic oligonucleotide
cuucgggaucuuggaauuc

SEQ ID NO: 2619126 - RNA, 19 nt, Artificial Sequence
  Description of Artificial Sequence: Synthetic oligonucleotide
cgcaucuuaaauacacaca

SEQ ID NO: 2619127 - RNA, 19 nt, Artificial Sequence
  Description of Artificial Sequence: Synthetic oligonucleotide
caacaugccuucgggaucu

SEQ ID NO: 2619128 - RNA, 19 nt, Artificial Sequence
  Description of Artificial Sequence: Synthetic oligonucleotide
acaugccuucgggaucuug

SEQ ID NO: 2619129 - RNA, 19 nt, Artificial Sequence
  Description of Artificial Sequence: Synthetic oligonucleotide
caaacccaauauuucuuuu

SEQ ID NO: 2619130 - RNA, 19 nt, Artificial Sequence
  Description of Artificial Sequence: Synthetic oligonucleotide
ugcaagcacuuugcccagu

SEQ ID NO: 2619131 - RNA, 19 nt, Artificial Sequence
  Description of Artificial Sequence: Synthetic oligonucleotide
cccaauauuucuuuugauu

SEQ ID NO: 2619132 - RNA, 19 nt, Artificial Sequence
  Description of Artificial Sequence: Synthetic oligonucleotide
gaguaggguuuauucuuuu

SEQ ID NO: 2619133 - RNA, 19 nt, Artificial Sequence
  Description of Artificial Sequence: Synthetic oligonucleotide
aagugucagcugguuuaua

SEQ ID NO: 2619134 - RNA, 19 nt, Artificial Sequence
  Description of Artificial Sequence: Synthetic oligonucleotide
guacaacuaaauacauuuu

SEQ ID NO: 2619135 - RNA, 19 nt, Artificial Sequence
  Description of Artificial Sequence: Synthetic oligonucleotide
cccuccacaaccauguccu

SEQ ID NO: 2619136 - RNA, 19 nt, Artificial Sequence
  Description of Artificial Sequence: Synthetic oligonucleotide
caagcacuuugcccaguaa

SEQ ID NO: 2619137 - RNA, 19 nt, Artificial Sequence
  Description of Artificial Sequence: Synthetic oligonucleotide
gccuucgggaucuuggaau

SEQ ID NO: 2619138 - RNA, 19 nt, Artificial Sequence
  Description of Artificial Sequence: Synthetic oligonucleotide
cauucucaucuagguacaa

SEQ ID NO: 2619139 - RNA, 19 nt, Artificial Sequence
  Description of Artificial Sequence: Synthetic oligonucleotide
gcaagcacuuugcccagua

SEQ ID NO: 2619140 - RNA, 19 nt, Artificial Sequence
  Description of Artificial Sequence: Synthetic oligonucleotide
caaccauguccugauaguu

SEQ ID NO: 2619141 - RNA, 19 nt, Artificial Sequence
  Description of Artificial Sequence: Synthetic oligonucleotide
uagguacaacauggagauu

SEQ ID NO: 2619142 - RNA, 19 nt, Artificial Sequence
  Description of Artificial Sequence: Synthetic oligonucleotide
gcugagcucugugggaaca

SEQ ID NO: 2619143 - RNA, 19 nt, Artificial Sequence
  Description of Artificial Sequence: Synthetic oligonucleotide
cacuuugcccaguaaccuu

SEQ ID NO: 2619144 - RNA, 19 nt, Artificial Sequence
  Description of Artificial Sequence: Synthetic oligonucleotide
ccauguagacuucgcaucu

SEQ ID NO: 2619145 - RNA, 19 nt, Artificial Sequence
  Description of Artificial Sequence: Synthetic oligonucleotide
gcccaguaaccuuccaugu

SEQ ID NO: 2619146 - RNA, 19 nt, Artificial Sequence
  Description of Artificial Sequence: Synthetic oligonucleotide
agauugcgcugagcucugu

SEQ ID NO: 2619147 - RNA, 19 nt, Artificial Sequence
  Description of Artificial Sequence: Synthetic oligonucleotide
gcacuuugcccaguaaccu

SEQ ID NO: 2619148 - RNA, 19 nt, Artificial Sequence
  Description of Artificial Sequence: Synthetic oligonucleotide
ccauuccauuccauaaaua

SEQ ID NO: 2619149 - RNA, 19 nt, Artificial Sequence
  Description of Artificial Sequence: Synthetic oligonucleotide
ccacaacccuccacaacca

SEQ ID NO: 2619150 - RNA, 19 nt, Artificial Sequence
  Description of Artificial Sequence: Synthetic oligonucleotide
gcugugcuaacgacaccca

SEQ ID NO: 2619151 - RNA, 19 nt, Artificial Sequence
  Description of Artificial Sequence: Synthetic oligonucleotide
aacaugccuucgggaucuu

SEQ ID NO: 2619152 - RNA, 19 nt, Artificial Sequence
  Description of Artificial Sequence: Synthetic oligonucleotide
cccaguaaccuuccaugua

SEQ ID NO: 2619153 - RNA, 19 nt, Artificial Sequence
  Description of Artificial Sequence: Synthetic oligonucleotide
ccuccacaaccauguccug

SEQ ID NO: 2619154 - RNA, 19 nt, Artificial Sequence
  Description of Artificial Sequence: Synthetic oligonucleotide
cgggaucuuggaauucaca

SEQ ID NO: 2619155 - RNA, 19 nt, Artificial Sequence
  Description of Artificial Sequence: Synthetic oligonucleotide
gcgcugagcucugugggaa

SEQ ID NO: 2619156 - RNA, 19 nt, Artificial Sequence
  Description of Artificial Sequence: Synthetic oligonucleotide
cauguagacuucgcaucuu

SEQ ID NO: 2619157 - RNA, 19 nt, Artificial Sequence
  Description of Artificial Sequence: Synthetic oligonucleotide
ccuucgggaucuuggaauu

SEQ ID NO: 2619158 - RNA, 19 nt, Artificial Sequence
  Description of Artificial Sequence: Synthetic oligonucleotide
cgcugagcucugugggaac

SEQ ID NO: 2619159 - RNA, 19 nt, Artificial Sequence
  Description of Artificial Sequence: Synthetic oligonucleotide
gugcuggaguugaacccau

SEQ ID NO: 2619160 - RNA, 19 nt, Artificial Sequence
  Description of Artificial Sequence: Synthetic oligonucleotide
ggggagaguaggguuuauu

SEQ ID NO: 2619161 - RNA, 19 nt, Artificial Sequence
  Description of Artificial Sequence: Synthetic oligonucleotide
cgacacccacaacccucca

SEQ ID NO: 2619162 - RNA, 19 nt, Artificial Sequence
  Description of Artificial Sequence: Synthetic oligonucleotide
aaaacaaaccuccucaucg

SEQ ID NO: 2619163 - RNA, 19 nt, Artificial Sequence
  Description of Artificial Sequence: Synthetic oligonucleotide
agugccagaacauacuccc

SEQ ID NO: 2619164 - RNA, 19 nt, Artificial Sequence
  Description of Artificial Sequence: Synthetic oligonucleotide
ucuuccauggccuuagggg

SEQ ID NO: 2619165 - RNA, 19 nt, Artificial Sequence
  Description of Artificial Sequence: Synthetic oligonucleotide
uauuguuuccuccuuaucu

SEQ ID NO: 2619166 - RNA, 19 nt, Artificial Sequence
  Description of Artificial Sequence: Synthetic oligonucleotide
uaaagcaucacccuuccca

SEQ ID NO: 2619167 - RNA, 19 nt, Artificial Sequence
  Description of Artificial Sequence: Synthetic oligonucleotide
uacucagagauccagggag

SEQ ID NO: 2619168 - RNA, 19 nt, Artificial Sequence
  Description of Artificial Sequence: Synthetic oligonucleotide
uaugggagcugccucaugg

SEQ ID NO: 2619169 - RNA, 19 nt, Artificial Sequence
  Description of Artificial Sequence: Synthetic oligonucleotide
gaaucuugagcucucuggg

SEQ ID NO: 2619170 - RNA, 19 nt, Artificial Sequence
  Description of Artificial Sequence: Synthetic oligonucleotide
cucuuggggaguaaaaugg

SEQ ID NO: 2619171 - RNA, 19 nt, Artificial Sequence
  Description of Artificial Sequence: Synthetic oligonucleotide
uguccauuggcccagacau

SEQ ID NO: 2619172 - RNA, 19 nt, Artificial Sequence
  Description of Artificial Sequence: Synthetic oligonucleotide
aaaaccugccguccccucc

SEQ ID NO: 2619173 - RNA, 19 nt, Artificial Sequence
  Description of Artificial Sequence: Synthetic oligonucleotide
cauguugaaggucaacugg

SEQ ID NO: 2619174 - RNA, 19 nt, Artificial Sequence
  Description of Artificial Sequence: Synthetic oligonucleotide
gauggcauuguccauuggc

SEQ ID NO: 2619175 - RNA, 19 nt, Artificial Sequence
  Description of Artificial Sequence: Synthetic oligonucleotide
uccuccuuaucuuccaugg

SEQ ID NO: 2619176 - RNA, 19 nt, Artificial Sequence
  Description of Artificial Sequence: Synthetic oligonucleotide
cuucucuagagucucaagc

SEQ ID NO: 2619177 - RNA, 19 nt, Artificial Sequence
  Description of Artificial Sequence: Synthetic oligonucleotide
cacgccuccauguugaagg

SEQ ID NO: 2619178 - RNA, 19 nt, Artificial Sequence
  Description of Artificial Sequence: Synthetic oligonucleotide
ucaggguuccagucgaugg

SEQ ID NO: 2619179 - RNA, 19 nt, Artificial Sequence
  Description of Artificial Sequence: Synthetic oligonucleotide
ucugaagucacuucuuccu

SEQ ID NO: 2619180 - RNA, 19 nt, Artificial Sequence
  Description of Artificial Sequence: Synthetic oligonucleotide
aaaccugccguccccuccc

SEQ ID NO: 2619181 - RNA, 19 nt, Artificial Sequence
  Description of Artificial Sequence: Synthetic oligonucleotide
acuggguggaacucuaagg

SEQ ID NO: 2619182 - RNA, 19 nt, Artificial Sequence
  Description of Artificial Sequence: Synthetic oligonucleotide
aaugguggcccguuccuuc

SEQ ID NO: 2619183 - RNA, 19 nt, Artificial Sequence
  Description of Artificial Sequence: Synthetic oligonucleotide
cuggguggaacucuaaggg

SEQ ID NO: 2619184 - RNA, 19 nt, Artificial Sequence
  Description of Artificial Sequence: Synthetic oligonucleotide
ucugguacuugucugagua

SEQ ID NO: 2619185 - RNA, 19 nt, Artificial Sequence
  Description of Artificial Sequence: Synthetic oligonucleotide
ucuguaguuuccgaacucg

SEQ ID NO: 2619186 - RNA, 19 nt, Artificial Sequence
  Description of Artificial Sequence: Synthetic oligonucleotide
aucguacuccucuucuucc

SEQ ID NO: 2619187 - RNA, 19 nt, Artificial Sequence
  Description of Artificial Sequence: Synthetic oligonucleotide
cuucccaaugcccacacgc

SEQ ID NO: 2619188 - RNA, 19 nt, Artificial Sequence
  Description of Artificial Sequence: Synthetic oligonucleotide
aacauacuccccuuccucu

SEQ ID NO: 2619189 - RNA, 19 nt, Artificial Sequence
  Description of Artificial Sequence: Synthetic oligonucleotide
uuuccgaacucgaaucuug

SEQ ID NO: 2619190 - RNA, 19 nt, Artificial Sequence
  Description of Artificial Sequence: Synthetic oligonucleotide
aaacaaaccuccucaucgu

SEQ ID NO: 2619191 - RNA, 19 nt, Artificial Sequence
  Description of Artificial Sequence: Synthetic oligonucleotide
cuccuuaucuuccauggcc

SEQ ID NO: 2619192 - RNA, 19 nt, Artificial Sequence
  Description of Artificial Sequence: Synthetic oligonucleotide
auguugaaggucaacuggc

SEQ ID NO: 2619193 - RNA, 19 nt, Artificial Sequence
  Description of Artificial Sequence: Synthetic oligonucleotide
caagcuucuguauuguuuc

SEQ ID NO: 2619194 - RNA, 19 nt, Artificial Sequence
  Description of Artificial Sequence: Synthetic oligonucleotide
ugaguaccguuccacaucu

SEQ ID NO: 2619195 - RNA, 19 nt, Artificial Sequence
  Description of Artificial Sequence: Synthetic oligonucleotide
aaaaugguggcccguuccu

SEQ ID NO: 2619196 - RNA, 19 nt, Artificial Sequence
  Description of Artificial Sequence: Synthetic oligonucleotide
auggcauuguccauuggcc

SEQ ID NO: 2619197 - RNA, 19 nt, Artificial Sequence
  Description of Artificial Sequence: Synthetic oligonucleotide
cucucuuggggacagcugg

SEQ ID NO: 2619198 - RNA, 19 nt, Artificial Sequence
  Description of Artificial Sequence: Synthetic oligonucleotide
ugaagucacuucuuccucc

SEQ ID NO: 2619199 - RNA, 19 nt, Artificial Sequence
  Description of Artificial Sequence: Synthetic oligonucleotide
uguugaaggucaacuggcc

SEQ ID NO: 2619200 - RNA, 19 nt, Artificial Sequence
  Description of Artificial Sequence: Synthetic oligonucleotide
uggagaaggcuguuagagg

SEQ ID NO: 2619201 - RNA, 19 nt, Artificial Sequence
  Description of Artificial Sequence: Synthetic oligonucleotide
gaagagguggagaaggcug

SEQ ID NO: 2619202 - RNA, 19 nt, Artificial Sequence
  Description of Artificial Sequence: Synthetic oligonucleotide
ugaaggucaacuggccucg

SEQ ID NO: 2619203 - RNA, 19 nt, Artificial Sequence
  Description of Artificial Sequence: Synthetic oligonucleotide
uggguggaacucuaagggg

SEQ ID NO: 2619204 - RNA, 19 nt, Artificial Sequence
  Description of Artificial Sequence: Synthetic oligonucleotide
aaguaugggagcugccuca

SEQ ID NO: 2619205 - RNA, 19 nt, Artificial Sequence
  Description of Artificial Sequence: Synthetic oligonucleotide
aaggucaacuggccucggc

SEQ ID NO: 2619206 - RNA, 19 nt, Artificial Sequence
  Description of Artificial Sequence: Synthetic oligonucleotide
uccauguugaaggucaacu

SEQ ID NO: 2619207 - RNA, 19 nt, Artificial Sequence
  Description of Artificial Sequence: Synthetic oligonucleotide
acuggccucggccacgacc

SEQ ID NO: 2619208 - RNA, 19 nt, Artificial Sequence
  Description of Artificial Sequence: Synthetic oligonucleotide
uccacaucucucuugggga

SEQ ID NO: 2619209 - RNA, 19 nt, Artificial Sequence
  Description of Artificial Sequence: Synthetic oligonucleotide
ucaagcuucuguauuguuu

SEQ ID NO: 2619210 - RNA, 19 nt, Artificial Sequence
  Description of Artificial Sequence: Synthetic oligonucleotide
gacaucugguacuugucug

SEQ ID NO: 2619211 - RNA, 19 nt, Artificial Sequence
  Description of Artificial Sequence: Synthetic oligonucleotide
uccuuaucuuccauggccu

SEQ ID NO: 2619212 - RNA, 19 nt, Artificial Sequence
  Description of Artificial Sequence: Synthetic oligonucleotide
uuaucuuccauggccuuag

SEQ ID NO: 2619213 - RNA, 19 nt, Artificial Sequence
  Description of Artificial Sequence: Synthetic oligonucleotide
aaucuugagcucucugggu

SEQ ID NO: 2619214 - RNA, 19 nt, Artificial Sequence
  Description of Artificial Sequence: Synthetic oligonucleotide
uucuguauuguuuccuccu

SEQ ID NO: 2619215 - RNA, 19 nt, Artificial Sequence
  Description of Artificial Sequence: Synthetic oligonucleotide
uggggaguaaaaugguggc

SEQ ID NO: 2619216 - RNA, 19 nt, Artificial Sequence
  Description of Artificial Sequence: Synthetic oligonucleotide
aguaccguuccacaucucu

SEQ ID NO: 2619217 - RNA, 19 nt, Artificial Sequence
  Description of Artificial Sequence: Synthetic oligonucleotide
ucuagagucucaagcuucu

SEQ ID NO: 2619218 - RNA, 19 nt, Artificial Sequence
  Description of Artificial Sequence: Synthetic oligonucleotide
uaguuuccgaacucgaauc

SEQ ID NO: 2619219 - RNA, 19 nt, Artificial Sequence
  Description of Artificial Sequence: Synthetic oligonucleotide
uagagucucaagcuucugu

SEQ ID NO: 2619220 - RNA, 19 nt, Artificial Sequence
  Description of Artificial Sequence: Synthetic oligonucleotide
aacucgaaucuugagcucu

SEQ ID NO: 2619221 - RNA, 19 nt, Artificial Sequence
  Description of Artificial Sequence: Synthetic oligonucleotide
ugguacuugucugaguacc

SEQ ID NO: 2619222 - RNA, 19 nt, Artificial Sequence
  Description of Artificial Sequence: Synthetic oligonucleotide
agagaaaccugucuugaaa

SEQ ID NO: 2619223 - RNA, 19 nt, Artificial Sequence
  Description of Artificial Sequence: Synthetic oligonucleotide
uugaaggucaacuggccuc

SEQ ID NO: 2619224 - RNA, 19 nt, Artificial Sequence
  Description of Artificial Sequence: Synthetic oligonucleotide
uguauuguuuccuccuuau

SEQ ID NO: 2619225 - RNA, 19 nt, Artificial Sequence
  Description of Artificial Sequence: Synthetic oligonucleotide
guggagaaggcuguuagag

SEQ ID NO: 2619226 - RNA, 19 nt, Artificial Sequence
  Description of Artificial Sequence: Synthetic oligonucleotide
gagaaaccugucuugaaaa

SEQ ID NO: 2619227 - RNA, 19 nt, Artificial Sequence
  Description of Artificial Sequence: Synthetic oligonucleotide
gagcucucuggguagacgc

SEQ ID NO: 2619228 - RNA, 19 nt, Artificial Sequence
  Description of Artificial Sequence: Synthetic oligonucleotide
aaggcuguuagaggugggg

SEQ ID NO: 2619229 - RNA, 19 nt, Artificial Sequence
  Description of Artificial Sequence: Synthetic oligonucleotide
ucuuggggacagcuggccg

SEQ ID NO: 2619230 - RNA, 19 nt, Artificial Sequence
  Description of Artificial Sequence: Synthetic oligonucleotide
ucacccuucccaaugccca

SEQ ID NO: 2619231 - RNA, 19 nt, Artificial Sequence
  Description of Artificial Sequence: Synthetic oligonucleotide
agguggagaaggcuguuag

SEQ ID NO: 2619232 - RNA, 19 nt, Artificial Sequence
  Description of Artificial Sequence: Synthetic oligonucleotide
ugccagaacauacuccccu

SEQ ID NO: 2619233 - RNA, 19 nt, Artificial Sequence
  Description of Artificial Sequence: Synthetic oligonucleotide
uguaguuuccgaacucgaa

SEQ ID NO: 2619234 - RNA, 19 nt, Artificial Sequence
  Description of Artificial Sequence: Synthetic oligonucleotide
aacuugaaauucgcuuuuc

SEQ ID NO: 2619235 - RNA, 19 nt, Artificial Sequence
  Description of Artificial Sequence: Synthetic oligonucleotide
ucuucguccuccucugaag

SEQ ID NO: 2619236 - RNA, 19 nt, Artificial Sequence
  Description of Artificial Sequence: Synthetic oligonucleotide
agaaggcuguuagaggugg

SEQ ID NO: 2619237 - RNA, 19 nt, Artificial Sequence
  Description of Artificial Sequence: Synthetic oligonucleotide
aaaccuccucaucguacuc

SEQ ID NO: 2619238 - RNA, 19 nt, Artificial Sequence
  Description of Artificial Sequence: Synthetic oligonucleotide
ucuugagcucucuggguag

SEQ ID NO: 2619239 - RNA, 19 nt, Artificial Sequence
  Description of Artificial Sequence: Synthetic oligonucleotide
aucuuccauggccuuaggg

SEQ ID NO: 2619240 - RNA, 19 nt, Artificial Sequence
  Description of Artificial Sequence: Synthetic oligonucleotide
cuugucugaguaccguucc

SEQ ID NO: 2619241 - RNA, 19 nt, Artificial Sequence
  Description of Artificial Sequence: Synthetic oligonucleotide
auuguuuccuccuuaucuu

SEQ ID NO: 2619242 - RNA, 19 nt, Artificial Sequence
  Description of Artificial Sequence: Synthetic oligonucleotide
ucuuggggaguaaaauggu

SEQ ID NO: 2619243 - RNA, 19 nt, Artificial Sequence
  Description of Artificial Sequence: Synthetic oligonucleotide
acuugaaauucgcuuuucu

SEQ ID NO: 2619244 - RNA, 19 nt, Artificial Sequence
  Description of Artificial Sequence: Synthetic oligonucleotide
uccauuggcccagacaucu

SEQ ID NO: 2619245 - RNA, 19 nt, Artificial Sequence
  Description of Artificial Sequence: Synthetic oligonucleotide
cuuggggacagcuggccgg

SEQ ID NO: 2619246 - RNA, 19 nt, Artificial Sequence
  Description of Artificial Sequence: Synthetic oligonucleotide
ugaaguaugggagcugccu

SEQ ID NO: 2619247 - RNA, 19 nt, Artificial Sequence
  Description of Artificial Sequence: Synthetic oligonucleotide
agacaucugguacuugucu

SEQ ID NO: 2619248 - RNA, 19 nt, Artificial Sequence
  Description of Artificial Sequence: Synthetic oligonucleotide
gucucaagcuucuguauug

SEQ ID NO: 2619249 - RNA, 19 nt, Artificial Sequence
  Description of Artificial Sequence: Synthetic oligonucleotide
cuuggggaguaaaauggug

SEQ ID NO: 2619250 - RNA, 19 nt, Artificial Sequence
  Description of Artificial Sequence: Synthetic oligonucleotide
uggcauuguccauuggccc

SEQ ID NO: 2619251 - RNA, 19 nt, Artificial Sequence
  Description of Artificial Sequence: Synthetic oligonucleotide
acaaaccuccucaucguac

SEQ ID NO: 2619252 - RNA, 19 nt, Artificial Sequence
  Description of Artificial Sequence: Synthetic oligonucleotide
cagaacauacuccccuucc

SEQ ID NO: 2619253 - RNA, 19 nt, Artificial Sequence
  Description of Artificial Sequence: Synthetic oligonucleotide
ucuucucuagagucucaag

SEQ ID NO: 2619254 - RNA, 19 nt, Artificial Sequence
  Description of Artificial Sequence: Synthetic oligonucleotide
acauacuccccuuccucuc

SEQ ID NO: 2619255 - RNA, 19 nt, Artificial Sequence
  Description of Artificial Sequence: Synthetic oligonucleotide
aguuuccgaacucgaaucu

SEQ ID NO: 2619256 - RNA, 19 nt, Artificial Sequence
  Description of Artificial Sequence: Synthetic oligonucleotide
ucuugcuucagugccagaa

SEQ ID NO: 2619257 - RNA, 19 nt, Artificial Sequence
  Description of Artificial Sequence: Synthetic oligonucleotide
uucccaaugcccacacgcc

SEQ ID NO: 2619258 - RNA, 19 nt, Artificial Sequence
  Description of Artificial Sequence: Synthetic oligonucleotide
cucuccugcgggcagaggc

SEQ ID NO: 2619259 - RNA, 19 nt, Artificial Sequence
  Description of Artificial Sequence: Synthetic oligonucleotide
guagacgccuccaaucagg

SEQ ID NO: 2619260 - RNA, 19 nt, Artificial Sequence
  Description of Artificial Sequence: Synthetic oligonucleotide
augggagcugccucauggc

SEQ ID NO: 2619261 - RNA, 19 nt, Artificial Sequence
  Description of Artificial Sequence: Synthetic oligonucleotide
cacagagaaaccugucuug

SEQ ID NO: 2619262 - RNA, 19 nt, Artificial Sequence
  Description of Artificial Sequence: Synthetic oligonucleotide
uuguccauuggcccagaca

SEQ ID NO: 2619263 - RNA, 19 nt, Artificial Sequence
  Description of Artificial Sequence: Synthetic oligonucleotide
gaaguaugggagcugccuc

SEQ ID NO: 2619264 - RNA, 19 nt, Artificial Sequence
  Description of Artificial Sequence: Synthetic oligonucleotide
cucuagagucucaagcuuc

SEQ ID NO: 2619265 - RNA, 19 nt, Artificial Sequence
  Description of Artificial Sequence: Synthetic oligonucleotide
uaccguuccacaucucucu

SEQ ID NO: 2619266 - RNA, 19 nt, Artificial Sequence
  Description of Artificial Sequence: Synthetic oligonucleotide
agagucucaagcuucugua

SEQ ID NO: 2619267 - RNA, 19 nt, Artificial Sequence
  Description of Artificial Sequence: Synthetic oligonucleotide
cuggccucggccacgaccc

SEQ ID NO: 2619268 - RNA, 19 nt, Artificial Sequence
  Description of Artificial Sequence: Synthetic oligonucleotide
acaucugguacuugucuga

SEQ ID NO: 2619269 - RNA, 19 nt, Artificial Sequence
  Description of Artificial Sequence: Synthetic oligonucleotide
acacagagaaaccugucuu

SEQ ID NO: 2619270 - RNA, 19 nt, Artificial Sequence
  Description of Artificial Sequence: Synthetic oligonucleotide
ucugaguaccguuccacau

SEQ ID NO: 2619271 - RNA, 19 nt, Artificial Sequence
  Description of Artificial Sequence: Synthetic oligonucleotide
ucgaaucuugagcucucug

SEQ ID NO: 2619272 - RNA, 19 nt, Artificial Sequence
  Description of Artificial Sequence: Synthetic oligonucleotide
ucucuagagucucaagcuu

SEQ ID NO: 2619273 - RNA, 19 nt, Artificial Sequence
  Description of Artificial Sequence: Synthetic oligonucleotide
aucacccuucccaaugccc

SEQ ID NO: 2619274 - RNA, 19 nt, Artificial Sequence
  Description of Artificial Sequence: Synthetic oligonucleotide
uccaaucaggguuccaguc

SEQ ID NO: 2619275 - RNA, 19 nt, Artificial Sequence
  Description of Artificial Sequence: Synthetic oligonucleotide
acuugucugaguaccguuc

SEQ ID NO: 2619276 - RNA, 19 nt, Artificial Sequence
  Description of Artificial Sequence: Synthetic oligonucleotide
uccccuuccucuccugcgg

SEQ ID NO: 2619277 - RNA, 19 nt, Artificial Sequence
  Description of Artificial Sequence: Synthetic oligonucleotide
ugggagcugccucauggcc

SEQ ID NO: 2619278 - RNA, 19 nt, Artificial Sequence
  Description of Artificial Sequence: Synthetic oligonucleotide
uccgaacucgaaucuugag

SEQ ID NO: 2619279 - RNA, 19 nt, Artificial Sequence
  Description of Artificial Sequence: Synthetic oligonucleotide
ccuggauacucagagaucc

SEQ ID NO: 2619280 - RNA, 19 nt, Artificial Sequence
  Description of Artificial Sequence: Synthetic oligonucleotide
uuccgaacucgaaucuuga

SEQ ID NO: 2619281 - RNA, 19 nt, Artificial Sequence
  Description of Artificial Sequence: Synthetic oligonucleotide
acuccccuuccucuccugc

SEQ ID NO: 2619282 - RNA, 19 nt, Artificial Sequence
  Description of Artificial Sequence: Synthetic oligonucleotide
aacaaaccuccucaucgua

SEQ ID NO: 2619283 - RNA, 19 nt, Artificial Sequence
  Description of Artificial Sequence: Synthetic oligonucleotide
uggguagacgccuccaauc

SEQ ID NO: 2619284 - RNA, 19 nt, Artificial Sequence
  Description of Artificial Sequence: Synthetic oligonucleotide
agaggcacuggguggaacu

SEQ ID NO: 2619285 - RNA, 19 nt, Artificial Sequence
  Description of Artificial Sequence: Synthetic oligonucleotide
gggaguaaaaugguggccc

SEQ ID NO: 2619286 - RNA, 19 nt, Artificial Sequence
  Description of Artificial Sequence: Synthetic oligonucleotide
uggcccagacaucugguac

SEQ ID NO: 2619287 - RNA, 19 nt, Artificial Sequence
  Description of Artificial Sequence: Synthetic oligonucleotide
uucuguaguuuccgaacuc

SEQ ID NO: 2619288 - RNA, 19 nt, Artificial Sequence
  Description of Artificial Sequence: Synthetic oligonucleotide
ggaguaaaaugguggcccg

SEQ ID NO: 2619289 - RNA, 19 nt, Artificial Sequence
  Description of Artificial Sequence: Synthetic oligonucleotide
ucuguauuguuuccuccuu

SEQ ID NO: 2619290 - RNA, 19 nt, Artificial Sequence
  Description of Artificial Sequence: Synthetic oligonucleotide
cagugccagaacauacucc

SEQ ID NO: 2619291 - RNA, 19 nt, Artificial Sequence
  Description of Artificial Sequence: Synthetic oligonucleotide
uccuucuguaguuuccgaa

SEQ ID NO: 2619292 - RNA, 19 nt, Artificial Sequence
  Description of Artificial Sequence: Synthetic oligonucleotide
ugagcucucuggguagacg

SEQ ID NO: 2619293 - RNA, 19 nt, Artificial Sequence
  Description of Artificial Sequence: Synthetic oligonucleotide
ucguacuccucuucuuccc

SEQ ID NO: 2619294 - RNA, 19 nt, Artificial Sequence
  Description of Artificial Sequence: Synthetic oligonucleotide
aucuugagcucucugggua

SEQ ID NO: 2619295 - RNA, 19 nt, Artificial Sequence
  Description of Artificial Sequence: Synthetic oligonucleotide
ucucucuuggggacagcug

SEQ ID NO: 2619296 - RNA, 19 nt, Artificial Sequence
  Description of Artificial Sequence: Synthetic oligonucleotide
ggggaagagguggagaagg

SEQ ID NO: 2619297 - RNA, 19 nt, Artificial Sequence
  Description of Artificial Sequence: Synthetic oligonucleotide
caucguacuccucuucuuc

SEQ ID NO: 2619298 - RNA, 19 nt, Artificial Sequence
  Description of Artificial Sequence: Synthetic oligonucleotide
ucucuuggggacagcuggc

SEQ ID NO: 2619299 - RNA, 19 nt, Artificial Sequence
  Description of Artificial Sequence: Synthetic oligonucleotide
ucccaaugcccacacgccu

SEQ ID NO: 2619300 - RNA, 19 nt, Artificial Sequence
  Description of Artificial Sequence: Synthetic oligonucleotide
gguaaagcaucacccuucc

SEQ ID NO: 2619301 - RNA, 19 nt, Artificial Sequence
  Description of Artificial Sequence: Synthetic oligonucleotide
agucucaagcuucuguauu

SEQ ID NO: 2619302 - RNA, 19 nt, Artificial Sequence
  Description of Artificial Sequence: Synthetic oligonucleotide
guuccagucgauggcauug

SEQ ID NO: 2619303 - RNA, 19 nt, Artificial Sequence
  Description of Artificial Sequence: Synthetic oligonucleotide
auuguccauuggcccagac

SEQ ID NO: 2619304 - RNA, 19 nt, Artificial Sequence
  Description of Artificial Sequence: Synthetic oligonucleotide
cauacuccccuuccucucc

SEQ ID NO: 2619305 - RNA, 19 nt, Artificial Sequence
  Description of Artificial Sequence: Synthetic oligonucleotide
ugcgggcagaggcacuggg

SEQ ID NO: 2619306 - RNA, 19 nt, Artificial Sequence
  Description of Artificial Sequence: Synthetic oligonucleotide
cgaaucuugagcucucugg

SEQ ID NO: 2619307 - RNA, 19 nt, Artificial Sequence
  Description of Artificial Sequence: Synthetic oligonucleotide
ggggccuggauacucagag

SEQ ID NO: 2619308 - RNA, 19 nt, Artificial Sequence
  Description of Artificial Sequence: Synthetic oligonucleotide
cugaguaccguuccacauc

SEQ ID NO: 2619309 - RNA, 19 nt, Artificial Sequence
  Description of Artificial Sequence: Synthetic oligonucleotide
ucguccuccucugaaguca

SEQ ID NO: 2619310 - RNA, 19 nt, Artificial Sequence
  Description of Artificial Sequence: Synthetic oligonucleotide
ugcuucagugccagaacau

SEQ ID NO: 2619311 - RNA, 19 nt, Artificial Sequence
  Description of Artificial Sequence: Synthetic oligonucleotide
uaucuuccauggccuuagg

SEQ ID NO: 2619312 - RNA, 19 nt, Artificial Sequence
  Description of Artificial Sequence: Synthetic oligonucleotide
ucuccugcgggcagaggca

SEQ ID NO: 2619313 - RNA, 19 nt, Artificial Sequence
  Description of Artificial Sequence: Synthetic oligonucleotide
ugccucauggccccacgca

SEQ ID NO: 2619314 - RNA, 19 nt, Artificial Sequence
  Description of Artificial Sequence: Synthetic oligonucleotide
ccgaacucgaaucuugagc

SEQ ID NO: 2619315 - RNA, 19 nt, Artificial Sequence
  Description of Artificial Sequence: Synthetic oligonucleotide
caggguuccagucgauggc

SEQ ID NO: 2619316 - RNA, 19 nt, Artificial Sequence
  Description of Artificial Sequence: Synthetic oligonucleotide
ccaaucaggguuccagucg

SEQ ID NO: 2619317 - RNA, 19 nt, Artificial Sequence
  Description of Artificial Sequence: Synthetic oligonucleotide
cuggccggaugaaguaugg

SEQ ID NO: 2619318 - RNA, 19 nt, Artificial Sequence
  Description of Artificial Sequence: Synthetic oligonucleotide
cacuggguggaacucuaag

SEQ ID NO: 2619319 - RNA, 19 nt, Artificial Sequence
  Description of Artificial Sequence: Synthetic oligonucleotide
cagagauccagggagaaaa

SEQ ID NO: 2619320 - RNA, 19 nt, Artificial Sequence
  Description of Artificial Sequence: Synthetic oligonucleotide
ucaacuggccucggccacg

SEQ ID NO: 2619321 - RNA, 19 nt, Artificial Sequence
  Description of Artificial Sequence: Synthetic oligonucleotide
ucuggguagacgccuccaa

SEQ ID NO: 2619322 - RNA, 19 nt, Artificial Sequence
  Description of Artificial Sequence: Synthetic oligonucleotide
cuacacagagaaaccuguc

SEQ ID NO: 2619323 - RNA, 19 nt, Artificial Sequence
  Description of Artificial Sequence: Synthetic oligonucleotide
augaaguaugggagcugcc

SEQ ID NO: 2619324 - RNA, 19 nt, Artificial Sequence
  Description of Artificial Sequence: Synthetic oligonucleotide
ucucuggguagacgccucc

SEQ ID NO: 2619325 - RNA, 19 nt, Artificial Sequence
  Description of Artificial Sequence: Synthetic oligonucleotide
gcuguuagagguggggugg

SEQ ID NO: 2619326 - RNA, 19 nt, Artificial Sequence
  Description of Artificial Sequence: Synthetic oligonucleotide
ggagaaggcuguuagaggu

SEQ ID NO: 2619327 - RNA, 19 nt, Artificial Sequence
  Description of Artificial Sequence: Synthetic oligonucleotide
aaccugccguccccucccc

SEQ ID NO: 2619328 - RNA, 19 nt, Artificial Sequence
  Description of Artificial Sequence: Synthetic oligonucleotide
ggauacucagagauccagg

SEQ ID NO: 2619329 - RNA, 19 nt, Artificial Sequence
  Description of Artificial Sequence: Synthetic oligonucleotide
gacgccuccaaucaggguu

SEQ ID NO: 2619330 - RNA, 19 nt, Artificial Sequence
  Description of Artificial Sequence: Synthetic oligonucleotide
uguuagagguggggugggg

SEQ ID NO: 2619331 - RNA, 19 nt, Artificial Sequence
  Description of Artificial Sequence: Synthetic oligonucleotide
caaucaggguuccagucga

SEQ ID NO: 2619332 - RNA, 19 nt, Artificial Sequence
  Description of Artificial Sequence: Synthetic oligonucleotide
aaugcccacacgccuccau

SEQ ID NO: 2619333 - RNA, 19 nt, Artificial Sequence
  Description of Artificial Sequence: Synthetic oligonucleotide
agcggccaacuugaaauuc

SEQ ID NO: 2619334 - RNA, 19 nt, Artificial Sequence
  Description of Artificial Sequence: Synthetic oligonucleotide
ccuucuguaguuuccgaac

SEQ ID NO: 2619335 - RNA, 19 nt, Artificial Sequence
  Description of Artificial Sequence: Synthetic oligonucleotide
gguacuugucugaguaccg

SEQ ID NO: 2619336 - RNA, 19 nt, Artificial Sequence
  Description of Artificial Sequence: Synthetic oligonucleotide
guaaaaugguggcccguuc

SEQ ID NO: 2619337 - RNA, 19 nt, Artificial Sequence
  Description of Artificial Sequence: Synthetic oligonucleotide
cagacaucugguacuuguc

SEQ ID NO: 2619338 - RNA, 19 nt, Artificial Sequence
  Description of Artificial Sequence: Synthetic oligonucleotide
guauuguuuccuccuuauc

SEQ ID NO: 2619339 - RNA, 19 nt, Artificial Sequence
  Description of Artificial Sequence: Synthetic oligonucleotide
cacgcagcggccaacuuga

SEQ ID NO: 2619340 - RNA, 19 nt, Artificial Sequence
  Description of Artificial Sequence: Synthetic oligonucleotide
uacuugucugaguaccguu

SEQ ID NO: 2619341 - RNA, 19 nt, Artificial Sequence
  Description of Artificial Sequence: Synthetic oligonucleotide
uggcccguuccuucuguag

SEQ ID NO: 2619342 - RNA, 19 nt, Artificial Sequence
  Description of Artificial Sequence: Synthetic oligonucleotide
uuccuucuguaguuuccga

SEQ ID NO: 2619343 - RNA, 19 nt, Artificial Sequence
  Description of Artificial Sequence: Synthetic oligonucleotide
gaacucgaaucuugagcuc

SEQ ID NO: 2619344 - RNA, 19 nt, Artificial Sequence
  Description of Artificial Sequence: Synthetic oligonucleotide
guaguuuccgaacucgaau

SEQ ID NO: 2619345 - RNA, 19 nt, Artificial Sequence
  Description of Artificial Sequence: Synthetic oligonucleotide
aguaaaaugguggcccguu

SEQ ID NO: 2619346 - RNA, 19 nt, Artificial Sequence
  Description of Artificial Sequence: Synthetic oligonucleotide
gagaaggcuguuagaggug

SEQ ID NO: 2619347 - RNA, 19 nt, Artificial Sequence
  Description of Artificial Sequence: Synthetic oligonucleotide
ccucuuggggaguaaaaug

SEQ ID NO: 2619348 - RNA, 19 nt, Artificial Sequence
  Description of Artificial Sequence: Synthetic oligonucleotide
acagcuggccggaugaagu

SEQ ID NO: 2619349 - RNA, 19 nt, Artificial Sequence
  Description of Artificial Sequence: Synthetic oligonucleotide
gccggaugaaguaugggag

SEQ ID NO: 2619350 - RNA, 19 nt, Artificial Sequence
  Description of Artificial Sequence: Synthetic oligonucleotide
cugguacuugucugaguac

SEQ ID NO: 2619351 - RNA, 19 nt, Artificial Sequence
  Description of Artificial Sequence: Synthetic oligonucleotide
caucugguacuugucugag

SEQ ID NO: 2619352 - RNA, 19 nt, Artificial Sequence
  Description of Artificial Sequence: Synthetic oligonucleotide
caucacccuucccaaugcc

SEQ ID NO: 2619353 - RNA, 19 nt, Artificial Sequence
  Description of Artificial Sequence: Synthetic oligonucleotide
gacagcuggccggaugaag

SEQ ID NO: 2619354 - RNA, 19 nt, Artificial Sequence
  Description of Artificial Sequence: Synthetic oligonucleotide
aucucucuuggggacagcu

SEQ ID NO: 2619355 - RNA, 19 nt, Artificial Sequence
  Description of Artificial Sequence: Synthetic oligonucleotide
agcucucuggguagacgcc

SEQ ID NO: 2619356 - RNA, 19 nt, Artificial Sequence
  Description of Artificial Sequence: Synthetic oligonucleotide
ccauguugaaggucaacug

SEQ ID NO: 2619357 - RNA, 19 nt, Artificial Sequence
  Description of Artificial Sequence: Synthetic oligonucleotide
uccucugaagucacuucuu

SEQ ID NO: 2619358 - RNA, 19 nt, Artificial Sequence
  Description of Artificial Sequence: Synthetic oligonucleotide
cacuccggggcccacgcag

SEQ ID NO: 2619359 - RNA, 19 nt, Artificial Sequence
  Description of Artificial Sequence: Synthetic oligonucleotide
ucaucguacuccucuucuu

SEQ ID NO: 2619360 - RNA, 19 nt, Artificial Sequence
  Description of Artificial Sequence: Synthetic oligonucleotide
gaagucacuucuuccuccu

SEQ ID NO: 2619361 - RNA, 19 nt, Artificial Sequence
  Description of Artificial Sequence: Synthetic oligonucleotide
uucguccuccucugaaguc

SEQ ID NO: 2619362 - RNA, 19 nt, Artificial Sequence
  Description of Artificial Sequence: Synthetic oligonucleotide
ggcuguuagagguggggug

SEQ ID NO: 2619363 - RNA, 19 nt, Artificial Sequence
  Description of Artificial Sequence: Synthetic oligonucleotide
guaaagcaucacccuuccc

SEQ ID NO: 2619364 - RNA, 19 nt, Artificial Sequence
  Description of Artificial Sequence: Synthetic oligonucleotide
gucugaguaccguuccaca

SEQ ID NO: 2619365 - RNA, 19 nt, Artificial Sequence
  Description of Artificial Sequence: Synthetic oligonucleotide
aagcaucacccuucccaau

SEQ ID NO: 2619366 - RNA, 19 nt, Artificial Sequence
  Description of Artificial Sequence: Synthetic oligonucleotide
augcccacacgccuccaug

SEQ ID NO: 2619367 - RNA, 19 nt, Artificial Sequence
  Description of Artificial Sequence: Synthetic oligonucleotide
ggccggaugaaguauggga

SEQ ID NO: 2619368 - RNA, 19 nt, Artificial Sequence
  Description of Artificial Sequence: Synthetic oligonucleotide
guugaaggucaacuggccu

SEQ ID NO: 2619369 - RNA, 19 nt, Artificial Sequence
  Description of Artificial Sequence: Synthetic oligonucleotide
cuguaguuuccgaacucga

SEQ ID NO: 2619370 - RNA, 19 nt, Artificial Sequence
  Description of Artificial Sequence: Synthetic oligonucleotide
gguagacgccuccaaucag

SEQ ID NO: 2619371 - RNA, 19 nt, Artificial Sequence
  Description of Artificial Sequence: Synthetic oligonucleotide
gcagcucuugcuucagugc

SEQ ID NO: 2619372 - RNA, 19 nt, Artificial Sequence
  Description of Artificial Sequence: Synthetic oligonucleotide
aucaggguuccagucgaug

SEQ ID NO: 2619373 - RNA, 19 nt, Artificial Sequence
  Description of Artificial Sequence: Synthetic oligonucleotide
uggccggaugaaguauggg

SEQ ID NO: 2619374 - RNA, 19 nt, Artificial Sequence
  Description of Artificial Sequence: Synthetic oligonucleotide
aucugguacuugucugagu

SEQ ID NO: 2619375 - RNA, 19 nt, Artificial Sequence
  Description of Artificial Sequence: Synthetic oligonucleotide
ggagcugccucauggcccc

SEQ ID NO: 2619376 - RNA, 19 nt, Artificial Sequence
  Description of Artificial Sequence: Synthetic oligonucleotide
ggcauuguccauuggccca

SEQ ID NO: 2619377 - RNA, 19 nt, Artificial Sequence
  Description of Artificial Sequence: Synthetic oligonucleotide
ucagagauccagggagaaa

SEQ ID NO: 2619378 - RNA, 19 nt, Artificial Sequence
  Description of Artificial Sequence: Synthetic oligonucleotide
cucuuggggacagcuggcc

SEQ ID NO: 2619379 - RNA, 19 nt, Artificial Sequence
  Description of Artificial Sequence: Synthetic oligonucleotide
ccggaugaaguaugggagc

SEQ ID NO: 2619380 - RNA, 19 nt, Artificial Sequence
  Description of Artificial Sequence: Synthetic oligonucleotide
cuguuagaggugggguggg

SEQ ID NO: 2619381 - RNA, 19 nt, Artificial Sequence
  Description of Artificial Sequence: Synthetic oligonucleotide
uuggcccagacaucuggua

SEQ ID NO: 2619382 - RNA, 19 nt, Artificial Sequence
  Description of Artificial Sequence: Synthetic oligonucleotide
ggguagacgccuccaauca

SEQ ID NO: 2619383 - RNA, 19 nt, Artificial Sequence
  Description of Artificial Sequence: Synthetic oligonucleotide
cuucuguaguuuccgaacu

SEQ ID NO: 2619384 - RNA, 19 nt, Artificial Sequence
  Description of Artificial Sequence: Synthetic oligonucleotide
aaaugguggcccguuccuu

SEQ ID NO: 2619385 - RNA, 19 nt, Artificial Sequence
  Description of Artificial Sequence: Synthetic oligonucleotide
gcggccaacuugaaauucg

SEQ ID NO: 2619386 - RNA, 19 nt, Artificial Sequence
  Description of Artificial Sequence: Synthetic oligonucleotide
gucaacuggccucggccac

SEQ ID NO: 2619387 - RNA, 19 nt, Artificial Sequence
  Description of Artificial Sequence: Synthetic oligonucleotide
aggguuccagucgauggca

SEQ ID NO: 2619388 - RNA, 19 nt, Artificial Sequence
  Description of Artificial Sequence: Synthetic oligonucleotide
gcagcggccaacuugaaau

SEQ ID NO: 2619389 - RNA, 19 nt, Artificial Sequence
  Description of Artificial Sequence: Synthetic oligonucleotide
acgccuccaaucaggguuc

SEQ ID NO: 2619390 - RNA, 19 nt, Artificial Sequence
  Description of Artificial Sequence: Synthetic oligonucleotide
auacuccccuuccucuccu

SEQ ID NO: 2619391 - RNA, 19 nt, Artificial Sequence
  Description of Artificial Sequence: Synthetic oligonucleotide
caaaccuccucaucguacu

SEQ ID NO: 2619392 - RNA, 19 nt, Artificial Sequence
  Description of Artificial Sequence: Synthetic oligonucleotide
aggcuguuagagguggggu

SEQ ID NO: 2619393 - RNA, 19 nt, Artificial Sequence
  Description of Artificial Sequence: Synthetic oligonucleotide
acucagagauccagggaga

SEQ ID NO: 2619394 - RNA, 19 nt, Artificial Sequence
  Description of Artificial Sequence: Synthetic oligonucleotide
guaccguuccacaucucuc

SEQ ID NO: 2619395 - RNA, 19 nt, Artificial Sequence
  Description of Artificial Sequence: Synthetic oligonucleotide
accccggcuggccauggug

SEQ ID NO: 2619396 - RNA, 19 nt, Artificial Sequence
  Description of Artificial Sequence: Synthetic oligonucleotide
uuccagucgauggcauugu

SEQ ID NO: 2619397 - RNA, 19 nt, Artificial Sequence
  Description of Artificial Sequence: Synthetic oligonucleotide
gucacuucuuccuccuucu

SEQ ID NO: 2619398 - RNA, 19 nt, Artificial Sequence
  Description of Artificial Sequence: Synthetic oligonucleotide
aagucacuucuuccuccuu

SEQ ID NO: 2619399 - RNA, 19 nt, Artificial Sequence
  Description of Artificial Sequence: Synthetic oligonucleotide
uccucaucguacuccucuu

SEQ ID NO: 2619400 - RNA, 19 nt, Artificial Sequence
  Description of Artificial Sequence: Synthetic oligonucleotide
gaaggucaacuggccucgg

SEQ ID NO: 2619401 - RNA, 19 nt, Artificial Sequence
  Description of Artificial Sequence: Synthetic oligonucleotide
ggucaacuggccucggcca

SEQ ID NO: 2619402 - RNA, 19 nt, Artificial Sequence
  Description of Artificial Sequence: Synthetic oligonucleotide
gccucauggccccacgcag

SEQ ID NO: 2619403 - RNA, 19 nt, Artificial Sequence
  Description of Artificial Sequence: Synthetic oligonucleotide
auuggcccagacaucuggu

SEQ ID NO: 2619404 - RNA, 19 nt, Artificial Sequence
  Description of Artificial Sequence: Synthetic oligonucleotide
aacuggccucggccacgac

SEQ ID NO: 2619405 - RNA, 19 nt, Artificial Sequence
  Description of Artificial Sequence: Synthetic oligonucleotide
ggguaaagcaucacccuuc

SEQ ID NO: 2619406 - RNA, 19 nt, Artificial Sequence
  Description of Artificial Sequence: Synthetic oligonucleotide
uuggggacagcuggccgga

SEQ ID NO: 2619407 - RNA, 19 nt, Artificial Sequence
  Description of Artificial Sequence: Synthetic oligonucleotide
ggggaguaaaaugguggcc

SEQ ID NO: 2619408 - RNA, 19 nt, Artificial Sequence
  Description of Artificial Sequence: Synthetic oligonucleotide
cucaucguacuccucuucu

SEQ ID NO: 2619409 - RNA, 19 nt, Artificial Sequence
  Description of Artificial Sequence: Synthetic oligonucleotide
gccuccauguugaagguca

SEQ ID NO: 2619410 - RNA, 19 nt, Artificial Sequence
  Description of Artificial Sequence: Synthetic oligonucleotide
gagucucaagcuucuguau

SEQ ID NO: 2619411 - RNA, 19 nt, Artificial Sequence
  Description of Artificial Sequence: Synthetic oligonucleotide
cugccucauggccccacgc

SEQ ID NO: 2619412 - RNA, 19 nt, Artificial Sequence
  Description of Artificial Sequence: Synthetic oligonucleotide
cuccucaucguacuccucu

SEQ ID NO: 2619413 - RNA, 19 nt, Artificial Sequence
  Description of Artificial Sequence: Synthetic oligonucleotide
cuccucugaagucacuucu

SEQ ID NO: 2619414 - RNA, 19 nt, Artificial Sequence
  Description of Artificial Sequence: Synthetic oligonucleotide
acacgccuccauguugaag

SEQ ID NO: 2619415 - RNA, 19 nt, Artificial Sequence
  Description of Artificial Sequence: Synthetic oligonucleotide
uugagcucucuggguagac

SEQ ID NO: 2619416 - RNA, 19 nt, Artificial Sequence
  Description of Artificial Sequence: Synthetic oligonucleotide
cucucuggguagacgccuc

SEQ ID NO: 2619417 - RNA, 19 nt, Artificial Sequence
  Description of Artificial Sequence: Synthetic oligonucleotide
cuguauuguuuccuccuua

SEQ ID NO: 2619418 - RNA, 19 nt, Artificial Sequence
  Description of Artificial Sequence: Synthetic oligonucleotide
ucacuucuuccuccuucuu

SEQ ID NO: 2619419 - RNA, 19 nt, Artificial Sequence
  Description of Artificial Sequence: Synthetic oligonucleotide
cuagagucucaagcuucug

SEQ ID NO: 2619420 - RNA, 19 nt, Artificial Sequence
  Description of Artificial Sequence: Synthetic oligonucleotide
ugguggcccguuccuucug

SEQ ID NO: 2619421 - RNA, 19 nt, Artificial Sequence
  Description of Artificial Sequence: Synthetic oligonucleotide
acgccuccauguugaaggu

SEQ ID NO: 2619422 - RNA, 19 nt, Artificial Sequence
  Description of Artificial Sequence: Synthetic oligonucleotide
cguuccuucuguaguuucc

SEQ ID NO: 2619423 - RNA, 19 nt, Artificial Sequence
  Description of Artificial Sequence: Synthetic oligonucleotide
cacccuucccaaugcccac

SEQ ID NO: 2619424 - RNA, 19 nt, Artificial Sequence
  Description of Artificial Sequence: Synthetic oligonucleotide
uccucuccugcgggcagag

SEQ ID NO: 2619425 - RNA, 19 nt, Artificial Sequence
  Description of Artificial Sequence: Synthetic oligonucleotide
cgaacucgaaucuugagcu

SEQ ID NO: 2619426 - RNA, 19 nt, Artificial Sequence
  Description of Artificial Sequence: Synthetic oligonucleotide
uacuccccuuccucuccug

SEQ ID NO: 2619427 - RNA, 19 nt, Artificial Sequence
  Description of Artificial Sequence: Synthetic oligonucleotide
agacgccuccaaucagggu

SEQ ID NO: 2619428 - RNA, 19 nt, Artificial Sequence
  Description of Artificial Sequence: Synthetic oligonucleotide
guaugggagcugccucaug

SEQ ID NO: 2619429 - RNA, 19 nt, Artificial Sequence
  Description of Artificial Sequence: Synthetic oligonucleotide
gccaacuugaaauucgcuu

SEQ ID NO: 2619430 - RNA, 19 nt, Artificial Sequence
  Description of Artificial Sequence: Synthetic oligonucleotide
gguggagaaggcuguuaga

SEQ ID NO: 2619431 - RNA, 19 nt, Artificial Sequence
  Description of Artificial Sequence: Synthetic oligonucleotide
cuucguccuccucugaagu

SEQ ID NO: 2619432 - RNA, 19 nt, Artificial Sequence
  Description of Artificial Sequence: Synthetic oligonucleotide
cuccauguugaaggucaac

SEQ ID NO: 2619433 - RNA, 19 nt, Artificial Sequence
  Description of Artificial Sequence: Synthetic oligonucleotide
gaggcacuggguggaacuc

SEQ ID NO: 2619434 - RNA, 19 nt, Artificial Sequence
  Description of Artificial Sequence: Synthetic oligonucleotide
gcauuguccauuggcccag

SEQ ID NO: 2619435 - RNA, 19 nt, Artificial Sequence
  Description of Artificial Sequence: Synthetic oligonucleotide
cuuaucuuccauggccuua

SEQ ID NO: 2619436 - RNA, 19 nt, Artificial Sequence
  Description of Artificial Sequence: Synthetic oligonucleotide
cuccggggcccacgcagcg

SEQ ID NO: 2619437 - RNA, 19 nt, Artificial Sequence
  Description of Artificial Sequence: Synthetic oligonucleotide
ggaugaaguaugggagcug

SEQ ID NO: 2619438 - RNA, 19 nt, Artificial Sequence
  Description of Artificial Sequence: Synthetic oligonucleotide
accguuccacaucucucuu

SEQ ID NO: 2619439 - RNA, 19 nt, Artificial Sequence
  Description of Artificial Sequence: Synthetic oligonucleotide
cauggccccacgcagcucu

SEQ ID NO: 2619440 - RNA, 19 nt, Artificial Sequence
  Description of Artificial Sequence: Synthetic oligonucleotide
aaucaggguuccagucgau

SEQ ID NO: 2619441 - RNA, 19 nt, Artificial Sequence
  Description of Artificial Sequence: Synthetic oligonucleotide
ccaaugcccacacgccucc

SEQ ID NO: 2619442 - RNA, 19 nt, Artificial Sequence
  Description of Artificial Sequence: Synthetic oligonucleotide
ccucauggccccacgcagc

SEQ ID NO: 2619443 - RNA, 19 nt, Artificial Sequence
  Description of Artificial Sequence: Synthetic oligonucleotide
gugccagaacauacucccc

SEQ ID NO: 2619444 - RNA, 19 nt, Artificial Sequence
  Description of Artificial Sequence: Synthetic oligonucleotide
aggcacuggguggaacucu

SEQ ID NO: 2619445 - RNA, 19 nt, Artificial Sequence
  Description of Artificial Sequence: Synthetic oligonucleotide
uccggggcccacgcagcgg

SEQ ID NO: 2619446 - RNA, 19 nt, Artificial Sequence
  Description of Artificial Sequence: Synthetic oligonucleotide
ccccggcuggccauggugg

SEQ ID NO: 2619447 - RNA, 19 nt, Artificial Sequence
  Description of Artificial Sequence: Synthetic oligonucleotide
ccuccuuaucuuccauggc

SEQ ID NO: 2619448 - RNA, 19 nt, Artificial Sequence
  Description of Artificial Sequence: Synthetic oligonucleotide
ccaacuugaaauucgcuuu

SEQ ID NO: 2619449 - RNA, 19 nt, Artificial Sequence
  Description of Artificial Sequence: Synthetic oligonucleotide
ccacgcagcggccaacuug

SEQ ID NO: 2619450 - RNA, 19 nt, Artificial Sequence
  Description of Artificial Sequence: Synthetic oligonucleotide
uuccucuccugcgggcaga

SEQ ID NO: 2619451 - RNA, 19 nt, Artificial Sequence
  Description of Artificial Sequence: Synthetic oligonucleotide
cucagagauccagggagaa

SEQ ID NO: 2619452 - RNA, 19 nt, Artificial Sequence
  Description of Artificial Sequence: Synthetic oligonucleotide
ccagaacauacuccccuuc

SEQ ID NO: 2619453 - RNA, 19 nt, Artificial Sequence
  Description of Artificial Sequence: Synthetic oligonucleotide
agcuggccggaugaaguau

SEQ ID NO: 2619454 - RNA, 19 nt, Artificial Sequence
  Description of Artificial Sequence: Synthetic oligonucleotide
uccugcgggcagaggcacu

SEQ ID NO: 2619455 - RNA, 19 nt, Artificial Sequence
  Description of Artificial Sequence: Synthetic oligonucleotide
cuugagcucucuggguaga

SEQ ID NO: 2619456 - RNA, 19 nt, Artificial Sequence
  Description of Artificial Sequence: Synthetic oligonucleotide
gaguaaaaugguggcccgu

SEQ ID NO: 2619457 - RNA, 19 nt, Artificial Sequence
  Description of Artificial Sequence: Synthetic oligonucleotide
gcuggccggaugaaguaug

SEQ ID NO: 2619458 - RNA, 19 nt, Artificial Sequence
  Description of Artificial Sequence: Synthetic oligonucleotide
caacuugaaauucgcuuuu

SEQ ID NO: 2619459 - RNA, 19 nt, Artificial Sequence
  Description of Artificial Sequence: Synthetic oligonucleotide
guacuugucugaguaccgu

SEQ ID NO: 2619460 - RNA, 19 nt, Artificial Sequence
  Description of Artificial Sequence: Synthetic oligonucleotide
cccaaugcccacacgccuc

SEQ ID NO: 2619461 - RNA, 19 nt, Artificial Sequence
  Description of Artificial Sequence: Synthetic oligonucleotide
cguacuccucuucuucccc

SEQ ID NO: 2619462 - RNA, 19 nt, Artificial Sequence
  Description of Artificial Sequence: Synthetic oligonucleotide
acgcagcucuugcuucagu

SEQ ID NO: 2619463 - RNA, 19 nt, Artificial Sequence
  Description of Artificial Sequence: Synthetic oligonucleotide
cuccugcgggcagaggcac

SEQ ID NO: 2619464 - RNA, 19 nt, Artificial Sequence
  Description of Artificial Sequence: Synthetic oligonucleotide
cacaucucucuuggggaca

SEQ ID NO: 2619465 - RNA, 19 nt, Artificial Sequence
  Description of Artificial Sequence: Synthetic oligonucleotide
ccagacaucugguacuugu

SEQ ID NO: 2619466 - RNA, 19 nt, Artificial Sequence
  Description of Artificial Sequence: Synthetic oligonucleotide
ccacacgccuccauguuga

SEQ ID NO: 2619467 - RNA, 19 nt, Artificial Sequence
  Description of Artificial Sequence: Synthetic oligonucleotide
cacgcagcucuugcuucag

SEQ ID NO: 2619468 - RNA, 19 nt, Artificial Sequence
  Description of Artificial Sequence: Synthetic oligonucleotide
gagguggagaaggcuguua

SEQ ID NO: 2619469 - RNA, 19 nt, Artificial Sequence
  Description of Artificial Sequence: Synthetic oligonucleotide
ggccccacgcagcucuugc

SEQ ID NO: 2619470 - RNA, 19 nt, Artificial Sequence
  Description of Artificial Sequence: Synthetic oligonucleotide
ggggacagcuggccggaug

SEQ ID NO: 2619471 - RNA, 19 nt, Artificial Sequence
  Description of Artificial Sequence: Synthetic oligonucleotide
acccuucccaaugcccaca

SEQ ID NO: 2619472 - RNA, 19 nt, Artificial Sequence
  Description of Artificial Sequence: Synthetic oligonucleotide
cagaggcacuggguggaac

SEQ ID NO: 2619473 - RNA, 19 nt, Artificial Sequence
  Description of Artificial Sequence: Synthetic oligonucleotide
cccacacgccuccauguug

SEQ ID NO: 2619474 - RNA, 19 nt, Artificial Sequence
  Description of Artificial Sequence: Synthetic oligonucleotide
gucgauggcauuguccauu

SEQ ID NO: 2619475 - RNA, 19 nt, Artificial Sequence
  Description of Artificial Sequence: Synthetic oligonucleotide
ccguuccacaucucucuug

SEQ ID NO: 2619476 - RNA, 19 nt, Artificial Sequence
  Description of Artificial Sequence: Synthetic oligonucleotide
uggccucggccacgacccc

SEQ ID NO: 2619477 - RNA, 19 nt, Artificial Sequence
  Description of Artificial Sequence: Synthetic oligonucleotide
agagguggagaaggcuguu

SEQ ID NO: 2619478 - RNA, 19 nt, Artificial Sequence
  Description of Artificial Sequence: Synthetic oligonucleotide
cccacgcagcucuugcuuc

SEQ ID NO: 2619479 - RNA, 19 nt, Artificial Sequence
  Description of Artificial Sequence: Synthetic oligonucleotide
ggcccagacaucugguacu

SEQ ID NO: 2619480 - RNA, 19 nt, Artificial Sequence
  Description of Artificial Sequence: Synthetic oligonucleotide
ggaagagguggagaaggcu

SEQ ID NO: 2619481 - RNA, 19 nt, Artificial Sequence
  Description of Artificial Sequence: Synthetic oligonucleotide
guccauuggcccagacauc

SEQ ID NO: 2619482 - RNA, 19 nt, Artificial Sequence
  Description of Artificial Sequence: Synthetic oligonucleotide
caucucucuuggggacagc

SEQ ID NO: 2619483 - RNA, 19 nt, Artificial Sequence
  Description of Artificial Sequence: Synthetic oligonucleotide
ccguuccuucuguaguuuc

SEQ ID NO: 2619484 - RNA, 19 nt, Artificial Sequence
  Description of Artificial Sequence: Synthetic oligonucleotide
gggguaaagcaucacccuu

SEQ ID NO: 2619485 - RNA, 19 nt, Artificial Sequence
  Description of Artificial Sequence: Synthetic oligonucleotide
cucuggguagacgccucca

SEQ ID NO: 2619486 - RNA, 19 nt, Artificial Sequence
  Description of Artificial Sequence: Synthetic oligonucleotide
cugcgggcagaggcacugg

SEQ ID NO: 2619487 - RNA, 19 nt, Artificial Sequence
  Description of Artificial Sequence: Synthetic oligonucleotide
guuuccgaacucgaaucuu

SEQ ID NO: 2619488 - RNA, 19 nt, Artificial Sequence
  Description of Artificial Sequence: Synthetic oligonucleotide
cagcuggccggaugaagua

SEQ ID NO: 2619489 - RNA, 19 nt, Artificial Sequence
  Description of Artificial Sequence: Synthetic oligonucleotide
ccuucccaaugcccacacg

SEQ ID NO: 2619490 - RNA, 19 nt, Artificial Sequence
  Description of Artificial Sequence: Synthetic oligonucleotide
ggcccguuccuucuguagu

SEQ ID NO: 2619491 - RNA, 19 nt, Artificial Sequence
  Description of Artificial Sequence: Synthetic oligonucleotide
uggccccacgcagcucuug

SEQ ID NO: 2619492 - RNA, 19 nt, Artificial Sequence
  Description of Artificial Sequence: Synthetic oligonucleotide
cuggguagacgccuccaau

SEQ ID NO: 2619493 - RNA, 19 nt, Artificial Sequence
  Description of Artificial Sequence: Synthetic oligonucleotide
gggccuggauacucagaga

SEQ ID NO: 2619494 - RNA, 19 nt, Artificial Sequence
  Description of Artificial Sequence: Synthetic oligonucleotide
cucaagcuucuguauuguu

SEQ ID NO: 2619495 - RNA, 19 nt, Artificial Sequence
  Description of Artificial Sequence: Synthetic oligonucleotide
gaguaccguuccacaucuc

SEQ ID NO: 2619496 - RNA, 19 nt, Artificial Sequence
  Description of Artificial Sequence: Synthetic oligonucleotide
ccggggcccacgcagcggc

SEQ ID NO: 2619497 - RNA, 19 nt, Artificial Sequence
  Description of Artificial Sequence: Synthetic oligonucleotide
ggccucggccacgaccccg

SEQ ID NO: 2619498 - RNA, 19 nt, Artificial Sequence
  Description of Artificial Sequence: Synthetic oligonucleotide
cccuucccaaugcccacac

SEQ ID NO: 2619499 - RNA, 19 nt, Artificial Sequence
  Description of Artificial Sequence: Synthetic oligonucleotide
cccacuccggggcccacgc

SEQ ID NO: 2619500 - RNA, 19 nt, Artificial Sequence
  Description of Artificial Sequence: Synthetic oligonucleotide
ccugcgggcagaggcacug

SEQ ID NO: 2619501 - RNA, 19 nt, Artificial Sequence
  Description of Artificial Sequence: Synthetic oligonucleotide
cccuuccucuccugcgggc

SEQ ID NO: 2619502 - RNA, 19 nt, Artificial Sequence
  Description of Artificial Sequence: Synthetic oligonucleotide
caacuggccucggccacga

SEQ ID NO: 2619503 - RNA, 19 nt, Artificial Sequence
  Description of Artificial Sequence: Synthetic oligonucleotide
gccuggauacucagagauc

SEQ ID NO: 2619504 - RNA, 19 nt, Artificial Sequence
  Description of Artificial Sequence: Synthetic oligonucleotide
cucuugcuucagugccaga

SEQ ID NO: 2619505 - RNA, 19 nt, Artificial Sequence
  Description of Artificial Sequence: Synthetic oligonucleotide
guggcccguuccuucugua

SEQ ID NO: 2619506 - RNA, 19 nt, Artificial Sequence
  Description of Artificial Sequence: Synthetic oligonucleotide
cauuguccauuggcccaga

SEQ ID NO: 2619507 - RNA, 19 nt, Artificial Sequence
  Description of Artificial Sequence: Synthetic oligonucleotide
gccucuuggggaguaaaau

SEQ ID NO: 2619508 - RNA, 19 nt, Artificial Sequence
  Description of Artificial Sequence: Synthetic oligonucleotide
cacacgccuccauguugaa

SEQ ID NO: 2619509 - RNA, 19 nt, Artificial Sequence
  Description of Artificial Sequence: Synthetic oligonucleotide
ggccucuuggggaguaaaa

SEQ ID NO: 2619510 - RNA, 19 nt, Artificial Sequence
  Description of Artificial Sequence: Synthetic oligonucleotide
ggcacuggguggaacucua

SEQ ID NO: 2619511 - RNA, 19 nt, Artificial Sequence
  Description of Artificial Sequence: Synthetic oligonucleotide
gguggcccguuccuucugu

SEQ ID NO: 2619512 - RNA, 19 nt, Artificial Sequence
  Description of Artificial Sequence: Synthetic oligonucleotide
gcucucuggguagacgccu

SEQ ID NO: 2619513 - RNA, 19 nt, Artificial Sequence
  Description of Artificial Sequence: Synthetic oligonucleotide
gccagaacauacuccccuu

SEQ ID NO: 2619514 - RNA, 19 nt, Artificial Sequence
  Description of Artificial Sequence: Synthetic oligonucleotide
ggccaacuugaaauucgcu

SEQ ID NO: 2619515 - RNA, 19 nt, Artificial Sequence
  Description of Artificial Sequence: Synthetic oligonucleotide
gguuccagucgauggcauu

SEQ ID NO: 2619516 - RNA, 19 nt, Artificial Sequence
  Description of Artificial Sequence: Synthetic oligonucleotide
caaugcccacacgccucca

SEQ ID NO: 2619517 - RNA, 19 nt, Artificial Sequence
  Description of Artificial Sequence: Synthetic oligonucleotide
uggggacagcuggccggau

SEQ ID NO: 2619518 - RNA, 19 nt, Artificial Sequence
  Description of Artificial Sequence: Synthetic oligonucleotide
ccuccauguugaaggucaa

SEQ ID NO: 2619519 - RNA, 19 nt, Artificial Sequence
  Description of Artificial Sequence: Synthetic oligonucleotide
gcccguuccuucuguaguu

SEQ ID NO: 2619520 - RNA, 19 nt, Artificial Sequence
  Description of Artificial Sequence: Synthetic oligonucleotide
cccagacaucugguacuug

SEQ ID NO: 2619521 - RNA, 19 nt, Artificial Sequence
  Description of Artificial Sequence: Synthetic oligonucleotide
ggggcccacgcagcggcca

SEQ ID NO: 2619522 - RNA, 19 nt, Artificial Sequence
  Description of Artificial Sequence: Synthetic oligonucleotide
ggacagcuggccggaugaa

SEQ ID NO: 2619523 - RNA, 19 nt, Artificial Sequence
  Description of Artificial Sequence: Synthetic oligonucleotide
cccggcuggccauggugga

SEQ ID NO: 2619524 - RNA, 19 nt, Artificial Sequence
  Description of Artificial Sequence: Synthetic oligonucleotide
gagcugccucauggcccca

SEQ ID NO: 2619525 - RNA, 19 nt, Artificial Sequence
  Description of Artificial Sequence: Synthetic oligonucleotide
ccccacuccggggcccacg

SEQ ID NO: 2619526 - RNA, 19 nt, Artificial Sequence
  Description of Artificial Sequence: Synthetic oligonucleotide
ccucuccugcgggcagagg

SEQ ID NO: 2619527 - RNA, 19 nt, Artificial Sequence
  Description of Artificial Sequence: Synthetic oligonucleotide
gcacuggguggaacucuaa

SEQ ID NO: 2619528 - RNA, 19 nt, Artificial Sequence
  Description of Artificial Sequence: Synthetic oligonucleotide
ccaccccggcuggccaugg

SEQ ID NO: 2619529 - RNA, 19 nt, Artificial Sequence
  Description of Artificial Sequence: Synthetic oligonucleotide
gccccacgcagcucuugcu

SEQ ID NO: 2619530 - RNA, 19 nt, Artificial Sequence
  Description of Artificial Sequence: Synthetic oligonucleotide
gccuccaaucaggguucca

SEQ ID NO: 2619531 - RNA, 19 nt, Artificial Sequence
  Description of Artificial Sequence: Synthetic oligonucleotide
acgcagcggccaacuugaa

SEQ ID NO: 2619532 - RNA, 19 nt, Artificial Sequence
  Description of Artificial Sequence: Synthetic oligonucleotide
gcagaggcacuggguggaa

SEQ ID NO: 2619533 - RNA, 19 nt, Artificial Sequence
  Description of Artificial Sequence: Synthetic oligonucleotide
auggccccacgcagcucuu

SEQ ID NO: 2619534 - RNA, 19 nt, Artificial Sequence
  Description of Artificial Sequence: Synthetic oligonucleotide
cgcagcggccaacuugaaa

SEQ ID NO: 2619535 - RNA, 19 nt, Artificial Sequence
  Description of Artificial Sequence: Synthetic oligonucleotide
ggguuccagucgauggcau

SEQ ID NO: 2619536 - RNA, 19 nt, Artificial Sequence
  Description of Artificial Sequence: Synthetic oligonucleotide
ggcccacgcagcggccaac

SEQ ID NO: 2619537 - RNA, 19 nt, Artificial Sequence
  Description of Artificial Sequence: Synthetic oligonucleotide
gcgggcagaggcacugggu

SEQ ID NO: 2619538 - RNA, 19 nt, Artificial Sequence
  Description of Artificial Sequence: Synthetic oligonucleotide
cgccuccauguugaagguc

SEQ ID NO: 2619539 - RNA, 19 nt, Artificial Sequence
  Description of Artificial Sequence: Synthetic oligonucleotide
gcccagacaucugguacuu

SEQ ID NO: 2619540 - RNA, 19 nt, Artificial Sequence
  Description of Artificial Sequence: Synthetic oligonucleotide
cccaccccggcuggccaug

SEQ ID NO: 2619541 - RNA, 19 nt, Artificial Sequence
  Description of Artificial Sequence: Synthetic oligonucleotide
gcccacacgccuccauguu

SEQ ID NO: 2619542 - RNA, 19 nt, Artificial Sequence
  Description of Artificial Sequence: Synthetic oligonucleotide
cgccuccaaucaggguucc

SEQ ID NO: 2619543 - RNA, 19 nt, Artificial Sequence
  Description of Artificial Sequence: Synthetic oligonucleotide
gcccacgcagcggccaacu

SEQ ID NO: 2619544 - RNA, 19 nt, Artificial Sequence
  Description of Artificial Sequence: Synthetic oligonucleotide
ggggccucuuggggaguaa

SEQ ID NO: 2619545 - RNA, 19 nt, Artificial Sequence
  Description of Artificial Sequence: Synthetic oligonucleotide
ccccacgcagcucuugcuu

SEQ ID NO: 2619546 - RNA, 19 nt, Artificial Sequence
  Description of Artificial Sequence: Synthetic oligonucleotide
cggggcccacgcagcggcc

SEQ ID NO: 2619547 - RNA, 19 nt, Artificial Sequence
  Description of Artificial Sequence: Synthetic oligonucleotide
ccacuccggggcccacgca

SEQ ID NO: 2619548 - RNA, 19 nt, Artificial Sequence
  Description of Artificial Sequence: Synthetic oligonucleotide
cggccacgaccccggcccc

SEQ ID NO: 2619549 - RNA, 19 nt, Artificial Sequence
  Description of Artificial Sequence: Synthetic oligonucleotide
caccccggcuggccauggu

SEQ ID NO: 2619550 - RNA, 19 nt, Artificial Sequence
  Description of Artificial Sequence: Synthetic oligonucleotide
ccccaccccggcuggccau

SEQ ID NO: 2619551 - RNA, 19 nt, Artificial Sequence
  Description of Artificial Sequence: Synthetic oligonucleotide
cccacgcagcggccaacuu

SEQ ID NO: 2619552 - RNA, 19 nt, Artificial Sequence
  Description of Artificial Sequence: Synthetic oligonucleotide
aaaggguugccauagagac

SEQ ID NO: 2619553 - RNA, 19 nt, Artificial Sequence
  Description of Artificial Sequence: Synthetic oligonucleotide
aaggguaucaacugguugc

SEQ ID NO: 2619554 - RNA, 19 nt, Artificial Sequence
  Description of Artificial Sequence: Synthetic oligonucleotide
gacacauugagucaggugg

SEQ ID NO: 2619555 - RNA, 19 nt, Artificial Sequence
  Description of Artificial Sequence: Synthetic oligonucleotide
aaaguaucgaaaguugucc

SEQ ID NO: 2619556 - RNA, 19 nt, Artificial Sequence
  Description of Artificial Sequence: Synthetic oligonucleotide
acugaaauagucugcagcc

SEQ ID NO: 2619557 - RNA, 19 nt, Artificial Sequence
  Description of Artificial Sequence: Synthetic oligonucleotide
aaaucuagcuucuugaggu

SEQ ID NO: 2619558 - RNA, 19 nt, Artificial Sequence
  Description of Artificial Sequence: Synthetic oligonucleotide
agcaugagagcucugagcc

SEQ ID NO: 2619559 - RNA, 19 nt, Artificial Sequence
  Description of Artificial Sequence: Synthetic oligonucleotide
aaaguuguccucaccaucc

SEQ ID NO: 2619560 - RNA, 19 nt, Artificial Sequence
  Description of Artificial Sequence: Synthetic oligonucleotide
agcaaguugacacucaguc

SEQ ID NO: 2619561 - RNA, 19 nt, Artificial Sequence
  Description of Artificial Sequence: Synthetic oligonucleotide
aaagcggcccaucugggcc

SEQ ID NO: 2619562 - RNA, 19 nt, Artificial Sequence
  Description of Artificial Sequence: Synthetic oligonucleotide
uuuaaguccugccauagac

SEQ ID NO: 2619563 - RNA, 19 nt, Artificial Sequence
  Description of Artificial Sequence: Synthetic oligonucleotide
gauggaggcuuccagaagg

SEQ ID NO: 2619564 - RNA, 19 nt, Artificial Sequence
  Description of Artificial Sequence: Synthetic oligonucleotide
agaucagagacugaaauag

SEQ ID NO: 2619565 - RNA, 19 nt, Artificial Sequence
  Description of Artificial Sequence: Synthetic oligonucleotide
caaguugacacucagucag

SEQ ID NO: 2619566 - RNA, 19 nt, Artificial Sequence
  Description of Artificial Sequence: Synthetic oligonucleotide
ugaagcuaacaguagcugg

SEQ ID NO: 2619567 - RNA, 19 nt, Artificial Sequence
  Description of Artificial Sequence: Synthetic oligonucleotide
uugacacucagucagcuca

SEQ ID NO: 2619568 - RNA, 19 nt, Artificial Sequence
  Description of Artificial Sequence: Synthetic oligonucleotide
agccaagaagcguaggucc

SEQ ID NO: 2619569 - RNA, 19 nt, Artificial Sequence
  Description of Artificial Sequence: Synthetic oligonucleotide
ucaagaugcagcagugugg

SEQ ID NO: 2619570 - RNA, 19 nt, Artificial Sequence
  Description of Artificial Sequence: Synthetic oligonucleotide
gacaaagcggcccaucugg

SEQ ID NO: 2619571 - RNA, 19 nt, Artificial Sequence
  Description of Artificial Sequence: Synthetic oligonucleotide
aaauagucugcagccaggc

SEQ ID NO: 2619572 - RNA, 19 nt, Artificial Sequence
  Description of Artificial Sequence: Synthetic oligonucleotide
uucucuucauugauggagg

SEQ ID NO: 2619573 - RNA, 19 nt, Artificial Sequence
  Description of Artificial Sequence: Synthetic oligonucleotide
gacugaaauagucugcagc

SEQ ID NO: 2619574 - RNA, 19 nt, Artificial Sequence
  Description of Artificial Sequence: Synthetic oligonucleotide
ucgaaaguuguccucacca

SEQ ID NO: 2619575 - RNA, 19 nt, Artificial Sequence
  Description of Artificial Sequence: Synthetic oligonucleotide
aaggaaggcccucauagca

SEQ ID NO: 2619576 - RNA, 19 nt, Artificial Sequence
  Description of Artificial Sequence: Synthetic oligonucleotide
gaagcagcucuuuaagucc

SEQ ID NO: 2619577 - RNA, 19 nt, Artificial Sequence
  Description of Artificial Sequence: Synthetic oligonucleotide
ucaaaucuagcuucuugag

SEQ ID NO: 2619578 - RNA, 19 nt, Artificial Sequence
  Description of Artificial Sequence: Synthetic oligonucleotide
ucagagacugaaauagucu

SEQ ID NO: 2619579 - RNA, 19 nt, Artificial Sequence
  Description of Artificial Sequence: Synthetic oligonucleotide
uccagaaggacagaggcag

SEQ ID NO: 2619580 - RNA, 19 nt, Artificial Sequence
  Description of Artificial Sequence: Synthetic oligonucleotide
aguugauccagccugccug

SEQ ID NO: 2619581 - RNA, 19 nt, Artificial Sequence
  Description of Artificial Sequence: Synthetic oligonucleotide
agucguuuccacucaaauc

SEQ ID NO: 2619582 - RNA, 19 nt, Artificial Sequence
  Description of Artificial Sequence: Synthetic oligonucleotide
aaggcccucauagcaaucc

SEQ ID NO: 2619583 - RNA, 19 nt, Artificial Sequence
  Description of Artificial Sequence: Synthetic oligonucleotide
uccacucaaaucuagcuuc

SEQ ID NO: 2619584 - RNA, 19 nt, Artificial Sequence
  Description of Artificial Sequence: Synthetic oligonucleotide
caaaucuagcuucuugagg

SEQ ID NO: 2619585 - RNA, 19 nt, Artificial Sequence
  Description of Artificial Sequence: Synthetic oligonucleotide
ugcacagaaggccagcucu

SEQ ID NO: 2619586 - RNA, 19 nt, Artificial Sequence
  Description of Artificial Sequence: Synthetic oligonucleotide
aguaucgaaaguuguccuc

SEQ ID NO: 2619587 - RNA, 19 nt, Artificial Sequence
  Description of Artificial Sequence: Synthetic oligonucleotide
ugcaacucagccucuaccc

SEQ ID NO: 2619588 - RNA, 19 nt, Artificial Sequence
  Description of Artificial Sequence: Synthetic oligonucleotide
aaguaucgaaaguuguccu

SEQ ID NO: 2619589 - RNA, 19 nt, Artificial Sequence
  Description of Artificial Sequence: Synthetic oligonucleotide
uuuccacucaaaucuagcu

SEQ ID NO: 2619590 - RNA, 19 nt, Artificial Sequence
  Description of Artificial Sequence: Synthetic oligonucleotide
ucuagcuucuugagguggg

SEQ ID NO: 2619591 - RNA, 19 nt, Artificial Sequence
  Description of Artificial Sequence: Synthetic oligonucleotide
acaaaggguugccauagag

SEQ ID NO: 2619592 - RNA, 19 nt, Artificial Sequence
  Description of Artificial Sequence: Synthetic oligonucleotide
auagagaccaagguagcgg

SEQ ID NO: 2619593 - RNA, 19 nt, Artificial Sequence
  Description of Artificial Sequence: Synthetic oligonucleotide
gagcaguugauccagccug

SEQ ID NO: 2619594 - RNA, 19 nt, Artificial Sequence
  Description of Artificial Sequence: Synthetic oligonucleotide
uccugccauagacaaaggg

SEQ ID NO: 2619595 - RNA, 19 nt, Artificial Sequence
  Description of Artificial Sequence: Synthetic oligonucleotide
uuaaguccugccauagaca

SEQ ID NO: 2619596 - RNA, 19 nt, Artificial Sequence
  Description of Artificial Sequence: Synthetic oligonucleotide
agcucuaggcuuuccaggg

SEQ ID NO: 2619597 - RNA, 19 nt, Artificial Sequence
  Description of Artificial Sequence: Synthetic oligonucleotide
gaaggggugcaccacagug

SEQ ID NO: 2619598 - RNA, 19 nt, Artificial Sequence
  Description of Artificial Sequence: Synthetic oligonucleotide
ucagcaaguugacacucag

SEQ ID NO: 2619599 - RNA, 19 nt, Artificial Sequence
  Description of Artificial Sequence: Synthetic oligonucleotide
cagagacugaaauagucug

SEQ ID NO: 2619600 - RNA, 19 nt, Artificial Sequence
  Description of Artificial Sequence: Synthetic oligonucleotide
gucguuuccacucaaaucu

SEQ ID NO: 2619601 - RNA, 19 nt, Artificial Sequence
  Description of Artificial Sequence: Synthetic oligonucleotide
augucagugguccagagua

SEQ ID NO: 2619602 - RNA, 19 nt, Artificial Sequence
  Description of Artificial Sequence: Synthetic oligonucleotide
aacaguagcuggugcaacu

SEQ ID NO: 2619603 - RNA, 19 nt, Artificial Sequence
  Description of Artificial Sequence: Synthetic oligonucleotide
agguagcggagacugacac

SEQ ID NO: 2619604 - RNA, 19 nt, Artificial Sequence
  Description of Artificial Sequence: Synthetic oligonucleotide
uaccacagagucccgaagc

SEQ ID NO: 2619605 - RNA, 19 nt, Artificial Sequence
  Description of Artificial Sequence: Synthetic oligonucleotide
ugagccaagaagcguaggu

SEQ ID NO: 2619606 - RNA, 19 nt, Artificial Sequence
  Description of Artificial Sequence: Synthetic oligonucleotide
agcuaacaguagcuggugc

SEQ ID NO: 2619607 - RNA, 19 nt, Artificial Sequence
  Description of Artificial Sequence: Synthetic oligonucleotide
ucuuuaaguccugccauag

SEQ ID NO: 2619608 - RNA, 19 nt, Artificial Sequence
  Description of Artificial Sequence: Synthetic oligonucleotide
ugguccagaguacaugggc

SEQ ID NO: 2619609 - RNA, 19 nt, Artificial Sequence
  Description of Artificial Sequence: Synthetic oligonucleotide
gaaggguaucaacugguug

SEQ ID NO: 2619610 - RNA, 19 nt, Artificial Sequence
  Description of Artificial Sequence: Synthetic oligonucleotide
cagaaggccagcucuaggc

SEQ ID NO: 2619611 - RNA, 19 nt, Artificial Sequence
  Description of Artificial Sequence: Synthetic oligonucleotide
agagacugaaauagucugc

SEQ ID NO: 2619612 - RNA, 19 nt, Artificial Sequence
  Description of Artificial Sequence: Synthetic oligonucleotide
aagucguuuccacucaaau

SEQ ID NO: 2619613 - RNA, 19 nt, Artificial Sequence
  Description of Artificial Sequence: Synthetic oligonucleotide
aucgaaaguuguccucacc

SEQ ID NO: 2619614 - RNA, 19 nt, Artificial Sequence
  Description of Artificial Sequence: Synthetic oligonucleotide
ugacaagucguuuccacuc

SEQ ID NO: 2619615 - RNA, 19 nt, Artificial Sequence
  Description of Artificial Sequence: Synthetic oligonucleotide
cauugagucaggugggcag

SEQ ID NO: 2619616 - RNA, 19 nt, Artificial Sequence
  Description of Artificial Sequence: Synthetic oligonucleotide
aaucuagcuucuugaggug

SEQ ID NO: 2619617 - RNA, 19 nt, Artificial Sequence
  Description of Artificial Sequence: Synthetic oligonucleotide
cugguugccugacaagucg

SEQ ID NO: 2619618 - RNA, 19 nt, Artificial Sequence
  Description of Artificial Sequence: Synthetic oligonucleotide
uggaaggguaucaacuggu

SEQ ID NO: 2619619 - RNA, 19 nt, Artificial Sequence
  Description of Artificial Sequence: Synthetic oligonucleotide
agaagcguagguccucagg

SEQ ID NO: 2619620 - RNA, 19 nt, Artificial Sequence
  Description of Artificial Sequence: Synthetic oligonucleotide
gaaauagucugcagccagg

SEQ ID NO: 2619621 - RNA, 19 nt, Artificial Sequence
  Description of Artificial Sequence: Synthetic oligonucleotide
agaccaagguagcggagac

SEQ ID NO: 2619622 - RNA, 19 nt, Artificial Sequence
  Description of Artificial Sequence: Synthetic oligonucleotide
aggggugcaccacagugcg

SEQ ID NO: 2619623 - RNA, 19 nt, Artificial Sequence
  Description of Artificial Sequence: Synthetic oligonucleotide
agcucuuuaaguccugcca

SEQ ID NO: 2619624 - RNA, 19 nt, Artificial Sequence
  Description of Artificial Sequence: Synthetic oligonucleotide
gaaaguaucgaaaguuguc

SEQ ID NO: 2619625 - RNA, 19 nt, Artificial Sequence
  Description of Artificial Sequence: Synthetic oligonucleotide
uagggugccgagcaguuga

SEQ ID NO: 2619626 - RNA, 19 nt, Artificial Sequence
  Description of Artificial Sequence: Synthetic oligonucleotide
auagcaauccacagggaag

SEQ ID NO: 2619627 - RNA, 19 nt, Artificial Sequence
  Description of Artificial Sequence: Synthetic oligonucleotide
caagaugcagcaguguggc

SEQ ID NO: 2619628 - RNA, 19 nt, Artificial Sequence
  Description of Artificial Sequence: Synthetic oligonucleotide
cucccgaagacagacaaag

SEQ ID NO: 2619629 - RNA, 19 nt, Artificial Sequence
  Description of Artificial Sequence: Synthetic oligonucleotide
uuggagaucagagacugaa

SEQ ID NO: 2619630 - RNA, 19 nt, Artificial Sequence
  Description of Artificial Sequence: Synthetic oligonucleotide
uagcuggugcaacucagcc

SEQ ID NO: 2619631 - RNA, 19 nt, Artificial Sequence
  Description of Artificial Sequence: Synthetic oligonucleotide
ugccugaaaggagagaaga

SEQ ID NO: 2619632 - RNA, 19 nt, Artificial Sequence
  Description of Artificial Sequence: Synthetic oligonucleotide
agucagcucaagaugcagc

SEQ ID NO: 2619633 - RNA, 19 nt, Artificial Sequence
  Description of Artificial Sequence: Synthetic oligonucleotide
cuggaaggguaucaacugg

SEQ ID NO: 2619634 - RNA, 19 nt, Artificial Sequence
  Description of Artificial Sequence: Synthetic oligonucleotide
gacugacacauugagucag

SEQ ID NO: 2619635 - RNA, 19 nt, Artificial Sequence
  Description of Artificial Sequence: Synthetic oligonucleotide
aaguugacacucagucagc

SEQ ID NO: 2619636 - RNA, 19 nt, Artificial Sequence
  Description of Artificial Sequence: Synthetic oligonucleotide
cacagugcggagcucagcc

SEQ ID NO: 2619637 - RNA, 19 nt, Artificial Sequence
  Description of Artificial Sequence: Synthetic oligonucleotide
gaaaggagagaagagccca

SEQ ID NO: 2619638 - RNA, 19 nt, Artificial Sequence
  Description of Artificial Sequence: Synthetic oligonucleotide
agacaaaggguugccauag

SEQ ID NO: 2619639 - RNA, 19 nt, Artificial Sequence
  Description of Artificial Sequence: Synthetic oligonucleotide
aacagugcacagaaggcca

SEQ ID NO: 2619640 - RNA, 19 nt, Artificial Sequence
  Description of Artificial Sequence: Synthetic oligonucleotide
ucuacccgggcaaacuucu

SEQ ID NO: 2619641 - RNA, 19 nt, Artificial Sequence
  Description of Artificial Sequence: Synthetic oligonucleotide
aggguaucaacugguugcc

SEQ ID NO: 2619642 - RNA, 19 nt, Artificial Sequence
  Description of Artificial Sequence: Synthetic oligonucleotide
ugccauagagaccaaggua

SEQ ID NO: 2619643 - RNA, 19 nt, Artificial Sequence
  Description of Artificial Sequence: Synthetic oligonucleotide
cccgaagacagacaaagcg

SEQ ID NO: 2619644 - RNA, 19 nt, Artificial Sequence
  Description of Artificial Sequence: Synthetic oligonucleotide
ugacacauugagucaggug

SEQ ID NO: 2619645 - RNA, 19 nt, Artificial Sequence
  Description of Artificial Sequence: Synthetic oligonucleotide
caacagugcacagaaggcc

SEQ ID NO: 2619646 - RNA, 19 nt, Artificial Sequence
  Description of Artificial Sequence: Synthetic oligonucleotide
aguacaugggcacggccug

SEQ ID NO: 2619647 - RNA, 19 nt, Artificial Sequence
  Description of Artificial Sequence: Synthetic oligonucleotide
agaaaguaucgaaaguugu

SEQ ID NO: 2619648 - RNA, 19 nt, Artificial Sequence
  Description of Artificial Sequence: Synthetic oligonucleotide
ugccugacaagucguuucc

SEQ ID NO: 2619649 - RNA, 19 nt, Artificial Sequence
  Description of Artificial Sequence: Synthetic oligonucleotide
aucugggccagaaaguauc

SEQ ID NO: 2619650 - RNA, 19 nt, Artificial Sequence
  Description of Artificial Sequence: Synthetic oligonucleotide
ccaaggaaggcccucauag

SEQ ID NO: 2619651 - RNA, 19 nt, Artificial Sequence
  Description of Artificial Sequence: Synthetic oligonucleotide
cauugauggaggcuuccag

SEQ ID NO: 2619652 - RNA, 19 nt, Artificial Sequence
  Description of Artificial Sequence: Synthetic oligonucleotide
uuccacucaaaucuagcuu

SEQ ID NO: 2619653 - RNA, 19 nt, Artificial Sequence
  Description of Artificial Sequence: Synthetic oligonucleotide
cauagagaccaagguagcg

SEQ ID NO: 2619654 - RNA, 19 nt, Artificial Sequence
  Description of Artificial Sequence: Synthetic oligonucleotide
caugggcacggccugaagc

SEQ ID NO: 2619655 - RNA, 19 nt, Artificial Sequence
  Description of Artificial Sequence: Synthetic oligonucleotide
gagacugaaauagucugca

SEQ ID NO: 2619656 - RNA, 19 nt, Artificial Sequence
  Description of Artificial Sequence: Synthetic oligonucleotide
agaagagcccaugcugagc

SEQ ID NO: 2619657 - RNA, 19 nt, Artificial Sequence
  Description of Artificial Sequence: Synthetic oligonucleotide
cucagccuguaccacagag

SEQ ID NO: 2619658 - RNA, 19 nt, Artificial Sequence
  Description of Artificial Sequence: Synthetic oligonucleotide
ccgaagacagacaaagcgg

SEQ ID NO: 2619659 - RNA, 19 nt, Artificial Sequence
  Description of Artificial Sequence: Synthetic oligonucleotide
agagucccgaagcagcucu

SEQ ID NO: 2619660 - RNA, 19 nt, Artificial Sequence
  Description of Artificial Sequence: Synthetic oligonucleotide
ucucuucauugauggaggc

SEQ ID NO: 2619661 - RNA, 19 nt, Artificial Sequence
  Description of Artificial Sequence: Synthetic oligonucleotide
ugggccagaaaguaucgaa

SEQ ID NO: 2619662 - RNA, 19 nt, Artificial Sequence
  Description of Artificial Sequence: Synthetic oligonucleotide
uuccagaaggacagaggca

SEQ ID NO: 2619663 - RNA, 19 nt, Artificial Sequence
  Description of Artificial Sequence: Synthetic oligonucleotide
ggugccgagcaguugaucc

SEQ ID NO: 2619664 - RNA, 19 nt, Artificial Sequence
  Description of Artificial Sequence: Synthetic oligonucleotide
gguaucaacugguugccug

SEQ ID NO: 2619665 - RNA, 19 nt, Artificial Sequence
  Description of Artificial Sequence: Synthetic oligonucleotide
cagcucuaggcuuuccagg

SEQ ID NO: 2619666 - RNA, 19 nt, Artificial Sequence
  Description of Artificial Sequence: Synthetic oligonucleotide
aagcguagguccucaggca

SEQ ID NO: 2619667 - RNA, 19 nt, Artificial Sequence
  Description of Artificial Sequence: Synthetic oligonucleotide
cagcaugagagcucugagc

SEQ ID NO: 2619668 - RNA, 19 nt, Artificial Sequence
  Description of Artificial Sequence: Synthetic oligonucleotide
gacagaggcaggugguggc

SEQ ID NO: 2619669 - RNA, 19 nt, Artificial Sequence
  Description of Artificial Sequence: Synthetic oligonucleotide
uguaccacagagucccgaa

SEQ ID NO: 2619670 - RNA, 19 nt, Artificial Sequence
  Description of Artificial Sequence: Synthetic oligonucleotide
ucagccucuacccgggcaa

SEQ ID NO: 2619671 - RNA, 19 nt, Artificial Sequence
  Description of Artificial Sequence: Synthetic oligonucleotide
caaaggguugccauagaga

SEQ ID NO: 2619672 - RNA, 19 nt, Artificial Sequence
  Description of Artificial Sequence: Synthetic oligonucleotide
agacugaaauagucugcag

SEQ ID NO: 2619673 - RNA, 19 nt, Artificial Sequence
  Description of Artificial Sequence: Synthetic oligonucleotide
cauagcaauccacagggaa

SEQ ID NO: 2619674 - RNA, 19 nt, Artificial Sequence
  Description of Artificial Sequence: Synthetic oligonucleotide
aacucagccucuacccggg

SEQ ID NO: 2619675 - RNA, 19 nt, Artificial Sequence
  Description of Artificial Sequence: Synthetic oligonucleotide
gucagcucaagaugcagca

SEQ ID NO: 2619676 - RNA, 19 nt, Artificial Sequence
  Description of Artificial Sequence: Synthetic oligonucleotide
gaagagcccaugcugagcu

SEQ ID NO: 2619677 - RNA, 19 nt, Artificial Sequence
  Description of Artificial Sequence: Synthetic oligonucleotide
augggcacggccugaagcu

SEQ ID NO: 2619678 - RNA, 19 nt, Artificial Sequence
  Description of Artificial Sequence: Synthetic oligonucleotide
acggccugaagcuaacagu

SEQ ID NO: 2619679 - RNA, 19 nt, Artificial Sequence
  Description of Artificial Sequence: Synthetic oligonucleotide
uugccugacaagucguuuc

SEQ ID NO: 2619680 - RNA, 19 nt, Artificial Sequence
  Description of Artificial Sequence: Synthetic oligonucleotide
aagcuaacaguagcuggug

SEQ ID NO: 2619681 - RNA, 19 nt, Artificial Sequence
  Description of Artificial Sequence: Synthetic oligonucleotide
gagaucagagacugaaaua

SEQ ID NO: 2619682 - RNA, 19 nt, Artificial Sequence
  Description of Artificial Sequence: Synthetic oligonucleotide
aagaagcguagguccucag

SEQ ID NO: 2619683 - RNA, 19 nt, Artificial Sequence
  Description of Artificial Sequence: Synthetic oligonucleotide
acacauugagucagguggg

SEQ ID NO: 2619684 - RNA, 19 nt, Artificial Sequence
  Description of Artificial Sequence: Synthetic oligonucleotide
uagacaaaggguugccaua

SEQ ID NO: 2619685 - RNA, 19 nt, Artificial Sequence
  Description of Artificial Sequence: Synthetic oligonucleotide
uacccgggcaaacuucucu

SEQ ID NO: 2619686 - RNA, 19 nt, Artificial Sequence
  Description of Artificial Sequence: Synthetic oligonucleotide
agacagacaaagcggccca

SEQ ID NO: 2619687 - RNA, 19 nt, Artificial Sequence
  Description of Artificial Sequence: Synthetic oligonucleotide
guaucgaaaguuguccuca

SEQ ID NO: 2619688 - RNA, 19 nt, Artificial Sequence
  Description of Artificial Sequence: Synthetic oligonucleotide
ucuguagggugccgagcag

SEQ ID NO: 2619689 - RNA, 19 nt, Artificial Sequence
  Description of Artificial Sequence: Synthetic oligonucleotide
acaguagcuggugcaacuc

SEQ ID NO: 2619690 - RNA, 19 nt, Artificial Sequence
  Description of Artificial Sequence: Synthetic oligonucleotide
uccucaggcaacagugcac

SEQ ID NO: 2619691 - RNA, 19 nt, Artificial Sequence
  Description of Artificial Sequence: Synthetic oligonucleotide
uccucaccauccacggaag

SEQ ID NO: 2619692 - RNA, 19 nt, Artificial Sequence
  Description of Artificial Sequence: Synthetic oligonucleotide
agaugucagugguccagag

SEQ ID NO: 2619693 - RNA, 19 nt, Artificial Sequence
  Description of Artificial Sequence: Synthetic oligonucleotide
guaucaacugguugccuga

SEQ ID NO: 2619694 - RNA, 19 nt, Artificial Sequence
  Description of Artificial Sequence: Synthetic oligonucleotide
caagguagcggagacugac

SEQ ID NO: 2619695 - RNA, 19 nt, Artificial Sequence
  Description of Artificial Sequence: Synthetic oligonucleotide
agacaaagcggcccaucug

SEQ ID NO: 2619696 - RNA, 19 nt, Artificial Sequence
  Description of Artificial Sequence: Synthetic oligonucleotide
agcucccgaagacagacaa

SEQ ID NO: 2619697 - RNA, 19 nt, Artificial Sequence
  Description of Artificial Sequence: Synthetic oligonucleotide
uagguccucaggcaacagu

SEQ ID NO: 2619698 - RNA, 19 nt, Artificial Sequence
  Description of Artificial Sequence: Synthetic oligonucleotide
gcaacagccugcaacagcc

SEQ ID NO: 2619699 - RNA, 19 nt, Artificial Sequence
  Description of Artificial Sequence: Synthetic oligonucleotide
accacagagucccgaagca

SEQ ID NO: 2619700 - RNA, 19 nt, Artificial Sequence
  Description of Artificial Sequence: Synthetic oligonucleotide
agcaguugauccagccugc

SEQ ID NO: 2619701 - RNA, 19 nt, Artificial Sequence
  Description of Artificial Sequence: Synthetic oligonucleotide
uaucgaaaguuguccucac

SEQ ID NO: 2619702 - RNA, 19 nt, Artificial Sequence
  Description of Artificial Sequence: Synthetic oligonucleotide
ccugaaaggagagaagagc

SEQ ID NO: 2619703 - RNA, 19 nt, Artificial Sequence
  Description of Artificial Sequence: Synthetic oligonucleotide
gugcaacucagccucuacc

SEQ ID NO: 2619704 - RNA, 19 nt, Artificial Sequence
  Description of Artificial Sequence: Synthetic oligonucleotide
cugaagcuaacaguagcug

SEQ ID NO: 2619705 - RNA, 19 nt, Artificial Sequence
  Description of Artificial Sequence: Synthetic oligonucleotide
aguagcuggugcaacucag

SEQ ID NO: 2619706 - RNA, 19 nt, Artificial Sequence
  Description of Artificial Sequence: Synthetic oligonucleotide
gacaagucguuuccacuca

SEQ ID NO: 2619707 - RNA, 19 nt, Artificial Sequence
  Description of Artificial Sequence: Synthetic oligonucleotide
agcucugagccaagaagcg

SEQ ID NO: 2619708 - RNA, 19 nt, Artificial Sequence
  Description of Artificial Sequence: Synthetic oligonucleotide
uggagaucagagacugaaa

SEQ ID NO: 2619709 - RNA, 19 nt, Artificial Sequence
  Description of Artificial Sequence: Synthetic oligonucleotide
cacggccugaagcuaacag

SEQ ID NO: 2619710 - RNA, 19 nt, Artificial Sequence
  Description of Artificial Sequence: Synthetic oligonucleotide
ugucagugguccagaguac

SEQ ID NO: 2619711 - RNA, 19 nt, Artificial Sequence
  Description of Artificial Sequence: Synthetic oligonucleotide
caugcugagcucccgaaga

SEQ ID NO: 2619712 - RNA, 19 nt, Artificial Sequence
  Description of Artificial Sequence: Synthetic oligonucleotide
ucauugauggaggcuucca

SEQ ID NO: 2619713 - RNA, 19 nt, Artificial Sequence
  Description of Artificial Sequence: Synthetic oligonucleotide
uguggccaacagcugggca

SEQ ID NO: 2619714 - RNA, 19 nt, Artificial Sequence
  Description of Artificial Sequence: Synthetic oligonucleotide
ucagcucaagaugcagcag

SEQ ID NO: 2619715 - RNA, 19 nt, Artificial Sequence
  Description of Artificial Sequence: Synthetic oligonucleotide
ucagugguccagaguacau

SEQ ID NO: 2619716 - RNA, 19 nt, Artificial Sequence
  Description of Artificial Sequence: Synthetic oligonucleotide
gcccaucugggccagaaag

SEQ ID NO: 2619717 - RNA, 19 nt, Artificial Sequence
  Description of Artificial Sequence: Synthetic oligonucleotide
acacucagucagcucaaga

SEQ ID NO: 2619718 - RNA, 19 nt, Artificial Sequence
  Description of Artificial Sequence: Synthetic oligonucleotide
agcuggugcaacucagccu

SEQ ID NO: 2619719 - RNA, 19 nt, Artificial Sequence
  Description of Artificial Sequence: Synthetic oligonucleotide
acugguugccugacaaguc

SEQ ID NO: 2619720 - RNA, 19 nt, Artificial Sequence
  Description of Artificial Sequence: Synthetic oligonucleotide
aguugacacucagucagcu

SEQ ID NO: 2619721 - RNA, 19 nt, Artificial Sequence
  Description of Artificial Sequence: Synthetic oligonucleotide
agucaggugggcagugugg

SEQ ID NO: 2619722 - RNA, 19 nt, Artificial Sequence
  Description of Artificial Sequence: Synthetic oligonucleotide
ggcugcaacagccugcaac

SEQ ID NO: 2619723 - RNA, 19 nt, Artificial Sequence
  Description of Artificial Sequence: Synthetic oligonucleotide
uguagggugccgagcaguu

SEQ ID NO: 2619724 - RNA, 19 nt, Artificial Sequence
  Description of Artificial Sequence: Synthetic oligonucleotide
gcaacucagccucuacccg

SEQ ID NO: 2619725 - RNA, 19 nt, Artificial Sequence
  Description of Artificial Sequence: Synthetic oligonucleotide
agcguagguccucaggcaa

SEQ ID NO: 2619726 - RNA, 19 nt, Artificial Sequence
  Description of Artificial Sequence: Synthetic oligonucleotide
gagccaagaagcguagguc

SEQ ID NO: 2619727 - RNA, 19 nt, Artificial Sequence
  Description of Artificial Sequence: Synthetic oligonucleotide
uagaugucagugguccaga

SEQ ID NO: 2619728 - RNA, 19 nt, Artificial Sequence
  Description of Artificial Sequence: Synthetic oligonucleotide
acagacaaagcggcccauc

SEQ ID NO: 2619729 - RNA, 19 nt, Artificial Sequence
  Description of Artificial Sequence: Synthetic oligonucleotide
gcuaacaguagcuggugca

SEQ ID NO: 2619730 - RNA, 19 nt, Artificial Sequence
  Description of Artificial Sequence: Synthetic oligonucleotide
ugccgagcaguugauccag

SEQ ID NO: 2619731 - RNA, 19 nt, Artificial Sequence
  Description of Artificial Sequence: Synthetic oligonucleotide
caauccacagggaaggggu

SEQ ID NO: 2619732 - RNA, 19 nt, Artificial Sequence
  Description of Artificial Sequence: Synthetic oligonucleotide
gagaccaagguagcggaga

SEQ ID NO: 2619733 - RNA, 19 nt, Artificial Sequence
  Description of Artificial Sequence: Synthetic oligonucleotide
gccugaagcuaacaguagc

SEQ ID NO: 2619734 - RNA, 19 nt, Artificial Sequence
  Description of Artificial Sequence: Synthetic oligonucleotide
acugacacauugagucagg

SEQ ID NO: 2619735 - RNA, 19 nt, Artificial Sequence
  Description of Artificial Sequence: Synthetic oligonucleotide
uaacaguagcuggugcaac

SEQ ID NO: 2619736 - RNA, 19 nt, Artificial Sequence
  Description of Artificial Sequence: Synthetic oligonucleotide
cagugcggagcucagccug

SEQ ID NO: 2619737 - RNA, 19 nt, Artificial Sequence
  Description of Artificial Sequence: Synthetic oligonucleotide
ucguuuccacucaaaucua

SEQ ID NO: 2619738 - RNA, 19 nt, Artificial Sequence
  Description of Artificial Sequence: Synthetic oligonucleotide
ucaggugggcaguguggcc

SEQ ID NO: 2619739 - RNA, 19 nt, Artificial Sequence
  Description of Artificial Sequence: Synthetic oligonucleotide
cucugagccaagaagcgua

SEQ ID NO: 2619740 - RNA, 19 nt, Artificial Sequence
  Description of Artificial Sequence: Synthetic oligonucleotide
ccuggaaggguaucaacug

SEQ ID NO: 2619741 - RNA, 19 nt, Artificial Sequence
  Description of Artificial Sequence: Synthetic oligonucleotide
aaaggagagaagagcccau

SEQ ID NO: 2619742 - RNA, 19 nt, Artificial Sequence
  Description of Artificial Sequence: Synthetic oligonucleotide
guugauccagccugccuga

SEQ ID NO: 2619743 - RNA, 19 nt, Artificial Sequence
  Description of Artificial Sequence: Synthetic oligonucleotide
cucuacccgggcaaacuuc

SEQ ID NO: 2619744 - RNA, 19 nt, Artificial Sequence
  Description of Artificial Sequence: Synthetic oligonucleotide
ugauccagccugccugaaa

SEQ ID NO: 2619745 - RNA, 19 nt, Artificial Sequence
  Description of Artificial Sequence: Synthetic oligonucleotide
acaaagcggcccaucuggg

SEQ ID NO: 2619746 - RNA, 19 nt, Artificial Sequence
  Description of Artificial Sequence: Synthetic oligonucleotide
agccuguaccacagagucc

SEQ ID NO: 2619747 - RNA, 19 nt, Artificial Sequence
  Description of Artificial Sequence: Synthetic oligonucleotide
guugacacucagucagcuc

SEQ ID NO: 2619748 - RNA, 19 nt, Artificial Sequence
  Description of Artificial Sequence: Synthetic oligonucleotide
aagguagcggagacugaca

SEQ ID NO: 2619749 - RNA, 19 nt, Artificial Sequence
  Description of Artificial Sequence: Synthetic oligonucleotide
cgaagcagcucuuuaaguc

SEQ ID NO: 2619750 - RNA, 19 nt, Artificial Sequence
  Description of Artificial Sequence: Synthetic oligonucleotide
gcaacagugcacagaaggc

SEQ ID NO: 2619751 - RNA, 19 nt, Artificial Sequence
  Description of Artificial Sequence: Synthetic oligonucleotide
ugcugagcucccgaagaca

SEQ ID NO: 2619752 - RNA, 19 nt, Artificial Sequence
  Description of Artificial Sequence: Synthetic oligonucleotide
ggagaucagagacugaaau

SEQ ID NO: 2619753 - RNA, 19 nt, Artificial Sequence
  Description of Artificial Sequence: Synthetic oligonucleotide
agcucaagaugcagcagug

SEQ ID NO: 2619754 - RNA, 19 nt, Artificial Sequence
  Description of Artificial Sequence: Synthetic oligonucleotide
uguccucaccauccacgga

SEQ ID NO: 2619755 - RNA, 19 nt, Artificial Sequence
  Description of Artificial Sequence: Synthetic oligonucleotide
acaagucguuuccacucaa

SEQ ID NO: 2619756 - RNA, 19 nt, Artificial Sequence
  Description of Artificial Sequence: Synthetic oligonucleotide
cacauugagucaggugggc

SEQ ID NO: 2619757 - RNA, 19 nt, Artificial Sequence
  Description of Artificial Sequence: Synthetic oligonucleotide
acauugagucaggugggca

SEQ ID NO: 2619758 - RNA, 19 nt, Artificial Sequence
  Description of Artificial Sequence: Synthetic oligonucleotide
caugagagcucugagccaa

SEQ ID NO: 2619759 - RNA, 19 nt, Artificial Sequence
  Description of Artificial Sequence: Synthetic oligonucleotide
guagcggagacugacacau

SEQ ID NO: 2619760 - RNA, 19 nt, Artificial Sequence
  Description of Artificial Sequence: Synthetic oligonucleotide
ugagagcucugagccaaga

SEQ ID NO: 2619761 - RNA, 19 nt, Artificial Sequence
  Description of Artificial Sequence: Synthetic oligonucleotide
ccuuggagaucagagacug

SEQ ID NO: 2619762 - RNA, 19 nt, Artificial Sequence
  Description of Artificial Sequence: Synthetic oligonucleotide
guagcuggugcaacucagc

SEQ ID NO: 2619763 - RNA, 19 nt, Artificial Sequence
  Description of Artificial Sequence: Synthetic oligonucleotide
cuuuaaguccugccauaga

SEQ ID NO: 2619764 - RNA, 19 nt, Artificial Sequence
  Description of Artificial Sequence: Synthetic oligonucleotide
gaugucagugguccagagu

SEQ ID NO: 2619765 - RNA, 19 nt, Artificial Sequence
  Description of Artificial Sequence: Synthetic oligonucleotide
gcaauccacagggaagggg

SEQ ID NO: 2619766 - RNA, 19 nt, Artificial Sequence
  Description of Artificial Sequence: Synthetic oligonucleotide
acagugcggagcucagccu

SEQ ID NO: 2619767 - RNA, 19 nt, Artificial Sequence
  Description of Artificial Sequence: Synthetic oligonucleotide
gaguacaugggcacggccu

SEQ ID NO: 2619768 - RNA, 19 nt, Artificial Sequence
  Description of Artificial Sequence: Synthetic oligonucleotide
cacucagucagcucaagau

SEQ ID NO: 2619769 - RNA, 19 nt, Artificial Sequence
  Description of Artificial Sequence: Synthetic oligonucleotide
gagagcucugagccaagaa

SEQ ID NO: 2619770 - RNA, 19 nt, Artificial Sequence
  Description of Artificial Sequence: Synthetic oligonucleotide
uugagucaggugggcagug

SEQ ID NO: 2619771 - RNA, 19 nt, Artificial Sequence
  Description of Artificial Sequence: Synthetic oligonucleotide
gcaaguugacacucaguca

SEQ ID NO: 2619772 - RNA, 19 nt, Artificial Sequence
  Description of Artificial Sequence: Synthetic oligonucleotide
ccugacaagucguuuccac

SEQ ID NO: 2619773 - RNA, 19 nt, Artificial Sequence
  Description of Artificial Sequence: Synthetic oligonucleotide
gacacucagucagcucaag

SEQ ID NO: 2619774 - RNA, 19 nt, Artificial Sequence
  Description of Artificial Sequence: Synthetic oligonucleotide
ccauagagaccaagguagc

SEQ ID NO: 2619775 - RNA, 19 nt, Artificial Sequence
  Description of Artificial Sequence: Synthetic oligonucleotide
cuaacaguagcuggugcaa

SEQ ID NO: 2619776 - RNA, 19 nt, Artificial Sequence
  Description of Artificial Sequence: Synthetic oligonucleotide
gacaaaggguugccauaga

SEQ ID NO: 2619777 - RNA, 19 nt, Artificial Sequence
  Description of Artificial Sequence: Synthetic oligonucleotide
cagugguccagaguacaug

SEQ ID NO: 2619778 - RNA, 19 nt, Artificial Sequence
  Description of Artificial Sequence: Synthetic oligonucleotide
gugguccagaguacauggg

SEQ ID NO: 2619779 - RNA, 19 nt, Artificial Sequence
  Description of Artificial Sequence: Synthetic oligonucleotide
gucagugguccagaguaca

SEQ ID NO: 2619780 - RNA, 19 nt, Artificial Sequence
  Description of Artificial Sequence: Synthetic oligonucleotide
cugaaauagucugcagcca

SEQ ID NO: 2619781 - RNA, 19 nt, Artificial Sequence
  Description of Artificial Sequence: Synthetic oligonucleotide
cccgaagcagcucuuuaag

SEQ ID NO: 2619782 - RNA, 19 nt, Artificial Sequence
  Description of Artificial Sequence: Synthetic oligonucleotide
acaugggcacggccugaag

SEQ ID NO: 2619783 - RNA, 19 nt, Artificial Sequence
  Description of Artificial Sequence: Synthetic oligonucleotide
aggcccucauagcaaucca

SEQ ID NO: 2619784 - RNA, 19 nt, Artificial Sequence
  Description of Artificial Sequence: Synthetic oligonucleotide
ggaggcuuccagaaggaca

SEQ ID NO: 2619785 - RNA, 19 nt, Artificial Sequence
  Description of Artificial Sequence: Synthetic oligonucleotide
cugagccaagaagcguagg

SEQ ID NO: 2619786 - RNA, 19 nt, Artificial Sequence
  Description of Artificial Sequence: Synthetic oligonucleotide
cucuuuaaguccugccaua

SEQ ID NO: 2619787 - RNA, 19 nt, Artificial Sequence
  Description of Artificial Sequence: Synthetic oligonucleotide
gaucagagacugaaauagu

SEQ ID NO: 2619788 - RNA, 19 nt, Artificial Sequence
  Description of Artificial Sequence: Synthetic oligonucleotide
ccagaguacaugggcacgg

SEQ ID NO: 2619789 - RNA, 19 nt, Artificial Sequence
  Description of Artificial Sequence: Synthetic oligonucleotide
cugacaagucguuuccacu

SEQ ID NO: 2619790 - RNA, 19 nt, Artificial Sequence
  Description of Artificial Sequence: Synthetic oligonucleotide
accuuggagaucagagacu

SEQ ID NO: 2619791 - RNA, 19 nt, Artificial Sequence
  Description of Artificial Sequence: Synthetic oligonucleotide
gcucuaggcuuuccagggg

SEQ ID NO: 2619792 - RNA, 19 nt, Artificial Sequence
  Description of Artificial Sequence: Synthetic oligonucleotide
cagaguacaugggcacggc

SEQ ID NO: 2619793 - RNA, 19 nt, Artificial Sequence
  Description of Artificial Sequence: Synthetic oligonucleotide
uggaggcuuccagaaggac

SEQ ID NO: 2619794 - RNA, 19 nt, Artificial Sequence
  Description of Artificial Sequence: Synthetic oligonucleotide
ugagucaggugggcagugu

SEQ ID NO: 2619795 - RNA, 19 nt, Artificial Sequence
  Description of Artificial Sequence: Synthetic oligonucleotide
acccgggcaaacuucucuu

SEQ ID NO: 2619796 - RNA, 19 nt, Artificial Sequence
  Description of Artificial Sequence: Synthetic oligonucleotide
ugcggagcucagccuguac

SEQ ID NO: 2619797 - RNA, 19 nt, Artificial Sequence
  Description of Artificial Sequence: Synthetic oligonucleotide
aguguggcugcaacagccu

SEQ ID NO: 2619798 - RNA, 19 nt, Artificial Sequence
  Description of Artificial Sequence: Synthetic oligonucleotide
gguccagaguacaugggca

SEQ ID NO: 2619799 - RNA, 19 nt, Artificial Sequence
  Description of Artificial Sequence: Synthetic oligonucleotide
gugccgagcaguugaucca

SEQ ID NO: 2619800 - RNA, 19 nt, Artificial Sequence
  Description of Artificial Sequence: Synthetic oligonucleotide
ccugccauagacaaagggu

SEQ ID NO: 2619801 - RNA, 19 nt, Artificial Sequence
  Description of Artificial Sequence: Synthetic oligonucleotide
uggccaacagcugggcauc

SEQ ID NO: 2619802 - RNA, 19 nt, Artificial Sequence
  Description of Artificial Sequence: Synthetic oligonucleotide
caguagcuggugcaacuca

SEQ ID NO: 2619803 - RNA, 19 nt, Artificial Sequence
  Description of Artificial Sequence: Synthetic oligonucleotide
ggcucuguagggugccgag

SEQ ID NO: 2619804 - RNA, 19 nt, Artificial Sequence
  Description of Artificial Sequence: Synthetic oligonucleotide
uacaugggcacggccugaa

SEQ ID NO: 2619805 - RNA, 19 nt, Artificial Sequence
  Description of Artificial Sequence: Synthetic oligonucleotide
caagaagcguagguccuca

SEQ ID NO: 2619806 - RNA, 19 nt, Artificial Sequence
  Description of Artificial Sequence: Synthetic oligonucleotide
ggagagaagagcccaugcu

SEQ ID NO: 2619807 - RNA, 19 nt, Artificial Sequence
  Description of Artificial Sequence: Synthetic oligonucleotide
ggugcaacucagccucuac

SEQ ID NO: 2619808 - RNA, 19 nt, Artificial Sequence
  Description of Artificial Sequence: Synthetic oligonucleotide
aggaaggcccucauagcaa

SEQ ID NO: 2619809 - RNA, 19 nt, Artificial Sequence
  Description of Artificial Sequence: Synthetic oligonucleotide
caagucguuuccacucaaa

SEQ ID NO: 2619810 - RNA, 19 nt, Artificial Sequence
  Description of Artificial Sequence: Synthetic oligonucleotide
cguuuccacucaaaucuag

SEQ ID NO: 2619811 - RNA, 19 nt, Artificial Sequence
  Description of Artificial Sequence: Synthetic oligonucleotide
cuucuugaggugggcagca

SEQ ID NO: 2619812 - RNA, 19 nt, Artificial Sequence
  Description of Artificial Sequence: Synthetic oligonucleotide
ccgagcaguugauccagcc

SEQ ID NO: 2619813 - RNA, 19 nt, Artificial Sequence
  Description of Artificial Sequence: Synthetic oligonucleotide
cuuggagaucagagacuga

SEQ ID NO: 2619814 - RNA, 19 nt, Artificial Sequence
  Description of Artificial Sequence: Synthetic oligonucleotide
agucugcagccaggcgccc

SEQ ID NO: 2619815 - RNA, 19 nt, Artificial Sequence
  Description of Artificial Sequence: Synthetic oligonucleotide
guagguccucaggcaacag

SEQ ID NO: 2619816 - RNA, 19 nt, Artificial Sequence
  Description of Artificial Sequence: Synthetic oligonucleotide
aaguccugccauagacaaa

SEQ ID NO: 2619817 - RNA, 19 nt, Artificial Sequence
  Description of Artificial Sequence: Synthetic oligonucleotide
gguagcggagacugacaca

SEQ ID NO: 2619818 - RNA, 19 nt, Artificial Sequence
  Description of Artificial Sequence: Synthetic oligonucleotide
agccccuggaaggguauca

SEQ ID NO: 2619819 - RNA, 19 nt, Artificial Sequence
  Description of Artificial Sequence: Synthetic oligonucleotide
ggcagcaugagagcucuga

SEQ ID NO: 2619820 - RNA, 19 nt, Artificial Sequence
  Description of Artificial Sequence: Synthetic oligonucleotide
gaaggcccucauagcaauc

SEQ ID NO: 2619821 - RNA, 19 nt, Artificial Sequence
  Description of Artificial Sequence: Synthetic oligonucleotide
caggcgcccauagauguca

SEQ ID NO: 2619822 - RNA, 19 nt, Artificial Sequence
  Description of Artificial Sequence: Synthetic oligonucleotide
guccugccauagacaaagg

SEQ ID NO: 2619823 - RNA, 19 nt, Artificial Sequence
  Description of Artificial Sequence: Synthetic oligonucleotide
guagggugccgagcaguug

SEQ ID NO: 2619824 - RNA, 19 nt, Artificial Sequence
  Description of Artificial Sequence: Synthetic oligonucleotide
gcucuuuaaguccugccau

SEQ ID NO: 2619825 - RNA, 19 nt, Artificial Sequence
  Description of Artificial Sequence: Synthetic oligonucleotide
ccugaagcuaacaguagcu

SEQ ID NO: 2619826 - RNA, 19 nt, Artificial Sequence
  Description of Artificial Sequence: Synthetic oligonucleotide
cuacccgggcaaacuucuc

SEQ ID NO: 2619827 - RNA, 19 nt, Artificial Sequence
  Description of Artificial Sequence: Synthetic oligonucleotide
gcagcucuuuaaguccugc

SEQ ID NO: 2619828 - RNA, 19 nt, Artificial Sequence
  Description of Artificial Sequence: Synthetic oligonucleotide
ugcagcaguguggcugcaa

SEQ ID NO: 2619829 - RNA, 19 nt, Artificial Sequence
  Description of Artificial Sequence: Synthetic oligonucleotide
agugcggagcucagccugu

SEQ ID NO: 2619830 - RNA, 19 nt, Artificial Sequence
  Description of Artificial Sequence: Synthetic oligonucleotide
guguggccaacagcugggc

SEQ ID NO: 2619831 - RNA, 19 nt, Artificial Sequence
  Description of Artificial Sequence: Synthetic oligonucleotide
augagagcucugagccaag

SEQ ID NO: 2619832 - RNA, 19 nt, Artificial Sequence
  Description of Artificial Sequence: Synthetic oligonucleotide
gcaucagcaaguugacacu

SEQ ID NO: 2619833 - RNA, 19 nt, Artificial Sequence
  Description of Artificial Sequence: Synthetic oligonucleotide
gcccauagaugucaguggu

SEQ ID NO: 2619834 - RNA, 19 nt, Artificial Sequence
  Description of Artificial Sequence: Synthetic oligonucleotide
gcccucauagcaauccaca

SEQ ID NO: 2619835 - RNA, 19 nt, Artificial Sequence
  Description of Artificial Sequence: Synthetic oligonucleotide
cugagcucccgaagacaga

SEQ ID NO: 2619836 - RNA, 19 nt, Artificial Sequence
  Description of Artificial Sequence: Synthetic oligonucleotide
uugauccagccugccugaa

SEQ ID NO: 2619837 - RNA, 19 nt, Artificial Sequence
  Description of Artificial Sequence: Synthetic oligonucleotide
gugggcagcaugagagcuc

SEQ ID NO: 2619838 - RNA, 19 nt, Artificial Sequence
  Description of Artificial Sequence: Synthetic oligonucleotide
gcaugagagcucugagcca

SEQ ID NO: 2619839 - RNA, 19 nt, Artificial Sequence
  Description of Artificial Sequence: Synthetic oligonucleotide
uggugcaacucagccucua

SEQ ID NO: 2619840 - RNA, 19 nt, Artificial Sequence
  Description of Artificial Sequence: Synthetic oligonucleotide
cuguaccacagagucccga

SEQ ID NO: 2619841 - RNA, 19 nt, Artificial Sequence
  Description of Artificial Sequence: Synthetic oligonucleotide
cagccaggcgcccauagau

SEQ ID NO: 2619842 - RNA, 19 nt, Artificial Sequence
  Description of Artificial Sequence: Synthetic oligonucleotide
gucccgaagcagcucuuua

SEQ ID NO: 2619843 - RNA, 19 nt, Artificial Sequence
  Description of Artificial Sequence: Synthetic oligonucleotide
cagagucccgaagcagcuc

SEQ ID NO: 2619844 - RNA, 19 nt, Artificial Sequence
  Description of Artificial Sequence: Synthetic oligonucleotide
ugggcacggccugaagcua

SEQ ID NO: 2619845 - RNA, 19 nt, Artificial Sequence
  Description of Artificial Sequence: Synthetic oligonucleotide
gcaguugauccagccugcc

SEQ ID NO: 2619846 - RNA, 19 nt, Artificial Sequence
  Description of Artificial Sequence: Synthetic oligonucleotide
ggaaggcccucauagcaau

SEQ ID NO: 2619847 - RNA, 19 nt, Artificial Sequence
  Description of Artificial Sequence: Synthetic oligonucleotide
uagcggagacugacacauu

SEQ ID NO: 2619848 - RNA, 19 nt, Artificial Sequence
  Description of Artificial Sequence: Synthetic oligonucleotide
ccucaggcaacagugcaca

SEQ ID NO: 2619849 - RNA, 19 nt, Artificial Sequence
  Description of Artificial Sequence: Synthetic oligonucleotide
cagcaaguugacacucagu

SEQ ID NO: 2619850 - RNA, 19 nt, Artificial Sequence
  Description of Artificial Sequence: Synthetic oligonucleotide
caucugggccagaaaguau

SEQ ID NO: 2619851 - RNA, 19 nt, Artificial Sequence
  Description of Artificial Sequence: Synthetic oligonucleotide
aggccagcucuaggcuuuc

SEQ ID NO: 2619852 - RNA, 19 nt, Artificial Sequence
  Description of Artificial Sequence: Synthetic oligonucleotide
ggagacugacacauugagu

SEQ ID NO: 2619853 - RNA, 19 nt, Artificial Sequence
  Description of Artificial Sequence: Synthetic oligonucleotide
cugggccagaaaguaucga

SEQ ID NO: 2619854 - RNA, 19 nt, Artificial Sequence
  Description of Artificial Sequence: Synthetic oligonucleotide
guacaugggcacggccuga

SEQ ID NO: 2619855 - RNA, 19 nt, Artificial Sequence
  Description of Artificial Sequence: Synthetic oligonucleotide
ccuguaccacagagucccg

SEQ ID NO: 2619856 - RNA, 19 nt, Artificial Sequence
  Description of Artificial Sequence: Synthetic oligonucleotide
gcucuguagggugccgagc

SEQ ID NO: 2619857 - RNA, 19 nt, Artificial Sequence
  Description of Artificial Sequence: Synthetic oligonucleotide
ccccuggaaggguaucaac

SEQ ID NO: 2619858 - RNA, 19 nt, Artificial Sequence
  Description of Artificial Sequence: Synthetic oligonucleotide
guggccaaggaaggcccuc

SEQ ID NO: 2619859 - RNA, 19 nt, Artificial Sequence
  Description of Artificial Sequence: Synthetic oligonucleotide
ggugggcagcaugagagcu

SEQ ID NO: 2619860 - RNA, 19 nt, Artificial Sequence
  Description of Artificial Sequence: Synthetic oligonucleotide
gcaguguggccaacagcug

SEQ ID NO: 2619861 - RNA, 19 nt, Artificial Sequence
  Description of Artificial Sequence: Synthetic oligonucleotide
cugacacauugagucaggu

SEQ ID NO: 2619862 - RNA, 19 nt, Artificial Sequence
  Description of Artificial Sequence: Synthetic oligonucleotide
guugccugacaagucguuu

SEQ ID NO: 2619863 - RNA, 19 nt, Artificial Sequence
  Description of Artificial Sequence: Synthetic oligonucleotide
aggcgcccauagaugucag

SEQ ID NO: 2619864 - RNA, 19 nt, Artificial Sequence
  Description of Artificial Sequence: Synthetic oligonucleotide
cuguagggugccgagcagu

SEQ ID NO: 2619865 - RNA, 19 nt, Artificial Sequence
  Description of Artificial Sequence: Synthetic oligonucleotide
ccaagaagcguagguccuc

SEQ ID NO: 2619866 - RNA, 19 nt, Artificial Sequence
  Description of Artificial Sequence: Synthetic oligonucleotide
gcggagacugacacauuga

SEQ ID NO: 2619867 - RNA, 19 nt, Artificial Sequence
  Description of Artificial Sequence: Synthetic oligonucleotide
uggcugcaacagccugcaa

SEQ ID NO: 2619868 - RNA, 19 nt, Artificial Sequence
  Description of Artificial Sequence: Synthetic oligonucleotide
ccaucugggccagaaagua

SEQ ID NO: 2619869 - RNA, 19 nt, Artificial Sequence
  Description of Artificial Sequence: Synthetic oligonucleotide
gcguagguccucaggcaac

SEQ ID NO: 2619870 - RNA, 19 nt, Artificial Sequence
  Description of Artificial Sequence: Synthetic oligonucleotide
ggggcucuguagggugccg

SEQ ID NO: 2619871 - RNA, 19 nt, Artificial Sequence
  Description of Artificial Sequence: Synthetic oligonucleotide
gacagacaaagcggcccau

SEQ ID NO: 2619872 - RNA, 19 nt, Artificial Sequence
  Description of Artificial Sequence: Synthetic oligonucleotide
ggggugcaccacagugcgg

SEQ ID NO: 2619873 - RNA, 19 nt, Artificial Sequence
  Description of Artificial Sequence: Synthetic oligonucleotide
agggugccgagcaguugau

SEQ ID NO: 2619874 - RNA, 19 nt, Artificial Sequence
  Description of Artificial Sequence: Synthetic oligonucleotide
ccgaagcagcucuuuaagu

SEQ ID NO: 2619875 - RNA, 19 nt, Artificial Sequence
  Description of Artificial Sequence: Synthetic oligonucleotide
gccaaggaaggcccucaua

SEQ ID NO: 2619876 - RNA, 19 nt, Artificial Sequence
  Description of Artificial Sequence: Synthetic oligonucleotide
cccaucugggccagaaagu

SEQ ID NO: 2619877 - RNA, 19 nt, Artificial Sequence
  Description of Artificial Sequence: Synthetic oligonucleotide
ccacucaaaucuagcuucu

SEQ ID NO: 2619878 - RNA, 19 nt, Artificial Sequence
  Description of Artificial Sequence: Synthetic oligonucleotide
ggcacggccugaagcuaac

SEQ ID NO: 2619879 - RNA, 19 nt, Artificial Sequence
  Description of Artificial Sequence: Synthetic oligonucleotide
ggaaggggugcaccacagu

SEQ ID NO: 2619880 - RNA, 19 nt, Artificial Sequence
  Description of Artificial Sequence: Synthetic oligonucleotide
cagccccuggaaggguauc

SEQ ID NO: 2619881 - RNA, 19 nt, Artificial Sequence
  Description of Artificial Sequence: Synthetic oligonucleotide
gccugacaagucguuucca

SEQ ID NO: 2619882 - RNA, 19 nt, Artificial Sequence
  Description of Artificial Sequence: Synthetic oligonucleotide
gcucugagccaagaagcgu

SEQ ID NO: 2619883 - RNA, 19 nt, Artificial Sequence
  Description of Artificial Sequence: Synthetic oligonucleotide
ggaaggguaucaacugguu

SEQ ID NO: 2619884 - RNA, 19 nt, Artificial Sequence
  Description of Artificial Sequence: Synthetic oligonucleotide
gccgagcaguugauccagc

SEQ ID NO: 2619885 - RNA, 19 nt, Artificial Sequence
  Description of Artificial Sequence: Synthetic oligonucleotide
gcucaagaugcagcagugu

SEQ ID NO: 2619886 - RNA, 19 nt, Artificial Sequence
  Description of Artificial Sequence: Synthetic oligonucleotide
cguagguccucaggcaaca

SEQ ID NO: 2619887 - RNA, 19 nt, Artificial Sequence
  Description of Artificial Sequence: Synthetic oligonucleotide
gggcacggccugaagcuaa

SEQ ID NO: 2619888 - RNA, 19 nt, Artificial Sequence
  Description of Artificial Sequence: Synthetic oligonucleotide
cgaaaguuguccucaccau

SEQ ID NO: 2619889 - RNA, 19 nt, Artificial Sequence
  Description of Artificial Sequence: Synthetic oligonucleotide
gcucagccuguaccacaga

SEQ ID NO: 2619890 - RNA, 19 nt, Artificial Sequence
  Description of Artificial Sequence: Synthetic oligonucleotide
ggcccaucugggccagaaa

SEQ ID NO: 2619891 - RNA, 19 nt, Artificial Sequence
  Description of Artificial Sequence: Synthetic oligonucleotide
gggugccgagcaguugauc

SEQ ID NO: 2619892 - RNA, 19 nt, Artificial Sequence
  Description of Artificial Sequence: Synthetic oligonucleotide
ggccagcucuaggcuuucc

SEQ ID NO: 2619893 - RNA, 19 nt, Artificial Sequence
  Description of Artificial Sequence: Synthetic oligonucleotide
gccucuacccgggcaaacu

SEQ ID NO: 2619894 - RNA, 19 nt, Artificial Sequence
  Description of Artificial Sequence: Synthetic oligonucleotide
gcucccgaagacagacaaa

SEQ ID NO: 2619895 - RNA, 19 nt, Artificial Sequence
  Description of Artificial Sequence: Synthetic oligonucleotide
cgagcaguugauccagccu

SEQ ID NO: 2619896 - RNA, 19 nt, Artificial Sequence
  Description of Artificial Sequence: Synthetic oligonucleotide
cacucaaaucuagcuucuu

SEQ ID NO: 2619897 - RNA, 19 nt, Artificial Sequence
  Description of Artificial Sequence: Synthetic oligonucleotide
ggguaucaacugguugccu

SEQ ID NO: 2619898 - RNA, 19 nt, Artificial Sequence
  Description of Artificial Sequence: Synthetic oligonucleotide
caacagccccuggaagggu

SEQ ID NO: 2619899 - RNA, 19 nt, Artificial Sequence
  Description of Artificial Sequence: Synthetic oligonucleotide
gccccuggaaggguaucaa

SEQ ID NO: 2619900 - RNA, 19 nt, Artificial Sequence
  Description of Artificial Sequence: Synthetic oligonucleotide
ggccaacagcugggcauca

SEQ ID NO: 2619901 - RNA, 19 nt, Artificial Sequence
  Description of Artificial Sequence: Synthetic oligonucleotide
ggcgcccauagaugucagu

SEQ ID NO: 2619902 - RNA, 19 nt, Artificial Sequence
  Description of Artificial Sequence: Synthetic oligonucleotide
gcacggccugaagcuaaca

SEQ ID NO: 2619903 - RNA, 19 nt, Artificial Sequence
  Description of Artificial Sequence: Synthetic oligonucleotide
ggugggcaguguggccaac

SEQ ID NO: 2619904 - RNA, 19 nt, Artificial Sequence
  Description of Artificial Sequence: Synthetic oligonucleotide
gugcggagcucagccugua

SEQ ID NO: 2619905 - RNA, 19 nt, Artificial Sequence
  Description of Artificial Sequence: Synthetic oligonucleotide
gagucccgaagcagcucuu

SEQ ID NO: 2619906 - RNA, 19 nt, Artificial Sequence
  Description of Artificial Sequence: Synthetic oligonucleotide
ggccaaggaaggcccucau

SEQ ID NO: 2619907 - RNA, 19 nt, Artificial Sequence
  Description of Artificial Sequence: Synthetic oligonucleotide
ccucuacccgggcaaacuu

SEQ ID NO: 2619908 - RNA, 19 nt, Artificial Sequence
  Description of Artificial Sequence: Synthetic oligonucleotide
gcaccacagugcggagcuc

SEQ ID NO: 2619909 - RNA, 19 nt, Artificial Sequence
  Description of Artificial Sequence: Synthetic oligonucleotide
gcggcccaucugggccaga

SEQ ID NO: 2619910 - RNA, 19 nt, Artificial Sequence
  Description of Artificial Sequence: Synthetic oligonucleotide
aacagcaccaaccacaggc

SEQ ID NO: 2619911 - RNA, 19 nt, Artificial Sequence
  Description of Artificial Sequence: Synthetic oligonucleotide
aaauuugugucuugaagcc

SEQ ID NO: 2619912 - RNA, 19 nt, Artificial Sequence
  Description of Artificial Sequence: Synthetic oligonucleotide
uaaauuaaaaucccgguac

SEQ ID NO: 2619913 - RNA, 19 nt, Artificial Sequence
  Description of Artificial Sequence: Synthetic oligonucleotide
uaaauuugugucuugaagc

SEQ ID NO: 2619914 - RNA, 19 nt, Artificial Sequence
  Description of Artificial Sequence: Synthetic oligonucleotide
aagaaacucucaaagagcc

SEQ ID NO: 2619915 - RNA, 19 nt, Artificial Sequence
  Description of Artificial Sequence: Synthetic oligonucleotide
aagacaaguacgcaaggac

SEQ ID NO: 2619916 - RNA, 19 nt, Artificial Sequence
  Description of Artificial Sequence: Synthetic oligonucleotide
aaccccgucucauaaaccc

SEQ ID NO: 2619917 - RNA, 19 nt, Artificial Sequence
  Description of Artificial Sequence: Synthetic oligonucleotide
auuagugcccacgagaugc

SEQ ID NO: 2619918 - RNA, 19 nt, Artificial Sequence
  Description of Artificial Sequence: Synthetic oligonucleotide
aacggcaaagauucggggc

SEQ ID NO: 2619919 - RNA, 19 nt, Artificial Sequence
  Description of Artificial Sequence: Synthetic oligonucleotide
uuaaaaucccgguacagcc

SEQ ID NO: 2619920 - RNA, 19 nt, Artificial Sequence
  Description of Artificial Sequence: Synthetic oligonucleotide
auaaauuugugucuugaag

SEQ ID NO: 2619921 - RNA, 19 nt, Artificial Sequence
  Description of Artificial Sequence: Synthetic oligonucleotide
uuaaauucaaggcuagcca

SEQ ID NO: 2619922 - RNA, 19 nt, Artificial Sequence
  Description of Artificial Sequence: Synthetic oligonucleotide
uuuggcauaaauuuguguc

SEQ ID NO: 2619923 - RNA, 19 nt, Artificial Sequence
  Description of Artificial Sequence: Synthetic oligonucleotide
gaucucuuaaauucaaggc

SEQ ID NO: 2619924 - RNA, 19 nt, Artificial Sequence
  Description of Artificial Sequence: Synthetic oligonucleotide
caaaaugauagccagcacc

SEQ ID NO: 2619925 - RNA, 19 nt, Artificial Sequence
  Description of Artificial Sequence: Synthetic oligonucleotide
aaaaucccgguacagccac

SEQ ID NO: 2619926 - RNA, 19 nt, Artificial Sequence
  Description of Artificial Sequence: Synthetic oligonucleotide
ucugcaaaaugauagccag

SEQ ID NO: 2619927 - RNA, 19 nt, Artificial Sequence
  Description of Artificial Sequence: Synthetic oligonucleotide
uacagggaagacaaguacg

SEQ ID NO: 2619928 - RNA, 19 nt, Artificial Sequence
  Description of Artificial Sequence: Synthetic oligonucleotide
ugaagccagacccagaaca

SEQ ID NO: 2619929 - RNA, 19 nt, Artificial Sequence
  Description of Artificial Sequence: Synthetic oligonucleotide
ucucauaaacccaauaaau

SEQ ID NO: 2619930 - RNA, 19 nt, Artificial Sequence
  Description of Artificial Sequence: Synthetic oligonucleotide
aggaaggaugugcugaugc

SEQ ID NO: 2619931 - RNA, 19 nt, Artificial Sequence
  Description of Artificial Sequence: Synthetic oligonucleotide
gaugccaaaccacugguag

SEQ ID NO: 2619932 - RNA, 19 nt, Artificial Sequence
  Description of Artificial Sequence: Synthetic oligonucleotide
aagucugcagagcaaguuc

SEQ ID NO: 2619933 - RNA, 19 nt, Artificial Sequence
  Description of Artificial Sequence: Synthetic oligonucleotide
aucucuuaaauucaaggcu

SEQ ID NO: 2619934 - RNA, 19 nt, Artificial Sequence
  Description of Artificial Sequence: Synthetic oligonucleotide
cuuaaauucaaggcuagcc

SEQ ID NO: 2619935 - RNA, 19 nt, Artificial Sequence
  Description of Artificial Sequence: Synthetic oligonucleotide
gugucuugaagccagaccc

SEQ ID NO: 2619936 - RNA, 19 nt, Artificial Sequence
  Description of Artificial Sequence: Synthetic oligonucleotide
caugcugauauccagggag

SEQ ID NO: 2619937 - RNA, 19 nt, Artificial Sequence
  Description of Artificial Sequence: Synthetic oligonucleotide
acggcaaagauucggggcc

SEQ ID NO: 2619938 - RNA, 19 nt, Artificial Sequence
  Description of Artificial Sequence: Synthetic oligonucleotide
aaaaugauagccagcacca

SEQ ID NO: 2619939 - RNA, 19 nt, Artificial Sequence
  Description of Artificial Sequence: Synthetic oligonucleotide
aaagauucggggccacaac

SEQ ID NO: 2619940 - RNA, 19 nt, Artificial Sequence
  Description of Artificial Sequence: Synthetic oligonucleotide
aaugauagccagcaccagu

SEQ ID NO: 2619941 - RNA, 19 nt, Artificial Sequence
  Description of Artificial Sequence: Synthetic oligonucleotide
caagaaacucucaaagagc

SEQ ID NO: 2619942 - RNA, 19 nt, Artificial Sequence
  Description of Artificial Sequence: Synthetic oligonucleotide
ugcaaaaugauagccagca

SEQ ID NO: 2619943 - RNA, 19 nt, Artificial Sequence
  Description of Artificial Sequence: Synthetic oligonucleotide
aauuaaaaucccgguacag

SEQ ID NO: 2619944 - RNA, 19 nt, Artificial Sequence
  Description of Artificial Sequence: Synthetic oligonucleotide
aagagagccgagaacaggg

SEQ ID NO: 2619945 - RNA, 19 nt, Artificial Sequence
  Description of Artificial Sequence: Synthetic oligonucleotide
agaauugccacucugcaaa

SEQ ID NO: 2619946 - RNA, 19 nt, Artificial Sequence
  Description of Artificial Sequence: Synthetic oligonucleotide
uggacagcccugcugaacg

SEQ ID NO: 2619947 - RNA, 19 nt, Artificial Sequence
  Description of Artificial Sequence: Synthetic oligonucleotide
gaaaugcagggcuauguag

SEQ ID NO: 2619948 - RNA, 19 nt, Artificial Sequence
  Description of Artificial Sequence: Synthetic oligonucleotide
uucagaauugccacucugc

SEQ ID NO: 2619949 - RNA, 19 nt, Artificial Sequence
  Description of Artificial Sequence: Synthetic oligonucleotide
ggaucucuuaaauucaagg

SEQ ID NO: 2619950 - RNA, 19 nt, Artificial Sequence
  Description of Artificial Sequence: Synthetic oligonucleotide
aauuggcagcuccugccgc

SEQ ID NO: 2619951 - RNA, 19 nt, Artificial Sequence
  Description of Artificial Sequence: Synthetic oligonucleotide
acagcaacagguuccacag

SEQ ID NO: 2619952 - RNA, 19 nt, Artificial Sequence
  Description of Artificial Sequence: Synthetic oligonucleotide
gacaaguacgcaaggaccg

SEQ ID NO: 2619953 - RNA, 19 nt, Artificial Sequence
  Description of Artificial Sequence: Synthetic oligonucleotide
uaguauucagaauugccac

SEQ ID NO: 2619954 - RNA, 19 nt, Artificial Sequence
  Description of Artificial Sequence: Synthetic oligonucleotide
uccauuagugcccacgaga

SEQ ID NO: 2619955 - RNA, 19 nt, Artificial Sequence
  Description of Artificial Sequence: Synthetic oligonucleotide
agacaaguacgcaaggacc

SEQ ID NO: 2619956 - RNA, 19 nt, Artificial Sequence
  Description of Artificial Sequence: Synthetic oligonucleotide
auaaauuaaaaucccggua

SEQ ID NO: 2619957 - RNA, 19 nt, Artificial Sequence
  Description of Artificial Sequence: Synthetic oligonucleotide
guacaaauagccgagcugc

SEQ ID NO: 2619958 - RNA, 19 nt, Artificial Sequence
  Description of Artificial Sequence: Synthetic oligonucleotide
acucucaauuggcagcucc

SEQ ID NO: 2619959 - RNA, 19 nt, Artificial Sequence
  Description of Artificial Sequence: Synthetic oligonucleotide
cuccaagaaacucucaaag

SEQ ID NO: 2619960 - RNA, 19 nt, Artificial Sequence
  Description of Artificial Sequence: Synthetic oligonucleotide
aagauucggggccacaaca

SEQ ID NO: 2619961 - RNA, 19 nt, Artificial Sequence
  Description of Artificial Sequence: Synthetic oligonucleotide
ucagaauugccacucugca

SEQ ID NO: 2619962 - RNA, 19 nt, Artificial Sequence
  Description of Artificial Sequence: Synthetic oligonucleotide
uuacagggaagacaaguac

SEQ ID NO: 2619963 - RNA, 19 nt, Artificial Sequence
  Description of Artificial Sequence: Synthetic oligonucleotide
uguggugucgccuccaaga

SEQ ID NO: 2619964 - RNA, 19 nt, Artificial Sequence
  Description of Artificial Sequence: Synthetic oligonucleotide
agcaugcugauauccaggg

SEQ ID NO: 2619965 - RNA, 19 nt, Artificial Sequence
  Description of Artificial Sequence: Synthetic oligonucleotide
uguaguaggggaagagagc

SEQ ID NO: 2619966 - RNA, 19 nt, Artificial Sequence
  Description of Artificial Sequence: Synthetic oligonucleotide
aaauagccgagcugcagca

SEQ ID NO: 2619967 - RNA, 19 nt, Artificial Sequence
  Description of Artificial Sequence: Synthetic oligonucleotide
ucaguaguggaguuuggca

SEQ ID NO: 2619968 - RNA, 19 nt, Artificial Sequence
  Description of Artificial Sequence: Synthetic oligonucleotide
ugugcugaugccaaaccac

SEQ ID NO: 2619969 - RNA, 19 nt, Artificial Sequence
  Description of Artificial Sequence: Synthetic oligonucleotide
uuggcauaaauuugugucu

SEQ ID NO: 2619970 - RNA, 19 nt, Artificial Sequence
  Description of Artificial Sequence: Synthetic oligonucleotide
gugguaguccauuagugcc

SEQ ID NO: 2619971 - RNA, 19 nt, Artificial Sequence
  Description of Artificial Sequence: Synthetic oligonucleotide
gaaccuguacaaauagccg

SEQ ID NO: 2619972 - RNA, 19 nt, Artificial Sequence
  Description of Artificial Sequence: Synthetic oligonucleotide
cacgagaugcccaggaagg

SEQ ID NO: 2619973 - RNA, 19 nt, Artificial Sequence
  Description of Artificial Sequence: Synthetic oligonucleotide
auugccacucugcaaaaug

SEQ ID NO: 2619974 - RNA, 19 nt, Artificial Sequence
  Description of Artificial Sequence: Synthetic oligonucleotide
aacauggacagcccugcug

SEQ ID NO: 2619975 - RNA, 19 nt, Artificial Sequence
  Description of Artificial Sequence: Synthetic oligonucleotide
agggcuauguaguagggga

SEQ ID NO: 2619976 - RNA, 19 nt, Artificial Sequence
  Description of Artificial Sequence: Synthetic oligonucleotide
guaguaggggaagagagcc

SEQ ID NO: 2619977 - RNA, 19 nt, Artificial Sequence
  Description of Artificial Sequence: Synthetic oligonucleotide
agcaacagguuccacagga

SEQ ID NO: 2619978 - RNA, 19 nt, Artificial Sequence
  Description of Artificial Sequence: Synthetic oligonucleotide
gaaaccccgucucauaaac

SEQ ID NO: 2619979 - RNA, 19 nt, Artificial Sequence
  Description of Artificial Sequence: Synthetic oligonucleotide
aaauucaaggcuagccaag

SEQ ID NO: 2619980 - RNA, 19 nt, Artificial Sequence
  Description of Artificial Sequence: Synthetic oligonucleotide
ccaagaaacucucaaagag

SEQ ID NO: 2619981 - RNA, 19 nt, Artificial Sequence
  Description of Artificial Sequence: Synthetic oligonucleotide
uaaaaucccgguacagcca

SEQ ID NO: 2619982 - RNA, 19 nt, Artificial Sequence
  Description of Artificial Sequence: Synthetic oligonucleotide
acucucaaagagccgcagc

SEQ ID NO: 2619983 - RNA, 19 nt, Artificial Sequence
  Description of Artificial Sequence: Synthetic oligonucleotide
caggcugaggaaaugcagg

SEQ ID NO: 2619984 - RNA, 19 nt, Artificial Sequence
  Description of Artificial Sequence: Synthetic oligonucleotide
gaugugcugaugccaaacc

SEQ ID NO: 2619985 - RNA, 19 nt, Artificial Sequence
  Description of Artificial Sequence: Synthetic oligonucleotide
uccagggagaggaagucug

SEQ ID NO: 2619986 - RNA, 19 nt, Artificial Sequence
  Description of Artificial Sequence: Synthetic oligonucleotide
guaguauucagaauugcca

SEQ ID NO: 2619987 - RNA, 19 nt, Artificial Sequence
  Description of Artificial Sequence: Synthetic oligonucleotide
ggaaccuguacaaauagcc

SEQ ID NO: 2619988 - RNA, 19 nt, Artificial Sequence
  Description of Artificial Sequence: Synthetic oligonucleotide
cuaggucacucucaauugg

SEQ ID NO: 2619989 - RNA, 19 nt, Artificial Sequence
  Description of Artificial Sequence: Synthetic oligonucleotide
uaggucacucucaauuggc

SEQ ID NO: 2619990 - RNA, 19 nt, Artificial Sequence
  Description of Artificial Sequence: Synthetic oligonucleotide
auguaguaggggaagagag

SEQ ID NO: 2619991 - RNA, 19 nt, Artificial Sequence
  Description of Artificial Sequence: Synthetic oligonucleotide
caaaccacugguaguauuc

SEQ ID NO: 2619992 - RNA, 19 nt, Artificial Sequence
  Description of Artificial Sequence: Synthetic oligonucleotide
uggaucucuuaaauucaag

SEQ ID NO: 2619993 - RNA, 19 nt, Artificial Sequence
  Description of Artificial Sequence: Synthetic oligonucleotide
gauauccagggagaggaag

SEQ ID NO: 2619994 - RNA, 19 nt, Artificial Sequence
  Description of Artificial Sequence: Synthetic oligonucleotide
uugccacucugcaaaauga

SEQ ID NO: 2619995 - RNA, 19 nt, Artificial Sequence
  Description of Artificial Sequence: Synthetic oligonucleotide
uagccaagucugcagagca

SEQ ID NO: 2619996 - RNA, 19 nt, Artificial Sequence
  Description of Artificial Sequence: Synthetic oligonucleotide
uauguaguaggggaagaga

SEQ ID NO: 2619997 - RNA, 19 nt, Artificial Sequence
  Description of Artificial Sequence: Synthetic oligonucleotide
aauucaaggcuagccaagu

SEQ ID NO: 2619998 - RNA, 19 nt, Artificial Sequence
  Description of Artificial Sequence: Synthetic oligonucleotide
aguacgcaaggaccggugg

SEQ ID NO: 2619999 - RNA, 19 nt, Artificial Sequence
  Description of Artificial Sequence: Synthetic oligonucleotide
aaccacugguaguauucag

SEQ ID NO: 2620000 - RNA, 19 nt, Artificial Sequence
  Description of Artificial Sequence: Synthetic oligonucleotide
auggcagaggagcuccagc

SEQ ID NO: 2620001 - RNA, 19 nt, Artificial Sequence
  Description of Artificial Sequence: Synthetic oligonucleotide
cucuuaaauucaaggcuag

SEQ ID NO: 2620002 - RNA, 19 nt, Artificial Sequence
  Description of Artificial Sequence: Synthetic oligonucleotide
auucagaauugccacucug

SEQ ID NO: 2620003 - RNA, 19 nt, Artificial Sequence
  Description of Artificial Sequence: Synthetic oligonucleotide
aauuugugucuugaagcca

SEQ ID NO: 2620004 - RNA, 19 nt, Artificial Sequence
  Description of Artificial Sequence: Synthetic oligonucleotide
aaaccccgucucauaaacc

SEQ ID NO: 2620005 - RNA, 19 nt, Artificial Sequence
  Description of Artificial Sequence: Synthetic oligonucleotide
uaguccauuagugcccacg

SEQ ID NO: 2620006 - RNA, 19 nt, Artificial Sequence
  Description of Artificial Sequence: Synthetic oligonucleotide
ccacucugcaaaaugauag

SEQ ID NO: 2620007 - RNA, 19 nt, Artificial Sequence
  Description of Artificial Sequence: Synthetic oligonucleotide
aacagguuccacaggaagu

SEQ ID NO: 2620008 - RNA, 19 nt, Artificial Sequence
  Description of Artificial Sequence: Synthetic oligonucleotide
caacagguuccacaggaag

SEQ ID NO: 2620009 - RNA, 19 nt, Artificial Sequence
  Description of Artificial Sequence: Synthetic oligonucleotide
aaucccgguacagccacuc

SEQ ID NO: 2620010 - RNA, 19 nt, Artificial Sequence
  Description of Artificial Sequence: Synthetic oligonucleotide
cugcugaacgcccugcagg

SEQ ID NO: 2620011 - RNA, 19 nt, Artificial Sequence
  Description of Artificial Sequence: Synthetic oligonucleotide
uaguaggggaagagagccg

SEQ ID NO: 2620012 - RNA, 19 nt, Artificial Sequence
  Description of Artificial Sequence: Synthetic oligonucleotide
ugaacgcccugcaggaacc

SEQ ID NO: 2620013 - RNA, 19 nt, Artificial Sequence
  Description of Artificial Sequence: Synthetic oligonucleotide
cugauauccagggagagga

SEQ ID NO: 2620014 - RNA, 19 nt, Artificial Sequence
  Description of Artificial Sequence: Synthetic oligonucleotide
agggaagacaaguacgcaa

SEQ ID NO: 2620015 - RNA, 19 nt, Artificial Sequence
  Description of Artificial Sequence: Synthetic oligonucleotide
gucucauaaacccaauaaa

SEQ ID NO: 2620016 - RNA, 19 nt, Artificial Sequence
  Description of Artificial Sequence: Synthetic oligonucleotide
uaauuccaacacuugggaa

SEQ ID NO: 2620017 - RNA, 19 nt, Artificial Sequence
  Description of Artificial Sequence: Synthetic oligonucleotide
aggaagucugcauaggcua

SEQ ID NO: 2620018 - RNA, 19 nt, Artificial Sequence
  Description of Artificial Sequence: Synthetic oligonucleotide
uagauggcagaggagcucc

SEQ ID NO: 2620019 - RNA, 19 nt, Artificial Sequence
  Description of Artificial Sequence: Synthetic oligonucleotide
aagccagacccagaacaac

SEQ ID NO: 2620020 - RNA, 19 nt, Artificial Sequence
  Description of Artificial Sequence: Synthetic oligonucleotide
augauagccagcaccagug

SEQ ID NO: 2620021 - RNA, 19 nt, Artificial Sequence
  Description of Artificial Sequence: Synthetic oligonucleotide
gauucggggccacaacagc

SEQ ID NO: 2620022 - RNA, 19 nt, Artificial Sequence
  Description of Artificial Sequence: Synthetic oligonucleotide
caauuggcagcuccugccg

SEQ ID NO: 2620023 - RNA, 19 nt, Artificial Sequence
  Description of Artificial Sequence: Synthetic oligonucleotide
gguaguauucagaauugcc

SEQ ID NO: 2620024 - RNA, 19 nt, Artificial Sequence
  Description of Artificial Sequence: Synthetic oligonucleotide
ucuuaaauucaaggcuagc

SEQ ID NO: 2620025 - RNA, 19 nt, Artificial Sequence
  Description of Artificial Sequence: Synthetic oligonucleotide
uauucagaauugccacucu

SEQ ID NO: 2620026 - RNA, 19 nt, Artificial Sequence
  Description of Artificial Sequence: Synthetic oligonucleotide
ggugguaguccauuagugc

SEQ ID NO: 2620027 - RNA, 19 nt, Artificial Sequence
  Description of Artificial Sequence: Synthetic oligonucleotide
aguccauuagugcccacga

SEQ ID NO: 2620028 - RNA, 19 nt, Artificial Sequence
  Description of Artificial Sequence: Synthetic oligonucleotide
cucaauuggcagcuccugc

SEQ ID NO: 2620029 - RNA, 19 nt, Artificial Sequence
  Description of Artificial Sequence: Synthetic oligonucleotide
caacggcaaagauucgggg

SEQ ID NO: 2620030 - RNA, 19 nt, Artificial Sequence
  Description of Artificial Sequence: Synthetic oligonucleotide
gaagucugcauaggcuagg

SEQ ID NO: 2620031 - RNA, 19 nt, Artificial Sequence
  Description of Artificial Sequence: Synthetic oligonucleotide
ggagaggaagucugcauag

SEQ ID NO: 2620032 - RNA, 19 nt, Artificial Sequence
  Description of Artificial Sequence: Synthetic oligonucleotide
augugcugaugccaaacca

SEQ ID NO: 2620033 - RNA, 19 nt, Artificial Sequence
  Description of Artificial Sequence: Synthetic oligonucleotide
uacaaauagccgagcugca

SEQ ID NO: 2620034 - RNA, 19 nt, Artificial Sequence
  Description of Artificial Sequence: Synthetic oligonucleotide
ugcugaacgcccugcagga

SEQ ID NO: 2620035 - RNA, 19 nt, Artificial Sequence
  Description of Artificial Sequence: Synthetic oligonucleotide
ugcugaugccaaaccacug

SEQ ID NO: 2620036 - RNA, 19 nt, Artificial Sequence
  Description of Artificial Sequence: Synthetic oligonucleotide
ccaggcgaggcuuacaggg

SEQ ID NO: 2620037 - RNA, 19 nt, Artificial Sequence
  Description of Artificial Sequence: Synthetic oligonucleotide
aaaccacugguaguauuca

SEQ ID NO: 2620038 - RNA, 19 nt, Artificial Sequence
  Description of Artificial Sequence: Synthetic oligonucleotide
cuauguaguaggggaagag

SEQ ID NO: 2620039 - RNA, 19 nt, Artificial Sequence
  Description of Artificial Sequence: Synthetic oligonucleotide
uccugccgcaacauggaca

SEQ ID NO: 2620040 - RNA, 19 nt, Artificial Sequence
  Description of Artificial Sequence: Synthetic oligonucleotide
agccgcagcaugcugauau

SEQ ID NO: 2620041 - RNA, 19 nt, Artificial Sequence
  Description of Artificial Sequence: Synthetic oligonucleotide
uaggcuaggucacucucaa

SEQ ID NO: 2620042 - RNA, 19 nt, Artificial Sequence
  Description of Artificial Sequence: Synthetic oligonucleotide
agacccagaacaacagcac

SEQ ID NO: 2620043 - RNA, 19 nt, Artificial Sequence
  Description of Artificial Sequence: Synthetic oligonucleotide
cucugcaaaaugauagcca

SEQ ID NO: 2620044 - RNA, 19 nt, Artificial Sequence
  Description of Artificial Sequence: Synthetic oligonucleotide
ugguaguauucagaauugc

SEQ ID NO: 2620045 - RNA, 19 nt, Artificial Sequence
  Description of Artificial Sequence: Synthetic oligonucleotide
aacagggcaacggcaaaga

SEQ ID NO: 2620046 - RNA, 19 nt, Artificial Sequence
  Description of Artificial Sequence: Synthetic oligonucleotide
aacucucaaagagccgcag

SEQ ID NO: 2620047 - RNA, 19 nt, Artificial Sequence
  Description of Artificial Sequence: Synthetic oligonucleotide
acaaauagccgagcugcag

SEQ ID NO: 2620048 - RNA, 19 nt, Artificial Sequence
  Description of Artificial Sequence: Synthetic oligonucleotide
gaacagggcaacggcaaag

SEQ ID NO: 2620049 - RNA, 19 nt, Artificial Sequence
  Description of Artificial Sequence: Synthetic oligonucleotide
aaggcuagccaagucugca

SEQ ID NO: 2620050 - RNA, 19 nt, Artificial Sequence
  Description of Artificial Sequence: Synthetic oligonucleotide
aguaggggaagagagccga

SEQ ID NO: 2620051 - RNA, 19 nt, Artificial Sequence
  Description of Artificial Sequence: Synthetic oligonucleotide
gaggcuuacagggaagaca

SEQ ID NO: 2620052 - RNA, 19 nt, Artificial Sequence
  Description of Artificial Sequence: Synthetic oligonucleotide
agcagcgccaggaacgacg

SEQ ID NO: 2620053 - RNA, 19 nt, Artificial Sequence
  Description of Artificial Sequence: Synthetic oligonucleotide
cuugaagccagacccagaa

SEQ ID NO: 2620054 - RNA, 19 nt, Artificial Sequence
  Description of Artificial Sequence: Synthetic oligonucleotide
aguaguggaguuuggcaua

SEQ ID NO: 2620055 - RNA, 19 nt, Artificial Sequence
  Description of Artificial Sequence: Synthetic oligonucleotide
ggaagacaaguacgcaagg

SEQ ID NO: 2620056 - RNA, 19 nt, Artificial Sequence
  Description of Artificial Sequence: Synthetic oligonucleotide
cagcuaggacuacacagag

SEQ ID NO: 2620057 - RNA, 19 nt, Artificial Sequence
  Description of Artificial Sequence: Synthetic oligonucleotide
cacucaguaguggaguuug

SEQ ID NO: 2620058 - RNA, 19 nt, Artificial Sequence
  Description of Artificial Sequence: Synthetic oligonucleotide
cucaguaguggaguuuggc

SEQ ID NO: 2620059 - RNA, 19 nt, Artificial Sequence
  Description of Artificial Sequence: Synthetic oligonucleotide
accuguacaaauagccgag

SEQ ID NO: 2620060 - RNA, 19 nt, Artificial Sequence
  Description of Artificial Sequence: Synthetic oligonucleotide
cauaaauuugugucuugaa

SEQ ID NO: 2620061 - RNA, 19 nt, Artificial Sequence
  Description of Artificial Sequence: Synthetic oligonucleotide
ugcugauauccagggagag

SEQ ID NO: 2620062 - RNA, 19 nt, Artificial Sequence
  Description of Artificial Sequence: Synthetic oligonucleotide
cuuacagggaagacaagua

SEQ ID NO: 2620063 - RNA, 19 nt, Artificial Sequence
  Description of Artificial Sequence: Synthetic oligonucleotide
ucuugaagccagacccaga

SEQ ID NO: 2620064 - RNA, 19 nt, Artificial Sequence
  Description of Artificial Sequence: Synthetic oligonucleotide
agucugcauaggcuagguc

SEQ ID NO: 2620065 - RNA, 19 nt, Artificial Sequence
  Description of Artificial Sequence: Synthetic oligonucleotide
aauagccgagcugcagcag

SEQ ID NO: 2620066 - RNA, 19 nt, Artificial Sequence
  Description of Artificial Sequence: Synthetic oligonucleotide
cugaacgcccugcaggaac

SEQ ID NO: 2620067 - RNA, 19 nt, Artificial Sequence
  Description of Artificial Sequence: Synthetic oligonucleotide
uuugugucuugaagccaga

SEQ ID NO: 2620068 - RNA, 19 nt, Artificial Sequence
  Description of Artificial Sequence: Synthetic oligonucleotide
acaaguacgcaaggaccgg

SEQ ID NO: 2620069 - RNA, 19 nt, Artificial Sequence
  Description of Artificial Sequence: Synthetic oligonucleotide
auagccagcaccaguguga

SEQ ID NO: 2620070 - RNA, 19 nt, Artificial Sequence
  Description of Artificial Sequence: Synthetic oligonucleotide
cauaggcuaggucacucuc

SEQ ID NO: 2620071 - RNA, 19 nt, Artificial Sequence
  Description of Artificial Sequence: Synthetic oligonucleotide
ugauagccagcaccagugu

SEQ ID NO: 2620072 - RNA, 19 nt, Artificial Sequence
  Description of Artificial Sequence: Synthetic oligonucleotide
agagagccgagaacagggc

SEQ ID NO: 2620073 - RNA, 19 nt, Artificial Sequence
  Description of Artificial Sequence: Synthetic oligonucleotide
ggugucgccuccaagaaac

SEQ ID NO: 2620074 - RNA, 19 nt, Artificial Sequence
  Description of Artificial Sequence: Synthetic oligonucleotide
aagagccgcagcaugcuga

SEQ ID NO: 2620075 - RNA, 19 nt, Artificial Sequence
  Description of Artificial Sequence: Synthetic oligonucleotide
aaggaugugcugaugccaa

SEQ ID NO: 2620076 - RNA, 19 nt, Artificial Sequence
  Description of Artificial Sequence: Synthetic oligonucleotide
ugccaaaccacugguagua

SEQ ID NO: 2620077 - RNA, 19 nt, Artificial Sequence
  Description of Artificial Sequence: Synthetic oligonucleotide
gaguuuggcauaaauuugu

SEQ ID NO: 2620078 - RNA, 19 nt, Artificial Sequence
  Description of Artificial Sequence: Synthetic oligonucleotide
aggcuuacagggaagacaa

SEQ ID NO: 2620079 - RNA, 19 nt, Artificial Sequence
  Description of Artificial Sequence: Synthetic oligonucleotide
ugccacucugcaaaaugau

SEQ ID NO: 2620080 - RNA, 19 nt, Artificial Sequence
  Description of Artificial Sequence: Synthetic oligonucleotide
gcuaggucacucucaauug

SEQ ID NO: 2620081 - RNA, 19 nt, Artificial Sequence
  Description of Artificial Sequence: Synthetic oligonucleotide
accggugguaguccauuag

SEQ ID NO: 2620082 - RNA, 19 nt, Artificial Sequence
  Description of Artificial Sequence: Synthetic oligonucleotide
aaggaccggugguagucca

SEQ ID NO: 2620083 - RNA, 19 nt, Artificial Sequence
  Description of Artificial Sequence: Synthetic oligonucleotide
aggcuagccaagucugcag

SEQ ID NO: 2620084 - RNA, 19 nt, Artificial Sequence
  Description of Artificial Sequence: Synthetic oligonucleotide
ccugccgcaacauggacag

SEQ ID NO: 2620085 - RNA, 19 nt, Artificial Sequence
  Description of Artificial Sequence: Synthetic oligonucleotide
cuagccaagucugcagagc

SEQ ID NO: 2620086 - RNA, 19 nt, Artificial Sequence
  Description of Artificial Sequence: Synthetic oligonucleotide
agauucggggccacaacag

SEQ ID NO: 2620087 - RNA, 19 nt, Artificial Sequence
  Description of Artificial Sequence: Synthetic oligonucleotide
uucggggccacaacagcaa

SEQ ID NO: 2620088 - RNA, 19 nt, Artificial Sequence
  Description of Artificial Sequence: Synthetic oligonucleotide
augccaaaccacugguagu

SEQ ID NO: 2620089 - RNA, 19 nt, Artificial Sequence
  Description of Artificial Sequence: Synthetic oligonucleotide
ggaaggaugugcugaugcc

SEQ ID NO: 2620090 - RNA, 19 nt, Artificial Sequence
  Description of Artificial Sequence: Synthetic oligonucleotide
ggcaacggcaaagauucgg

SEQ ID NO: 2620091 - RNA, 19 nt, Artificial Sequence
  Description of Artificial Sequence: Synthetic oligonucleotide
gagagccgagaacagggca

SEQ ID NO: 2620092 - RNA, 19 nt, Artificial Sequence
  Description of Artificial Sequence: Synthetic oligonucleotide
aaguacgcaaggaccggug

SEQ ID NO: 2620093 - RNA, 19 nt, Artificial Sequence
  Description of Artificial Sequence: Synthetic oligonucleotide
aaacucucaaagagccgca

SEQ ID NO: 2620094 - RNA, 19 nt, Artificial Sequence
  Description of Artificial Sequence: Synthetic oligonucleotide
aggaacgacgcgaggcagc

SEQ ID NO: 2620095 - RNA, 19 nt, Artificial Sequence
  Description of Artificial Sequence: Synthetic oligonucleotide
ugaugccaaaccacuggua

SEQ ID NO: 2620096 - RNA, 19 nt, Artificial Sequence
  Description of Artificial Sequence: Synthetic oligonucleotide
gucuugaagccagacccag

SEQ ID NO: 2620097 - RNA, 19 nt, Artificial Sequence
  Description of Artificial Sequence: Synthetic oligonucleotide
ugaggaaaugcagggcuau

SEQ ID NO: 2620098 - RNA, 19 nt, Artificial Sequence
  Description of Artificial Sequence: Synthetic oligonucleotide
gcaacggcaaagauucggg

SEQ ID NO: 2620099 - RNA, 19 nt, Artificial Sequence
  Description of Artificial Sequence: Synthetic oligonucleotide
acagcccugcugaacgccc

SEQ ID NO: 2620100 - RNA, 19 nt, Artificial Sequence
  Description of Artificial Sequence: Synthetic oligonucleotide
ucgccuccaagaaacucuc

SEQ ID NO: 2620101 - RNA, 19 nt, Artificial Sequence
  Description of Artificial Sequence: Synthetic oligonucleotide
auggacagcccugcugaac

SEQ ID NO: 2620102 - RNA, 19 nt, Artificial Sequence
  Description of Artificial Sequence: Synthetic oligonucleotide
acagguuccacaggaagua

SEQ ID NO: 2620103 - RNA, 19 nt, Artificial Sequence
  Description of Artificial Sequence: Synthetic oligonucleotide
aauugccacucugcaaaau

SEQ ID NO: 2620104 - RNA, 19 nt, Artificial Sequence
  Description of Artificial Sequence: Synthetic oligonucleotide
agcgccaggaacgacgcga

SEQ ID NO: 2620105 - RNA, 19 nt, Artificial Sequence
  Description of Artificial Sequence: Synthetic oligonucleotide
gauggcagaggagcuccag

SEQ ID NO: 2620106 - RNA, 19 nt, Artificial Sequence
  Description of Artificial Sequence: Synthetic oligonucleotide
agagaaaccccgucucaua

SEQ ID NO: 2620107 - RNA, 19 nt, Artificial Sequence
  Description of Artificial Sequence: Synthetic oligonucleotide
gagaacagggcaacggcaa

SEQ ID NO: 2620108 - RNA, 19 nt, Artificial Sequence
  Description of Artificial Sequence: Synthetic oligonucleotide
guuuggcauaaauuugugu

SEQ ID NO: 2620109 - RNA, 19 nt, Artificial Sequence
  Description of Artificial Sequence: Synthetic oligonucleotide
agaaaccccgucucauaaa

SEQ ID NO: 2620110 - RNA, 19 nt, Artificial Sequence
  Description of Artificial Sequence: Synthetic oligonucleotide
ugcauaggcuaggucacuc

SEQ ID NO: 2620111 - RNA, 19 nt, Artificial Sequence
  Description of Artificial Sequence: Synthetic oligonucleotide
auucggggccacaacagca

SEQ ID NO: 2620112 - RNA, 19 nt, Artificial Sequence
  Description of Artificial Sequence: Synthetic oligonucleotide
cauuagugcccacgagaug

SEQ ID NO: 2620113 - RNA, 19 nt, Artificial Sequence
  Description of Artificial Sequence: Synthetic oligonucleotide
cagggcuauguaguagggg

SEQ ID NO: 2620114 - RNA, 19 nt, Artificial Sequence
  Description of Artificial Sequence: Synthetic oligonucleotide
ucucaaagagccgcagcau

SEQ ID NO: 2620115 - RNA, 19 nt, Artificial Sequence
  Description of Artificial Sequence: Synthetic oligonucleotide
uugugucuugaagccagac

SEQ ID NO: 2620116 - RNA, 19 nt, Artificial Sequence
  Description of Artificial Sequence: Synthetic oligonucleotide
auaggcuaggucacucuca

SEQ ID NO: 2620117 - RNA, 19 nt, Artificial Sequence
  Description of Artificial Sequence: Synthetic oligonucleotide
ggaacgacgcgaggcagcg

SEQ ID NO: 2620118 - RNA, 19 nt, Artificial Sequence
  Description of Artificial Sequence: Synthetic oligonucleotide
gugcccacgagaugcccag

SEQ ID NO: 2620119 - RNA, 19 nt, Artificial Sequence
  Description of Artificial Sequence: Synthetic oligonucleotide
gaagccagacccagaacaa

SEQ ID NO: 2620120 - RNA, 19 nt, Artificial Sequence
  Description of Artificial Sequence: Synthetic oligonucleotide
cacaggcugaggaaaugca

SEQ ID NO: 2620121 - RNA, 19 nt, Artificial Sequence
  Description of Artificial Sequence: Synthetic oligonucleotide
gaauugccacucugcaaaa

SEQ ID NO: 2620122 - RNA, 19 nt, Artificial Sequence
  Description of Artificial Sequence: Synthetic oligonucleotide
ggcuauguaguaggggaag

SEQ ID NO: 2620123 - RNA, 19 nt, Artificial Sequence
  Description of Artificial Sequence: Synthetic oligonucleotide
ugugagcuguggugucgcc

SEQ ID NO: 2620124 - RNA, 19 nt, Artificial Sequence
  Description of Artificial Sequence: Synthetic oligonucleotide
uggugucgccuccaagaaa

SEQ ID NO: 2620125 - RNA, 19 nt, Artificial Sequence
  Description of Artificial Sequence: Synthetic oligonucleotide
gcugauauccagggagagg

SEQ ID NO: 2620126 - RNA, 19 nt, Artificial Sequence
  Description of Artificial Sequence: Synthetic oligonucleotide
uacgcaaggaccgguggua

SEQ ID NO: 2620127 - RNA, 19 nt, Artificial Sequence
  Description of Artificial Sequence: Synthetic oligonucleotide
ugucgccuccaagaaacuc

SEQ ID NO: 2620128 - RNA, 19 nt, Artificial Sequence
  Description of Artificial Sequence: Synthetic oligonucleotide
gccaagucugcagagcaag

SEQ ID NO: 2620129 - RNA, 19 nt, Artificial Sequence
  Description of Artificial Sequence: Synthetic oligonucleotide
gcauaaauuugugucuuga

SEQ ID NO: 2620130 - RNA, 19 nt, Artificial Sequence
  Description of Artificial Sequence: Synthetic oligonucleotide
gaggaagucugcauaggcu

SEQ ID NO: 2620131 - RNA, 19 nt, Artificial Sequence
  Description of Artificial Sequence: Synthetic oligonucleotide
ggaagucugcauaggcuag

SEQ ID NO: 2620132 - RNA, 19 nt, Artificial Sequence
  Description of Artificial Sequence: Synthetic oligonucleotide
caaggaccggugguagucc

SEQ ID NO: 2620133 - RNA, 19 nt, Artificial Sequence
  Description of Artificial Sequence: Synthetic oligonucleotide
cagaggagcuccagcccag

SEQ ID NO: 2620134 - RNA, 19 nt, Artificial Sequence
  Description of Artificial Sequence: Synthetic oligonucleotide
ccacgagaugcccaggaag

SEQ ID NO: 2620135 - RNA, 19 nt, Artificial Sequence
  Description of Artificial Sequence: Synthetic oligonucleotide
ucggggccacaacagcaac

SEQ ID NO: 2620136 - RNA, 19 nt, Artificial Sequence
  Description of Artificial Sequence: Synthetic oligonucleotide
agcaccaaccacaggcuga

SEQ ID NO: 2620137 - RNA, 19 nt, Artificial Sequence
  Description of Artificial Sequence: Synthetic oligonucleotide
aggcgaggcuuacagggaa

SEQ ID NO: 2620138 - RNA, 19 nt, Artificial Sequence
  Description of Artificial Sequence: Synthetic oligonucleotide
gccgagcugcagcagaugc

SEQ ID NO: 2620139 - RNA, 19 nt, Artificial Sequence
  Description of Artificial Sequence: Synthetic oligonucleotide
aaccacaggcugaggaaau

SEQ ID NO: 2620140 - RNA, 19 nt, Artificial Sequence
  Description of Artificial Sequence: Synthetic oligonucleotide
agagccgagaacagggcaa

SEQ ID NO: 2620141 - RNA, 19 nt, Artificial Sequence
  Description of Artificial Sequence: Synthetic oligonucleotide
caguaguggaguuuggcau

SEQ ID NO: 2620142 - RNA, 19 nt, Artificial Sequence
  Description of Artificial Sequence: Synthetic oligonucleotide
cagaauugccacucugcaa

SEQ ID NO: 2620143 - RNA, 19 nt, Artificial Sequence
  Description of Artificial Sequence: Synthetic oligonucleotide
gcugaggaaaugcagggcu

SEQ ID NO: 2620144 - RNA, 19 nt, Artificial Sequence
  Description of Artificial Sequence: Synthetic oligonucleotide
uagccgagcugcagcagau

SEQ ID NO: 2620145 - RNA, 19 nt, Artificial Sequence
  Description of Artificial Sequence: Synthetic oligonucleotide
agagccgcagcaugcugau

SEQ ID NO: 2620146 - RNA, 19 nt, Artificial Sequence
  Description of Artificial Sequence: Synthetic oligonucleotide
gccgagaacagggcaacgg

SEQ ID NO: 2620147 - RNA, 19 nt, Artificial Sequence
  Description of Artificial Sequence: Synthetic oligonucleotide
gccaggaacgacgcgaggc

SEQ ID NO: 2620148 - RNA, 19 nt, Artificial Sequence
  Description of Artificial Sequence: Synthetic oligonucleotide
caaagauucggggccacaa

SEQ ID NO: 2620149 - RNA, 19 nt, Artificial Sequence
  Description of Artificial Sequence: Synthetic oligonucleotide
acucaguaguggaguuugg

SEQ ID NO: 2620150 - RNA, 19 nt, Artificial Sequence
  Description of Artificial Sequence: Synthetic oligonucleotide
ccgagaacagggcaacggc

SEQ ID NO: 2620151 - RNA, 19 nt, Artificial Sequence
  Description of Artificial Sequence: Synthetic oligonucleotide
cuguacaaauagccgagcu

SEQ ID NO: 2620152 - RNA, 19 nt, Artificial Sequence
  Description of Artificial Sequence: Synthetic oligonucleotide
cagcaccaaccacaggcug

SEQ ID NO: 2620153 - RNA, 19 nt, Artificial Sequence
  Description of Artificial Sequence: Synthetic oligonucleotide
gagccgagaacagggcaac

SEQ ID NO: 2620154 - RNA, 19 nt, Artificial Sequence
  Description of Artificial Sequence: Synthetic oligonucleotide
aacgcccugcaggaaccug

SEQ ID NO: 2620155 - RNA, 19 nt, Artificial Sequence
  Description of Artificial Sequence: Synthetic oligonucleotide
acgcaaggaccggugguag

SEQ ID NO: 2620156 - RNA, 19 nt, Artificial Sequence
  Description of Artificial Sequence: Synthetic oligonucleotide
ggcuaggucacucucaauu

SEQ ID NO: 2620157 - RNA, 19 nt, Artificial Sequence
  Description of Artificial Sequence: Synthetic oligonucleotide
gcaaaaugauagccagcac

SEQ ID NO: 2620158 - RNA, 19 nt, Artificial Sequence
  Description of Artificial Sequence: Synthetic oligonucleotide
agaggagcuccagcccagg

SEQ ID NO: 2620159 - RNA, 19 nt, Artificial Sequence
  Description of Artificial Sequence: Synthetic oligonucleotide
auccagggagaggaagucu

SEQ ID NO: 2620160 - RNA, 19 nt, Artificial Sequence
  Description of Artificial Sequence: Synthetic oligonucleotide
gcccaggcgaggcuuacag

SEQ ID NO: 2620161 - RNA, 19 nt, Artificial Sequence
  Description of Artificial Sequence: Synthetic oligonucleotide
ggccacaacagcaacaggu

SEQ ID NO: 2620162 - RNA, 19 nt, Artificial Sequence
  Description of Artificial Sequence: Synthetic oligonucleotide
ggaugugcugaugccaaac

SEQ ID NO: 2620163 - RNA, 19 nt, Artificial Sequence
  Description of Artificial Sequence: Synthetic oligonucleotide
gugugagcuguggugucgc

SEQ ID NO: 2620164 - RNA, 19 nt, Artificial Sequence
  Description of Artificial Sequence: Synthetic oligonucleotide
caggaacgacgcgaggcag

SEQ ID NO: 2620165 - RNA, 19 nt, Artificial Sequence
  Description of Artificial Sequence: Synthetic oligonucleotide
guggaucucuuaaauucaa

SEQ ID NO: 2620166 - RNA, 19 nt, Artificial Sequence
  Description of Artificial Sequence: Synthetic oligonucleotide
gagcuguggugucgccucc

SEQ ID NO: 2620167 - RNA, 19 nt, Artificial Sequence
  Description of Artificial Sequence: Synthetic oligonucleotide
guggugucgccuccaagaa

SEQ ID NO: 2620168 - RNA, 19 nt, Artificial Sequence
  Description of Artificial Sequence: Synthetic oligonucleotide
cuguggugucgccuccaag

SEQ ID NO: 2620169 - RNA, 19 nt, Artificial Sequence
  Description of Artificial Sequence: Synthetic oligonucleotide
gcagaggagcuccagccca

SEQ ID NO: 2620170 - RNA, 19 nt, Artificial Sequence
  Description of Artificial Sequence: Synthetic oligonucleotide
gggagaggaagucugcaua

SEQ ID NO: 2620171 - RNA, 19 nt, Artificial Sequence
  Description of Artificial Sequence: Synthetic oligonucleotide
uagugcccacgagaugccc

SEQ ID NO: 2620172 - RNA, 19 nt, Artificial Sequence
  Description of Artificial Sequence: Synthetic oligonucleotide
gucgccuccaagaaacucu

SEQ ID NO: 2620173 - RNA, 19 nt, Artificial Sequence
  Description of Artificial Sequence: Synthetic oligonucleotide
agugcccacgagaugccca

SEQ ID NO: 2620174 - RNA, 19 nt, Artificial Sequence
  Description of Artificial Sequence: Synthetic oligonucleotide
acgagaugcccaggaagga

SEQ ID NO: 2620175 - RNA, 19 nt, Artificial Sequence
  Description of Artificial Sequence: Synthetic oligonucleotide
cagugugagcugugguguc

SEQ ID NO: 2620176 - RNA, 19 nt, Artificial Sequence
  Description of Artificial Sequence: Synthetic oligonucleotide
guaguggaguuuggcauaa

SEQ ID NO: 2620177 - RNA, 19 nt, Artificial Sequence
  Description of Artificial Sequence: Synthetic oligonucleotide
ggcuagccaagucugcaga

SEQ ID NO: 2620178 - RNA, 19 nt, Artificial Sequence
  Description of Artificial Sequence: Synthetic oligonucleotide
ccagacccagaacaacagc

SEQ ID NO: 2620179 - RNA, 19 nt, Artificial Sequence
  Description of Artificial Sequence: Synthetic oligonucleotide
agcuccagcccaggcgagg

SEQ ID NO: 2620180 - RNA, 19 nt, Artificial Sequence
  Description of Artificial Sequence: Synthetic oligonucleotide
cugaggaaaugcagggcua

SEQ ID NO: 2620181 - RNA, 19 nt, Artificial Sequence
  Description of Artificial Sequence: Synthetic oligonucleotide
gcuuacagggaagacaagu

SEQ ID NO: 2620182 - RNA, 19 nt, Artificial Sequence
  Description of Artificial Sequence: Synthetic oligonucleotide
agccgagaacagggcaacg

SEQ ID NO: 2620183 - RNA, 19 nt, Artificial Sequence
  Description of Artificial Sequence: Synthetic oligonucleotide
aggaugugcugaugccaaa

SEQ ID NO: 2620184 - RNA, 19 nt, Artificial Sequence
  Description of Artificial Sequence: Synthetic oligonucleotide
cugaugccaaaccacuggu

SEQ ID NO: 2620185 - RNA, 19 nt, Artificial Sequence
  Description of Artificial Sequence: Synthetic oligonucleotide
cgucucauaaacccaauaa

SEQ ID NO: 2620186 - RNA, 19 nt, Artificial Sequence
  Description of Artificial Sequence: Synthetic oligonucleotide
caaccacaggcugaggaaa

SEQ ID NO: 2620187 - RNA, 19 nt, Artificial Sequence
  Description of Artificial Sequence: Synthetic oligonucleotide
uuccaacacuugggaagca

SEQ ID NO: 2620188 - RNA, 19 nt, Artificial Sequence
  Description of Artificial Sequence: Synthetic oligonucleotide
ccacaggcugaggaaaugc

SEQ ID NO: 2620189 - RNA, 19 nt, Artificial Sequence
  Description of Artificial Sequence: Synthetic oligonucleotide
agcuaggacuacacagaga

SEQ ID NO: 2620190 - RNA, 19 nt, Artificial Sequence
  Description of Artificial Sequence: Synthetic oligonucleotide
guggaguuuggcauaaauu

SEQ ID NO: 2620191 - RNA, 19 nt, Artificial Sequence
  Description of Artificial Sequence: Synthetic oligonucleotide
cuccugccgcaacauggac

SEQ ID NO: 2620192 - RNA, 19 nt, Artificial Sequence
  Description of Artificial Sequence: Synthetic oligonucleotide
aaaucccgguacagccacu

SEQ ID NO: 2620193 - RNA, 19 nt, Artificial Sequence
  Description of Artificial Sequence: Synthetic oligonucleotide
ccacaacagcaacagguuc

SEQ ID NO: 2620194 - RNA, 19 nt, Artificial Sequence
  Description of Artificial Sequence: Synthetic oligonucleotide
gcagggcuauguaguaggg

SEQ ID NO: 2620195 - RNA, 19 nt, Artificial Sequence
  Description of Artificial Sequence: Synthetic oligonucleotide
gguaguccauuagugccca

SEQ ID NO: 2620196 - RNA, 19 nt, Artificial Sequence
  Description of Artificial Sequence: Synthetic oligonucleotide
cggugguaguccauuagug

SEQ ID NO: 2620197 - RNA, 19 nt, Artificial Sequence
  Description of Artificial Sequence: Synthetic oligonucleotide
guacgcaaggaccgguggu

SEQ ID NO: 2620198 - RNA, 19 nt, Artificial Sequence
  Description of Artificial Sequence: Synthetic oligonucleotide
caggcgaggcuuacaggga

SEQ ID NO: 2620199 - RNA, 19 nt, Artificial Sequence
  Description of Artificial Sequence: Synthetic oligonucleotide
cgagcugcagcagaugcag

SEQ ID NO: 2620200 - RNA, 19 nt, Artificial Sequence
  Description of Artificial Sequence: Synthetic oligonucleotide
gcaaggaccggugguaguc

SEQ ID NO: 2620201 - RNA, 19 nt, Artificial Sequence
  Description of Artificial Sequence: Synthetic oligonucleotide
caggaaggaugugcugaug

SEQ ID NO: 2620202 - RNA, 19 nt, Artificial Sequence
  Description of Artificial Sequence: Synthetic oligonucleotide
gcuauguaguaggggaaga

SEQ ID NO: 2620203 - RNA, 19 nt, Artificial Sequence
  Description of Artificial Sequence: Synthetic oligonucleotide
ugcccacgagaugcccagg

SEQ ID NO: 2620204 - RNA, 19 nt, Artificial Sequence
  Description of Artificial Sequence: Synthetic oligonucleotide
ccuguacaaauagccgagc

SEQ ID NO: 2620205 - RNA, 19 nt, Artificial Sequence
  Description of Artificial Sequence: Synthetic oligonucleotide
cagggaagacaaguacgca

SEQ ID NO: 2620206 - RNA, 19 nt, Artificial Sequence
  Description of Artificial Sequence: Synthetic oligonucleotide
ccugcugaacgcccugcag

SEQ ID NO: 2620207 - RNA, 19 nt, Artificial Sequence
  Description of Artificial Sequence: Synthetic oligonucleotide
accccgucucauaaaccca

SEQ ID NO: 2620208 - RNA, 19 nt, Artificial Sequence
  Description of Artificial Sequence: Synthetic oligonucleotide
gaccggugguaguccauua

SEQ ID NO: 2620209 - RNA, 19 nt, Artificial Sequence
  Description of Artificial Sequence: Synthetic oligonucleotide
cagcuccugccgcaacaug

SEQ ID NO: 2620210 - RNA, 19 nt, Artificial Sequence
  Description of Artificial Sequence: Synthetic oligonucleotide
cccaggcgaggcuuacagg

SEQ ID NO: 2620211 - RNA, 19 nt, Artificial Sequence
  Description of Artificial Sequence: Synthetic oligonucleotide
cccaggaaggaugugcuga

SEQ ID NO: 2620212 - RNA, 19 nt, Artificial Sequence
  Description of Artificial Sequence: Synthetic oligonucleotide
aggcuaggucacucucaau

SEQ ID NO: 2620213 - RNA, 19 nt, Artificial Sequence
  Description of Artificial Sequence: Synthetic oligonucleotide
ggcgaggcuuacagggaag

SEQ ID NO: 2620214 - RNA, 19 nt, Artificial Sequence
  Description of Artificial Sequence: Synthetic oligonucleotide
ccauuagugcccacgagau

SEQ ID NO: 2620215 - RNA, 19 nt, Artificial Sequence
  Description of Artificial Sequence: Synthetic oligonucleotide
agccgagcugcagcagaug

SEQ ID NO: 2620216 - RNA, 19 nt, Artificial Sequence
  Description of Artificial Sequence: Synthetic oligonucleotide
ccaggaacgacgcgaggca

SEQ ID NO: 2620217 - RNA, 19 nt, Artificial Sequence
  Description of Artificial Sequence: Synthetic oligonucleotide
agcuguggugucgccucca

SEQ ID NO: 2620218 - RNA, 19 nt, Artificial Sequence
  Description of Artificial Sequence: Synthetic oligonucleotide
cgagaacagggcaacggca

SEQ ID NO: 2620219 - RNA, 19 nt, Artificial Sequence
  Description of Artificial Sequence: Synthetic oligonucleotide
agccaagucugcagagcaa

SEQ ID NO: 2620220 - RNA, 19 nt, Artificial Sequence
  Description of Artificial Sequence: Synthetic oligonucleotide
caaagagccgcagcaugcu

SEQ ID NO: 2620221 - RNA, 19 nt, Artificial Sequence
  Description of Artificial Sequence: Synthetic oligonucleotide
cauggacagcccugcugaa

SEQ ID NO: 2620222 - RNA, 19 nt, Artificial Sequence
  Description of Artificial Sequence: Synthetic oligonucleotide
gcuccagcccaggcgaggc

SEQ ID NO: 2620223 - RNA, 19 nt, Artificial Sequence
  Description of Artificial Sequence: Synthetic oligonucleotide
gcccacgagaugcccagga

SEQ ID NO: 2620224 - RNA, 19 nt, Artificial Sequence
  Description of Artificial Sequence: Synthetic oligonucleotide
ggcuuacagggaagacaag

SEQ ID NO: 2620225 - RNA, 19 nt, Artificial Sequence
  Description of Artificial Sequence: Synthetic oligonucleotide
cacugguaguauucagaau

SEQ ID NO: 2620226 - RNA, 19 nt, Artificial Sequence
  Description of Artificial Sequence: Synthetic oligonucleotide
gcauaggcuaggucacucu

SEQ ID NO: 2620227 - RNA, 19 nt, Artificial Sequence
  Description of Artificial Sequence: Synthetic oligonucleotide
ccacaggaaguagauggca

SEQ ID NO: 2620228 - RNA, 19 nt, Artificial Sequence
  Description of Artificial Sequence: Synthetic oligonucleotide
gccacucugcaaaaugaua

SEQ ID NO: 2620229 - RNA, 19 nt, Artificial Sequence
  Description of Artificial Sequence: Synthetic oligonucleotide
gcgaggcuuacagggaaga

SEQ ID NO: 2620230 - RNA, 19 nt, Artificial Sequence
  Description of Artificial Sequence: Synthetic oligonucleotide
gugagcuguggugucgccu

SEQ ID NO: 2620231 - RNA, 19 nt, Artificial Sequence
  Description of Artificial Sequence: Synthetic oligonucleotide
gcgccaggaacgacgcgag

SEQ ID NO: 2620232 - RNA, 19 nt, Artificial Sequence
  Description of Artificial Sequence: Synthetic oligonucleotide
ggcaaagauucggggccac

SEQ ID NO: 2620233 - RNA, 19 nt, Artificial Sequence
  Description of Artificial Sequence: Synthetic oligonucleotide
gggcuauguaguaggggaa

SEQ ID NO: 2620234 - RNA, 19 nt, Artificial Sequence
  Description of Artificial Sequence: Synthetic oligonucleotide
cacucucaauuggcagcuc

SEQ ID NO: 2620235 - RNA, 19 nt, Artificial Sequence
  Description of Artificial Sequence: Synthetic oligonucleotide
ccccgucucauaaacccaa

SEQ ID NO: 2620236 - RNA, 19 nt, Artificial Sequence
  Description of Artificial Sequence: Synthetic oligonucleotide
caccagugugagcuguggu

SEQ ID NO: 2620237 - RNA, 19 nt, Artificial Sequence
  Description of Artificial Sequence: Synthetic oligonucleotide
gaacgacgcgaggcagcga

SEQ ID NO: 2620238 - RNA, 19 nt, Artificial Sequence
  Description of Artificial Sequence: Synthetic oligonucleotide
gcaaagauucggggccaca

SEQ ID NO: 2620239 - RNA, 19 nt, Artificial Sequence
  Description of Artificial Sequence: Synthetic oligonucleotide
agcccaggcgaggcuuaca

SEQ ID NO: 2620240 - RNA, 19 nt, Artificial Sequence
  Description of Artificial Sequence: Synthetic oligonucleotide
aggaccggugguaguccau

SEQ ID NO: 2620241 - RNA, 19 nt, Artificial Sequence
  Description of Artificial Sequence: Synthetic oligonucleotide
cccagaacaacagcaccaa

SEQ ID NO: 2620242 - RNA, 19 nt, Artificial Sequence
  Description of Artificial Sequence: Synthetic oligonucleotide
cagcccaggcgaggcuuac

SEQ ID NO: 2620243 - RNA, 19 nt, Artificial Sequence
  Description of Artificial Sequence: Synthetic oligonucleotide
gcuguggugucgccuccaa

SEQ ID NO: 2620244 - RNA, 19 nt, Artificial Sequence
  Description of Artificial Sequence: Synthetic oligonucleotide
gaacgcccugcaggaaccu

SEQ ID NO: 2620245 - RNA, 19 nt, Artificial Sequence
  Description of Artificial Sequence: Synthetic oligonucleotide
ccggugguaguccauuagu

SEQ ID NO: 2620246 - RNA, 19 nt, Artificial Sequence
  Description of Artificial Sequence: Synthetic oligonucleotide
ccgucucauaaacccaaua

SEQ ID NO: 2620247 - RNA, 19 nt, Artificial Sequence
  Description of Artificial Sequence: Synthetic oligonucleotide
cgaggcuuacagggaagac

SEQ ID NO: 2620248 - RNA, 19 nt, Artificial Sequence
  Description of Artificial Sequence: Synthetic oligonucleotide
gcccugcaggaaccuguac

SEQ ID NO: 2620249 - RNA, 19 nt, Artificial Sequence
  Description of Artificial Sequence: Synthetic oligonucleotide
cccgguacagccacucagu

SEQ ID NO: 2620250 - RNA, 19 nt, Artificial Sequence
  Description of Artificial Sequence: Synthetic oligonucleotide
ccaagucugcagagcaagu

SEQ ID NO: 2620251 - RNA, 19 nt, Artificial Sequence
  Description of Artificial Sequence: Synthetic oligonucleotide
cugcauaggcuaggucacu

SEQ ID NO: 2620252 - RNA, 19 nt, Artificial Sequence
  Description of Artificial Sequence: Synthetic oligonucleotide
ccaggaaggaugugcugau

SEQ ID NO: 2620253 - RNA, 19 nt, Artificial Sequence
  Description of Artificial Sequence: Synthetic oligonucleotide
ccaaaccacugguaguauu

SEQ ID NO: 2620254 - RNA, 19 nt, Artificial Sequence
  Description of Artificial Sequence: Synthetic oligonucleotide
ccgguacagccacucagua

SEQ ID NO: 2620255 - RNA, 19 nt, Artificial Sequence
  Description of Artificial Sequence: Synthetic oligonucleotide
gugucgccuccaagaaacu

SEQ ID NO: 2620256 - RNA, 19 nt, Artificial Sequence
  Description of Artificial Sequence: Synthetic oligonucleotide
cccacgagaugcccaggaa

SEQ ID NO: 2620257 - RNA, 19 nt, Artificial Sequence
  Description of Artificial Sequence: Synthetic oligonucleotide
cggggccacaacagcaaca

SEQ ID NO: 2620258 - RNA, 19 nt, Artificial Sequence
  Description of Artificial Sequence: Synthetic oligonucleotide
cccugcugaacgcccugca

SEQ ID NO: 2620259 - RNA, 19 nt, Artificial Sequence
  Description of Artificial Sequence: Synthetic oligonucleotide
cgccaggaacgacgcgagg

SEQ ID NO: 2620260 - RNA, 19 nt, Artificial Sequence
  Description of Artificial Sequence: Synthetic oligonucleotide
gagccgcagcaugcugaua

SEQ ID NO: 2620261 - RNA, 19 nt, Artificial Sequence
  Description of Artificial Sequence: Synthetic oligonucleotide
ggaccggugguaguccauu

SEQ ID NO: 2620262 - RNA, 19 nt, Artificial Sequence
  Description of Artificial Sequence: Synthetic oligonucleotide
gccaaaccacugguaguau

SEQ ID NO: 2620263 - RNA, 19 nt, Artificial Sequence
  Description of Artificial Sequence: Synthetic oligonucleotide
cggcaaagauucggggcca

SEQ ID NO: 2620264 - RNA, 19 nt, Artificial Sequence
  Description of Artificial Sequence: Synthetic oligonucleotide
cccgucucauaaacccaau

SEQ ID NO: 2620265 - RNA, 19 nt, Artificial Sequence
  Description of Artificial Sequence: Synthetic oligonucleotide
cgcaaggaccggugguagu

SEQ ID NO: 2620266 - RNA, 19 nt, Artificial Sequence
  Description of Artificial Sequence: Synthetic oligonucleotide
gaguacggaaucaagaugg

SEQ ID NO: 2620267 - RNA, 19 nt, Artificial Sequence
  Description of Artificial Sequence: Synthetic oligonucleotide
uuggcuuuagccuuguucc

SEQ ID NO: 2620268 - RNA, 19 nt, Artificial Sequence
  Description of Artificial Sequence: Synthetic oligonucleotide
uggagagagguucacacgg

SEQ ID NO: 2620269 - RNA, 19 nt, Artificial Sequence
  Description of Artificial Sequence: Synthetic oligonucleotide
uagucugggacuuuugugg

SEQ ID NO: 2620270 - RNA, 19 nt, Artificial Sequence
  Description of Artificial Sequence: Synthetic oligonucleotide
aggaggaagacccuuuacc

SEQ ID NO: 2620271 - RNA, 19 nt, Artificial Sequence
  Description of Artificial Sequence: Synthetic oligonucleotide
uuccuguccaccuuuauag

SEQ ID NO: 2620272 - RNA, 19 nt, Artificial Sequence
  Description of Artificial Sequence: Synthetic oligonucleotide
guugucuuggcccugaccc

SEQ ID NO: 2620273 - RNA, 19 nt, Artificial Sequence
  Description of Artificial Sequence: Synthetic oligonucleotide
uguuccuuacuacaguggc

SEQ ID NO: 2620274 - RNA, 19 nt, Artificial Sequence
  Description of Artificial Sequence: Synthetic oligonucleotide
uuggccuuaaccaccuugg

SEQ ID NO: 2620275 - RNA, 19 nt, Artificial Sequence
  Description of Artificial Sequence: Synthetic oligonucleotide
gagacuggagcacaagccg

SEQ ID NO: 2620276 - RNA, 19 nt, Artificial Sequence
  Description of Artificial Sequence: Synthetic oligonucleotide
ugaacagauccuuuuggcc

SEQ ID NO: 2620277 - RNA, 19 nt, Artificial Sequence
  Description of Artificial Sequence: Synthetic oligonucleotide
acggaaucaagaugguagc

SEQ ID NO: 2620278 - RNA, 19 nt, Artificial Sequence
  Description of Artificial Sequence: Synthetic oligonucleotide
aauggcuggagccauacua

SEQ ID NO: 2620279 - RNA, 19 nt, Artificial Sequence
  Description of Artificial Sequence: Synthetic oligonucleotide
gugguuuugcuccaggccg

SEQ ID NO: 2620280 - RNA, 19 nt, Artificial Sequence
  Description of Artificial Sequence: Synthetic oligonucleotide
aucaagaugguagcaaugg

SEQ ID NO: 2620281 - RNA, 19 nt, Artificial Sequence
  Description of Artificial Sequence: Synthetic oligonucleotide
acuguuuggugcccaaggc

SEQ ID NO: 2620282 - RNA, 19 nt, Artificial Sequence
  Description of Artificial Sequence: Synthetic oligonucleotide
acacguaggccacugcucc

SEQ ID NO: 2620283 - RNA, 19 nt, Artificial Sequence
  Description of Artificial Sequence: Synthetic oligonucleotide
cuacucaggcauuuuaugc

SEQ ID NO: 2620284 - RNA, 19 nt, Artificial Sequence
  Description of Artificial Sequence: Synthetic oligonucleotide
ugccuuaggagacuggagc

SEQ ID NO: 2620285 - RNA, 19 nt, Artificial Sequence
  Description of Artificial Sequence: Synthetic oligonucleotide
uacucaggcauuuuaugcc

SEQ ID NO: 2620286 - RNA, 19 nt, Artificial Sequence
  Description of Artificial Sequence: Synthetic oligonucleotide
ucugagaauuuccugucca

SEQ ID NO: 2620287 - RNA, 19 nt, Artificial Sequence
  Description of Artificial Sequence: Synthetic oligonucleotide
ugugguuuugcuccaggcc

SEQ ID NO: 2620288 - RNA, 19 nt, Artificial Sequence
  Description of Artificial Sequence: Synthetic oligonucleotide
ugaguacggaaucaagaug

SEQ ID NO: 2620289 - RNA, 19 nt, Artificial Sequence
  Description of Artificial Sequence: Synthetic oligonucleotide
uuguuccuuacuacagugg

SEQ ID NO: 2620290 - RNA, 19 nt, Artificial Sequence
  Description of Artificial Sequence: Synthetic oligonucleotide
gacuguuuggugcccaagg

SEQ ID NO: 2620291 - RNA, 19 nt, Artificial Sequence
  Description of Artificial Sequence: Synthetic oligonucleotide
cuggguucgagcuaggcug

SEQ ID NO: 2620292 - RNA, 19 nt, Artificial Sequence
  Description of Artificial Sequence: Synthetic oligonucleotide
acuacaguggccuuggcuu

SEQ ID NO: 2620293 - RNA, 19 nt, Artificial Sequence
  Description of Artificial Sequence: Synthetic oligonucleotide
accuuuauagucugggacu

SEQ ID NO: 2620294 - RNA, 19 nt, Artificial Sequence
  Description of Artificial Sequence: Synthetic oligonucleotide
uguucgagaugccuuggcc

SEQ ID NO: 2620295 - RNA, 19 nt, Artificial Sequence
  Description of Artificial Sequence: Synthetic oligonucleotide
uccaccuuuauagucuggg

SEQ ID NO: 2620296 - RNA, 19 nt, Artificial Sequence
  Description of Artificial Sequence: Synthetic oligonucleotide
aggcauuuuaugcccuugc

SEQ ID NO: 2620297 - RNA, 19 nt, Artificial Sequence
  Description of Artificial Sequence: Synthetic oligonucleotide
ucuucuuaggaggaagacc

SEQ ID NO: 2620298 - RNA, 19 nt, Artificial Sequence
  Description of Artificial Sequence: Synthetic oligonucleotide
cuuguuccuuacuacagug

SEQ ID NO: 2620299 - RNA, 19 nt, Artificial Sequence
  Description of Artificial Sequence: Synthetic oligonucleotide
cugaacagauccuuuuggc

SEQ ID NO: 2620300 - RNA, 19 nt, Artificial Sequence
  Description of Artificial Sequence: Synthetic oligonucleotide
gagagguucacacggagga

SEQ ID NO: 2620301 - RNA, 19 nt, Artificial Sequence
  Description of Artificial Sequence: Synthetic oligonucleotide
ucugcugggcccacugucg

SEQ ID NO: 2620302 - RNA, 19 nt, Artificial Sequence
  Description of Artificial Sequence: Synthetic oligonucleotide
aacuguuuucccaagcacu

SEQ ID NO: 2620303 - RNA, 19 nt, Artificial Sequence
  Description of Artificial Sequence: Synthetic oligonucleotide
ucuuguucuggguucgagc

SEQ ID NO: 2620304 - RNA, 19 nt, Artificial Sequence
  Description of Artificial Sequence: Synthetic oligonucleotide
uuggucuuuguugucuugg

SEQ ID NO: 2620305 - RNA, 19 nt, Artificial Sequence
  Description of Artificial Sequence: Synthetic oligonucleotide
aggcagagcacccuuucac

SEQ ID NO: 2620306 - RNA, 19 nt, Artificial Sequence
  Description of Artificial Sequence: Synthetic oligonucleotide
gagccauacuacuggagag

SEQ ID NO: 2620307 - RNA, 19 nt, Artificial Sequence
  Description of Artificial Sequence: Synthetic oligonucleotide
uuccuuacuacaguggccu

SEQ ID NO: 2620308 - RNA, 19 nt, Artificial Sequence
  Description of Artificial Sequence: Synthetic oligonucleotide
uuuugcuccaggccgcagc

SEQ ID NO: 2620309 - RNA, 19 nt, Artificial Sequence
  Description of Artificial Sequence: Synthetic oligonucleotide
uguggaucagccccagggc

SEQ ID NO: 2620310 - RNA, 19 nt, Artificial Sequence
  Description of Artificial Sequence: Synthetic oligonucleotide
acccuuacugucuuguucu

SEQ ID NO: 2620311 - RNA, 19 nt, Artificial Sequence
  Description of Artificial Sequence: Synthetic oligonucleotide
ugagaauuuccuguccacc

SEQ ID NO: 2620312 - RNA, 19 nt, Artificial Sequence
  Description of Artificial Sequence: Synthetic oligonucleotide
cacccuuucacacguaggc

SEQ ID NO: 2620313 - RNA, 19 nt, Artificial Sequence
  Description of Artificial Sequence: Synthetic oligonucleotide
gugcucucuucuuaggagg

SEQ ID NO: 2620314 - RNA, 19 nt, Artificial Sequence
  Description of Artificial Sequence: Synthetic oligonucleotide
ucucuucuuaggaggaaga

SEQ ID NO: 2620315 - RNA, 19 nt, Artificial Sequence
  Description of Artificial Sequence: Synthetic oligonucleotide
caccuuuauagucugggac

SEQ ID NO: 2620316 - RNA, 19 nt, Artificial Sequence
  Description of Artificial Sequence: Synthetic oligonucleotide
cuuacuacaguggccuugg

SEQ ID NO: 2620317 - RNA, 19 nt, Artificial Sequence
  Description of Artificial Sequence: Synthetic oligonucleotide
aaucaagaugguagcaaug

SEQ ID NO: 2620318 - RNA, 19 nt, Artificial Sequence
  Description of Artificial Sequence: Synthetic oligonucleotide
ucuguucugaacagauccu

SEQ ID NO: 2620319 - RNA, 19 nt, Artificial Sequence
  Description of Artificial Sequence: Synthetic oligonucleotide
uucgagaugccuuggccug

SEQ ID NO: 2620320 - RNA, 19 nt, Artificial Sequence
  Description of Artificial Sequence: Synthetic oligonucleotide
ugggcuuggucuuuguugu

SEQ ID NO: 2620321 - RNA, 19 nt, Artificial Sequence
  Description of Artificial Sequence: Synthetic oligonucleotide
ucacacguaggccacugcu

SEQ ID NO: 2620322 - RNA, 19 nt, Artificial Sequence
  Description of Artificial Sequence: Synthetic oligonucleotide
uacuacaguggccuuggcu

SEQ ID NO: 2620323 - RNA, 19 nt, Artificial Sequence
  Description of Artificial Sequence: Synthetic oligonucleotide
uuauagucugggacuuuug

SEQ ID NO: 2620324 - RNA, 19 nt, Artificial Sequence
  Description of Artificial Sequence: Synthetic oligonucleotide
ugucgaaccucaucgucug

SEQ ID NO: 2620325 - RNA, 19 nt, Artificial Sequence
  Description of Artificial Sequence: Synthetic oligonucleotide
gacuuuugugguuuugcuc

SEQ ID NO: 2620326 - RNA, 19 nt, Artificial Sequence
  Description of Artificial Sequence: Synthetic oligonucleotide
uuuaugcccuugcuuguga

SEQ ID NO: 2620327 - RNA, 19 nt, Artificial Sequence
  Description of Artificial Sequence: Synthetic oligonucleotide
ccaaggacgacucaggaug

SEQ ID NO: 2620328 - RNA, 19 nt, Artificial Sequence
  Description of Artificial Sequence: Synthetic oligonucleotide
uugugguuuugcuccaggc

SEQ ID NO: 2620329 - RNA, 19 nt, Artificial Sequence
  Description of Artificial Sequence: Synthetic oligonucleotide
auuuuaugcccuugcuugu

SEQ ID NO: 2620330 - RNA, 19 nt, Artificial Sequence
  Description of Artificial Sequence: Synthetic oligonucleotide
ucaguguucgagaugccuu

SEQ ID NO: 2620331 - RNA, 19 nt, Artificial Sequence
  Description of Artificial Sequence: Synthetic oligonucleotide
agagcacccuuucacacgu

SEQ ID NO: 2620332 - RNA, 19 nt, Artificial Sequence
  Description of Artificial Sequence: Synthetic oligonucleotide
uuuccuguccaccuuuaua

SEQ ID NO: 2620333 - RNA, 19 nt, Artificial Sequence
  Description of Artificial Sequence: Synthetic oligonucleotide
agauccuuuuggccuuccc

SEQ ID NO: 2620334 - RNA, 19 nt, Artificial Sequence
  Description of Artificial Sequence: Synthetic oligonucleotide
uuuucaggcuuguccuucc

SEQ ID NO: 2620335 - RNA, 19 nt, Artificial Sequence
  Description of Artificial Sequence: Synthetic oligonucleotide
aucugcugggcccacuguc

SEQ ID NO: 2620336 - RNA, 19 nt, Artificial Sequence
  Description of Artificial Sequence: Synthetic oligonucleotide
gcuggagccauacuacugg

SEQ ID NO: 2620337 - RNA, 19 nt, Artificial Sequence
  Description of Artificial Sequence: Synthetic oligonucleotide
uggguucgagcuaggcugg

SEQ ID NO: 2620338 - RNA, 19 nt, Artificial Sequence
  Description of Artificial Sequence: Synthetic oligonucleotide
aacagauccuuuuggccuu

SEQ ID NO: 2620339 - RNA, 19 nt, Artificial Sequence
  Description of Artificial Sequence: Synthetic oligonucleotide
uguugucuuggcccugacc

SEQ ID NO: 2620340 - RNA, 19 nt, Artificial Sequence
  Description of Artificial Sequence: Synthetic oligonucleotide
ccacugucgaaccucaucg

SEQ ID NO: 2620341 - RNA, 19 nt, Artificial Sequence
  Description of Artificial Sequence: Synthetic oligonucleotide
uugccuuaggagacuggag

SEQ ID NO: 2620342 - RNA, 19 nt, Artificial Sequence
  Description of Artificial Sequence: Synthetic oligonucleotide
acccuuuaccuccucagcu

SEQ ID NO: 2620343 - RNA, 19 nt, Artificial Sequence
  Description of Artificial Sequence: Synthetic oligonucleotide
uuaaccaccuuggcuuuag

SEQ ID NO: 2620344 - RNA, 19 nt, Artificial Sequence
  Description of Artificial Sequence: Synthetic oligonucleotide
ugcucucuucuuaggagga

SEQ ID NO: 2620345 - RNA, 19 nt, Artificial Sequence
  Description of Artificial Sequence: Synthetic oligonucleotide
auggcuggagccauacuac

SEQ ID NO: 2620346 - RNA, 19 nt, Artificial Sequence
  Description of Artificial Sequence: Synthetic oligonucleotide
cauacuacuggagagaggu

SEQ ID NO: 2620347 - RNA, 19 nt, Artificial Sequence
  Description of Artificial Sequence: Synthetic oligonucleotide
ucgaaccucaucgucugag

SEQ ID NO: 2620348 - RNA, 19 nt, Artificial Sequence
  Description of Artificial Sequence: Synthetic oligonucleotide
agcacccuuucacacguag

SEQ ID NO: 2620349 - RNA, 19 nt, Artificial Sequence
  Description of Artificial Sequence: Synthetic oligonucleotide
acagcccaacuguuuuccc

SEQ ID NO: 2620350 - RNA, 19 nt, Artificial Sequence
  Description of Artificial Sequence: Synthetic oligonucleotide
uguccaccuuuauagucug

SEQ ID NO: 2620351 - RNA, 19 nt, Artificial Sequence
  Description of Artificial Sequence: Synthetic oligonucleotide
uuuagccuuguuccuuacu

SEQ ID NO: 2620352 - RNA, 19 nt, Artificial Sequence
  Description of Artificial Sequence: Synthetic oligonucleotide
uuuuaugcccuugcuugug

SEQ ID NO: 2620353 - RNA, 19 nt, Artificial Sequence
  Description of Artificial Sequence: Synthetic oligonucleotide
acccuuucacacguaggcc

SEQ ID NO: 2620354 - RNA, 19 nt, Artificial Sequence
  Description of Artificial Sequence: Synthetic oligonucleotide
ugguuuugcuccaggccgc

SEQ ID NO: 2620355 - RNA, 19 nt, Artificial Sequence
  Description of Artificial Sequence: Synthetic oligonucleotide
uggucuuuguugucuuggc

SEQ ID NO: 2620356 - RNA, 19 nt, Artificial Sequence
  Description of Artificial Sequence: Synthetic oligonucleotide
gagaauuuccuguccaccu

SEQ ID NO: 2620357 - RNA, 19 nt, Artificial Sequence
  Description of Artificial Sequence: Synthetic oligonucleotide
gacccuuacugucuuguuc

SEQ ID NO: 2620358 - RNA, 19 nt, Artificial Sequence
  Description of Artificial Sequence: Synthetic oligonucleotide
cugagaauuuccuguccac

SEQ ID NO: 2620359 - RNA, 19 nt, Artificial Sequence
  Description of Artificial Sequence: Synthetic oligonucleotide
uuaggaggaagacccuuua

SEQ ID NO: 2620360 - RNA, 19 nt, Artificial Sequence
  Description of Artificial Sequence: Synthetic oligonucleotide
uucacacggaggaucugcu

SEQ ID NO: 2620361 - RNA, 19 nt, Artificial Sequence
  Description of Artificial Sequence: Synthetic oligonucleotide
uccuuuuggccuucccuug

SEQ ID NO: 2620362 - RNA, 19 nt, Artificial Sequence
  Description of Artificial Sequence: Synthetic oligonucleotide
gacagcccaacuguuuucc

SEQ ID NO: 2620363 - RNA, 19 nt, Artificial Sequence
  Description of Artificial Sequence: Synthetic oligonucleotide
uuggucaguguucgagaug

SEQ ID NO: 2620364 - RNA, 19 nt, Artificial Sequence
  Description of Artificial Sequence: Synthetic oligonucleotide
caaggacgacucaggaugc

SEQ ID NO: 2620365 - RNA, 19 nt, Artificial Sequence
  Description of Artificial Sequence: Synthetic oligonucleotide
gacgacucaggaugcugag

SEQ ID NO: 2620366 - RNA, 19 nt, Artificial Sequence
  Description of Artificial Sequence: Synthetic oligonucleotide
ccacuuuucaggcuugucc

SEQ ID NO: 2620367 - RNA, 19 nt, Artificial Sequence
  Description of Artificial Sequence: Synthetic oligonucleotide
uaggaggaagacccuuuac

SEQ ID NO: 2620368 - RNA, 19 nt, Artificial Sequence
  Description of Artificial Sequence: Synthetic oligonucleotide
agagagguucacacggagg

SEQ ID NO: 2620369 - RNA, 19 nt, Artificial Sequence
  Description of Artificial Sequence: Synthetic oligonucleotide
uggucugagcugcuuuggc

SEQ ID NO: 2620370 - RNA, 19 nt, Artificial Sequence
  Description of Artificial Sequence: Synthetic oligonucleotide
gaugcugaguacggaauca

SEQ ID NO: 2620371 - RNA, 19 nt, Artificial Sequence
  Description of Artificial Sequence: Synthetic oligonucleotide
agucugggacuuuuguggu

SEQ ID NO: 2620372 - RNA, 19 nt, Artificial Sequence
  Description of Artificial Sequence: Synthetic oligonucleotide
gaaucaagaugguagcaau

SEQ ID NO: 2620373 - RNA, 19 nt, Artificial Sequence
  Description of Artificial Sequence: Synthetic oligonucleotide
uuaggagacuggagcacaa

SEQ ID NO: 2620374 - RNA, 19 nt, Artificial Sequence
  Description of Artificial Sequence: Synthetic oligonucleotide
gaugguagcaauggcugga

SEQ ID NO: 2620375 - RNA, 19 nt, Artificial Sequence
  Description of Artificial Sequence: Synthetic oligonucleotide
caagaugguagcaauggcu

SEQ ID NO: 2620376 - RNA, 19 nt, Artificial Sequence
  Description of Artificial Sequence: Synthetic oligonucleotide
guucacacggaggaucugc

SEQ ID NO: 2620377 - RNA, 19 nt, Artificial Sequence
  Description of Artificial Sequence: Synthetic oligonucleotide
caguguucgagaugccuug

SEQ ID NO: 2620378 - RNA, 19 nt, Artificial Sequence
  Description of Artificial Sequence: Synthetic oligonucleotide
ggcaugagcagcuuugguc

SEQ ID NO: 2620379 - RNA, 19 nt, Artificial Sequence
  Description of Artificial Sequence: Synthetic oligonucleotide
uuucacacguaggccacug

SEQ ID NO: 2620380 - RNA, 19 nt, Artificial Sequence
  Description of Artificial Sequence: Synthetic oligonucleotide
ucgagcuaggcuggcgugg

SEQ ID NO: 2620381 - RNA, 19 nt, Artificial Sequence
  Description of Artificial Sequence: Synthetic oligonucleotide
uucccaagcacugcugcca

SEQ ID NO: 2620382 - RNA, 19 nt, Artificial Sequence
  Description of Artificial Sequence: Synthetic oligonucleotide
gaaccucaucgucugagaa

SEQ ID NO: 2620383 - RNA, 19 nt, Artificial Sequence
  Description of Artificial Sequence: Synthetic oligonucleotide
cagcuuuggucaguguucg

SEQ ID NO: 2620384 - RNA, 19 nt, Artificial Sequence
  Description of Artificial Sequence: Synthetic oligonucleotide
cuuguucuggguucgagcu

SEQ ID NO: 2620385 - RNA, 19 nt, Artificial Sequence
  Description of Artificial Sequence: Synthetic oligonucleotide
ugggcaugagcagcuuugg

SEQ ID NO: 2620386 - RNA, 19 nt, Artificial Sequence
  Description of Artificial Sequence: Synthetic oligonucleotide
cuuuggucaguguucgaga

SEQ ID NO: 2620387 - RNA, 19 nt, Artificial Sequence
  Description of Artificial Sequence: Synthetic oligonucleotide
uuacugucuuguucugggu

SEQ ID NO: 2620388 - RNA, 19 nt, Artificial Sequence
  Description of Artificial Sequence: Synthetic oligonucleotide
accucaucgucugagaauu

SEQ ID NO: 2620389 - RNA, 19 nt, Artificial Sequence
  Description of Artificial Sequence: Synthetic oligonucleotide
gauccuuuuggccuucccu

SEQ ID NO: 2620390 - RNA, 19 nt, Artificial Sequence
  Description of Artificial Sequence: Synthetic oligonucleotide
agaauuuccuguccaccuu

SEQ ID NO: 2620391 - RNA, 19 nt, Artificial Sequence
  Description of Artificial Sequence: Synthetic oligonucleotide
uucgagcuaggcuggcgug

SEQ ID NO: 2620392 - RNA, 19 nt, Artificial Sequence
  Description of Artificial Sequence: Synthetic oligonucleotide
uucacacguaggccacugc

SEQ ID NO: 2620393 - RNA, 19 nt, Artificial Sequence
  Description of Artificial Sequence: Synthetic oligonucleotide
agccgugcucucuucuuag

SEQ ID NO: 2620394 - RNA, 19 nt, Artificial Sequence
  Description of Artificial Sequence: Synthetic oligonucleotide
uucuuaggaggaagacccu

SEQ ID NO: 2620395 - RNA, 19 nt, Artificial Sequence
  Description of Artificial Sequence: Synthetic oligonucleotide
cagccuugccuuaggagac

SEQ ID NO: 2620396 - RNA, 19 nt, Artificial Sequence
  Description of Artificial Sequence: Synthetic oligonucleotide
gggccuuuccuacucaggc

SEQ ID NO: 2620397 - RNA, 19 nt, Artificial Sequence
  Description of Artificial Sequence: Synthetic oligonucleotide
uggccuuaaccaccuuggc

SEQ ID NO: 2620398 - RNA, 19 nt, Artificial Sequence
  Description of Artificial Sequence: Synthetic oligonucleotide
uuuggcuccugcugcccug

SEQ ID NO: 2620399 - RNA, 19 nt, Artificial Sequence
  Description of Artificial Sequence: Synthetic oligonucleotide
guuccuuacuacaguggcc

SEQ ID NO: 2620400 - RNA, 19 nt, Artificial Sequence
  Description of Artificial Sequence: Synthetic oligonucleotide
aguguucgagaugccuugg

SEQ ID NO: 2620401 - RNA, 19 nt, Artificial Sequence
  Description of Artificial Sequence: Synthetic oligonucleotide
ugcccaaggcagagcaccc

SEQ ID NO: 2620402 - RNA, 19 nt, Artificial Sequence
  Description of Artificial Sequence: Synthetic oligonucleotide
uccuguccaccuuuauagu

SEQ ID NO: 2620403 - RNA, 19 nt, Artificial Sequence
  Description of Artificial Sequence: Synthetic oligonucleotide
cucuucuuaggaggaagac

SEQ ID NO: 2620404 - RNA, 19 nt, Artificial Sequence
  Description of Artificial Sequence: Synthetic oligonucleotide
gugcccaaggcagagcacc

SEQ ID NO: 2620405 - RNA, 19 nt, Artificial Sequence
  Description of Artificial Sequence: Synthetic oligonucleotide
gcuuuggucaguguucgag

SEQ ID NO: 2620406 - RNA, 19 nt, Artificial Sequence
  Description of Artificial Sequence: Synthetic oligonucleotide
cacacguaggccacugcuc

SEQ ID NO: 2620407 - RNA, 19 nt, Artificial Sequence
  Description of Artificial Sequence: Synthetic oligonucleotide
acaagccgugcucucuucu

SEQ ID NO: 2620408 - RNA, 19 nt, Artificial Sequence
  Description of Artificial Sequence: Synthetic oligonucleotide
cuguuuggugcccaaggca

SEQ ID NO: 2620409 - RNA, 19 nt, Artificial Sequence
  Description of Artificial Sequence: Synthetic oligonucleotide
cuucccuugugcuuggucu

SEQ ID NO: 2620410 - RNA, 19 nt, Artificial Sequence
  Description of Artificial Sequence: Synthetic oligonucleotide
acuacuggagagagguuca

SEQ ID NO: 2620411 - RNA, 19 nt, Artificial Sequence
  Description of Artificial Sequence: Synthetic oligonucleotide
aagccgugcucucuucuua

SEQ ID NO: 2620412 - RNA, 19 nt, Artificial Sequence
  Description of Artificial Sequence: Synthetic oligonucleotide
uuaugcccuugcuugugau

SEQ ID NO: 2620413 - RNA, 19 nt, Artificial Sequence
  Description of Artificial Sequence: Synthetic oligonucleotide
ucuuaggaggaagacccuu

SEQ ID NO: 2620414 - RNA, 19 nt, Artificial Sequence
  Description of Artificial Sequence: Synthetic oligonucleotide
uugucuuggcccugacccu

SEQ ID NO: 2620415 - RNA, 19 nt, Artificial Sequence
  Description of Artificial Sequence: Synthetic oligonucleotide
aggccacugcuccggggcc

SEQ ID NO: 2620416 - RNA, 19 nt, Artificial Sequence
  Description of Artificial Sequence: Synthetic oligonucleotide
guucgagaugccuuggccu

SEQ ID NO: 2620417 - RNA, 19 nt, Artificial Sequence
  Description of Artificial Sequence: Synthetic oligonucleotide
ucgagaugccuuggccugg

SEQ ID NO: 2620418 - RNA, 19 nt, Artificial Sequence
  Description of Artificial Sequence: Synthetic oligonucleotide
gugggcaugagcagcuuug

SEQ ID NO: 2620419 - RNA, 19 nt, Artificial Sequence
  Description of Artificial Sequence: Synthetic oligonucleotide
uggcuuuagccuuguuccu

SEQ ID NO: 2620420 - RNA, 19 nt, Artificial Sequence
  Description of Artificial Sequence: Synthetic oligonucleotide
ccuacucaggcauuuuaug

SEQ ID NO: 2620421 - RNA, 19 nt, Artificial Sequence
  Description of Artificial Sequence: Synthetic oligonucleotide
uaggagacuggagcacaag

SEQ ID NO: 2620422 - RNA, 19 nt, Artificial Sequence
  Description of Artificial Sequence: Synthetic oligonucleotide
cugaguacggaaucaagau

SEQ ID NO: 2620423 - RNA, 19 nt, Artificial Sequence
  Description of Artificial Sequence: Synthetic oligonucleotide
agccauacuacuggagaga

SEQ ID NO: 2620424 - RNA, 19 nt, Artificial Sequence
  Description of Artificial Sequence: Synthetic oligonucleotide
cuuuagccuuguuccuuac

SEQ ID NO: 2620425 - RNA, 19 nt, Artificial Sequence
  Description of Artificial Sequence: Synthetic oligonucleotide
guguucgagaugccuuggc

SEQ ID NO: 2620426 - RNA, 19 nt, Artificial Sequence
  Description of Artificial Sequence: Synthetic oligonucleotide
augcccuugcuugugauuu

SEQ ID NO: 2620427 - RNA, 19 nt, Artificial Sequence
  Description of Artificial Sequence: Synthetic oligonucleotide
cacguaggccacugcuccg

SEQ ID NO: 2620428 - RNA, 19 nt, Artificial Sequence
  Description of Artificial Sequence: Synthetic oligonucleotide
guuuucccaagcacugcug

SEQ ID NO: 2620429 - RNA, 19 nt, Artificial Sequence
  Description of Artificial Sequence: Synthetic oligonucleotide
gcugaguacggaaucaaga

SEQ ID NO: 2620430 - RNA, 19 nt, Artificial Sequence
  Description of Artificial Sequence: Synthetic oligonucleotide
gccauacuacuggagagag

SEQ ID NO: 2620431 - RNA, 19 nt, Artificial Sequence
  Description of Artificial Sequence: Synthetic oligonucleotide
ucccaagcacugcugccaa

SEQ ID NO: 2620432 - RNA, 19 nt, Artificial Sequence
  Description of Artificial Sequence: Synthetic oligonucleotide
uaugcccuugcuugugauu

SEQ ID NO: 2620433 - RNA, 19 nt, Artificial Sequence
  Description of Artificial Sequence: Synthetic oligonucleotide
guaggccacugcuccgggg

SEQ ID NO: 2620434 - RNA, 19 nt, Artificial Sequence
  Description of Artificial Sequence: Synthetic oligonucleotide
cuggcgugggcaugagcag

SEQ ID NO: 2620435 - RNA, 19 nt, Artificial Sequence
  Description of Artificial Sequence: Synthetic oligonucleotide
acuuuucaggcuuguccuu

SEQ ID NO: 2620436 - RNA, 19 nt, Artificial Sequence
  Description of Artificial Sequence: Synthetic oligonucleotide
ggaaucaagaugguagcaa

SEQ ID NO: 2620437 - RNA, 19 nt, Artificial Sequence
  Description of Artificial Sequence: Synthetic oligonucleotide
caggaugcugaguacggaa

SEQ ID NO: 2620438 - RNA, 19 nt, Artificial Sequence
  Description of Artificial Sequence: Synthetic oligonucleotide
cuuuugugguuuugcucca

SEQ ID NO: 2620439 - RNA, 19 nt, Artificial Sequence
  Description of Artificial Sequence: Synthetic oligonucleotide
ccaagcacugcugccaagg

SEQ ID NO: 2620440 - RNA, 19 nt, Artificial Sequence
  Description of Artificial Sequence: Synthetic oligonucleotide
aggacgacucaggaugcug

SEQ ID NO: 2620441 - RNA, 19 nt, Artificial Sequence
  Description of Artificial Sequence: Synthetic oligonucleotide
gucuuguucuggguucgag

SEQ ID NO: 2620442 - RNA, 19 nt, Artificial Sequence
  Description of Artificial Sequence: Synthetic oligonucleotide
ggaugcugaguacggaauc

SEQ ID NO: 2620443 - RNA, 19 nt, Artificial Sequence
  Description of Artificial Sequence: Synthetic oligonucleotide
uggcgugggcaugagcagc

SEQ ID NO: 2620444 - RNA, 19 nt, Artificial Sequence
  Description of Artificial Sequence: Synthetic oligonucleotide
gaauuuccuguccaccuuu

SEQ ID NO: 2620445 - RNA, 19 nt, Artificial Sequence
  Description of Artificial Sequence: Synthetic oligonucleotide
gcuggcgugggcaugagca

SEQ ID NO: 2620446 - RNA, 19 nt, Artificial Sequence
  Description of Artificial Sequence: Synthetic oligonucleotide
ugggacuuuugugguuuug

SEQ ID NO: 2620447 - RNA, 19 nt, Artificial Sequence
  Description of Artificial Sequence: Synthetic oligonucleotide
cugggcccacugucgaacc

SEQ ID NO: 2620448 - RNA, 19 nt, Artificial Sequence
  Description of Artificial Sequence: Synthetic oligonucleotide
agggccuuuccuacucagg

SEQ ID NO: 2620449 - RNA, 19 nt, Artificial Sequence
  Description of Artificial Sequence: Synthetic oligonucleotide
aaggacgacucaggaugcu

SEQ ID NO: 2620450 - RNA, 19 nt, Artificial Sequence
  Description of Artificial Sequence: Synthetic oligonucleotide
gccuuguuccuuacuacag

SEQ ID NO: 2620451 - RNA, 19 nt, Artificial Sequence
  Description of Artificial Sequence: Synthetic oligonucleotide
cagcccaacuguuuuccca

SEQ ID NO: 2620452 - RNA, 19 nt, Artificial Sequence
  Description of Artificial Sequence: Synthetic oligonucleotide
caucgucugagaauuuccu

SEQ ID NO: 2620453 - RNA, 19 nt, Artificial Sequence
  Description of Artificial Sequence: Synthetic oligonucleotide
aggaugcugaguacggaau

SEQ ID NO: 2620454 - RNA, 19 nt, Artificial Sequence
  Description of Artificial Sequence: Synthetic oligonucleotide
gccuuaggagacuggagca

SEQ ID NO: 2620455 - RNA, 19 nt, Artificial Sequence
  Description of Artificial Sequence: Synthetic oligonucleotide
ugucuuggcccugacccuu

SEQ ID NO: 2620456 - RNA, 19 nt, Artificial Sequence
  Description of Artificial Sequence: Synthetic oligonucleotide
guucgagcuaggcuggcgu

SEQ ID NO: 2620457 - RNA, 19 nt, Artificial Sequence
  Description of Artificial Sequence: Synthetic oligonucleotide
ugggcccacugucgaaccu

SEQ ID NO: 2620458 - RNA, 19 nt, Artificial Sequence
  Description of Artificial Sequence: Synthetic oligonucleotide
ugacccuuacugucuuguu

SEQ ID NO: 2620459 - RNA, 19 nt, Artificial Sequence
  Description of Artificial Sequence: Synthetic oligonucleotide
agccccagggccuuuccua

SEQ ID NO: 2620460 - RNA, 19 nt, Artificial Sequence
  Description of Artificial Sequence: Synthetic oligonucleotide
ccauacuacuggagagagg

SEQ ID NO: 2620461 - RNA, 19 nt, Artificial Sequence
  Description of Artificial Sequence: Synthetic oligonucleotide
cccuuucacacguaggcca

SEQ ID NO: 2620462 - RNA, 19 nt, Artificial Sequence
  Description of Artificial Sequence: Synthetic oligonucleotide
gcagcuuuggucaguguuc

SEQ ID NO: 2620463 - RNA, 19 nt, Artificial Sequence
  Description of Artificial Sequence: Synthetic oligonucleotide
ccuuucacacguaggccac

SEQ ID NO: 2620464 - RNA, 19 nt, Artificial Sequence
  Description of Artificial Sequence: Synthetic oligonucleotide
augcugaguacggaaucaa

SEQ ID NO: 2620465 - RNA, 19 nt, Artificial Sequence
  Description of Artificial Sequence: Synthetic oligonucleotide
ccuuacugucuuguucugg

SEQ ID NO: 2620466 - RNA, 19 nt, Artificial Sequence
  Description of Artificial Sequence: Synthetic oligonucleotide
cuacuggagagagguucac

SEQ ID NO: 2620467 - RNA, 19 nt, Artificial Sequence
  Description of Artificial Sequence: Synthetic oligonucleotide
ggcccugacccuuacuguc

SEQ ID NO: 2620468 - RNA, 19 nt, Artificial Sequence
  Description of Artificial Sequence: Synthetic oligonucleotide
gccagagccuuguggauca

SEQ ID NO: 2620469 - RNA, 19 nt, Artificial Sequence
  Description of Artificial Sequence: Synthetic oligonucleotide
gguucgagcuaggcuggcg

SEQ ID NO: 2620470 - RNA, 19 nt, Artificial Sequence
  Description of Artificial Sequence: Synthetic oligonucleotide
cacaagccgugcucucuuc

SEQ ID NO: 2620471 - RNA, 19 nt, Artificial Sequence
  Description of Artificial Sequence: Synthetic oligonucleotide
ggcuuguccuuccaguucu

SEQ ID NO: 2620472 - RNA, 19 nt, Artificial Sequence
  Description of Artificial Sequence: Synthetic oligonucleotide
cuuaggaggaagacccuuu

SEQ ID NO: 2620473 - RNA, 19 nt, Artificial Sequence
  Description of Artificial Sequence: Synthetic oligonucleotide
agcuuuggucaguguucga

SEQ ID NO: 2620474 - RNA, 19 nt, Artificial Sequence
  Description of Artificial Sequence: Synthetic oligonucleotide
cacugcuccggggccagag

SEQ ID NO: 2620475 - RNA, 19 nt, Artificial Sequence
  Description of Artificial Sequence: Synthetic oligonucleotide
gucaguguucgagaugccu

SEQ ID NO: 2620476 - RNA, 19 nt, Artificial Sequence
  Description of Artificial Sequence: Synthetic oligonucleotide
ccuuacuacaguggccuug

SEQ ID NO: 2620477 - RNA, 19 nt, Artificial Sequence
  Description of Artificial Sequence: Synthetic oligonucleotide
gccgugcucucuucuuagg

SEQ ID NO: 2620478 - RNA, 19 nt, Artificial Sequence
  Description of Artificial Sequence: Synthetic oligonucleotide
uccuuacuacaguggccuu

SEQ ID NO: 2620479 - RNA, 19 nt, Artificial Sequence
  Description of Artificial Sequence: Synthetic oligonucleotide
gagcuaggcuggcgugggc

SEQ ID NO: 2620480 - RNA, 19 nt, Artificial Sequence
  Description of Artificial Sequence: Synthetic oligonucleotide
ggcauuuuaugcccuugcu

SEQ ID NO: 2620481 - RNA, 19 nt, Artificial Sequence
  Description of Artificial Sequence: Synthetic oligonucleotide
cggaggaucugcugggccc

SEQ ID NO: 2620482 - RNA, 19 nt, Artificial Sequence
  Description of Artificial Sequence: Synthetic oligonucleotide
ccuugccuuaggagacugg

SEQ ID NO: 2620483 - RNA, 19 nt, Artificial Sequence
  Description of Artificial Sequence: Synthetic oligonucleotide
gcuuuagccuuguuccuua

SEQ ID NO: 2620484 - RNA, 19 nt, Artificial Sequence
  Description of Artificial Sequence: Synthetic oligonucleotide
ggccuuaaccaccuuggcu

SEQ ID NO: 2620485 - RNA, 19 nt, Artificial Sequence
  Description of Artificial Sequence: Synthetic oligonucleotide
ugcugcccugggcuugguc

SEQ ID NO: 2620486 - RNA, 19 nt, Artificial Sequence
  Description of Artificial Sequence: Synthetic oligonucleotide
gcauuuuaugcccuugcuu

SEQ ID NO: 2620487 - RNA, 19 nt, Artificial Sequence
  Description of Artificial Sequence: Synthetic oligonucleotide
ugcccuugcuugugauuuu

SEQ ID NO: 2620488 - RNA, 19 nt, Artificial Sequence
  Description of Artificial Sequence: Synthetic oligonucleotide
ggacuguuuggugcccaag

SEQ ID NO: 2620489 - RNA, 19 nt, Artificial Sequence
  Description of Artificial Sequence: Synthetic oligonucleotide
cccacugucgaaccucauc

SEQ ID NO: 2620490 - RNA, 19 nt, Artificial Sequence
  Description of Artificial Sequence: Synthetic oligonucleotide
gagaugccuuggccuggac

SEQ ID NO: 2620491 - RNA, 19 nt, Artificial Sequence
  Description of Artificial Sequence: Synthetic oligonucleotide
gcugcccugggcuuggucu

SEQ ID NO: 2620492 - RNA, 19 nt, Artificial Sequence
  Description of Artificial Sequence: Synthetic oligonucleotide
cugacccuuacugucuugu

SEQ ID NO: 2620493 - RNA, 19 nt, Artificial Sequence
  Description of Artificial Sequence: Synthetic oligonucleotide
agccacuuuucaggcuugu

SEQ ID NO: 2620494 - RNA, 19 nt, Artificial Sequence
  Description of Artificial Sequence: Synthetic oligonucleotide
ugcuuuggccuuggccuua

SEQ ID NO: 2620495 - RNA, 19 nt, Artificial Sequence
  Description of Artificial Sequence: Synthetic oligonucleotide
gcccaacuguuuucccaag

SEQ ID NO: 2620496 - RNA, 19 nt, Artificial Sequence
  Description of Artificial Sequence: Synthetic oligonucleotide
gucgaaccucaucgucuga

SEQ ID NO: 2620497 - RNA, 19 nt, Artificial Sequence
  Description of Artificial Sequence: Synthetic oligonucleotide
ggagagagguucacacgga

SEQ ID NO: 2620498 - RNA, 19 nt, Artificial Sequence
  Description of Artificial Sequence: Synthetic oligonucleotide
ccaccuuuauagucuggga

SEQ ID NO: 2620499 - RNA, 19 nt, Artificial Sequence
  Description of Artificial Sequence: Synthetic oligonucleotide
ggaggaucugcugggccca

SEQ ID NO: 2620500 - RNA, 19 nt, Artificial Sequence
  Description of Artificial Sequence: Synthetic oligonucleotide
gccccagggccuuuccuac

SEQ ID NO: 2620501 - RNA, 19 nt, Artificial Sequence
  Description of Artificial Sequence: Synthetic oligonucleotide
auacuacuggagagagguu

SEQ ID NO: 2620502 - RNA, 19 nt, Artificial Sequence
  Description of Artificial Sequence: Synthetic oligonucleotide
cacugucgaaccucaucgu

SEQ ID NO: 2620503 - RNA, 19 nt, Artificial Sequence
  Description of Artificial Sequence: Synthetic oligonucleotide
ggagcacaagccgugcucu

SEQ ID NO: 2620504 - RNA, 19 nt, Artificial Sequence
  Description of Artificial Sequence: Synthetic oligonucleotide
cuuuccuacucaggcauuu

SEQ ID NO: 2620505 - RNA, 19 nt, Artificial Sequence
  Description of Artificial Sequence: Synthetic oligonucleotide
caggcuuguccuuccaguu

SEQ ID NO: 2620506 - RNA, 19 nt, Artificial Sequence
  Description of Artificial Sequence: Synthetic oligonucleotide
cuguucugaacagauccuu

SEQ ID NO: 2620507 - RNA, 19 nt, Artificial Sequence
  Description of Artificial Sequence: Synthetic oligonucleotide
gccuugccuuaggagacug

SEQ ID NO: 2620508 - RNA, 19 nt, Artificial Sequence
  Description of Artificial Sequence: Synthetic oligonucleotide
cuacaguggccuuggcuuu

SEQ ID NO: 2620509 - RNA, 19 nt, Artificial Sequence
  Description of Artificial Sequence: Synthetic oligonucleotide
ccgugcucucuucuuagga

SEQ ID NO: 2620510 - RNA, 19 nt, Artificial Sequence
  Description of Artificial Sequence: Synthetic oligonucleotide
aggaucugcugggcccacu

SEQ ID NO: 2620511 - RNA, 19 nt, Artificial Sequence
  Description of Artificial Sequence: Synthetic oligonucleotide
cuuaaccaccuuggcuuua

SEQ ID NO: 2620512 - RNA, 19 nt, Artificial Sequence
  Description of Artificial Sequence: Synthetic oligonucleotide
ccuuguuccuuacuacagu

SEQ ID NO: 2620513 - RNA, 19 nt, Artificial Sequence
  Description of Artificial Sequence: Synthetic oligonucleotide
ccugacccuuacugucuug

SEQ ID NO: 2620514 - RNA, 19 nt, Artificial Sequence
  Description of Artificial Sequence: Synthetic oligonucleotide
ggcuggcgugggcaugagc

SEQ ID NO: 2620515 - RNA, 19 nt, Artificial Sequence
  Description of Artificial Sequence: Synthetic oligonucleotide
cacugcugccaaggacgac

SEQ ID NO: 2620516 - RNA, 19 nt, Artificial Sequence
  Description of Artificial Sequence: Synthetic oligonucleotide
caagccgugcucucuucuu

SEQ ID NO: 2620517 - RNA, 19 nt, Artificial Sequence
  Description of Artificial Sequence: Synthetic oligonucleotide
ccuggacuguuuggugccc

SEQ ID NO: 2620518 - RNA, 19 nt, Artificial Sequence
  Description of Artificial Sequence: Synthetic oligonucleotide
cccaagcacugcugccaag

SEQ ID NO: 2620519 - RNA, 19 nt, Artificial Sequence
  Description of Artificial Sequence: Synthetic oligonucleotide
cgaaccucaucgucugaga

SEQ ID NO: 2620520 - RNA, 19 nt, Artificial Sequence
  Description of Artificial Sequence: Synthetic oligonucleotide
gcuuggucugagcugcuuu

SEQ ID NO: 2620521 - RNA, 19 nt, Artificial Sequence
  Description of Artificial Sequence: Synthetic oligonucleotide
ggcccacugucgaaccuca

SEQ ID NO: 2620522 - RNA, 19 nt, Artificial Sequence
  Description of Artificial Sequence: Synthetic oligonucleotide
gcacugcugccaaggacga

SEQ ID NO: 2620523 - RNA, 19 nt, Artificial Sequence
  Description of Artificial Sequence: Synthetic oligonucleotide
gccuuguggaucagcccca

SEQ ID NO: 2620524 - RNA, 19 nt, Artificial Sequence
  Description of Artificial Sequence: Synthetic oligonucleotide
ggccgcagccuugccuuag

SEQ ID NO: 2620525 - RNA, 19 nt, Artificial Sequence
  Description of Artificial Sequence: Synthetic oligonucleotide
cuuucacacguaggccacu

SEQ ID NO: 2620526 - RNA, 19 nt, Artificial Sequence
  Description of Artificial Sequence: Synthetic oligonucleotide
aggcuggcgugggcaugag

SEQ ID NO: 2620527 - RNA, 19 nt, Artificial Sequence
  Description of Artificial Sequence: Synthetic oligonucleotide
cuuuauagucugggacuuu

SEQ ID NO: 2620528 - RNA, 19 nt, Artificial Sequence
  Description of Artificial Sequence: Synthetic oligonucleotide
cuuggcccugacccuuacu

SEQ ID NO: 2620529 - RNA, 19 nt, Artificial Sequence
  Description of Artificial Sequence: Synthetic oligonucleotide
cccuugugcuuggucugag

SEQ ID NO: 2620530 - RNA, 19 nt, Artificial Sequence
  Description of Artificial Sequence: Synthetic oligonucleotide
aggccgcagccuugccuua

SEQ ID NO: 2620531 - RNA, 19 nt, Artificial Sequence
  Description of Artificial Sequence: Synthetic oligonucleotide
ggguucgagcuaggcuggc

SEQ ID NO: 2620532 - RNA, 19 nt, Artificial Sequence
  Description of Artificial Sequence: Synthetic oligonucleotide
cggaaucaagaugguagca

SEQ ID NO: 2620533 - RNA, 19 nt, Artificial Sequence
  Description of Artificial Sequence: Synthetic oligonucleotide
ccuuuauagucugggacuu

SEQ ID NO: 2620534 - RNA, 19 nt, Artificial Sequence
  Description of Artificial Sequence: Synthetic oligonucleotide
gucuuggcccugacccuua

SEQ ID NO: 2620535 - RNA, 19 nt, Artificial Sequence
  Description of Artificial Sequence: Synthetic oligonucleotide
cccuuuaccuccucagcuu

SEQ ID NO: 2620536 - RNA, 19 nt, Artificial Sequence
  Description of Artificial Sequence: Synthetic oligonucleotide
ccagggccuuuccuacuca

SEQ ID NO: 2620537 - RNA, 19 nt, Artificial Sequence
  Description of Artificial Sequence: Synthetic oligonucleotide
gcacaagccgugcucucuu

SEQ ID NO: 2620538 - RNA, 19 nt, Artificial Sequence
  Description of Artificial Sequence: Synthetic oligonucleotide
gagcacccuuucacacgua

SEQ ID NO: 2620539 - RNA, 19 nt, Artificial Sequence
  Description of Artificial Sequence: Synthetic oligonucleotide
gcccugacccuuacugucu

SEQ ID NO: 2620540 - RNA, 19 nt, Artificial Sequence
  Description of Artificial Sequence: Synthetic oligonucleotide
ccgcagccuugccuuagga

SEQ ID NO: 2620541 - RNA, 19 nt, Artificial Sequence
  Description of Artificial Sequence: Synthetic oligonucleotide
ccaaggcagagcacccuuu

SEQ ID NO: 2620542 - RNA, 19 nt, Artificial Sequence
  Description of Artificial Sequence: Synthetic oligonucleotide
ggaucagccccagggccuu

SEQ ID NO: 2620543 - RNA, 19 nt, Artificial Sequence
  Description of Artificial Sequence: Synthetic oligonucleotide
ccggggccagagccuugug

SEQ ID NO: 2620544 - RNA, 19 nt, Artificial Sequence
  Description of Artificial Sequence: Synthetic oligonucleotide
ccucaucgucugagaauuu

SEQ ID NO: 2620545 - RNA, 19 nt, Artificial Sequence
  Description of Artificial Sequence: Synthetic oligonucleotide
cgugggcaugagcagcuuu

SEQ ID NO: 2620546 - RNA, 19 nt, Artificial Sequence
  Description of Artificial Sequence: Synthetic oligonucleotide
cugcugcccugggcuuggu

SEQ ID NO: 2620547 - RNA, 19 nt, Artificial Sequence
  Description of Artificial Sequence: Synthetic oligonucleotide
gcccacugucgaaccucau

SEQ ID NO: 2620548 - RNA, 19 nt, Artificial Sequence
  Description of Artificial Sequence: Synthetic oligonucleotide
gcgugggcaugagcagcuu

SEQ ID NO: 2620549 - RNA, 19 nt, Artificial Sequence
  Description of Artificial Sequence: Synthetic oligonucleotide
aauauuaaacaucacauag

SEQ ID NO: 2620550 - RNA, 19 nt, Artificial Sequence
  Description of Artificial Sequence: Synthetic oligonucleotide
aagauaaucaaugagacac

SEQ ID NO: 2620551 - RNA, 19 nt, Artificial Sequence
  Description of Artificial Sequence: Synthetic oligonucleotide
uuaaacaucacauagggcu

SEQ ID NO: 2620552 - RNA, 19 nt, Artificial Sequence
  Description of Artificial Sequence: Synthetic oligonucleotide
gaugcgaccauauuuaugg

SEQ ID NO: 2620553 - RNA, 19 nt, Artificial Sequence
  Description of Artificial Sequence: Synthetic oligonucleotide
uugacaaucaauauuaaac

SEQ ID NO: 2620554 - RNA, 19 nt, Artificial Sequence
  Description of Artificial Sequence: Synthetic oligonucleotide
aaugaaaccagauucuuug

SEQ ID NO: 2620555 - RNA, 19 nt, Artificial Sequence
  Description of Artificial Sequence: Synthetic oligonucleotide
aguacauaaacccagacca

SEQ ID NO: 2620556 - RNA, 19 nt, Artificial Sequence
  Description of Artificial Sequence: Synthetic oligonucleotide
ucugacuuagaauagaaug

SEQ ID NO: 2620557 - RNA, 19 nt, Artificial Sequence
  Description of Artificial Sequence: Synthetic oligonucleotide
ugcauaaucuuucacaggc

SEQ ID NO: 2620558 - RNA, 19 nt, Artificial Sequence
  Description of Artificial Sequence: Synthetic oligonucleotide
caaaggaucgcacaaaugg

SEQ ID NO: 2620559 - RNA, 19 nt, Artificial Sequence
  Description of Artificial Sequence: Synthetic oligonucleotide
uucuuaauccuugagaagg

SEQ ID NO: 2620560 - RNA, 19 nt, Artificial Sequence
  Description of Artificial Sequence: Synthetic oligonucleotide
gauauugucaaguugacaa

SEQ ID NO: 2620561 - RNA, 19 nt, Artificial Sequence
  Description of Artificial Sequence: Synthetic oligonucleotide
uuucauuguaaacuuuugg

SEQ ID NO: 2620562 - RNA, 19 nt, Artificial Sequence
  Description of Artificial Sequence: Synthetic oligonucleotide
acuuuaacuagccaaauca

SEQ ID NO: 2620563 - RNA, 19 nt, Artificial Sequence
  Description of Artificial Sequence: Synthetic oligonucleotide
uuaacuagccaaaucaaga

SEQ ID NO: 2620564 - RNA, 19 nt, Artificial Sequence
  Description of Artificial Sequence: Synthetic oligonucleotide
ucaagauaaucaaugagac

SEQ ID NO: 2620565 - RNA, 19 nt, Artificial Sequence
  Description of Artificial Sequence: Synthetic oligonucleotide
ucaugcaguacauaaaccc

SEQ ID NO: 2620566 - RNA, 19 nt, Artificial Sequence
  Description of Artificial Sequence: Synthetic oligonucleotide
ugacaaucaauauuaaaca

SEQ ID NO: 2620567 - RNA, 19 nt, Artificial Sequence
  Description of Artificial Sequence: Synthetic oligonucleotide
auagaaaacaaccaauggu

SEQ ID NO: 2620568 - RNA, 19 nt, Artificial Sequence
  Description of Artificial Sequence: Synthetic oligonucleotide
uuuaacuagccaaaucaag

SEQ ID NO: 2620569 - RNA, 19 nt, Artificial Sequence
  Description of Artificial Sequence: Synthetic oligonucleotide
ucugcauaaucuuucacag

SEQ ID NO: 2620570 - RNA, 19 nt, Artificial Sequence
  Description of Artificial Sequence: Synthetic oligonucleotide
uucauuguaaacuuuugga

SEQ ID NO: 2620571 - RNA, 19 nt, Artificial Sequence
  Description of Artificial Sequence: Synthetic oligonucleotide
aucacuuuuguauuuaucu

SEQ ID NO: 2620572 - RNA, 19 nt, Artificial Sequence
  Description of Artificial Sequence: Synthetic oligonucleotide
gauucuuugcaaaggaucg

SEQ ID NO: 2620573 - RNA, 19 nt, Artificial Sequence
  Description of Artificial Sequence: Synthetic oligonucleotide
gauuauuccagauauuguc

SEQ ID NO: 2620574 - RNA, 19 nt, Artificial Sequence
  Description of Artificial Sequence: Synthetic oligonucleotide
uguauuuaucuucugcuca

SEQ ID NO: 2620575 - RNA, 19 nt, Artificial Sequence
  Description of Artificial Sequence: Synthetic oligonucleotide
uuucaugcaguacauaaac

SEQ ID NO: 2620576 - RNA, 19 nt, Artificial Sequence
  Description of Artificial Sequence: Synthetic oligonucleotide
auuucuuaauccuugagaa

SEQ ID NO: 2620577 - RNA, 19 nt, Artificial Sequence
  Description of Artificial Sequence: Synthetic oligonucleotide
aauggugccaccccuuuuc

SEQ ID NO: 2620578 - RNA, 19 nt, Artificial Sequence
  Description of Artificial Sequence: Synthetic oligonucleotide
cauuguaaacuuuuggaag

SEQ ID NO: 2620579 - RNA, 19 nt, Artificial Sequence
  Description of Artificial Sequence: Synthetic oligonucleotide
uuuuagauuucuuaauccu

SEQ ID NO: 2620580 - RNA, 19 nt, Artificial Sequence
  Description of Artificial Sequence: Synthetic oligonucleotide
aaacaaccaauggucaugc

SEQ ID NO: 2620581 - RNA, 19 nt, Artificial Sequence
  Description of Artificial Sequence: Synthetic oligonucleotide
ugagcucugacuuagaaua

SEQ ID NO: 2620582 - RNA, 19 nt, Artificial Sequence
  Description of Artificial Sequence: Synthetic oligonucleotide
uacucaaguucucagaaca

SEQ ID NO: 2620583 - RNA, 19 nt, Artificial Sequence
  Description of Artificial Sequence: Synthetic oligonucleotide
uucaccuuuacucaaguuc

SEQ ID NO: 2620584 - RNA, 19 nt, Artificial Sequence
  Description of Artificial Sequence: Synthetic oligonucleotide
uuaaguucaccuuuacuca

SEQ ID NO: 2620585 - RNA, 19 nt, Artificial Sequence
  Description of Artificial Sequence: Synthetic oligonucleotide
caaucaauauuaaacauca

SEQ ID NO: 2620586 - RNA, 19 nt, Artificial Sequence
  Description of Artificial Sequence: Synthetic oligonucleotide
aagugcuguuaccaggagc

SEQ ID NO: 2620587 - RNA, 19 nt, Artificial Sequence
  Description of Artificial Sequence: Synthetic oligonucleotide
auuuccuuuaaguucaccu

SEQ ID NO: 2620588 - RNA, 19 nt, Artificial Sequence
  Description of Artificial Sequence: Synthetic oligonucleotide
auuguaaacuuuuggaagu

SEQ ID NO: 2620589 - RNA, 19 nt, Artificial Sequence
  Description of Artificial Sequence: Synthetic oligonucleotide
caaucaaguguuuucauug

SEQ ID NO: 2620590 - RNA, 19 nt, Artificial Sequence
  Description of Artificial Sequence: Synthetic oligonucleotide
uuaauccuugagaaggugc

SEQ ID NO: 2620591 - RNA, 19 nt, Artificial Sequence
  Description of Artificial Sequence: Synthetic oligonucleotide
uuagaauagaauguuuccc

SEQ ID NO: 2620592 - RNA, 19 nt, Artificial Sequence
  Description of Artificial Sequence: Synthetic oligonucleotide
uuuacucaaguucucagaa

SEQ ID NO: 2620593 - RNA, 19 nt, Artificial Sequence
  Description of Artificial Sequence: Synthetic oligonucleotide
aaggcuaagaaucugcaua

SEQ ID NO: 2620594 - RNA, 19 nt, Artificial Sequence
  Description of Artificial Sequence: Synthetic oligonucleotide
accauauuuauggugggcc

SEQ ID NO: 2620595 - RNA, 19 nt, Artificial Sequence
  Description of Artificial Sequence: Synthetic oligonucleotide
gauuucuuaauccuugaga

SEQ ID NO: 2620596 - RNA, 19 nt, Artificial Sequence
  Description of Artificial Sequence: Synthetic oligonucleotide
aaccccaguuuauagaaug

SEQ ID NO: 2620597 - RNA, 19 nt, Artificial Sequence
  Description of Artificial Sequence: Synthetic oligonucleotide
acaaucaauauuaaacauc

SEQ ID NO: 2620598 - RNA, 19 nt, Artificial Sequence
  Description of Artificial Sequence: Synthetic oligonucleotide
ucuuucacaggcaugacua

SEQ ID NO: 2620599 - RNA, 19 nt, Artificial Sequence
  Description of Artificial Sequence: Synthetic oligonucleotide
cauauuuccuuuaaguuca

SEQ ID NO: 2620600 - RNA, 19 nt, Artificial Sequence
  Description of Artificial Sequence: Synthetic oligonucleotide
ucauuguaaacuuuuggaa

SEQ ID NO: 2620601 - RNA, 19 nt, Artificial Sequence
  Description of Artificial Sequence: Synthetic oligonucleotide
ugugucacagccugaaugc

SEQ ID NO: 2620602 - RNA, 19 nt, Artificial Sequence
  Description of Artificial Sequence: Synthetic oligonucleotide
uagaauagaauguuucccu

SEQ ID NO: 2620603 - RNA, 19 nt, Artificial Sequence
  Description of Artificial Sequence: Synthetic oligonucleotide
uaaucuuucacaggcauga

SEQ ID NO: 2620604 - RNA, 19 nt, Artificial Sequence
  Description of Artificial Sequence: Synthetic oligonucleotide
acuuagaauagaauguuuc

SEQ ID NO: 2620605 - RNA, 19 nt, Artificial Sequence
  Description of Artificial Sequence: Synthetic oligonucleotide
augacuagaggccugucuc

SEQ ID NO: 2620606 - RNA, 19 nt, Artificial Sequence
  Description of Artificial Sequence: Synthetic oligonucleotide
aaaacaaccaauggucaug

SEQ ID NO: 2620607 - RNA, 19 nt, Artificial Sequence
  Description of Artificial Sequence: Synthetic oligonucleotide
aaguugacaaucaauauua

SEQ ID NO: 2620608 - RNA, 19 nt, Artificial Sequence
  Description of Artificial Sequence: Synthetic oligonucleotide
aucaagauaaucaaugaga

SEQ ID NO: 2620609 - RNA, 19 nt, Artificial Sequence
  Description of Artificial Sequence: Synthetic oligonucleotide
ugaaugcacuccuacuugg

SEQ ID NO: 2620610 - RNA, 19 nt, Artificial Sequence
  Description of Artificial Sequence: Synthetic oligonucleotide
uucacaggcaugacuagag

SEQ ID NO: 2620611 - RNA, 19 nt, Artificial Sequence
  Description of Artificial Sequence: Synthetic oligonucleotide
uauagaauggugccacccc

SEQ ID NO: 2620612 - RNA, 19 nt, Artificial Sequence
  Description of Artificial Sequence: Synthetic oligonucleotide
uacauaaacccagaccagg

SEQ ID NO: 2620613 - RNA, 19 nt, Artificial Sequence
  Description of Artificial Sequence: Synthetic oligonucleotide
aaccagauucuuugcaaag

SEQ ID NO: 2620614 - RNA, 19 nt, Artificial Sequence
  Description of Artificial Sequence: Synthetic oligonucleotide
uaauccuugagaaggugca

SEQ ID NO: 2620615 - RNA, 19 nt, Artificial Sequence
  Description of Artificial Sequence: Synthetic oligonucleotide
uuuauggugggccuuccca

SEQ ID NO: 2620616 - RNA, 19 nt, Artificial Sequence
  Description of Artificial Sequence: Synthetic oligonucleotide
acauugucaaguggcaucc

SEQ ID NO: 2620617 - RNA, 19 nt, Artificial Sequence
  Description of Artificial Sequence: Synthetic oligonucleotide
agauucuuugcaaaggauc

SEQ ID NO: 2620618 - RNA, 19 nt, Artificial Sequence
  Description of Artificial Sequence: Synthetic oligonucleotide
aaucaaguguuuucauugu

SEQ ID NO: 2620619 - RNA, 19 nt, Artificial Sequence
  Description of Artificial Sequence: Synthetic oligonucleotide
augaaaccagauucuuugc

SEQ ID NO: 2620620 - RNA, 19 nt, Artificial Sequence
  Description of Artificial Sequence: Synthetic oligonucleotide
caguuuauagaauggugcc

SEQ ID NO: 2620621 - RNA, 19 nt, Artificial Sequence
  Description of Artificial Sequence: Synthetic oligonucleotide
ugaaaccagauucuuugca

SEQ ID NO: 2620622 - RNA, 19 nt, Artificial Sequence
  Description of Artificial Sequence: Synthetic oligonucleotide
ucaaguguuuucauuguaa

SEQ ID NO: 2620623 - RNA, 19 nt, Artificial Sequence
  Description of Artificial Sequence: Synthetic oligonucleotide
uggucucuagcccaguucc

SEQ ID NO: 2620624 - RNA, 19 nt, Artificial Sequence
  Description of Artificial Sequence: Synthetic oligonucleotide
ucuaccuuucuccuuuuca

SEQ ID NO: 2620625 - RNA, 19 nt, Artificial Sequence
  Description of Artificial Sequence: Synthetic oligonucleotide
auugucaaguggcauccac

SEQ ID NO: 2620626 - RNA, 19 nt, Artificial Sequence
  Description of Artificial Sequence: Synthetic oligonucleotide
uuuagauuucuuaauccuu

SEQ ID NO: 2620627 - RNA, 19 nt, Artificial Sequence
  Description of Artificial Sequence: Synthetic oligonucleotide
uuucuuaauccuugagaag

SEQ ID NO: 2620628 - RNA, 19 nt, Artificial Sequence
  Description of Artificial Sequence: Synthetic oligonucleotide
cagauuauuccagauauug

SEQ ID NO: 2620629 - RNA, 19 nt, Artificial Sequence
  Description of Artificial Sequence: Synthetic oligonucleotide
uccagauauugucaaguug

SEQ ID NO: 2620630 - RNA, 19 nt, Artificial Sequence
  Description of Artificial Sequence: Synthetic oligonucleotide
ucagcauauuuccuuuaag

SEQ ID NO: 2620631 - RNA, 19 nt, Artificial Sequence
  Description of Artificial Sequence: Synthetic oligonucleotide
uucaugcaguacauaaacc

SEQ ID NO: 2620632 - RNA, 19 nt, Artificial Sequence
  Description of Artificial Sequence: Synthetic oligonucleotide
aaggaucgcacaaaugguc

SEQ ID NO: 2620633 - RNA, 19 nt, Artificial Sequence
  Description of Artificial Sequence: Synthetic oligonucleotide
aaugaugcgaccauauuua

SEQ ID NO: 2620634 - RNA, 19 nt, Artificial Sequence
  Description of Artificial Sequence: Synthetic oligonucleotide
aaaucagcauauuuccuuu

SEQ ID NO: 2620635 - RNA, 19 nt, Artificial Sequence
  Description of Artificial Sequence: Synthetic oligonucleotide
uaucuucugcucaaucaag

SEQ ID NO: 2620636 - RNA, 19 nt, Artificial Sequence
  Description of Artificial Sequence: Synthetic oligonucleotide
aaucacuuuuguauuuauc

SEQ ID NO: 2620637 - RNA, 19 nt, Artificial Sequence
  Description of Artificial Sequence: Synthetic oligonucleotide
uuuucaugcaguacauaaa

SEQ ID NO: 2620638 - RNA, 19 nt, Artificial Sequence
  Description of Artificial Sequence: Synthetic oligonucleotide
cuaagaaucugcauaaucu

SEQ ID NO: 2620639 - RNA, 19 nt, Artificial Sequence
  Description of Artificial Sequence: Synthetic oligonucleotide
caguacauaaacccagacc

SEQ ID NO: 2620640 - RNA, 19 nt, Artificial Sequence
  Description of Artificial Sequence: Synthetic oligonucleotide
ucuuugaugcucagugagc

SEQ ID NO: 2620641 - RNA, 19 nt, Artificial Sequence
  Description of Artificial Sequence: Synthetic oligonucleotide
uuauagaauggugccaccc

SEQ ID NO: 2620642 - RNA, 19 nt, Artificial Sequence
  Description of Artificial Sequence: Synthetic oligonucleotide
aaaccagauucuuugcaaa

SEQ ID NO: 2620643 - RNA, 19 nt, Artificial Sequence
  Description of Artificial Sequence: Synthetic oligonucleotide
agauaaucaaugagacacc

SEQ ID NO: 2620644 - RNA, 19 nt, Artificial Sequence
  Description of Artificial Sequence: Synthetic oligonucleotide
uaacuagccaaaucaagau

SEQ ID NO: 2620645 - RNA, 19 nt, Artificial Sequence
  Description of Artificial Sequence: Synthetic oligonucleotide
agauuucuuaauccuugag

SEQ ID NO: 2620646 - RNA, 19 nt, Artificial Sequence
  Description of Artificial Sequence: Synthetic oligonucleotide
uucugcucaaucaaguguu

SEQ ID NO: 2620647 - RNA, 19 nt, Artificial Sequence
  Description of Artificial Sequence: Synthetic oligonucleotide
ucacauagggcuuuucauc

SEQ ID NO: 2620648 - RNA, 19 nt, Artificial Sequence
  Description of Artificial Sequence: Synthetic oligonucleotide
aaucaauauuaaacaucac

SEQ ID NO: 2620649 - RNA, 19 nt, Artificial Sequence
  Description of Artificial Sequence: Synthetic oligonucleotide
ucaaguugacaaucaauau

SEQ ID NO: 2620650 - RNA, 19 nt, Artificial Sequence
  Description of Artificial Sequence: Synthetic oligonucleotide
uuuaaucacuuuuguauuu

SEQ ID NO: 2620651 - RNA, 19 nt, Artificial Sequence
  Description of Artificial Sequence: Synthetic oligonucleotide
ugucaaguugacaaucaau

SEQ ID NO: 2620652 - RNA, 19 nt, Artificial Sequence
  Description of Artificial Sequence: Synthetic oligonucleotide
auuucuucauccaacaaau

SEQ ID NO: 2620653 - RNA, 19 nt, Artificial Sequence
  Description of Artificial Sequence: Synthetic oligonucleotide
cacagguaaaugaaaccag

SEQ ID NO: 2620654 - RNA, 19 nt, Artificial Sequence
  Description of Artificial Sequence: Synthetic oligonucleotide
guucucagaacacagguaa

SEQ ID NO: 2620655 - RNA, 19 nt, Artificial Sequence
  Description of Artificial Sequence: Synthetic oligonucleotide
caaguucucagaacacagg

SEQ ID NO: 2620656 - RNA, 19 nt, Artificial Sequence
  Description of Artificial Sequence: Synthetic oligonucleotide
ucuuaauccuugagaaggu

SEQ ID NO: 2620657 - RNA, 19 nt, Artificial Sequence
  Description of Artificial Sequence: Synthetic oligonucleotide
ugaucuaccuuucuccuuu

SEQ ID NO: 2620658 - RNA, 19 nt, Artificial Sequence
  Description of Artificial Sequence: Synthetic oligonucleotide
gacauugucaaguggcauc

SEQ ID NO: 2620659 - RNA, 19 nt, Artificial Sequence
  Description of Artificial Sequence: Synthetic oligonucleotide
auggucaugcuugaucuac

SEQ ID NO: 2620660 - RNA, 19 nt, Artificial Sequence
  Description of Artificial Sequence: Synthetic oligonucleotide
gcauccacaaagaaaauag

SEQ ID NO: 2620661 - RNA, 19 nt, Artificial Sequence
  Description of Artificial Sequence: Synthetic oligonucleotide
agugcuguuaccaggagcu

SEQ ID NO: 2620662 - RNA, 19 nt, Artificial Sequence
  Description of Artificial Sequence: Synthetic oligonucleotide
ugucaaguggcauccacaa

SEQ ID NO: 2620663 - RNA, 19 nt, Artificial Sequence
  Description of Artificial Sequence: Synthetic oligonucleotide
ucacaggcaugacuagagg

SEQ ID NO: 2620664 - RNA, 19 nt, Artificial Sequence
  Description of Artificial Sequence: Synthetic oligonucleotide
cacaaauggucucuagccc

SEQ ID NO: 2620665 - RNA, 19 nt, Artificial Sequence
  Description of Artificial Sequence: Synthetic oligonucleotide
auaaacccagaccagggaa

SEQ ID NO: 2620666 - RNA, 19 nt, Artificial Sequence
  Description of Artificial Sequence: Synthetic oligonucleotide
aaaggcuaagaaucugcau

SEQ ID NO: 2620667 - RNA, 19 nt, Artificial Sequence
  Description of Artificial Sequence: Synthetic oligonucleotide
ugcgaccauauuuauggug

SEQ ID NO: 2620668 - RNA, 19 nt, Artificial Sequence
  Description of Artificial Sequence: Synthetic oligonucleotide
aacuagccaaaucaagaua

SEQ ID NO: 2620669 - RNA, 19 nt, Artificial Sequence
  Description of Artificial Sequence: Synthetic oligonucleotide
uaugacuucuuugaugcuc

SEQ ID NO: 2620670 - RNA, 19 nt, Artificial Sequence
  Description of Artificial Sequence: Synthetic oligonucleotide
ccugacauugucaaguggc

SEQ ID NO: 2620671 - RNA, 19 nt, Artificial Sequence
  Description of Artificial Sequence: Synthetic oligonucleotide
aaugcacuccuacuuggaa

SEQ ID NO: 2620672 - RNA, 19 nt, Artificial Sequence
  Description of Artificial Sequence: Synthetic oligonucleotide
uauugucaaguugacaauc

SEQ ID NO: 2620673 - RNA, 19 nt, Artificial Sequence
  Description of Artificial Sequence: Synthetic oligonucleotide
auucuuugcaaaggaucgc

SEQ ID NO: 2620674 - RNA, 19 nt, Artificial Sequence
  Description of Artificial Sequence: Synthetic oligonucleotide
uuuauagaauggugccacc

SEQ ID NO: 2620675 - RNA, 19 nt, Artificial Sequence
  Description of Artificial Sequence: Synthetic oligonucleotide
uugucaaguggcauccaca

SEQ ID NO: 2620676 - RNA, 19 nt, Artificial Sequence
  Description of Artificial Sequence: Synthetic oligonucleotide
cuacuuggaaauuucuuca

SEQ ID NO: 2620677 - RNA, 19 nt, Artificial Sequence
  Description of Artificial Sequence: Synthetic oligonucleotide
cugugucacagccugaaug

SEQ ID NO: 2620678 - RNA, 19 nt, Artificial Sequence
  Description of Artificial Sequence: Synthetic oligonucleotide
uuuuggaagugcuguuacc

SEQ ID NO: 2620679 - RNA, 19 nt, Artificial Sequence
  Description of Artificial Sequence: Synthetic oligonucleotide
gcauauuuccuuuaaguuc

SEQ ID NO: 2620680 - RNA, 19 nt, Artificial Sequence
  Description of Artificial Sequence: Synthetic oligonucleotide
uccugacauugucaagugg

SEQ ID NO: 2620681 - RNA, 19 nt, Artificial Sequence
  Description of Artificial Sequence: Synthetic oligonucleotide
ugaugcgaccauauuuaug

SEQ ID NO: 2620682 - RNA, 19 nt, Artificial Sequence
  Description of Artificial Sequence: Synthetic oligonucleotide
aaaggaucgcacaaauggu

SEQ ID NO: 2620683 - RNA, 19 nt, Artificial Sequence
  Description of Artificial Sequence: Synthetic oligonucleotide
uguaaacuuuuggaagugc

SEQ ID NO: 2620684 - RNA, 19 nt, Artificial Sequence
  Description of Artificial Sequence: Synthetic oligonucleotide
ucaaucaaguguuuucauu

SEQ ID NO: 2620685 - RNA, 19 nt, Artificial Sequence
  Description of Artificial Sequence: Synthetic oligonucleotide
cuuuuggaagugcuguuac

SEQ ID NO: 2620686 - RNA, 19 nt, Artificial Sequence
  Description of Artificial Sequence: Synthetic oligonucleotide
uuccuuuaaguucaccuuu

SEQ ID NO: 2620687 - RNA, 19 nt, Artificial Sequence
  Description of Artificial Sequence: Synthetic oligonucleotide
cuucccacuuuaacuagcc

SEQ ID NO: 2620688 - RNA, 19 nt, Artificial Sequence
  Description of Artificial Sequence: Synthetic oligonucleotide
uaaacaucacauagggcuu

SEQ ID NO: 2620689 - RNA, 19 nt, Artificial Sequence
  Description of Artificial Sequence: Synthetic oligonucleotide
agccugaaugcacuccuac

SEQ ID NO: 2620690 - RNA, 19 nt, Artificial Sequence
  Description of Artificial Sequence: Synthetic oligonucleotide
accagauucuuugcaaagg

SEQ ID NO: 2620691 - RNA, 19 nt, Artificial Sequence
  Description of Artificial Sequence: Synthetic oligonucleotide
guggcauccacaaagaaaa

SEQ ID NO: 2620692 - RNA, 19 nt, Artificial Sequence
  Description of Artificial Sequence: Synthetic oligonucleotide
auauuuauggugggccuuc

SEQ ID NO: 2620693 - RNA, 19 nt, Artificial Sequence
  Description of Artificial Sequence: Synthetic oligonucleotide
acauaaacccagaccaggg

SEQ ID NO: 2620694 - RNA, 19 nt, Artificial Sequence
  Description of Artificial Sequence: Synthetic oligonucleotide
auagaauggugccaccccu

SEQ ID NO: 2620695 - RNA, 19 nt, Artificial Sequence
  Description of Artificial Sequence: Synthetic oligonucleotide
uucuuugcaaaggaucgca

SEQ ID NO: 2620696 - RNA, 19 nt, Artificial Sequence
  Description of Artificial Sequence: Synthetic oligonucleotide
guuaccaggagcuguguca

SEQ ID NO: 2620697 - RNA, 19 nt, Artificial Sequence
  Description of Artificial Sequence: Synthetic oligonucleotide
aucacauagggcuuuucau

SEQ ID NO: 2620698 - RNA, 19 nt, Artificial Sequence
  Description of Artificial Sequence: Synthetic oligonucleotide
uaaguucaccuuuacucaa

SEQ ID NO: 2620699 - RNA, 19 nt, Artificial Sequence
  Description of Artificial Sequence: Synthetic oligonucleotide
acaaccaauggucaugcuu

SEQ ID NO: 2620700 - RNA, 19 nt, Artificial Sequence
  Description of Artificial Sequence: Synthetic oligonucleotide
ugcaguacauaaacccaga

SEQ ID NO: 2620701 - RNA, 19 nt, Artificial Sequence
  Description of Artificial Sequence: Synthetic oligonucleotide
ugcacuccuacuuggaaau

SEQ ID NO: 2620702 - RNA, 19 nt, Artificial Sequence
  Description of Artificial Sequence: Synthetic oligonucleotide
ucaucuguaugacuucuuu

SEQ ID NO: 2620703 - RNA, 19 nt, Artificial Sequence
  Description of Artificial Sequence: Synthetic oligonucleotide
agguaaaugaaaccagauu

SEQ ID NO: 2620704 - RNA, 19 nt, Artificial Sequence
  Description of Artificial Sequence: Synthetic oligonucleotide
caucuguaugacuucuuug

SEQ ID NO: 2620705 - RNA, 19 nt, Artificial Sequence
  Description of Artificial Sequence: Synthetic oligonucleotide
gaaucugcauaaucuuuca

SEQ ID NO: 2620706 - RNA, 19 nt, Artificial Sequence
  Description of Artificial Sequence: Synthetic oligonucleotide
uuauggugggccuucccac

SEQ ID NO: 2620707 - RNA, 19 nt, Artificial Sequence
  Description of Artificial Sequence: Synthetic oligonucleotide
aaucuuucacaggcaugac

SEQ ID NO: 2620708 - RNA, 19 nt, Artificial Sequence
  Description of Artificial Sequence: Synthetic oligonucleotide
gucaaguugacaaucaaua

SEQ ID NO: 2620709 - RNA, 19 nt, Artificial Sequence
  Description of Artificial Sequence: Synthetic oligonucleotide
auggucucuagcccaguuc

SEQ ID NO: 2620710 - RNA, 19 nt, Artificial Sequence
  Description of Artificial Sequence: Synthetic oligonucleotide
uuacucaaguucucagaac

SEQ ID NO: 2620711 - RNA, 19 nt, Artificial Sequence
  Description of Artificial Sequence: Synthetic oligonucleotide
gcgaccauauuuauggugg

SEQ ID NO: 2620712 - RNA, 19 nt, Artificial Sequence
  Description of Artificial Sequence: Synthetic oligonucleotide
cauccaacaaaucagcaua

SEQ ID NO: 2620713 - RNA, 19 nt, Artificial Sequence
  Description of Artificial Sequence: Synthetic oligonucleotide
uaccuuucuccuuuucaug

SEQ ID NO: 2620714 - RNA, 19 nt, Artificial Sequence
  Description of Artificial Sequence: Synthetic oligonucleotide
aucuuucacaggcaugacu

SEQ ID NO: 2620715 - RNA, 19 nt, Artificial Sequence
  Description of Artificial Sequence: Synthetic oligonucleotide
agaaaacaaccaaugguca

SEQ ID NO: 2620716 - RNA, 19 nt, Artificial Sequence
  Description of Artificial Sequence: Synthetic oligonucleotide
aggccugucucccagauua

SEQ ID NO: 2620717 - RNA, 19 nt, Artificial Sequence
  Description of Artificial Sequence: Synthetic oligonucleotide
ccagauauugucaaguuga

SEQ ID NO: 2620718 - RNA, 19 nt, Artificial Sequence
  Description of Artificial Sequence: Synthetic oligonucleotide
uuucaucuguaugacuucu

SEQ ID NO: 2620719 - RNA, 19 nt, Artificial Sequence
  Description of Artificial Sequence: Synthetic oligonucleotide
aggcuaagaaucugcauaa

SEQ ID NO: 2620720 - RNA, 19 nt, Artificial Sequence
  Description of Artificial Sequence: Synthetic oligonucleotide
ugacuagaggccugucucc

SEQ ID NO: 2620721 - RNA, 19 nt, Artificial Sequence
  Description of Artificial Sequence: Synthetic oligonucleotide
cugcauaaucuuucacagg

SEQ ID NO: 2620722 - RNA, 19 nt, Artificial Sequence
  Description of Artificial Sequence: Synthetic oligonucleotide
cugaaugcacuccuacuug

SEQ ID NO: 2620723 - RNA, 19 nt, Artificial Sequence
  Description of Artificial Sequence: Synthetic oligonucleotide
agaauagaauguuucccua

SEQ ID NO: 2620724 - RNA, 19 nt, Artificial Sequence
  Description of Artificial Sequence: Synthetic oligonucleotide
auauugucaaguugacaau

SEQ ID NO: 2620725 - RNA, 19 nt, Artificial Sequence
  Description of Artificial Sequence: Synthetic oligonucleotide
gaaugaugcgaccauauuu

SEQ ID NO: 2620726 - RNA, 19 nt, Artificial Sequence
  Description of Artificial Sequence: Synthetic oligonucleotide
guugacaaucaauauuaaa

SEQ ID NO: 2620727 - RNA, 19 nt, Artificial Sequence
  Description of Artificial Sequence: Synthetic oligonucleotide
cuuuacucaaguucucaga

SEQ ID NO: 2620728 - RNA, 19 nt, Artificial Sequence
  Description of Artificial Sequence: Synthetic oligonucleotide
aaacccagaccagggaaug

SEQ ID NO: 2620729 - RNA, 19 nt, Artificial Sequence
  Description of Artificial Sequence: Synthetic oligonucleotide
uugucaaguugacaaucaa

SEQ ID NO: 2620730 - RNA, 19 nt, Artificial Sequence
  Description of Artificial Sequence: Synthetic oligonucleotide
ccuacuuggaaauuucuuc

SEQ ID NO: 2620731 - RNA, 19 nt, Artificial Sequence
  Description of Artificial Sequence: Synthetic oligonucleotide
ucucccagauuauuccaga

SEQ ID NO: 2620732 - RNA, 19 nt, Artificial Sequence
  Description of Artificial Sequence: Synthetic oligonucleotide
uccuacuuggaaauuucuu

SEQ ID NO: 2620733 - RNA, 19 nt, Artificial Sequence
  Description of Artificial Sequence: Synthetic oligonucleotide
aaaugaaaccagauucuuu

SEQ ID NO: 2620734 - RNA, 19 nt, Artificial Sequence
  Description of Artificial Sequence: Synthetic oligonucleotide
uuccugacauugucaagug

SEQ ID NO: 2620735 - RNA, 19 nt, Artificial Sequence
  Description of Artificial Sequence: Synthetic oligonucleotide
aaguucaccuuuacucaag

SEQ ID NO: 2620736 - RNA, 19 nt, Artificial Sequence
  Description of Artificial Sequence: Synthetic oligonucleotide
uaaucacuuuuguauuuau

SEQ ID NO: 2620737 - RNA, 19 nt, Artificial Sequence
  Description of Artificial Sequence: Synthetic oligonucleotide
augcaguacauaaacccag

SEQ ID NO: 2620738 - RNA, 19 nt, Artificial Sequence
  Description of Artificial Sequence: Synthetic oligonucleotide
accagggaaugaugcgacc

SEQ ID NO: 2620739 - RNA, 19 nt, Artificial Sequence
  Description of Artificial Sequence: Synthetic oligonucleotide
cagaccagggaaugaugcg

SEQ ID NO: 2620740 - RNA, 19 nt, Artificial Sequence
  Description of Artificial Sequence: Synthetic oligonucleotide
aguucaccuuuacucaagu

SEQ ID NO: 2620741 - RNA, 19 nt, Artificial Sequence
  Description of Artificial Sequence: Synthetic oligonucleotide
uggucaugcuugaucuacc

SEQ ID NO: 2620742 - RNA, 19 nt, Artificial Sequence
  Description of Artificial Sequence: Synthetic oligonucleotide
cagauauugucaaguugac

SEQ ID NO: 2620743 - RNA, 19 nt, Artificial Sequence
  Description of Artificial Sequence: Synthetic oligonucleotide
ggagcugugucacagccug

SEQ ID NO: 2620744 - RNA, 19 nt, Artificial Sequence
  Description of Artificial Sequence: Synthetic oligonucleotide
uuucacaggcaugacuaga

SEQ ID NO: 2620745 - RNA, 19 nt, Artificial Sequence
  Description of Artificial Sequence: Synthetic oligonucleotide
uccuuuaaguucaccuuua

SEQ ID NO: 2620746 - RNA, 19 nt, Artificial Sequence
  Description of Artificial Sequence: Synthetic oligonucleotide
aucagcauauuuccuuuaa

SEQ ID NO: 2620747 - RNA, 19 nt, Artificial Sequence
  Description of Artificial Sequence: Synthetic oligonucleotide
aaccaauggucaugcuuga

SEQ ID NO: 2620748 - RNA, 19 nt, Artificial Sequence
  Description of Artificial Sequence: Synthetic oligonucleotide
cuuucacaggcaugacuag

SEQ ID NO: 2620749 - RNA, 19 nt, Artificial Sequence
  Description of Artificial Sequence: Synthetic oligonucleotide
ccaaaggcuaagaaucugc

SEQ ID NO: 2620750 - RNA, 19 nt, Artificial Sequence
  Description of Artificial Sequence: Synthetic oligonucleotide
guauuuaucuucugcucaa

SEQ ID NO: 2620751 - RNA, 19 nt, Artificial Sequence
  Description of Artificial Sequence: Synthetic oligonucleotide
agauuauuccagauauugu

SEQ ID NO: 2620752 - RNA, 19 nt, Artificial Sequence
  Description of Artificial Sequence: Synthetic oligonucleotide
acuccuacuuggaaauuuc

SEQ ID NO: 2620753 - RNA, 19 nt, Artificial Sequence
  Description of Artificial Sequence: Synthetic oligonucleotide
aauggucucuagcccaguu

SEQ ID NO: 2620754 - RNA, 19 nt, Artificial Sequence
  Description of Artificial Sequence: Synthetic oligonucleotide
ucccagauuauuccagaua

SEQ ID NO: 2620755 - RNA, 19 nt, Artificial Sequence
  Description of Artificial Sequence: Synthetic oligonucleotide
aguccagaaccccaguuua

SEQ ID NO: 2620756 - RNA, 19 nt, Artificial Sequence
  Description of Artificial Sequence: Synthetic oligonucleotide
aguuccugacauugucaag

SEQ ID NO: 2620757 - RNA, 19 nt, Artificial Sequence
  Description of Artificial Sequence: Synthetic oligonucleotide
cacuuuaacuagccaaauc

SEQ ID NO: 2620758 - RNA, 19 nt, Artificial Sequence
  Description of Artificial Sequence: Synthetic oligonucleotide
uuaccaggagcugugucac

SEQ ID NO: 2620759 - RNA, 19 nt, Artificial Sequence
  Description of Artificial Sequence: Synthetic oligonucleotide
ugggccuucccacuuuaac

SEQ ID NO: 2620760 - RNA, 19 nt, Artificial Sequence
  Description of Artificial Sequence: Synthetic oligonucleotide
caaaggcuaagaaucugca

SEQ ID NO: 2620761 - RNA, 19 nt, Artificial Sequence
  Description of Artificial Sequence: Synthetic oligonucleotide
uagccaaaucaagauaauc

SEQ ID NO: 2620762 - RNA, 19 nt, Artificial Sequence
  Description of Artificial Sequence: Synthetic oligonucleotide
uguuaccaggagcuguguc

SEQ ID NO: 2620763 - RNA, 19 nt, Artificial Sequence
  Description of Artificial Sequence: Synthetic oligonucleotide
gcuaagaaucugcauaauc

SEQ ID NO: 2620764 - RNA, 19 nt, Artificial Sequence
  Description of Artificial Sequence: Synthetic oligonucleotide
ucuagcccaguuccugaca

SEQ ID NO: 2620765 - RNA, 19 nt, Artificial Sequence
  Description of Artificial Sequence: Synthetic oligonucleotide
caauggucaugcuugaucu

SEQ ID NO: 2620766 - RNA, 19 nt, Artificial Sequence
  Description of Artificial Sequence: Synthetic oligonucleotide
auaaucuuucacaggcaug

SEQ ID NO: 2620767 - RNA, 19 nt, Artificial Sequence
  Description of Artificial Sequence: Synthetic oligonucleotide
gaagugcuguuaccaggag

SEQ ID NO: 2620768 - RNA, 19 nt, Artificial Sequence
  Description of Artificial Sequence: Synthetic oligonucleotide
cuuaauccuugagaaggug

SEQ ID NO: 2620769 - RNA, 19 nt, Artificial Sequence
  Description of Artificial Sequence: Synthetic oligonucleotide
uucucagaacacagguaaa

SEQ ID NO: 2620770 - RNA, 19 nt, Artificial Sequence
  Description of Artificial Sequence: Synthetic oligonucleotide
aguggcauccacaaagaaa

SEQ ID NO: 2620771 - RNA, 19 nt, Artificial Sequence
  Description of Artificial Sequence: Synthetic oligonucleotide
uauuuccuuuaaguucacc

SEQ ID NO: 2620772 - RNA, 19 nt, Artificial Sequence
  Description of Artificial Sequence: Synthetic oligonucleotide
cuagaggccugucucccag

SEQ ID NO: 2620773 - RNA, 19 nt, Artificial Sequence
  Description of Artificial Sequence: Synthetic oligonucleotide
guaaaugaaaccagauucu

SEQ ID NO: 2620774 - RNA, 19 nt, Artificial Sequence
  Description of Artificial Sequence: Synthetic oligonucleotide
caucacauagggcuuuuca

SEQ ID NO: 2620775 - RNA, 19 nt, Artificial Sequence
  Description of Artificial Sequence: Synthetic oligonucleotide
augcacuccuacuuggaaa

SEQ ID NO: 2620776 - RNA, 19 nt, Artificial Sequence
  Description of Artificial Sequence: Synthetic oligonucleotide
guacauaaacccagaccag

SEQ ID NO: 2620777 - RNA, 19 nt, Artificial Sequence
  Description of Artificial Sequence: Synthetic oligonucleotide
agauauugucaaguugaca

SEQ ID NO: 2620778 - RNA, 19 nt, Artificial Sequence
  Description of Artificial Sequence: Synthetic oligonucleotide
gaccauauuuauggugggc

SEQ ID NO: 2620779 - RNA, 19 nt, Artificial Sequence
  Description of Artificial Sequence: Synthetic oligonucleotide
uauggugggccuucccacu

SEQ ID NO: 2620780 - RNA, 19 nt, Artificial Sequence
  Description of Artificial Sequence: Synthetic oligonucleotide
ggugccaccccuuuucaug

SEQ ID NO: 2620781 - RNA, 19 nt, Artificial Sequence
  Description of Artificial Sequence: Synthetic oligonucleotide
cauccacaaagaaaauaga

SEQ ID NO: 2620782 - RNA, 19 nt, Artificial Sequence
  Description of Artificial Sequence: Synthetic oligonucleotide
aauggucaugcuugaucua

SEQ ID NO: 2620783 - RNA, 19 nt, Artificial Sequence
  Description of Artificial Sequence: Synthetic oligonucleotide
ccagaccagggaaugaugc

SEQ ID NO: 2620784 - RNA, 19 nt, Artificial Sequence
  Description of Artificial Sequence: Synthetic oligonucleotide
aucuaccuuucuccuuuuc

SEQ ID NO: 2620785 - RNA, 19 nt, Artificial Sequence
  Description of Artificial Sequence: Synthetic oligonucleotide
agaccagggaaugaugcga

SEQ ID NO: 2620786 - RNA, 19 nt, Artificial Sequence
  Description of Artificial Sequence: Synthetic oligonucleotide
ugcuguuaccaggagcugu

SEQ ID NO: 2620787 - RNA, 19 nt, Artificial Sequence
  Description of Artificial Sequence: Synthetic oligonucleotide
gugccaccccuuuucaugc

SEQ ID NO: 2620788 - RNA, 19 nt, Artificial Sequence
  Description of Artificial Sequence: Synthetic oligonucleotide
gccaaaucaagauaaucaa

SEQ ID NO: 2620789 - RNA, 19 nt, Artificial Sequence
  Description of Artificial Sequence: Synthetic oligonucleotide
gacuagaggccugucuccc

SEQ ID NO: 2620790 - RNA, 19 nt, Artificial Sequence
  Description of Artificial Sequence: Synthetic oligonucleotide
ugaugcucagugagcucug

SEQ ID NO: 2620791 - RNA, 19 nt, Artificial Sequence
  Description of Artificial Sequence: Synthetic oligonucleotide
aacaaccaauggucaugcu

SEQ ID NO: 2620792 - RNA, 19 nt, Artificial Sequence
  Description of Artificial Sequence: Synthetic oligonucleotide
uuugaugcucagugagcuc

SEQ ID NO: 2620793 - RNA, 19 nt, Artificial Sequence
  Description of Artificial Sequence: Synthetic oligonucleotide
cugacauugucaaguggca

SEQ ID NO: 2620794 - RNA, 19 nt, Artificial Sequence
  Description of Artificial Sequence: Synthetic oligonucleotide
uauuuauggugggccuucc

SEQ ID NO: 2620795 - RNA, 19 nt, Artificial Sequence
  Description of Artificial Sequence: Synthetic oligonucleotide
uccuugagaaggugcaauu

SEQ ID NO: 2620796 - RNA, 19 nt, Artificial Sequence
  Description of Artificial Sequence: Synthetic oligonucleotide
ucgcacaaauggucucuag

SEQ ID NO: 2620797 - RNA, 19 nt, Artificial Sequence
  Description of Artificial Sequence: Synthetic oligonucleotide
ccuuuacucaaguucucag

SEQ ID NO: 2620798 - RNA, 19 nt, Artificial Sequence
  Description of Artificial Sequence: Synthetic oligonucleotide
aggaucgcacaaauggucu

SEQ ID NO: 2620799 - RNA, 19 nt, Artificial Sequence
  Description of Artificial Sequence: Synthetic oligonucleotide
cauaaacccagaccaggga

SEQ ID NO: 2620800 - RNA, 19 nt, Artificial Sequence
  Description of Artificial Sequence: Synthetic oligonucleotide
cacauagggcuuuucaucu

SEQ ID NO: 2620801 - RNA, 19 nt, Artificial Sequence
  Description of Artificial Sequence: Synthetic oligonucleotide
gaauguuucccuacauucu

SEQ ID NO: 2620802 - RNA, 19 nt, Artificial Sequence
  Description of Artificial Sequence: Synthetic oligonucleotide
gagcucugacuuagaauag

SEQ ID NO: 2620803 - RNA, 19 nt, Artificial Sequence
  Description of Artificial Sequence: Synthetic oligonucleotide
cucaaguucucagaacaca

SEQ ID NO: 2620804 - RNA, 19 nt, Artificial Sequence
  Description of Artificial Sequence: Synthetic oligonucleotide
accuuuacucaaguucuca

SEQ ID NO: 2620805 - RNA, 19 nt, Artificial Sequence
  Description of Artificial Sequence: Synthetic oligonucleotide
guaaacuuuuggaagugcu

SEQ ID NO: 2620806 - RNA, 19 nt, Artificial Sequence
  Description of Artificial Sequence: Synthetic oligonucleotide
aauccuugagaaggugcaa

SEQ ID NO: 2620807 - RNA, 19 nt, Artificial Sequence
  Description of Artificial Sequence: Synthetic oligonucleotide
caaaucagcauauuuccuu

SEQ ID NO: 2620808 - RNA, 19 nt, Artificial Sequence
  Description of Artificial Sequence: Synthetic oligonucleotide
ugacauugucaaguggcau

SEQ ID NO: 2620809 - RNA, 19 nt, Artificial Sequence
  Description of Artificial Sequence: Synthetic oligonucleotide
caaguugacaaucaauauu

SEQ ID NO: 2620810 - RNA, 19 nt, Artificial Sequence
  Description of Artificial Sequence: Synthetic oligonucleotide
augaugcgaccauauuuau

SEQ ID NO: 2620811 - RNA, 19 nt, Artificial Sequence
  Description of Artificial Sequence: Synthetic oligonucleotide
gucucccagauuauuccag

SEQ ID NO: 2620812 - RNA, 19 nt, Artificial Sequence
  Description of Artificial Sequence: Synthetic oligonucleotide
uugaucuaccuuucuccuu

SEQ ID NO: 2620813 - RNA, 19 nt, Artificial Sequence
  Description of Artificial Sequence: Synthetic oligonucleotide
uauuuaucuucugcucaau

SEQ ID NO: 2620814 - RNA, 19 nt, Artificial Sequence
  Description of Artificial Sequence: Synthetic oligonucleotide
ucugcucaaucaaguguuu

SEQ ID NO: 2620815 - RNA, 19 nt, Artificial Sequence
  Description of Artificial Sequence: Synthetic oligonucleotide
gaccagggaaugaugcgac

SEQ ID NO: 2620816 - RNA, 19 nt, Artificial Sequence
  Description of Artificial Sequence: Synthetic oligonucleotide
cuugaucuaccuuucuccu

SEQ ID NO: 2620817 - RNA, 19 nt, Artificial Sequence
  Description of Artificial Sequence: Synthetic oligonucleotide
cuucugcucaaucaagugu

SEQ ID NO: 2620818 - RNA, 19 nt, Artificial Sequence
  Description of Artificial Sequence: Synthetic oligonucleotide
caguuccugacauugucaa

SEQ ID NO: 2620819 - RNA, 19 nt, Artificial Sequence
  Description of Artificial Sequence: Synthetic oligonucleotide
agcucugacuuagaauaga

SEQ ID NO: 2620820 - RNA, 19 nt, Artificial Sequence
  Description of Artificial Sequence: Synthetic oligonucleotide
acuuuuggaagugcuguua

SEQ ID NO: 2620821 - RNA, 19 nt, Artificial Sequence
  Description of Artificial Sequence: Synthetic oligonucleotide
uccagaaccccaguuuaua

SEQ ID NO: 2620822 - RNA, 19 nt, Artificial Sequence
  Description of Artificial Sequence: Synthetic oligonucleotide
ccaauggucaugcuugauc

SEQ ID NO: 2620823 - RNA, 19 nt, Artificial Sequence
  Description of Artificial Sequence: Synthetic oligonucleotide
agaauggugccaccccuuu

SEQ ID NO: 2620824 - RNA, 19 nt, Artificial Sequence
  Description of Artificial Sequence: Synthetic oligonucleotide
cucuagcccaguuccugac

SEQ ID NO: 2620825 - RNA, 19 nt, Artificial Sequence
  Description of Artificial Sequence: Synthetic oligonucleotide
cuuugaugcucagugagcu

SEQ ID NO: 2620826 - RNA, 19 nt, Artificial Sequence
  Description of Artificial Sequence: Synthetic oligonucleotide
ucccuacauucuuuacacu

SEQ ID NO: 2620827 - RNA, 19 nt, Artificial Sequence
  Description of Artificial Sequence: Synthetic oligonucleotide
gucucuagcccaguuccug

SEQ ID NO: 2620828 - RNA, 19 nt, Artificial Sequence
  Description of Artificial Sequence: Synthetic oligonucleotide
acuagaggccugucuccca

SEQ ID NO: 2620829 - RNA, 19 nt, Artificial Sequence
  Description of Artificial Sequence: Synthetic oligonucleotide
gaaugcacuccuacuugga

SEQ ID NO: 2620830 - RNA, 19 nt, Artificial Sequence
  Description of Artificial Sequence: Synthetic oligonucleotide
auccuugagaaggugcaau

SEQ ID NO: 2620831 - RNA, 19 nt, Artificial Sequence
  Description of Artificial Sequence: Synthetic oligonucleotide
gcaguacauaaacccagac

SEQ ID NO: 2620832 - RNA, 19 nt, Artificial Sequence
  Description of Artificial Sequence: Synthetic oligonucleotide
gcucaaucaaguguuuuca

SEQ ID NO: 2620833 - RNA, 19 nt, Artificial Sequence
  Description of Artificial Sequence: Synthetic oligonucleotide
aaauggucucuagcccagu

SEQ ID NO: 2620834 - RNA, 19 nt, Artificial Sequence
  Description of Artificial Sequence: Synthetic oligonucleotide
agaggccugucucccagau

SEQ ID NO: 2620835 - RNA, 19 nt, Artificial Sequence
  Description of Artificial Sequence: Synthetic oligonucleotide
augcgaccauauuuauggu

SEQ ID NO: 2620836 - RNA, 19 nt, Artificial Sequence
  Description of Artificial Sequence: Synthetic oligonucleotide
cuaccuuucuccuuuucau

SEQ ID NO: 2620837 - RNA, 19 nt, Artificial Sequence
  Description of Artificial Sequence: Synthetic oligonucleotide
auggugccaccccuuuuca

SEQ ID NO: 2620838 - RNA, 19 nt, Artificial Sequence
  Description of Artificial Sequence: Synthetic oligonucleotide
ggaagugcuguuaccagga

SEQ ID NO: 2620839 - RNA, 19 nt, Artificial Sequence
  Description of Artificial Sequence: Synthetic oligonucleotide
ugccuugcuuuuagauuuc

SEQ ID NO: 2620840 - RNA, 19 nt, Artificial Sequence
  Description of Artificial Sequence: Synthetic oligonucleotide
auccaacaaaucagcauau

SEQ ID NO: 2620841 - RNA, 19 nt, Artificial Sequence
  Description of Artificial Sequence: Synthetic oligonucleotide
aguugacaaucaauauuaa

SEQ ID NO: 2620842 - RNA, 19 nt, Artificial Sequence
  Description of Artificial Sequence: Synthetic oligonucleotide
uccaacaaaucagcauauu

SEQ ID NO: 2620843 - RNA, 19 nt, Artificial Sequence
  Description of Artificial Sequence: Synthetic oligonucleotide
ccagauucuuugcaaagga

SEQ ID NO: 2620844 - RNA, 19 nt, Artificial Sequence
  Description of Artificial Sequence: Synthetic oligonucleotide
aguucucagaacacaggua

SEQ ID NO: 2620845 - RNA, 19 nt, Artificial Sequence
  Description of Artificial Sequence: Synthetic oligonucleotide
cagguaaaugaaaccagau

SEQ ID NO: 2620846 - RNA, 19 nt, Artificial Sequence
  Description of Artificial Sequence: Synthetic oligonucleotide
gcuguuaccaggagcugug

SEQ ID NO: 2620847 - RNA, 19 nt, Artificial Sequence
  Description of Artificial Sequence: Synthetic oligonucleotide
gaucgcacaaauggucucu

SEQ ID NO: 2620848 - RNA, 19 nt, Artificial Sequence
  Description of Artificial Sequence: Synthetic oligonucleotide
ccccuuuucaugcaguaca

SEQ ID NO: 2620849 - RNA, 19 nt, Artificial Sequence
  Description of Artificial Sequence: Synthetic oligonucleotide
ggcuuuucaucuguaugac

SEQ ID NO: 2620850 - RNA, 19 nt, Artificial Sequence
  Description of Artificial Sequence: Synthetic oligonucleotide
caugacuagaggccugucu

SEQ ID NO: 2620851 - RNA, 19 nt, Artificial Sequence
  Description of Artificial Sequence: Synthetic oligonucleotide
gcaaaggaucgcacaaaug

SEQ ID NO: 2620852 - RNA, 19 nt, Artificial Sequence
  Description of Artificial Sequence: Synthetic oligonucleotide
acccagaccagggaaugau

SEQ ID NO: 2620853 - RNA, 19 nt, Artificial Sequence
  Description of Artificial Sequence: Synthetic oligonucleotide
gugagcucugacuuagaau

SEQ ID NO: 2620854 - RNA, 19 nt, Artificial Sequence
  Description of Artificial Sequence: Synthetic oligonucleotide
cccagauuauuccagauau

SEQ ID NO: 2620855 - RNA, 19 nt, Artificial Sequence
  Description of Artificial Sequence: Synthetic oligonucleotide
ggaucgcacaaauggucuc

SEQ ID NO: 2620856 - RNA, 19 nt, Artificial Sequence
  Description of Artificial Sequence: Synthetic oligonucleotide
gacuuagaauagaauguuu

SEQ ID NO: 2620857 - RNA, 19 nt, Artificial Sequence
  Description of Artificial Sequence: Synthetic oligonucleotide
cccacuuuaacuagccaaa

SEQ ID NO: 2620858 - RNA, 19 nt, Artificial Sequence
  Description of Artificial Sequence: Synthetic oligonucleotide
uaccaggagcugugucaca

SEQ ID NO: 2620859 - RNA, 19 nt, Artificial Sequence
  Description of Artificial Sequence: Synthetic oligonucleotide
ugccaccccuuuucaugca

SEQ ID NO: 2620860 - RNA, 19 nt, Artificial Sequence
  Description of Artificial Sequence: Synthetic oligonucleotide
auggugggccuucccacuu

SEQ ID NO: 2620861 - RNA, 19 nt, Artificial Sequence
  Description of Artificial Sequence: Synthetic oligonucleotide
uggugccaccccuuuucau

SEQ ID NO: 2620862 - RNA, 19 nt, Artificial Sequence
  Description of Artificial Sequence: Synthetic oligonucleotide
cccaguuccugacauuguc

SEQ ID NO: 2620863 - RNA, 19 nt, Artificial Sequence
  Description of Artificial Sequence: Synthetic oligonucleotide
ggcauccacaaagaaaaua

SEQ ID NO: 2620864 - RNA, 19 nt, Artificial Sequence
  Description of Artificial Sequence: Synthetic oligonucleotide
gucaaguggcauccacaaa

SEQ ID NO: 2620865 - RNA, 19 nt, Artificial Sequence
  Description of Artificial Sequence: Synthetic oligonucleotide
cucugacuuagaauagaau

SEQ ID NO: 2620866 - RNA, 19 nt, Artificial Sequence
  Description of Artificial Sequence: Synthetic oligonucleotide
cucaaucaaguguuuucau

SEQ ID NO: 2620867 - RNA, 19 nt, Artificial Sequence
  Description of Artificial Sequence: Synthetic oligonucleotide
cuccuacuuggaaauuucu

SEQ ID NO: 2620868 - RNA, 19 nt, Artificial Sequence
  Description of Artificial Sequence: Synthetic oligonucleotide
agggaaugaugcgaccaua

SEQ ID NO: 2620869 - RNA, 19 nt, Artificial Sequence
  Description of Artificial Sequence: Synthetic oligonucleotide
cgaccauauuuaugguggg

SEQ ID NO: 2620870 - RNA, 19 nt, Artificial Sequence
  Description of Artificial Sequence: Synthetic oligonucleotide
cucagugagcucugacuua

SEQ ID NO: 2620871 - RNA, 19 nt, Artificial Sequence
  Description of Artificial Sequence: Synthetic oligonucleotide
gccaccccuuuucaugcag

SEQ ID NO: 2620872 - RNA, 19 nt, Artificial Sequence
  Description of Artificial Sequence: Synthetic oligonucleotide
guaguccagaaccccaguu

SEQ ID NO: 2620873 - RNA, 19 nt, Artificial Sequence
  Description of Artificial Sequence: Synthetic oligonucleotide
cuagcccaguuccugacau

SEQ ID NO: 2620874 - RNA, 19 nt, Artificial Sequence
  Description of Artificial Sequence: Synthetic oligonucleotide
cuagccaaaucaagauaau

SEQ ID NO: 2620875 - RNA, 19 nt, Artificial Sequence
  Description of Artificial Sequence: Synthetic oligonucleotide
gcauaaucuuucacaggca

SEQ ID NO: 2620876 - RNA, 19 nt, Artificial Sequence
  Description of Artificial Sequence: Synthetic oligonucleotide
aggagcugugucacagccu

SEQ ID NO: 2620877 - RNA, 19 nt, Artificial Sequence
  Description of Artificial Sequence: Synthetic oligonucleotide
gcucugacuuagaauagaa

SEQ ID NO: 2620878 - RNA, 19 nt, Artificial Sequence
  Description of Artificial Sequence: Synthetic oligonucleotide
ggucaugcuugaucuaccu

SEQ ID NO: 2620879 - RNA, 19 nt, Artificial Sequence
  Description of Artificial Sequence: Synthetic oligonucleotide
uggugggccuucccacuuu

SEQ ID NO: 2620880 - RNA, 19 nt, Artificial Sequence
  Description of Artificial Sequence: Synthetic oligonucleotide
aucgcacaaauggucucua

SEQ ID NO: 2620881 - RNA, 19 nt, Artificial Sequence
  Description of Artificial Sequence: Synthetic oligonucleotide
ccaaaucaagauaaucaau

SEQ ID NO: 2620882 - RNA, 19 nt, Artificial Sequence
  Description of Artificial Sequence: Synthetic oligonucleotide
accaauggucaugcuugau

SEQ ID NO: 2620883 - RNA, 19 nt, Artificial Sequence
  Description of Artificial Sequence: Synthetic oligonucleotide
cccagaccagggaaugaug

SEQ ID NO: 2620884 - RNA, 19 nt, Artificial Sequence
  Description of Artificial Sequence: Synthetic oligonucleotide
aggcaugacuagaggccug

SEQ ID NO: 2620885 - RNA, 19 nt, Artificial Sequence
  Description of Artificial Sequence: Synthetic oligonucleotide
cccaaaggcuaagaaucug

SEQ ID NO: 2620886 - RNA, 19 nt, Artificial Sequence
  Description of Artificial Sequence: Synthetic oligonucleotide
uagcccaguuccugacauu

SEQ ID NO: 2620887 - RNA, 19 nt, Artificial Sequence
  Description of Artificial Sequence: Synthetic oligonucleotide
ccagggaaugaugcgacca

SEQ ID NO: 2620888 - RNA, 19 nt, Artificial Sequence
  Description of Artificial Sequence: Synthetic oligonucleotide
cauauuuauggugggccuu

SEQ ID NO: 2620889 - RNA, 19 nt, Artificial Sequence
  Description of Artificial Sequence: Synthetic oligonucleotide
caggcaugacuagaggccu

SEQ ID NO: 2620890 - RNA, 19 nt, Artificial Sequence
  Description of Artificial Sequence: Synthetic oligonucleotide
gaauggugccaccccuuuu

SEQ ID NO: 2620891 - RNA, 19 nt, Artificial Sequence
  Description of Artificial Sequence: Synthetic oligonucleotide
cucccagauuauuccagau

SEQ ID NO: 2620892 - RNA, 19 nt, Artificial Sequence
  Description of Artificial Sequence: Synthetic oligonucleotide
ccauauuuauggugggccu

SEQ ID NO: 2620893 - RNA, 19 nt, Artificial Sequence
  Description of Artificial Sequence: Synthetic oligonucleotide
gucaugcuugaucuaccuu

SEQ ID NO: 2620894 - RNA, 19 nt, Artificial Sequence
  Description of Artificial Sequence: Synthetic oligonucleotide
cauugucaaguggcaucca

SEQ ID NO: 2620895 - RNA, 19 nt, Artificial Sequence
  Description of Artificial Sequence: Synthetic oligonucleotide
ggaaugaugcgaccauauu

SEQ ID NO: 2620896 - RNA, 19 nt, Artificial Sequence
  Description of Artificial Sequence: Synthetic oligonucleotide
gaucuaccuuucuccuuuu

SEQ ID NO: 2620897 - RNA, 19 nt, Artificial Sequence
  Description of Artificial Sequence: Synthetic oligonucleotide
cagggaaugaugcgaccau

SEQ ID NO: 2620898 - RNA, 19 nt, Artificial Sequence
  Description of Artificial Sequence: Synthetic oligonucleotide
gccugaaugcacuccuacu

SEQ ID NO: 2620899 - RNA, 19 nt, Artificial Sequence
  Description of Artificial Sequence: Synthetic oligonucleotide
gggaaugaugcgaccauau

SEQ ID NO: 2620900 - RNA, 19 nt, Artificial Sequence
  Description of Artificial Sequence: Synthetic oligonucleotide
cacuccuacuuggaaauuu

SEQ ID NO: 2620901 - RNA, 19 nt, Artificial Sequence
  Description of Artificial Sequence: Synthetic oligonucleotide
cagccugaaugcacuccua

SEQ ID NO: 2620902 - RNA, 19 nt, Artificial Sequence
  Description of Artificial Sequence: Synthetic oligonucleotide
ggugggccuucccacuuua

SEQ ID NO: 2620903 - RNA, 19 nt, Artificial Sequence
  Description of Artificial Sequence: Synthetic oligonucleotide
ggcaugacuagaggccugu

SEQ ID NO: 2620904 - RNA, 19 nt, Artificial Sequence
  Description of Artificial Sequence: Synthetic oligonucleotide
guccagaaccccaguuuau

SEQ ID NO: 2620905 - RNA, 19 nt, Artificial Sequence
  Description of Artificial Sequence: Synthetic oligonucleotide
ccccaaaggcuaagaaucu

SEQ ID NO: 2620906 - RNA, 19 nt, Artificial Sequence
  Description of Artificial Sequence: Synthetic oligonucleotide
cuguuaccaggagcugugu

SEQ ID NO: 2620907 - RNA, 19 nt, Artificial Sequence
  Description of Artificial Sequence: Synthetic oligonucleotide
gugggccuucccacuuuaa

SEQ ID NO: 2620908 - RNA, 19 nt, Artificial Sequence
  Description of Artificial Sequence: Synthetic oligonucleotide
gcaugacuagaggccuguc

SEQ ID NO: 2620909 - RNA, 19 nt, Artificial Sequence
  Description of Artificial Sequence: Synthetic oligonucleotide
ccuuuucaugcaguacaua

SEQ ID NO: 2620910 - RNA, 19 nt, Artificial Sequence
  Description of Artificial Sequence: Synthetic oligonucleotide
ccagauuauuccagauauu

SEQ ID NO: 2620911 - RNA, 19 nt, Artificial Sequence
  Description of Artificial Sequence: Synthetic oligonucleotide
ggcuaagaaucugcauaau

SEQ ID NO: 2620912 - RNA, 19 nt, Artificial Sequence
  Description of Artificial Sequence: Synthetic oligonucleotide
gcugugucacagccugaau

SEQ ID NO: 2620913 - RNA, 19 nt, Artificial Sequence
  Description of Artificial Sequence: Synthetic oligonucleotide
ccaccccuuuucaugcagu

SEQ ID NO: 2620914 - RNA, 19 nt, Artificial Sequence
  Description of Artificial Sequence: Synthetic oligonucleotide
ccacuuuaacuagccaaau

SEQ ID NO: 2620915 - RNA, 19 nt, Artificial Sequence
  Description of Artificial Sequence: Synthetic oligonucleotide
gccugucucccagauuauu

SEQ ID NO: 2620916 - RNA, 19 nt, Artificial Sequence
  Description of Artificial Sequence: Synthetic oligonucleotide
gcacuccuacuuggaaauu

SEQ ID NO: 2620917 - RNA, 19 nt, Artificial Sequence
  Description of Artificial Sequence: Synthetic oligonucleotide
ggccugucucccagauuau

SEQ ID NO: 2620918 - RNA, 19 nt, Artificial Sequence
  Description of Artificial Sequence: Synthetic oligonucleotide
aauauauuaguuuugaaau

SEQ ID NO: 2620919 - RNA, 19 nt, Artificial Sequence
  Description of Artificial Sequence: Synthetic oligonucleotide
aaugcaaauauacauuuuc

SEQ ID NO: 2620920 - RNA, 19 nt, Artificial Sequence
  Description of Artificial Sequence: Synthetic oligonucleotide
auuaccagccaucagaacc

SEQ ID NO: 2620921 - RNA, 19 nt, Artificial Sequence
  Description of Artificial Sequence: Synthetic oligonucleotide
agaacuaaggcacacaaac

SEQ ID NO: 2620922 - RNA, 19 nt, Artificial Sequence
  Description of Artificial Sequence: Synthetic oligonucleotide
aauaaaauaaggcauucgu

SEQ ID NO: 2620923 - RNA, 19 nt, Artificial Sequence
  Description of Artificial Sequence: Synthetic oligonucleotide
uguaaguuaagacaagaag

SEQ ID NO: 2620924 - RNA, 19 nt, Artificial Sequence
  Description of Artificial Sequence: Synthetic oligonucleotide
guuaucuugauccugagag

SEQ ID NO: 2620925 - RNA, 19 nt, Artificial Sequence
  Description of Artificial Sequence: Synthetic oligonucleotide
gauaauuuuaauauauuag

SEQ ID NO: 2620926 - RNA, 19 nt, Artificial Sequence
  Description of Artificial Sequence: Synthetic oligonucleotide
uuuauuaccagccaucaga

SEQ ID NO: 2620927 - RNA, 19 nt, Artificial Sequence
  Description of Artificial Sequence: Synthetic oligonucleotide
uguuucaauaaaauaaggc

SEQ ID NO: 2620928 - RNA, 19 nt, Artificial Sequence
  Description of Artificial Sequence: Synthetic oligonucleotide
auauuaaagguauaggcag

SEQ ID NO: 2620929 - RNA, 19 nt, Artificial Sequence
  Description of Artificial Sequence: Synthetic oligonucleotide
aaaauaaggcauucguuuc

SEQ ID NO: 2620930 - RNA, 19 nt, Artificial Sequence
  Description of Artificial Sequence: Synthetic oligonucleotide
cuuaagcucaauuucaagg

SEQ ID NO: 2620931 - RNA, 19 nt, Artificial Sequence
  Description of Artificial Sequence: Synthetic oligonucleotide
uuuguaaucuguaucagga

SEQ ID NO: 2620932 - RNA, 19 nt, Artificial Sequence
  Description of Artificial Sequence: Synthetic oligonucleotide
ucugcaaaauauaaaacug

SEQ ID NO: 2620933 - RNA, 19 nt, Artificial Sequence
  Description of Artificial Sequence: Synthetic oligonucleotide
aaauccuuagaggagaagg

SEQ ID NO: 2620934 - RNA, 19 nt, Artificial Sequence
  Description of Artificial Sequence: Synthetic oligonucleotide
uuuacuauaccuuucaaua

SEQ ID NO: 2620935 - RNA, 19 nt, Artificial Sequence
  Description of Artificial Sequence: Synthetic oligonucleotide
guuuucaucccuuagguag

SEQ ID NO: 2620936 - RNA, 19 nt, Artificial Sequence
  Description of Artificial Sequence: Synthetic oligonucleotide
aacaucaggcaacuuuucc

SEQ ID NO: 2620937 - RNA, 19 nt, Artificial Sequence
  Description of Artificial Sequence: Synthetic oligonucleotide
uauauuaguuuugaaaugc

SEQ ID NO: 2620938 - RNA, 19 nt, Artificial Sequence
  Description of Artificial Sequence: Synthetic oligonucleotide
uuuuguuauaccuucauau

SEQ ID NO: 2620939 - RNA, 19 nt, Artificial Sequence
  Description of Artificial Sequence: Synthetic oligonucleotide
uacauuuucuugaaaaucu

SEQ ID NO: 2620940 - RNA, 19 nt, Artificial Sequence
  Description of Artificial Sequence: Synthetic oligonucleotide
uaaagguauaggcagcacg

SEQ ID NO: 2620941 - RNA, 19 nt, Artificial Sequence
  Description of Artificial Sequence: Synthetic oligonucleotide
aauauuaaagguauaggca

SEQ ID NO: 2620942 - RNA, 19 nt, Artificial Sequence
  Description of Artificial Sequence: Synthetic oligonucleotide
guuucaauaaaauaaggca

SEQ ID NO: 2620943 - RNA, 19 nt, Artificial Sequence
  Description of Artificial Sequence: Synthetic oligonucleotide
ucuguaucaggaaacagug

SEQ ID NO: 2620944 - RNA, 19 nt, Artificial Sequence
  Description of Artificial Sequence: Synthetic oligonucleotide
aguuaagacaagaagaauc

SEQ ID NO: 2620945 - RNA, 19 nt, Artificial Sequence
  Description of Artificial Sequence: Synthetic oligonucleotide
uuugaaaugcaaauauaca

SEQ ID NO: 2620946 - RNA, 19 nt, Artificial Sequence
  Description of Artificial Sequence: Synthetic oligonucleotide
uugaaaugcaaauauacau

SEQ ID NO: 2620947 - RNA, 19 nt, Artificial Sequence
  Description of Artificial Sequence: Synthetic oligonucleotide
guuauaccuucauauaucg

SEQ ID NO: 2620948 - RNA, 19 nt, Artificial Sequence
  Description of Artificial Sequence: Synthetic oligonucleotide
uaaguuaagacaagaagaa

SEQ ID NO: 2620949 - RNA, 19 nt, Artificial Sequence
  Description of Artificial Sequence: Synthetic oligonucleotide
ugcaaaauauaaaacugca

SEQ ID NO: 2620950 - RNA, 19 nt, Artificial Sequence
  Description of Artificial Sequence: Synthetic oligonucleotide
ugauaagucuccccaaagg

SEQ ID NO: 2620951 - RNA, 19 nt, Artificial Sequence
  Description of Artificial Sequence: Synthetic oligonucleotide
uauaucguuuacuauaccu

SEQ ID NO: 2620952 - RNA, 19 nt, Artificial Sequence
  Description of Artificial Sequence: Synthetic oligonucleotide
ucaauauuaaagguauagg

SEQ ID NO: 2620953 - RNA, 19 nt, Artificial Sequence
  Description of Artificial Sequence: Synthetic oligonucleotide
acaucaggcaacuuuuccc

SEQ ID NO: 2620954 - RNA, 19 nt, Artificial Sequence
  Description of Artificial Sequence: Synthetic oligonucleotide
uuuaauauauuaguuuuga

SEQ ID NO: 2620955 - RNA, 19 nt, Artificial Sequence
  Description of Artificial Sequence: Synthetic oligonucleotide
uaagugauaagucucccca

SEQ ID NO: 2620956 - RNA, 19 nt, Artificial Sequence
  Description of Artificial Sequence: Synthetic oligonucleotide
agguagauaauuuuaauau

SEQ ID NO: 2620957 - RNA, 19 nt, Artificial Sequence
  Description of Artificial Sequence: Synthetic oligonucleotide
aauaagugauaagucuccc

SEQ ID NO: 2620958 - RNA, 19 nt, Artificial Sequence
  Description of Artificial Sequence: Synthetic oligonucleotide
ucauauaucguuuacuaua

SEQ ID NO: 2620959 - RNA, 19 nt, Artificial Sequence
  Description of Artificial Sequence: Synthetic oligonucleotide
gagaucaucucucuggaag

SEQ ID NO: 2620960 - RNA, 19 nt, Artificial Sequence
  Description of Artificial Sequence: Synthetic oligonucleotide
auauacauuuucuugaaaa

SEQ ID NO: 2620961 - RNA, 19 nt, Artificial Sequence
  Description of Artificial Sequence: Synthetic oligonucleotide
uucuugaaaaucuuuuggc

SEQ ID NO: 2620962 - RNA, 19 nt, Artificial Sequence
  Description of Artificial Sequence: Synthetic oligonucleotide
aaggguucuggcuauuuuc

SEQ ID NO: 2620963 - RNA, 19 nt, Artificial Sequence
  Description of Artificial Sequence: Synthetic oligonucleotide
uuaagcucaauuucaaggu

SEQ ID NO: 2620964 - RNA, 19 nt, Artificial Sequence
  Description of Artificial Sequence: Synthetic oligonucleotide
aaaacugcaggggagucac

SEQ ID NO: 2620965 - RNA, 19 nt, Artificial Sequence
  Description of Artificial Sequence: Synthetic oligonucleotide
auaagugauaagucucccc

SEQ ID NO: 2620966 - RNA, 19 nt, Artificial Sequence
  Description of Artificial Sequence: Synthetic oligonucleotide
aucaauuguaauuucagaa

SEQ ID NO: 2620967 - RNA, 19 nt, Artificial Sequence
  Description of Artificial Sequence: Synthetic oligonucleotide
aguuuugaaaugcaaauau

SEQ ID NO: 2620968 - RNA, 19 nt, Artificial Sequence
  Description of Artificial Sequence: Synthetic oligonucleotide
aagaaucaauuguaauuuc

SEQ ID NO: 2620969 - RNA, 19 nt, Artificial Sequence
  Description of Artificial Sequence: Synthetic oligonucleotide
aaucaauuguaauuucaga

SEQ ID NO: 2620970 - RNA, 19 nt, Artificial Sequence
  Description of Artificial Sequence: Synthetic oligonucleotide
acaagcggagaacuaaggc

SEQ ID NO: 2620971 - RNA, 19 nt, Artificial Sequence
  Description of Artificial Sequence: Synthetic oligonucleotide
ucuugaaaaucuuuuggca

SEQ ID NO: 2620972 - RNA, 19 nt, Artificial Sequence
  Description of Artificial Sequence: Synthetic oligonucleotide
uaucaggaaacaguggugg

SEQ ID NO: 2620973 - RNA, 19 nt, Artificial Sequence
  Description of Artificial Sequence: Synthetic oligonucleotide
uuuucucugcaaaauauaa

SEQ ID NO: 2620974 - RNA, 19 nt, Artificial Sequence
  Description of Artificial Sequence: Synthetic oligonucleotide
agaagaaucaauuguaauu

SEQ ID NO: 2620975 - RNA, 19 nt, Artificial Sequence
  Description of Artificial Sequence: Synthetic oligonucleotide
auaccuuucaauaucaucu

SEQ ID NO: 2620976 - RNA, 19 nt, Artificial Sequence
  Description of Artificial Sequence: Synthetic oligonucleotide
uguaaucuguaucaggaaa

SEQ ID NO: 2620977 - RNA, 19 nt, Artificial Sequence
  Description of Artificial Sequence: Synthetic oligonucleotide
aacuaaggcacacaaacuu

SEQ ID NO: 2620978 - RNA, 19 nt, Artificial Sequence
  Description of Artificial Sequence: Synthetic oligonucleotide
uuucagaaugaccugagau

SEQ ID NO: 2620979 - RNA, 19 nt, Artificial Sequence
  Description of Artificial Sequence: Synthetic oligonucleotide
auauauuaguuuugaaaug

SEQ ID NO: 2620980 - RNA, 19 nt, Artificial Sequence
  Description of Artificial Sequence: Synthetic oligonucleotide
guaaguuaagacaagaaga

SEQ ID NO: 2620981 - RNA, 19 nt, Artificial Sequence
  Description of Artificial Sequence: Synthetic oligonucleotide
auuguaauuucagaaugac

SEQ ID NO: 2620982 - RNA, 19 nt, Artificial Sequence
  Description of Artificial Sequence: Synthetic oligonucleotide
  modified_base (16)..(16): a, c, u, g, unknown or other
cucucuggaagucuunucc

SEQ ID NO: 2620983 - RNA, 19 nt, Artificial Sequence
  Description of Artificial Sequence: Synthetic oligonucleotide
caauuguaauuucagaaug

SEQ ID NO: 2620984 - RNA, 19 nt, Artificial Sequence
  Description of Artificial Sequence: Synthetic oligonucleotide
aaauauacauuuucuugaa

SEQ ID NO: 2620985 - RNA, 19 nt, Artificial Sequence
  Description of Artificial Sequence: Synthetic oligonucleotide
cugcaaaauauaaaacugc

SEQ ID NO: 2620986 - RNA, 19 nt, Artificial Sequence
  Description of Artificial Sequence: Synthetic oligonucleotide
ucagaaugaccugagauca

SEQ ID NO: 2620987 - RNA, 19 nt, Artificial Sequence
  Description of Artificial Sequence: Synthetic oligonucleotide
ucaauuguaauuucagaau

SEQ ID NO: 2620988 - RNA, 19 nt, Artificial Sequence
  Description of Artificial Sequence: Synthetic oligonucleotide
aagcggagaacuaaggcac

SEQ ID NO: 2620989 - RNA, 19 nt, Artificial Sequence
  Description of Artificial Sequence: Synthetic oligonucleotide
aaauaaggcauucguuuca

SEQ ID NO: 2620990 - RNA, 19 nt, Artificial Sequence
  Description of Artificial Sequence: Synthetic oligonucleotide
cucaauauuaaagguauag

SEQ ID NO: 2620991 - RNA, 19 nt, Artificial Sequence
  Description of Artificial Sequence: Synthetic oligonucleotide
aacuuuuccccucugcuga

SEQ ID NO: 2620992 - RNA, 19 nt, Artificial Sequence
  Description of Artificial Sequence: Synthetic oligonucleotide
uaaggcauucguuucacug

SEQ ID NO: 2620993 - RNA, 19 nt, Artificial Sequence
  Description of Artificial Sequence: Synthetic oligonucleotide
cauauaucguuuacuauac

SEQ ID NO: 2620994 - RNA, 19 nt, Artificial Sequence
  Description of Artificial Sequence: Synthetic oligonucleotide
caaacuuaagcucaauuuc

SEQ ID NO: 2620995 - RNA, 19 nt, Artificial Sequence
  Description of Artificial Sequence: Synthetic oligonucleotide
uauuaaagguauaggcagc

SEQ ID NO: 2620996 - RNA, 19 nt, Artificial Sequence
  Description of Artificial Sequence: Synthetic oligonucleotide
aaugaccugagaucaucuc

SEQ ID NO: 2620997 - RNA, 19 nt, Artificial Sequence
  Description of Artificial Sequence: Synthetic oligonucleotide
auaggaaacuguuuacaag

SEQ ID NO: 2620998 - RNA, 19 nt, Artificial Sequence
  Description of Artificial Sequence: Synthetic oligonucleotide
uuguuauaccuucauauau

SEQ ID NO: 2620999 - RNA, 19 nt, Artificial Sequence
  Description of Artificial Sequence: Synthetic oligonucleotide
agguauaggcagcacgucc

SEQ ID NO: 2621000 - RNA, 19 nt, Artificial Sequence
  Description of Artificial Sequence: Synthetic oligonucleotide
uguuauaccuucauauauc

SEQ ID NO: 2621001 - RNA, 19 nt, Artificial Sequence
  Description of Artificial Sequence: Synthetic oligonucleotide
ucagaagguaauaagugau

SEQ ID NO: 2621002 - RNA, 19 nt, Artificial Sequence
  Description of Artificial Sequence: Synthetic oligonucleotide
acaaacuuaagcucaauuu

SEQ ID NO: 2621003 - RNA, 19 nt, Artificial Sequence
  Description of Artificial Sequence: Synthetic oligonucleotide
uaagucuccccaaagggga

SEQ ID NO: 2621004 - RNA, 19 nt, Artificial Sequence
  Description of Artificial Sequence: Synthetic oligonucleotide
aauccuuagaggagaaggg

SEQ ID NO: 2621005 - RNA, 19 nt, Artificial Sequence
  Description of Artificial Sequence: Synthetic oligonucleotide
guuuguaaucuguaucagg

SEQ ID NO: 2621006 - RNA, 19 nt, Artificial Sequence
  Description of Artificial Sequence: Synthetic oligonucleotide
uucaauaaaauaaggcauu

SEQ ID NO: 2621007 - RNA, 19 nt, Artificial Sequence
  Description of Artificial Sequence: Synthetic oligonucleotide
aacugcaggggagucaccc

SEQ ID NO: 2621008 - RNA, 19 nt, Artificial Sequence
  Description of Artificial Sequence: Synthetic oligonucleotide
aagaagaaucaauuguaau

SEQ ID NO: 2621009 - RNA, 19 nt, Artificial Sequence
  Description of Artificial Sequence: Synthetic oligonucleotide
aaacuuaagcucaauuuca

SEQ ID NO: 2621010 - RNA, 19 nt, Artificial Sequence
  Description of Artificial Sequence: Synthetic oligonucleotide
gaagguaauaagugauaag

SEQ ID NO: 2621011 - RNA, 19 nt, Artificial Sequence
  Description of Artificial Sequence: Synthetic oligonucleotide
uacuauaccuuucaauauc

SEQ ID NO: 2621012 - RNA, 19 nt, Artificial Sequence
  Description of Artificial Sequence: Synthetic oligonucleotide
aggcacacaaacuuaagcu

SEQ ID NO: 2621013 - RNA, 19 nt, Artificial Sequence
  Description of Artificial Sequence: Synthetic oligonucleotide
cuguuuccaggucagaagg

SEQ ID NO: 2621014 - RNA, 19 nt, Artificial Sequence
  Description of Artificial Sequence: Synthetic oligonucleotide
uucagaaugaccugagauc

SEQ ID NO: 2621015 - RNA, 19 nt, Artificial Sequence
  Description of Artificial Sequence: Synthetic oligonucleotide
uuauuaccagccaucagaa

SEQ ID NO: 2621016 - RNA, 19 nt, Artificial Sequence
  Description of Artificial Sequence: Synthetic oligonucleotide
auucguuucacuguuucuc

SEQ ID NO: 2621017 - RNA, 19 nt, Artificial Sequence
  Description of Artificial Sequence: Synthetic oligonucleotide
uuacaagcggagaacuaag

SEQ ID NO: 2621018 - RNA, 19 nt, Artificial Sequence
  Description of Artificial Sequence: Synthetic oligonucleotide
ucucugcaaaauauaaaac

SEQ ID NO: 2621019 - RNA, 19 nt, Artificial Sequence
  Description of Artificial Sequence: Synthetic oligonucleotide
aaaaucuuuuggcauguua

SEQ ID NO: 2621020 - RNA, 19 nt, Artificial Sequence
  Description of Artificial Sequence: Synthetic oligonucleotide
aaggcauucguuucacugu

SEQ ID NO: 2621021 - RNA, 19 nt, Artificial Sequence
  Description of Artificial Sequence: Synthetic oligonucleotide
ucaucccuuagguagauaa

SEQ ID NO: 2621022 - RNA, 19 nt, Artificial Sequence
  Description of Artificial Sequence: Synthetic oligonucleotide
aauuguaauuucagaauga

SEQ ID NO: 2621023 - RNA, 19 nt, Artificial Sequence
  Description of Artificial Sequence: Synthetic oligonucleotide
auauaucguuuacuauacc

SEQ ID NO: 2621024 - RNA, 19 nt, Artificial Sequence
  Description of Artificial Sequence: Synthetic oligonucleotide
uguaauccucaucuucucc

SEQ ID NO: 2621025 - RNA, 19 nt, Artificial Sequence
  Description of Artificial Sequence: Synthetic oligonucleotide
aaagguauaggcagcacgu

SEQ ID NO: 2621026 - RNA, 19 nt, Artificial Sequence
  Description of Artificial Sequence: Synthetic oligonucleotide
agacaagaagaaucaauug

SEQ ID NO: 2621027 - RNA, 19 nt, Artificial Sequence
  Description of Artificial Sequence: Synthetic oligonucleotide
uauaccuuucaauaucauc

SEQ ID NO: 2621028 - RNA, 19 nt, Artificial Sequence
  Description of Artificial Sequence: Synthetic oligonucleotide
agaggagaaggguucuggc

SEQ ID NO: 2621029 - RNA, 19 nt, Artificial Sequence
  Description of Artificial Sequence: Synthetic oligonucleotide
uacaagcggagaacuaagg

SEQ ID NO: 2621030 - RNA, 19 nt, Artificial Sequence
  Description of Artificial Sequence: Synthetic oligonucleotide
agguguuucaauaaaauaa

SEQ ID NO: 2621031 - RNA, 19 nt, Artificial Sequence
  Description of Artificial Sequence: Synthetic oligonucleotide
gacaagaagaaucaauugu

SEQ ID NO: 2621032 - RNA, 19 nt, Artificial Sequence
  Description of Artificial Sequence: Synthetic oligonucleotide
aagccaacagccucaauau

SEQ ID NO: 2621033 - RNA, 19 nt, Artificial Sequence
  Description of Artificial Sequence: Synthetic oligonucleotide
uuuguuauaccuucauaua

SEQ ID NO: 2621034 - RNA, 19 nt, Artificial Sequence
  Description of Artificial Sequence: Synthetic oligonucleotide
aauauacauuuucuugaaa

SEQ ID NO: 2621035 - RNA, 19 nt, Artificial Sequence
  Description of Artificial Sequence: Synthetic oligonucleotide
ucguuuacuauaccuuuca

SEQ ID NO: 2621036 - RNA, 19 nt, Artificial Sequence
  Description of Artificial Sequence: Synthetic oligonucleotide
guuaagacaagaagaauca

SEQ ID NO: 2621037 - RNA, 19 nt, Artificial Sequence
  Description of Artificial Sequence: Synthetic oligonucleotide
gaaacuguuuacaagcgga

SEQ ID NO: 2621038 - RNA, 19 nt, Artificial Sequence
  Description of Artificial Sequence: Synthetic oligonucleotide
uuuacaagcggagaacuaa

SEQ ID NO: 2621039 - RNA, 19 nt, Artificial Sequence
  Description of Artificial Sequence: Synthetic oligonucleotide
gaagccaacagccucaaua

SEQ ID NO: 2621040 - RNA, 19 nt, Artificial Sequence
  Description of Artificial Sequence: Synthetic oligonucleotide
acuguuuacaagcggagaa

SEQ ID NO: 2621041 - RNA, 19 nt, Artificial Sequence
  Description of Artificial Sequence: Synthetic oligonucleotide
uuuucaucccuuagguaga

SEQ ID NO: 2621042 - RNA, 19 nt, Artificial Sequence
  Description of Artificial Sequence: Synthetic oligonucleotide
guaauaagugauaagucuc

SEQ ID NO: 2621043 - RNA, 19 nt, Artificial Sequence
  Description of Artificial Sequence: Synthetic oligonucleotide
auaagucuccccaaagggg

SEQ ID NO: 2621044 - RNA, 19 nt, Artificial Sequence
  Description of Artificial Sequence: Synthetic oligonucleotide
ucaacacaacaucaggcaa

SEQ ID NO: 2621045 - RNA, 19 nt, Artificial Sequence
  Description of Artificial Sequence: Synthetic oligonucleotide
gguguuucaauaaaauaag

SEQ ID NO: 2621046 - RNA, 19 nt, Artificial Sequence
  Description of Artificial Sequence: Synthetic oligonucleotide
caauaaaauaaggcauucg

SEQ ID NO: 2621047 - RNA, 19 nt, Artificial Sequence
  Description of Artificial Sequence: Synthetic oligonucleotide
uauaaaacugcaggggagu

SEQ ID NO: 2621048 - RNA, 19 nt, Artificial Sequence
  Description of Artificial Sequence: Synthetic oligonucleotide
uuacuauaccuuucaauau

SEQ ID NO: 2621049 - RNA, 19 nt, Artificial Sequence
  Description of Artificial Sequence: Synthetic oligonucleotide
acuuaagcucaauuucaag

SEQ ID NO: 2621050 - RNA, 19 nt, Artificial Sequence
  Description of Artificial Sequence: Synthetic oligonucleotide
aaucuguaucaggaaacag

SEQ ID NO: 2621051 - RNA, 19 nt, Artificial Sequence
  Description of Artificial Sequence: Synthetic oligonucleotide
agguuuucaucccuuaggu

SEQ ID NO: 2621052 - RNA, 19 nt, Artificial Sequence
  Description of Artificial Sequence: Synthetic oligonucleotide
uuagguagauaauuuuaau

SEQ ID NO: 2621053 - RNA, 19 nt, Artificial Sequence
  Description of Artificial Sequence: Synthetic oligonucleotide
guaauuucagaaugaccug

SEQ ID NO: 2621054 - RNA, 19 nt, Artificial Sequence
  Description of Artificial Sequence: Synthetic oligonucleotide
agguaauaagugauaaguc

SEQ ID NO: 2621055 - RNA, 19 nt, Artificial Sequence
  Description of Artificial Sequence: Synthetic oligonucleotide
uaucuugauccugagagaa

SEQ ID NO: 2621056 - RNA, 19 nt, Artificial Sequence
  Description of Artificial Sequence: Synthetic oligonucleotide
  modified_base (9)..(9): a, c, u, g, unknown or other
gaagucuunuccagucugg

SEQ ID NO: 2621057 - RNA, 19 nt, Artificial Sequence
  Description of Artificial Sequence: Synthetic oligonucleotide
ucuugauccugagagaaaa

SEQ ID NO: 2621058 - RNA, 19 nt, Artificial Sequence
  Description of Artificial Sequence: Synthetic oligonucleotide
accuucauauaucguuuac

SEQ ID NO: 2621059 - RNA, 19 nt, Artificial Sequence
  Description of Artificial Sequence: Synthetic oligonucleotide
aaacuguuuacaagcggag

SEQ ID NO: 2621060 - RNA, 19 nt, Artificial Sequence
  Description of Artificial Sequence: Synthetic oligonucleotide
ucaauaaaauaaggcauuc

SEQ ID NO: 2621061 - RNA, 19 nt, Artificial Sequence
  Description of Artificial Sequence: Synthetic oligonucleotide
ucuuuuguuauaccuucau

SEQ ID NO: 2621062 - RNA, 19 nt, Artificial Sequence
  Description of Artificial Sequence: Synthetic oligonucleotide
uguuuacaagcggagaacu

SEQ ID NO: 2621063 - RNA, 19 nt, Artificial Sequence
  Description of Artificial Sequence: Synthetic oligonucleotide
uccuuuauuaccagccauc

SEQ ID NO: 2621064 - RNA, 19 nt, Artificial Sequence
  Description of Artificial Sequence: Synthetic oligonucleotide
guguuucaauaaaauaagg

SEQ ID NO: 2621065 - RNA, 19 nt, Artificial Sequence
  Description of Artificial Sequence: Synthetic oligonucleotide
auauaaaacugcaggggag

SEQ ID NO: 2621066 - RNA, 19 nt, Artificial Sequence
  Description of Artificial Sequence: Synthetic oligonucleotide
uaaggcacacaaacuuaag

SEQ ID NO: 2621067 - RNA, 19 nt, Artificial Sequence
  Description of Artificial Sequence: Synthetic oligonucleotide
uaucguuuacuauaccuuu

SEQ ID NO: 2621068 - RNA, 19 nt, Artificial Sequence
  Description of Artificial Sequence: Synthetic oligonucleotide
augaccugagaucaucucu

SEQ ID NO: 2621069 - RNA, 19 nt, Artificial Sequence
  Description of Artificial Sequence: Synthetic oligonucleotide
  modified_base (10)..(10): a, c, u, g, unknown or other
ggaagucuunuccagucug

SEQ ID NO: 2621070 - RNA, 19 nt, Artificial Sequence
  Description of Artificial Sequence: Synthetic oligonucleotide
ucacccuguaaguuaagac

SEQ ID NO: 2621071 - RNA, 19 nt, Artificial Sequence
  Description of Artificial Sequence: Synthetic oligonucleotide
caacacaacaucaggcaac

SEQ ID NO: 2621072 - RNA, 19 nt, Artificial Sequence
  Description of Artificial Sequence: Synthetic oligonucleotide
uucauauaucguuuacuau

SEQ ID NO: 2621073 - RNA, 19 nt, Artificial Sequence
  Description of Artificial Sequence: Synthetic oligonucleotide
agaaugaccugagaucauc

SEQ ID NO: 2621074 - RNA, 19 nt, Artificial Sequence
  Description of Artificial Sequence: Synthetic oligonucleotide
uaaucuguaucaggaaaca

SEQ ID NO: 2621075 - RNA, 19 nt, Artificial Sequence
  Description of Artificial Sequence: Synthetic oligonucleotide
uagaggagaaggguucugg

SEQ ID NO: 2621076 - RNA, 19 nt, Artificial Sequence
  Description of Artificial Sequence: Synthetic oligonucleotide
guaaucuguaucaggaaac

SEQ ID NO: 2621077 - RNA, 19 nt, Artificial Sequence
  Description of Artificial Sequence: Synthetic oligonucleotide
uggcuucaacacaacauca

SEQ ID NO: 2621078 - RNA, 19 nt, Artificial Sequence
  Description of Artificial Sequence: Synthetic oligonucleotide
agaucaucucucuggaagu

SEQ ID NO: 2621079 - RNA, 19 nt, Artificial Sequence
  Description of Artificial Sequence: Synthetic oligonucleotide
gucagaagguaauaaguga

SEQ ID NO: 2621080 - RNA, 19 nt, Artificial Sequence
  Description of Artificial Sequence: Synthetic oligonucleotide
caggaaacagugguggugg

SEQ ID NO: 2621081 - RNA, 19 nt, Artificial Sequence
  Description of Artificial Sequence: Synthetic oligonucleotide
ccugagaucaucucucugg

SEQ ID NO: 2621082 - RNA, 19 nt, Artificial Sequence
  Description of Artificial Sequence: Synthetic oligonucleotide
auguaauccucaucuucuc

SEQ ID NO: 2621083 - RNA, 19 nt, Artificial Sequence
  Description of Artificial Sequence: Synthetic oligonucleotide
caggucagaagguaauaag

SEQ ID NO: 2621084 - RNA, 19 nt, Artificial Sequence
  Description of Artificial Sequence: Synthetic oligonucleotide
uuuuccccucugcugaagc

SEQ ID NO: 2621085 - RNA, 19 nt, Artificial Sequence
  Description of Artificial Sequence: Synthetic oligonucleotide
cucugcaaaauauaaaacu

SEQ ID NO: 2621086 - RNA, 19 nt, Artificial Sequence
  Description of Artificial Sequence: Synthetic oligonucleotide
cugguuuguaaucuguauc

SEQ ID NO: 2621087 - RNA, 19 nt, Artificial Sequence
  Description of Artificial Sequence: Synthetic oligonucleotide
  modified_base (15)..(15): a, c, u, g, unknown or other
ucucuggaagucuunucca

SEQ ID NO: 2621088 - RNA, 19 nt, Artificial Sequence
  Description of Artificial Sequence: Synthetic oligonucleotide
auuaaagguauaggcagca

SEQ ID NO: 2621089 - RNA, 19 nt, Artificial Sequence
  Description of Artificial Sequence: Synthetic oligonucleotide
caagcggagaacuaaggca

SEQ ID NO: 2621090 - RNA, 19 nt, Artificial Sequence
  Description of Artificial Sequence: Synthetic oligonucleotide
agaagguaauaagugauaa

SEQ ID NO: 2621091 - RNA, 19 nt, Artificial Sequence
  Description of Artificial Sequence: Synthetic oligonucleotide
uucguuucacuguuucucu

SEQ ID NO: 2621092 - RNA, 19 nt, Artificial Sequence
  Description of Artificial Sequence: Synthetic oligonucleotide
gguaauaagugauaagucu

SEQ ID NO: 2621093 - RNA, 19 nt, Artificial Sequence
  Description of Artificial Sequence: Synthetic oligonucleotide
uguuucucucagcucuugc

SEQ ID NO: 2621094 - RNA, 19 nt, Artificial Sequence
  Description of Artificial Sequence: Synthetic oligonucleotide
aucuguaucaggaaacagu

SEQ ID NO: 2621095 - RNA, 19 nt, Artificial Sequence
  Description of Artificial Sequence: Synthetic oligonucleotide
ucuggcuauuuucucugca

SEQ ID NO: 2621096 - RNA, 19 nt, Artificial Sequence
  Description of Artificial Sequence: Synthetic oligonucleotide
uuauaccuucauauaucgu

SEQ ID NO: 2621097 - RNA, 19 nt, Artificial Sequence
  Description of Artificial Sequence: Synthetic oligonucleotide
cacccuguaaguuaagaca

SEQ ID NO: 2621098 - RNA, 19 nt, Artificial Sequence
  Description of Artificial Sequence: Synthetic oligonucleotide
gugauaagucuccccaaag

SEQ ID NO: 2621099 - RNA, 19 nt, Artificial Sequence
  Description of Artificial Sequence: Synthetic oligonucleotide
acuauaccuuucaauauca

SEQ ID NO: 2621100 - RNA, 19 nt, Artificial Sequence
  Description of Artificial Sequence: Synthetic oligonucleotide
acaagaagaaucaauugua

SEQ ID NO: 2621101 - RNA, 19 nt, Artificial Sequence
  Description of Artificial Sequence: Synthetic oligonucleotide
cuguaucaggaaacagugg

SEQ ID NO: 2621102 - RNA, 19 nt, Artificial Sequence
  Description of Artificial Sequence: Synthetic oligonucleotide
aagguauaggcagcacguc

SEQ ID NO: 2621103 - RNA, 19 nt, Artificial Sequence
  Description of Artificial Sequence: Synthetic oligonucleotide
acugguuuguaaucuguau

SEQ ID NO: 2621104 - RNA, 19 nt, Artificial Sequence
  Description of Artificial Sequence: Synthetic oligonucleotide
uaagcucaauuucaagguu

SEQ ID NO: 2621105 - RNA, 19 nt, Artificial Sequence
  Description of Artificial Sequence: Synthetic oligonucleotide
aaguuaagacaagaagaau

SEQ ID NO: 2621106 - RNA, 19 nt, Artificial Sequence
  Description of Artificial Sequence: Synthetic oligonucleotide
agugauaagucuccccaaa

SEQ ID NO: 2621107 - RNA, 19 nt, Artificial Sequence
  Description of Artificial Sequence: Synthetic oligonucleotide
aacuguuuacaagcggaga

SEQ ID NO: 2621108 - RNA, 19 nt, Artificial Sequence
  Description of Artificial Sequence: Synthetic oligonucleotide
aagugauaagucuccccaa

SEQ ID NO: 2621109 - RNA, 19 nt, Artificial Sequence
  Description of Artificial Sequence: Synthetic oligonucleotide
uccuuagaggagaaggguu

SEQ ID NO: 2621110 - RNA, 19 nt, Artificial Sequence
  Description of Artificial Sequence: Synthetic oligonucleotide
aaaacagggcucccuguuu

SEQ ID NO: 2621111 - RNA, 19 nt, Artificial Sequence
  Description of Artificial Sequence: Synthetic oligonucleotide
uguuuucaggggcacuggu

SEQ ID NO: 2621112 - RNA, 19 nt, Artificial Sequence
  Description of Artificial Sequence: Synthetic oligonucleotide
uggcuauuuucucugcaaa

SEQ ID NO: 2621113 - RNA, 19 nt, Artificial Sequence
  Description of Artificial Sequence: Synthetic oligonucleotide
auaaaauaaggcauucguu

SEQ ID NO: 2621114 - RNA, 19 nt, Artificial Sequence
  Description of Artificial Sequence: Synthetic oligonucleotide
cuuuauuaccagccaucag

SEQ ID NO: 2621115 - RNA, 19 nt, Artificial Sequence
  Description of Artificial Sequence: Synthetic oligonucleotide
  modified_base (11)..(11): a, c, u, g, unknown or other
uggaagucuunuccagucu

SEQ ID NO: 2621116 - RNA, 19 nt, Artificial Sequence
  Description of Artificial Sequence: Synthetic oligonucleotide
caacuuuuccccucugcug

SEQ ID NO: 2621117 - RNA, 19 nt, Artificial Sequence
  Description of Artificial Sequence: Synthetic oligonucleotide
uuguaaucuguaucaggaa

SEQ ID NO: 2621118 - RNA, 19 nt, Artificial Sequence
  Description of Artificial Sequence: Synthetic oligonucleotide
aaggggaaagcagguuuuc

SEQ ID NO: 2621119 - RNA, 19 nt, Artificial Sequence
  Description of Artificial Sequence: Synthetic oligonucleotide
  modified_base (5)..(5): a, c, u, g, unknown or other
ucuunuccagucugguauc

SEQ ID NO: 2621120 - RNA, 19 nt, Artificial Sequence
  Description of Artificial Sequence: Synthetic oligonucleotide
augcaaauauacauuuucu

SEQ ID NO: 2621121 - RNA, 19 nt, Artificial Sequence
  Description of Artificial Sequence: Synthetic oligonucleotide
auuucaagguuaucuugau

SEQ ID NO: 2621122 - RNA, 19 nt, Artificial Sequence
  Description of Artificial Sequence: Synthetic oligonucleotide
aggagaaggguucuggcua

SEQ ID NO: 2621123 - RNA, 19 nt, Artificial Sequence
  Description of Artificial Sequence: Synthetic oligonucleotide
ggucagaagguaauaagug

SEQ ID NO: 2621124 - RNA, 19 nt, Artificial Sequence
  Description of Artificial Sequence: Synthetic oligonucleotide
ucccuuagguagauaauuu

SEQ ID NO: 2621125 - RNA, 19 nt, Artificial Sequence
  Description of Artificial Sequence: Synthetic oligonucleotide
  modified_base (2)..(2): a, c, u, g, unknown or other
unuccagucugguauccau

SEQ ID NO: 2621126 - RNA, 19 nt, Artificial Sequence
  Description of Artificial Sequence: Synthetic oligonucleotide
uuaagacaagaagaaucaa

SEQ ID NO: 2621127 - RNA, 19 nt, Artificial Sequence
  Description of Artificial Sequence: Synthetic oligonucleotide
aggaaacaguggugguggc

SEQ ID NO: 2621128 - RNA, 19 nt, Artificial Sequence
  Description of Artificial Sequence: Synthetic oligonucleotide
uugcagguguuucaauaaa

SEQ ID NO: 2621129 - RNA, 19 nt, Artificial Sequence
  Description of Artificial Sequence: Synthetic oligonucleotide
aucguuuacuauaccuuuc

SEQ ID NO: 2621130 - RNA, 19 nt, Artificial Sequence
  Description of Artificial Sequence: Synthetic oligonucleotide
agucugguauccauucuuc

SEQ ID NO: 2621131 - RNA, 19 nt, Artificial Sequence
  Description of Artificial Sequence: Synthetic oligonucleotide
  modified_base (8)..(8): a, c, u, g, unknown or other
aagucuunuccagucuggu

SEQ ID NO: 2621132 - RNA, 19 nt, Artificial Sequence
  Description of Artificial Sequence: Synthetic oligonucleotide
auauuaguuuugaaaugca

SEQ ID NO: 2621133 - RNA, 19 nt, Artificial Sequence
  Description of Artificial Sequence: Synthetic oligonucleotide
  modified_base (4)..(4): a, c, u, g, unknown or other
cuunuccagucugguaucc

SEQ ID NO: 2621134 - RNA, 19 nt, Artificial Sequence
  Description of Artificial Sequence: Synthetic oligonucleotide
cuaaggcacacaaacuuaa

SEQ ID NO: 2621135 - RNA, 19 nt, Artificial Sequence
  Description of Artificial Sequence: Synthetic oligonucleotide
uuuccccucugcugaagcc

SEQ ID NO: 2621136 - RNA, 19 nt, Artificial Sequence
  Description of Artificial Sequence: Synthetic oligonucleotide
auccauucuucuuuuguua

SEQ ID NO: 2621137 - RNA, 19 nt, Artificial Sequence
  Description of Artificial Sequence: Synthetic oligonucleotide
  modified_base (6)..(6): a, c, u, g, unknown or other
gucuunuccagucugguau

SEQ ID NO: 2621138 - RNA, 19 nt, Artificial Sequence
  Description of Artificial Sequence: Synthetic oligonucleotide
ugguggcuucaacacaaca

SEQ ID NO: 2621139 - RNA, 19 nt, Artificial Sequence
  Description of Artificial Sequence: Synthetic oligonucleotide
auaucguuuacuauaccuu

SEQ ID NO: 2621140 - RNA, 19 nt, Artificial Sequence
  Description of Artificial Sequence: Synthetic oligonucleotide
aagcucaauuucaagguua

SEQ ID NO: 2621141 - RNA, 19 nt, Artificial Sequence
  Description of Artificial Sequence: Synthetic oligonucleotide
guuuacuauaccuuucaau

SEQ ID NO: 2621142 - RNA, 19 nt, Artificial Sequence
  Description of Artificial Sequence: Synthetic oligonucleotide
cagcauguaauccucaucu

SEQ ID NO: 2621143 - RNA, 19 nt, Artificial Sequence
  Description of Artificial Sequence: Synthetic oligonucleotide
agccaucagaaccaauuau

SEQ ID NO: 2621144 - RNA, 19 nt, Artificial Sequence
  Description of Artificial Sequence: Synthetic oligonucleotide
acaacaucaggcaacuuuu

SEQ ID NO: 2621145 - RNA, 19 nt, Artificial Sequence
  Description of Artificial Sequence: Synthetic oligonucleotide
ggcacacaaacuuaagcuc

SEQ ID NO: 2621146 - RNA, 19 nt, Artificial Sequence
  Description of Artificial Sequence: Synthetic oligonucleotide
guaucaggaaacaguggug

SEQ ID NO: 2621147 - RNA, 19 nt, Artificial Sequence
  Description of Artificial Sequence: Synthetic oligonucleotide
cuguaaguuaagacaagaa

SEQ ID NO: 2621148 - RNA, 19 nt, Artificial Sequence
  Description of Artificial Sequence: Synthetic oligonucleotide
uuucuugcagguguuucaa

SEQ ID NO: 2621149 - RNA, 19 nt, Artificial Sequence
  Description of Artificial Sequence: Synthetic oligonucleotide
cuugcagguguuucaauaa

SEQ ID NO: 2621150 - RNA, 19 nt, Artificial Sequence
  Description of Artificial Sequence: Synthetic oligonucleotide
  modified_base (7)..(7): a, c, u, g, unknown or other
agucuunuccagucuggua

SEQ ID NO: 2621151 - RNA, 19 nt, Artificial Sequence
  Description of Artificial Sequence: Synthetic oligonucleotide
uuaaagguauaggcagcac

SEQ ID NO: 2621152 - RNA, 19 nt, Artificial Sequence
  Description of Artificial Sequence: Synthetic oligonucleotide
uauuaccagccaucagaac

SEQ ID NO: 2621153 - RNA, 19 nt, Artificial Sequence
  Description of Artificial Sequence: Synthetic oligonucleotide
gguagauaauuuuaauaua

SEQ ID NO: 2621154 - RNA, 19 nt, Artificial Sequence
  Description of Artificial Sequence: Synthetic oligonucleotide
cuguuuacaagcggagaac

SEQ ID NO: 2621155 - RNA, 19 nt, Artificial Sequence
  Description of Artificial Sequence: Synthetic oligonucleotide
agggcucccuguuuccagg

SEQ ID NO: 2621156 - RNA, 19 nt, Artificial Sequence
  Description of Artificial Sequence: Synthetic oligonucleotide
uggugguggcuucaacaca

SEQ ID NO: 2621157 - RNA, 19 nt, Artificial Sequence
  Description of Artificial Sequence: Synthetic oligonucleotide
acccuguaaguuaagacaa

SEQ ID NO: 2621158 - RNA, 19 nt, Artificial Sequence
  Description of Artificial Sequence: Synthetic oligonucleotide
agguuaucuugauccugag

SEQ ID NO: 2621159 - RNA, 19 nt, Artificial Sequence
  Description of Artificial Sequence: Synthetic oligonucleotide
aaaggggaaagcagguuuu

SEQ ID NO: 2621160 - RNA, 19 nt, Artificial Sequence
  Description of Artificial Sequence: Synthetic oligonucleotide
acguccucuuccuuuauua

SEQ ID NO: 2621161 - RNA, 19 nt, Artificial Sequence
  Description of Artificial Sequence: Synthetic oligonucleotide
aucaggaaacagugguggu

SEQ ID NO: 2621162 - RNA, 19 nt, Artificial Sequence
  Description of Artificial Sequence: Synthetic oligonucleotide
caagguuaucuugauccug

SEQ ID NO: 2621163 - RNA, 19 nt, Artificial Sequence
  Description of Artificial Sequence: Synthetic oligonucleotide
uucuggcuauuuucucugc

SEQ ID NO: 2621164 - RNA, 19 nt, Artificial Sequence
  Description of Artificial Sequence: Synthetic oligonucleotide
auccuuagaggagaagggu

SEQ ID NO: 2621165 - RNA, 19 nt, Artificial Sequence
  Description of Artificial Sequence: Synthetic oligonucleotide
aucccuuagguagauaauu

SEQ ID NO: 2621166 - RNA, 19 nt, Artificial Sequence
  Description of Artificial Sequence: Synthetic oligonucleotide
cacuguuucucucagcucu

SEQ ID NO: 2621167 - RNA, 19 nt, Artificial Sequence
  Description of Artificial Sequence: Synthetic oligonucleotide
  modified_base (17)..(17): a, c, u, g, unknown or other
ucucucuggaagucuunuc

SEQ ID NO: 2621168 - RNA, 19 nt, Artificial Sequence
  Description of Artificial Sequence: Synthetic oligonucleotide
uaccuucauauaucguuua

SEQ ID NO: 2621169 - RNA, 19 nt, Artificial Sequence
  Description of Artificial Sequence: Synthetic oligonucleotide
  modified_base (3)..(3): a, c, u, g, unknown or other
uunuccagucugguaucca

SEQ ID NO: 2621170 - RNA, 19 nt, Artificial Sequence
  Description of Artificial Sequence: Synthetic oligonucleotide
cuuccuuuauuaccagcca

SEQ ID NO: 2621171 - RNA, 19 nt, Artificial Sequence
  Description of Artificial Sequence: Synthetic oligonucleotide
auaccuucauauaucguuu

SEQ ID NO: 2621172 - RNA, 19 nt, Artificial Sequence
  Description of Artificial Sequence: Synthetic oligonucleotide
ugagaucaucucucuggaa

SEQ ID NO: 2621173 - RNA, 19 nt, Artificial Sequence
  Description of Artificial Sequence: Synthetic oligonucleotide
cugagaucaucucucugga

SEQ ID NO: 2621174 - RNA, 19 nt, Artificial Sequence
  Description of Artificial Sequence: Synthetic oligonucleotide
cuuuuguuauaccuucaua

SEQ ID NO: 2621175 - RNA, 19 nt, Artificial Sequence
  Description of Artificial Sequence: Synthetic oligonucleotide
accugagaucaucucucug

SEQ ID NO: 2621176 - RNA, 19 nt, Artificial Sequence
  Description of Artificial Sequence: Synthetic oligonucleotide
uuccccucugcugaagcca

SEQ ID NO: 2621177 - RNA, 19 nt, Artificial Sequence
  Description of Artificial Sequence: Synthetic oligonucleotide
gguuuguaaucuguaucag

SEQ ID NO: 2621178 - RNA, 19 nt, Artificial Sequence
  Description of Artificial Sequence: Synthetic oligonucleotide
gaucaucucucuggaaguc

SEQ ID NO: 2621179 - RNA, 19 nt, Artificial Sequence
  Description of Artificial Sequence: Synthetic oligonucleotide
aggguucuggcuauuuucu

SEQ ID NO: 2621180 - RNA, 19 nt, Artificial Sequence
  Description of Artificial Sequence: Synthetic oligonucleotide
aucaggcaacuuuuccccu

SEQ ID NO: 2621181 - RNA, 19 nt, Artificial Sequence
  Description of Artificial Sequence: Synthetic oligonucleotide
acuaaggcacacaaacuua

SEQ ID NO: 2621182 - RNA, 19 nt, Artificial Sequence
  Description of Artificial Sequence: Synthetic oligonucleotide
ucguuucacuguuucucuc

SEQ ID NO: 2621183 - RNA, 19 nt, Artificial Sequence
  Description of Artificial Sequence: Synthetic oligonucleotide
ccuuagaggagaaggguuc

SEQ ID NO: 2621184 - RNA, 19 nt, Artificial Sequence
  Description of Artificial Sequence: Synthetic oligonucleotide
ugguauccauucuucuuuu

SEQ ID NO: 2621185 - RNA, 19 nt, Artificial Sequence
  Description of Artificial Sequence: Synthetic oligonucleotide
agccucaauauuaaaggua

SEQ ID NO: 2621186 - RNA, 19 nt, Artificial Sequence
  Description of Artificial Sequence: Synthetic oligonucleotide
aggcauucguuucacuguu

SEQ ID NO: 2621187 - RNA, 19 nt, Artificial Sequence
  Description of Artificial Sequence: Synthetic oligonucleotide
aaacugcaggggagucacc

SEQ ID NO: 2621188 - RNA, 19 nt, Artificial Sequence
  Description of Artificial Sequence: Synthetic oligonucleotide
guuucucucagcucuugcu

SEQ ID NO: 2621189 - RNA, 19 nt, Artificial Sequence
  Description of Artificial Sequence: Synthetic oligonucleotide
gaggagaaggguucuggcu

SEQ ID NO: 2621190 - RNA, 19 nt, Artificial Sequence
  Description of Artificial Sequence: Synthetic oligonucleotide
ggcuucaacacaacaucag

SEQ ID NO: 2621191 - RNA, 19 nt, Artificial Sequence
  Description of Artificial Sequence: Synthetic oligonucleotide
uccucaucuucuccuguuu

SEQ ID NO: 2621192 - RNA, 19 nt, Artificial Sequence
  Description of Artificial Sequence: Synthetic oligonucleotide
ugcaggggagucacccugu

SEQ ID NO: 2621193 - RNA, 19 nt, Artificial Sequence
  Description of Artificial Sequence: Synthetic oligonucleotide
gcagguuuucaucccuuag

SEQ ID NO: 2621194 - RNA, 19 nt, Artificial Sequence
  Description of Artificial Sequence: Synthetic oligonucleotide
cagaagguaauaagugaua

SEQ ID NO: 2621195 - RNA, 19 nt, Artificial Sequence
  Description of Artificial Sequence: Synthetic oligonucleotide
cugcaggggagucacccug

SEQ ID NO: 2621196 - RNA, 19 nt, Artificial Sequence
  Description of Artificial Sequence: Synthetic oligonucleotide
uucaggggcacugguuugu

SEQ ID NO: 2621197 - RNA, 19 nt, Artificial Sequence
  Description of Artificial Sequence: Synthetic oligonucleotide
agcauguaauccucaucuu

SEQ ID NO: 2621198 - RNA, 19 nt, Artificial Sequence
  Description of Artificial Sequence: Synthetic oligonucleotide
gaacuaaggcacacaaacu

SEQ ID NO: 2621199 - RNA, 19 nt, Artificial Sequence
  Description of Artificial Sequence: Synthetic oligonucleotide
ggcaacuuuuccccucugc

SEQ ID NO: 2621200 - RNA, 19 nt, Artificial Sequence
  Description of Artificial Sequence: Synthetic oligonucleotide
gcacacaaacuuaagcuca

SEQ ID NO: 2621201 - RNA, 19 nt, Artificial Sequence
  Description of Artificial Sequence: Synthetic oligonucleotide
cacaacaucaggcaacuuu

SEQ ID NO: 2621202 - RNA, 19 nt, Artificial Sequence
  Description of Artificial Sequence: Synthetic oligonucleotide
acugcaggggagucacccu

SEQ ID NO: 2621203 - RNA, 19 nt, Artificial Sequence
  Description of Artificial Sequence: Synthetic oligonucleotide
gcauucguuucacuguuuc

SEQ ID NO: 2621204 - RNA, 19 nt, Artificial Sequence
  Description of Artificial Sequence: Synthetic oligonucleotide
agcucaauuucaagguuau

SEQ ID NO: 2621205 - RNA, 19 nt, Artificial Sequence
  Description of Artificial Sequence: Synthetic oligonucleotide
uccccucugcugaagccaa

SEQ ID NO: 2621206 - RNA, 19 nt, Artificial Sequence
  Description of Artificial Sequence: Synthetic oligonucleotide
gguauccauucuucuuuug

SEQ ID NO: 2621207 - RNA, 19 nt, Artificial Sequence
  Description of Artificial Sequence: Synthetic oligonucleotide
gaaugaccugagaucaucu

SEQ ID NO: 2621208 - RNA, 19 nt, Artificial Sequence
  Description of Artificial Sequence: Synthetic oligonucleotide
ggcacugguuuguaaucug

SEQ ID NO: 2621209 - RNA, 19 nt, Artificial Sequence
  Description of Artificial Sequence: Synthetic oligonucleotide
agcagguuuucaucccuua

SEQ ID NO: 2621210 - RNA, 19 nt, Artificial Sequence
  Description of Artificial Sequence: Synthetic oligonucleotide
gguuaucuugauccugaga

SEQ ID NO: 2621211 - RNA, 19 nt, Artificial Sequence
  Description of Artificial Sequence: Synthetic oligonucleotide
cagggcucccuguuuccag

SEQ ID NO: 2621212 - RNA, 19 nt, Artificial Sequence
  Description of Artificial Sequence: Synthetic oligonucleotide
uuucaucccuuagguagau

SEQ ID NO: 2621213 - RNA, 19 nt, Artificial Sequence
  Description of Artificial Sequence: Synthetic oligonucleotide
ccuuagguagauaauuuua

SEQ ID NO: 2621214 - RNA, 19 nt, Artificial Sequence
  Description of Artificial Sequence: Synthetic oligonucleotide
ucuccccaaaggggaaagc

SEQ ID NO: 2621215 - RNA, 19 nt, Artificial Sequence
  Description of Artificial Sequence: Synthetic oligonucleotide
caaaggggaaagcagguuu

SEQ ID NO: 2621216 - RNA, 19 nt, Artificial Sequence
  Description of Artificial Sequence: Synthetic oligonucleotide
gucuccccaaaggggaaag

SEQ ID NO: 2621217 - RNA, 19 nt, Artificial Sequence
  Description of Artificial Sequence: Synthetic oligonucleotide
ggugguggcuucaacacaa

SEQ ID NO: 2621218 - RNA, 19 nt, Artificial Sequence
  Description of Artificial Sequence: Synthetic oligonucleotide
cacugguuuguaaucugua

SEQ ID NO: 2621219 - RNA, 19 nt, Artificial Sequence
  Description of Artificial Sequence: Synthetic oligonucleotide
gcaacuuuuccccucugcu

SEQ ID NO: 2621220 - RNA, 19 nt, Artificial Sequence
  Description of Artificial Sequence: Synthetic oligonucleotide
cacaaacuuaagcucaauu

SEQ ID NO: 2621221 - RNA, 19 nt, Artificial Sequence
  Description of Artificial Sequence: Synthetic oligonucleotide
gccaacagccucaauauua

SEQ ID NO: 2621222 - RNA, 19 nt, Artificial Sequence
  Description of Artificial Sequence: Synthetic oligonucleotide
aagcagguuuucaucccuu

SEQ ID NO: 2621223 - RNA, 19 nt, Artificial Sequence
  Description of Artificial Sequence: Synthetic oligonucleotide
guuuacaagcggagaacua

SEQ ID NO: 2621224 - RNA, 19 nt, Artificial Sequence
  Description of Artificial Sequence: Synthetic oligonucleotide
uccuguuuucaggggcacu

SEQ ID NO: 2621225 - RNA, 19 nt, Artificial Sequence
  Description of Artificial Sequence: Synthetic oligonucleotide
aagucuccccaaaggggaa

SEQ ID NO: 2621226 - RNA, 19 nt, Artificial Sequence
  Description of Artificial Sequence: Synthetic oligonucleotide
gcucccuguuuccagguca

SEQ ID NO: 2621227 - RNA, 19 nt, Artificial Sequence
  Description of Artificial Sequence: Synthetic oligonucleotide
agccaacagccucaauauu

SEQ ID NO: 2621228 - RNA, 19 nt, Artificial Sequence
  Description of Artificial Sequence: Synthetic oligonucleotide
ccuguaaguuaagacaaga

SEQ ID NO: 2621229 - RNA, 19 nt, Artificial Sequence
  Description of Artificial Sequence: Synthetic oligonucleotide
gccucaauauuaaagguau

SEQ ID NO: 2621230 - RNA, 19 nt, Artificial Sequence
  Description of Artificial Sequence: Synthetic oligonucleotide
gaccugagaucaucucucu

SEQ ID NO: 2621231 - RNA, 19 nt, Artificial Sequence
  Description of Artificial Sequence: Synthetic oligonucleotide
ggggcacugguuuguaauc

SEQ ID NO: 2621232 - RNA, 19 nt, Artificial Sequence
  Description of Artificial Sequence: Synthetic oligonucleotide
cccuguaaguuaagacaag

SEQ ID NO: 2621233 - RNA, 19 nt, Artificial Sequence
  Description of Artificial Sequence: Synthetic oligonucleotide
gguuuucaucccuuaggua

SEQ ID NO: 2621234 - RNA, 19 nt, Artificial Sequence
  Description of Artificial Sequence: Synthetic oligonucleotide
acacaaacuuaagcucaau

SEQ ID NO: 2621235 - RNA, 19 nt, Artificial Sequence
  Description of Artificial Sequence: Synthetic oligonucleotide
cuugcuucaaggccagcau

SEQ ID NO: 2621236 - RNA, 19 nt, Artificial Sequence
  Description of Artificial Sequence: Synthetic oligonucleotide
aucuugauccugagagaaa

SEQ ID NO: 2621237 - RNA, 19 nt, Artificial Sequence
  Description of Artificial Sequence: Synthetic oligonucleotide
gguggcuucaacacaacau

SEQ ID NO: 2621238 - RNA, 19 nt, Artificial Sequence
  Description of Artificial Sequence: Synthetic oligonucleotide
cuccuguuuucaggggcac

SEQ ID NO: 2621239 - RNA, 19 nt, Artificial Sequence
  Description of Artificial Sequence: Synthetic oligonucleotide
cuuagaggagaaggguucu

SEQ ID NO: 2621240 - RNA, 19 nt, Artificial Sequence
  Description of Artificial Sequence: Synthetic oligonucleotide
ccucugcugaagccaacag

SEQ ID NO: 2621241 - RNA, 19 nt, Artificial Sequence
  Description of Artificial Sequence: Synthetic oligonucleotide
caguggugguggcuucaac

SEQ ID NO: 2621242 - RNA, 19 nt, Artificial Sequence
  Description of Artificial Sequence: Synthetic oligonucleotide
agcggagaacuaaggcaca

SEQ ID NO: 2621243 - RNA, 19 nt, Artificial Sequence
  Description of Artificial Sequence: Synthetic oligonucleotide
caacagccucaauauuaaa

SEQ ID NO: 2621244 - RNA, 19 nt, Artificial Sequence
  Description of Artificial Sequence: Synthetic oligonucleotide
ggggaaagcagguuuucau

SEQ ID NO: 2621245 - RNA, 19 nt, Artificial Sequence
  Description of Artificial Sequence: Synthetic oligonucleotide
cguccucuuccuuuauuac

SEQ ID NO: 2621246 - RNA, 19 nt, Artificial Sequence
  Description of Artificial Sequence: Synthetic oligonucleotide
  modified_base (19)..(19): a, c, u, g, unknown or other
caucucucuggaagucuun

SEQ ID NO: 2621247 - RNA, 19 nt, Artificial Sequence
  Description of Artificial Sequence: Synthetic oligonucleotide
uucaucccuuagguagaua

SEQ ID NO: 2621248 - RNA, 19 nt, Artificial Sequence
  Description of Artificial Sequence: Synthetic oligonucleotide
cguuucacuguuucucuca

SEQ ID NO: 2621249 - RNA, 19 nt, Artificial Sequence
  Description of Artificial Sequence: Synthetic oligonucleotide
cagucugguauccauucuu

SEQ ID NO: 2621250 - RNA, 19 nt, Artificial Sequence
  Description of Artificial Sequence: Synthetic oligonucleotide
caucccuuagguagauaau

SEQ ID NO: 2621251 - RNA, 19 nt, Artificial Sequence
  Description of Artificial Sequence: Synthetic oligonucleotide
gugguggcuucaacacaac

SEQ ID NO: 2621252 - RNA, 19 nt, Artificial Sequence
  Description of Artificial Sequence: Synthetic oligonucleotide
guuuucaggggcacugguu

SEQ ID NO: 2621253 - RNA, 19 nt, Artificial Sequence
  Description of Artificial Sequence: Synthetic oligonucleotide
ggggagucacccuguaagu

SEQ ID NO: 2621254 - RNA, 19 nt, Artificial Sequence
  Description of Artificial Sequence: Synthetic oligonucleotide
ccuucauauaucguuuacu

SEQ ID NO: 2621255 - RNA, 19 nt, Artificial Sequence
  Description of Artificial Sequence: Synthetic oligonucleotide
ggagaaggguucuggcuau

SEQ ID NO: 2621256 - RNA, 19 nt, Artificial Sequence
  Description of Artificial Sequence: Synthetic oligonucleotide
ccaggucagaagguaauaa

SEQ ID NO: 2621257 - RNA, 19 nt, Artificial Sequence
  Description of Artificial Sequence: Synthetic oligonucleotide
cugaagccaacagccucaa

SEQ ID NO: 2621258 - RNA, 19 nt, Artificial Sequence
  Description of Artificial Sequence: Synthetic oligonucleotide
caggggagucacccuguaa

SEQ ID NO: 2621259 - RNA, 19 nt, Artificial Sequence
  Description of Artificial Sequence: Synthetic oligonucleotide
caggggcacugguuuguaa

SEQ ID NO: 2621260 - RNA, 19 nt, Artificial Sequence
  Description of Artificial Sequence: Synthetic oligonucleotide
ccucaauauuaaagguaua

SEQ ID NO: 2621261 - RNA, 19 nt, Artificial Sequence
  Description of Artificial Sequence: Synthetic oligonucleotide
gggcacugguuuguaaucu

SEQ ID NO: 2621262 - RNA, 19 nt, Artificial Sequence
  Description of Artificial Sequence: Synthetic oligonucleotide
acacaacaucaggcaacuu

SEQ ID NO: 2621263 - RNA, 19 nt, Artificial Sequence
  Description of Artificial Sequence: Synthetic oligonucleotide
ggcucccuguuuccagguc

SEQ ID NO: 2621264 - RNA, 19 nt, Artificial Sequence
  Description of Artificial Sequence: Synthetic oligonucleotide
gcacugguuuguaaucugu

SEQ ID NO: 2621265 - RNA, 19 nt, Artificial Sequence
  Description of Artificial Sequence: Synthetic oligonucleotide
cccuguuuccaggucagaa

SEQ ID NO: 2621266 - RNA, 19 nt, Artificial Sequence
  Description of Artificial Sequence: Synthetic oligonucleotide
cguuuacuauaccuuucaa

SEQ ID NO: 2621267 - RNA, 19 nt, Artificial Sequence
  Description of Artificial Sequence: Synthetic oligonucleotide
cccuuagguagauaauuuu

SEQ ID NO: 2621268 - RNA, 19 nt, Artificial Sequence
  Description of Artificial Sequence: Synthetic oligonucleotide
ggccagcauguaauccuca

SEQ ID NO: 2621269 - RNA, 19 nt, Artificial Sequence
  Description of Artificial Sequence: Synthetic oligonucleotide
cacguccucuuccuuuauu

SEQ ID NO: 2621270 - RNA, 19 nt, Artificial Sequence
  Description of Artificial Sequence: Synthetic oligonucleotide
gcaggggagucacccugua

SEQ ID NO: 2621271 - RNA, 19 nt, Artificial Sequence
  Description of Artificial Sequence: Synthetic oligonucleotide
gcagcacguccucuuccuu

SEQ ID NO: 2621272 - RNA, 19 nt, Artificial Sequence
  Description of Artificial Sequence: Synthetic oligonucleotide
  modified_base (1)..(1): a, c, u, g, unknown or other
nuccagucugguauccauu

SEQ ID NO: 2621273 - RNA, 19 nt, Artificial Sequence
  Description of Artificial Sequence: Synthetic oligonucleotide
uucaacaucaaauugcagg

SEQ ID NO: 2621274 - RNA, 19 nt, Artificial Sequence
  Description of Artificial Sequence: Synthetic oligonucleotide
ugagugaucaccaauaaac

SEQ ID NO: 2621275 - RNA, 19 nt, Artificial Sequence
  Description of Artificial Sequence: Synthetic oligonucleotide
uguaccauugucuagaccu

SEQ ID NO: 2621276 - RNA, 19 nt, Artificial Sequence
  Description of Artificial Sequence: Synthetic oligonucleotide
auugucuagaccuauggac

SEQ ID NO: 2621277 - RNA, 19 nt, Artificial Sequence
  Description of Artificial Sequence: Synthetic oligonucleotide
cuuguuauaaucuucugac

SEQ ID NO: 2621278 - RNA, 19 nt, Artificial Sequence
  Description of Artificial Sequence: Synthetic oligonucleotide
ucuuuaaccaaacacgaac

SEQ ID NO: 2621279 - RNA, 19 nt, Artificial Sequence
  Description of Artificial Sequence: Synthetic oligonucleotide
ucaacaucaaauugcaggc

SEQ ID NO: 2621280 - RNA, 19 nt, Artificial Sequence
  Description of Artificial Sequence: Synthetic oligonucleotide
uguuauaaucuucugacaa

SEQ ID NO: 2621281 - RNA, 19 nt, Artificial Sequence
  Description of Artificial Sequence: Synthetic oligonucleotide
uaaucuucugacaaaauaa

SEQ ID NO: 2621282 - RNA, 19 nt, Artificial Sequence
  Description of Artificial Sequence: Synthetic oligonucleotide
agugaucaccaauaaacac

SEQ ID NO: 2621283 - RNA, 19 nt, Artificial Sequence
  Description of Artificial Sequence: Synthetic oligonucleotide
ugagauuguaccauugucu

SEQ ID NO: 2621284 - RNA, 19 nt, Artificial Sequence
  Description of Artificial Sequence: Synthetic oligonucleotide
aacaggaccaucgucacuc

SEQ ID NO: 2621285 - RNA, 19 nt, Artificial Sequence
  Description of Artificial Sequence: Synthetic oligonucleotide
ucuuguuauaaucuucuga

SEQ ID NO: 2621286 - RNA, 19 nt, Artificial Sequence
  Description of Artificial Sequence: Synthetic oligonucleotide
accaauaaacacaugacgg

SEQ ID NO: 2621287 - RNA, 19 nt, Artificial Sequence
  Description of Artificial Sequence: Synthetic oligonucleotide
ucuuccgagacgcugauga

SEQ ID NO: 2621288 - RNA, 19 nt, Artificial Sequence
  Description of Artificial Sequence: Synthetic oligonucleotide
uacgguaacaucccaggcg

SEQ ID NO: 2621289 - RNA, 19 nt, Artificial Sequence
  Description of Artificial Sequence: Synthetic oligonucleotide
acgguaacaucccaggcgc

SEQ ID NO: 2621290 - RNA, 19 nt, Artificial Sequence
  Description of Artificial Sequence: Synthetic oligonucleotide
caugaugacggagugaucg

SEQ ID NO: 2621291 - RNA, 19 nt, Artificial Sequence
  Description of Artificial Sequence: Synthetic oligonucleotide
uccuuaggcacgaucaccg

SEQ ID NO: 2621292 - RNA, 19 nt, Artificial Sequence
  Description of Artificial Sequence: Synthetic oligonucleotide
agaacaaacaggaccaucg

SEQ ID NO: 2621293 - RNA, 19 nt, Artificial Sequence
  Description of Artificial Sequence: Synthetic oligonucleotide
ucaaauugcaggcccgagg

SEQ ID NO: 2621294 - RNA, 19 nt, Artificial Sequence
  Description of Artificial Sequence: Synthetic oligonucleotide
cuuguuuccggguuaaaag

SEQ ID NO: 2621295 - RNA, 19 nt, Artificial Sequence
  Description of Artificial Sequence: Synthetic oligonucleotide
ugugcaguuuucuuguucc

SEQ ID NO: 2621296 - RNA, 19 nt, Artificial Sequence
  Description of Artificial Sequence: Synthetic oligonucleotide
aauaugcuuggccaguacu

SEQ ID NO: 2621297 - RNA, 19 nt, Artificial Sequence
  Description of Artificial Sequence: Synthetic oligonucleotide
auaaauucugagauuguac

SEQ ID NO: 2621298 - RNA, 19 nt, Artificial Sequence
  Description of Artificial Sequence: Synthetic oligonucleotide
caccaauaaacacaugacg

SEQ ID NO: 2621299 - RNA, 19 nt, Artificial Sequence
  Description of Artificial Sequence: Synthetic oligonucleotide
caaauugcaggcccgaggc

SEQ ID NO: 2621300 - RNA, 19 nt, Artificial Sequence
  Description of Artificial Sequence: Synthetic oligonucleotide
cacugguacgguaacaucc

SEQ ID NO: 2621301 - RNA, 19 nt, Artificial Sequence
  Description of Artificial Sequence: Synthetic oligonucleotide
ugaucaccaauaaacacau

SEQ ID NO: 2621302 - RNA, 19 nt, Artificial Sequence
  Description of Artificial Sequence: Synthetic oligonucleotide
aaauugcaggcccgaggcc

SEQ ID NO: 2621303 - RNA, 19 nt, Artificial Sequence
  Description of Artificial Sequence: Synthetic oligonucleotide
uucugacaaaauaaauucu

SEQ ID NO: 2621304 - RNA, 19 nt, Artificial Sequence
  Description of Artificial Sequence: Synthetic oligonucleotide
accaucgucacucugcucu

SEQ ID NO: 2621305 - RNA, 19 nt, Artificial Sequence
  Description of Artificial Sequence: Synthetic oligonucleotide
auugcauggaauaugcuug

SEQ ID NO: 2621306 - RNA, 19 nt, Artificial Sequence
  Description of Artificial Sequence: Synthetic oligonucleotide
uuucacaggugucaucuug

SEQ ID NO: 2621307 - RNA, 19 nt, Artificial Sequence
  Description of Artificial Sequence: Synthetic oligonucleotide
uccuccuuaggcacgauca

SEQ ID NO: 2621308 - RNA, 19 nt, Artificial Sequence
  Description of Artificial Sequence: Synthetic oligonucleotide
aauaaauucugagauugua

SEQ ID NO: 2621309 - RNA, 19 nt, Artificial Sequence
  Description of Artificial Sequence: Synthetic oligonucleotide
uuugaggauggugacuugg

SEQ ID NO: 2621310 - RNA, 19 nt, Artificial Sequence
  Description of Artificial Sequence: Synthetic oligonucleotide
uuauaaucuucugacaaaa

SEQ ID NO: 2621311 - RNA, 19 nt, Artificial Sequence
  Description of Artificial Sequence: Synthetic oligonucleotide
uuguuuccggguuaaaaga

SEQ ID NO: 2621312 - RNA, 19 nt, Artificial Sequence
  Description of Artificial Sequence: Synthetic oligonucleotide
aaccaaacacgaacugucc

SEQ ID NO: 2621313 - RNA, 19 nt, Artificial Sequence
  Description of Artificial Sequence: Synthetic oligonucleotide
uuaggcacgaucaccgcca

SEQ ID NO: 2621314 - RNA, 19 nt, Artificial Sequence
  Description of Artificial Sequence: Synthetic oligonucleotide
gguuaaaagacaugcauga

SEQ ID NO: 2621315 - RNA, 19 nt, Artificial Sequence
  Description of Artificial Sequence: Synthetic oligonucleotide
gauuguaccauugucuaga

SEQ ID NO: 2621316 - RNA, 19 nt, Artificial Sequence
  Description of Artificial Sequence: Synthetic oligonucleotide
gguuucaacaucaaauugc

SEQ ID NO: 2621317 - RNA, 19 nt, Artificial Sequence
  Description of Artificial Sequence: Synthetic oligonucleotide
acagucuucuuguuuccgg

SEQ ID NO: 2621318 - RNA, 19 nt, Artificial Sequence
  Description of Artificial Sequence: Synthetic oligonucleotide
acaugcaugaacauggaga

SEQ ID NO: 2621319 - RNA, 19 nt, Artificial Sequence
  Description of Artificial Sequence: Synthetic oligonucleotide
cauggaauaugcuuggcca

SEQ ID NO: 2621320 - RNA, 19 nt, Artificial Sequence
  Description of Artificial Sequence: Synthetic oligonucleotide
uugcauggaauaugcuugg

SEQ ID NO: 2621321 - RNA, 19 nt, Artificial Sequence
  Description of Artificial Sequence: Synthetic oligonucleotide
auuguaccauugucuagac

SEQ ID NO: 2621322 - RNA, 19 nt, Artificial Sequence
  Description of Artificial Sequence: Synthetic oligonucleotide
acacaugacggguuucaac

SEQ ID NO: 2621323 - RNA, 19 nt, Artificial Sequence
  Description of Artificial Sequence: Synthetic oligonucleotide
cccucuuuaaccaaacacg

SEQ ID NO: 2621324 - RNA, 19 nt, Artificial Sequence
  Description of Artificial Sequence: Synthetic oligonucleotide
uuucaacaucaaauugcag

SEQ ID NO: 2621325 - RNA, 19 nt, Artificial Sequence
  Description of Artificial Sequence: Synthetic oligonucleotide
uccgagacgcugaugacac

SEQ ID NO: 2621326 - RNA, 19 nt, Artificial Sequence
  Description of Artificial Sequence: Synthetic oligonucleotide
  modified_base (3)..(3): a, c, u, g, unknown or other
acnguccacaugaugacgg

SEQ ID NO: 2621327 - RNA, 19 nt, Artificial Sequence
  Description of Artificial Sequence: Synthetic oligonucleotide
auggaauaugcuuggccag

SEQ ID NO: 2621328 - RNA, 19 nt, Artificial Sequence
  Description of Artificial Sequence: Synthetic oligonucleotide
gguacgguaacaucccagg

SEQ ID NO: 2621329 - RNA, 19 nt, Artificial Sequence
  Description of Artificial Sequence: Synthetic oligonucleotide
aacuguccugucuuccgag

SEQ ID NO: 2621330 - RNA, 19 nt, Artificial Sequence
  Description of Artificial Sequence: Synthetic oligonucleotide
ccaauaaacacaugacggg

SEQ ID NO: 2621331 - RNA, 19 nt, Artificial Sequence
  Description of Artificial Sequence: Synthetic oligonucleotide
uggugacuuggccugagug

SEQ ID NO: 2621332 - RNA, 19 nt, Artificial Sequence
  Description of Artificial Sequence: Synthetic oligonucleotide
acugguacgguaacauccc

SEQ ID NO: 2621333 - RNA, 19 nt, Artificial Sequence
  Description of Artificial Sequence: Synthetic oligonucleotide
  modified_base (16)..(16): a, c, u, g, unknown or other
cuuucucccaccgacnguc

SEQ ID NO: 2621334 - RNA, 19 nt, Artificial Sequence
  Description of Artificial Sequence: Synthetic oligonucleotide
acugccugagaacagcaca

SEQ ID NO: 2621335 - RNA, 19 nt, Artificial Sequence
  Description of Artificial Sequence: Synthetic oligonucleotide
augacggagugaucggaac

SEQ ID NO: 2621336 - RNA, 19 nt, Artificial Sequence
  Description of Artificial Sequence: Synthetic oligonucleotide
gagugaucggaacugccug

SEQ ID NO: 2621337 - RNA, 19 nt, Artificial Sequence
  Description of Artificial Sequence: Synthetic oligonucleotide
gacaugcaugaacauggag

SEQ ID NO: 2621338 - RNA, 19 nt, Artificial Sequence
  Description of Artificial Sequence: Synthetic oligonucleotide
gaaggcauugcauggaaua

SEQ ID NO: 2621339 - RNA, 19 nt, Artificial Sequence
  Description of Artificial Sequence: Synthetic oligonucleotide
aacagcuuguccugcccug

SEQ ID NO: 2621340 - RNA, 19 nt, Artificial Sequence
  Description of Artificial Sequence: Synthetic oligonucleotide
gagauuguaccauugucua

SEQ ID NO: 2621341 - RNA, 19 nt, Artificial Sequence
  Description of Artificial Sequence: Synthetic oligonucleotide
gaucggaacugccugagaa

SEQ ID NO: 2621342 - RNA, 19 nt, Artificial Sequence
  Description of Artificial Sequence: Synthetic oligonucleotide
uucaccaccuccugcgacc

SEQ ID NO: 2621343 - RNA, 19 nt, Artificial Sequence
  Description of Artificial Sequence: Synthetic oligonucleotide
  modified_base (4)..(4): a, c, u, g, unknown or other
gacnguccacaugaugacg

SEQ ID NO: 2621344 - RNA, 19 nt, Artificial Sequence
  Description of Artificial Sequence: Synthetic oligonucleotide
cuuaggcacgaucaccgcc

SEQ ID NO: 2621345 - RNA, 19 nt, Artificial Sequence
  Description of Artificial Sequence: Synthetic oligonucleotide
augaugacggagugaucgg

SEQ ID NO: 2621346 - RNA, 19 nt, Artificial Sequence
  Description of Artificial Sequence: Synthetic oligonucleotide
ugaacauggagaaggcauu

SEQ ID NO: 2621347 - RNA, 19 nt, Artificial Sequence
  Description of Artificial Sequence: Synthetic oligonucleotide
cagucuucuuguuuccggg

SEQ ID NO: 2621348 - RNA, 19 nt, Artificial Sequence
  Description of Artificial Sequence: Synthetic oligonucleotide
ucggaacugccugagaaca

SEQ ID NO: 2621349 - RNA, 19 nt, Artificial Sequence
  Description of Artificial Sequence: Synthetic oligonucleotide
cugagauuguaccauuguc

SEQ ID NO: 2621350 - RNA, 19 nt, Artificial Sequence
  Description of Artificial Sequence: Synthetic oligonucleotide
aguacuguccacugucccu

SEQ ID NO: 2621351 - RNA, 19 nt, Artificial Sequence
  Description of Artificial Sequence: Synthetic oligonucleotide
augaacauggagaaggcau

SEQ ID NO: 2621352 - RNA, 19 nt, Artificial Sequence
  Description of Artificial Sequence: Synthetic oligonucleotide
acagcacugguacgguaac

SEQ ID NO: 2621353 - RNA, 19 nt, Artificial Sequence
  Description of Artificial Sequence: Synthetic oligonucleotide
ugacggagugaucggaacu

SEQ ID NO: 2621354 - RNA, 19 nt, Artificial Sequence
  Description of Artificial Sequence: Synthetic oligonucleotide
acggguuucaacaucaaau

SEQ ID NO: 2621355 - RNA, 19 nt, Artificial Sequence
  Description of Artificial Sequence: Synthetic oligonucleotide
ucuggugugcuugauaguu

SEQ ID NO: 2621356 - RNA, 19 nt, Artificial Sequence
  Description of Artificial Sequence: Synthetic oligonucleotide
agaccuauggacagucuuc

SEQ ID NO: 2621357 - RNA, 19 nt, Artificial Sequence
  Description of Artificial Sequence: Synthetic oligonucleotide
uagaccuauggacagucuu

SEQ ID NO: 2621358 - RNA, 19 nt, Artificial Sequence
  Description of Artificial Sequence: Synthetic oligonucleotide
uggaccggaucccagcaga

SEQ ID NO: 2621359 - RNA, 19 nt, Artificial Sequence
  Description of Artificial Sequence: Synthetic oligonucleotide
aguuugaggauggugacuu

SEQ ID NO: 2621360 - RNA, 19 nt, Artificial Sequence
  Description of Artificial Sequence: Synthetic oligonucleotide
acgaacuguccugucuucc

SEQ ID NO: 2621361 - RNA, 19 nt, Artificial Sequence
  Description of Artificial Sequence: Synthetic oligonucleotide
acgaucaccgccauguuca

SEQ ID NO: 2621362 - RNA, 19 nt, Artificial Sequence
  Description of Artificial Sequence: Synthetic oligonucleotide
caaacaggaccaucgucac

SEQ ID NO: 2621363 - RNA, 19 nt, Artificial Sequence
  Description of Artificial Sequence: Synthetic oligonucleotide
agugccguuaccccuccug

SEQ ID NO: 2621364 - RNA, 19 nt, Artificial Sequence
  Description of Artificial Sequence: Synthetic oligonucleotide
  modified_base (7)..(7): a, c, u, g, unknown or other
accgacnguccacaugaug

SEQ ID NO: 2621365 - RNA, 19 nt, Artificial Sequence
  Description of Artificial Sequence: Synthetic oligonucleotide
cacacgcuggaccggaucc

SEQ ID NO: 2621366 - RNA, 19 nt, Artificial Sequence
  Description of Artificial Sequence: Synthetic oligonucleotide
uccugcgaccccucgaccc

SEQ ID NO: 2621367 - RNA, 19 nt, Artificial Sequence
  Description of Artificial Sequence: Synthetic oligonucleotide
aacaucccaggcgcugccc

SEQ ID NO: 2621368 - RNA, 19 nt, Artificial Sequence
  Description of Artificial Sequence: Synthetic oligonucleotide
aacugccugagaacagcac

SEQ ID NO: 2621369 - RNA, 19 nt, Artificial Sequence
  Description of Artificial Sequence: Synthetic oligonucleotide
uuguaccauugucuagacc

SEQ ID NO: 2621370 - RNA, 19 nt, Artificial Sequence
  Description of Artificial Sequence: Synthetic oligonucleotide
gacggagugaucggaacug

SEQ ID NO: 2621371 - RNA, 19 nt, Artificial Sequence
  Description of Artificial Sequence: Synthetic oligonucleotide
aaggcauugcauggaauau

SEQ ID NO: 2621372 - RNA, 19 nt, Artificial Sequence
  Description of Artificial Sequence: Synthetic oligonucleotide
acaucaaauugcaggcccg

SEQ ID NO: 2621373 - RNA, 19 nt, Artificial Sequence
  Description of Artificial Sequence: Synthetic oligonucleotide
ugucccucuuuaaccaaac

SEQ ID NO: 2621374 - RNA, 19 nt, Artificial Sequence
  Description of Artificial Sequence: Synthetic oligonucleotide
cuuggccugagugaucacc

SEQ ID NO: 2621375 - RNA, 19 nt, Artificial Sequence
  Description of Artificial Sequence: Synthetic oligonucleotide
gagaacagcacacgcugga

SEQ ID NO: 2621376 - RNA, 19 nt, Artificial Sequence
  Description of Artificial Sequence: Synthetic oligonucleotide
ucucggagcagugccaggc

SEQ ID NO: 2621377 - RNA, 19 nt, Artificial Sequence
  Description of Artificial Sequence: Synthetic oligonucleotide
agugaucggaacugccuga

SEQ ID NO: 2621378 - RNA, 19 nt, Artificial Sequence
  Description of Artificial Sequence: Synthetic oligonucleotide
gaauaugcuuggccaguac

SEQ ID NO: 2621379 - RNA, 19 nt, Artificial Sequence
  Description of Artificial Sequence: Synthetic oligonucleotide
ggguuucaacaucaaauug

SEQ ID NO: 2621380 - RNA, 19 nt, Artificial Sequence
  Description of Artificial Sequence: Synthetic oligonucleotide
gcagugugcaguuuucuug

SEQ ID NO: 2621381 - RNA, 19 nt, Artificial Sequence
  Description of Artificial Sequence: Synthetic oligonucleotide
ugagcagugugcaguuuuc

SEQ ID NO: 2621382 - RNA, 19 nt, Artificial Sequence
  Description of Artificial Sequence: Synthetic oligonucleotide
ucggcuugcgggucagggg

SEQ ID NO: 2621383 - RNA, 19 nt, Artificial Sequence
  Description of Artificial Sequence: Synthetic oligonucleotide
ggguuaaaagacaugcaug

SEQ ID NO: 2621384 - RNA, 19 nt, Artificial Sequence
  Description of Artificial Sequence: Synthetic oligonucleotide
uuccgagacgcugaugaca

SEQ ID NO: 2621385 - RNA, 19 nt, Artificial Sequence
  Description of Artificial Sequence: Synthetic oligonucleotide
agagugccguuaccccucc

SEQ ID NO: 2621386 - RNA, 19 nt, Artificial Sequence
  Description of Artificial Sequence: Synthetic oligonucleotide
guacgguaacaucccaggc

SEQ ID NO: 2621387 - RNA, 19 nt, Artificial Sequence
  Description of Artificial Sequence: Synthetic oligonucleotide
uuccaguuugaggauggug

SEQ ID NO: 2621388 - RNA, 19 nt, Artificial Sequence
  Description of Artificial Sequence: Synthetic oligonucleotide
caacaucaaauugcaggcc

SEQ ID NO: 2621389 - RNA, 19 nt, Artificial Sequence
  Description of Artificial Sequence: Synthetic oligonucleotide
augacacccuccuccuuag

SEQ ID NO: 2621390 - RNA, 19 nt, Artificial Sequence
  Description of Artificial Sequence: Synthetic oligonucleotide
agacgcugaugacacccuc

SEQ ID NO: 2621391 - RNA, 19 nt, Artificial Sequence
  Description of Artificial Sequence: Synthetic oligonucleotide
uaacaucccaggcgcugcc

SEQ ID NO: 2621392 - RNA, 19 nt, Artificial Sequence
  Description of Artificial Sequence: Synthetic oligonucleotide
augacggguuucaacauca

SEQ ID NO: 2621393 - RNA, 19 nt, Artificial Sequence
  Description of Artificial Sequence: Synthetic oligonucleotide
uuccggguuaaaagacaug

SEQ ID NO: 2621394 - RNA, 19 nt, Artificial Sequence
  Description of Artificial Sequence: Synthetic oligonucleotide
uggaauaugcuuggccagu

SEQ ID NO: 2621395 - RNA, 19 nt, Artificial Sequence
  Description of Artificial Sequence: Synthetic oligonucleotide
uggugugcuugauaguuuu

SEQ ID NO: 2621396 - RNA, 19 nt, Artificial Sequence
  Description of Artificial Sequence: Synthetic oligonucleotide
gugccaggcgaacagcuug

SEQ ID NO: 2621397 - RNA, 19 nt, Artificial Sequence
  Description of Artificial Sequence: Synthetic oligonucleotide
ugaugacggagugaucgga

SEQ ID NO: 2621398 - RNA, 19 nt, Artificial Sequence
  Description of Artificial Sequence: Synthetic oligonucleotide
acggagugaucggaacugc

SEQ ID NO: 2621399 - RNA, 19 nt, Artificial Sequence
  Description of Artificial Sequence: Synthetic oligonucleotide
ccuauggacagucuucuug

SEQ ID NO: 2621400 - RNA, 19 nt, Artificial Sequence
  Description of Artificial Sequence: Synthetic oligonucleotide
caguacuguccacuguccc

SEQ ID NO: 2621401 - RNA, 19 nt, Artificial Sequence
  Description of Artificial Sequence: Synthetic oligonucleotide
caugacggguuucaacauc

SEQ ID NO: 2621402 - RNA, 19 nt, Artificial Sequence
  Description of Artificial Sequence: Synthetic oligonucleotide
acgcugaugacacccuccu

SEQ ID NO: 2621403 - RNA, 19 nt, Artificial Sequence
  Description of Artificial Sequence: Synthetic oligonucleotide
ucggagcagugccaggcga

SEQ ID NO: 2621404 - RNA, 19 nt, Artificial Sequence
  Description of Artificial Sequence: Synthetic oligonucleotide
gaacuguccugucuuccga

SEQ ID NO: 2621405 - RNA, 19 nt, Artificial Sequence
  Description of Artificial Sequence: Synthetic oligonucleotide
cuccuuaggcacgaucacc

SEQ ID NO: 2621406 - RNA, 19 nt, Artificial Sequence
  Description of Artificial Sequence: Synthetic oligonucleotide
  modified_base (15)..(15): a, c, u, g, unknown or other
uuucucccaccgacngucc

SEQ ID NO: 2621407 - RNA, 19 nt, Artificial Sequence
  Description of Artificial Sequence: Synthetic oligonucleotide
ugcccucugaaggauguga

SEQ ID NO: 2621408 - RNA, 19 nt, Artificial Sequence
  Description of Artificial Sequence: Synthetic oligonucleotide
aggcauugcauggaauaug

SEQ ID NO: 2621409 - RNA, 19 nt, Artificial Sequence
  Description of Artificial Sequence: Synthetic oligonucleotide
gucacucugcucuggugug

SEQ ID NO: 2621410 - RNA, 19 nt, Artificial Sequence
  Description of Artificial Sequence: Synthetic oligonucleotide
  modified_base (6)..(6): a, c, u, g, unknown or other
ccgacnguccacaugauga

SEQ ID NO: 2621411 - RNA, 19 nt, Artificial Sequence
  Description of Artificial Sequence: Synthetic oligonucleotide
agcacugguacgguaacau

SEQ ID NO: 2621412 - RNA, 19 nt, Artificial Sequence
  Description of Artificial Sequence: Synthetic oligonucleotide
ugaucggaacugccugaga

SEQ ID NO: 2621413 - RNA, 19 nt, Artificial Sequence
  Description of Artificial Sequence: Synthetic oligonucleotide
ggugacuuggccugaguga

SEQ ID NO: 2621414 - RNA, 19 nt, Artificial Sequence
  Description of Artificial Sequence: Synthetic oligonucleotide
acaugacggguuucaacau

SEQ ID NO: 2621415 - RNA, 19 nt, Artificial Sequence
  Description of Artificial Sequence: Synthetic oligonucleotide
cuguccugucuuccgagac

SEQ ID NO: 2621416 - RNA, 19 nt, Artificial Sequence
  Description of Artificial Sequence: Synthetic oligonucleotide
ugccaggcgaacagcuugu

SEQ ID NO: 2621417 - RNA, 19 nt, Artificial Sequence
  Description of Artificial Sequence: Synthetic oligonucleotide
acuguccugucuuccgaga

SEQ ID NO: 2621418 - RNA, 19 nt, Artificial Sequence
  Description of Artificial Sequence: Synthetic oligonucleotide
ccucuuuaaccaaacacga

SEQ ID NO: 2621419 - RNA, 19 nt, Artificial Sequence
  Description of Artificial Sequence: Synthetic oligonucleotide
caggcgaacagcuuguccu

SEQ ID NO: 2621420 - RNA, 19 nt, Artificial Sequence
  Description of Artificial Sequence: Synthetic oligonucleotide
cacgaucaccgccauguuc

SEQ ID NO: 2621421 - RNA, 19 nt, Artificial Sequence
  Description of Artificial Sequence: Synthetic oligonucleotide
ugccguuaccccuccugug

SEQ ID NO: 2621422 - RNA, 19 nt, Artificial Sequence
  Description of Artificial Sequence: Synthetic oligonucleotide
cacccuccuccuuaggcac

SEQ ID NO: 2621423 - RNA, 19 nt, Artificial Sequence
  Description of Artificial Sequence: Synthetic oligonucleotide
ucgucacucugcucuggug

SEQ ID NO: 2621424 - RNA, 19 nt, Artificial Sequence
  Description of Artificial Sequence: Synthetic oligonucleotide
ugcauggaauaugcuuggc

SEQ ID NO: 2621425 - RNA, 19 nt, Artificial Sequence
  Description of Artificial Sequence: Synthetic oligonucleotide
acacgcuggaccggauccc

SEQ ID NO: 2621426 - RNA, 19 nt, Artificial Sequence
  Description of Artificial Sequence: Synthetic oligonucleotide
gaacaaacaggaccaucgu

SEQ ID NO: 2621427 - RNA, 19 nt, Artificial Sequence
  Description of Artificial Sequence: Synthetic oligonucleotide
gacggguuucaacaucaaa

SEQ ID NO: 2621428 - RNA, 19 nt, Artificial Sequence
  Description of Artificial Sequence: Synthetic oligonucleotide
cucgacccguugcagcagg

SEQ ID NO: 2621429 - RNA, 19 nt, Artificial Sequence
  Description of Artificial Sequence: Synthetic oligonucleotide
ggaacugccugagaacagc

SEQ ID NO: 2621430 - RNA, 19 nt, Artificial Sequence
  Description of Artificial Sequence: Synthetic oligonucleotide
cucggagcagugccaggcg

SEQ ID NO: 2621431 - RNA, 19 nt, Artificial Sequence
  Description of Artificial Sequence: Synthetic oligonucleotide
caauaaacacaugacgggu

SEQ ID NO: 2621432 - RNA, 19 nt, Artificial Sequence
  Description of Artificial Sequence: Synthetic oligonucleotide
aucgucacucugcucuggu

SEQ ID NO: 2621433 - RNA, 19 nt, Artificial Sequence
  Description of Artificial Sequence: Synthetic oligonucleotide
guuaccccuccugugugcc

SEQ ID NO: 2621434 - RNA, 19 nt, Artificial Sequence
  Description of Artificial Sequence: Synthetic oligonucleotide
gugaucggaacugccugag

SEQ ID NO: 2621435 - RNA, 19 nt, Artificial Sequence
  Description of Artificial Sequence: Synthetic oligonucleotide
cugucuuccgagacgcuga

SEQ ID NO: 2621436 - RNA, 19 nt, Artificial Sequence
  Description of Artificial Sequence: Synthetic oligonucleotide
guacuguccacugucccuc

SEQ ID NO: 2621437 - RNA, 19 nt, Artificial Sequence
  Description of Artificial Sequence: Synthetic oligonucleotide
cucuuuaaccaaacacgaa

SEQ ID NO: 2621438 - RNA, 19 nt, Artificial Sequence
  Description of Artificial Sequence: Synthetic oligonucleotide
cugugcucagcacccacuc

SEQ ID NO: 2621439 - RNA, 19 nt, Artificial Sequence
  Description of Artificial Sequence: Synthetic oligonucleotide
cacagcacugguacgguaa

SEQ ID NO: 2621440 - RNA, 19 nt, Artificial Sequence
  Description of Artificial Sequence: Synthetic oligonucleotide
guuugaggauggugacuug

SEQ ID NO: 2621441 - RNA, 19 nt, Artificial Sequence
  Description of Artificial Sequence: Synthetic oligonucleotide
auugcaggcccgaggccac

SEQ ID NO: 2621442 - RNA, 19 nt, Artificial Sequence
  Description of Artificial Sequence: Synthetic oligonucleotide
gaugacggagugaucggaa

SEQ ID NO: 2621443 - RNA, 19 nt, Artificial Sequence
  Description of Artificial Sequence: Synthetic oligonucleotide
cucugcucuggugugcuug

SEQ ID NO: 2621444 - RNA, 19 nt, Artificial Sequence
  Description of Artificial Sequence: Synthetic oligonucleotide
gccaguacuguccacuguc

SEQ ID NO: 2621445 - RNA, 19 nt, Artificial Sequence
  Description of Artificial Sequence: Synthetic oligonucleotide
acugucccucuuuaaccaa

SEQ ID NO: 2621446 - RNA, 19 nt, Artificial Sequence
  Description of Artificial Sequence: Synthetic oligonucleotide
cuuccgagacgcugaugac

SEQ ID NO: 2621447 - RNA, 19 nt, Artificial Sequence
  Description of Artificial Sequence: Synthetic oligonucleotide
ggccacagcacugguacgg

SEQ ID NO: 2621448 - RNA, 19 nt, Artificial Sequence
  Description of Artificial Sequence: Synthetic oligonucleotide
ugucuuccgagacgcugau

SEQ ID NO: 2621449 - RNA, 19 nt, Artificial Sequence
  Description of Artificial Sequence: Synthetic oligonucleotide
ucaccaccuccugcgaccc

SEQ ID NO: 2621450 - RNA, 19 nt, Artificial Sequence
  Description of Artificial Sequence: Synthetic oligonucleotide
ucacaggugucaucuuguu

SEQ ID NO: 2621451 - RNA, 19 nt, Artificial Sequence
  Description of Artificial Sequence: Synthetic oligonucleotide
ucacucugcucuggugugc

SEQ ID NO: 2621452 - RNA, 19 nt, Artificial Sequence
  Description of Artificial Sequence: Synthetic oligonucleotide
gguaacaucccaggcgcug

SEQ ID NO: 2621453 - RNA, 19 nt, Artificial Sequence
  Description of Artificial Sequence: Synthetic oligonucleotide
uaccauugucuagaccuau

SEQ ID NO: 2621454 - RNA, 19 nt, Artificial Sequence
  Description of Artificial Sequence: Synthetic oligonucleotide
  modified_base (9)..(9): a, c, u, g, unknown or other
ccaccgacnguccacauga

SEQ ID NO: 2621455 - RNA, 19 nt, Artificial Sequence
  Description of Artificial Sequence: Synthetic oligonucleotide
cugagugaucaccaauaaa

SEQ ID NO: 2621456 - RNA, 19 nt, Artificial Sequence
  Description of Artificial Sequence: Synthetic oligonucleotide
gccugagaacagcacacgc

SEQ ID NO: 2621457 - RNA, 19 nt, Artificial Sequence
  Description of Artificial Sequence: Synthetic oligonucleotide
aggcgcugcccacucucgg

SEQ ID NO: 2621458 - RNA, 19 nt, Artificial Sequence
  Description of Artificial Sequence: Synthetic oligonucleotide
cugugugcccucugaagga

SEQ ID NO: 2621459 - RNA, 19 nt, Artificial Sequence
  Description of Artificial Sequence: Synthetic oligonucleotide
ugacggguuucaacaucaa

SEQ ID NO: 2621460 - RNA, 19 nt, Artificial Sequence
  Description of Artificial Sequence: Synthetic oligonucleotide
cacaugaugacggagugau

SEQ ID NO: 2621461 - RNA, 19 nt, Artificial Sequence
  Description of Artificial Sequence: Synthetic oligonucleotide
gaacagcuuguccugcccu

SEQ ID NO: 2621462 - RNA, 19 nt, Artificial Sequence
  Description of Artificial Sequence: Synthetic oligonucleotide
guuccagaacaaacaggac

SEQ ID NO: 2621463 - RNA, 19 nt, Artificial Sequence
  Description of Artificial Sequence: Synthetic oligonucleotide
cuuguccugcccugugcuc

SEQ ID NO: 2621464 - RNA, 19 nt, Artificial Sequence
  Description of Artificial Sequence: Synthetic oligonucleotide
ccaguuugaggauggugac

SEQ ID NO: 2621465 - RNA, 19 nt, Artificial Sequence
  Description of Artificial Sequence: Synthetic oligonucleotide
cagugugcaguuuucuugu

SEQ ID NO: 2621466 - RNA, 19 nt, Artificial Sequence
  Description of Artificial Sequence: Synthetic oligonucleotide
gaccccucgacccguugca

SEQ ID NO: 2621467 - RNA, 19 nt, Artificial Sequence
  Description of Artificial Sequence: Synthetic oligonucleotide
caggcgcugcccacucucg

SEQ ID NO: 2621468 - RNA, 19 nt, Artificial Sequence
  Description of Artificial Sequence: Synthetic oligonucleotide
ccaguacuguccacugucc

SEQ ID NO: 2621469 - RNA, 19 nt, Artificial Sequence
  Description of Artificial Sequence: Synthetic oligonucleotide
gaccuauggacagucuucu

SEQ ID NO: 2621470 - RNA, 19 nt, Artificial Sequence
  Description of Artificial Sequence: Synthetic oligonucleotide
aggaucggcuugcggguca

SEQ ID NO: 2621471 - RNA, 19 nt, Artificial Sequence
  Description of Artificial Sequence: Synthetic oligonucleotide
acagcacacgcuggaccgg

SEQ ID NO: 2621472 - RNA, 19 nt, Artificial Sequence
  Description of Artificial Sequence: Synthetic oligonucleotide
gaucaccaauaaacacaug

SEQ ID NO: 2621473 - RNA, 19 nt, Artificial Sequence
  Description of Artificial Sequence: Synthetic oligonucleotide
acuccaguuccagaacaaa

SEQ ID NO: 2621474 - RNA, 19 nt, Artificial Sequence
  Description of Artificial Sequence: Synthetic oligonucleotide
acaggaccaucgucacucu

SEQ ID NO: 2621475 - RNA, 19 nt, Artificial Sequence
  Description of Artificial Sequence: Synthetic oligonucleotide
cgaacuguccugucuuccg

SEQ ID NO: 2621476 - RNA, 19 nt, Artificial Sequence
  Description of Artificial Sequence: Synthetic oligonucleotide
cucucggagcagugccagg

SEQ ID NO: 2621477 - RNA, 19 nt, Artificial Sequence
  Description of Artificial Sequence: Synthetic oligonucleotide
acaugaugacggagugauc

SEQ ID NO: 2621478 - RNA, 19 nt, Artificial Sequence
  Description of Artificial Sequence: Synthetic oligonucleotide
cuccuccuuaggcacgauc

SEQ ID NO: 2621479 - RNA, 19 nt, Artificial Sequence
  Description of Artificial Sequence: Synthetic oligonucleotide
aggugucaucuuguuauaa

SEQ ID NO: 2621480 - RNA, 19 nt, Artificial Sequence
  Description of Artificial Sequence: Synthetic oligonucleotide
ucgacccguugcagcagga

SEQ ID NO: 2621481 - RNA, 19 nt, Artificial Sequence
  Description of Artificial Sequence: Synthetic oligonucleotide
ggcacgaucaccgccaugu

SEQ ID NO: 2621482 - RNA, 19 nt, Artificial Sequence
  Description of Artificial Sequence: Synthetic oligonucleotide
caucaaauugcaggcccga

SEQ ID NO: 2621483 - RNA, 19 nt, Artificial Sequence
  Description of Artificial Sequence: Synthetic oligonucleotide
agacaugcaugaacaugga

SEQ ID NO: 2621484 - RNA, 19 nt, Artificial Sequence
  Description of Artificial Sequence: Synthetic oligonucleotide
  modified_base (18)..(18): a, c, u, g, unknown or other
cccuuucucccaccgacng

SEQ ID NO: 2621485 - RNA, 19 nt, Artificial Sequence
  Description of Artificial Sequence: Synthetic oligonucleotide
ugcgggucaggggcugggg

SEQ ID NO: 2621486 - RNA, 19 nt, Artificial Sequence
  Description of Artificial Sequence: Synthetic oligonucleotide
agaaggcauugcauggaau

SEQ ID NO: 2621487 - RNA, 19 nt, Artificial Sequence
  Description of Artificial Sequence: Synthetic oligonucleotide
cagcaggaucggcuugcgg

SEQ ID NO: 2621488 - RNA, 19 nt, Artificial Sequence
  Description of Artificial Sequence: Synthetic oligonucleotide
cgagacgcugaugacaccc

SEQ ID NO: 2621489 - RNA, 19 nt, Artificial Sequence
  Description of Artificial Sequence: Synthetic oligonucleotide
cugucccucuuuaaccaaa

SEQ ID NO: 2621490 - RNA, 19 nt, Artificial Sequence
  Description of Artificial Sequence: Synthetic oligonucleotide
accuccugcgaccccucga

SEQ ID NO: 2621491 - RNA, 19 nt, Artificial Sequence
  Description of Artificial Sequence: Synthetic oligonucleotide
caaacacgaacuguccugu

SEQ ID NO: 2621492 - RNA, 19 nt, Artificial Sequence
  Description of Artificial Sequence: Synthetic oligonucleotide
uggccugagugaucaccaa

SEQ ID NO: 2621493 - RNA, 19 nt, Artificial Sequence
  Description of Artificial Sequence: Synthetic oligonucleotide
guccacaugaugacggagu

SEQ ID NO: 2621494 - RNA, 19 nt, Artificial Sequence
  Description of Artificial Sequence: Synthetic oligonucleotide
ggugucaucuuguuauaau

SEQ ID NO: 2621495 - RNA, 19 nt, Artificial Sequence
  Description of Artificial Sequence: Synthetic oligonucleotide
cacuccaguuccagaacaa

SEQ ID NO: 2621496 - RNA, 19 nt, Artificial Sequence
  Description of Artificial Sequence: Synthetic oligonucleotide
caggaccaucgucacucug

SEQ ID NO: 2621497 - RNA, 19 nt, Artificial Sequence
  Description of Artificial Sequence: Synthetic oligonucleotide
uaggcacgaucaccgccau

SEQ ID NO: 2621498 - RNA, 19 nt, Artificial Sequence
  Description of Artificial Sequence: Synthetic oligonucleotide
  modified_base (2)..(2): a, c, u, g, unknown or other
cnguccacaugaugacgga

SEQ ID NO: 2621499 - RNA, 19 nt, Artificial Sequence
  Description of Artificial Sequence: Synthetic oligonucleotide
ugcccacucucggagcagu

SEQ ID NO: 2621500 - RNA, 19 nt, Artificial Sequence
  Description of Artificial Sequence: Synthetic oligonucleotide
gugagcagugugcaguuuu

SEQ ID NO: 2621501 - RNA, 19 nt, Artificial Sequence
  Description of Artificial Sequence: Synthetic oligonucleotide
cuccugcgaccccucgacc

SEQ ID NO: 2621502 - RNA, 19 nt, Artificial Sequence
  Description of Artificial Sequence: Synthetic oligonucleotide
cacaggugucaucuuguua

SEQ ID NO: 2621503 - RNA, 19 nt, Artificial Sequence
  Description of Artificial Sequence: Synthetic oligonucleotide
accuauggacagucuucuu

SEQ ID NO: 2621504 - RNA, 19 nt, Artificial Sequence
  Description of Artificial Sequence: Synthetic oligonucleotide
cugguacgguaacauccca

SEQ ID NO: 2621505 - RNA, 19 nt, Artificial Sequence
  Description of Artificial Sequence: Synthetic oligonucleotide
ccugcgaccccucgacccg

SEQ ID NO: 2621506 - RNA, 19 nt, Artificial Sequence
  Description of Artificial Sequence: Synthetic oligonucleotide
ccuuaggcacgaucaccgc

SEQ ID NO: 2621507 - RNA, 19 nt, Artificial Sequence
  Description of Artificial Sequence: Synthetic oligonucleotide
ucccaggcgcugcccacuc

SEQ ID NO: 2621508 - RNA, 19 nt, Artificial Sequence
  Description of Artificial Sequence: Synthetic oligonucleotide
gagcagugccaggcgaaca

SEQ ID NO: 2621509 - RNA, 19 nt, Artificial Sequence
  Description of Artificial Sequence: Synthetic oligonucleotide
uucuuguuuccggguuaaa

SEQ ID NO: 2621510 - RNA, 19 nt, Artificial Sequence
  Description of Artificial Sequence: Synthetic oligonucleotide
  modified_base (5)..(5): a, c, u, g, unknown or other
cgacnguccacaugaugac

SEQ ID NO: 2621511 - RNA, 19 nt, Artificial Sequence
  Description of Artificial Sequence: Synthetic oligonucleotide
gaucggcuugcgggucagg

SEQ ID NO: 2621512 - RNA, 19 nt, Artificial Sequence
  Description of Artificial Sequence: Synthetic oligonucleotide
cgccauguucaccaccucc

SEQ ID NO: 2621513 - RNA, 19 nt, Artificial Sequence
  Description of Artificial Sequence: Synthetic oligonucleotide
cggcuugcgggucaggggc

SEQ ID NO: 2621514 - RNA, 19 nt, Artificial Sequence
  Description of Artificial Sequence: Synthetic oligonucleotide
guaccauugucuagaccua

SEQ ID NO: 2621515 - RNA, 19 nt, Artificial Sequence
  Description of Artificial Sequence: Synthetic oligonucleotide
  modified_base (10)..(10): a, c, u, g, unknown or other
cccaccgacnguccacaug

SEQ ID NO: 2621516 - RNA, 19 nt, Artificial Sequence
  Description of Artificial Sequence: Synthetic oligonucleotide
gcgcugcccacucucggag

SEQ ID NO: 2621517 - RNA, 19 nt, Artificial Sequence
  Description of Artificial Sequence: Synthetic oligonucleotide
ccuccugcgaccccucgac

SEQ ID NO: 2621518 - RNA, 19 nt, Artificial Sequence
  Description of Artificial Sequence: Synthetic oligonucleotide
gugugcccucugaaggaug

SEQ ID NO: 2621519 - RNA, 19 nt, Artificial Sequence
  Description of Artificial Sequence: Synthetic oligonucleotide
gugccguuaccccuccugu

SEQ ID NO: 2621520 - RNA, 19 nt, Artificial Sequence
  Description of Artificial Sequence: Synthetic oligonucleotide
aggcacgaucaccgccaug

SEQ ID NO: 2621521 - RNA, 19 nt, Artificial Sequence
  Description of Artificial Sequence: Synthetic oligonucleotide
ggaccggaucccagcagag

SEQ ID NO: 2621522 - RNA, 19 nt, Artificial Sequence
  Description of Artificial Sequence: Synthetic oligonucleotide
ggagugaucggaacugccu

SEQ ID NO: 2621523 - RNA, 19 nt, Artificial Sequence
  Description of Artificial Sequence: Synthetic oligonucleotide
gccugagugaucaccaaua

SEQ ID NO: 2621524 - RNA, 19 nt, Artificial Sequence
  Description of Artificial Sequence: Synthetic oligonucleotide
cuagaccuauggacagucu

SEQ ID NO: 2621525 - RNA, 19 nt, Artificial Sequence
  Description of Artificial Sequence: Synthetic oligonucleotide
ccugagaacagcacacgcu

SEQ ID NO: 2621526 - RNA, 19 nt, Artificial Sequence
  Description of Artificial Sequence: Synthetic oligonucleotide
ggcgaacagcuuguccugc

SEQ ID NO: 2621527 - RNA, 19 nt, Artificial Sequence
  Description of Artificial Sequence: Synthetic oligonucleotide
cggagugaucggaacugcc

SEQ ID NO: 2621528 - RNA, 19 nt, Artificial Sequence
  Description of Artificial Sequence: Synthetic oligonucleotide
accccucgacccguugcag

SEQ ID NO: 2621529 - RNA, 19 nt, Artificial Sequence
  Description of Artificial Sequence: Synthetic oligonucleotide
caggugucaucuuguuaua

SEQ ID NO: 2621530 - RNA, 19 nt, Artificial Sequence
  Description of Artificial Sequence: Synthetic oligonucleotide
  modified_base (12)..(12): a, c, u, g, unknown or other
cucccaccgacnguccaca

SEQ ID NO: 2621531 - RNA, 19 nt, Artificial Sequence
  Description of Artificial Sequence: Synthetic oligonucleotide
ggaccaucgucacucugcu

SEQ ID NO: 2621532 - RNA, 19 nt, Artificial Sequence
  Description of Artificial Sequence: Synthetic oligonucleotide
cuccugugugcccucugaa

SEQ ID NO: 2621533 - RNA, 19 nt, Artificial Sequence
  Description of Artificial Sequence: Synthetic oligonucleotide
gcagagugccguuaccccu

SEQ ID NO: 2621534 - RNA, 19 nt, Artificial Sequence
  Description of Artificial Sequence: Synthetic oligonucleotide
ccggguuaaaagacaugca

SEQ ID NO: 2621535 - RNA, 19 nt, Artificial Sequence
  Description of Artificial Sequence: Synthetic oligonucleotide
  modified_base (11)..(11): a, c, u, g, unknown or other
ucccaccgacnguccacau

SEQ ID NO: 2621536 - RNA, 19 nt, Artificial Sequence
  Description of Artificial Sequence: Synthetic oligonucleotide
ggaauaugcuuggccagua

SEQ ID NO: 2621537 - RNA, 19 nt, Artificial Sequence
  Description of Artificial Sequence: Synthetic oligonucleotide
ggagcagugccaggcgaac

SEQ ID NO: 2621538 - RNA, 19 nt, Artificial Sequence
  Description of Artificial Sequence: Synthetic oligonucleotide
gagacgcugaugacacccu

SEQ ID NO: 2621539 - RNA, 19 nt, Artificial Sequence
  Description of Artificial Sequence: Synthetic oligonucleotide
gucuuccgagacgcugaug

SEQ ID NO: 2621540 - RNA, 19 nt, Artificial Sequence
  Description of Artificial Sequence: Synthetic oligonucleotide
ccccucgacccguugcagc

SEQ ID NO: 2621541 - RNA, 19 nt, Artificial Sequence
  Description of Artificial Sequence: Synthetic oligonucleotide
gcuuguccugcccugugcu

SEQ ID NO: 2621542 - RNA, 19 nt, Artificial Sequence
  Description of Artificial Sequence: Synthetic oligonucleotide
cguuaccccuccugugugc

SEQ ID NO: 2621543 - RNA, 19 nt, Artificial Sequence
  Description of Artificial Sequence: Synthetic oligonucleotide
caggaucggcuugcggguc

SEQ ID NO: 2621544 - RNA, 19 nt, Artificial Sequence
  Description of Artificial Sequence: Synthetic oligonucleotide
gccguuaccccuccugugu

SEQ ID NO: 2621545 - RNA, 19 nt, Artificial Sequence
  Description of Artificial Sequence: Synthetic oligonucleotide
ggcgcugcccacucucgga

SEQ ID NO: 2621546 - RNA, 19 nt, Artificial Sequence
  Description of Artificial Sequence: Synthetic oligonucleotide
gcaggaucggcuugcgggu

SEQ ID NO: 2621547 - RNA, 19 nt, Artificial Sequence
  Description of Artificial Sequence: Synthetic oligonucleotide
cacgcuggaccggauccca

SEQ ID NO: 2621548 - RNA, 19 nt, Artificial Sequence
  Description of Artificial Sequence: Synthetic oligonucleotide
cggaacugccugagaacag

SEQ ID NO: 2621549 - RNA, 19 nt, Artificial Sequence
  Description of Artificial Sequence: Synthetic oligonucleotide
ccguuaccccuccugugug

SEQ ID NO: 2621550 - RNA, 19 nt, Artificial Sequence
  Description of Artificial Sequence: Synthetic oligonucleotide
acgcuggaccggaucccag

SEQ ID NO: 2621551 - RNA, 19 nt, Artificial Sequence
  Description of Artificial Sequence: Synthetic oligonucleotide
gcacacgcuggaccggauc

SEQ ID NO: 2621552 - RNA, 19 nt, Artificial Sequence
  Description of Artificial Sequence: Synthetic oligonucleotide
cccucgacccguugcagca

SEQ ID NO: 2621553 - RNA, 19 nt, Artificial Sequence
  Description of Artificial Sequence: Synthetic oligonucleotide
ggaucggcuugcgggucag

SEQ ID NO: 2621554 - RNA, 19 nt, Artificial Sequence
  Description of Artificial Sequence: Synthetic oligonucleotide
ggaucccagcagagugccg

SEQ ID NO: 2621555 - RNA, 19 nt, Artificial Sequence
  Description of Artificial Sequence: Synthetic oligonucleotide
cggguuaaaagacaugcau

SEQ ID NO: 2621556 - RNA, 19 nt, Artificial Sequence
  Description of Artificial Sequence: Synthetic oligonucleotide
caguuugaggauggugacu

SEQ ID NO: 2621557 - RNA, 19 nt, Artificial Sequence
  Description of Artificial Sequence: Synthetic oligonucleotide
cucuggugugcuugauagu

SEQ ID NO: 2621558 - RNA, 19 nt, Artificial Sequence
  Description of Artificial Sequence: Synthetic oligonucleotide
cagcacugguacgguaaca

SEQ ID NO: 2621559 - RNA, 19 nt, Artificial Sequence
  Description of Artificial Sequence: Synthetic oligonucleotide
gucuagaccuauggacagu

SEQ ID NO: 2621560 - RNA, 19 nt, Artificial Sequence
  Description of Artificial Sequence: Synthetic oligonucleotide
cccguugcagcaggaucgg

SEQ ID NO: 2621561 - RNA, 19 nt, Artificial Sequence
  Description of Artificial Sequence: Synthetic oligonucleotide
gaccggaucccagcagagu

SEQ ID NO: 2621562 - RNA, 19 nt, Artificial Sequence
  Description of Artificial Sequence: Synthetic oligonucleotide
cagcacacgcuggaccgga

SEQ ID NO: 2621563 - RNA, 19 nt, Artificial Sequence
  Description of Artificial Sequence: Synthetic oligonucleotide
cgcuggaccggaucccagc

SEQ ID NO: 2621564 - RNA, 19 nt, Artificial Sequence
  Description of Artificial Sequence: Synthetic oligonucleotide
ugcgaccccucgacccguu

SEQ ID NO: 2621565 - RNA, 19 nt, Artificial Sequence
  Description of Artificial Sequence: Synthetic oligonucleotide
ggcccgaggccacagcacu

SEQ ID NO: 2621566 - RNA, 19 nt, Artificial Sequence
  Description of Artificial Sequence: Synthetic oligonucleotide
cgaccccucgacccguugc

SEQ ID NO: 2621567 - RNA, 19 nt, Artificial Sequence
  Description of Artificial Sequence: Synthetic oligonucleotide
ggccugagugaucaccaau

SEQ ID NO: 2621568 - RNA, 19 nt, Artificial Sequence
  Description of Artificial Sequence: Synthetic oligonucleotide
cgucacucugcucuggugu

SEQ ID NO: 2621569 - RNA, 19 nt, Artificial Sequence
  Description of Artificial Sequence: Synthetic oligonucleotide
guuccaguuugaggauggu

SEQ ID NO: 2621570 - RNA, 19 nt, Artificial Sequence
  Description of Artificial Sequence: Synthetic oligonucleotide
ccgagacgcugaugacacc

SEQ ID NO: 2621571 - RNA, 19 nt, Artificial Sequence
  Description of Artificial Sequence: Synthetic oligonucleotide
ggauggugacuuggccuga

SEQ ID NO: 2621572 - RNA, 19 nt, Artificial Sequence
  Description of Artificial Sequence: Synthetic oligonucleotide
  modified_base (19)..(19): a, c, u, g, unknown or other
gcccuuucucccaccgacn

SEQ ID NO: 2621573 - RNA, 19 nt, Artificial Sequence
  Description of Artificial Sequence: Synthetic oligonucleotide
ccacaugaugacggaguga

SEQ ID NO: 2621574 - RNA, 19 nt, Artificial Sequence
  Description of Artificial Sequence: Synthetic oligonucleotide
agcacacgcuggaccggau

SEQ ID NO: 2621575 - RNA, 19 nt, Artificial Sequence
  Description of Artificial Sequence: Synthetic oligonucleotide
gggcuggaucuccgccgcc

SEQ ID NO: 2621576 - RNA, 19 nt, Artificial Sequence
  Description of Artificial Sequence: Synthetic oligonucleotide
gcgaccccucgacccguug

SEQ ID NO: 2621577 - RNA, 19 nt, Artificial Sequence
  Description of Artificial Sequence: Synthetic oligonucleotide
gcccacucucggagcagug

SEQ ID NO: 2621578 - RNA, 19 nt, Artificial Sequence
  Description of Artificial Sequence: Synthetic oligonucleotide
gagugccguuaccccuccu

SEQ ID NO: 2621579 - RNA, 19 nt, Artificial Sequence
  Description of Artificial Sequence: Synthetic oligonucleotide
ccguugcagcaggaucggc

SEQ ID NO: 2621580 - RNA, 19 nt, Artificial Sequence
  Description of Artificial Sequence: Synthetic oligonucleotide
ccacagcacugguacggua

SEQ ID NO: 2621581 - RNA, 19 nt, Artificial Sequence
  Description of Artificial Sequence: Synthetic oligonucleotide
  modified_base (8)..(8): a, c, u, g, unknown or other
caccgacnguccacaugau

SEQ ID NO: 2621582 - RNA, 19 nt, Artificial Sequence
  Description of Artificial Sequence: Synthetic oligonucleotide
  modified_base (17)..(17): a, c, u, g, unknown or other
ccuuucucccaccgacngu

SEQ ID NO: 2621583 - RNA, 19 nt, Artificial Sequence
  Description of Artificial Sequence: Synthetic oligonucleotide
gccacagcacugguacggu

SEQ ID NO: 2621584 - RNA, 19 nt, Artificial Sequence
  Description of Artificial Sequence: Synthetic oligonucleotide
cgaggccacagcacuggua

SEQ ID NO: 2621585 - RNA, 19 nt, Artificial Sequence
  Description of Artificial Sequence: Synthetic oligonucleotide
cugcgaccccucgacccgu

SEQ ID NO: 2621586 - RNA, 19 nt, Artificial Sequence
  Description of Artificial Sequence: Synthetic oligonucleotide
gcccugugcucagcaccca

SEQ ID NO: 2621587 - RNA, 19 nt, Artificial Sequence
  Description of Artificial Sequence: Synthetic oligonucleotide
cgguaacaucccaggcgcu

SEQ ID NO: 2621588 - RNA, 19 nt, Artificial Sequence
  Description of Artificial Sequence: Synthetic oligonucleotide
cgacccguugcagcaggau

SEQ ID NO: 2621589 - RNA, 19 nt, Artificial Sequence
  Description of Artificial Sequence: Synthetic oligonucleotide
  modified_base (1)..(1): a, c, u, g, unknown or other
nguccacaugaugacggag

SEQ ID NO: 2621590 - RNA, 19 nt, Artificial Sequence
  Description of Artificial Sequence: Synthetic oligonucleotide
aaugauuagcaacagaagg

SEQ ID NO: 2621591 - RNA, 19 nt, Artificial Sequence
  Description of Artificial Sequence: Synthetic oligonucleotide
aauucaaguaauccaaagc

SEQ ID NO: 2621592 - RNA, 19 nt, Artificial Sequence
  Description of Artificial Sequence: Synthetic oligonucleotide
aaaaucaccuuccaugccc

SEQ ID NO: 2621593 - RNA, 19 nt, Artificial Sequence
  Description of Artificial Sequence: Synthetic oligonucleotide
uacaacacaauuuagaaac

SEQ ID NO: 2621594 - RNA, 19 nt, Artificial Sequence
  Description of Artificial Sequence: Synthetic oligonucleotide
aaggcuuuugcucagguuc

SEQ ID NO: 2621595 - RNA, 19 nt, Artificial Sequence
  Description of Artificial Sequence: Synthetic oligonucleotide
uuaauuuuguccuuuacca

SEQ ID NO: 2621596 - RNA, 19 nt, Artificial Sequence
  Description of Artificial Sequence: Synthetic oligonucleotide
uuuucuguugauuaaacca

SEQ ID NO: 2621597 - RNA, 19 nt, Artificial Sequence
  Description of Artificial Sequence: Synthetic oligonucleotide
aauuuagaaacagauaaug

SEQ ID NO: 2621598 - RNA, 19 nt, Artificial Sequence
  Description of Artificial Sequence: Synthetic oligonucleotide
acuagcagcaguuugcccc

SEQ ID NO: 2621599 - RNA, 19 nt, Artificial Sequence
  Description of Artificial Sequence: Synthetic oligonucleotide
uuuauuuggccuuagagaa

SEQ ID NO: 2621600 - RNA, 19 nt, Artificial Sequence
  Description of Artificial Sequence: Synthetic oligonucleotide
cagauaaugaauuccaugc

SEQ ID NO: 2621601 - RNA, 19 nt, Artificial Sequence
  Description of Artificial Sequence: Synthetic oligonucleotide
gaugaaaaugauuagcaac

SEQ ID NO: 2621602 - RNA, 19 nt, Artificial Sequence
  Description of Artificial Sequence: Synthetic oligonucleotide
ucuuauaaugguccgaagc

SEQ ID NO: 2621603 - RNA, 19 nt, Artificial Sequence
  Description of Artificial Sequence: Synthetic oligonucleotide
uuguuuugcacaaagaguc

SEQ ID NO: 2621604 - RNA, 19 nt, Artificial Sequence
  Description of Artificial Sequence: Synthetic oligonucleotide
aaaaugauuagcaacagaa

SEQ ID NO: 2621605 - RNA, 19 nt, Artificial Sequence
  Description of Artificial Sequence: Synthetic oligonucleotide
aucugcaacauuuauuugg

SEQ ID NO: 2621606 - RNA, 19 nt, Artificial Sequence
  Description of Artificial Sequence: Synthetic oligonucleotide
uguaauucaaguaauccaa

SEQ ID NO: 2621607 - RNA, 19 nt, Artificial Sequence
  Description of Artificial Sequence: Synthetic oligonucleotide
uuaaaaucaccuuccaugc

SEQ ID NO: 2621608 - RNA, 19 nt, Artificial Sequence
  Description of Artificial Sequence: Synthetic oligonucleotide
ucuaaagugaucugcaaca

SEQ ID NO: 2621609 - RNA, 19 nt, Artificial Sequence
  Description of Artificial Sequence: Synthetic oligonucleotide
uuugcuuugaauccucugc

SEQ ID NO: 2621610 - RNA, 19 nt, Artificial Sequence
  Description of Artificial Sequence: Synthetic oligonucleotide
ucaaguaauccaaagcagc

SEQ ID NO: 2621611 - RNA, 19 nt, Artificial Sequence
  Description of Artificial Sequence: Synthetic oligonucleotide
agauaaugaauuccaugcc

SEQ ID NO: 2621612 - RNA, 19 nt, Artificial Sequence
  Description of Artificial Sequence: Synthetic oligonucleotide
auuuauuuggccuuagaga

SEQ ID NO: 2621613 - RNA, 19 nt, Artificial Sequence
  Description of Artificial Sequence: Synthetic oligonucleotide
ugaggcauuaaaaucaccu

SEQ ID NO: 2621614 - RNA, 19 nt, Artificial Sequence
  Description of Artificial Sequence: Synthetic oligonucleotide
uucuagauaauccagcaaa

SEQ ID NO: 2621615 - RNA, 19 nt, Artificial Sequence
  Description of Artificial Sequence: Synthetic oligonucleotide
aaugaauuccaugccauuc

SEQ ID NO: 2621616 - RNA, 19 nt, Artificial Sequence
  Description of Artificial Sequence: Synthetic oligonucleotide
  modified_base (18)..(18): a, c, u, g, unknown or other
aauuccuggaagcuaccnc

SEQ ID NO: 2621617 - RNA, 19 nt, Artificial Sequence
  Description of Artificial Sequence: Synthetic oligonucleotide
aagagacaacauuaaagag

SEQ ID NO: 2621618 - RNA, 19 nt, Artificial Sequence
  Description of Artificial Sequence: Synthetic oligonucleotide
  modified_base (2)..(2): a, c, u, g, unknown or other
cncaaaauucacuagcagc

SEQ ID NO: 2621619 - RNA, 19 nt, Artificial Sequence
  Description of Artificial Sequence: Synthetic oligonucleotide
  modified_base (11)..(11): a, c, u, g, unknown or other
uucucuuuccncaaauucc

SEQ ID NO: 2621620 - RNA, 19 nt, Artificial Sequence
  Description of Artificial Sequence: Synthetic oligonucleotide
aauuccaugccauuccuca

SEQ ID NO: 2621621 - RNA, 19 nt, Artificial Sequence
  Description of Artificial Sequence: Synthetic oligonucleotide
uaauccagcaaauuuucag

SEQ ID NO: 2621622 - RNA, 19 nt, Artificial Sequence
  Description of Artificial Sequence: Synthetic oligonucleotide
caaauuuucaguccauucc

SEQ ID NO: 2621623 - RNA, 19 nt, Artificial Sequence
  Description of Artificial Sequence: Synthetic oligonucleotide
augaauuccaugccauucc

SEQ ID NO: 2621624 - RNA, 19 nt, Artificial Sequence
  Description of Artificial Sequence: Synthetic oligonucleotide
aaucacugcagacaaguca

SEQ ID NO: 2621625 - RNA, 19 nt, Artificial Sequence
  Description of Artificial Sequence: Synthetic oligonucleotide
uuucuguugauuaaaccac

SEQ ID NO: 2621626 - RNA, 19 nt, Artificial Sequence
  Description of Artificial Sequence: Synthetic oligonucleotide
uuagcaacagaagggagcg

SEQ ID NO: 2621627 - RNA, 19 nt, Artificial Sequence
  Description of Artificial Sequence: Synthetic oligonucleotide
gaaacagauaaugaauucc

SEQ ID NO: 2621628 - RNA, 19 nt, Artificial Sequence
  Description of Artificial Sequence: Synthetic oligonucleotide
aacauuaaagagcuguaau

SEQ ID NO: 2621629 - RNA, 19 nt, Artificial Sequence
  Description of Artificial Sequence: Synthetic oligonucleotide
  modified_base (10)..(10): a, c, u, g, unknown or other
ucucuuuccncaaauuccu

SEQ ID NO: 2621630 - RNA, 19 nt, Artificial Sequence
  Description of Artificial Sequence: Synthetic oligonucleotide
agaaacagauaaugaauuc

SEQ ID NO: 2621631 - RNA, 19 nt, Artificial Sequence
  Description of Artificial Sequence: Synthetic oligonucleotide
ugauuaaaccacucuauca

SEQ ID NO: 2621632 - RNA, 19 nt, Artificial Sequence
  Description of Artificial Sequence: Synthetic oligonucleotide
  modified_base (5)..(5): a, c, u, g, unknown or other
uaccncaaaauucacuagc

SEQ ID NO: 2621633 - RNA, 19 nt, Artificial Sequence
  Description of Artificial Sequence: Synthetic oligonucleotide
cauuuauuuggccuuagag

SEQ ID NO: 2621634 - RNA, 19 nt, Artificial Sequence
  Description of Artificial Sequence: Synthetic oligonucleotide
uaauucaaguaauccaaag

SEQ ID NO: 2621635 - RNA, 19 nt, Artificial Sequence
  Description of Artificial Sequence: Synthetic oligonucleotide
  modified_base (10)..(10): a, c, u, g, unknown or other
gaagcuaccncaaaauuca

SEQ ID NO: 2621636 - RNA, 19 nt, Artificial Sequence
  Description of Artificial Sequence: Synthetic oligonucleotide
aagggagcgcuauagauga

SEQ ID NO: 2621637 - RNA, 19 nt, Artificial Sequence
  Description of Artificial Sequence: Synthetic oligonucleotide
uuggccuuagagaaaauca

SEQ ID NO: 2621638 - RNA, 19 nt, Artificial Sequence
  Description of Artificial Sequence: Synthetic oligonucleotide
auuagcaacagaagggagc

SEQ ID NO: 2621639 - RNA, 19 nt, Artificial Sequence
  Description of Artificial Sequence: Synthetic oligonucleotide
aguacaacacaauuuagaa

SEQ ID NO: 2621640 - RNA, 19 nt, Artificial Sequence
  Description of Artificial Sequence: Synthetic oligonucleotide
  modified_base (8)..(8): a, c, u, g, unknown or other
ucuuuccncaaauuccugg

SEQ ID NO: 2621641 - RNA, 19 nt, Artificial Sequence
  Description of Artificial Sequence: Synthetic oligonucleotide
uaguacaacacaauuuaga

SEQ ID NO: 2621642 - RNA, 19 nt, Artificial Sequence
  Description of Artificial Sequence: Synthetic oligonucleotide
uguuguucuagauaaucca

SEQ ID NO: 2621643 - RNA, 19 nt, Artificial Sequence
  Description of Artificial Sequence: Synthetic oligonucleotide
aauaccgugacgcugcuua

SEQ ID NO: 2621644 - RNA, 19 nt, Artificial Sequence
  Description of Artificial Sequence: Synthetic oligonucleotide
cagcuuaucagacaggagc

SEQ ID NO: 2621645 - RNA, 19 nt, Artificial Sequence
  Description of Artificial Sequence: Synthetic oligonucleotide
aaccgagugagccagccag

SEQ ID NO: 2621646 - RNA, 19 nt, Artificial Sequence
  Description of Artificial Sequence: Synthetic oligonucleotide
aagaacuuggcuuguuuug

SEQ ID NO: 2621647 - RNA, 19 nt, Artificial Sequence
  Description of Artificial Sequence: Synthetic oligonucleotide
gauaaugaauuccaugcca

SEQ ID NO: 2621648 - RNA, 19 nt, Artificial Sequence
  Description of Artificial Sequence: Synthetic oligonucleotide
ugcacaaagagucccagac

SEQ ID NO: 2621649 - RNA, 19 nt, Artificial Sequence
  Description of Artificial Sequence: Synthetic oligonucleotide
cugcagacaagucacaagg

SEQ ID NO: 2621650 - RNA, 19 nt, Artificial Sequence
  Description of Artificial Sequence: Synthetic oligonucleotide
agcaucuaauucuaaagug

SEQ ID NO: 2621651 - RNA, 19 nt, Artificial Sequence
  Description of Artificial Sequence: Synthetic oligonucleotide
uaauucuaaagugaucugc

SEQ ID NO: 2621652 - RNA, 19 nt, Artificial Sequence
  Description of Artificial Sequence: Synthetic oligonucleotide
uguugauuaaaccacucua

SEQ ID NO: 2621653 - RNA, 19 nt, Artificial Sequence
  Description of Artificial Sequence: Synthetic oligonucleotide
aaagagcuguaauucaagu

SEQ ID NO: 2621654 - RNA, 19 nt, Artificial Sequence
  Description of Artificial Sequence: Synthetic oligonucleotide
uagauaauccagcaaauuu

SEQ ID NO: 2621655 - RNA, 19 nt, Artificial Sequence
  Description of Artificial Sequence: Synthetic oligonucleotide
ucaucugagacugccaagg

SEQ ID NO: 2621656 - RNA, 19 nt, Artificial Sequence
  Description of Artificial Sequence: Synthetic oligonucleotide
  modified_base (4)..(4): a, c, u, g, unknown or other
uccncaaauuccuggaagc

SEQ ID NO: 2621657 - RNA, 19 nt, Artificial Sequence
  Description of Artificial Sequence: Synthetic oligonucleotide
uuaguacaacacaauuuag

SEQ ID NO: 2621658 - RNA, 19 nt, Artificial Sequence
  Description of Artificial Sequence: Synthetic oligonucleotide
augauuagcaacagaaggg

SEQ ID NO: 2621659 - RNA, 19 nt, Artificial Sequence
  Description of Artificial Sequence: Synthetic oligonucleotide
acagauaaugaauuccaug

SEQ ID NO: 2621660 - RNA, 19 nt, Artificial Sequence
  Description of Artificial Sequence: Synthetic oligonucleotide
uaauuaguacaacacaauu

SEQ ID NO: 2621661 - RNA, 19 nt, Artificial Sequence
  Description of Artificial Sequence: Synthetic oligonucleotide
aaacagauaaugaauucca

SEQ ID NO: 2621662 - RNA, 19 nt, Artificial Sequence
  Description of Artificial Sequence: Synthetic oligonucleotide
ucaccuuccaugcccaggg

SEQ ID NO: 2621663 - RNA, 19 nt, Artificial Sequence
  Description of Artificial Sequence: Synthetic oligonucleotide
uguucuagauaauccagca

SEQ ID NO: 2621664 - RNA, 19 nt, Artificial Sequence
  Description of Artificial Sequence: Synthetic oligonucleotide
  modified_base (5)..(5): a, c, u, g, unknown or other
uuccncaaauuccuggaag

SEQ ID NO: 2621665 - RNA, 19 nt, Artificial Sequence
  Description of Artificial Sequence: Synthetic oligonucleotide
agaaaaucacugcagacaa

SEQ ID NO: 2621666 - RNA, 19 nt, Artificial Sequence
  Description of Artificial Sequence: Synthetic oligonucleotide
auuaaagagcuguaauuca

SEQ ID NO: 2621667 - RNA, 19 nt, Artificial Sequence
  Description of Artificial Sequence: Synthetic oligonucleotide
uuguucuagauaauccagc

SEQ ID NO: 2621668 - RNA, 19 nt, Artificial Sequence
  Description of Artificial Sequence: Synthetic oligonucleotide
uuguccuuuaccagcagcc

SEQ ID NO: 2621669 - RNA, 19 nt, Artificial Sequence
  Description of Artificial Sequence: Synthetic oligonucleotide
aaaugauuagcaacagaag

SEQ ID NO: 2621670 - RNA, 19 nt, Artificial Sequence
  Description of Artificial Sequence: Synthetic oligonucleotide
aaagugaucugcaacauuu

SEQ ID NO: 2621671 - RNA, 19 nt, Artificial Sequence
  Description of Artificial Sequence: Synthetic oligonucleotide
aauucuaaagugaucugca

SEQ ID NO: 2621672 - RNA, 19 nt, Artificial Sequence
  Description of Artificial Sequence: Synthetic oligonucleotide
augaaaaugauuagcaaca

SEQ ID NO: 2621673 - RNA, 19 nt, Artificial Sequence
  Description of Artificial Sequence: Synthetic oligonucleotide
uccagugcagcuuuguggc

SEQ ID NO: 2621674 - RNA, 19 nt, Artificial Sequence
  Description of Artificial Sequence: Synthetic oligonucleotide
cacaaagagucccagacac

SEQ ID NO: 2621675 - RNA, 19 nt, Artificial Sequence
  Description of Artificial Sequence: Synthetic oligonucleotide
ugagccagccagaugaggc

SEQ ID NO: 2621676 - RNA, 19 nt, Artificial Sequence
  Description of Artificial Sequence: Synthetic oligonucleotide
uuaucagacaggagcaugu

SEQ ID NO: 2621677 - RNA, 19 nt, Artificial Sequence
  Description of Artificial Sequence: Synthetic oligonucleotide
cauuaaagagcuguaauuc

SEQ ID NO: 2621678 - RNA, 19 nt, Artificial Sequence
  Description of Artificial Sequence: Synthetic oligonucleotide
aaugguccgaagccuccgc

SEQ ID NO: 2621679 - RNA, 19 nt, Artificial Sequence
  Description of Artificial Sequence: Synthetic oligonucleotide
ugccccuuuaauuuugucc

SEQ ID NO: 2621680 - RNA, 19 nt, Artificial Sequence
  Description of Artificial Sequence: Synthetic oligonucleotide
cuguuguucuagauaaucc

SEQ ID NO: 2621681 - RNA, 19 nt, Artificial Sequence
  Description of Artificial Sequence: Synthetic oligonucleotide
agaacuuggcuuguuuugc

SEQ ID NO: 2621682 - RNA, 19 nt, Artificial Sequence
  Description of Artificial Sequence: Synthetic oligonucleotide
ucuaucaucugagacugcc

SEQ ID NO: 2621683 - RNA, 19 nt, Artificial Sequence
  Description of Artificial Sequence: Synthetic oligonucleotide
uucuucuuauaaugguccg

SEQ ID NO: 2621684 - RNA, 19 nt, Artificial Sequence
  Description of Artificial Sequence: Synthetic oligonucleotide
uuccuagucuuccuggaag

SEQ ID NO: 2621685 - RNA, 19 nt, Artificial Sequence
  Description of Artificial Sequence: Synthetic oligonucleotide
agaugaggcauuaaaauca

SEQ ID NO: 2621686 - RNA, 19 nt, Artificial Sequence
  Description of Artificial Sequence: Synthetic oligonucleotide
uugauuaaaccacucuauc

SEQ ID NO: 2621687 - RNA, 19 nt, Artificial Sequence
  Description of Artificial Sequence: Synthetic oligonucleotide
acaccagcuuaucagacag

SEQ ID NO: 2621688 - RNA, 19 nt, Artificial Sequence
  Description of Artificial Sequence: Synthetic oligonucleotide
ugauuagcaacagaaggga

SEQ ID NO: 2621689 - RNA, 19 nt, Artificial Sequence
  Description of Artificial Sequence: Synthetic oligonucleotide
gcuuguuuugcacaaagag

SEQ ID NO: 2621690 - RNA, 19 nt, Artificial Sequence
  Description of Artificial Sequence: Synthetic oligonucleotide
ugcuuaaaccgagugagcc

SEQ ID NO: 2621691 - RNA, 19 nt, Artificial Sequence
  Description of Artificial Sequence: Synthetic oligonucleotide
cuucggaauaccgugacgc

SEQ ID NO: 2621692 - RNA, 19 nt, Artificial Sequence
  Description of Artificial Sequence: Synthetic oligonucleotide
  modified_base (17)..(17): a, c, u, g, unknown or other
auuccuggaagcuaccnca

SEQ ID NO: 2621693 - RNA, 19 nt, Artificial Sequence
  Description of Artificial Sequence: Synthetic oligonucleotide
auccuguuguucuagauaa

SEQ ID NO: 2621694 - RNA, 19 nt, Artificial Sequence
  Description of Artificial Sequence: Synthetic oligonucleotide
agucacaaggaugaaaaug

SEQ ID NO: 2621695 - RNA, 19 nt, Artificial Sequence
  Description of Artificial Sequence: Synthetic oligonucleotide
aaaccacucuaucaucuga

SEQ ID NO: 2621696 - RNA, 19 nt, Artificial Sequence
  Description of Artificial Sequence: Synthetic oligonucleotide
uauaaugguccgaagccuc

SEQ ID NO: 2621697 - RNA, 19 nt, Artificial Sequence
  Description of Artificial Sequence: Synthetic oligonucleotide
aauccaaagcagcaucuaa

SEQ ID NO: 2621698 - RNA, 19 nt, Artificial Sequence
  Description of Artificial Sequence: Synthetic oligonucleotide
cauucaagagacaacauua

SEQ ID NO: 2621699 - RNA, 19 nt, Artificial Sequence
  Description of Artificial Sequence: Synthetic oligonucleotide
ucuagauaauccagcaaau

SEQ ID NO: 2621700 - RNA, 19 nt, Artificial Sequence
  Description of Artificial Sequence: Synthetic oligonucleotide
ugccauuccucauucaaga

SEQ ID NO: 2621701 - RNA, 19 nt, Artificial Sequence
  Description of Artificial Sequence: Synthetic oligonucleotide
cuuaaaccgagugagccag

SEQ ID NO: 2621702 - RNA, 19 nt, Artificial Sequence
  Description of Artificial Sequence: Synthetic oligonucleotide
gauuaaaccacucuaucau

SEQ ID NO: 2621703 - RNA, 19 nt, Artificial Sequence
  Description of Artificial Sequence: Synthetic oligonucleotide
cagaugaggcauuaaaauc

SEQ ID NO: 2621704 - RNA, 19 nt, Artificial Sequence
  Description of Artificial Sequence: Synthetic oligonucleotide
gauaauccagcaaauuuuc

SEQ ID NO: 2621705 - RNA, 19 nt, Artificial Sequence
  Description of Artificial Sequence: Synthetic oligonucleotide
agacaggagcaugucaucc

SEQ ID NO: 2621706 - RNA, 19 nt, Artificial Sequence
  Description of Artificial Sequence: Synthetic oligonucleotide
uaaaaucaccuuccaugcc

SEQ ID NO: 2621707 - RNA, 19 nt, Artificial Sequence
  Description of Artificial Sequence: Synthetic oligonucleotide
uggcuuguuuugcacaaag

SEQ ID NO: 2621708 - RNA, 19 nt, Artificial Sequence
  Description of Artificial Sequence: Synthetic oligonucleotide
acucuaucaucugagacug

SEQ ID NO: 2621709 - RNA, 19 nt, Artificial Sequence
  Description of Artificial Sequence: Synthetic oligonucleotide
aagagcuguaauucaagua

SEQ ID NO: 2621710 - RNA, 19 nt, Artificial Sequence
  Description of Artificial Sequence: Synthetic oligonucleotide
uccagcaaauuuucagucc

SEQ ID NO: 2621711 - RNA, 19 nt, Artificial Sequence
  Description of Artificial Sequence: Synthetic oligonucleotide
auuuagaaacagauaauga

SEQ ID NO: 2621712 - RNA, 19 nt, Artificial Sequence
  Description of Artificial Sequence: Synthetic oligonucleotide
cagacaagucacaaggaug

SEQ ID NO: 2621713 - RNA, 19 nt, Artificial Sequence
  Description of Artificial Sequence: Synthetic oligonucleotide
uuuugcacaaagaguccca

SEQ ID NO: 2621714 - RNA, 19 nt, Artificial Sequence
  Description of Artificial Sequence: Synthetic oligonucleotide
uggccuuagagaaaaucac

SEQ ID NO: 2621715 - RNA, 19 nt, Artificial Sequence
  Description of Artificial Sequence: Synthetic oligonucleotide
uugcuuugaauccucugcu

SEQ ID NO: 2621716 - RNA, 19 nt, Artificial Sequence
  Description of Artificial Sequence: Synthetic oligonucleotide
aggaugaaaaugauuagca

SEQ ID NO: 2621717 - RNA, 19 nt, Artificial Sequence
  Description of Artificial Sequence: Synthetic oligonucleotide
aauuuucaguccauuccag

SEQ ID NO: 2621718 - RNA, 19 nt, Artificial Sequence
  Description of Artificial Sequence: Synthetic oligonucleotide
guuguucuagauaauccag

SEQ ID NO: 2621719 - RNA, 19 nt, Artificial Sequence
  Description of Artificial Sequence: Synthetic oligonucleotide
uucaguccauuccagugca

SEQ ID NO: 2621720 - RNA, 19 nt, Artificial Sequence
  Description of Artificial Sequence: Synthetic oligonucleotide
uauuuggccuuagagaaaa

SEQ ID NO: 2621721 - RNA, 19 nt, Artificial Sequence
  Description of Artificial Sequence: Synthetic oligonucleotide
gaaaaugauuagcaacaga

SEQ ID NO: 2621722 - RNA, 19 nt, Artificial Sequence
  Description of Artificial Sequence: Synthetic oligonucleotide
auucacuagcagcaguuug

SEQ ID NO: 2621723 - RNA, 19 nt, Artificial Sequence
  Description of Artificial Sequence: Synthetic oligonucleotide
agacaagucacaaggauga

SEQ ID NO: 2621724 - RNA, 19 nt, Artificial Sequence
  Description of Artificial Sequence: Synthetic oligonucleotide
uucuguugauuaaaccacu

SEQ ID NO: 2621725 - RNA, 19 nt, Artificial Sequence
  Description of Artificial Sequence: Synthetic oligonucleotide
agacugccaaggcaucucc

SEQ ID NO: 2621726 - RNA, 19 nt, Artificial Sequence
  Description of Artificial Sequence: Synthetic oligonucleotide
agacacuggaaucccaucu

SEQ ID NO: 2621727 - RNA, 19 nt, Artificial Sequence
  Description of Artificial Sequence: Synthetic oligonucleotide
accgugacgcugcuuaaac

SEQ ID NO: 2621728 - RNA, 19 nt, Artificial Sequence
  Description of Artificial Sequence: Synthetic oligonucleotide
ugaauuccaugccauuccu

SEQ ID NO: 2621729 - RNA, 19 nt, Artificial Sequence
  Description of Artificial Sequence: Synthetic oligonucleotide
caaagagucccagacacug

SEQ ID NO: 2621730 - RNA, 19 nt, Artificial Sequence
  Description of Artificial Sequence: Synthetic oligonucleotide
ucuguugauuaaaccacuc

SEQ ID NO: 2621731 - RNA, 19 nt, Artificial Sequence
  Description of Artificial Sequence: Synthetic oligonucleotide
agaagggagcgcuauagau

SEQ ID NO: 2621732 - RNA, 19 nt, Artificial Sequence
  Description of Artificial Sequence: Synthetic oligonucleotide
cuaauucuaaagugaucug

SEQ ID NO: 2621733 - RNA, 19 nt, Artificial Sequence
  Description of Artificial Sequence: Synthetic oligonucleotide
gaagggagcgcuauagaug

SEQ ID NO: 2621734 - RNA, 19 nt, Artificial Sequence
  Description of Artificial Sequence: Synthetic oligonucleotide
aaccacucuaucaucugag

SEQ ID NO: 2621735 - RNA, 19 nt, Artificial Sequence
  Description of Artificial Sequence: Synthetic oligonucleotide
caaguaauccaaagcagca

SEQ ID NO: 2621736 - RNA, 19 nt, Artificial Sequence
  Description of Artificial Sequence: Synthetic oligonucleotide
  modified_base (7)..(7): a, c, u, g, unknown or other
cuuuccncaaauuccugga

SEQ ID NO: 2621737 - RNA, 19 nt, Artificial Sequence
  Description of Artificial Sequence: Synthetic oligonucleotide
uuaccagcagccuucggaa

SEQ ID NO: 2621738 - RNA, 19 nt, Artificial Sequence
  Description of Artificial Sequence: Synthetic oligonucleotide
uuugcacaaagagucccag

SEQ ID NO: 2621739 - RNA, 19 nt, Artificial Sequence
  Description of Artificial Sequence: Synthetic oligonucleotide
  modified_base (6)..(6): a, c, u, g, unknown or other
cuaccncaaaauucacuag

SEQ ID NO: 2621740 - RNA, 19 nt, Artificial Sequence
  Description of Artificial Sequence: Synthetic oligonucleotide
gauuagcaacagaagggag

SEQ ID NO: 2621741 - RNA, 19 nt, Artificial Sequence
  Description of Artificial Sequence: Synthetic oligonucleotide
aaauucacuagcagcaguu

SEQ ID NO: 2621742 - RNA, 19 nt, Artificial Sequence
  Description of Artificial Sequence: Synthetic oligonucleotide
uucuuauaaugguccgaag

SEQ ID NO: 2621743 - RNA, 19 nt, Artificial Sequence
  Description of Artificial Sequence: Synthetic oligonucleotide
agauaauccagcaaauuuu

SEQ ID NO: 2621744 - RNA, 19 nt, Artificial Sequence
  Description of Artificial Sequence: Synthetic oligonucleotide
auaaugguccgaagccucc

SEQ ID NO: 2621745 - RNA, 19 nt, Artificial Sequence
  Description of Artificial Sequence: Synthetic oligonucleotide
guuuugcacaaagaguccc

SEQ ID NO: 2621746 - RNA, 19 nt, Artificial Sequence
  Description of Artificial Sequence: Synthetic oligonucleotide
  modified_base (13)..(13): a, c, u, g, unknown or other
uuuucucuuuccncaaauu

SEQ ID NO: 2621747 - RNA, 19 nt, Artificial Sequence
  Description of Artificial Sequence: Synthetic oligonucleotide
gagcaugucauccuguugu

SEQ ID NO: 2621748 - RNA, 19 nt, Artificial Sequence
  Description of Artificial Sequence: Synthetic oligonucleotide
  modified_base (19)..(19): a, c, u, g, unknown or other
aaauuccuggaagcuaccn

SEQ ID NO: 2621749 - RNA, 19 nt, Artificial Sequence
  Description of Artificial Sequence: Synthetic oligonucleotide
  modified_base (7)..(7): a, c, u, g, unknown or other
gcuaccncaaaauucacua

SEQ ID NO: 2621750 - RNA, 19 nt, Artificial Sequence
  Description of Artificial Sequence: Synthetic oligonucleotide
  modified_base (6)..(6): a, c, u, g, unknown or other
uuuccncaaauuccuggaa

SEQ ID NO: 2621751 - RNA, 19 nt, Artificial Sequence
  Description of Artificial Sequence: Synthetic oligonucleotide
uuugaauccucugcuuucu

SEQ ID NO: 2621752 - RNA, 19 nt, Artificial Sequence
  Description of Artificial Sequence: Synthetic oligonucleotide
aacauuuauuuggccuuag

SEQ ID NO: 2621753 - RNA, 19 nt, Artificial Sequence
  Description of Artificial Sequence: Synthetic oligonucleotide
  modified_base (12)..(12): a, c, u, g, unknown or other
uggaagcuaccncaaaauu

SEQ ID NO: 2621754 - RNA, 19 nt, Artificial Sequence
  Description of Artificial Sequence: Synthetic oligonucleotide
gaugaggcauuaaaaucac

SEQ ID NO: 2621755 - RNA, 19 nt, Artificial Sequence
  Description of Artificial Sequence: Synthetic oligonucleotide
uugcucagguucugggagg

SEQ ID NO: 2621756 - RNA, 19 nt, Artificial Sequence
  Description of Artificial Sequence: Synthetic oligonucleotide
gaucugcaacauuuauuug

SEQ ID NO: 2621757 - RNA, 19 nt, Artificial Sequence
  Description of Artificial Sequence: Synthetic oligonucleotide
ucuucuuauaaugguccga

SEQ ID NO: 2621758 - RNA, 19 nt, Artificial Sequence
  Description of Artificial Sequence: Synthetic oligonucleotide
uuauuuggccuuagagaaa

SEQ ID NO: 2621759 - RNA, 19 nt, Artificial Sequence
  Description of Artificial Sequence: Synthetic oligonucleotide
ugaauccucugcuuucuuc

SEQ ID NO: 2621760 - RNA, 19 nt, Artificial Sequence
  Description of Artificial Sequence: Synthetic oligonucleotide
auaaugaauuccaugccau

SEQ ID NO: 2621761 - RNA, 19 nt, Artificial Sequence
  Description of Artificial Sequence: Synthetic oligonucleotide
uccgcuuuccuagucuucc

SEQ ID NO: 2621762 - RNA, 19 nt, Artificial Sequence
  Description of Artificial Sequence: Synthetic oligonucleotide
cuuaucagacaggagcaug

SEQ ID NO: 2621763 - RNA, 19 nt, Artificial Sequence
  Description of Artificial Sequence: Synthetic oligonucleotide
aaguaauccaaagcagcau

SEQ ID NO: 2621764 - RNA, 19 nt, Artificial Sequence
  Description of Artificial Sequence: Synthetic oligonucleotide
acaggagcaugucauccug

SEQ ID NO: 2621765 - RNA, 19 nt, Artificial Sequence
  Description of Artificial Sequence: Synthetic oligonucleotide
  modified_base (4)..(4): a, c, u, g, unknown or other
accncaaaauucacuagca

SEQ ID NO: 2621766 - RNA, 19 nt, Artificial Sequence
  Description of Artificial Sequence: Synthetic oligonucleotide
uaaaccgagugagccagcc

SEQ ID NO: 2621767 - RNA, 19 nt, Artificial Sequence
  Description of Artificial Sequence: Synthetic oligonucleotide
aucuaauucuaaagugauc

SEQ ID NO: 2621768 - RNA, 19 nt, Artificial Sequence
  Description of Artificial Sequence: Synthetic oligonucleotide
ucagguucugggaggagau

SEQ ID NO: 2621769 - RNA, 19 nt, Artificial Sequence
  Description of Artificial Sequence: Synthetic oligonucleotide
aucugagacugccaaggca

SEQ ID NO: 2621770 - RNA, 19 nt, Artificial Sequence
  Description of Artificial Sequence: Synthetic oligonucleotide
uaaagugaucugcaacauu

SEQ ID NO: 2621771 - RNA, 19 nt, Artificial Sequence
  Description of Artificial Sequence: Synthetic oligonucleotide
caaaauucacuagcagcag

SEQ ID NO: 2621772 - RNA, 19 nt, Artificial Sequence
  Description of Artificial Sequence: Synthetic oligonucleotide
uagucuuccuggaaggcuu

SEQ ID NO: 2621773 - RNA, 19 nt, Artificial Sequence
  Description of Artificial Sequence: Synthetic oligonucleotide
agcaguuugccccuuuaau

SEQ ID NO: 2621774 - RNA, 19 nt, Artificial Sequence
  Description of Artificial Sequence: Synthetic oligonucleotide
agcaacagaagggagcgcu

SEQ ID NO: 2621775 - RNA, 19 nt, Artificial Sequence
  Description of Artificial Sequence: Synthetic oligonucleotide
gaauccucugcuuucuucu

SEQ ID NO: 2621776 - RNA, 19 nt, Artificial Sequence
  Description of Artificial Sequence: Synthetic oligonucleotide
  modified_base (9)..(9): a, c, u, g, unknown or other
aagcuaccncaaaauucac

SEQ ID NO: 2621777 - RNA, 19 nt, Artificial Sequence
  Description of Artificial Sequence: Synthetic oligonucleotide
guacaacacaauuuagaaa

SEQ ID NO: 2621778 - RNA, 19 nt, Artificial Sequence
  Description of Artificial Sequence: Synthetic oligonucleotide
aucagacaggagcauguca

SEQ ID NO: 2621779 - RNA, 19 nt, Artificial Sequence
  Description of Artificial Sequence: Synthetic oligonucleotide
aguccauuccagugcagcu

SEQ ID NO: 2621780 - RNA, 19 nt, Artificial Sequence
  Description of Artificial Sequence: Synthetic oligonucleotide
accagcuuaucagacagga

SEQ ID NO: 2621781 - RNA, 19 nt, Artificial Sequence
  Description of Artificial Sequence: Synthetic oligonucleotide
auuccagugcagcuuugug

SEQ ID NO: 2621782 - RNA, 19 nt, Artificial Sequence
  Description of Artificial Sequence: Synthetic oligonucleotide
aguuccgcuuuccuagucu

SEQ ID NO: 2621783 - RNA, 19 nt, Artificial Sequence
  Description of Artificial Sequence: Synthetic oligonucleotide
uuuccuagucuuccuggaa

SEQ ID NO: 2621784 - RNA, 19 nt, Artificial Sequence
  Description of Artificial Sequence: Synthetic oligonucleotide
uccaugccauuccucauuc

SEQ ID NO: 2621785 - RNA, 19 nt, Artificial Sequence
  Description of Artificial Sequence: Synthetic oligonucleotide
auucuaaagugaucugcaa

SEQ ID NO: 2621786 - RNA, 19 nt, Artificial Sequence
  Description of Artificial Sequence: Synthetic oligonucleotide
  modified_base (16)..(16): a, c, u, g, unknown or other
uuccuggaagcuaccncaa

SEQ ID NO: 2621787 - RNA, 19 nt, Artificial Sequence
  Description of Artificial Sequence: Synthetic oligonucleotide
ccuuagagaaaaucacugc

SEQ ID NO: 2621788 - RNA, 19 nt, Artificial Sequence
  Description of Artificial Sequence: Synthetic oligonucleotide
aaaucaccuuccaugccca

SEQ ID NO: 2621789 - RNA, 19 nt, Artificial Sequence
  Description of Artificial Sequence: Synthetic oligonucleotide
acugccaaggcaucuccga

SEQ ID NO: 2621790 - RNA, 19 nt, Artificial Sequence
  Description of Artificial Sequence: Synthetic oligonucleotide
agccagaugaggcauuaaa

SEQ ID NO: 2621791 - RNA, 19 nt, Artificial Sequence
  Description of Artificial Sequence: Synthetic oligonucleotide
  modified_base (11)..(11): a, c, u, g, unknown or other
ggaagcuaccncaaaauuc

SEQ ID NO: 2621792 - RNA, 19 nt, Artificial Sequence
  Description of Artificial Sequence: Synthetic oligonucleotide
uuugccccuuuaauuuugu

SEQ ID NO: 2621793 - RNA, 19 nt, Artificial Sequence
  Description of Artificial Sequence: Synthetic oligonucleotide
gcuuuccuagucuuccugg

SEQ ID NO: 2621794 - RNA, 19 nt, Artificial Sequence
  Description of Artificial Sequence: Synthetic oligonucleotide
ugucauccuguuguucuag

SEQ ID NO: 2621795 - RNA, 19 nt, Artificial Sequence
  Description of Artificial Sequence: Synthetic oligonucleotide
cagccuucggaauaccgug

SEQ ID NO: 2621796 - RNA, 19 nt, Artificial Sequence
  Description of Artificial Sequence: Synthetic oligonucleotide
agcuuaucagacaggagca

SEQ ID NO: 2621797 - RNA, 19 nt, Artificial Sequence
  Description of Artificial Sequence: Synthetic oligonucleotide
ucggaauaccgugacgcug

SEQ ID NO: 2621798 - RNA, 19 nt, Artificial Sequence
  Description of Artificial Sequence: Synthetic oligonucleotide
caacaccagcuuaucagac

SEQ ID NO: 2621799 - RNA, 19 nt, Artificial Sequence
  Description of Artificial Sequence: Synthetic oligonucleotide
ucuggaugcaguuccgcuu

SEQ ID NO: 2621800 - RNA, 19 nt, Artificial Sequence
  Description of Artificial Sequence: Synthetic oligonucleotide
caaauuccuggaagcuacc

SEQ ID NO: 2621801 - RNA, 19 nt, Artificial Sequence
  Description of Artificial Sequence: Synthetic oligonucleotide
aaaccgagugagccagcca

SEQ ID NO: 2621802 - RNA, 19 nt, Artificial Sequence
  Description of Artificial Sequence: Synthetic oligonucleotide
augaggcauuaaaaucacc

SEQ ID NO: 2621803 - RNA, 19 nt, Artificial Sequence
  Description of Artificial Sequence: Synthetic oligonucleotide
uucggaauaccgugacgcu

SEQ ID NO: 2621804 - RNA, 19 nt, Artificial Sequence
  Description of Artificial Sequence: Synthetic oligonucleotide
gucccagacacuggaaucc

SEQ ID NO: 2621805 - RNA, 19 nt, Artificial Sequence
  Description of Artificial Sequence: Synthetic oligonucleotide
uuaaaccgagugagccagc

SEQ ID NO: 2621806 - RNA, 19 nt, Artificial Sequence
  Description of Artificial Sequence: Synthetic oligonucleotide
aauucacuagcagcaguuu

SEQ ID NO: 2621807 - RNA, 19 nt, Artificial Sequence
  Description of Artificial Sequence: Synthetic oligonucleotide
uuguggcuaauaugcuucu

SEQ ID NO: 2621808 - RNA, 19 nt, Artificial Sequence
  Description of Artificial Sequence: Synthetic oligonucleotide
gccuuagagaaaaucacug

SEQ ID NO: 2621809 - RNA, 19 nt, Artificial Sequence
  Description of Artificial Sequence: Synthetic oligonucleotide
cugcaacauuuauuuggcc

SEQ ID NO: 2621810 - RNA, 19 nt, Artificial Sequence
  Description of Artificial Sequence: Synthetic oligonucleotide
cuucuuauaaugguccgaa

SEQ ID NO: 2621811 - RNA, 19 nt, Artificial Sequence
  Description of Artificial Sequence: Synthetic oligonucleotide
caucugagacugccaaggc

SEQ ID NO: 2621812 - RNA, 19 nt, Artificial Sequence
  Description of Artificial Sequence: Synthetic oligonucleotide
cacucuaucaucugagacu

SEQ ID NO: 2621813 - RNA, 19 nt, Artificial Sequence
  Description of Artificial Sequence: Synthetic oligonucleotide
gcaucuaauucuaaaguga

SEQ ID NO: 2621814 - RNA, 19 nt, Artificial Sequence
  Description of Artificial Sequence: Synthetic oligonucleotide
auucaagagacaacauuaa

SEQ ID NO: 2621815 - RNA, 19 nt, Artificial Sequence
  Description of Artificial Sequence: Synthetic oligonucleotide
cugcuuaaaccgagugagc

SEQ ID NO: 2621816 - RNA, 19 nt, Artificial Sequence
  Description of Artificial Sequence: Synthetic oligonucleotide
uugcacaaagagucccaga

SEQ ID NO: 2621817 - RNA, 19 nt, Artificial Sequence
  Description of Artificial Sequence: Synthetic oligonucleotide
acgcugcuuaaaccgagug

SEQ ID NO: 2621818 - RNA, 19 nt, Artificial Sequence
  Description of Artificial Sequence: Synthetic oligonucleotide
accacucuaucaucugaga

SEQ ID NO: 2621819 - RNA, 19 nt, Artificial Sequence
  Description of Artificial Sequence: Synthetic oligonucleotide
caugccauuccucauucaa

SEQ ID NO: 2621820 - RNA, 19 nt, Artificial Sequence
  Description of Artificial Sequence: Synthetic oligonucleotide
cuaauuaguacaacacaau

SEQ ID NO: 2621821 - RNA, 19 nt, Artificial Sequence
  Description of Artificial Sequence: Synthetic oligonucleotide
caguccauuccagugcagc

SEQ ID NO: 2621822 - RNA, 19 nt, Artificial Sequence
  Description of Artificial Sequence: Synthetic oligonucleotide
  modified_base (9)..(9): a, c, u, g, unknown or other
cucuuuccncaaauuccug

SEQ ID NO: 2621823 - RNA, 19 nt, Artificial Sequence
  Description of Artificial Sequence: Synthetic oligonucleotide
accuuccaugcccagggca

SEQ ID NO: 2621824 - RNA, 19 nt, Artificial Sequence
  Description of Artificial Sequence: Synthetic oligonucleotide
acaagucacaaggaugaaa

SEQ ID NO: 2621825 - RNA, 19 nt, Artificial Sequence
  Description of Artificial Sequence: Synthetic oligonucleotide
caucuaauucuaaagugau

SEQ ID NO: 2621826 - RNA, 19 nt, Artificial Sequence
  Description of Artificial Sequence: Synthetic oligonucleotide
aacagaagggagcgcuaua

SEQ ID NO: 2621827 - RNA, 19 nt, Artificial Sequence
  Description of Artificial Sequence: Synthetic oligonucleotide
aguuugccccuuuaauuuu

SEQ ID NO: 2621828 - RNA, 19 nt, Artificial Sequence
  Description of Artificial Sequence: Synthetic oligonucleotide
uguccuuuaccagcagccu

SEQ ID NO: 2621829 - RNA, 19 nt, Artificial Sequence
  Description of Artificial Sequence: Synthetic oligonucleotide
ucacugcagacaagucaca

SEQ ID NO: 2621830 - RNA, 19 nt, Artificial Sequence
  Description of Artificial Sequence: Synthetic oligonucleotide
ggaugaaaaugauuagcaa

SEQ ID NO: 2621831 - RNA, 19 nt, Artificial Sequence
  Description of Artificial Sequence: Synthetic oligonucleotide
auaauccagcaaauuuuca

SEQ ID NO: 2621832 - RNA, 19 nt, Artificial Sequence
  Description of Artificial Sequence: Synthetic oligonucleotide
guggcuaauaugcuucucu

SEQ ID NO: 2621833 - RNA, 19 nt, Artificial Sequence
  Description of Artificial Sequence: Synthetic oligonucleotide
gaaucccaucuguuuucug

SEQ ID NO: 2621834 - RNA, 19 nt, Artificial Sequence
  Description of Artificial Sequence: Synthetic oligonucleotide
guugauuaaaccacucuau

SEQ ID NO: 2621835 - RNA, 19 nt, Artificial Sequence
  Description of Artificial Sequence: Synthetic oligonucleotide
guucuagauaauccagcaa

SEQ ID NO: 2621836 - RNA, 19 nt, Artificial Sequence
  Description of Artificial Sequence: Synthetic oligonucleotide
acaacacaauuuagaaaca

SEQ ID NO: 2621837 - RNA, 19 nt, Artificial Sequence
  Description of Artificial Sequence: Synthetic oligonucleotide
guuugccccuuuaauuuug

SEQ ID NO: 2621838 - RNA, 19 nt, Artificial Sequence
  Description of Artificial Sequence: Synthetic oligonucleotide
cuuuccuagucuuccugga

SEQ ID NO: 2621839 - RNA, 19 nt, Artificial Sequence
  Description of Artificial Sequence: Synthetic oligonucleotide
cgcaacaccagcuuaucag

SEQ ID NO: 2621840 - RNA, 19 nt, Artificial Sequence
  Description of Artificial Sequence: Synthetic oligonucleotide
uaauccaaagcagcaucua

SEQ ID NO: 2621841 - RNA, 19 nt, Artificial Sequence
  Description of Artificial Sequence: Synthetic oligonucleotide
gacugccaaggcaucuccg

SEQ ID NO: 2621842 - RNA, 19 nt, Artificial Sequence
  Description of Artificial Sequence: Synthetic oligonucleotide
agcagccuucggaauaccg

SEQ ID NO: 2621843 - RNA, 19 nt, Artificial Sequence
  Description of Artificial Sequence: Synthetic oligonucleotide
  modified_base (3)..(3): a, c, u, g, unknown or other
ccncaaaauucacuagcag

SEQ ID NO: 2621844 - RNA, 19 nt, Artificial Sequence
  Description of Artificial Sequence: Synthetic oligonucleotide
ugcuuugaauccucugcuu

SEQ ID NO: 2621845 - RNA, 19 nt, Artificial Sequence
  Description of Artificial Sequence: Synthetic oligonucleotide
cuaucaucugagacugcca

SEQ ID NO: 2621846 - RNA, 19 nt, Artificial Sequence
  Description of Artificial Sequence: Synthetic oligonucleotide
uggaaggcuuuugcucagg

SEQ ID NO: 2621847 - RNA, 19 nt, Artificial Sequence
  Description of Artificial Sequence: Synthetic oligonucleotide
caauuuagaaacagauaau

SEQ ID NO: 2621848 - RNA, 19 nt, Artificial Sequence
  Description of Artificial Sequence: Synthetic oligonucleotide
cagcaucuaauucuaaagu

SEQ ID NO: 2621849 - RNA, 19 nt, Artificial Sequence
  Description of Artificial Sequence: Synthetic oligonucleotide
caccagcuuaucagacagg

SEQ ID NO: 2621850 - RNA, 19 nt, Artificial Sequence
  Description of Artificial Sequence: Synthetic oligonucleotide
cacuagcagcaguuugccc

SEQ ID NO: 2621851 - RNA, 19 nt, Artificial Sequence
  Description of Artificial Sequence: Synthetic oligonucleotide
  modified_base (8)..(8): a, c, u, g, unknown or other
agcuaccncaaaauucacu

SEQ ID NO: 2621852 - RNA, 19 nt, Artificial Sequence
  Description of Artificial Sequence: Synthetic oligonucleotide
uccgaagccuccgcaacac

SEQ ID NO: 2621853 - RNA, 19 nt, Artificial Sequence
  Description of Artificial Sequence: Synthetic oligonucleotide
gaggcauuaaaaucaccuu

SEQ ID NO: 2621854 - RNA, 19 nt, Artificial Sequence
  Description of Artificial Sequence: Synthetic oligonucleotide
gaugcaguuccgcuuuccu

SEQ ID NO: 2621855 - RNA, 19 nt, Artificial Sequence
  Description of Artificial Sequence: Synthetic oligonucleotide
ccucauucaagagacaaca

SEQ ID NO: 2621856 - RNA, 19 nt, Artificial Sequence
  Description of Artificial Sequence: Synthetic oligonucleotide
ucccagacacuggaauccc

SEQ ID NO: 2621857 - RNA, 19 nt, Artificial Sequence
  Description of Artificial Sequence: Synthetic oligonucleotide
ugcucagguucugggagga

SEQ ID NO: 2621858 - RNA, 19 nt, Artificial Sequence
  Description of Artificial Sequence: Synthetic oligonucleotide
ugcuucucuggaugcaguu

SEQ ID NO: 2621859 - RNA, 19 nt, Artificial Sequence
  Description of Artificial Sequence: Synthetic oligonucleotide
  modified_base (15)..(15): a, c, u, g, unknown or other
uccuggaagcuaccncaaa

SEQ ID NO: 2621860 - RNA, 19 nt, Artificial Sequence
  Description of Artificial Sequence: Synthetic oligonucleotide
agugcagcuuuguggcuaa

SEQ ID NO: 2621861 - RNA, 19 nt, Artificial Sequence
  Description of Artificial Sequence: Synthetic oligonucleotide
caugcccagggcaucaaaa

SEQ ID NO: 2621862 - RNA, 19 nt, Artificial Sequence
  Description of Artificial Sequence: Synthetic oligonucleotide
augguccgaagccuccgca

SEQ ID NO: 2621863 - RNA, 19 nt, Artificial Sequence
  Description of Artificial Sequence: Synthetic oligonucleotide
gccccuuuaauuuuguccu

SEQ ID NO: 2621864 - RNA, 19 nt, Artificial Sequence
  Description of Artificial Sequence: Synthetic oligonucleotide
ugguccgaagccuccgcaa

SEQ ID NO: 2621865 - RNA, 19 nt, Artificial Sequence
  Description of Artificial Sequence: Synthetic oligonucleotide
gcuuaaaccgagugagcca

SEQ ID NO: 2621866 - RNA, 19 nt, Artificial Sequence
  Description of Artificial Sequence: Synthetic oligonucleotide
ccuguuguucuagauaauc

SEQ ID NO: 2621867 - RNA, 19 nt, Artificial Sequence
  Description of Artificial Sequence: Synthetic oligonucleotide
augcaguuccgcuuuccua

SEQ ID NO: 2621868 - RNA, 19 nt, Artificial Sequence
  Description of Artificial Sequence: Synthetic oligonucleotide
uccuguuguucuagauaau

SEQ ID NO: 2621869 - RNA, 19 nt, Artificial Sequence
  Description of Artificial Sequence: Synthetic oligonucleotide
gugagccagccagaugagg

SEQ ID NO: 2621870 - RNA, 19 nt, Artificial Sequence
  Description of Artificial Sequence: Synthetic oligonucleotide
uuccgcuuuccuagucuuc

SEQ ID NO: 2621871 - RNA, 19 nt, Artificial Sequence
  Description of Artificial Sequence: Synthetic oligonucleotide
cggaauaccgugacgcugc

SEQ ID NO: 2621872 - RNA, 19 nt, Artificial Sequence
  Description of Artificial Sequence: Synthetic oligonucleotide
gcauuaaaaucaccuucca

SEQ ID NO: 2621873 - RNA, 19 nt, Artificial Sequence
  Description of Artificial Sequence: Synthetic oligonucleotide
ccuggaaggcuuuugcuca

SEQ ID NO: 2621874 - RNA, 19 nt, Artificial Sequence
  Description of Artificial Sequence: Synthetic oligonucleotide
  modified_base (13)..(13): a, c, u, g, unknown or other
cuggaagcuaccncaaaau

SEQ ID NO: 2621875 - RNA, 19 nt, Artificial Sequence
  Description of Artificial Sequence: Synthetic oligonucleotide
cuguugauuaaaccacucu

SEQ ID NO: 2621876 - RNA, 19 nt, Artificial Sequence
  Description of Artificial Sequence: Synthetic oligonucleotide
cauuaaaaucaccuuccau

SEQ ID NO: 2621877 - RNA, 19 nt, Artificial Sequence
  Description of Artificial Sequence: Synthetic oligonucleotide
caguuugccccuuuaauuu

SEQ ID NO: 2621878 - RNA, 19 nt, Artificial Sequence
  Description of Artificial Sequence: Synthetic oligonucleotide
agcaugucauccuguuguu

SEQ ID NO: 2621879 - RNA, 19 nt, Artificial Sequence
  Description of Artificial Sequence: Synthetic oligonucleotide
uguggcuaauaugcuucuc

SEQ ID NO: 2621880 - RNA, 19 nt, Artificial Sequence
  Description of Artificial Sequence: Synthetic oligonucleotide
acaaagagucccagacacu

SEQ ID NO: 2621881 - RNA, 19 nt, Artificial Sequence
  Description of Artificial Sequence: Synthetic oligonucleotide
cugagacugccaaggcauc

SEQ ID NO: 2621882 - RNA, 19 nt, Artificial Sequence
  Description of Artificial Sequence: Synthetic oligonucleotide
cucagguucugggaggaga

SEQ ID NO: 2621883 - RNA, 19 nt, Artificial Sequence
  Description of Artificial Sequence: Synthetic oligonucleotide
  modified_base (14)..(14): a, c, u, g, unknown or other
ccuggaagcuaccncaaaa

SEQ ID NO: 2621884 - RNA, 19 nt, Artificial Sequence
  Description of Artificial Sequence: Synthetic oligonucleotide
gcuuuugcucagguucugg

SEQ ID NO: 2621885 - RNA, 19 nt, Artificial Sequence
  Description of Artificial Sequence: Synthetic oligonucleotide
  modified_base (2)..(2): a, c, u, g, unknown or other
cncaaauuccuggaagcua

SEQ ID NO: 2621886 - RNA, 19 nt, Artificial Sequence
  Description of Artificial Sequence: Synthetic oligonucleotide
uugccccuuuaauuuuguc

SEQ ID NO: 2621887 - RNA, 19 nt, Artificial Sequence
  Description of Artificial Sequence: Synthetic oligonucleotide
cuuuguggcuaauaugcuu

SEQ ID NO: 2621888 - RNA, 19 nt, Artificial Sequence
  Description of Artificial Sequence: Synthetic oligonucleotide
agugagccagccagaugag

SEQ ID NO: 2621889 - RNA, 19 nt, Artificial Sequence
  Description of Artificial Sequence: Synthetic oligonucleotide
uccgcaacaccagcuuauc

SEQ ID NO: 2621890 - RNA, 19 nt, Artificial Sequence
  Description of Artificial Sequence: Synthetic oligonucleotide
cagaagggagcgcuauaga

SEQ ID NO: 2621891 - RNA, 19 nt, Artificial Sequence
  Description of Artificial Sequence: Synthetic oligonucleotide
auaccgugacgcugcuuaa

SEQ ID NO: 2621892 - RNA, 19 nt, Artificial Sequence
  Description of Artificial Sequence: Synthetic oligonucleotide
gcacaaagagucccagaca

SEQ ID NO: 2621893 - RNA, 19 nt, Artificial Sequence
  Description of Artificial Sequence: Synthetic oligonucleotide
guccgaagccuccgcaaca

SEQ ID NO: 2621894 - RNA, 19 nt, Artificial Sequence
  Description of Artificial Sequence: Synthetic oligonucleotide
uggaugcaguuccgcuuuc

SEQ ID NO: 2621895 - RNA, 19 nt, Artificial Sequence
  Description of Artificial Sequence: Synthetic oligonucleotide
uagcaacagaagggagcgc

SEQ ID NO: 2621896 - RNA, 19 nt, Artificial Sequence
  Description of Artificial Sequence: Synthetic oligonucleotide
uaccgugacgcugcuuaaa

SEQ ID NO: 2621897 - RNA, 19 nt, Artificial Sequence
  Description of Artificial Sequence: Synthetic oligonucleotide
ccuucggaauaccgugacg

SEQ ID NO: 2621898 - RNA, 19 nt, Artificial Sequence
  Description of Artificial Sequence: Synthetic oligonucleotide
gugacgcugcuuaaaccga

SEQ ID NO: 2621899 - RNA, 19 nt, Artificial Sequence
  Description of Artificial Sequence: Synthetic oligonucleotide
cuagcagcaguuugccccu

SEQ ID NO: 2621900 - RNA, 19 nt, Artificial Sequence
  Description of Artificial Sequence: Synthetic oligonucleotide
gcaguuugccccuuuaauu

SEQ ID NO: 2621901 - RNA, 19 nt, Artificial Sequence
  Description of Artificial Sequence: Synthetic oligonucleotide
ccgugacgcugcuuaaacc

SEQ ID NO: 2621902 - RNA, 19 nt, Artificial Sequence
  Description of Artificial Sequence: Synthetic oligonucleotide
cuagucuuccuggaaggcu

SEQ ID NO: 2621903 - RNA, 19 nt, Artificial Sequence
  Description of Artificial Sequence: Synthetic oligonucleotide
cuagauaauccagcaaauu

SEQ ID NO: 2621904 - RNA, 19 nt, Artificial Sequence
  Description of Artificial Sequence: Synthetic oligonucleotide
gugaucugcaacauuuauu

SEQ ID NO: 2621905 - RNA, 19 nt, Artificial Sequence
  Description of Artificial Sequence: Synthetic oligonucleotide
agccuucggaauaccguga

SEQ ID NO: 2621906 - RNA, 19 nt, Artificial Sequence
  Description of Artificial Sequence: Synthetic oligonucleotide
caguuccgcuuuccuaguc

SEQ ID NO: 2621907 - RNA, 19 nt, Artificial Sequence
  Description of Artificial Sequence: Synthetic oligonucleotide
gacaagucacaaggaugaa

SEQ ID NO: 2621908 - RNA, 19 nt, Artificial Sequence
  Description of Artificial Sequence: Synthetic oligonucleotide
gccuucggaauaccgugac

SEQ ID NO: 2621909 - RNA, 19 nt, Artificial Sequence
  Description of Artificial Sequence: Synthetic oligonucleotide
cucauucaagagacaacau

SEQ ID NO: 2621910 - RNA, 19 nt, Artificial Sequence
  Description of Artificial Sequence: Synthetic oligonucleotide
cuaaagugaucugcaacau

SEQ ID NO: 2621911 - RNA, 19 nt, Artificial Sequence
  Description of Artificial Sequence: Synthetic oligonucleotide
caccuuccaugcccagggc

SEQ ID NO: 2621912 - RNA, 19 nt, Artificial Sequence
  Description of Artificial Sequence: Synthetic oligonucleotide
auuccucauucaagagaca

SEQ ID NO: 2621913 - RNA, 19 nt, Artificial Sequence
  Description of Artificial Sequence: Synthetic oligonucleotide
ccuagucuuccuggaaggc

SEQ ID NO: 2621914 - RNA, 19 nt, Artificial Sequence
  Description of Artificial Sequence: Synthetic oligonucleotide
cuuccaugcccagggcauc

SEQ ID NO: 2621915 - RNA, 19 nt, Artificial Sequence
  Description of Artificial Sequence: Synthetic oligonucleotide
cacugcagacaagucacaa

SEQ ID NO: 2621916 - RNA, 19 nt, Artificial Sequence
  Description of Artificial Sequence: Synthetic oligonucleotide
agacaacauuaaagagcug

SEQ ID NO: 2621917 - RNA, 19 nt, Artificial Sequence
  Description of Artificial Sequence: Synthetic oligonucleotide
ggaugcaguuccgcuuucc

SEQ ID NO: 2621918 - RNA, 19 nt, Artificial Sequence
  Description of Artificial Sequence: Synthetic oligonucleotide
ggcuuguuuugcacaaaga

SEQ ID NO: 2621919 - RNA, 19 nt, Artificial Sequence
  Description of Artificial Sequence: Synthetic oligonucleotide
gcuuugaauccucugcuuu

SEQ ID NO: 2621920 - RNA, 19 nt, Artificial Sequence
  Description of Artificial Sequence: Synthetic oligonucleotide
ggccuuagagaaaaucacu

SEQ ID NO: 2621921 - RNA, 19 nt, Artificial Sequence
  Description of Artificial Sequence: Synthetic oligonucleotide
agcagcaguuugccccuuu

SEQ ID NO: 2621922 - RNA, 19 nt, Artificial Sequence
  Description of Artificial Sequence: Synthetic oligonucleotide
guuccgcuuuccuagucuu

SEQ ID NO: 2621923 - RNA, 19 nt, Artificial Sequence
  Description of Artificial Sequence: Synthetic oligonucleotide
cccaucuguuuucuguuga

SEQ ID NO: 2621924 - RNA, 19 nt, Artificial Sequence
  Description of Artificial Sequence: Synthetic oligonucleotide
guccuuuaccagcagccuu

SEQ ID NO: 2621925 - RNA, 19 nt, Artificial Sequence
  Description of Artificial Sequence: Synthetic oligonucleotide
cuggaugcaguuccgcuuu

SEQ ID NO: 2621926 - RNA, 19 nt, Artificial Sequence
  Description of Artificial Sequence: Synthetic oligonucleotide
accgagugagccagccaga

SEQ ID NO: 2621927 - RNA, 19 nt, Artificial Sequence
  Description of Artificial Sequence: Synthetic oligonucleotide
cuccgcaacaccagcuuau

SEQ ID NO: 2621928 - RNA, 19 nt, Artificial Sequence
  Description of Artificial Sequence: Synthetic oligonucleotide
ggaaggcuuuugcucaggu

SEQ ID NO: 2621929 - RNA, 19 nt, Artificial Sequence
  Description of Artificial Sequence: Synthetic oligonucleotide
uccaugcccagggcaucaa

SEQ ID NO: 2621930 - RNA, 19 nt, Artificial Sequence
  Description of Artificial Sequence: Synthetic oligonucleotide
gagcgcuauagaugauuuu

SEQ ID NO: 2621931 - RNA, 19 nt, Artificial Sequence
  Description of Artificial Sequence: Synthetic oligonucleotide
auuuggccuuagagaaaau

SEQ ID NO: 2621932 - RNA, 19 nt, Artificial Sequence
  Description of Artificial Sequence: Synthetic oligonucleotide
caggagcaugucauccugu

SEQ ID NO: 2621933 - RNA, 19 nt, Artificial Sequence
  Description of Artificial Sequence: Synthetic oligonucleotide
cgcuuuccuagucuuccug

SEQ ID NO: 2621934 - RNA, 19 nt, Artificial Sequence
  Description of Artificial Sequence: Synthetic oligonucleotide
caacagaagggagcgcuau

SEQ ID NO: 2621935 - RNA, 19 nt, Artificial Sequence
  Description of Artificial Sequence: Synthetic oligonucleotide
gcagccuucggaauaccgu

SEQ ID NO: 2621936 - RNA, 19 nt, Artificial Sequence
  Description of Artificial Sequence: Synthetic oligonucleotide
ggaaucccaucuguuuucu

SEQ ID NO: 2621937 - RNA, 19 nt, Artificial Sequence
  Description of Artificial Sequence: Synthetic oligonucleotide
guccauuccagugcagcuu

SEQ ID NO: 2621938 - RNA, 19 nt, Artificial Sequence
  Description of Artificial Sequence: Synthetic oligonucleotide
ggagcgcuauagaugauuu

SEQ ID NO: 2621939 - RNA, 19 nt, Artificial Sequence
  Description of Artificial Sequence: Synthetic oligonucleotide
ccgaagccuccgcaacacc

SEQ ID NO: 2621940 - RNA, 19 nt, Artificial Sequence
  Description of Artificial Sequence: Synthetic oligonucleotide
ccauuccagugcagcuuug

SEQ ID NO: 2621941 - RNA, 19 nt, Artificial Sequence
  Description of Artificial Sequence: Synthetic oligonucleotide
gcuuuguggcuaauaugcu

SEQ ID NO: 2621942 - RNA, 19 nt, Artificial Sequence
  Description of Artificial Sequence: Synthetic oligonucleotide
  modified_base (3)..(3): a, c, u, g, unknown or other
ccncaaauuccuggaagcu

SEQ ID NO: 2621943 - RNA, 19 nt, Artificial Sequence
  Description of Artificial Sequence: Synthetic oligonucleotide
ccuuccaugcccagggcau

SEQ ID NO: 2621944 - RNA, 19 nt, Artificial Sequence
  Description of Artificial Sequence: Synthetic oligonucleotide
ccgcaacaccagcuuauca

SEQ ID NO: 2621945 - RNA, 19 nt, Artificial Sequence
  Description of Artificial Sequence: Synthetic oligonucleotide
cgagugagccagccagaug

SEQ ID NO: 2621946 - RNA, 19 nt, Artificial Sequence
  Description of Artificial Sequence: Synthetic oligonucleotide
ggaauaccgugacgcugcu

SEQ ID NO: 2621947 - RNA, 19 nt, Artificial Sequence
  Description of Artificial Sequence: Synthetic oligonucleotide
gcaacagaagggagcgcua

SEQ ID NO: 2621948 - RNA, 19 nt, Artificial Sequence
  Description of Artificial Sequence: Synthetic oligonucleotide
gggagcgcuauagaugauu

SEQ ID NO: 2621949 - RNA, 19 nt, Artificial Sequence
  Description of Artificial Sequence: Synthetic oligonucleotide
gcuuaucagacaggagcau

SEQ ID NO: 2621950 - RNA, 19 nt, Artificial Sequence
  Description of Artificial Sequence: Synthetic oligonucleotide
gaauaccgugacgcugcuu

SEQ ID NO: 2621951 - RNA, 19 nt, Artificial Sequence
  Description of Artificial Sequence: Synthetic oligonucleotide
agggagcgcuauagaugau

SEQ ID NO: 2621952 - RNA, 19 nt, Artificial Sequence
  Description of Artificial Sequence: Synthetic oligonucleotide
uagcagcaguuugccccuu

SEQ ID NO: 2621953 - RNA, 19 nt, Artificial Sequence
  Description of Artificial Sequence: Synthetic oligonucleotide
gguucugggaggagauuuu

SEQ ID NO: 2621954 - RNA, 19 nt, Artificial Sequence
  Description of Artificial Sequence: Synthetic oligonucleotide
cagccagaugaggcauuaa

SEQ ID NO: 2621955 - RNA, 19 nt, Artificial Sequence
  Description of Artificial Sequence: Synthetic oligonucleotide
ccuccgcaacaccagcuua

SEQ ID NO: 2621956 - RNA, 19 nt, Artificial Sequence
  Description of Artificial Sequence: Synthetic oligonucleotide
ccagccagaugaggcauua

SEQ ID NO: 2621957 - RNA, 19 nt, Artificial Sequence
  Description of Artificial Sequence: Synthetic oligonucleotide
gccuccgcaacaccagcuu

SEQ ID NO: 2621958 - RNA, 19 nt, Artificial Sequence
  Description of Artificial Sequence: Synthetic oligonucleotide
cccuuuaauuuuguccuuu

SEQ ID NO: 2621959 - RNA, 19 nt, Artificial Sequence
  Description of Artificial Sequence: Synthetic oligonucleotide
ccaugcccagggcaucaaa

SEQ ID NO: 2621960 - RNA, 19 nt, Artificial Sequence
  Description of Artificial Sequence: Synthetic oligonucleotide
gucuuccuggaaggcuuuu

SEQ ID NO: 2621961 - RNA, 19 nt, Artificial Sequence
  Description of Artificial Sequence: Synthetic oligonucleotide
ccagugcagcuuuguggcu

SEQ ID NO: 2621962 - RNA, 19 nt, Artificial Sequence
  Description of Artificial Sequence: Synthetic oligonucleotide
cagguucugggaggagauu

SEQ ID NO: 2621963 - RNA, 19 nt, Artificial Sequence
  Description of Artificial Sequence: Synthetic oligonucleotide
ccgcuuuccuagucuuccu

SEQ ID NO: 2621964 - RNA, 19 nt, Artificial Sequence
  Description of Artificial Sequence: Synthetic oligonucleotide
ccccuuuaauuuuguccuu

SEQ ID NO: 2621965 - RNA, 19 nt, Artificial Sequence
  Description of Artificial Sequence: Synthetic oligonucleotide
ccgagugagccagccagau

SEQ ID NO: 2621966 - RNA, 19 nt, Artificial Sequence
  Description of Artificial Sequence: Synthetic oligonucleotide
gccagccagaugaggcauu

SEQ ID NO: 2621967 - RNA, 19 nt, Artificial Sequence
  Description of Artificial Sequence: Synthetic oligonucleotide
  modified_base (1)..(1): a, c, u, g, unknown or other
ncaaauuccuggaagcuac

SEQ ID NO: 2621968 - RNA, 19 nt, Artificial Sequence
  Description of Artificial Sequence: Synthetic oligonucleotide
acuaaaauauuuuaagucc

SEQ ID NO: 2621969 - RNA, 19 nt, Artificial Sequence
  Description of Artificial Sequence: Synthetic oligonucleotide
aacuaaaauauuuuaaguc

SEQ ID NO: 2621970 - RNA, 19 nt, Artificial Sequence
  Description of Artificial Sequence: Synthetic oligonucleotide
aauuguaauugacacacac

SEQ ID NO: 2621971 - RNA, 19 nt, Artificial Sequence
  Description of Artificial Sequence: Synthetic oligonucleotide
aaugcaauaggucucuggg

SEQ ID NO: 2621972 - RNA, 19 nt, Artificial Sequence
  Description of Artificial Sequence: Synthetic oligonucleotide
aguuuguucaaacugagag

SEQ ID NO: 2621973 - RNA, 19 nt, Artificial Sequence
  Description of Artificial Sequence: Synthetic oligonucleotide
augaggaaaguguagaagc

SEQ ID NO: 2621974 - RNA, 19 nt, Artificial Sequence
  Description of Artificial Sequence: Synthetic oligonucleotide
uuuuaauuguaauugacac

SEQ ID NO: 2621975 - RNA, 19 nt, Artificial Sequence
  Description of Artificial Sequence: Synthetic oligonucleotide
uacacaguuaaucugugcg

SEQ ID NO: 2621976 - RNA, 19 nt, Artificial Sequence
  Description of Artificial Sequence: Synthetic oligonucleotide
uuaauuguaauugacacac

SEQ ID NO: 2621977 - RNA, 19 nt, Artificial Sequence
  Description of Artificial Sequence: Synthetic oligonucleotide
aauauuuuaagucccaauu

SEQ ID NO: 2621978 - RNA, 19 nt, Artificial Sequence
  Description of Artificial Sequence: Synthetic oligonucleotide
aaacuaaaauauuuuaagu

SEQ ID NO: 2621979 - RNA, 19 nt, Artificial Sequence
  Description of Artificial Sequence: Synthetic oligonucleotide
uucaaaaugaggaaagugu

SEQ ID NO: 2621980 - RNA, 19 nt, Artificial Sequence
  Description of Artificial Sequence: Synthetic oligonucleotide
uauuuuaagucccaauugc

SEQ ID NO: 2621981 - RNA, 19 nt, Artificial Sequence
  Description of Artificial Sequence: Synthetic oligonucleotide
aauugaguauacuauguca

SEQ ID NO: 2621982 - RNA, 19 nt, Artificial Sequence
  Description of Artificial Sequence: Synthetic oligonucleotide
acaaauuacacaguuaauc

SEQ ID NO: 2621983 - RNA, 19 nt, Artificial Sequence
  Description of Artificial Sequence: Synthetic oligonucleotide
uuguaauugacacacacaa

SEQ ID NO: 2621984 - RNA, 19 nt, Artificial Sequence
  Description of Artificial Sequence: Synthetic oligonucleotide
agucuuauaccacaguuuc

SEQ ID NO: 2621985 - RNA, 19 nt, Artificial Sequence
  Description of Artificial Sequence: Synthetic oligonucleotide
aaauuacacaguuaaucug

SEQ ID NO: 2621986 - RNA, 19 nt, Artificial Sequence
  Description of Artificial Sequence: Synthetic oligonucleotide
ugaagugaugcccacaagc

SEQ ID NO: 2621987 - RNA, 19 nt, Artificial Sequence
  Description of Artificial Sequence: Synthetic oligonucleotide
aaauccacaugccugaagu

SEQ ID NO: 2621988 - RNA, 19 nt, Artificial Sequence
  Description of Artificial Sequence: Synthetic oligonucleotide
cuuaacauuacuuaaugca

SEQ ID NO: 2621989 - RNA, 19 nt, Artificial Sequence
  Description of Artificial Sequence: Synthetic oligonucleotide
gaugcaaucaaacaaacua

SEQ ID NO: 2621990 - RNA, 19 nt, Artificial Sequence
  Description of Artificial Sequence: Synthetic oligonucleotide
uacuuaaugcaauaggucu

SEQ ID NO: 2621991 - RNA, 19 nt, Artificial Sequence
  Description of Artificial Sequence: Synthetic oligonucleotide
uuaacauuacuuaaugcaa

SEQ ID NO: 2621992 - RNA, 19 nt, Artificial Sequence
  Description of Artificial Sequence: Synthetic oligonucleotide
uucuaguuuguucaaacug

SEQ ID NO: 2621993 - RNA, 19 nt, Artificial Sequence
  Description of Artificial Sequence: Synthetic oligonucleotide
ugugcgaaugcaaaguugc

SEQ ID NO: 2621994 - RNA, 19 nt, Artificial Sequence
  Description of Artificial Sequence: Synthetic oligonucleotide
aagaaauuuaacauuucag

SEQ ID NO: 2621995 - RNA, 19 nt, Artificial Sequence
  Description of Artificial Sequence: Synthetic oligonucleotide
aaguguuucuaguuuguuc

SEQ ID NO: 2621996 - RNA, 19 nt, Artificial Sequence
  Description of Artificial Sequence: Synthetic oligonucleotide
uuauaccacaguuucauug

SEQ ID NO: 2621997 - RNA, 19 nt, Artificial Sequence
  Description of Artificial Sequence: Synthetic oligonucleotide
aagucaacuuaguaaaucu

SEQ ID NO: 2621998 - RNA, 19 nt, Artificial Sequence
  Description of Artificial Sequence: Synthetic oligonucleotide
ugcaaaguugccaagaaau

SEQ ID NO: 2621999 - RNA, 19 nt, Artificial Sequence
  Description of Artificial Sequence: Synthetic oligonucleotide
aguguuucuaguuuguuca

SEQ ID NO: 2622000 - RNA, 19 nt, Artificial Sequence
  Description of Artificial Sequence: Synthetic oligonucleotide
aauugcuuaacauuacuua

SEQ ID NO: 2622001 - RNA, 19 nt, Artificial Sequence
  Description of Artificial Sequence: Synthetic oligonucleotide
aauugacacacacaaauua

SEQ ID NO: 2622002 - RNA, 19 nt, Artificial Sequence
  Description of Artificial Sequence: Synthetic oligonucleotide
uuuaaagucaauugaguau

SEQ ID NO: 2622003 - RNA, 19 nt, Artificial Sequence
  Description of Artificial Sequence: Synthetic oligonucleotide
ugaguauacuaugucaugg

SEQ ID NO: 2622004 - RNA, 19 nt, Artificial Sequence
  Description of Artificial Sequence: Synthetic oligonucleotide
cauuacuuaaugcaauagg

SEQ ID NO: 2622005 - RNA, 19 nt, Artificial Sequence
  Description of Artificial Sequence: Synthetic oligonucleotide
auauuuuaagucccaauug

SEQ ID NO: 2622006 - RNA, 19 nt, Artificial Sequence
  Description of Artificial Sequence: Synthetic oligonucleotide
gaauucaccaaucgguuag

SEQ ID NO: 2622007 - RNA, 19 nt, Artificial Sequence
  Description of Artificial Sequence: Synthetic oligonucleotide
uauacuaugucauggucca

SEQ ID NO: 2622008 - RNA, 19 nt, Artificial Sequence
  Description of Artificial Sequence: Synthetic oligonucleotide
aagccggcuagucuuauac

SEQ ID NO: 2622009 - RNA, 19 nt, Artificial Sequence
  Description of Artificial Sequence: Synthetic oligonucleotide
uuuuccucugaauuaagug

SEQ ID NO: 2622010 - RNA, 19 nt, Artificial Sequence
  Description of Artificial Sequence: Synthetic oligonucleotide
uugcuuuuaauuguaauug

SEQ ID NO: 2622011 - RNA, 19 nt, Artificial Sequence
  Description of Artificial Sequence: Synthetic oligonucleotide
ugaguaauuuccuucaaaa

SEQ ID NO: 2622012 - RNA, 19 nt, Artificial Sequence
  Description of Artificial Sequence: Synthetic oligonucleotide
aguuaaucugugcgaaugc

SEQ ID NO: 2622013 - RNA, 19 nt, Artificial Sequence
  Description of Artificial Sequence: Synthetic oligonucleotide
aauuacacaguuaaucugu

SEQ ID NO: 2622014 - RNA, 19 nt, Artificial Sequence
  Description of Artificial Sequence: Synthetic oligonucleotide
uuuaauuguaauugacaca

SEQ ID NO: 2622015 - RNA, 19 nt, Artificial Sequence
  Description of Artificial Sequence: Synthetic oligonucleotide
uuaacauuucaguucuucc

SEQ ID NO: 2622016 - RNA, 19 nt, Artificial Sequence
  Description of Artificial Sequence: Synthetic oligonucleotide
acacaaauuacacaguuaa

SEQ ID NO: 2622017 - RNA, 19 nt, Artificial Sequence
  Description of Artificial Sequence: Synthetic oligonucleotide
uuuguucaaacugagaguc

SEQ ID NO: 2622018 - RNA, 19 nt, Artificial Sequence
  Description of Artificial Sequence: Synthetic oligonucleotide
aacuuaguaaaucucguuu

SEQ ID NO: 2622019 - RNA, 19 nt, Artificial Sequence
  Description of Artificial Sequence: Synthetic oligonucleotide
aaugaggaaaguguagaag

SEQ ID NO: 2622020 - RNA, 19 nt, Artificial Sequence
  Description of Artificial Sequence: Synthetic oligonucleotide
aagucaauugaguauacua

SEQ ID NO: 2622021 - RNA, 19 nt, Artificial Sequence
  Description of Artificial Sequence: Synthetic oligonucleotide
uauaccacaguuucauugc

SEQ ID NO: 2622022 - RNA, 19 nt, Artificial Sequence
  Description of Artificial Sequence: Synthetic oligonucleotide
agugaaucaccuuuccuuc

SEQ ID NO: 2622023 - RNA, 19 nt, Artificial Sequence
  Description of Artificial Sequence: Synthetic oligonucleotide
ucaauugaguauacuaugu

SEQ ID NO: 2622024 - RNA, 19 nt, Artificial Sequence
  Description of Artificial Sequence: Synthetic oligonucleotide
uccuucaaaaugaggaaag

SEQ ID NO: 2622025 - RNA, 19 nt, Artificial Sequence
  Description of Artificial Sequence: Synthetic oligonucleotide
ugcuuaacauuacuuaaug

SEQ ID NO: 2622026 - RNA, 19 nt, Artificial Sequence
  Description of Artificial Sequence: Synthetic oligonucleotide
caaacugagagucacugag

SEQ ID NO: 2622027 - RNA, 19 nt, Artificial Sequence
  Description of Artificial Sequence: Synthetic oligonucleotide
aaguguagaagccggcuag

SEQ ID NO: 2622028 - RNA, 19 nt, Artificial Sequence
  Description of Artificial Sequence: Synthetic oligonucleotide
aagugaaucaccuuuccuu

SEQ ID NO: 2622029 - RNA, 19 nt, Artificial Sequence
  Description of Artificial Sequence: Synthetic oligonucleotide
uaugucaugguccaagaau

SEQ ID NO: 2622030 - RNA, 19 nt, Artificial Sequence
  Description of Artificial Sequence: Synthetic oligonucleotide
aguauacuaugucaugguc

SEQ ID NO: 2622031 - RNA, 19 nt, Artificial Sequence
  Description of Artificial Sequence: Synthetic oligonucleotide
aguaaaucucguuuuccuc

SEQ ID NO: 2622032 - RNA, 19 nt, Artificial Sequence
  Description of Artificial Sequence: Synthetic oligonucleotide
ucaugguccaagaauuugc

SEQ ID NO: 2622033 - RNA, 19 nt, Artificial Sequence
  Description of Artificial Sequence: Synthetic oligonucleotide
auuagagucaucugcagaa

SEQ ID NO: 2622034 - RNA, 19 nt, Artificial Sequence
  Description of Artificial Sequence: Synthetic oligonucleotide
ucaaaaugaggaaagugua

SEQ ID NO: 2622035 - RNA, 19 nt, Artificial Sequence
  Description of Artificial Sequence: Synthetic oligonucleotide
gucaacuuaguaaaucucg

SEQ ID NO: 2622036 - RNA, 19 nt, Artificial Sequence
  Description of Artificial Sequence: Synthetic oligonucleotide
ugcaauaggucucuggggu

SEQ ID NO: 2622037 - RNA, 19 nt, Artificial Sequence
  Description of Artificial Sequence: Synthetic oligonucleotide
auuacuuaaugcaauaggu

SEQ ID NO: 2622038 - RNA, 19 nt, Artificial Sequence
  Description of Artificial Sequence: Synthetic oligonucleotide
uuacuuaaugcaauagguc

SEQ ID NO: 2622039 - RNA, 19 nt, Artificial Sequence
  Description of Artificial Sequence: Synthetic oligonucleotide
aaucugugcgaaugcaaag

SEQ ID NO: 2622040 - RNA, 19 nt, Artificial Sequence
  Description of Artificial Sequence: Synthetic oligonucleotide
ucucucuuuaccuucccag

SEQ ID NO: 2622041 - RNA, 19 nt, Artificial Sequence
  Description of Artificial Sequence: Synthetic oligonucleotide
uuaaagucaauugaguaua

SEQ ID NO: 2622042 - RNA, 19 nt, Artificial Sequence
  Description of Artificial Sequence: Synthetic oligonucleotide
aagugauugucagaaagug

SEQ ID NO: 2622043 - RNA, 19 nt, Artificial Sequence
  Description of Artificial Sequence: Synthetic oligonucleotide
agagucacugaguaauuuc

SEQ ID NO: 2622044 - RNA, 19 nt, Artificial Sequence
  Description of Artificial Sequence: Synthetic oligonucleotide
cuggcgucugccuagaugc

SEQ ID NO: 2622045 - RNA, 19 nt, Artificial Sequence
  Description of Artificial Sequence: Synthetic oligonucleotide
cuaaaguguuucuaguuug

SEQ ID NO: 2622046 - RNA, 19 nt, Artificial Sequence
  Description of Artificial Sequence: Synthetic oligonucleotide
uaagugauugucagaaagu

SEQ ID NO: 2622047 - RNA, 19 nt, Artificial Sequence
  Description of Artificial Sequence: Synthetic oligonucleotide
aacauuuccacugccauau

SEQ ID NO: 2622048 - RNA, 19 nt, Artificial Sequence
  Description of Artificial Sequence: Synthetic oligonucleotide
ugaggaaaguguagaagcc

SEQ ID NO: 2622049 - RNA, 19 nt, Artificial Sequence
  Description of Artificial Sequence: Synthetic oligonucleotide
uuuuggcugaccaaaucca

SEQ ID NO: 2622050 - RNA, 19 nt, Artificial Sequence
  Description of Artificial Sequence: Synthetic oligonucleotide
auugucagaaagugaauca

SEQ ID NO: 2622051 - RNA, 19 nt, Artificial Sequence
  Description of Artificial Sequence: Synthetic oligonucleotide
ucugaauuaagugauuguc

SEQ ID NO: 2622052 - RNA, 19 nt, Artificial Sequence
  Description of Artificial Sequence: Synthetic oligonucleotide
guaauuuccuucaaaauga

SEQ ID NO: 2622053 - RNA, 19 nt, Artificial Sequence
  Description of Artificial Sequence: Synthetic oligonucleotide
ucaacuuaguaaaucucgu

SEQ ID NO: 2622054 - RNA, 19 nt, Artificial Sequence
  Description of Artificial Sequence: Synthetic oligonucleotide
auugcuuaacauuacuuaa

SEQ ID NO: 2622055 - RNA, 19 nt, Artificial Sequence
  Description of Artificial Sequence: Synthetic oligonucleotide
uugccaagaaauuuaacau

SEQ ID NO: 2622056 - RNA, 19 nt, Artificial Sequence
  Description of Artificial Sequence: Synthetic oligonucleotide
uauuagagucaucugcaga

SEQ ID NO: 2622057 - RNA, 19 nt, Artificial Sequence
  Description of Artificial Sequence: Synthetic oligonucleotide
uuuaagucccaauugcuua

SEQ ID NO: 2622058 - RNA, 19 nt, Artificial Sequence
  Description of Artificial Sequence: Synthetic oligonucleotide
aaagugaaucaccuuuccu

SEQ ID NO: 2622059 - RNA, 19 nt, Artificial Sequence
  Description of Artificial Sequence: Synthetic oligonucleotide
gucaauugaguauacuaug

SEQ ID NO: 2622060 - RNA, 19 nt, Artificial Sequence
  Description of Artificial Sequence: Synthetic oligonucleotide
uaauuuccuucaaaaugag

SEQ ID NO: 2622061 - RNA, 19 nt, Artificial Sequence
  Description of Artificial Sequence: Synthetic oligonucleotide
ugccauauuagagucaucu

SEQ ID NO: 2622062 - RNA, 19 nt, Artificial Sequence
  Description of Artificial Sequence: Synthetic oligonucleotide
uuucauugccuuucccugg

SEQ ID NO: 2622063 - RNA, 19 nt, Artificial Sequence
  Description of Artificial Sequence: Synthetic oligonucleotide
uuuaccuucccagaauuca

SEQ ID NO: 2622064 - RNA, 19 nt, Artificial Sequence
  Description of Artificial Sequence: Synthetic oligonucleotide
aaugcaaaguugccaagaa

SEQ ID NO: 2622065 - RNA, 19 nt, Artificial Sequence
  Description of Artificial Sequence: Synthetic oligonucleotide
ugcaaucaaacaaacuaaa

SEQ ID NO: 2622066 - RNA, 19 nt, Artificial Sequence
  Description of Artificial Sequence: Synthetic oligonucleotide
aacauuacuuaaugcaaua

SEQ ID NO: 2622067 - RNA, 19 nt, Artificial Sequence
  Description of Artificial Sequence: Synthetic oligonucleotide
auaccacaguuucauugcc

SEQ ID NO: 2622068 - RNA, 19 nt, Artificial Sequence
  Description of Artificial Sequence: Synthetic oligonucleotide
guauacuaugucauggucc

SEQ ID NO: 2622069 - RNA, 19 nt, Artificial Sequence
  Description of Artificial Sequence: Synthetic oligonucleotide
uuaguaaaucucguuuucc

SEQ ID NO: 2622070 - RNA, 19 nt, Artificial Sequence
  Description of Artificial Sequence: Synthetic oligonucleotide
uaacauuacuuaaugcaau

SEQ ID NO: 2622071 - RNA, 19 nt, Artificial Sequence
  Description of Artificial Sequence: Synthetic oligonucleotide
uaaucugugcgaaugcaaa

SEQ ID NO: 2622072 - RNA, 19 nt, Artificial Sequence
  Description of Artificial Sequence: Synthetic oligonucleotide
cauauuagagucaucugca

SEQ ID NO: 2622073 - RNA, 19 nt, Artificial Sequence
  Description of Artificial Sequence: Synthetic oligonucleotide
uuuuaagucccaauugcuu

SEQ ID NO: 2622074 - RNA, 19 nt, Artificial Sequence
  Description of Artificial Sequence: Synthetic oligonucleotide
gaaagugaaucaccuuucc

SEQ ID NO: 2622075 - RNA, 19 nt, Artificial Sequence
  Description of Artificial Sequence: Synthetic oligonucleotide
cuaguuuguucaaacugag

SEQ ID NO: 2622076 - RNA, 19 nt, Artificial Sequence
  Description of Artificial Sequence: Synthetic oligonucleotide
ucccagaauucaccaaucg

SEQ ID NO: 2622077 - RNA, 19 nt, Artificial Sequence
  Description of Artificial Sequence: Synthetic oligonucleotide
ucuuauaccacaguuucau

SEQ ID NO: 2622078 - RNA, 19 nt, Artificial Sequence
  Description of Artificial Sequence: Synthetic oligonucleotide
ucccaauugcuuaacauua

SEQ ID NO: 2622079 - RNA, 19 nt, Artificial Sequence
  Description of Artificial Sequence: Synthetic oligonucleotide
uaguaaaucucguuuuccu

SEQ ID NO: 2622080 - RNA, 19 nt, Artificial Sequence
  Description of Artificial Sequence: Synthetic oligonucleotide
guaauugacacacacaaau

SEQ ID NO: 2622081 - RNA, 19 nt, Artificial Sequence
  Description of Artificial Sequence: Synthetic oligonucleotide
ucaacauuuccacugccau

SEQ ID NO: 2622082 - RNA, 19 nt, Artificial Sequence
  Description of Artificial Sequence: Synthetic oligonucleotide
aucaaacaaacuaaaauau

SEQ ID NO: 2622083 - RNA, 19 nt, Artificial Sequence
  Description of Artificial Sequence: Synthetic oligonucleotide
aacugagagucacugagua

SEQ ID NO: 2622084 - RNA, 19 nt, Artificial Sequence
  Description of Artificial Sequence: Synthetic oligonucleotide
aaaaugaugcugggugggg

SEQ ID NO: 2622085 - RNA, 19 nt, Artificial Sequence
  Description of Artificial Sequence: Synthetic oligonucleotide
uuuaacauuucaguucuuc

SEQ ID NO: 2622086 - RNA, 19 nt, Artificial Sequence
  Description of Artificial Sequence: Synthetic oligonucleotide
ucauuaggcaugcugcagu

SEQ ID NO: 2622087 - RNA, 19 nt, Artificial Sequence
  Description of Artificial Sequence: Synthetic oligonucleotide
ucucguuuuccucugaauu

SEQ ID NO: 2622088 - RNA, 19 nt, Artificial Sequence
  Description of Artificial Sequence: Synthetic oligonucleotide
ugcuuuuaauuguaauuga

SEQ ID NO: 2622089 - RNA, 19 nt, Artificial Sequence
  Description of Artificial Sequence: Synthetic oligonucleotide
uuaaucugugcgaaugcaa

SEQ ID NO: 2622090 - RNA, 19 nt, Artificial Sequence
  Description of Artificial Sequence: Synthetic oligonucleotide
gaggaaaguguagaagccg

SEQ ID NO: 2622091 - RNA, 19 nt, Artificial Sequence
  Description of Artificial Sequence: Synthetic oligonucleotide
uaaaguguuucuaguuugu

SEQ ID NO: 2622092 - RNA, 19 nt, Artificial Sequence
  Description of Artificial Sequence: Synthetic oligonucleotide
aaacaaacuaaaauauuuu

SEQ ID NO: 2622093 - RNA, 19 nt, Artificial Sequence
  Description of Artificial Sequence: Synthetic oligonucleotide
gauugucagaaagugaauc

SEQ ID NO: 2622094 - RNA, 19 nt, Artificial Sequence
  Description of Artificial Sequence: Synthetic oligonucleotide
uuucuaguuuguucaaacu

SEQ ID NO: 2622095 - RNA, 19 nt, Artificial Sequence
  Description of Artificial Sequence: Synthetic oligonucleotide
auauuagagucaucugcag

SEQ ID NO: 2622096 - RNA, 19 nt, Artificial Sequence
  Description of Artificial Sequence: Synthetic oligonucleotide
uagaugcaaucaaacaaac

SEQ ID NO: 2622097 - RNA, 19 nt, Artificial Sequence
  Description of Artificial Sequence: Synthetic oligonucleotide
ugguccaagaauuugcuuu

SEQ ID NO: 2622098 - RNA, 19 nt, Artificial Sequence
  Description of Artificial Sequence: Synthetic oligonucleotide
agagucaucugcagaauac

SEQ ID NO: 2622099 - RNA, 19 nt, Artificial Sequence
  Description of Artificial Sequence: Synthetic oligonucleotide
ucaucugcagaauaccgaa

SEQ ID NO: 2622100 - RNA, 19 nt, Artificial Sequence
  Description of Artificial Sequence: Synthetic oligonucleotide
uugaguauacuaugucaug

SEQ ID NO: 2622101 - RNA, 19 nt, Artificial Sequence
  Description of Artificial Sequence: Synthetic oligonucleotide
auugccuuucccuggcuuc

SEQ ID NO: 2622102 - RNA, 19 nt, Artificial Sequence
  Description of Artificial Sequence: Synthetic oligonucleotide
uguagaagccggcuagucu

SEQ ID NO: 2622103 - RNA, 19 nt, Artificial Sequence
  Description of Artificial Sequence: Synthetic oligonucleotide
uguucaaacugagagucac

SEQ ID NO: 2622104 - RNA, 19 nt, Artificial Sequence
  Description of Artificial Sequence: Synthetic oligonucleotide
caagaaauuuaacauuuca

SEQ ID NO: 2622105 - RNA, 19 nt, Artificial Sequence
  Description of Artificial Sequence: Synthetic oligonucleotide
ggugcuaaaguguuucuag

SEQ ID NO: 2622106 - RNA, 19 nt, Artificial Sequence
  Description of Artificial Sequence: Synthetic oligonucleotide
ugaccaaauccacaugccu

SEQ ID NO: 2622107 - RNA, 19 nt, Artificial Sequence
  Description of Artificial Sequence: Synthetic oligonucleotide
gagucacugaguaauuucc

SEQ ID NO: 2622108 - RNA, 19 nt, Artificial Sequence
  Description of Artificial Sequence: Synthetic oligonucleotide
aauccacaugccugaagug

SEQ ID NO: 2622109 - RNA, 19 nt, Artificial Sequence
  Description of Artificial Sequence: Synthetic oligonucleotide
acaagcaaagacaauaaaa

SEQ ID NO: 2622110 - RNA, 19 nt, Artificial Sequence
  Description of Artificial Sequence: Synthetic oligonucleotide
ccauauuagagucaucugc

SEQ ID NO: 2622111 - RNA, 19 nt, Artificial Sequence
  Description of Artificial Sequence: Synthetic oligonucleotide
cuucaaaaugaggaaagug

SEQ ID NO: 2622112 - RNA, 19 nt, Artificial Sequence
  Description of Artificial Sequence: Synthetic oligonucleotide
acuuaaugcaauaggucuc

SEQ ID NO: 2622113 - RNA, 19 nt, Artificial Sequence
  Description of Artificial Sequence: Synthetic oligonucleotide
gugugaaggguuuuggcug

SEQ ID NO: 2622114 - RNA, 19 nt, Artificial Sequence
  Description of Artificial Sequence: Synthetic oligonucleotide
acuuaguaaaucucguuuu

SEQ ID NO: 2622115 - RNA, 19 nt, Artificial Sequence
  Description of Artificial Sequence: Synthetic oligonucleotide
acgugugaaggguuuuggc

SEQ ID NO: 2622116 - RNA, 19 nt, Artificial Sequence
  Description of Artificial Sequence: Synthetic oligonucleotide
cuagaugcaaucaaacaaa

SEQ ID NO: 2622117 - RNA, 19 nt, Artificial Sequence
  Description of Artificial Sequence: Synthetic oligonucleotide
ucugccuagaugcaaucaa

SEQ ID NO: 2622118 - RNA, 19 nt, Artificial Sequence
  Description of Artificial Sequence: Synthetic oligonucleotide
acaaacuaaaauauuuuaa

SEQ ID NO: 2622119 - RNA, 19 nt, Artificial Sequence
  Description of Artificial Sequence: Synthetic oligonucleotide
uaaaucucguuuuccucug

SEQ ID NO: 2622120 - RNA, 19 nt, Artificial Sequence
  Description of Artificial Sequence: Synthetic oligonucleotide
guaagggaagucaacuuag

SEQ ID NO: 2622121 - RNA, 19 nt, Artificial Sequence
  Description of Artificial Sequence: Synthetic oligonucleotide
augcaauaggucucugggg

SEQ ID NO: 2622122 - RNA, 19 nt, Artificial Sequence
  Description of Artificial Sequence: Synthetic oligonucleotide
ucugcagaauaccgaaaga

SEQ ID NO: 2622123 - RNA, 19 nt, Artificial Sequence
  Description of Artificial Sequence: Synthetic oligonucleotide
aaaguguagaagccggcua

SEQ ID NO: 2622124 - RNA, 19 nt, Artificial Sequence
  Description of Artificial Sequence: Synthetic oligonucleotide
uugcuuaacauuacuuaau

SEQ ID NO: 2622125 - RNA, 19 nt, Artificial Sequence
  Description of Artificial Sequence: Synthetic oligonucleotide
cuuaguaaaucucguuuuc

SEQ ID NO: 2622126 - RNA, 19 nt, Artificial Sequence
  Description of Artificial Sequence: Synthetic oligonucleotide
agaaagugaaucaccuuuc

SEQ ID NO: 2622127 - RNA, 19 nt, Artificial Sequence
  Description of Artificial Sequence: Synthetic oligonucleotide
cauuucaguucuuccagac

SEQ ID NO: 2622128 - RNA, 19 nt, Artificial Sequence
  Description of Artificial Sequence: Synthetic oligonucleotide
uguaauugacacacacaaa

SEQ ID NO: 2622129 - RNA, 19 nt, Artificial Sequence
  Description of Artificial Sequence: Synthetic oligonucleotide
uaauugacacacacaaauu

SEQ ID NO: 2622130 - RNA, 19 nt, Artificial Sequence
  Description of Artificial Sequence: Synthetic oligonucleotide
ucuuuaccuucccagaauu

SEQ ID NO: 2622131 - RNA, 19 nt, Artificial Sequence
  Description of Artificial Sequence: Synthetic oligonucleotide
gaagucaacuuaguaaauc

SEQ ID NO: 2622132 - RNA, 19 nt, Artificial Sequence
  Description of Artificial Sequence: Synthetic oligonucleotide
ugccuagaugcaaucaaac

SEQ ID NO: 2622133 - RNA, 19 nt, Artificial Sequence
  Description of Artificial Sequence: Synthetic oligonucleotide
uaaagucaauugaguauac

SEQ ID NO: 2622134 - RNA, 19 nt, Artificial Sequence
  Description of Artificial Sequence: Synthetic oligonucleotide
aggaaaguguagaagccgg

SEQ ID NO: 2622135 - RNA, 19 nt, Artificial Sequence
  Description of Artificial Sequence: Synthetic oligonucleotide
uucauugccuuucccuggc

SEQ ID NO: 2622136 - RNA, 19 nt, Artificial Sequence
  Description of Artificial Sequence: Synthetic oligonucleotide
uuuugccacgugugaaggg

SEQ ID NO: 2622137 - RNA, 19 nt, Artificial Sequence
  Description of Artificial Sequence: Synthetic oligonucleotide
ucucuuuaccuucccagaa

SEQ ID NO: 2622138 - RNA, 19 nt, Artificial Sequence
  Description of Artificial Sequence: Synthetic oligonucleotide
uuacacaguuaaucugugc

SEQ ID NO: 2622139 - RNA, 19 nt, Artificial Sequence
  Description of Artificial Sequence: Synthetic oligonucleotide
auugaguauacuaugucau

SEQ ID NO: 2622140 - RNA, 19 nt, Artificial Sequence
  Description of Artificial Sequence: Synthetic oligonucleotide
gaccaaauccacaugccug

SEQ ID NO: 2622141 - RNA, 19 nt, Artificial Sequence
  Description of Artificial Sequence: Synthetic oligonucleotide
caugccugaagugaugccc

SEQ ID NO: 2622142 - RNA, 19 nt, Artificial Sequence
  Description of Artificial Sequence: Synthetic oligonucleotide
agucaucugcagaauaccg

SEQ ID NO: 2622143 - RNA, 19 nt, Artificial Sequence
  Description of Artificial Sequence: Synthetic oligonucleotide
acacacaaauuacacaguu

SEQ ID NO: 2622144 - RNA, 19 nt, Artificial Sequence
  Description of Artificial Sequence: Synthetic oligonucleotide
gugauugucagaaagugaa

SEQ ID NO: 2622145 - RNA, 19 nt, Artificial Sequence
  Description of Artificial Sequence: Synthetic oligonucleotide
uagucuuauaccacaguuu

SEQ ID NO: 2622146 - RNA, 19 nt, Artificial Sequence
  Description of Artificial Sequence: Synthetic oligonucleotide
agucaacuuaguaaaucuc

SEQ ID NO: 2622147 - RNA, 19 nt, Artificial Sequence
  Description of Artificial Sequence: Synthetic oligonucleotide
caauugaguauacuauguc

SEQ ID NO: 2622148 - RNA, 19 nt, Artificial Sequence
  Description of Artificial Sequence: Synthetic oligonucleotide
aaagucaauugaguauacu

SEQ ID NO: 2622149 - RNA, 19 nt, Artificial Sequence
  Description of Artificial Sequence: Synthetic oligonucleotide
ugugaaggguuuuggcuga

SEQ ID NO: 2622150 - RNA, 19 nt, Artificial Sequence
  Description of Artificial Sequence: Synthetic oligonucleotide
gaauuaagugauugucaga

SEQ ID NO: 2622151 - RNA, 19 nt, Artificial Sequence
  Description of Artificial Sequence: Synthetic oligonucleotide
cuucacccaaccauucccc

SEQ ID NO: 2622152 - RNA, 19 nt, Artificial Sequence
  Description of Artificial Sequence: Synthetic oligonucleotide
acaugccugaagugaugcc

SEQ ID NO: 2622153 - RNA, 19 nt, Artificial Sequence
  Description of Artificial Sequence: Synthetic oligonucleotide
acacaguuaaucugugcga

SEQ ID NO: 2622154 - RNA, 19 nt, Artificial Sequence
  Description of Artificial Sequence: Synthetic oligonucleotide
ugccaagaaauuuaacauu

SEQ ID NO: 2622155 - RNA, 19 nt, Artificial Sequence
  Description of Artificial Sequence: Synthetic oligonucleotide
agucaauugaguauacuau

SEQ ID NO: 2622156 - RNA, 19 nt, Artificial Sequence
  Description of Artificial Sequence: Synthetic oligonucleotide
gaagugaugcccacaagca

SEQ ID NO: 2622157 - RNA, 19 nt, Artificial Sequence
  Description of Artificial Sequence: Synthetic oligonucleotide
aagugaugcccacaagcaa

SEQ ID NO: 2622158 - RNA, 19 nt, Artificial Sequence
  Description of Artificial Sequence: Synthetic oligonucleotide
cugaccaaauccacaugcc

SEQ ID NO: 2622159 - RNA, 19 nt, Artificial Sequence
  Description of Artificial Sequence: Synthetic oligonucleotide
ugcgaaugcaaaguugcca

SEQ ID NO: 2622160 - RNA, 19 nt, Artificial Sequence
  Description of Artificial Sequence: Synthetic oligonucleotide
guaaaucucguuuuccucu

SEQ ID NO: 2622161 - RNA, 19 nt, Artificial Sequence
  Description of Artificial Sequence: Synthetic oligonucleotide
ugcuaaaguguuucuaguu

SEQ ID NO: 2622162 - RNA, 19 nt, Artificial Sequence
  Description of Artificial Sequence: Synthetic oligonucleotide
aaucucguuuuccucugaa

SEQ ID NO: 2622163 - RNA, 19 nt, Artificial Sequence
  Description of Artificial Sequence: Synthetic oligonucleotide
uaguuuguucaaacugaga

SEQ ID NO: 2622164 - RNA, 19 nt, Artificial Sequence
  Description of Artificial Sequence: Synthetic oligonucleotide
uaagggaagucaacuuagu

SEQ ID NO: 2622165 - RNA, 19 nt, Artificial Sequence
  Description of Artificial Sequence: Synthetic oligonucleotide
ucgguaagggaagucaacu

SEQ ID NO: 2622166 - RNA, 19 nt, Artificial Sequence
  Description of Artificial Sequence: Synthetic oligonucleotide
agucccaauugcuuaacau

SEQ ID NO: 2622167 - RNA, 19 nt, Artificial Sequence
  Description of Artificial Sequence: Synthetic oligonucleotide
auuguaauugacacacaca

SEQ ID NO: 2622168 - RNA, 19 nt, Artificial Sequence
  Description of Artificial Sequence: Synthetic oligonucleotide
acuaugucaugguccaaga

SEQ ID NO: 2622169 - RNA, 19 nt, Artificial Sequence
  Description of Artificial Sequence: Synthetic oligonucleotide
caguuaaucugugcgaaug

SEQ ID NO: 2622170 - RNA, 19 nt, Artificial Sequence
  Description of Artificial Sequence: Synthetic oligonucleotide
gggaagucaacuuaguaaa

SEQ ID NO: 2622171 - RNA, 19 nt, Artificial Sequence
  Description of Artificial Sequence: Synthetic oligonucleotide
gagucaucugcagaauacc

SEQ ID NO: 2622172 - RNA, 19 nt, Artificial Sequence
  Description of Artificial Sequence: Synthetic oligonucleotide
gcuuaacauuacuuaaugc

SEQ ID NO: 2622173 - RNA, 19 nt, Artificial Sequence
  Description of Artificial Sequence: Synthetic oligonucleotide
agccggcuagucuuauacc

SEQ ID NO: 2622174 - RNA, 19 nt, Artificial Sequence
  Description of Artificial Sequence: Synthetic oligonucleotide
aagucccaauugcuuaaca

SEQ ID NO: 2622175 - RNA, 19 nt, Artificial Sequence
  Description of Artificial Sequence: Synthetic oligonucleotide
ucugugcgaaugcaaaguu

SEQ ID NO: 2622176 - RNA, 19 nt, Artificial Sequence
  Description of Artificial Sequence: Synthetic oligonucleotide
uccacaugccugaagugau

SEQ ID NO: 2622177 - RNA, 19 nt, Artificial Sequence
  Description of Artificial Sequence: Synthetic oligonucleotide
auuaggcaugcugcagugc

SEQ ID NO: 2622178 - RNA, 19 nt, Artificial Sequence
  Description of Artificial Sequence: Synthetic oligonucleotide
uuguucaaacugagaguca

SEQ ID NO: 2622179 - RNA, 19 nt, Artificial Sequence
  Description of Artificial Sequence: Synthetic oligonucleotide
cauuaggcaugcugcagug

SEQ ID NO: 2622180 - RNA, 19 nt, Artificial Sequence
  Description of Artificial Sequence: Synthetic oligonucleotide
ugauugucagaaagugaau

SEQ ID NO: 2622181 - RNA, 19 nt, Artificial Sequence
  Description of Artificial Sequence: Synthetic oligonucleotide
acuggcgucugccuagaug

SEQ ID NO: 2622182 - RNA, 19 nt, Artificial Sequence
  Description of Artificial Sequence: Synthetic oligonucleotide
aaaucucguuuuccucuga

SEQ ID NO: 2622183 - RNA, 19 nt, Artificial Sequence
  Description of Artificial Sequence: Synthetic oligonucleotide
aaggguuuuggcugaccaa

SEQ ID NO: 2622184 - RNA, 19 nt, Artificial Sequence
  Description of Artificial Sequence: Synthetic oligonucleotide
augcaaucaaacaaacuaa

SEQ ID NO: 2622185 - RNA, 19 nt, Artificial Sequence
  Description of Artificial Sequence: Synthetic oligonucleotide
ucguuuuccucugaauuaa

SEQ ID NO: 2622186 - RNA, 19 nt, Artificial Sequence
  Description of Artificial Sequence: Synthetic oligonucleotide
cugugcgaaugcaaaguug

SEQ ID NO: 2622187 - RNA, 19 nt, Artificial Sequence
  Description of Artificial Sequence: Synthetic oligonucleotide
aauuugcuuuuaauuguaa

SEQ ID NO: 2622188 - RNA, 19 nt, Artificial Sequence
  Description of Artificial Sequence: Synthetic oligonucleotide
agaauucaccaaucgguua

SEQ ID NO: 2622189 - RNA, 19 nt, Artificial Sequence
  Description of Artificial Sequence: Synthetic oligonucleotide
aaacugagagucacugagu

SEQ ID NO: 2622190 - RNA, 19 nt, Artificial Sequence
  Description of Artificial Sequence: Synthetic oligonucleotide
cacaugccugaagugaugc

SEQ ID NO: 2622191 - RNA, 19 nt, Artificial Sequence
  Description of Artificial Sequence: Synthetic oligonucleotide
gugaaucaccuuuccuucc

SEQ ID NO: 2622192 - RNA, 19 nt, Artificial Sequence
  Description of Artificial Sequence: Synthetic oligonucleotide
cccucauuaggcaugcugc

SEQ ID NO: 2622193 - RNA, 19 nt, Artificial Sequence
  Description of Artificial Sequence: Synthetic oligonucleotide
aauucaccaaucgguuaga

SEQ ID NO: 2622194 - RNA, 19 nt, Artificial Sequence
  Description of Artificial Sequence: Synthetic oligonucleotide
auccacaugccugaaguga

SEQ ID NO: 2622195 - RNA, 19 nt, Artificial Sequence
  Description of Artificial Sequence: Synthetic oligonucleotide
aucugugcgaaugcaaagu

SEQ ID NO: 2622196 - RNA, 19 nt, Artificial Sequence
  Description of Artificial Sequence: Synthetic oligonucleotide
cuuuaccuucccagaauuc

SEQ ID NO: 2622197 - RNA, 19 nt, Artificial Sequence
  Description of Artificial Sequence: Synthetic oligonucleotide
uucccagaauucaccaauc

SEQ ID NO: 2622198 - RNA, 19 nt, Artificial Sequence
  Description of Artificial Sequence: Synthetic oligonucleotide
agugauugucagaaaguga

SEQ ID NO: 2622199 - RNA, 19 nt, Artificial Sequence
  Description of Artificial Sequence: Synthetic oligonucleotide
accuucccagaauucacca

SEQ ID NO: 2622200 - RNA, 19 nt, Artificial Sequence
  Description of Artificial Sequence: Synthetic oligonucleotide
guuuguucaaacugagagu

SEQ ID NO: 2622201 - RNA, 19 nt, Artificial Sequence
  Description of Artificial Sequence: Synthetic oligonucleotide
uuucccuggcuucacccaa

SEQ ID NO: 2622202 - RNA, 19 nt, Artificial Sequence
  Description of Artificial Sequence: Synthetic oligonucleotide
ucagaaagugaaucaccuu

SEQ ID NO: 2622203 - RNA, 19 nt, Artificial Sequence
  Description of Artificial Sequence: Synthetic oligonucleotide
caaauccacaugccugaag

SEQ ID NO: 2622204 - RNA, 19 nt, Artificial Sequence
  Description of Artificial Sequence: Synthetic oligonucleotide
uguuucuaguuuguucaaa

SEQ ID NO: 2622205 - RNA, 19 nt, Artificial Sequence
  Description of Artificial Sequence: Synthetic oligonucleotide
guuaaucugugcgaaugca

SEQ ID NO: 2622206 - RNA, 19 nt, Artificial Sequence
  Description of Artificial Sequence: Synthetic oligonucleotide
aaaguguuucuaguuuguu

SEQ ID NO: 2622207 - RNA, 19 nt, Artificial Sequence
  Description of Artificial Sequence: Synthetic oligonucleotide
augucaugguccaagaauu

SEQ ID NO: 2622208 - RNA, 19 nt, Artificial Sequence
  Description of Artificial Sequence: Synthetic oligonucleotide
gaauuugcuuuuaauugua

SEQ ID NO: 2622209 - RNA, 19 nt, Artificial Sequence
  Description of Artificial Sequence: Synthetic oligonucleotide
ccuagaugcaaucaaacaa

SEQ ID NO: 2622210 - RNA, 19 nt, Artificial Sequence
  Description of Artificial Sequence: Synthetic oligonucleotide
cagacuggcgucugccuag

SEQ ID NO: 2622211 - RNA, 19 nt, Artificial Sequence
  Description of Artificial Sequence: Synthetic oligonucleotide
gaguauacuaugucauggu

SEQ ID NO: 2622212 - RNA, 19 nt, Artificial Sequence
  Description of Artificial Sequence: Synthetic oligonucleotide
gcuucacccaaccauuccc

SEQ ID NO: 2622213 - RNA, 19 nt, Artificial Sequence
  Description of Artificial Sequence: Synthetic oligonucleotide
ugucaugguccaagaauuu

SEQ ID NO: 2622214 - RNA, 19 nt, Artificial Sequence
  Description of Artificial Sequence: Synthetic oligonucleotide
augcaaaguugccaagaaa

SEQ ID NO: 2622215 - RNA, 19 nt, Artificial Sequence
  Description of Artificial Sequence: Synthetic oligonucleotide
cccagaauucaccaaucgg

SEQ ID NO: 2622216 - RNA, 19 nt, Artificial Sequence
  Description of Artificial Sequence: Synthetic oligonucleotide
uggugggcugacagugggg

SEQ ID NO: 2622217 - RNA, 19 nt, Artificial Sequence
  Description of Artificial Sequence: Synthetic oligonucleotide
cucauuaggcaugcugcag

SEQ ID NO: 2622218 - RNA, 19 nt, Artificial Sequence
  Description of Artificial Sequence: Synthetic oligonucleotide
aggguuuuggcugaccaaa

SEQ ID NO: 2622219 - RNA, 19 nt, Artificial Sequence
  Description of Artificial Sequence: Synthetic oligonucleotide
cacgugugaaggguuuugg

SEQ ID NO: 2622220 - RNA, 19 nt, Artificial Sequence
  Description of Artificial Sequence: Synthetic oligonucleotide
agaugcaaucaaacaaacu

SEQ ID NO: 2622221 - RNA, 19 nt, Artificial Sequence
  Description of Artificial Sequence: Synthetic oligonucleotide
cucguuuuccucugaauua

SEQ ID NO: 2622222 - RNA, 19 nt, Artificial Sequence
  Description of Artificial Sequence: Synthetic oligonucleotide
gguaagggaagucaacuua

SEQ ID NO: 2622223 - RNA, 19 nt, Artificial Sequence
  Description of Artificial Sequence: Synthetic oligonucleotide
gugaugcccacaagcaaag

SEQ ID NO: 2622224 - RNA, 19 nt, Artificial Sequence
  Description of Artificial Sequence: Synthetic oligonucleotide
acaguuaaucugugcgaau

SEQ ID NO: 2622225 - RNA, 19 nt, Artificial Sequence
  Description of Artificial Sequence: Synthetic oligonucleotide
cuggggucgguaagggaag

SEQ ID NO: 2622226 - RNA, 19 nt, Artificial Sequence
  Description of Artificial Sequence: Synthetic oligonucleotide
uuaaugcaauaggucucug

SEQ ID NO: 2622227 - RNA, 19 nt, Artificial Sequence
  Description of Artificial Sequence: Synthetic oligonucleotide
cucucuuuaccuucccaga

SEQ ID NO: 2622228 - RNA, 19 nt, Artificial Sequence
  Description of Artificial Sequence: Synthetic oligonucleotide
accacaguuuuaaagucaa

SEQ ID NO: 2622229 - RNA, 19 nt, Artificial Sequence
  Description of Artificial Sequence: Synthetic oligonucleotide
aucucguuuuccucugaau

SEQ ID NO: 2622230 - RNA, 19 nt, Artificial Sequence
  Description of Artificial Sequence: Synthetic oligonucleotide
gucagaaagugaaucaccu

SEQ ID NO: 2622231 - RNA, 19 nt, Artificial Sequence
  Description of Artificial Sequence: Synthetic oligonucleotide
cuagucuuauaccacaguu

SEQ ID NO: 2622232 - RNA, 19 nt, Artificial Sequence
  Description of Artificial Sequence: Synthetic oligonucleotide
guagaagccggcuagucuu

SEQ ID NO: 2622233 - RNA, 19 nt, Artificial Sequence
  Description of Artificial Sequence: Synthetic oligonucleotide
ucccuggcuucacccaacc

SEQ ID NO: 2622234 - RNA, 19 nt, Artificial Sequence
  Description of Artificial Sequence: Synthetic oligonucleotide
cugaguaauuuccuucaaa

SEQ ID NO: 2622235 - RNA, 19 nt, Artificial Sequence
  Description of Artificial Sequence: Synthetic oligonucleotide
uaagucccaauugcuuaac

SEQ ID NO: 2622236 - RNA, 19 nt, Artificial Sequence
  Description of Artificial Sequence: Synthetic oligonucleotide
cugaagugaugcccacaag

SEQ ID NO: 2622237 - RNA, 19 nt, Artificial Sequence
  Description of Artificial Sequence: Synthetic oligonucleotide
caguuucauugccuuuccc

SEQ ID NO: 2622238 - RNA, 19 nt, Artificial Sequence
  Description of Artificial Sequence: Synthetic oligonucleotide
ccagaauucaccaaucggu

SEQ ID NO: 2622239 - RNA, 19 nt, Artificial Sequence
  Description of Artificial Sequence: Synthetic oligonucleotide
gccauauuagagucaucug

SEQ ID NO: 2622240 - RNA, 19 nt, Artificial Sequence
  Description of Artificial Sequence: Synthetic oligonucleotide
gcgaaugcaaaguugccaa

SEQ ID NO: 2622241 - RNA, 19 nt, Artificial Sequence
  Description of Artificial Sequence: Synthetic oligonucleotide
uccucugaauuaagugauu

SEQ ID NO: 2622242 - RNA, 19 nt, Artificial Sequence
  Description of Artificial Sequence: Synthetic oligonucleotide
gccuagaugcaaucaaaca

SEQ ID NO: 2622243 - RNA, 19 nt, Artificial Sequence
  Description of Artificial Sequence: Synthetic oligonucleotide
uugccuuucccuggcuuca

SEQ ID NO: 2622244 - RNA, 19 nt, Artificial Sequence
  Description of Artificial Sequence: Synthetic oligonucleotide
cuuaaugcaauaggucucu

SEQ ID NO: 2622245 - RNA, 19 nt, Artificial Sequence
  Description of Artificial Sequence: Synthetic oligonucleotide
ucuuccagacuggcgucug

SEQ ID NO: 2622246 - RNA, 19 nt, Artificial Sequence
  Description of Artificial Sequence: Synthetic oligonucleotide
gccggcuagucuuauacca

SEQ ID NO: 2622247 - RNA, 19 nt, Artificial Sequence
  Description of Artificial Sequence: Synthetic oligonucleotide
ccucugaauuaagugauug

SEQ ID NO: 2622248 - RNA, 19 nt, Artificial Sequence
  Description of Artificial Sequence: Synthetic oligonucleotide
cacaguuaaucugugcgaa

SEQ ID NO: 2622249 - RNA, 19 nt, Artificial Sequence
  Description of Artificial Sequence: Synthetic oligonucleotide
ucauugccuuucccuggcu

SEQ ID NO: 2622250 - RNA, 19 nt, Artificial Sequence
  Description of Artificial Sequence: Synthetic oligonucleotide
uagaagccggcuagucuua

SEQ ID NO: 2622251 - RNA, 19 nt, Artificial Sequence
  Description of Artificial Sequence: Synthetic oligonucleotide
uucccuggcuucacccaac

SEQ ID NO: 2622252 - RNA, 19 nt, Artificial Sequence
  Description of Artificial Sequence: Synthetic oligonucleotide
aguguagaagccggcuagu

SEQ ID NO: 2622253 - RNA, 19 nt, Artificial Sequence
  Description of Artificial Sequence: Synthetic oligonucleotide
caugguccaagaauuugcu

SEQ ID NO: 2622254 - RNA, 19 nt, Artificial Sequence
  Description of Artificial Sequence: Synthetic oligonucleotide
gucccaauugcuuaacauu

SEQ ID NO: 2622255 - RNA, 19 nt, Artificial Sequence
  Description of Artificial Sequence: Synthetic oligonucleotide
cuucccagaauucaccaau

SEQ ID NO: 2622256 - RNA, 19 nt, Artificial Sequence
  Description of Artificial Sequence: Synthetic oligonucleotide
cugccuagaugcaaucaaa

SEQ ID NO: 2622257 - RNA, 19 nt, Artificial Sequence
  Description of Artificial Sequence: Synthetic oligonucleotide
augccugaagugaugccca

SEQ ID NO: 2622258 - RNA, 19 nt, Artificial Sequence
  Description of Artificial Sequence: Synthetic oligonucleotide
cuuccagacuggcgucugc

SEQ ID NO: 2622259 - RNA, 19 nt, Artificial Sequence
  Description of Artificial Sequence: Synthetic oligonucleotide
ggaaaguguagaagccggc

SEQ ID NO: 2622260 - RNA, 19 nt, Artificial Sequence
  Description of Artificial Sequence: Synthetic oligonucleotide
ccacugccauauuagaguc

SEQ ID NO: 2622261 - RNA, 19 nt, Artificial Sequence
  Description of Artificial Sequence: Synthetic oligonucleotide
cuaugucaugguccaagaa

SEQ ID NO: 2622262 - RNA, 19 nt, Artificial Sequence
  Description of Artificial Sequence: Synthetic oligonucleotide
gucgguaagggaagucaac

SEQ ID NO: 2622263 - RNA, 19 nt, Artificial Sequence
  Description of Artificial Sequence: Synthetic oligonucleotide
ggcuagucuuauaccacag

SEQ ID NO: 2622264 - RNA, 19 nt, Artificial Sequence
  Description of Artificial Sequence: Synthetic oligonucleotide
gugcgaaugcaaaguugcc

SEQ ID NO: 2622265 - RNA, 19 nt, Artificial Sequence
  Description of Artificial Sequence: Synthetic oligonucleotide
gucuuauaccacaguuuca

SEQ ID NO: 2622266 - RNA, 19 nt, Artificial Sequence
  Description of Artificial Sequence: Synthetic oligonucleotide
cccaauugcuuaacauuac

SEQ ID NO: 2622267 - RNA, 19 nt, Artificial Sequence
  Description of Artificial Sequence: Synthetic oligonucleotide
uugccacgugugaaggguu

SEQ ID NO: 2622268 - RNA, 19 nt, Artificial Sequence
  Description of Artificial Sequence: Synthetic oligonucleotide
gcaaucaaacaaacuaaaa

SEQ ID NO: 2622269 - RNA, 19 nt, Artificial Sequence
  Description of Artificial Sequence: Synthetic oligonucleotide
ugccugaagugaugcccac

SEQ ID NO: 2622270 - RNA, 19 nt, Artificial Sequence
  Description of Artificial Sequence: Synthetic oligonucleotide
gcuaaaguguuucuaguuu

SEQ ID NO: 2622271 - RNA, 19 nt, Artificial Sequence
  Description of Artificial Sequence: Synthetic oligonucleotide
ugaugcccacaagcaaaga

SEQ ID NO: 2622272 - RNA, 19 nt, Artificial Sequence
  Description of Artificial Sequence: Synthetic oligonucleotide
caacauuuccacugccaua

SEQ ID NO: 2622273 - RNA, 19 nt, Artificial Sequence
  Description of Artificial Sequence: Synthetic oligonucleotide
cagaauucaccaaucgguu

SEQ ID NO: 2622274 - RNA, 19 nt, Artificial Sequence
  Description of Artificial Sequence: Synthetic oligonucleotide
auucaccaaucgguuagaa

SEQ ID NO: 2622275 - RNA, 19 nt, Artificial Sequence
  Description of Artificial Sequence: Synthetic oligonucleotide
cucucucuuuaccuuccca

SEQ ID NO: 2622276 - RNA, 19 nt, Artificial Sequence
  Description of Artificial Sequence: Synthetic oligonucleotide
uggcgucugccuagaugca

SEQ ID NO: 2622277 - RNA, 19 nt, Artificial Sequence
  Description of Artificial Sequence: Synthetic oligonucleotide
caucugcagaauaccgaaa

SEQ ID NO: 2622278 - RNA, 19 nt, Artificial Sequence
  Description of Artificial Sequence: Synthetic oligonucleotide
gucugccuagaugcaauca

SEQ ID NO: 2622279 - RNA, 19 nt, Artificial Sequence
  Description of Artificial Sequence: Synthetic oligonucleotide
guguagaagccggcuaguc

SEQ ID NO: 2622280 - RNA, 19 nt, Artificial Sequence
  Description of Artificial Sequence: Synthetic oligonucleotide
aggcaugcugcagugcaaa

SEQ ID NO: 2622281 - RNA, 19 nt, Artificial Sequence
  Description of Artificial Sequence: Synthetic oligonucleotide
cacugccauauuagaguca

SEQ ID NO: 2622282 - RNA, 19 nt, Artificial Sequence
  Description of Artificial Sequence: Synthetic oligonucleotide
gcaauaggucucugggguc

SEQ ID NO: 2622283 - RNA, 19 nt, Artificial Sequence
  Description of Artificial Sequence: Synthetic oligonucleotide
cccacaagcaaagacaaua

SEQ ID NO: 2622284 - RNA, 19 nt, Artificial Sequence
  Description of Artificial Sequence: Synthetic oligonucleotide
caacuuaguaaaucucguu

SEQ ID NO: 2622285 - RNA, 19 nt, Artificial Sequence
  Description of Artificial Sequence: Synthetic oligonucleotide
ccacaagcaaagacaauaa

SEQ ID NO: 2622286 - RNA, 19 nt, Artificial Sequence
  Description of Artificial Sequence: Synthetic oligonucleotide
gggucgguaagggaaguca

SEQ ID NO: 2622287 - RNA, 19 nt, Artificial Sequence
  Description of Artificial Sequence: Synthetic oligonucleotide
ccugaagugaugcccacaa

SEQ ID NO: 2622288 - RNA, 19 nt, Artificial Sequence
  Description of Artificial Sequence: Synthetic oligonucleotide
ggcugaccaaauccacaug

SEQ ID NO: 2622289 - RNA, 19 nt, Artificial Sequence
  Description of Artificial Sequence: Synthetic oligonucleotide
ccggcuagucuuauaccac

SEQ ID NO: 2622290 - RNA, 19 nt, Artificial Sequence
  Description of Artificial Sequence: Synthetic oligonucleotide
caaucgguuagaacauuuu

SEQ ID NO: 2622291 - RNA, 19 nt, Artificial Sequence
  Description of Artificial Sequence: Synthetic oligonucleotide
ugagggguggugggcugac

SEQ ID NO: 2622292 - RNA, 19 nt, Artificial Sequence
  Description of Artificial Sequence: Synthetic oligonucleotide
uggggucgguaagggaagu

SEQ ID NO: 2622293 - RNA, 19 nt, Artificial Sequence
  Description of Artificial Sequence: Synthetic oligonucleotide
gaagccggcuagucuuaua

SEQ ID NO: 2622294 - RNA, 19 nt, Artificial Sequence
  Description of Artificial Sequence: Synthetic oligonucleotide
caccaaucgguuagaacau

SEQ ID NO: 2622295 - RNA, 19 nt, Artificial Sequence
  Description of Artificial Sequence: Synthetic oligonucleotide
cucuuuaccuucccagaau

SEQ ID NO: 2622296 - RNA, 19 nt, Artificial Sequence
  Description of Artificial Sequence: Synthetic oligonucleotide
gagagucacugaguaauuu

SEQ ID NO: 2622297 - RNA, 19 nt, Artificial Sequence
  Description of Artificial Sequence: Synthetic oligonucleotide
cugccauauuagagucauc

SEQ ID NO: 2622298 - RNA, 19 nt, Artificial Sequence
  Description of Artificial Sequence: Synthetic oligonucleotide
accaaucgguuagaacauu

SEQ ID NO: 2622299 - RNA, 19 nt, Artificial Sequence
  Description of Artificial Sequence: Synthetic oligonucleotide
ggugagggguggugggcug

SEQ ID NO: 2622300 - RNA, 19 nt, Artificial Sequence
  Description of Artificial Sequence: Synthetic oligonucleotide
ccucauuaggcaugcugca

SEQ ID NO: 2622301 - RNA, 19 nt, Artificial Sequence
  Description of Artificial Sequence: Synthetic oligonucleotide
acauuuccacugccauauu

SEQ ID NO: 2622302 - RNA, 19 nt, Artificial Sequence
  Description of Artificial Sequence: Synthetic oligonucleotide
cguuuuccucugaauuaag

SEQ ID NO: 2622303 - RNA, 19 nt, Artificial Sequence
  Description of Artificial Sequence: Synthetic oligonucleotide
cuuauaccacaguuucauu

SEQ ID NO: 2622304 - RNA, 19 nt, Artificial Sequence
  Description of Artificial Sequence: Synthetic oligonucleotide
ccacaugccugaagugaug

SEQ ID NO: 2622305 - RNA, 19 nt, Artificial Sequence
  Description of Artificial Sequence: Synthetic oligonucleotide
agaagccggcuagucuuau

SEQ ID NO: 2622306 - RNA, 19 nt, Artificial Sequence
  Description of Artificial Sequence: Synthetic oligonucleotide
gcuagucuuauaccacagu

SEQ ID NO: 2622307 - RNA, 19 nt, Artificial Sequence
  Description of Artificial Sequence: Synthetic oligonucleotide
auacuaugucaugguccaa

SEQ ID NO: 2622308 - RNA, 19 nt, Artificial Sequence
  Description of Artificial Sequence: Synthetic oligonucleotide
ccaauugcuuaacauuacu

SEQ ID NO: 2622309 - RNA, 19 nt, Artificial Sequence
  Description of Artificial Sequence: Synthetic oligonucleotide
ggucgguaagggaagucaa

SEQ ID NO: 2622310 - RNA, 19 nt, Artificial Sequence
  Description of Artificial Sequence: Synthetic oligonucleotide
agacuggcgucugccuaga

SEQ ID NO: 2622311 - RNA, 19 nt, Artificial Sequence
  Description of Artificial Sequence: Synthetic oligonucleotide
cgugugaaggguuuuggcu

SEQ ID NO: 2622312 - RNA, 19 nt, Artificial Sequence
  Description of Artificial Sequence: Synthetic oligonucleotide
ccuggcuucacccaaccau

SEQ ID NO: 2622313 - RNA, 19 nt, Artificial Sequence
  Description of Artificial Sequence: Synthetic oligonucleotide
gggugcuaaaguguuucua

SEQ ID NO: 2622314 - RNA, 19 nt, Artificial Sequence
  Description of Artificial Sequence: Synthetic oligonucleotide
guccaagaauuugcuuuua

SEQ ID NO: 2622315 - RNA, 19 nt, Artificial Sequence
  Description of Artificial Sequence: Synthetic oligonucleotide
cauugccuuucccuggcuu

SEQ ID NO: 2622316 - RNA, 19 nt, Artificial Sequence
  Description of Artificial Sequence: Synthetic oligonucleotide
gcaaaguugccaagaaauu

SEQ ID NO: 2622317 - RNA, 19 nt, Artificial Sequence
  Description of Artificial Sequence: Synthetic oligonucleotide
ggcaugcugcagugcaaaa

SEQ ID NO: 2622318 - RNA, 19 nt, Artificial Sequence
  Description of Artificial Sequence: Synthetic oligonucleotide
cggcuagucuuauaccaca

SEQ ID NO: 2622319 - RNA, 19 nt, Artificial Sequence
  Description of Artificial Sequence: Synthetic oligonucleotide
ggaagucaacuuaguaaau

SEQ ID NO: 2622320 - RNA, 19 nt, Artificial Sequence
  Description of Artificial Sequence: Synthetic oligonucleotide
ccuucccagaauucaccaa

SEQ ID NO: 2622321 - RNA, 19 nt, Artificial Sequence
  Description of Artificial Sequence: Synthetic oligonucleotide
ccaaucgguuagaacauuu

SEQ ID NO: 2622322 - RNA, 19 nt, Artificial Sequence
  Description of Artificial Sequence: Synthetic oligonucleotide
ggggugcuaaaguguuucu

SEQ ID NO: 2622323 - RNA, 19 nt, Artificial Sequence
  Description of Artificial Sequence: Synthetic oligonucleotide
ggcgucugccuagaugcaa

SEQ ID NO: 2622324 - RNA, 19 nt, Artificial Sequence
  Description of Artificial Sequence: Synthetic oligonucleotide
cgucugccuagaugcaauc

SEQ ID NO: 2622325 - RNA, 19 nt, Artificial Sequence
  Description of Artificial Sequence: Synthetic oligonucleotide
gagggguggugggcugaca

SEQ ID NO: 2622326 - RNA, 19 nt, Artificial Sequence
  Description of Artificial Sequence: Synthetic oligonucleotide
ccuucaaaaugaggaaagu

SEQ ID NO: 2622327 - RNA, 19 nt, Artificial Sequence
  Description of Artificial Sequence: Synthetic oligonucleotide
ggggucgguaagggaaguc

SEQ ID NO: 2622328 - RNA, 19 nt, Artificial Sequence
  Description of Artificial Sequence: Synthetic oligonucleotide
gccugaagugaugcccaca

SEQ ID NO: 2622329 - RNA, 19 nt, Artificial Sequence
  Description of Artificial Sequence: Synthetic oligonucleotide
gggugagggguggugggcu

SEQ ID NO: 2622330 - RNA, 19 nt, Artificial Sequence
  Description of Artificial Sequence: Synthetic oligonucleotide
gacuggcgucugccuagau

SEQ ID NO: 2622331 - RNA, 19 nt, Artificial Sequence
  Description of Artificial Sequence: Synthetic oligonucleotide
gcgucugccuagaugcaau

SEQ ID NO: 2622332 - RNA, 19 nt, Artificial Sequence
  Description of Artificial Sequence: Synthetic oligonucleotide
cgguaagggaagucaacuu

SEQ ID NO: 2622333 - RNA, 19 nt, Artificial Sequence
  Description of Artificial Sequence: Synthetic oligonucleotide
aaagaaaguauacagcugg

SEQ ID NO: 2622334 - RNA, 19 nt, Artificial Sequence
  Description of Artificial Sequence: Synthetic oligonucleotide
aaucgaagaaauucauccc

SEQ ID NO: 2622335 - RNA, 19 nt, Artificial Sequence
  Description of Artificial Sequence: Synthetic oligonucleotide
uuauaggcaacacuguugg

SEQ ID NO: 2622336 - RNA, 19 nt, Artificial Sequence
  Description of Artificial Sequence: Synthetic oligonucleotide
aguaagaacaccuccaaag

SEQ ID NO: 2622337 - RNA, 19 nt, Artificial Sequence
  Description of Artificial Sequence: Synthetic oligonucleotide
acuauuggcaggcagcucc

SEQ ID NO: 2622338 - RNA, 19 nt, Artificial Sequence
  Description of Artificial Sequence: Synthetic oligonucleotide
guuugugaaauucuuauag

SEQ ID NO: 2622339 - RNA, 19 nt, Artificial Sequence
  Description of Artificial Sequence: Synthetic oligonucleotide
aucgaagaaauucaucccc

SEQ ID NO: 2622340 - RNA, 19 nt, Artificial Sequence
  Description of Artificial Sequence: Synthetic oligonucleotide
  modified_base (5)..(5): a, c, u, g, unknown or other
aaagnugcugacuaaagaa

SEQ ID NO: 2622341 - RNA, 19 nt, Artificial Sequence
  Description of Artificial Sequence: Synthetic oligonucleotide
aauaggaaggccauuagag

SEQ ID NO: 2622342 - RNA, 19 nt, Artificial Sequence
  Description of Artificial Sequence: Synthetic oligonucleotide
cugaaagucgguuugagag

SEQ ID NO: 2622343 - RNA, 19 nt, Artificial Sequence
  Description of Artificial Sequence: Synthetic oligonucleotide
ugcuugacaauccagacac

SEQ ID NO: 2622344 - RNA, 19 nt, Artificial Sequence
  Description of Artificial Sequence: Synthetic oligonucleotide
uauuaguaagaacaccucc

SEQ ID NO: 2622345 - RNA, 19 nt, Artificial Sequence
  Description of Artificial Sequence: Synthetic oligonucleotide
uuuauaaugucucgguuac

SEQ ID NO: 2622346 - RNA, 19 nt, Artificial Sequence
  Description of Artificial Sequence: Synthetic oligonucleotide
  modified_base (7)..(7): a, c, u, g, unknown or other
uaaaagnugcugacuaaag

SEQ ID NO: 2622347 - RNA, 19 nt, Artificial Sequence
  Description of Artificial Sequence: Synthetic oligonucleotide
ugugaauggauagagaucu

SEQ ID NO: 2622348 - RNA, 19 nt, Artificial Sequence
  Description of Artificial Sequence: Synthetic oligonucleotide
uuuucgaagauauucuuga

SEQ ID NO: 2622349 - RNA, 19 nt, Artificial Sequence
  Description of Artificial Sequence: Synthetic oligonucleotide
uucaccaucagaacgaccu

SEQ ID NO: 2622350 - RNA, 19 nt, Artificial Sequence
  Description of Artificial Sequence: Synthetic oligonucleotide
acgugaaugggucaguagc

SEQ ID NO: 2622351 - RNA, 19 nt, Artificial Sequence
  Description of Artificial Sequence: Synthetic oligonucleotide
gaucuauugaacgugaaug

SEQ ID NO: 2622352 - RNA, 19 nt, Artificial Sequence
  Description of Artificial Sequence: Synthetic oligonucleotide
aaaguauacagcuggcuga

SEQ ID NO: 2622353 - RNA, 19 nt, Artificial Sequence
  Description of Artificial Sequence: Synthetic oligonucleotide
ucgaagauauucuugacac

SEQ ID NO: 2622354 - RNA, 19 nt, Artificial Sequence
  Description of Artificial Sequence: Synthetic oligonucleotide
uugugcauccucauggugg

SEQ ID NO: 2622355 - RNA, 19 nt, Artificial Sequence
  Description of Artificial Sequence: Synthetic oligonucleotide
aaacaaguuugugaaauuc

SEQ ID NO: 2622356 - RNA, 19 nt, Artificial Sequence
  Description of Artificial Sequence: Synthetic oligonucleotide
  modified_base (6)..(6): a, c, u, g, unknown or other
aaaagnugcugacuaaaga

SEQ ID NO: 2622357 - RNA, 19 nt, Artificial Sequence
  Description of Artificial Sequence: Synthetic oligonucleotide
acaauccagacacaaauag

SEQ ID NO: 2622358 - RNA, 19 nt, Artificial Sequence
  Description of Artificial Sequence: Synthetic oligonucleotide
aauggauagagaucuccag

SEQ ID NO: 2622359 - RNA, 19 nt, Artificial Sequence
  Description of Artificial Sequence: Synthetic oligonucleotide
aucuauugaacgugaaugg

SEQ ID NO: 2622360 - RNA, 19 nt, Artificial Sequence
  Description of Artificial Sequence: Synthetic oligonucleotide
gaaaguauacagcuggcug

SEQ ID NO: 2622361 - RNA, 19 nt, Artificial Sequence
  Description of Artificial Sequence: Synthetic oligonucleotide
uguggugggagaaagcaag

SEQ ID NO: 2622362 - RNA, 19 nt, Artificial Sequence
  Description of Artificial Sequence: Synthetic oligonucleotide
agucguaaggaccuucacc

SEQ ID NO: 2622363 - RNA, 19 nt, Artificial Sequence
  Description of Artificial Sequence: Synthetic oligonucleotide
agaagacaaaccuugugag

SEQ ID NO: 2622364 - RNA, 19 nt, Artificial Sequence
  Description of Artificial Sequence: Synthetic oligonucleotide
gaucuugcaaagcuuuugg

SEQ ID NO: 2622365 - RNA, 19 nt, Artificial Sequence
  Description of Artificial Sequence: Synthetic oligonucleotide
uccagacacaaauaggaag

SEQ ID NO: 2622366 - RNA, 19 nt, Artificial Sequence
  Description of Artificial Sequence: Synthetic oligonucleotide
auucuuauaggcaacacug

SEQ ID NO: 2622367 - RNA, 19 nt, Artificial Sequence
  Description of Artificial Sequence: Synthetic oligonucleotide
aucagaacgaccugugggg

SEQ ID NO: 2622368 - RNA, 19 nt, Artificial Sequence
  Description of Artificial Sequence: Synthetic oligonucleotide
ugacaauccagacacaaau

SEQ ID NO: 2622369 - RNA, 19 nt, Artificial Sequence
  Description of Artificial Sequence: Synthetic oligonucleotide
aaauaggaaggccauuaga

SEQ ID NO: 2622370 - RNA, 19 nt, Artificial Sequence
  Description of Artificial Sequence: Synthetic oligonucleotide
uucgaagauauucuugaca

SEQ ID NO: 2622371 - RNA, 19 nt, Artificial Sequence
  Description of Artificial Sequence: Synthetic oligonucleotide
uccauuuauaaugucucgg

SEQ ID NO: 2622372 - RNA, 19 nt, Artificial Sequence
  Description of Artificial Sequence: Synthetic oligonucleotide
gauagagaucuccaggaug

SEQ ID NO: 2622373 - RNA, 19 nt, Artificial Sequence
  Description of Artificial Sequence: Synthetic oligonucleotide
ucuauugaacgugaauggg

SEQ ID NO: 2622374 - RNA, 19 nt, Artificial Sequence
  Description of Artificial Sequence: Synthetic oligonucleotide
acuauuaguaagaacaccu

SEQ ID NO: 2622375 - RNA, 19 nt, Artificial Sequence
  Description of Artificial Sequence: Synthetic oligonucleotide
ugugagaagcaaucgaaga

SEQ ID NO: 2622376 - RNA, 19 nt, Artificial Sequence
  Description of Artificial Sequence: Synthetic oligonucleotide
auaaacagggguuuccgug

SEQ ID NO: 2622377 - RNA, 19 nt, Artificial Sequence
  Description of Artificial Sequence: Synthetic oligonucleotide
uuacuauuaguaagaacac

SEQ ID NO: 2622378 - RNA, 19 nt, Artificial Sequence
  Description of Artificial Sequence: Synthetic oligonucleotide
ucuccauuuauaaugucuc

SEQ ID NO: 2622379 - RNA, 19 nt, Artificial Sequence
  Description of Artificial Sequence: Synthetic oligonucleotide
ucgguuacuauuaguaaga

SEQ ID NO: 2622380 - RNA, 19 nt, Artificial Sequence
  Description of Artificial Sequence: Synthetic oligonucleotide
gaccuucaccaucagaacg

SEQ ID NO: 2622381 - RNA, 19 nt, Artificial Sequence
  Description of Artificial Sequence: Synthetic oligonucleotide
uauugaacgugaauggguc

SEQ ID NO: 2622382 - RNA, 19 nt, Artificial Sequence
  Description of Artificial Sequence: Synthetic oligonucleotide
auuuauaaugucucgguua

SEQ ID NO: 2622383 - RNA, 19 nt, Artificial Sequence
  Description of Artificial Sequence: Synthetic oligonucleotide
aacacuguuggaggagucc

SEQ ID NO: 2622384 - RNA, 19 nt, Artificial Sequence
  Description of Artificial Sequence: Synthetic oligonucleotide
ugaaugggucaguagcugg

SEQ ID NO: 2622385 - RNA, 19 nt, Artificial Sequence
  Description of Artificial Sequence: Synthetic oligonucleotide
cucgguuacuauuaguaag

SEQ ID NO: 2622386 - RNA, 19 nt, Artificial Sequence
  Description of Artificial Sequence: Synthetic oligonucleotide
aaaucagaagcacacuauu

SEQ ID NO: 2622387 - RNA, 19 nt, Artificial Sequence
  Description of Artificial Sequence: Synthetic oligonucleotide
auugcaucuccauuuauaa

SEQ ID NO: 2622388 - RNA, 19 nt, Artificial Sequence
  Description of Artificial Sequence: Synthetic oligonucleotide
caauccagacacaaauagg

SEQ ID NO: 2622389 - RNA, 19 nt, Artificial Sequence
  Description of Artificial Sequence: Synthetic oligonucleotide
gauauguggugggagaaag

SEQ ID NO: 2622390 - RNA, 19 nt, Artificial Sequence
  Description of Artificial Sequence: Synthetic oligonucleotide
ugaaauucuuauaggcaac

SEQ ID NO: 2622391 - RNA, 19 nt, Artificial Sequence
  Description of Artificial Sequence: Synthetic oligonucleotide
ugauaaacagggguuuccg

SEQ ID NO: 2622392 - RNA, 19 nt, Artificial Sequence
  Description of Artificial Sequence: Synthetic oligonucleotide
uuuccgugugaauggauag

SEQ ID NO: 2622393 - RNA, 19 nt, Artificial Sequence
  Description of Artificial Sequence: Synthetic oligonucleotide
aggccugaucuauugaacg

SEQ ID NO: 2622394 - RNA, 19 nt, Artificial Sequence
  Description of Artificial Sequence: Synthetic oligonucleotide
uacagcuggcugaaagucg

SEQ ID NO: 2622395 - RNA, 19 nt, Artificial Sequence
  Description of Artificial Sequence: Synthetic oligonucleotide
gauugauuucguuugugga

SEQ ID NO: 2622396 - RNA, 19 nt, Artificial Sequence
  Description of Artificial Sequence: Synthetic oligonucleotide
ugaauggauagagaucucc

SEQ ID NO: 2622397 - RNA, 19 nt, Artificial Sequence
  Description of Artificial Sequence: Synthetic oligonucleotide
auugauuucguuuguggau

SEQ ID NO: 2622398 - RNA, 19 nt, Artificial Sequence
  Description of Artificial Sequence: Synthetic oligonucleotide
ugaaagucgguuugagagc

SEQ ID NO: 2622399 - RNA, 19 nt, Artificial Sequence
  Description of Artificial Sequence: Synthetic oligonucleotide
acacuuuucccacaggccu

SEQ ID NO: 2622400 - RNA, 19 nt, Artificial Sequence
  Description of Artificial Sequence: Synthetic oligonucleotide
aaccuugugagaagcaauc

SEQ ID NO: 2622401 - RNA, 19 nt, Artificial Sequence
  Description of Artificial Sequence: Synthetic oligonucleotide
ugagacugaucuugcaaag

SEQ ID NO: 2622402 - RNA, 19 nt, Artificial Sequence
  Description of Artificial Sequence: Synthetic oligonucleotide
aaucagaagcacacuauug

SEQ ID NO: 2622403 - RNA, 19 nt, Artificial Sequence
  Description of Artificial Sequence: Synthetic oligonucleotide
guuggaggaguccacaaug

SEQ ID NO: 2622404 - RNA, 19 nt, Artificial Sequence
  Description of Artificial Sequence: Synthetic oligonucleotide
agacugaucuugcaaagcu

SEQ ID NO: 2622405 - RNA, 19 nt, Artificial Sequence
  Description of Artificial Sequence: Synthetic oligonucleotide
gaggcuaccucgcugagac

SEQ ID NO: 2622406 - RNA, 19 nt, Artificial Sequence
  Description of Artificial Sequence: Synthetic oligonucleotide
aggagagugucccggaagg

SEQ ID NO: 2622407 - RNA, 19 nt, Artificial Sequence
  Description of Artificial Sequence: Synthetic oligonucleotide
ucguuuguggauugcaucu

SEQ ID NO: 2622408 - RNA, 19 nt, Artificial Sequence
  Description of Artificial Sequence: Synthetic oligonucleotide
  modified_base (8)..(8): a, c, u, g, unknown or other
uuaaaagnugcugacuaaa

SEQ ID NO: 2622409 - RNA, 19 nt, Artificial Sequence
  Description of Artificial Sequence: Synthetic oligonucleotide
ggagaaagcaagcagacga

SEQ ID NO: 2622410 - RNA, 19 nt, Artificial Sequence
  Description of Artificial Sequence: Synthetic oligonucleotide
uauacagcuggcugaaagu

SEQ ID NO: 2622411 - RNA, 19 nt, Artificial Sequence
  Description of Artificial Sequence: Synthetic oligonucleotide
ugaacagaagacaaaccuu

SEQ ID NO: 2622412 - RNA, 19 nt, Artificial Sequence
  Description of Artificial Sequence: Synthetic oligonucleotide
uggggaaaacgccaguggc

SEQ ID NO: 2622413 - RNA, 19 nt, Artificial Sequence
  Description of Artificial Sequence: Synthetic oligonucleotide
ugacuaaagaaaguauaca

SEQ ID NO: 2622414 - RNA, 19 nt, Artificial Sequence
  Description of Artificial Sequence: Synthetic oligonucleotide
aacgugaaugggucaguag

SEQ ID NO: 2622415 - RNA, 19 nt, Artificial Sequence
  Description of Artificial Sequence: Synthetic oligonucleotide
agaaaggccugaucuauug

SEQ ID NO: 2622416 - RNA, 19 nt, Artificial Sequence
  Description of Artificial Sequence: Synthetic oligonucleotide
guggcugacagguaaauca

SEQ ID NO: 2622417 - RNA, 19 nt, Artificial Sequence
  Description of Artificial Sequence: Synthetic oligonucleotide
uauaaugucucgguuacua

SEQ ID NO: 2622418 - RNA, 19 nt, Artificial Sequence
  Description of Artificial Sequence: Synthetic oligonucleotide
cuccaaagucguaaggacc

SEQ ID NO: 2622419 - RNA, 19 nt, Artificial Sequence
  Description of Artificial Sequence: Synthetic oligonucleotide
auuaguaagaacaccucca

SEQ ID NO: 2622420 - RNA, 19 nt, Artificial Sequence
  Description of Artificial Sequence: Synthetic oligonucleotide
ugugggauugauuucguuu

SEQ ID NO: 2622421 - RNA, 19 nt, Artificial Sequence
  Description of Artificial Sequence: Synthetic oligonucleotide
cacacuauuggcaggcagc

SEQ ID NO: 2622422 - RNA, 19 nt, Artificial Sequence
  Description of Artificial Sequence: Synthetic oligonucleotide
  modified_base (3)..(3): a, c, u, g, unknown or other
agnugcugacuaaagaaag

SEQ ID NO: 2622423 - RNA, 19 nt, Artificial Sequence
  Description of Artificial Sequence: Synthetic oligonucleotide
ugagaagcaaucgaagaaa

SEQ ID NO: 2622424 - RNA, 19 nt, Artificial Sequence
  Description of Artificial Sequence: Synthetic oligonucleotide
cuuuuggauaugugguggg

SEQ ID NO: 2622425 - RNA, 19 nt, Artificial Sequence
  Description of Artificial Sequence: Synthetic oligonucleotide
ucuuauaggcaacacuguu

SEQ ID NO: 2622426 - RNA, 19 nt, Artificial Sequence
  Description of Artificial Sequence: Synthetic oligonucleotide
ugaagaggcuaccucgcug

SEQ ID NO: 2622427 - RNA, 19 nt, Artificial Sequence
  Description of Artificial Sequence: Synthetic oligonucleotide
aguagcugggcaaugucac

SEQ ID NO: 2622428 - RNA, 19 nt, Artificial Sequence
  Description of Artificial Sequence: Synthetic oligonucleotide
ugaucuauugaacgugaau

SEQ ID NO: 2622429 - RNA, 19 nt, Artificial Sequence
  Description of Artificial Sequence: Synthetic oligonucleotide
cuugacacuuuucccacag

SEQ ID NO: 2622430 - RNA, 19 nt, Artificial Sequence
  Description of Artificial Sequence: Synthetic oligonucleotide
uugaacgugaaugggucag

SEQ ID NO: 2622431 - RNA, 19 nt, Artificial Sequence
  Description of Artificial Sequence: Synthetic oligonucleotide
  modified_base (4)..(4): a, c, u, g, unknown or other
aagnugcugacuaaagaaa

SEQ ID NO: 2622432 - RNA, 19 nt, Artificial Sequence
  Description of Artificial Sequence: Synthetic oligonucleotide
cuauuaguaagaacaccuc

SEQ ID NO: 2622433 - RNA, 19 nt, Artificial Sequence
  Description of Artificial Sequence: Synthetic oligonucleotide
aaggccugaucuauugaac

SEQ ID NO: 2622434 - RNA, 19 nt, Artificial Sequence
  Description of Artificial Sequence: Synthetic oligonucleotide
cuccauuuauaaugucucg

SEQ ID NO: 2622435 - RNA, 19 nt, Artificial Sequence
  Description of Artificial Sequence: Synthetic oligonucleotide
uccgugugaauggauagag

SEQ ID NO: 2622436 - RNA, 19 nt, Artificial Sequence
  Description of Artificial Sequence: Synthetic oligonucleotide
uucuuauaggcaacacugu

SEQ ID NO: 2622437 - RNA, 19 nt, Artificial Sequence
  Description of Artificial Sequence: Synthetic oligonucleotide
ugugcauccucaugguggc

SEQ ID NO: 2622438 - RNA, 19 nt, Artificial Sequence
  Description of Artificial Sequence: Synthetic oligonucleotide
aacaccuccaaagucguaa

SEQ ID NO: 2622439 - RNA, 19 nt, Artificial Sequence
  Description of Artificial Sequence: Synthetic oligonucleotide
aaaacuggagaaaggccug

SEQ ID NO: 2622440 - RNA, 19 nt, Artificial Sequence
  Description of Artificial Sequence: Synthetic oligonucleotide
cagaagacaaaccuuguga

SEQ ID NO: 2622441 - RNA, 19 nt, Artificial Sequence
  Description of Artificial Sequence: Synthetic oligonucleotide
uacgcaugcuugacaaucc

SEQ ID NO: 2622442 - RNA, 19 nt, Artificial Sequence
  Description of Artificial Sequence: Synthetic oligonucleotide
caugcuugacaauccagac

SEQ ID NO: 2622443 - RNA, 19 nt, Artificial Sequence
  Description of Artificial Sequence: Synthetic oligonucleotide
gaguccacaaugauaaaca

SEQ ID NO: 2622444 - RNA, 19 nt, Artificial Sequence
  Description of Artificial Sequence: Synthetic oligonucleotide
uccucaugguggcugaaca

SEQ ID NO: 2622445 - RNA, 19 nt, Artificial Sequence
  Description of Artificial Sequence: Synthetic oligonucleotide
guaaaucagaagcacacua

SEQ ID NO: 2622446 - RNA, 19 nt, Artificial Sequence
  Description of Artificial Sequence: Synthetic oligonucleotide
  modified_base (14)..(14): a, c, u, g, unknown or other
agcuccuuaaaagnugcug

SEQ ID NO: 2622447 - RNA, 19 nt, Artificial Sequence
  Description of Artificial Sequence: Synthetic oligonucleotide
ugaucuugcaaagcuuuug

SEQ ID NO: 2622448 - RNA, 19 nt, Artificial Sequence
  Description of Artificial Sequence: Synthetic oligonucleotide
aacgccaguggcugacagg

SEQ ID NO: 2622449 - RNA, 19 nt, Artificial Sequence
  Description of Artificial Sequence: Synthetic oligonucleotide
agcuuuuggauauguggug

SEQ ID NO: 2622450 - RNA, 19 nt, Artificial Sequence
  Description of Artificial Sequence: Synthetic oligonucleotide
aaacgccaguggcugacag

SEQ ID NO: 2622451 - RNA, 19 nt, Artificial Sequence
  Description of Artificial Sequence: Synthetic oligonucleotide
ugggcaaugucacgguuga

SEQ ID NO: 2622452 - RNA, 19 nt, Artificial Sequence
  Description of Artificial Sequence: Synthetic oligonucleotide
ugcugacuaaagaaaguau

SEQ ID NO: 2622453 - RNA, 19 nt, Artificial Sequence
  Description of Artificial Sequence: Synthetic oligonucleotide
aaugucucgguuacuauua

SEQ ID NO: 2622454 - RNA, 19 nt, Artificial Sequence
  Description of Artificial Sequence: Synthetic oligonucleotide
gaaagucgguuugagagca

SEQ ID NO: 2622455 - RNA, 19 nt, Artificial Sequence
  Description of Artificial Sequence: Synthetic oligonucleotide
agggugaagaggcuaccuc

SEQ ID NO: 2622456 - RNA, 19 nt, Artificial Sequence
  Description of Artificial Sequence: Synthetic oligonucleotide
guccacaaugauaaacagg

SEQ ID NO: 2622457 - RNA, 19 nt, Artificial Sequence
  Description of Artificial Sequence: Synthetic oligonucleotide
uaaugucucgguuacuauu

SEQ ID NO: 2622458 - RNA, 19 nt, Artificial Sequence
  Description of Artificial Sequence: Synthetic oligonucleotide
gggugaagaggcuaccucg

SEQ ID NO: 2622459 - RNA, 19 nt, Artificial Sequence
  Description of Artificial Sequence: Synthetic oligonucleotide
ucucgguuacuauuaguaa

SEQ ID NO: 2622460 - RNA, 19 nt, Artificial Sequence
  Description of Artificial Sequence: Synthetic oligonucleotide
aaagucguaaggaccuuca

SEQ ID NO: 2622461 - RNA, 19 nt, Artificial Sequence
  Description of Artificial Sequence: Synthetic oligonucleotide
gacacuuuucccacaggcc

SEQ ID NO: 2622462 - RNA, 19 nt, Artificial Sequence
  Description of Artificial Sequence: Synthetic oligonucleotide
guggggaaaacgccagugg

SEQ ID NO: 2622463 - RNA, 19 nt, Artificial Sequence
  Description of Artificial Sequence: Synthetic oligonucleotide
aaacagggguuuccgugug

SEQ ID NO: 2622464 - RNA, 19 nt, Artificial Sequence
  Description of Artificial Sequence: Synthetic oligonucleotide
uugacacuuuucccacagg

SEQ ID NO: 2622465 - RNA, 19 nt, Artificial Sequence
  Description of Artificial Sequence: Synthetic oligonucleotide
cucgcugagacugaucuug

SEQ ID NO: 2622466 - RNA, 19 nt, Artificial Sequence
  Description of Artificial Sequence: Synthetic oligonucleotide
acaaugauaaacagggguu

SEQ ID NO: 2622467 - RNA, 19 nt, Artificial Sequence
  Description of Artificial Sequence: Synthetic oligonucleotide
uguggauugcaucuccauu

SEQ ID NO: 2622468 - RNA, 19 nt, Artificial Sequence
  Description of Artificial Sequence: Synthetic oligonucleotide
agacaaaccuugugagaag

SEQ ID NO: 2622469 - RNA, 19 nt, Artificial Sequence
  Description of Artificial Sequence: Synthetic oligonucleotide
uugacaauccagacacaaa

SEQ ID NO: 2622470 - RNA, 19 nt, Artificial Sequence
  Description of Artificial Sequence: Synthetic oligonucleotide
ugauuucguuuguggauug

SEQ ID NO: 2622471 - RNA, 19 nt, Artificial Sequence
  Description of Artificial Sequence: Synthetic oligonucleotide
augcuugacaauccagaca

SEQ ID NO: 2622472 - RNA, 19 nt, Artificial Sequence
  Description of Artificial Sequence: Synthetic oligonucleotide
auugaacgugaauggguca

SEQ ID NO: 2622473 - RNA, 19 nt, Artificial Sequence
  Description of Artificial Sequence: Synthetic oligonucleotide
auauguggugggagaaagc

SEQ ID NO: 2622474 - RNA, 19 nt, Artificial Sequence
  Description of Artificial Sequence: Synthetic oligonucleotide
caaagcuuuuggauaugug

SEQ ID NO: 2622475 - RNA, 19 nt, Artificial Sequence
  Description of Artificial Sequence: Synthetic oligonucleotide
uugauuucguuuguggauu

SEQ ID NO: 2622476 - RNA, 19 nt, Artificial Sequence
  Description of Artificial Sequence: Synthetic oligonucleotide
  modified_base (11)..(11): a, c, u, g, unknown or other
uccuuaaaagnugcugacu

SEQ ID NO: 2622477 - RNA, 19 nt, Artificial Sequence
  Description of Artificial Sequence: Synthetic oligonucleotide
aguuugugaaauucuuaua

SEQ ID NO: 2622478 - RNA, 19 nt, Artificial Sequence
  Description of Artificial Sequence: Synthetic oligonucleotide
gagagugucccggaaggcc

SEQ ID NO: 2622479 - RNA, 19 nt, Artificial Sequence
  Description of Artificial Sequence: Synthetic oligonucleotide
cuacgcaugcuugacaauc

SEQ ID NO: 2622480 - RNA, 19 nt, Artificial Sequence
  Description of Artificial Sequence: Synthetic oligonucleotide
aaggaccuucaccaucaga

SEQ ID NO: 2622481 - RNA, 19 nt, Artificial Sequence
  Description of Artificial Sequence: Synthetic oligonucleotide
uuuuggauaugugguggga

SEQ ID NO: 2622482 - RNA, 19 nt, Artificial Sequence
  Description of Artificial Sequence: Synthetic oligonucleotide
gagacugaucuugcaaagc

SEQ ID NO: 2622483 - RNA, 19 nt, Artificial Sequence
  Description of Artificial Sequence: Synthetic oligonucleotide
aagcagacgaguggcuguc

SEQ ID NO: 2622484 - RNA, 19 nt, Artificial Sequence
  Description of Artificial Sequence: Synthetic oligonucleotide
aaagagggugaagaggcua

SEQ ID NO: 2622485 - RNA, 19 nt, Artificial Sequence
  Description of Artificial Sequence: Synthetic oligonucleotide
accuugugagaagcaaucg

SEQ ID NO: 2622486 - RNA, 19 nt, Artificial Sequence
  Description of Artificial Sequence: Synthetic oligonucleotide
gcuuuuggauauguggugg

SEQ ID NO: 2622487 - RNA, 19 nt, Artificial Sequence
  Description of Artificial Sequence: Synthetic oligonucleotide
gggguuuccgugugaaugg

SEQ ID NO: 2622488 - RNA, 19 nt, Artificial Sequence
  Description of Artificial Sequence: Synthetic oligonucleotide
gccauuagaggauuguuca

SEQ ID NO: 2622489 - RNA, 19 nt, Artificial Sequence
  Description of Artificial Sequence: Synthetic oligonucleotide
  modified_base (9)..(9): a, c, u, g, unknown or other
cuuaaaagnugcugacuaa

SEQ ID NO: 2622490 - RNA, 19 nt, Artificial Sequence
  Description of Artificial Sequence: Synthetic oligonucleotide
guaaggaccuucaccauca

SEQ ID NO: 2622491 - RNA, 19 nt, Artificial Sequence
  Description of Artificial Sequence: Synthetic oligonucleotide
auaaugucucgguuacuau

SEQ ID NO: 2622492 - RNA, 19 nt, Artificial Sequence
  Description of Artificial Sequence: Synthetic oligonucleotide
acaccuccaaagucguaag

SEQ ID NO: 2622493 - RNA, 19 nt, Artificial Sequence
  Description of Artificial Sequence: Synthetic oligonucleotide
aaguauacagcuggcugaa

SEQ ID NO: 2622494 - RNA, 19 nt, Artificial Sequence
  Description of Artificial Sequence: Synthetic oligonucleotide
aacagaagacaaaccuugu

SEQ ID NO: 2622495 - RNA, 19 nt, Artificial Sequence
  Description of Artificial Sequence: Synthetic oligonucleotide
accuccaaagucguaagga

SEQ ID NO: 2622496 - RNA, 19 nt, Artificial Sequence
  Description of Artificial Sequence: Synthetic oligonucleotide
auuucguuuguggauugca

SEQ ID NO: 2622497 - RNA, 19 nt, Artificial Sequence
  Description of Artificial Sequence: Synthetic oligonucleotide
guaagaacaccuccaaagu

SEQ ID NO: 2622498 - RNA, 19 nt, Artificial Sequence
  Description of Artificial Sequence: Synthetic oligonucleotide
guagcugggcaaugucacg

SEQ ID NO: 2622499 - RNA, 19 nt, Artificial Sequence
  Description of Artificial Sequence: Synthetic oligonucleotide
cuggagaaaggccugaucu

SEQ ID NO: 2622500 - RNA, 19 nt, Artificial Sequence
  Description of Artificial Sequence: Synthetic oligonucleotide
ugggauugauuucguuugu

SEQ ID NO: 2622501 - RNA, 19 nt, Artificial Sequence
  Description of Artificial Sequence: Synthetic oligonucleotide
uucccacaggccucuacgc

SEQ ID NO: 2622502 - RNA, 19 nt, Artificial Sequence
  Description of Artificial Sequence: Synthetic oligonucleotide
aagucgguuugagagcaga

SEQ ID NO: 2622503 - RNA, 19 nt, Artificial Sequence
  Description of Artificial Sequence: Synthetic oligonucleotide
gguuacuauuaguaagaac

SEQ ID NO: 2622504 - RNA, 19 nt, Artificial Sequence
  Description of Artificial Sequence: Synthetic oligonucleotide
ugucucgguuacuauuagu

SEQ ID NO: 2622505 - RNA, 19 nt, Artificial Sequence
  Description of Artificial Sequence: Synthetic oligonucleotide
gaaaacgccaguggcugac

SEQ ID NO: 2622506 - RNA, 19 nt, Artificial Sequence
  Description of Artificial Sequence: Synthetic oligonucleotide
cuauugaacgugaaugggu

SEQ ID NO: 2622507 - RNA, 19 nt, Artificial Sequence
  Description of Artificial Sequence: Synthetic oligonucleotide
ccuugugggauugauuucg

SEQ ID NO: 2622508 - RNA, 19 nt, Artificial Sequence
  Description of Artificial Sequence: Synthetic oligonucleotide
  modified_base (10)..(10): a, c, u, g, unknown or other
ccuuaaaagnugcugacua

SEQ ID NO: 2622509 - RNA, 19 nt, Artificial Sequence
  Description of Artificial Sequence: Synthetic oligonucleotide
cagacacaaauaggaaggc

SEQ ID NO: 2622510 - RNA, 19 nt, Artificial Sequence
  Description of Artificial Sequence: Synthetic oligonucleotide
acaaguuugugaaauucuu

SEQ ID NO: 2622511 - RNA, 19 nt, Artificial Sequence
  Description of Artificial Sequence: Synthetic oligonucleotide
acugaucuugcaaagcuuu

SEQ ID NO: 2622512 - RNA, 19 nt, Artificial Sequence
  Description of Artificial Sequence: Synthetic oligonucleotide
cucuacgcaugcuugacaa

SEQ ID NO: 2622513 - RNA, 19 nt, Artificial Sequence
  Description of Artificial Sequence: Synthetic oligonucleotide
aaacuggagaaaggccuga

SEQ ID NO: 2622514 - RNA, 19 nt, Artificial Sequence
  Description of Artificial Sequence: Synthetic oligonucleotide
ucuugacacuuuucccaca

SEQ ID NO: 2622515 - RNA, 19 nt, Artificial Sequence
  Description of Artificial Sequence: Synthetic oligonucleotide
accuucaccaucagaacga

SEQ ID NO: 2622516 - RNA, 19 nt, Artificial Sequence
  Description of Artificial Sequence: Synthetic oligonucleotide
ucagaacgaccugugggga

SEQ ID NO: 2622517 - RNA, 19 nt, Artificial Sequence
  Description of Artificial Sequence: Synthetic oligonucleotide
ucgcugagacugaucuugc

SEQ ID NO: 2622518 - RNA, 19 nt, Artificial Sequence
  Description of Artificial Sequence: Synthetic oligonucleotide
uggauauguggugggagaa

SEQ ID NO: 2622519 - RNA, 19 nt, Artificial Sequence
  Description of Artificial Sequence: Synthetic oligonucleotide
acgaguggcuguccaaaca

SEQ ID NO: 2622520 - RNA, 19 nt, Artificial Sequence
  Description of Artificial Sequence: Synthetic oligonucleotide
ggcugaacagaagacaaac

SEQ ID NO: 2622521 - RNA, 19 nt, Artificial Sequence
  Description of Artificial Sequence: Synthetic oligonucleotide
gauuucguuuguggauugc

SEQ ID NO: 2622522 - RNA, 19 nt, Artificial Sequence
  Description of Artificial Sequence: Synthetic oligonucleotide
gucucgguuacuauuagua

SEQ ID NO: 2622523 - RNA, 19 nt, Artificial Sequence
  Description of Artificial Sequence: Synthetic oligonucleotide
caaguuugugaaauucuua

SEQ ID NO: 2622524 - RNA, 19 nt, Artificial Sequence
  Description of Artificial Sequence: Synthetic oligonucleotide
ggaguccacaaugauaaac

SEQ ID NO: 2622525 - RNA, 19 nt, Artificial Sequence
  Description of Artificial Sequence: Synthetic oligonucleotide
caggagagugucccggaag

SEQ ID NO: 2622526 - RNA, 19 nt, Artificial Sequence
  Description of Artificial Sequence: Synthetic oligonucleotide
aguggcuguccaaacaagu

SEQ ID NO: 2622527 - RNA, 19 nt, Artificial Sequence
  Description of Artificial Sequence: Synthetic oligonucleotide
aacgaccuguggggaaaac

SEQ ID NO: 2622528 - RNA, 19 nt, Artificial Sequence
  Description of Artificial Sequence: Synthetic oligonucleotide
acgccaguggcugacaggu

SEQ ID NO: 2622529 - RNA, 19 nt, Artificial Sequence
  Description of Artificial Sequence: Synthetic oligonucleotide
aacagggguuuccguguga

SEQ ID NO: 2622530 - RNA, 19 nt, Artificial Sequence
  Description of Artificial Sequence: Synthetic oligonucleotide
caccuccaaagucguaagg

SEQ ID NO: 2622531 - RNA, 19 nt, Artificial Sequence
  Description of Artificial Sequence: Synthetic oligonucleotide
gacgaguggcuguccaaac

SEQ ID NO: 2622532 - RNA, 19 nt, Artificial Sequence
  Description of Artificial Sequence: Synthetic oligonucleotide
ggcuguccaaacaaguuug

SEQ ID NO: 2622533 - RNA, 19 nt, Artificial Sequence
  Description of Artificial Sequence: Synthetic oligonucleotide
uuccgugugaauggauaga

SEQ ID NO: 2622534 - RNA, 19 nt, Artificial Sequence
  Description of Artificial Sequence: Synthetic oligonucleotide
auccucaugguggcugaac

SEQ ID NO: 2622535 - RNA, 19 nt, Artificial Sequence
  Description of Artificial Sequence: Synthetic oligonucleotide
caguagcugggcaauguca

SEQ ID NO: 2622536 - RNA, 19 nt, Artificial Sequence
  Description of Artificial Sequence: Synthetic oligonucleotide
  modified_base (2)..(2): a, c, u, g, unknown or other
gnugcugacuaaagaaagu

SEQ ID NO: 2622537 - RNA, 19 nt, Artificial Sequence
  Description of Artificial Sequence: Synthetic oligonucleotide
agaacaccuccaaagucgu

SEQ ID NO: 2622538 - RNA, 19 nt, Artificial Sequence
  Description of Artificial Sequence: Synthetic oligonucleotide
uuauaaugucucgguuacu

SEQ ID NO: 2622539 - RNA, 19 nt, Artificial Sequence
  Description of Artificial Sequence: Synthetic oligonucleotide
uccuugugggauugauuuc

SEQ ID NO: 2622540 - RNA, 19 nt, Artificial Sequence
  Description of Artificial Sequence: Synthetic oligonucleotide
agcaaucgaagaaauucau

SEQ ID NO: 2622541 - RNA, 19 nt, Artificial Sequence
  Description of Artificial Sequence: Synthetic oligonucleotide
acuguuggaggaguccaca

SEQ ID NO: 2622542 - RNA, 19 nt, Artificial Sequence
  Description of Artificial Sequence: Synthetic oligonucleotide
gugugaauggauagagauc

SEQ ID NO: 2622543 - RNA, 19 nt, Artificial Sequence
  Description of Artificial Sequence: Synthetic oligonucleotide
  modified_base (13)..(13): a, c, u, g, unknown or other
gcuccuuaaaagnugcuga

SEQ ID NO: 2622544 - RNA, 19 nt, Artificial Sequence
  Description of Artificial Sequence: Synthetic oligonucleotide
aggaugaaggcagugcauu

SEQ ID NO: 2622545 - RNA, 19 nt, Artificial Sequence
  Description of Artificial Sequence: Synthetic oligonucleotide
agagugucccggaaggccu

SEQ ID NO: 2622546 - RNA, 19 nt, Artificial Sequence
  Description of Artificial Sequence: Synthetic oligonucleotide
acacaaauaggaaggccau

SEQ ID NO: 2622547 - RNA, 19 nt, Artificial Sequence
  Description of Artificial Sequence: Synthetic oligonucleotide
aggcaacacuguuggagga

SEQ ID NO: 2622548 - RNA, 19 nt, Artificial Sequence
  Description of Artificial Sequence: Synthetic oligonucleotide
gacaauccagacacaaaua

SEQ ID NO: 2622549 - RNA, 19 nt, Artificial Sequence
  Description of Artificial Sequence: Synthetic oligonucleotide
cuguccaaacaaguuugug

SEQ ID NO: 2622550 - RNA, 19 nt, Artificial Sequence
  Description of Artificial Sequence: Synthetic oligonucleotide
ugaacgugaaugggucagu

SEQ ID NO: 2622551 - RNA, 19 nt, Artificial Sequence
  Description of Artificial Sequence: Synthetic oligonucleotide
caaagucguaaggaccuuc

SEQ ID NO: 2622552 - RNA, 19 nt, Artificial Sequence
  Description of Artificial Sequence: Synthetic oligonucleotide
acgcaugcuugacaaucca

SEQ ID NO: 2622553 - RNA, 19 nt, Artificial Sequence
  Description of Artificial Sequence: Synthetic oligonucleotide
aaaacgccaguggcugaca

SEQ ID NO: 2622554 - RNA, 19 nt, Artificial Sequence
  Description of Artificial Sequence: Synthetic oligonucleotide
cgaccuguggggaaaacgc

SEQ ID NO: 2622555 - RNA, 19 nt, Artificial Sequence
  Description of Artificial Sequence: Synthetic oligonucleotide
gaaggccauuagaggauug

SEQ ID NO: 2622556 - RNA, 19 nt, Artificial Sequence
  Description of Artificial Sequence: Synthetic oligonucleotide
gcugaacagaagacaaacc

SEQ ID NO: 2622557 - RNA, 19 nt, Artificial Sequence
  Description of Artificial Sequence: Synthetic oligonucleotide
ucuacgcaugcuugacaau

SEQ ID NO: 2622558 - RNA, 19 nt, Artificial Sequence
  Description of Artificial Sequence: Synthetic oligonucleotide
caaaccuugugagaagcaa

SEQ ID NO: 2622559 - RNA, 19 nt, Artificial Sequence
  Description of Artificial Sequence: Synthetic oligonucleotide
agaacgaccuguggggaaa

SEQ ID NO: 2622560 - RNA, 19 nt, Artificial Sequence
  Description of Artificial Sequence: Synthetic oligonucleotide
guuuccgugugaauggaua

SEQ ID NO: 2622561 - RNA, 19 nt, Artificial Sequence
  Description of Artificial Sequence: Synthetic oligonucleotide
agcagacgaguggcugucc

SEQ ID NO: 2622562 - RNA, 19 nt, Artificial Sequence
  Description of Artificial Sequence: Synthetic oligonucleotide
  modified_base (17)..(17): a, c, u, g, unknown or other
ggcagcuccuuaaaagnug

SEQ ID NO: 2622563 - RNA, 19 nt, Artificial Sequence
  Description of Artificial Sequence: Synthetic oligonucleotide
aacuggagaaaggccugau

SEQ ID NO: 2622564 - RNA, 19 nt, Artificial Sequence
  Description of Artificial Sequence: Synthetic oligonucleotide
acaaaccuugugagaagca

SEQ ID NO: 2622565 - RNA, 19 nt, Artificial Sequence
  Description of Artificial Sequence: Synthetic oligonucleotide
gguggcugaacagaagaca

SEQ ID NO: 2622566 - RNA, 19 nt, Artificial Sequence
  Description of Artificial Sequence: Synthetic oligonucleotide
ccacaaugauaaacagggg

SEQ ID NO: 2622567 - RNA, 19 nt, Artificial Sequence
  Description of Artificial Sequence: Synthetic oligonucleotide
gcacacuauuggcaggcag

SEQ ID NO: 2622568 - RNA, 19 nt, Artificial Sequence
  Description of Artificial Sequence: Synthetic oligonucleotide
ucguaaggaccuucaccau

SEQ ID NO: 2622569 - RNA, 19 nt, Artificial Sequence
  Description of Artificial Sequence: Synthetic oligonucleotide
agcugggcaaugucacggu

SEQ ID NO: 2622570 - RNA, 19 nt, Artificial Sequence
  Description of Artificial Sequence: Synthetic oligonucleotide
agacgaguggcuguccaaa

SEQ ID NO: 2622571 - RNA, 19 nt, Artificial Sequence
  Description of Artificial Sequence: Synthetic oligonucleotide
ggaccuucaccaucagaac

SEQ ID NO: 2622572 - RNA, 19 nt, Artificial Sequence
  Description of Artificial Sequence: Synthetic oligonucleotide
auccagacacaaauaggaa

SEQ ID NO: 2622573 - RNA, 19 nt, Artificial Sequence
  Description of Artificial Sequence: Synthetic oligonucleotide
uugugggauugauuucguu

SEQ ID NO: 2622574 - RNA, 19 nt, Artificial Sequence
  Description of Artificial Sequence: Synthetic oligonucleotide
ggccauuagaggauuguuc

SEQ ID NO: 2622575 - RNA, 19 nt, Artificial Sequence
  Description of Artificial Sequence: Synthetic oligonucleotide
cugaucuauugaacgugaa

SEQ ID NO: 2622576 - RNA, 19 nt, Artificial Sequence
  Description of Artificial Sequence: Synthetic oligonucleotide
acagggguuuccgugugaa

SEQ ID NO: 2622577 - RNA, 19 nt, Artificial Sequence
  Description of Artificial Sequence: Synthetic oligonucleotide
ggcagugcauuuccuugug

SEQ ID NO: 2622578 - RNA, 19 nt, Artificial Sequence
  Description of Artificial Sequence: Synthetic oligonucleotide
  modified_base (18)..(18): a, c, u, g, unknown or other
aggcagcuccuuaaaagnu

SEQ ID NO: 2622579 - RNA, 19 nt, Artificial Sequence
  Description of Artificial Sequence: Synthetic oligonucleotide
gaacgugaaugggucagua

SEQ ID NO: 2622580 - RNA, 19 nt, Artificial Sequence
  Description of Artificial Sequence: Synthetic oligonucleotide
ggcaacacuguuggaggag

SEQ ID NO: 2622581 - RNA, 19 nt, Artificial Sequence
  Description of Artificial Sequence: Synthetic oligonucleotide
ccugaucuauugaacguga

SEQ ID NO: 2622582 - RNA, 19 nt, Artificial Sequence
  Description of Artificial Sequence: Synthetic oligonucleotide
ccauuuauaaugucucggu

SEQ ID NO: 2622583 - RNA, 19 nt, Artificial Sequence
  Description of Artificial Sequence: Synthetic oligonucleotide
uaccucgcugagacugauc

SEQ ID NO: 2622584 - RNA, 19 nt, Artificial Sequence
  Description of Artificial Sequence: Synthetic oligonucleotide
gcaaugucacgguugauuu

SEQ ID NO: 2622585 - RNA, 19 nt, Artificial Sequence
  Description of Artificial Sequence: Synthetic oligonucleotide
aggccauuagaggauuguu

SEQ ID NO: 2622586 - RNA, 19 nt, Artificial Sequence
  Description of Artificial Sequence: Synthetic oligonucleotide
agaggcuaccucgcugaga

SEQ ID NO: 2622587 - RNA, 19 nt, Artificial Sequence
  Description of Artificial Sequence: Synthetic oligonucleotide
gccaguggcugacagguaa

SEQ ID NO: 2622588 - RNA, 19 nt, Artificial Sequence
  Description of Artificial Sequence: Synthetic oligonucleotide
caagcagacgaguggcugu

SEQ ID NO: 2622589 - RNA, 19 nt, Artificial Sequence
  Description of Artificial Sequence: Synthetic oligonucleotide
auguggugggagaaagcaa

SEQ ID NO: 2622590 - RNA, 19 nt, Artificial Sequence
  Description of Artificial Sequence: Synthetic oligonucleotide
agucgguuugagagcagau

SEQ ID NO: 2622591 - RNA, 19 nt, Artificial Sequence
  Description of Artificial Sequence: Synthetic oligonucleotide
cgugugaauggauagagau

SEQ ID NO: 2622592 - RNA, 19 nt, Artificial Sequence
  Description of Artificial Sequence: Synthetic oligonucleotide
cagaacgaccuguggggaa

SEQ ID NO: 2622593 - RNA, 19 nt, Artificial Sequence
  Description of Artificial Sequence: Synthetic oligonucleotide
gguaaaucagaagcacacu

SEQ ID NO: 2622594 - RNA, 19 nt, Artificial Sequence
  Description of Artificial Sequence: Synthetic oligonucleotide
ggagagugucccggaaggc

SEQ ID NO: 2622595 - RNA, 19 nt, Artificial Sequence
  Description of Artificial Sequence: Synthetic oligonucleotide
cuugugggauugauuucgu

SEQ ID NO: 2622596 - RNA, 19 nt, Artificial Sequence
  Description of Artificial Sequence: Synthetic oligonucleotide
gugaauggauagagaucuc

SEQ ID NO: 2622597 - RNA, 19 nt, Artificial Sequence
  Description of Artificial Sequence: Synthetic oligonucleotide
agcacacuauuggcaggca

SEQ ID NO: 2622598 - RNA, 19 nt, Artificial Sequence
  Description of Artificial Sequence: Synthetic oligonucleotide
ggaaaacgccaguggcuga

SEQ ID NO: 2622599 - RNA, 19 nt, Artificial Sequence
  Description of Artificial Sequence: Synthetic oligonucleotide
gagggugaagaggcuaccu

SEQ ID NO: 2622600 - RNA, 19 nt, Artificial Sequence
  Description of Artificial Sequence: Synthetic oligonucleotide
aguauacagcuggcugaaa

SEQ ID NO: 2622601 - RNA, 19 nt, Artificial Sequence
  Description of Artificial Sequence: Synthetic oligonucleotide
gucaguagcugggcaaugu

SEQ ID NO: 2622602 - RNA, 19 nt, Artificial Sequence
  Description of Artificial Sequence: Synthetic oligonucleotide
gugaagaggcuaccucgcu

SEQ ID NO: 2622603 - RNA, 19 nt, Artificial Sequence
  Description of Artificial Sequence: Synthetic oligonucleotide
ggccugaucuauugaacgu

SEQ ID NO: 2622604 - RNA, 19 nt, Artificial Sequence
  Description of Artificial Sequence: Synthetic oligonucleotide
gcagacgaguggcugucca

SEQ ID NO: 2622605 - RNA, 19 nt, Artificial Sequence
  Description of Artificial Sequence: Synthetic oligonucleotide
cuauuggcaggcagcuccu

SEQ ID NO: 2622606 - RNA, 19 nt, Artificial Sequence
  Description of Artificial Sequence: Synthetic oligonucleotide
cagacgaguggcuguccaa

SEQ ID NO: 2622607 - RNA, 19 nt, Artificial Sequence
  Description of Artificial Sequence: Synthetic oligonucleotide
cacuauuggcaggcagcuc

SEQ ID NO: 2622608 - RNA, 19 nt, Artificial Sequence
  Description of Artificial Sequence: Synthetic oligonucleotide
ggccucuacgcaugcuuga

SEQ ID NO: 2622609 - RNA, 19 nt, Artificial Sequence
  Description of Artificial Sequence: Synthetic oligonucleotide
ggauauguggugggagaaa

SEQ ID NO: 2622610 - RNA, 19 nt, Artificial Sequence
  Description of Artificial Sequence: Synthetic oligonucleotide
gaacgaccuguggggaaaa

SEQ ID NO: 2622611 - RNA, 19 nt, Artificial Sequence
  Description of Artificial Sequence: Synthetic oligonucleotide
ggucaguagcugggcaaug

SEQ ID NO: 2622612 - RNA, 19 nt, Artificial Sequence
  Description of Artificial Sequence: Synthetic oligonucleotide
acaggccucuacgcaugcu

SEQ ID NO: 2622613 - RNA, 19 nt, Artificial Sequence
  Description of Artificial Sequence: Synthetic oligonucleotide
aggcuaccucgcugagacu

SEQ ID NO: 2622614 - RNA, 19 nt, Artificial Sequence
  Description of Artificial Sequence: Synthetic oligonucleotide
gagaaaggccugaucuauu

SEQ ID NO: 2622615 - RNA, 19 nt, Artificial Sequence
  Description of Artificial Sequence: Synthetic oligonucleotide
ggggaaaacgccaguggcu

SEQ ID NO: 2622616 - RNA, 19 nt, Artificial Sequence
  Description of Artificial Sequence: Synthetic oligonucleotide
gccucuacgcaugcuugac

SEQ ID NO: 2622617 - RNA, 19 nt, Artificial Sequence
  Description of Artificial Sequence: Synthetic oligonucleotide
caggccucuacgcaugcuu

SEQ ID NO: 2622618 - RNA, 19 nt, Artificial Sequence
  Description of Artificial Sequence: Synthetic oligonucleotide
gaacaccuccaaagucgua

SEQ ID NO: 2622619 - RNA, 19 nt, Artificial Sequence
  Description of Artificial Sequence: Synthetic oligonucleotide
cgugaaugggucaguagcu

SEQ ID NO: 2622620 - RNA, 19 nt, Artificial Sequence
  Description of Artificial Sequence: Synthetic oligonucleotide
ccgugugaauggauagaga

SEQ ID NO: 2622621 - RNA, 19 nt, Artificial Sequence
  Description of Artificial Sequence: Synthetic oligonucleotide
ccucuacgcaugcuugaca

SEQ ID NO: 2622622 - RNA, 19 nt, Artificial Sequence
  Description of Artificial Sequence: Synthetic oligonucleotide
ggguuuccgugugaaugga

SEQ ID NO: 2622623 - RNA, 19 nt, Artificial Sequence
  Description of Artificial Sequence: Synthetic oligonucleotide
ggauugcaucuccauuuau

SEQ ID NO: 2622624 - RNA, 19 nt, Artificial Sequence
  Description of Artificial Sequence: Synthetic oligonucleotide
  modified_base (15)..(15): a, c, u, g, unknown or other
cagcuccuuaaaagnugcu

SEQ ID NO: 2622625 - RNA, 19 nt, Artificial Sequence
  Description of Artificial Sequence: Synthetic oligonucleotide
gcuaccucgcugagacuga

SEQ ID NO: 2622626 - RNA, 19 nt, Artificial Sequence
  Description of Artificial Sequence: Synthetic oligonucleotide
ccggaaggccuugugcauc

SEQ ID NO: 2622627 - RNA, 19 nt, Artificial Sequence
  Description of Artificial Sequence: Synthetic oligonucleotide
cuguggggaaaacgccagu

SEQ ID NO: 2622628 - RNA, 19 nt, Artificial Sequence
  Description of Artificial Sequence: Synthetic oligonucleotide
cgaagauauucuugacacu

SEQ ID NO: 2622629 - RNA, 19 nt, Artificial Sequence
  Description of Artificial Sequence: Synthetic oligonucleotide
ggaaggccauuagaggauu

SEQ ID NO: 2622630 - RNA, 19 nt, Artificial Sequence
  Description of Artificial Sequence: Synthetic oligonucleotide
gggucaguagcugggcaau

SEQ ID NO: 2622631 - RNA, 19 nt, Artificial Sequence
  Description of Artificial Sequence: Synthetic oligonucleotide
cagggguuuccgugugaau

SEQ ID NO: 2622632 - RNA, 19 nt, Artificial Sequence
  Description of Artificial Sequence: Synthetic oligonucleotide
gagugucccggaaggccuu

SEQ ID NO: 2622633 - RNA, 19 nt, Artificial Sequence
  Description of Artificial Sequence: Synthetic oligonucleotide
gguuuccgugugaauggau

SEQ ID NO: 2622634 - RNA, 19 nt, Artificial Sequence
  Description of Artificial Sequence: Synthetic oligonucleotide
cgguuacuauuaguaagaa

SEQ ID NO: 2622635 - RNA, 19 nt, Artificial Sequence
  Description of Artificial Sequence: Synthetic oligonucleotide
cuaccucgcugagacugau

SEQ ID NO: 2622636 - RNA, 19 nt, Artificial Sequence
  Description of Artificial Sequence: Synthetic oligonucleotide
gugcauccucaugguggcu

SEQ ID NO: 2622637 - RNA, 19 nt, Artificial Sequence
  Description of Artificial Sequence: Synthetic oligonucleotide
cccggaaggccuugugcau

SEQ ID NO: 2622638 - RNA, 19 nt, Artificial Sequence
  Description of Artificial Sequence: Synthetic oligonucleotide
cgccaguggcugacaggua

SEQ ID NO: 2622639 - RNA, 19 nt, Artificial Sequence
  Description of Artificial Sequence: Synthetic oligonucleotide
  modified_base (1)..(1): a, c, u, g, unknown or other
nugcugacuaaagaaagua

SEQ ID NO: 2622640 - RNA, 19 nt, Artificial Sequence
  Description of Artificial Sequence: Synthetic oligonucleotide
aacauaauaggucacaacg

SEQ ID NO: 2622641 - RNA, 19 nt, Artificial Sequence
  Description of Artificial Sequence: Synthetic oligonucleotide
aagaaaucaacauaauagg

SEQ ID NO: 2622642 - RNA, 19 nt, Artificial Sequence
  Description of Artificial Sequence: Synthetic oligonucleotide
uaauaggucacaacgaugg

SEQ ID NO: 2622643 - RNA, 19 nt, Artificial Sequence
  Description of Artificial Sequence: Synthetic oligonucleotide
ugaaaguuuucuuugaagg

SEQ ID NO: 2622644 - RNA, 19 nt, Artificial Sequence
  Description of Artificial Sequence: Synthetic oligonucleotide
aagagaaagucauuuauuc

SEQ ID NO: 2622645 - RNA, 19 nt, Artificial Sequence
  Description of Artificial Sequence: Synthetic oligonucleotide
uaaaaugcaauugacaggc

SEQ ID NO: 2622646 - RNA, 19 nt, Artificial Sequence
  Description of Artificial Sequence: Synthetic oligonucleotide
aauguuaacucuuggaaga

SEQ ID NO: 2622647 - RNA, 19 nt, Artificial Sequence
  Description of Artificial Sequence: Synthetic oligonucleotide
uuugagaacacccaagaga

SEQ ID NO: 2622648 - RNA, 19 nt, Artificial Sequence
  Description of Artificial Sequence: Synthetic oligonucleotide
acacuauacaguaaaaugc

SEQ ID NO: 2622649 - RNA, 19 nt, Artificial Sequence
  Description of Artificial Sequence: Synthetic oligonucleotide
aaccacucacuucagagac

SEQ ID NO: 2622650 - RNA, 19 nt, Artificial Sequence
  Description of Artificial Sequence: Synthetic oligonucleotide
uuuucaacaguuguggagg

SEQ ID NO: 2622651 - RNA, 19 nt, Artificial Sequence
  Description of Artificial Sequence: Synthetic oligonucleotide
uaaaucguggacuuauccg

SEQ ID NO: 2622652 - RNA, 19 nt, Artificial Sequence
  Description of Artificial Sequence: Synthetic oligonucleotide
uucuuugaagguuuuaaag

SEQ ID NO: 2622653 - RNA, 19 nt, Artificial Sequence
  Description of Artificial Sequence: Synthetic oligonucleotide
aacgauggaugccaaaauc

SEQ ID NO: 2622654 - RNA, 19 nt, Artificial Sequence
  Description of Artificial Sequence: Synthetic oligonucleotide
gaauguuaacucuuggaag

SEQ ID NO: 2622655 - RNA, 19 nt, Artificial Sequence
  Description of Artificial Sequence: Synthetic oligonucleotide
uugagaacacccaagagaa

SEQ ID NO: 2622656 - RNA, 19 nt, Artificial Sequence
  Description of Artificial Sequence: Synthetic oligonucleotide
acaauuuuccaugggaacc

SEQ ID NO: 2622657 - RNA, 19 nt, Artificial Sequence
  Description of Artificial Sequence: Synthetic oligonucleotide
aaaucguggacuuauccga

SEQ ID NO: 2622658 - RNA, 19 nt, Artificial Sequence
  Description of Artificial Sequence: Synthetic oligonucleotide
gaaggaaacagguaacgcc

SEQ ID NO: 2622659 - RNA, 19 nt, Artificial Sequence
  Description of Artificial Sequence: Synthetic oligonucleotide
uuccagauacacuauacag

SEQ ID NO: 2622660 - RNA, 19 nt, Artificial Sequence
  Description of Artificial Sequence: Synthetic oligonucleotide
uuaaaucguggacuuaucc

SEQ ID NO: 2622661 - RNA, 19 nt, Artificial Sequence
  Description of Artificial Sequence: Synthetic oligonucleotide
aaggaaacagguaacgccg

SEQ ID NO: 2622662 - RNA, 19 nt, Artificial Sequence
  Description of Artificial Sequence: Synthetic oligonucleotide
aaaugcaauugacaggcug

SEQ ID NO: 2622663 - RNA, 19 nt, Artificial Sequence
  Description of Artificial Sequence: Synthetic oligonucleotide
gacaccagcacacacuagg

SEQ ID NO: 2622664 - RNA, 19 nt, Artificial Sequence
  Description of Artificial Sequence: Synthetic oligonucleotide
ugaagcaaaucccugcugc

SEQ ID NO: 2622665 - RNA, 19 nt, Artificial Sequence
  Description of Artificial Sequence: Synthetic oligonucleotide
uaaauggucaucuucuuaa

SEQ ID NO: 2622666 - RNA, 19 nt, Artificial Sequence
  Description of Artificial Sequence: Synthetic oligonucleotide
acuaggauucuccuucacc

SEQ ID NO: 2622667 - RNA, 19 nt, Artificial Sequence
  Description of Artificial Sequence: Synthetic oligonucleotide
uccagaaugaauguuaacu

SEQ ID NO: 2622668 - RNA, 19 nt, Artificial Sequence
  Description of Artificial Sequence: Synthetic oligonucleotide
ugagaugaacaucacgacc

SEQ ID NO: 2622669 - RNA, 19 nt, Artificial Sequence
  Description of Artificial Sequence: Synthetic oligonucleotide
aagaaugaccacacguucc

SEQ ID NO: 2622670 - RNA, 19 nt, Artificial Sequence
  Description of Artificial Sequence: Synthetic oligonucleotide
aaacagguaacgccgucgg

SEQ ID NO: 2622671 - RNA, 19 nt, Artificial Sequence
  Description of Artificial Sequence: Synthetic oligonucleotide
uucggaaggaaacagguaa

SEQ ID NO: 2622672 - RNA, 19 nt, Artificial Sequence
  Description of Artificial Sequence: Synthetic oligonucleotide
acgauaccauuccagauac

SEQ ID NO: 2622673 - RNA, 19 nt, Artificial Sequence
  Description of Artificial Sequence: Synthetic oligonucleotide
gagaugaacaucacgaccc

SEQ ID NO: 2622674 - RNA, 19 nt, Artificial Sequence
  Description of Artificial Sequence: Synthetic oligonucleotide
uguuugagaacacccaaga

SEQ ID NO: 2622675 - RNA, 19 nt, Artificial Sequence
  Description of Artificial Sequence: Synthetic oligonucleotide
agugugaaaguuuucuuug

SEQ ID NO: 2622676 - RNA, 19 nt, Artificial Sequence
  Description of Artificial Sequence: Synthetic oligonucleotide
auauucuucaaucccacga

SEQ ID NO: 2622677 - RNA, 19 nt, Artificial Sequence
  Description of Artificial Sequence: Synthetic oligonucleotide
gaaaucaacauaauagguc

SEQ ID NO: 2622678 - RNA, 19 nt, Artificial Sequence
  Description of Artificial Sequence: Synthetic oligonucleotide
agugagaugaacaucacga

SEQ ID NO: 2622679 - RNA, 19 nt, Artificial Sequence
  Description of Artificial Sequence: Synthetic oligonucleotide
uccagauacacuauacagu

SEQ ID NO: 2622680 - RNA, 19 nt, Artificial Sequence
  Description of Artificial Sequence: Synthetic oligonucleotide
gaaaguugcaguugugaug

SEQ ID NO: 2622681 - RNA, 19 nt, Artificial Sequence
  Description of Artificial Sequence: Synthetic oligonucleotide
uuauucugauuucaacagc

SEQ ID NO: 2622682 - RNA, 19 nt, Artificial Sequence
  Description of Artificial Sequence: Synthetic oligonucleotide
aaacugcgugaacagcagc

SEQ ID NO: 2622683 - RNA, 19 nt, Artificial Sequence
  Description of Artificial Sequence: Synthetic oligonucleotide
ucuggcauuguccucgcag

SEQ ID NO: 2622684 - RNA, 19 nt, Artificial Sequence
  Description of Artificial Sequence: Synthetic oligonucleotide
agauacacuauacaguaaa

SEQ ID NO: 2622685 - RNA, 19 nt, Artificial Sequence
  Description of Artificial Sequence: Synthetic oligonucleotide
uaccauuccagauacacua

SEQ ID NO: 2622686 - RNA, 19 nt, Artificial Sequence
  Description of Artificial Sequence: Synthetic oligonucleotide
uuguuugagaacacccaag

SEQ ID NO: 2622687 - RNA, 19 nt, Artificial Sequence
  Description of Artificial Sequence: Synthetic oligonucleotide
acaguaaaaugcaauugac

SEQ ID NO: 2622688 - RNA, 19 nt, Artificial Sequence
  Description of Artificial Sequence: Synthetic oligonucleotide
ucacaauuuuccaugggaa

SEQ ID NO: 2622689 - RNA, 19 nt, Artificial Sequence
  Description of Artificial Sequence: Synthetic oligonucleotide
cacuuguuugagaacaccc

SEQ ID NO: 2622690 - RNA, 19 nt, Artificial Sequence
  Description of Artificial Sequence: Synthetic oligonucleotide
uuuguucacuuuaaauggu

SEQ ID NO: 2622691 - RNA, 19 nt, Artificial Sequence
  Description of Artificial Sequence: Synthetic oligonucleotide
acaaacagcaaggucccgc

SEQ ID NO: 2622692 - RNA, 19 nt, Artificial Sequence
  Description of Artificial Sequence: Synthetic oligonucleotide
aaugcaauugacaggcuga

SEQ ID NO: 2622693 - RNA, 19 nt, Artificial Sequence
  Description of Artificial Sequence: Synthetic oligonucleotide
agagaaagucauuuauucu

SEQ ID NO: 2622694 - RNA, 19 nt, Artificial Sequence
  Description of Artificial Sequence: Synthetic oligonucleotide
agaugaacaucacgacccc

SEQ ID NO: 2622695 - RNA, 19 nt, Artificial Sequence
  Description of Artificial Sequence: Synthetic oligonucleotide
uaaacugcgugaacagcag

SEQ ID NO: 2622696 - RNA, 19 nt, Artificial Sequence
  Description of Artificial Sequence: Synthetic oligonucleotide
gagugagaugaacaucacg

SEQ ID NO: 2622697 - RNA, 19 nt, Artificial Sequence
  Description of Artificial Sequence: Synthetic oligonucleotide
gaagaaugaccacacguuc

SEQ ID NO: 2622698 - RNA, 19 nt, Artificial Sequence
  Description of Artificial Sequence: Synthetic oligonucleotide
gguauuugacaucauauuc

SEQ ID NO: 2622699 - RNA, 19 nt, Artificial Sequence
  Description of Artificial Sequence: Synthetic oligonucleotide
uccagcaccgcuucggaag

SEQ ID NO: 2622700 - RNA, 19 nt, Artificial Sequence
  Description of Artificial Sequence: Synthetic oligonucleotide
gaaacagguaacgccgucg

SEQ ID NO: 2622701 - RNA, 19 nt, Artificial Sequence
  Description of Artificial Sequence: Synthetic oligonucleotide
agagaaaccagcuguuagu

SEQ ID NO: 2622702 - RNA, 19 nt, Artificial Sequence
  Description of Artificial Sequence: Synthetic oligonucleotide
agaaagucacaauuuucca

SEQ ID NO: 2622703 - RNA, 19 nt, Artificial Sequence
  Description of Artificial Sequence: Synthetic oligonucleotide
ucuuaaaucguggacuuau

SEQ ID NO: 2622704 - RNA, 19 nt, Artificial Sequence
  Description of Artificial Sequence: Synthetic oligonucleotide
ugaaaguugcaguugugau

SEQ ID NO: 2622705 - RNA, 19 nt, Artificial Sequence
  Description of Artificial Sequence: Synthetic oligonucleotide
cacacuaggauucuccuuc

SEQ ID NO: 2622706 - RNA, 19 nt, Artificial Sequence
  Description of Artificial Sequence: Synthetic oligonucleotide
cauuccagauacacuauac

SEQ ID NO: 2622707 - RNA, 19 nt, Artificial Sequence
  Description of Artificial Sequence: Synthetic oligonucleotide
augaccacacguuccacag

SEQ ID NO: 2622708 - RNA, 19 nt, Artificial Sequence
  Description of Artificial Sequence: Synthetic oligonucleotide
agaaaucaacauaauaggu

SEQ ID NO: 2622709 - RNA, 19 nt, Artificial Sequence
  Description of Artificial Sequence: Synthetic oligonucleotide
ucacuucagagacaccagc

SEQ ID NO: 2622710 - RNA, 19 nt, Artificial Sequence
  Description of Artificial Sequence: Synthetic oligonucleotide
augccaaaauccagaaucc

SEQ ID NO: 2622711 - RNA, 19 nt, Artificial Sequence
  Description of Artificial Sequence: Synthetic oligonucleotide
auaaacugcgugaacagca

SEQ ID NO: 2622712 - RNA, 19 nt, Artificial Sequence
  Description of Artificial Sequence: Synthetic oligonucleotide
ggaaccacucacuucagag

SEQ ID NO: 2622713 - RNA, 19 nt, Artificial Sequence
  Description of Artificial Sequence: Synthetic oligonucleotide
auuccagauacacuauaca

SEQ ID NO: 2622714 - RNA, 19 nt, Artificial Sequence
  Description of Artificial Sequence: Synthetic oligonucleotide
acucacuucagagacacca

SEQ ID NO: 2622715 - RNA, 19 nt, Artificial Sequence
  Description of Artificial Sequence: Synthetic oligonucleotide
agaaugaccacacguucca

SEQ ID NO: 2622716 - RNA, 19 nt, Artificial Sequence
  Description of Artificial Sequence: Synthetic oligonucleotide
aggucacaacgauggaugc

SEQ ID NO: 2622717 - RNA, 19 nt, Artificial Sequence
  Description of Artificial Sequence: Synthetic oligonucleotide
aauuuuccaugggaaccac

SEQ ID NO: 2622718 - RNA, 19 nt, Artificial Sequence
  Description of Artificial Sequence: Synthetic oligonucleotide
aggagugagaugaacauca

SEQ ID NO: 2622719 - RNA, 19 nt, Artificial Sequence
  Description of Artificial Sequence: Synthetic oligonucleotide
uggacuuauccgaggagug

SEQ ID NO: 2622720 - RNA, 19 nt, Artificial Sequence
  Description of Artificial Sequence: Synthetic oligonucleotide
agugaagaaugaccacacg

SEQ ID NO: 2622721 - RNA, 19 nt, Artificial Sequence
  Description of Artificial Sequence: Synthetic oligonucleotide
aguugcaguugugaugggc

SEQ ID NO: 2622722 - RNA, 19 nt, Artificial Sequence
  Description of Artificial Sequence: Synthetic oligonucleotide
guuugagaacacccaagag

SEQ ID NO: 2622723 - RNA, 19 nt, Artificial Sequence
  Description of Artificial Sequence: Synthetic oligonucleotide
caaacagcaaggucccgcc

SEQ ID NO: 2622724 - RNA, 19 nt, Artificial Sequence
  Description of Artificial Sequence: Synthetic oligonucleotide
gacuuauccgaggagugag

SEQ ID NO: 2622725 - RNA, 19 nt, Artificial Sequence
  Description of Artificial Sequence: Synthetic oligonucleotide
acagguaacgccgucggag

SEQ ID NO: 2622726 - RNA, 19 nt, Artificial Sequence
  Description of Artificial Sequence: Synthetic oligonucleotide
gagaaaccagcuguuagug

SEQ ID NO: 2622727 - RNA, 19 nt, Artificial Sequence
  Description of Artificial Sequence: Synthetic oligonucleotide
aauaggucacaacgaugga

SEQ ID NO: 2622728 - RNA, 19 nt, Artificial Sequence
  Description of Artificial Sequence: Synthetic oligonucleotide
agucacaauuuuccauggg

SEQ ID NO: 2622729 - RNA, 19 nt, Artificial Sequence
  Description of Artificial Sequence: Synthetic oligonucleotide
agauuuagaaagucacaau

SEQ ID NO: 2622730 - RNA, 19 nt, Artificial Sequence
  Description of Artificial Sequence: Synthetic oligonucleotide
agcguuggguauuugacau

SEQ ID NO: 2622731 - RNA, 19 nt, Artificial Sequence
  Description of Artificial Sequence: Synthetic oligonucleotide
ucaacauaauaggucacaa

SEQ ID NO: 2622732 - RNA, 19 nt, Artificial Sequence
  Description of Artificial Sequence: Synthetic oligonucleotide
aacagcaaggucccgccaa

SEQ ID NO: 2622733 - RNA, 19 nt, Artificial Sequence
  Description of Artificial Sequence: Synthetic oligonucleotide
uugaagcaaaucccugcug

SEQ ID NO: 2622734 - RNA, 19 nt, Artificial Sequence
  Description of Artificial Sequence: Synthetic oligonucleotide
uuucaacaguuguggaggc

SEQ ID NO: 2622735 - RNA, 19 nt, Artificial Sequence
  Description of Artificial Sequence: Synthetic oligonucleotide
agcuggauacuuuguucac

SEQ ID NO: 2622736 - RNA, 19 nt, Artificial Sequence
  Description of Artificial Sequence: Synthetic oligonucleotide
caacauaauaggucacaac

SEQ ID NO: 2622737 - RNA, 19 nt, Artificial Sequence
  Description of Artificial Sequence: Synthetic oligonucleotide
uucacuuuaaauggucauc

SEQ ID NO: 2622738 - RNA, 19 nt, Artificial Sequence
  Description of Artificial Sequence: Synthetic oligonucleotide
uucaaucccacgauaccau

SEQ ID NO: 2622739 - RNA, 19 nt, Artificial Sequence
  Description of Artificial Sequence: Synthetic oligonucleotide
auccagaaugaauguuaac

SEQ ID NO: 2622740 - RNA, 19 nt, Artificial Sequence
  Description of Artificial Sequence: Synthetic oligonucleotide
caguaaaaugcaauugaca

SEQ ID NO: 2622741 - RNA, 19 nt, Artificial Sequence
  Description of Artificial Sequence: Synthetic oligonucleotide
uuggguauuugacaucaua

SEQ ID NO: 2622742 - RNA, 19 nt, Artificial Sequence
  Description of Artificial Sequence: Synthetic oligonucleotide
aauccagaauccagaauga

SEQ ID NO: 2622743 - RNA, 19 nt, Artificial Sequence
  Description of Artificial Sequence: Synthetic oligonucleotide
aacugcgugaacagcagca

SEQ ID NO: 2622744 - RNA, 19 nt, Artificial Sequence
  Description of Artificial Sequence: Synthetic oligonucleotide
gcugcaaugaaaguugcag

SEQ ID NO: 2622745 - RNA, 19 nt, Artificial Sequence
  Description of Artificial Sequence: Synthetic oligonucleotide
augaaaguugcaguuguga

SEQ ID NO: 2622746 - RNA, 19 nt, Artificial Sequence
  Description of Artificial Sequence: Synthetic oligonucleotide
ucggaaggaaacagguaac

SEQ ID NO: 2622747 - RNA, 19 nt, Artificial Sequence
  Description of Artificial Sequence: Synthetic oligonucleotide
aggauucuccuucaccuca

SEQ ID NO: 2622748 - RNA, 19 nt, Artificial Sequence
  Description of Artificial Sequence: Synthetic oligonucleotide
auacacuauacaguaaaau

SEQ ID NO: 2622749 - RNA, 19 nt, Artificial Sequence
  Description of Artificial Sequence: Synthetic oligonucleotide
aaucguggacuuauccgag

SEQ ID NO: 2622750 - RNA, 19 nt, Artificial Sequence
  Description of Artificial Sequence: Synthetic oligonucleotide
auaauaggucacaacgaug

SEQ ID NO: 2622751 - RNA, 19 nt, Artificial Sequence
  Description of Artificial Sequence: Synthetic oligonucleotide
aauccagaaugaauguuaa

SEQ ID NO: 2622752 - RNA, 19 nt, Artificial Sequence
  Description of Artificial Sequence: Synthetic oligonucleotide
agaaagucauuuauucuga

SEQ ID NO: 2622753 - RNA, 19 nt, Artificial Sequence
  Description of Artificial Sequence: Synthetic oligonucleotide
acauaauaggucacaacga

SEQ ID NO: 2622754 - RNA, 19 nt, Artificial Sequence
  Description of Artificial Sequence: Synthetic oligonucleotide
uuaacucuuggaagagguc

SEQ ID NO: 2622755 - RNA, 19 nt, Artificial Sequence
  Description of Artificial Sequence: Synthetic oligonucleotide
aaugaaaguugcaguugug

SEQ ID NO: 2622756 - RNA, 19 nt, Artificial Sequence
  Description of Artificial Sequence: Synthetic oligonucleotide
cauaaacugcgugaacagc

SEQ ID NO: 2622757 - RNA, 19 nt, Artificial Sequence
  Description of Artificial Sequence: Synthetic oligonucleotide
cuaggauucuccuucaccu

SEQ ID NO: 2622758 - RNA, 19 nt, Artificial Sequence
  Description of Artificial Sequence: Synthetic oligonucleotide
accagcacacacuaggauu

SEQ ID NO: 2622759 - RNA, 19 nt, Artificial Sequence
  Description of Artificial Sequence: Synthetic oligonucleotide
acgccgucggagcugcucc

SEQ ID NO: 2622760 - RNA, 19 nt, Artificial Sequence
  Description of Artificial Sequence: Synthetic oligonucleotide
ccagcuguuagugugaaag

SEQ ID NO: 2622761 - RNA, 19 nt, Artificial Sequence
  Description of Artificial Sequence: Synthetic oligonucleotide
ucacuuguuugagaacacc

SEQ ID NO: 2622762 - RNA, 19 nt, Artificial Sequence
  Description of Artificial Sequence: Synthetic oligonucleotide
augcaauugacaggcugac

SEQ ID NO: 2622763 - RNA, 19 nt, Artificial Sequence
  Description of Artificial Sequence: Synthetic oligonucleotide
aucguggacuuauccgagg

SEQ ID NO: 2622764 - RNA, 19 nt, Artificial Sequence
  Description of Artificial Sequence: Synthetic oligonucleotide
gugagaugaacaucacgac

SEQ ID NO: 2622765 - RNA, 19 nt, Artificial Sequence
  Description of Artificial Sequence: Synthetic oligonucleotide
acaacgauggaugccaaaa

SEQ ID NO: 2622766 - RNA, 19 nt, Artificial Sequence
  Description of Artificial Sequence: Synthetic oligonucleotide
cagauuuagaaagucacaa

SEQ ID NO: 2622767 - RNA, 19 nt, Artificial Sequence
  Description of Artificial Sequence: Synthetic oligonucleotide
guauuugacaucauauucu

SEQ ID NO: 2622768 - RNA, 19 nt, Artificial Sequence
  Description of Artificial Sequence: Synthetic oligonucleotide
uuauccgaggagugagaug

SEQ ID NO: 2622769 - RNA, 19 nt, Artificial Sequence
  Description of Artificial Sequence: Synthetic oligonucleotide
cuuaaaucguggacuuauc

SEQ ID NO: 2622770 - RNA, 19 nt, Artificial Sequence
  Description of Artificial Sequence: Synthetic oligonucleotide
ucaacaguuguggaggcuu

SEQ ID NO: 2622771 - RNA, 19 nt, Artificial Sequence
  Description of Artificial Sequence: Synthetic oligonucleotide
gucacaacgauggaugcca

SEQ ID NO: 2622772 - RNA, 19 nt, Artificial Sequence
  Description of Artificial Sequence: Synthetic oligonucleotide
uguuagugugaaaguuuuc

SEQ ID NO: 2622773 - RNA, 19 nt, Artificial Sequence
  Description of Artificial Sequence: Synthetic oligonucleotide
ccugcugcaaugaaaguug

SEQ ID NO: 2622774 - RNA, 19 nt, Artificial Sequence
  Description of Artificial Sequence: Synthetic oligonucleotide
aaaucccugcugcaaugaa

SEQ ID NO: 2622775 - RNA, 19 nt, Artificial Sequence
  Description of Artificial Sequence: Synthetic oligonucleotide
uggaagaggucucuccuuu

SEQ ID NO: 2622776 - RNA, 19 nt, Artificial Sequence
  Description of Artificial Sequence: Synthetic oligonucleotide
agaaaccagcuguuagugu

SEQ ID NO: 2622777 - RNA, 19 nt, Artificial Sequence
  Description of Artificial Sequence: Synthetic oligonucleotide
gcaaggucccgccaaagag

SEQ ID NO: 2622778 - RNA, 19 nt, Artificial Sequence
  Description of Artificial Sequence: Synthetic oligonucleotide
aaagagaaaccagcuguua

SEQ ID NO: 2622779 - RNA, 19 nt, Artificial Sequence
  Description of Artificial Sequence: Synthetic oligonucleotide
acuuguuugagaacaccca

SEQ ID NO: 2622780 - RNA, 19 nt, Artificial Sequence
  Description of Artificial Sequence: Synthetic oligonucleotide
auguuaacucuuggaagag

SEQ ID NO: 2622781 - RNA, 19 nt, Artificial Sequence
  Description of Artificial Sequence: Synthetic oligonucleotide
caaaauccagaauccagaa

SEQ ID NO: 2622782 - RNA, 19 nt, Artificial Sequence
  Description of Artificial Sequence: Synthetic oligonucleotide
cagguaacgccgucggagc

SEQ ID NO: 2622783 - RNA, 19 nt, Artificial Sequence
  Description of Artificial Sequence: Synthetic oligonucleotide
caaucccacgauaccauuc

SEQ ID NO: 2622784 - RNA, 19 nt, Artificial Sequence
  Description of Artificial Sequence: Synthetic oligonucleotide
cuuguuugagaacacccaa

SEQ ID NO: 2622785 - RNA, 19 nt, Artificial Sequence
  Description of Artificial Sequence: Synthetic oligonucleotide
acacccaagagaaagucau

SEQ ID NO: 2622786 - RNA, 19 nt, Artificial Sequence
  Description of Artificial Sequence: Synthetic oligonucleotide
auacuuuguucacuuuaaa

SEQ ID NO: 2622787 - RNA, 19 nt, Artificial Sequence
  Description of Artificial Sequence: Synthetic oligonucleotide
guuguggaggcuucugguc

SEQ ID NO: 2622788 - RNA, 19 nt, Artificial Sequence
  Description of Artificial Sequence: Synthetic oligonucleotide
cagaaugaauguuaacucu

SEQ ID NO: 2622789 - RNA, 19 nt, Artificial Sequence
  Description of Artificial Sequence: Synthetic oligonucleotide
aacagguaacgccgucgga

SEQ ID NO: 2622790 - RNA, 19 nt, Artificial Sequence
  Description of Artificial Sequence: Synthetic oligonucleotide
acacguuccacagcgccag

SEQ ID NO: 2622791 - RNA, 19 nt, Artificial Sequence
  Description of Artificial Sequence: Synthetic oligonucleotide
agcaaggucccgccaaaga

SEQ ID NO: 2622792 - RNA, 19 nt, Artificial Sequence
  Description of Artificial Sequence: Synthetic oligonucleotide
aaaccagcuguuaguguga

SEQ ID NO: 2622793 - RNA, 19 nt, Artificial Sequence
  Description of Artificial Sequence: Synthetic oligonucleotide
caccgcuucggaaggaaac

SEQ ID NO: 2622794 - RNA, 19 nt, Artificial Sequence
  Description of Artificial Sequence: Synthetic oligonucleotide
ccauaaacugcgugaacag

SEQ ID NO: 2622795 - RNA, 19 nt, Artificial Sequence
  Description of Artificial Sequence: Synthetic oligonucleotide
aaucccugcugcaaugaaa

SEQ ID NO: 2622796 - RNA, 19 nt, Artificial Sequence
  Description of Artificial Sequence: Synthetic oligonucleotide
ggucccgccaaagagaaac

SEQ ID NO: 2622797 - RNA, 19 nt, Artificial Sequence
  Description of Artificial Sequence: Synthetic oligonucleotide
aaggucccgccaaagagaa

SEQ ID NO: 2622798 - RNA, 19 nt, Artificial Sequence
  Description of Artificial Sequence: Synthetic oligonucleotide
cauaauaggucacaacgau

SEQ ID NO: 2622799 - RNA, 19 nt, Artificial Sequence
  Description of Artificial Sequence: Synthetic oligonucleotide
aagcaaaucccugcugcaa

SEQ ID NO: 2622800 - RNA, 19 nt, Artificial Sequence
  Description of Artificial Sequence: Synthetic oligonucleotide
uaggauucuccuucaccuc

SEQ ID NO: 2622801 - RNA, 19 nt, Artificial Sequence
  Description of Artificial Sequence: Synthetic oligonucleotide
caauuuuccaugggaacca

SEQ ID NO: 2622802 - RNA, 19 nt, Artificial Sequence
  Description of Artificial Sequence: Synthetic oligonucleotide
ugaccacacguuccacagc

SEQ ID NO: 2622803 - RNA, 19 nt, Artificial Sequence
  Description of Artificial Sequence: Synthetic oligonucleotide
caaugaaaguugcaguugu

SEQ ID NO: 2622804 - RNA, 19 nt, Artificial Sequence
  Description of Artificial Sequence: Synthetic oligonucleotide
caagggagugaagaaugac

SEQ ID NO: 2622805 - RNA, 19 nt, Artificial Sequence
  Description of Artificial Sequence: Synthetic oligonucleotide
aacaguuguggaggcuucu

SEQ ID NO: 2622806 - RNA, 19 nt, Artificial Sequence
  Description of Artificial Sequence: Synthetic oligonucleotide
agaacacccaagagaaagu

SEQ ID NO: 2622807 - RNA, 19 nt, Artificial Sequence
  Description of Artificial Sequence: Synthetic oligonucleotide
acuauacaguaaaaugcaa

SEQ ID NO: 2622808 - RNA, 19 nt, Artificial Sequence
  Description of Artificial Sequence: Synthetic oligonucleotide
agcuguuagugugaaaguu

SEQ ID NO: 2622809 - RNA, 19 nt, Artificial Sequence
  Description of Artificial Sequence: Synthetic oligonucleotide
ggauacuuuguucacuuua

SEQ ID NO: 2622810 - RNA, 19 nt, Artificial Sequence
  Description of Artificial Sequence: Synthetic oligonucleotide
cacgauaccauuccagaua

SEQ ID NO: 2622811 - RNA, 19 nt, Artificial Sequence
  Description of Artificial Sequence: Synthetic oligonucleotide
aaaaugcaauugacaggcu

SEQ ID NO: 2622812 - RNA, 19 nt, Artificial Sequence
  Description of Artificial Sequence: Synthetic oligonucleotide
ccagauacacuauacagua

SEQ ID NO: 2622813 - RNA, 19 nt, Artificial Sequence
  Description of Artificial Sequence: Synthetic oligonucleotide
ccgccaaagagaaaccagc

SEQ ID NO: 2622814 - RNA, 19 nt, Artificial Sequence
  Description of Artificial Sequence: Synthetic oligonucleotide
auaccauuccagauacacu

SEQ ID NO: 2622815 - RNA, 19 nt, Artificial Sequence
  Description of Artificial Sequence: Synthetic oligonucleotide
gaggagugagaugaacauc

SEQ ID NO: 2622816 - RNA, 19 nt, Artificial Sequence
  Description of Artificial Sequence: Synthetic oligonucleotide
acacuaggauucuccuuca

SEQ ID NO: 2622817 - RNA, 19 nt, Artificial Sequence
  Description of Artificial Sequence: Synthetic oligonucleotide
gcacaagcuggauacuuug

SEQ ID NO: 2622818 - RNA, 19 nt, Artificial Sequence
  Description of Artificial Sequence: Synthetic oligonucleotide
cuucuggucuggcauuguc

SEQ ID NO: 2622819 - RNA, 19 nt, Artificial Sequence
  Description of Artificial Sequence: Synthetic oligonucleotide
uggcauuguccucgcaguc

SEQ ID NO: 2622820 - RNA, 19 nt, Artificial Sequence
  Description of Artificial Sequence: Synthetic oligonucleotide
ugcaauugacaggcugaca

SEQ ID NO: 2622821 - RNA, 19 nt, Artificial Sequence
  Description of Artificial Sequence: Synthetic oligonucleotide
ccagcguuggguauuugac

SEQ ID NO: 2622822 - RNA, 19 nt, Artificial Sequence
  Description of Artificial Sequence: Synthetic oligonucleotide
acggagcauccaucucggc

SEQ ID NO: 2622823 - RNA, 19 nt, Artificial Sequence
  Description of Artificial Sequence: Synthetic oligonucleotide
uucaacaguuguggaggcu

SEQ ID NO: 2622824 - RNA, 19 nt, Artificial Sequence
  Description of Artificial Sequence: Synthetic oligonucleotide
caacaguuguggaggcuuc

SEQ ID NO: 2622825 - RNA, 19 nt, Artificial Sequence
  Description of Artificial Sequence: Synthetic oligonucleotide
uccgaggagugagaugaac

SEQ ID NO: 2622826 - RNA, 19 nt, Artificial Sequence
  Description of Artificial Sequence: Synthetic oligonucleotide
agguugaagcaaaucccug

SEQ ID NO: 2622827 - RNA, 19 nt, Artificial Sequence
  Description of Artificial Sequence: Synthetic oligonucleotide
gcaaaucccugcugcaaug

SEQ ID NO: 2622828 - RNA, 19 nt, Artificial Sequence
  Description of Artificial Sequence: Synthetic oligonucleotide
aguccagcaccgcuucgga

SEQ ID NO: 2622829 - RNA, 19 nt, Artificial Sequence
  Description of Artificial Sequence: Synthetic oligonucleotide
gaggcuucuggucuggcau

SEQ ID NO: 2622830 - RNA, 19 nt, Artificial Sequence
  Description of Artificial Sequence: Synthetic oligonucleotide
guucacuuuaaauggucau

SEQ ID NO: 2622831 - RNA, 19 nt, Artificial Sequence
  Description of Artificial Sequence: Synthetic oligonucleotide
guaacgccgucggagcugc

SEQ ID NO: 2622832 - RNA, 19 nt, Artificial Sequence
  Description of Artificial Sequence: Synthetic oligonucleotide
ucacaacgauggaugccaa

SEQ ID NO: 2622833 - RNA, 19 nt, Artificial Sequence
  Description of Artificial Sequence: Synthetic oligonucleotide
acacacuaggauucuccuu

SEQ ID NO: 2622834 - RNA, 19 nt, Artificial Sequence
  Description of Artificial Sequence: Synthetic oligonucleotide
cagcguuggguauuugaca

SEQ ID NO: 2622835 - RNA, 19 nt, Artificial Sequence
  Description of Artificial Sequence: Synthetic oligonucleotide
cagguugaagcaaaucccu

SEQ ID NO: 2622836 - RNA, 19 nt, Artificial Sequence
  Description of Artificial Sequence: Synthetic oligonucleotide
cuuggaagaggucucuccu

SEQ ID NO: 2622837 - RNA, 19 nt, Artificial Sequence
  Description of Artificial Sequence: Synthetic oligonucleotide
agguaacgccgucggagcu

SEQ ID NO: 2622838 - RNA, 19 nt, Artificial Sequence
  Description of Artificial Sequence: Synthetic oligonucleotide
caauugacaggcugacaaa

SEQ ID NO: 2622839 - RNA, 19 nt, Artificial Sequence
  Description of Artificial Sequence: Synthetic oligonucleotide
ugggcaccagcguugggua

SEQ ID NO: 2622840 - RNA, 19 nt, Artificial Sequence
  Description of Artificial Sequence: Synthetic oligonucleotide
gaaugaccacacguuccac

SEQ ID NO: 2622841 - RNA, 19 nt, Artificial Sequence
  Description of Artificial Sequence: Synthetic oligonucleotide
aucccacgauaccauucca

SEQ ID NO: 2622842 - RNA, 19 nt, Artificial Sequence
  Description of Artificial Sequence: Synthetic oligonucleotide
cuguuagugugaaaguuuu

SEQ ID NO: 2622843 - RNA, 19 nt, Artificial Sequence
  Description of Artificial Sequence: Synthetic oligonucleotide
aaccagcuguuagugugaa

SEQ ID NO: 2622844 - RNA, 19 nt, Artificial Sequence
  Description of Artificial Sequence: Synthetic oligonucleotide
ucgcaguccagcaccgcuu

SEQ ID NO: 2622845 - RNA, 19 nt, Artificial Sequence
  Description of Artificial Sequence: Synthetic oligonucleotide
ccacacguuccacagcgcc

SEQ ID NO: 2622846 - RNA, 19 nt, Artificial Sequence
  Description of Artificial Sequence: Synthetic oligonucleotide
guggacuuauccgaggagu

SEQ ID NO: 2622847 - RNA, 19 nt, Artificial Sequence
  Description of Artificial Sequence: Synthetic oligonucleotide
uucuuaaaucguggacuua

SEQ ID NO: 2622848 - RNA, 19 nt, Artificial Sequence
  Description of Artificial Sequence: Synthetic oligonucleotide
cccauaaacugcgugaaca

SEQ ID NO: 2622849 - RNA, 19 nt, Artificial Sequence
  Description of Artificial Sequence: Synthetic oligonucleotide
uggcacaagcuggauacuu

SEQ ID NO: 2622850 - RNA, 19 nt, Artificial Sequence
  Description of Artificial Sequence: Synthetic oligonucleotide
cacacguuccacagcgcca

SEQ ID NO: 2622851 - RNA, 19 nt, Artificial Sequence
  Description of Artificial Sequence: Synthetic oligonucleotide
cacuaggauucuccuucac

SEQ ID NO: 2622852 - RNA, 19 nt, Artificial Sequence
  Description of Artificial Sequence: Synthetic oligonucleotide
acugcgugaacagcagcaa

SEQ ID NO: 2622853 - RNA, 19 nt, Artificial Sequence
  Description of Artificial Sequence: Synthetic oligonucleotide
accacacguuccacagcgc

SEQ ID NO: 2622854 - RNA, 19 nt, Artificial Sequence
  Description of Artificial Sequence: Synthetic oligonucleotide
auccagaauccagaaugaa

SEQ ID NO: 2622855 - RNA, 19 nt, Artificial Sequence
  Description of Artificial Sequence: Synthetic oligonucleotide
gcauuguccucgcagucca

SEQ ID NO: 2622856 - RNA, 19 nt, Artificial Sequence
  Description of Artificial Sequence: Synthetic oligonucleotide
acuuauccgaggagugaga

SEQ ID NO: 2622857 - RNA, 19 nt, Artificial Sequence
  Description of Artificial Sequence: Synthetic oligonucleotide
cuucggaaggaaacaggua

SEQ ID NO: 2622858 - RNA, 19 nt, Artificial Sequence
  Description of Artificial Sequence: Synthetic oligonucleotide
cagauacacuauacaguaa

SEQ ID NO: 2622859 - RNA, 19 nt, Artificial Sequence
  Description of Artificial Sequence: Synthetic oligonucleotide
ggucacaacgauggaugcc

SEQ ID NO: 2622860 - RNA, 19 nt, Artificial Sequence
  Description of Artificial Sequence: Synthetic oligonucleotide
aggaaacagguaacgccgu

SEQ ID NO: 2622861 - RNA, 19 nt, Artificial Sequence
  Description of Artificial Sequence: Synthetic oligonucleotide
cacacacuaggauucuccu

SEQ ID NO: 2622862 - RNA, 19 nt, Artificial Sequence
  Description of Artificial Sequence: Synthetic oligonucleotide
cggaaggaaacagguaacg

SEQ ID NO: 2622863 - RNA, 19 nt, Artificial Sequence
  Description of Artificial Sequence: Synthetic oligonucleotide
ggaaacagguaacgccguc

SEQ ID NO: 2622864 - RNA, 19 nt, Artificial Sequence
  Description of Artificial Sequence: Synthetic oligonucleotide
ccgaggagugagaugaaca

SEQ ID NO: 2622865 - RNA, 19 nt, Artificial Sequence
  Description of Artificial Sequence: Synthetic oligonucleotide
cacucacuucagagacacc

SEQ ID NO: 2622866 - RNA, 19 nt, Artificial Sequence
  Description of Artificial Sequence: Synthetic oligonucleotide
agcccacggagcauccauc

SEQ ID NO: 2622867 - RNA, 19 nt, Artificial Sequence
  Description of Artificial Sequence: Synthetic oligonucleotide
agcgccagguugaagcaaa

SEQ ID NO: 2622868 - RNA, 19 nt, Artificial Sequence
  Description of Artificial Sequence: Synthetic oligonucleotide
ggguauuugacaucauauu

SEQ ID NO: 2622869 - RNA, 19 nt, Artificial Sequence
  Description of Artificial Sequence: Synthetic oligonucleotide
cgcuucggaaggaaacagg

SEQ ID NO: 2622870 - RNA, 19 nt, Artificial Sequence
  Description of Artificial Sequence: Synthetic oligonucleotide
gguaacgccgucggagcug

SEQ ID NO: 2622871 - RNA, 19 nt, Artificial Sequence
  Description of Artificial Sequence: Synthetic oligonucleotide
gcuucggaaggaaacaggu

SEQ ID NO: 2622872 - RNA, 19 nt, Artificial Sequence
  Description of Artificial Sequence: Synthetic oligonucleotide
cuuauccgaggagugagau

SEQ ID NO: 2622873 - RNA, 19 nt, Artificial Sequence
  Description of Artificial Sequence: Synthetic oligonucleotide
ggacuuauccgaggaguga

SEQ ID NO: 2622874 - RNA, 19 nt, Artificial Sequence
  Description of Artificial Sequence: Synthetic oligonucleotide
cacaacgauggaugccaaa

SEQ ID NO: 2622875 - RNA, 19 nt, Artificial Sequence
  Description of Artificial Sequence: Synthetic oligonucleotide
cacguuccacagcgccagg

SEQ ID NO: 2622876 - RNA, 19 nt, Artificial Sequence
  Description of Artificial Sequence: Synthetic oligonucleotide
agcaccgcuucggaaggaa

SEQ ID NO: 2622877 - RNA, 19 nt, Artificial Sequence
  Description of Artificial Sequence: Synthetic oligonucleotide
accagcuguuagugugaaa

SEQ ID NO: 2622878 - RNA, 19 nt, Artificial Sequence
  Description of Artificial Sequence: Synthetic oligonucleotide
ggagugagaugaacaucac

SEQ ID NO: 2622879 - RNA, 19 nt, Artificial Sequence
  Description of Artificial Sequence: Synthetic oligonucleotide
cugauuucaacagcagauu

SEQ ID NO: 2622880 - RNA, 19 nt, Artificial Sequence
  Description of Artificial Sequence: Synthetic oligonucleotide
cagcuguuagugugaaagu

SEQ ID NO: 2622881 - RNA, 19 nt, Artificial Sequence
  Description of Artificial Sequence: Synthetic oligonucleotide
caacgauggaugccaaaau

SEQ ID NO: 2622882 - RNA, 19 nt, Artificial Sequence
  Description of Artificial Sequence: Synthetic oligonucleotide
gagcccacggagcauccau

SEQ ID NO: 2622883 - RNA, 19 nt, Artificial Sequence
  Description of Artificial Sequence: Synthetic oligonucleotide
gcaguccagcaccgcuucg

SEQ ID NO: 2622884 - RNA, 19 nt, Artificial Sequence
  Description of Artificial Sequence: Synthetic oligonucleotide
gcaagggagugaagaauga

SEQ ID NO: 2622885 - RNA, 19 nt, Artificial Sequence
  Description of Artificial Sequence: Synthetic oligonucleotide
cucgcaguccagcaccgcu

SEQ ID NO: 2622886 - RNA, 19 nt, Artificial Sequence
  Description of Artificial Sequence: Synthetic oligonucleotide
acaggcugacaaacagcaa

SEQ ID NO: 2622887 - RNA, 19 nt, Artificial Sequence
  Description of Artificial Sequence: Synthetic oligonucleotide
gcuguuagugugaaaguuu

SEQ ID NO: 2622888 - RNA, 19 nt, Artificial Sequence
  Description of Artificial Sequence: Synthetic oligonucleotide
guccagcaccgcuucggaa

SEQ ID NO: 2622889 - RNA, 19 nt, Artificial Sequence
  Description of Artificial Sequence: Synthetic oligonucleotide
ccgcuucggaaggaaacag

SEQ ID NO: 2622890 - RNA, 19 nt, Artificial Sequence
  Description of Artificial Sequence: Synthetic oligonucleotide
gcguuggguauuugacauc

SEQ ID NO: 2622891 - RNA, 19 nt, Artificial Sequence
  Description of Artificial Sequence: Synthetic oligonucleotide
gcuggauacuuuguucacu

SEQ ID NO: 2622892 - RNA, 19 nt, Artificial Sequence
  Description of Artificial Sequence: Synthetic oligonucleotide
ccccauaaacugcgugaac

SEQ ID NO: 2622893 - RNA, 19 nt, Artificial Sequence
  Description of Artificial Sequence: Synthetic oligonucleotide
gccgucggagcugcucccg

SEQ ID NO: 2622894 - RNA, 19 nt, Artificial Sequence
  Description of Artificial Sequence: Synthetic oligonucleotide
uaacgccgucggagcugcu

SEQ ID NO: 2622895 - RNA, 19 nt, Artificial Sequence
  Description of Artificial Sequence: Synthetic oligonucleotide
gcccacggagcauccaucu

SEQ ID NO: 2622896 - RNA, 19 nt, Artificial Sequence
  Description of Artificial Sequence: Synthetic oligonucleotide
cgaggagugagaugaacau

SEQ ID NO: 2622897 - RNA, 19 nt, Artificial Sequence
  Description of Artificial Sequence: Synthetic oligonucleotide
ccgagcccacggagcaucc

SEQ ID NO: 2622898 - RNA, 19 nt, Artificial Sequence
  Description of Artificial Sequence: Synthetic oligonucleotide
ucccgagcccacggagcau

SEQ ID NO: 2622899 - RNA, 19 nt, Artificial Sequence
  Description of Artificial Sequence: Synthetic oligonucleotide
cacccaagagaaagucauu

SEQ ID NO: 2622900 - RNA, 19 nt, Artificial Sequence
  Description of Artificial Sequence: Synthetic oligonucleotide
auccgaggagugagaugaa

SEQ ID NO: 2622901 - RNA, 19 nt, Artificial Sequence
  Description of Artificial Sequence: Synthetic oligonucleotide
cgugaacagcagcaaggga

SEQ ID NO: 2622902 - RNA, 19 nt, Artificial Sequence
  Description of Artificial Sequence: Synthetic oligonucleotide
ccacgauaccauuccagau

SEQ ID NO: 2622903 - RNA, 19 nt, Artificial Sequence
  Description of Artificial Sequence: Synthetic oligonucleotide
cccgagcccacggagcauc

SEQ ID NO: 2622904 - RNA, 19 nt, Artificial Sequence
  Description of Artificial Sequence: Synthetic oligonucleotide
ggcacaagcuggauacuuu

SEQ ID NO: 2622905 - RNA, 19 nt, Artificial Sequence
  Description of Artificial Sequence: Synthetic oligonucleotide
cagcgccagguugaagcaa

SEQ ID NO: 2622906 - RNA, 19 nt, Artificial Sequence
  Description of Artificial Sequence: Synthetic oligonucleotide
caccagcguuggguauuug

SEQ ID NO: 2622907 - RNA, 19 nt, Artificial Sequence
  Description of Artificial Sequence: Synthetic oligonucleotide
guggcacaagcuggauacu

SEQ ID NO: 2622908 - RNA, 19 nt, Artificial Sequence
  Description of Artificial Sequence: Synthetic oligonucleotide
gcaccgcuucggaaggaaa

SEQ ID NO: 2622909 - RNA, 19 nt, Artificial Sequence
  Description of Artificial Sequence: Synthetic oligonucleotide
aggucccgccaaagagaaa

SEQ ID NO: 2622910 - RNA, 19 nt, Artificial Sequence
  Description of Artificial Sequence: Synthetic oligonucleotide
ccucgcaguccagcaccgc

SEQ ID NO: 2622911 - RNA, 19 nt, Artificial Sequence
  Description of Artificial Sequence: Synthetic oligonucleotide
cagcaccgcuucggaagga

SEQ ID NO: 2622912 - RNA, 19 nt, Artificial Sequence
  Description of Artificial Sequence: Synthetic oligonucleotide
ggcaccagcguuggguauu

SEQ ID NO: 2622913 - RNA, 19 nt, Artificial Sequence
  Description of Artificial Sequence: Synthetic oligonucleotide
cgauaccauuccagauaca

SEQ ID NO: 2622914 - RNA, 19 nt, Artificial Sequence
  Description of Artificial Sequence: Synthetic oligonucleotide
cgccgucggagcugcuccc

SEQ ID NO: 2622915 - RNA, 19 nt, Artificial Sequence
  Description of Artificial Sequence: Synthetic oligonucleotide
ccgucggagcugcucccga

SEQ ID NO: 2622916 - RNA, 19 nt, Artificial Sequence
  Description of Artificial Sequence: Synthetic oligonucleotide
gggcaccagcguuggguau

SEQ ID NO: 2622917 - RNA, 19 nt, Artificial Sequence
  Description of Artificial Sequence: Synthetic oligonucleotide
gcaccagcguuggguauuu

SEQ ID NO: 2622918 - RNA, 19 nt, Artificial Sequence
  Description of Artificial Sequence: Synthetic oligonucleotide
gcgccagguugaagcaaau

SEQ ID NO: 2622919 - RNA, 19 nt, Artificial Sequence
  Description of Artificial Sequence: Synthetic oligonucleotide
gaugaaaucucccagagua

SEQ ID NO: 2622920 - RNA, 19 nt, Artificial Sequence
  Description of Artificial Sequence: Synthetic oligonucleotide
ucuaccaugaaguccaugu

SEQ ID NO: 2622921 - RNA, 19 nt, Artificial Sequence
  Description of Artificial Sequence: Synthetic oligonucleotide
ugaguaggcaaguagaccu

SEQ ID NO: 2622922 - RNA, 19 nt, Artificial Sequence
  Description of Artificial Sequence: Synthetic oligonucleotide
uacuuguuguagaacagag

SEQ ID NO: 2622923 - RNA, 19 nt, Artificial Sequence
  Description of Artificial Sequence: Synthetic oligonucleotide
aguacggaacuccaacacc

SEQ ID NO: 2622924 - RNA, 19 nt, Artificial Sequence
  Description of Artificial Sequence: Synthetic oligonucleotide
ucgucuaccaugaagucca

SEQ ID NO: 2622925 - RNA, 19 nt, Artificial Sequence
  Description of Artificial Sequence: Synthetic oligonucleotide
uuguacaccacauggcccg

SEQ ID NO: 2622926 - RNA, 19 nt, Artificial Sequence
  Description of Artificial Sequence: Synthetic oligonucleotide
ugguauuugaccaccacgu

SEQ ID NO: 2622927 - RNA, 19 nt, Artificial Sequence
  Description of Artificial Sequence: Synthetic oligonucleotide
guugguaguguacacagcc

SEQ ID NO: 2622928 - RNA, 19 nt, Artificial Sequence
  Description of Artificial Sequence: Synthetic oligonucleotide
gagaguuggucacauagag

SEQ ID NO: 2622929 - RNA, 19 nt, Artificial Sequence
  Description of Artificial Sequence: Synthetic oligonucleotide
ugaaaucucccagaguacg

SEQ ID NO: 2622930 - RNA, 19 nt, Artificial Sequence
  Description of Artificial Sequence: Synthetic oligonucleotide
ugcaccaacacagaacgcg

SEQ ID NO: 2622931 - RNA, 19 nt, Artificial Sequence
  Description of Artificial Sequence: Synthetic oligonucleotide
gugagaguuggucacauag

SEQ ID NO: 2622932 - RNA, 19 nt, Artificial Sequence
  Description of Artificial Sequence: Synthetic oligonucleotide
gugucagucauccaggagc

SEQ ID NO: 2622933 - RNA, 19 nt, Artificial Sequence
  Description of Artificial Sequence: Synthetic oligonucleotide
uaauaaccauccauguacc

SEQ ID NO: 2622934 - RNA, 19 nt, Artificial Sequence
  Description of Artificial Sequence: Synthetic oligonucleotide
aaugguaaugggguuacug

SEQ ID NO: 2622935 - RNA, 19 nt, Artificial Sequence
  Description of Artificial Sequence: Synthetic oligonucleotide
gaccucacgaccuccaggg

SEQ ID NO: 2622936 - RNA, 19 nt, Artificial Sequence
  Description of Artificial Sequence: Synthetic oligonucleotide
  modified_base (16)..(16): a, c, u, g, unknown or other
gcaaguagaccuuggnucg

SEQ ID NO: 2622937 - RNA, 19 nt, Artificial Sequence
  Description of Artificial Sequence: Synthetic oligonucleotide
ugguugguaguguacacag

SEQ ID NO: 2622938 - RNA, 19 nt, Artificial Sequence
  Description of Artificial Sequence: Synthetic oligonucleotide
uuggugaguaggcaaguag

SEQ ID NO: 2622939 - RNA, 19 nt, Artificial Sequence
  Description of Artificial Sequence: Synthetic oligonucleotide
  modified_base (14)..(14): a, c, u, g, unknown or other
aaguagaccuuggnucggc

SEQ ID NO: 2622940 - RNA, 19 nt, Artificial Sequence
  Description of Artificial Sequence: Synthetic oligonucleotide
cugacaacgauguugccug

SEQ ID NO: 2622941 - RNA, 19 nt, Artificial Sequence
  Description of Artificial Sequence: Synthetic oligonucleotide
uaccaugaaguccaugucu

SEQ ID NO: 2622942 - RNA, 19 nt, Artificial Sequence
  Description of Artificial Sequence: Synthetic oligonucleotide
guaaugggguuacugaccc

SEQ ID NO: 2622943 - RNA, 19 nt, Artificial Sequence
  Description of Artificial Sequence: Synthetic oligonucleotide
gugguauuugaccaccacg

SEQ ID NO: 2622944 - RNA, 19 nt, Artificial Sequence
  Description of Artificial Sequence: Synthetic oligonucleotide
guuggucacauagaggacg

SEQ ID NO: 2622945 - RNA, 19 nt, Artificial Sequence
  Description of Artificial Sequence: Synthetic oligonucleotide
accaacacagaacgcgacc

SEQ ID NO: 2622946 - RNA, 19 nt, Artificial Sequence
  Description of Artificial Sequence: Synthetic oligonucleotide
ugaaguccaugucugagaa

SEQ ID NO: 2622947 - RNA, 19 nt, Artificial Sequence
  Description of Artificial Sequence: Synthetic oligonucleotide
guauuugaccaccacguug

SEQ ID NO: 2622948 - RNA, 19 nt, Artificial Sequence
  Description of Artificial Sequence: Synthetic oligonucleotide
  modified_base (19)..(19): a, c, u, g, unknown or other
uguacucguagcuggacgn

SEQ ID NO: 2622949 - RNA, 19 nt, Artificial Sequence
  Description of Artificial Sequence: Synthetic oligonucleotide
uguaauaaccauccaugua

SEQ ID NO: 2622950 - RNA, 19 nt, Artificial Sequence
  Description of Artificial Sequence: Synthetic oligonucleotide
ugguaguguacacagccca

SEQ ID NO: 2622951 - RNA, 19 nt, Artificial Sequence
  Description of Artificial Sequence: Synthetic oligonucleotide
  modified_base (11)..(11): a, c, u, g, unknown or other
uagaccuuggnucggccag

SEQ ID NO: 2622952 - RNA, 19 nt, Artificial Sequence
  Description of Artificial Sequence: Synthetic oligonucleotide
uuguuguagaacagagagc

SEQ ID NO: 2622953 - RNA, 19 nt, Artificial Sequence
  Description of Artificial Sequence: Synthetic oligonucleotide
aguguacacagcccacagc

SEQ ID NO: 2622954 - RNA, 19 nt, Artificial Sequence
  Description of Artificial Sequence: Synthetic oligonucleotide
accccugucagcuucccac

SEQ ID NO: 2622955 - RNA, 19 nt, Artificial Sequence
  Description of Artificial Sequence: Synthetic oligonucleotide
auaaccauccauguaccag

SEQ ID NO: 2622956 - RNA, 19 nt, Artificial Sequence
  Description of Artificial Sequence: Synthetic oligonucleotide
ugagaagcgccccaggaau

SEQ ID NO: 2622957 - RNA, 19 nt, Artificial Sequence
  Description of Artificial Sequence: Synthetic oligonucleotide
augguaaugggguuacuga

SEQ ID NO: 2622958 - RNA, 19 nt, Artificial Sequence
  Description of Artificial Sequence: Synthetic oligonucleotide
uuggucacauagaggacgc

SEQ ID NO: 2622959 - RNA, 19 nt, Artificial Sequence
  Description of Artificial Sequence: Synthetic oligonucleotide
uaguguacacagcccacag

SEQ ID NO: 2622960 - RNA, 19 nt, Artificial Sequence
  Description of Artificial Sequence: Synthetic oligonucleotide
auugugucagucauccagg

SEQ ID NO: 2622961 - RNA, 19 nt, Artificial Sequence
  Description of Artificial Sequence: Synthetic oligonucleotide
ccauccauguaccagaccc

SEQ ID NO: 2622962 - RNA, 19 nt, Artificial Sequence
  Description of Artificial Sequence: Synthetic oligonucleotide
ugaaguucuggccuuugau

SEQ ID NO: 2622963 - RNA, 19 nt, Artificial Sequence
  Description of Artificial Sequence: Synthetic oligonucleotide
gaaaucucccagaguacgg

SEQ ID NO: 2622964 - RNA, 19 nt, Artificial Sequence
  Description of Artificial Sequence: Synthetic oligonucleotide
  modified_base (6)..(6): a, c, u, g, unknown or other
cuuggnucggccaggugag

SEQ ID NO: 2622965 - RNA, 19 nt, Artificial Sequence
  Description of Artificial Sequence: Synthetic oligonucleotide
gccguuguacaccacaugg

SEQ ID NO: 2622966 - RNA, 19 nt, Artificial Sequence
  Description of Artificial Sequence: Synthetic oligonucleotide
  modified_base (10)..(10): a, c, u, g, unknown or other
agcuggacgnguuggugag

SEQ ID NO: 2622967 - RNA, 19 nt, Artificial Sequence
  Description of Artificial Sequence: Synthetic oligonucleotide
gaagugguauuugaccacc

SEQ ID NO: 2622968 - RNA, 19 nt, Artificial Sequence
  Description of Artificial Sequence: Synthetic oligonucleotide
  modified_base (14)..(14): a, c, u, g, unknown or other
ucguagcuggacgnguugg

SEQ ID NO: 2622969 - RNA, 19 nt, Artificial Sequence
  Description of Artificial Sequence: Synthetic oligonucleotide
acugaccccugucagcuuc

SEQ ID NO: 2622970 - RNA, 19 nt, Artificial Sequence
  Description of Artificial Sequence: Synthetic oligonucleotide
guacggaacuccaacaccc

SEQ ID NO: 2622971 - RNA, 19 nt, Artificial Sequence
  Description of Artificial Sequence: Synthetic oligonucleotide
  modified_base (17)..(17): a, c, u, g, unknown or other
ggcaaguagaccuuggnuc

SEQ ID NO: 2622972 - RNA, 19 nt, Artificial Sequence
  Description of Artificial Sequence: Synthetic oligonucleotide
ugugucagucauccaggag

SEQ ID NO: 2622973 - RNA, 19 nt, Artificial Sequence
  Description of Artificial Sequence: Synthetic oligonucleotide
gaguacggaacuccaacac

SEQ ID NO: 2622974 - RNA, 19 nt, Artificial Sequence
  Description of Artificial Sequence: Synthetic oligonucleotide
uacggaacuccaacacccg

SEQ ID NO: 2622975 - RNA, 19 nt, Artificial Sequence
  Description of Artificial Sequence: Synthetic oligonucleotide
ggugugaggguccagccgg

SEQ ID NO: 2622976 - RNA, 19 nt, Artificial Sequence
  Description of Artificial Sequence: Synthetic oligonucleotide
agaguacggaacuccaaca

SEQ ID NO: 2622977 - RNA, 19 nt, Artificial Sequence
  Description of Artificial Sequence: Synthetic oligonucleotide
uugccugcauucugguugg

SEQ ID NO: 2622978 - RNA, 19 nt, Artificial Sequence
  Description of Artificial Sequence: Synthetic oligonucleotide
guguacucguagcuggacg

SEQ ID NO: 2622979 - RNA, 19 nt, Artificial Sequence
  Description of Artificial Sequence: Synthetic oligonucleotide
  modified_base (19)..(19): a, c, u, g, unknown or other
uaggcaaguagaccuuggn

SEQ ID NO: 2622980 - RNA, 19 nt, Artificial Sequence
  Description of Artificial Sequence: Synthetic oligonucleotide
guuacugaccccugucagc

SEQ ID NO: 2622981 - RNA, 19 nt, Artificial Sequence
  Description of Artificial Sequence: Synthetic oligonucleotide
cagaguacggaacuccaac

SEQ ID NO: 2622982 - RNA, 19 nt, Artificial Sequence
  Description of Artificial Sequence: Synthetic oligonucleotide
aucgggaccccauggcucg

SEQ ID NO: 2622983 - RNA, 19 nt, Artificial Sequence
  Description of Artificial Sequence: Synthetic oligonucleotide
ugaggguccagccggcuga

SEQ ID NO: 2622984 - RNA, 19 nt, Artificial Sequence
  Description of Artificial Sequence: Synthetic oligonucleotide
cauccauguaccagacccg

SEQ ID NO: 2622985 - RNA, 19 nt, Artificial Sequence
  Description of Artificial Sequence: Synthetic oligonucleotide
auggcucgaaugguaaugg

SEQ ID NO: 2622986 - RNA, 19 nt, Artificial Sequence
  Description of Artificial Sequence: Synthetic oligonucleotide
  modified_base (2)..(2): a, c, u, g, unknown or other
gnguuggugaguaggcaag

SEQ ID NO: 2622987 - RNA, 19 nt, Artificial Sequence
  Description of Artificial Sequence: Synthetic oligonucleotide
uggagucgugccuccaggg

SEQ ID NO: 2622988 - RNA, 19 nt, Artificial Sequence
  Description of Artificial Sequence: Synthetic oligonucleotide
caugaaguccaugucugag

SEQ ID NO: 2622989 - RNA, 19 nt, Artificial Sequence
  Description of Artificial Sequence: Synthetic oligonucleotide
agagccguuguacaccaca

SEQ ID NO: 2622990 - RNA, 19 nt, Artificial Sequence
  Description of Artificial Sequence: Synthetic oligonucleotide
  modified_base (11)..(11): a, c, u, g, unknown or other
uagcuggacgnguugguga

SEQ ID NO: 2622991 - RNA, 19 nt, Artificial Sequence
  Description of Artificial Sequence: Synthetic oligonucleotide
gaacagagagccguuguac

SEQ ID NO: 2622992 - RNA, 19 nt, Artificial Sequence
  Description of Artificial Sequence: Synthetic oligonucleotide
aaccauccauguaccagac

SEQ ID NO: 2622993 - RNA, 19 nt, Artificial Sequence
  Description of Artificial Sequence: Synthetic oligonucleotide
auggagucgugccuccagg

SEQ ID NO: 2622994 - RNA, 19 nt, Artificial Sequence
  Description of Artificial Sequence: Synthetic oligonucleotide
augaaaucucccagaguac

SEQ ID NO: 2622995 - RNA, 19 nt, Artificial Sequence
  Description of Artificial Sequence: Synthetic oligonucleotide
ucacauagaggacgccgca

SEQ ID NO: 2622996 - RNA, 19 nt, Artificial Sequence
  Description of Artificial Sequence: Synthetic oligonucleotide
agaguuggucacauagagg

SEQ ID NO: 2622997 - RNA, 19 nt, Artificial Sequence
  Description of Artificial Sequence: Synthetic oligonucleotide
  modified_base (5)..(5): a, c, u, g, unknown or other
gacgnguuggugaguaggc

SEQ ID NO: 2622998 - RNA, 19 nt, Artificial Sequence
  Description of Artificial Sequence: Synthetic oligonucleotide
ggaacuccaacacccggcg

SEQ ID NO: 2622999 - RNA, 19 nt, Artificial Sequence
  Description of Artificial Sequence: Synthetic oligonucleotide
aagcgccccaggaauaggg

SEQ ID NO: 2623000 - RNA, 19 nt, Artificial Sequence
  Description of Artificial Sequence: Synthetic oligonucleotide
aacacagaacgcgaccgga

SEQ ID NO: 2623001 - RNA, 19 nt, Artificial Sequence
  Description of Artificial Sequence: Synthetic oligonucleotide
auccauguaccagacccgg

SEQ ID NO: 2623002 - RNA, 19 nt, Artificial Sequence
  Description of Artificial Sequence: Synthetic oligonucleotide
cucgucuaccaugaagucc

SEQ ID NO: 2623003 - RNA, 19 nt, Artificial Sequence
  Description of Artificial Sequence: Synthetic oligonucleotide
caccacguugcucugguac

SEQ ID NO: 2623004 - RNA, 19 nt, Artificial Sequence
  Description of Artificial Sequence: Synthetic oligonucleotide
accauccauguaccagacc

SEQ ID NO: 2623005 - RNA, 19 nt, Artificial Sequence
  Description of Artificial Sequence: Synthetic oligonucleotide
agagagccguuguacacca

SEQ ID NO: 2623006 - RNA, 19 nt, Artificial Sequence
  Description of Artificial Sequence: Synthetic oligonucleotide
ugcauucugguugguagug

SEQ ID NO: 2623007 - RNA, 19 nt, Artificial Sequence
  Description of Artificial Sequence: Synthetic oligonucleotide
  modified_base (4)..(4): a, c, u, g, unknown or other
uggnucggccaggugagag

SEQ ID NO: 2623008 - RNA, 19 nt, Artificial Sequence
  Description of Artificial Sequence: Synthetic oligonucleotide
uggcucgaaugguaauggg

SEQ ID NO: 2623009 - RNA, 19 nt, Artificial Sequence
  Description of Artificial Sequence: Synthetic oligonucleotide
acugcgcuuggguacccgg

SEQ ID NO: 2623010 - RNA, 19 nt, Artificial Sequence
  Description of Artificial Sequence: Synthetic oligonucleotide
agcuucugcgcacaggcau

SEQ ID NO: 2623011 - RNA, 19 nt, Artificial Sequence
  Description of Artificial Sequence: Synthetic oligonucleotide
acaccacauggcccguacc

SEQ ID NO: 2623012 - RNA, 19 nt, Artificial Sequence
  Description of Artificial Sequence: Synthetic oligonucleotide
uguagaacagagagccguu

SEQ ID NO: 2623013 - RNA, 19 nt, Artificial Sequence
  Description of Artificial Sequence: Synthetic oligonucleotide
cucucgucuaccaugaagu

SEQ ID NO: 2623014 - RNA, 19 nt, Artificial Sequence
  Description of Artificial Sequence: Synthetic oligonucleotide
  modified_base (18)..(18): a, c, u, g, unknown or other
aggcaaguagaccuuggnu

SEQ ID NO: 2623015 - RNA, 19 nt, Artificial Sequence
  Description of Artificial Sequence: Synthetic oligonucleotide
uugugucagucauccagga

SEQ ID NO: 2623016 - RNA, 19 nt, Artificial Sequence
  Description of Artificial Sequence: Synthetic oligonucleotide
  modified_base (13)..(13): a, c, u, g, unknown or other
aguagaccuuggnucggcc

SEQ ID NO: 2623017 - RNA, 19 nt, Artificial Sequence
  Description of Artificial Sequence: Synthetic oligonucleotide
cacagaacgcgaccggaag

SEQ ID NO: 2623018 - RNA, 19 nt, Artificial Sequence
  Description of Artificial Sequence: Synthetic oligonucleotide
cuuggguacccgguggucc

SEQ ID NO: 2623019 - RNA, 19 nt, Artificial Sequence
  Description of Artificial Sequence: Synthetic oligonucleotide
accagacccggcugucugc

SEQ ID NO: 2623020 - RNA, 19 nt, Artificial Sequence
  Description of Artificial Sequence: Synthetic oligonucleotide
acagaacgcgaccggaagu

SEQ ID NO: 2623021 - RNA, 19 nt, Artificial Sequence
  Description of Artificial Sequence: Synthetic oligonucleotide
uaccagacccggcugucug

SEQ ID NO: 2623022 - RNA, 19 nt, Artificial Sequence
  Description of Artificial Sequence: Synthetic oligonucleotide
agggccaucacacgcugcu

SEQ ID NO: 2623023 - RNA, 19 nt, Artificial Sequence
  Description of Artificial Sequence: Synthetic oligonucleotide
aggagccgaaucgggaccc

SEQ ID NO: 2623024 - RNA, 19 nt, Artificial Sequence
  Description of Artificial Sequence: Synthetic oligonucleotide
uacaccacauggcccguac

SEQ ID NO: 2623025 - RNA, 19 nt, Artificial Sequence
  Description of Artificial Sequence: Synthetic oligonucleotide
cacacgcugcugcaggucc

SEQ ID NO: 2623026 - RNA, 19 nt, Artificial Sequence
  Description of Artificial Sequence: Synthetic oligonucleotide
caacacagaacgcgaccgg

SEQ ID NO: 2623027 - RNA, 19 nt, Artificial Sequence
  Description of Artificial Sequence: Synthetic oligonucleotide
ucccagaguacggaacucc

SEQ ID NO: 2623028 - RNA, 19 nt, Artificial Sequence
  Description of Artificial Sequence: Synthetic oligonucleotide
ugcgcuuggguacccggug

SEQ ID NO: 2623029 - RNA, 19 nt, Artificial Sequence
  Description of Artificial Sequence: Synthetic oligonucleotide
acgccgcagaucaugaagg

SEQ ID NO: 2623030 - RNA, 19 nt, Artificial Sequence
  Description of Artificial Sequence: Synthetic oligonucleotide
cuccagggccaucacacgc

SEQ ID NO: 2623031 - RNA, 19 nt, Artificial Sequence
  Description of Artificial Sequence: Synthetic oligonucleotide
gugaguaggcaaguagacc

SEQ ID NO: 2623032 - RNA, 19 nt, Artificial Sequence
  Description of Artificial Sequence: Synthetic oligonucleotide
uuggguacccggugguccc

SEQ ID NO: 2623033 - RNA, 19 nt, Artificial Sequence
  Description of Artificial Sequence: Synthetic oligonucleotide
ggcucgaaugguaaugggg

SEQ ID NO: 2623034 - RNA, 19 nt, Artificial Sequence
  Description of Artificial Sequence: Synthetic oligonucleotide
gucacauagaggacgccgc

SEQ ID NO: 2623035 - RNA, 19 nt, Artificial Sequence
  Description of Artificial Sequence: Synthetic oligonucleotide
acuccaacacccggcggcc

SEQ ID NO: 2623036 - RNA, 19 nt, Artificial Sequence
  Description of Artificial Sequence: Synthetic oligonucleotide
agaacagagagccguugua

SEQ ID NO: 2623037 - RNA, 19 nt, Artificial Sequence
  Description of Artificial Sequence: Synthetic oligonucleotide
  modified_base (6)..(6): a, c, u, g, unknown or other
ggacgnguuggugaguagg

SEQ ID NO: 2623038 - RNA, 19 nt, Artificial Sequence
  Description of Artificial Sequence: Synthetic oligonucleotide
  modified_base (7)..(7): a, c, u, g, unknown or other
uggacgnguuggugaguag

SEQ ID NO: 2623039 - RNA, 19 nt, Artificial Sequence
  Description of Artificial Sequence: Synthetic oligonucleotide
acgaccuccagggugugag

SEQ ID NO: 2623040 - RNA, 19 nt, Artificial Sequence
  Description of Artificial Sequence: Synthetic oligonucleotide
guuguagaacagagagccg

SEQ ID NO: 2623041 - RNA, 19 nt, Artificial Sequence
  Description of Artificial Sequence: Synthetic oligonucleotide
augaaguucuggccuuuga

SEQ ID NO: 2623042 - RNA, 19 nt, Artificial Sequence
  Description of Artificial Sequence: Synthetic oligonucleotide
  modified_base (10)..(10): a, c, u, g, unknown or other
agaccuuggnucggccagg

SEQ ID NO: 2623043 - RNA, 19 nt, Artificial Sequence
  Description of Artificial Sequence: Synthetic oligonucleotide
cuaccaugaaguccauguc

SEQ ID NO: 2623044 - RNA, 19 nt, Artificial Sequence
  Description of Artificial Sequence: Synthetic oligonucleotide
aguaggcaaguagaccuug

SEQ ID NO: 2623045 - RNA, 19 nt, Artificial Sequence
  Description of Artificial Sequence: Synthetic oligonucleotide
uccauguaccagacccggc

SEQ ID NO: 2623046 - RNA, 19 nt, Artificial Sequence
  Description of Artificial Sequence: Synthetic oligonucleotide
guaggcaaguagaccuugg

SEQ ID NO: 2623047 - RNA, 19 nt, Artificial Sequence
  Description of Artificial Sequence: Synthetic oligonucleotide
gguacuuguuguagaacag

SEQ ID NO: 2623048 - RNA, 19 nt, Artificial Sequence
  Description of Artificial Sequence: Synthetic oligonucleotide
agaagcgccccaggaauag

SEQ ID NO: 2623049 - RNA, 19 nt, Artificial Sequence
  Description of Artificial Sequence: Synthetic oligonucleotide
cauguaccagacccggcug

SEQ ID NO: 2623050 - RNA, 19 nt, Artificial Sequence
  Description of Artificial Sequence: Synthetic oligonucleotide
auguaccagacccggcugu

SEQ ID NO: 2623051 - RNA, 19 nt, Artificial Sequence
  Description of Artificial Sequence: Synthetic oligonucleotide
gaggacgccgcagaucaug

SEQ ID NO: 2623052 - RNA, 19 nt, Artificial Sequence
  Description of Artificial Sequence: Synthetic oligonucleotide
cagaacgcgaccggaagug

SEQ ID NO: 2623053 - RNA, 19 nt, Artificial Sequence
  Description of Artificial Sequence: Synthetic oligonucleotide
gaccggaagugguauuuga

SEQ ID NO: 2623054 - RNA, 19 nt, Artificial Sequence
  Description of Artificial Sequence: Synthetic oligonucleotide
guacuuguuguagaacaga

SEQ ID NO: 2623055 - RNA, 19 nt, Artificial Sequence
  Description of Artificial Sequence: Synthetic oligonucleotide
caugucugagaagcgcccc

SEQ ID NO: 2623056 - RNA, 19 nt, Artificial Sequence
  Description of Artificial Sequence: Synthetic oligonucleotide
uggaugaaguucuggccuu

SEQ ID NO: 2623057 - RNA, 19 nt, Artificial Sequence
  Description of Artificial Sequence: Synthetic oligonucleotide
  modified_base (15)..(15): a, c, u, g, unknown or other
caaguagaccuuggnucgg

SEQ ID NO: 2623058 - RNA, 19 nt, Artificial Sequence
  Description of Artificial Sequence: Synthetic oligonucleotide
  modified_base (7)..(7): a, c, u, g, unknown or other
ccuuggnucggccagguga

SEQ ID NO: 2623059 - RNA, 19 nt, Artificial Sequence
  Description of Artificial Sequence: Synthetic oligonucleotide
acagcccacagcccgcucu

SEQ ID NO: 2623060 - RNA, 19 nt, Artificial Sequence
  Description of Artificial Sequence: Synthetic oligonucleotide
guagaacagagagccguug

SEQ ID NO: 2623061 - RNA, 19 nt, Artificial Sequence
  Description of Artificial Sequence: Synthetic oligonucleotide
ggaagugguauuugaccac

SEQ ID NO: 2623062 - RNA, 19 nt, Artificial Sequence
  Description of Artificial Sequence: Synthetic oligonucleotide
agaacgcgaccggaagugg

SEQ ID NO: 2623063 - RNA, 19 nt, Artificial Sequence
  Description of Artificial Sequence: Synthetic oligonucleotide
ugcucugguacuuguugua

SEQ ID NO: 2623064 - RNA, 19 nt, Artificial Sequence
  Description of Artificial Sequence: Synthetic oligonucleotide
  modified_base (12)..(12): a, c, u, g, unknown or other
guagaccuuggnucggcca

SEQ ID NO: 2623065 - RNA, 19 nt, Artificial Sequence
  Description of Artificial Sequence: Synthetic oligonucleotide
uucuggccuuugaugaaau

SEQ ID NO: 2623066 - RNA, 19 nt, Artificial Sequence
  Description of Artificial Sequence: Synthetic oligonucleotide
augucugagaagcgcccca

SEQ ID NO: 2623067 - RNA, 19 nt, Artificial Sequence
  Description of Artificial Sequence: Synthetic oligonucleotide
cuucugcgcacaggcaugg

SEQ ID NO: 2623068 - RNA, 19 nt, Artificial Sequence
  Description of Artificial Sequence: Synthetic oligonucleotide
caggaauaggggaaggugu

SEQ ID NO: 2623069 - RNA, 19 nt, Artificial Sequence
  Description of Artificial Sequence: Synthetic oligonucleotide
caggagccgaaucgggacc

SEQ ID NO: 2623070 - RNA, 19 nt, Artificial Sequence
  Description of Artificial Sequence: Synthetic oligonucleotide
  modified_base (12)..(12): a, c, u, g, unknown or other
guagcuggacgnguuggug

SEQ ID NO: 2623071 - RNA, 19 nt, Artificial Sequence
  Description of Artificial Sequence: Synthetic oligonucleotide
cacauggcccguaccugcc

SEQ ID NO: 2623072 - RNA, 19 nt, Artificial Sequence
  Description of Artificial Sequence: Synthetic oligonucleotide
caccaacacagaacgcgac

SEQ ID NO: 2623073 - RNA, 19 nt, Artificial Sequence
  Description of Artificial Sequence: Synthetic oligonucleotide
ccgcagaucaugaaggcuc

SEQ ID NO: 2623074 - RNA, 19 nt, Artificial Sequence
  Description of Artificial Sequence: Synthetic oligonucleotide
agccguuguacaccacaug

SEQ ID NO: 2623075 - RNA, 19 nt, Artificial Sequence
  Description of Artificial Sequence: Synthetic oligonucleotide
gaaucgggaccccauggcu

SEQ ID NO: 2623076 - RNA, 19 nt, Artificial Sequence
  Description of Artificial Sequence: Synthetic oligonucleotide
ugacaacgauguugccugc

SEQ ID NO: 2623077 - RNA, 19 nt, Artificial Sequence
  Description of Artificial Sequence: Synthetic oligonucleotide
uacccgguggucccaggac

SEQ ID NO: 2623078 - RNA, 19 nt, Artificial Sequence
  Description of Artificial Sequence: Synthetic oligonucleotide
cacauagaggacgccgcag

SEQ ID NO: 2623079 - RNA, 19 nt, Artificial Sequence
  Description of Artificial Sequence: Synthetic oligonucleotide
aagugguauuugaccacca

SEQ ID NO: 2623080 - RNA, 19 nt, Artificial Sequence
  Description of Artificial Sequence: Synthetic oligonucleotide
gaagcgccccaggaauagg

SEQ ID NO: 2623081 - RNA, 19 nt, Artificial Sequence
  Description of Artificial Sequence: Synthetic oligonucleotide
gacccggcugucugcacug

SEQ ID NO: 2623082 - RNA, 19 nt, Artificial Sequence
  Description of Artificial Sequence: Synthetic oligonucleotide
ggaccucacgaccuccagg

SEQ ID NO: 2623083 - RNA, 19 nt, Artificial Sequence
  Description of Artificial Sequence: Synthetic oligonucleotide
  modified_base (17)..(17): a, c, u, g, unknown or other
uacucguagcuggacgngu

SEQ ID NO: 2623084 - RNA, 19 nt, Artificial Sequence
  Description of Artificial Sequence: Synthetic oligonucleotide
guaguguacacagcccaca

SEQ ID NO: 2623085 - RNA, 19 nt, Artificial Sequence
  Description of Artificial Sequence: Synthetic oligonucleotide
  modified_base (15)..(15): a, c, u, g, unknown or other
cucguagcuggacgnguug

SEQ ID NO: 2623086 - RNA, 19 nt, Artificial Sequence
  Description of Artificial Sequence: Synthetic oligonucleotide
cagccggcugacaacgaug

SEQ ID NO: 2623087 - RNA, 19 nt, Artificial Sequence
  Description of Artificial Sequence: Synthetic oligonucleotide
  modified_base (18)..(18): a, c, u, g, unknown or other
guacucguagcuggacgng

SEQ ID NO: 2623088 - RNA, 19 nt, Artificial Sequence
  Description of Artificial Sequence: Synthetic oligonucleotide
auggcccguaccugcccac

SEQ ID NO: 2623089 - RNA, 19 nt, Artificial Sequence
  Description of Artificial Sequence: Synthetic oligonucleotide
acagcccgcucucgucuac

SEQ ID NO: 2623090 - RNA, 19 nt, Artificial Sequence
  Description of Artificial Sequence: Synthetic oligonucleotide
  modified_base (4)..(4): a, c, u, g, unknown or other
acgnguuggugaguaggca

SEQ ID NO: 2623091 - RNA, 19 nt, Artificial Sequence
  Description of Artificial Sequence: Synthetic oligonucleotide
ccaggugagaguuggucac

SEQ ID NO: 2623092 - RNA, 19 nt, Artificial Sequence
  Description of Artificial Sequence: Synthetic oligonucleotide
gggugugaggguccagccg

SEQ ID NO: 2623093 - RNA, 19 nt, Artificial Sequence
  Description of Artificial Sequence: Synthetic oligonucleotide
acgauguugccugcauucu

SEQ ID NO: 2623094 - RNA, 19 nt, Artificial Sequence
  Description of Artificial Sequence: Synthetic oligonucleotide
cugaccccugucagcuucc

SEQ ID NO: 2623095 - RNA, 19 nt, Artificial Sequence
  Description of Artificial Sequence: Synthetic oligonucleotide
ccguuguacaccacauggc

SEQ ID NO: 2623096 - RNA, 19 nt, Artificial Sequence
  Description of Artificial Sequence: Synthetic oligonucleotide
ggagucgugccuccagggc

SEQ ID NO: 2623097 - RNA, 19 nt, Artificial Sequence
  Description of Artificial Sequence: Synthetic oligonucleotide
uguaccagacccggcuguc

SEQ ID NO: 2623098 - RNA, 19 nt, Artificial Sequence
  Description of Artificial Sequence: Synthetic oligonucleotide
gacaacgauguugccugca

SEQ ID NO: 2623099 - RNA, 19 nt, Artificial Sequence
  Description of Artificial Sequence: Synthetic oligonucleotide
gugaggguccagccggcug

SEQ ID NO: 2623100 - RNA, 19 nt, Artificial Sequence
  Description of Artificial Sequence: Synthetic oligonucleotide
agccggcugacaacgaugu

SEQ ID NO: 2623101 - RNA, 19 nt, Artificial Sequence
  Description of Artificial Sequence: Synthetic oligonucleotide
uguugccugcauucugguu

SEQ ID NO: 2623102 - RNA, 19 nt, Artificial Sequence
  Description of Artificial Sequence: Synthetic oligonucleotide
cggcugacaacgauguugc

SEQ ID NO: 2623103 - RNA, 19 nt, Artificial Sequence
  Description of Artificial Sequence: Synthetic oligonucleotide
ccaugucugagaagcgccc

SEQ ID NO: 2623104 - RNA, 19 nt, Artificial Sequence
  Description of Artificial Sequence: Synthetic oligonucleotide
cugagaagcgccccaggaa

SEQ ID NO: 2623105 - RNA, 19 nt, Artificial Sequence
  Description of Artificial Sequence: Synthetic oligonucleotide
gcucugguacuuguuguag

SEQ ID NO: 2623106 - RNA, 19 nt, Artificial Sequence
  Description of Artificial Sequence: Synthetic oligonucleotide
ccggcugacaacgauguug

SEQ ID NO: 2623107 - RNA, 19 nt, Artificial Sequence
  Description of Artificial Sequence: Synthetic oligonucleotide
agcgccccaggaauagggg

SEQ ID NO: 2623108 - RNA, 19 nt, Artificial Sequence
  Description of Artificial Sequence: Synthetic oligonucleotide
ccgaaucgggaccccaugg

SEQ ID NO: 2623109 - RNA, 19 nt, Artificial Sequence
  Description of Artificial Sequence: Synthetic oligonucleotide
ggaauaggggaagguguug

SEQ ID NO: 2623110 - RNA, 19 nt, Artificial Sequence
  Description of Artificial Sequence: Synthetic oligonucleotide
cucacgaccuccagggugu

SEQ ID NO: 2623111 - RNA, 19 nt, Artificial Sequence
  Description of Artificial Sequence: Synthetic oligonucleotide
aacgcgaccggaaguggua

SEQ ID NO: 2623112 - RNA, 19 nt, Artificial Sequence
  Description of Artificial Sequence: Synthetic oligonucleotide
guaccugcccacggcugcg

SEQ ID NO: 2623113 - RNA, 19 nt, Artificial Sequence
  Description of Artificial Sequence: Synthetic oligonucleotide
uccaacacccggcggccuu

SEQ ID NO: 2623114 - RNA, 19 nt, Artificial Sequence
  Description of Artificial Sequence: Synthetic oligonucleotide
ccucacgaccuccagggug

SEQ ID NO: 2623115 - RNA, 19 nt, Artificial Sequence
  Description of Artificial Sequence: Synthetic oligonucleotide
guuguuguagccagccccu

SEQ ID NO: 2623116 - RNA, 19 nt, Artificial Sequence
  Description of Artificial Sequence: Synthetic oligonucleotide
uggcccguaccugcccacg

SEQ ID NO: 2623117 - RNA, 19 nt, Artificial Sequence
  Description of Artificial Sequence: Synthetic oligonucleotide
  modified_base (16)..(16): a, c, u, g, unknown or other
acucguagcuggacgnguu

SEQ ID NO: 2623118 - RNA, 19 nt, Artificial Sequence
  Description of Artificial Sequence: Synthetic oligonucleotide
cggaagugguauuugacca

SEQ ID NO: 2623119 - RNA, 19 nt, Artificial Sequence
  Description of Artificial Sequence: Synthetic oligonucleotide
uggucacauagaggacgcc

SEQ ID NO: 2623120 - RNA, 19 nt, Artificial Sequence
  Description of Artificial Sequence: Synthetic oligonucleotide
agucgugccuccagggcca

SEQ ID NO: 2623121 - RNA, 19 nt, Artificial Sequence
  Description of Artificial Sequence: Synthetic oligonucleotide
uccagccggcugacaacga

SEQ ID NO: 2623122 - RNA, 19 nt, Artificial Sequence
  Description of Artificial Sequence: Synthetic oligonucleotide
ggcuccucugcaccaacac

SEQ ID NO: 2623123 - RNA, 19 nt, Artificial Sequence
  Description of Artificial Sequence: Synthetic oligonucleotide
aacacccggcggccuuugu

SEQ ID NO: 2623124 - RNA, 19 nt, Artificial Sequence
  Description of Artificial Sequence: Synthetic oligonucleotide
guacccgguggucccagga

SEQ ID NO: 2623125 - RNA, 19 nt, Artificial Sequence
  Description of Artificial Sequence: Synthetic oligonucleotide
gcucgaaugguaauggggu

SEQ ID NO: 2623126 - RNA, 19 nt, Artificial Sequence
  Description of Artificial Sequence: Synthetic oligonucleotide
uaccugcccacggcugcgg

SEQ ID NO: 2623127 - RNA, 19 nt, Artificial Sequence
  Description of Artificial Sequence: Synthetic oligonucleotide
gcggccuuuguaauaacca

SEQ ID NO: 2623128 - RNA, 19 nt, Artificial Sequence
  Description of Artificial Sequence: Synthetic oligonucleotide
gucagucauccaggagccg

SEQ ID NO: 2623129 - RNA, 19 nt, Artificial Sequence
  Description of Artificial Sequence: Synthetic oligonucleotide
ccggcugucugcacugggg

SEQ ID NO: 2623130 - RNA, 19 nt, Artificial Sequence
  Description of Artificial Sequence: Synthetic oligonucleotide
ggggccauugugucaguca

SEQ ID NO: 2623131 - RNA, 19 nt, Artificial Sequence
  Description of Artificial Sequence: Synthetic oligonucleotide
gguugguaguguacacagc

SEQ ID NO: 2623132 - RNA, 19 nt, Artificial Sequence
  Description of Artificial Sequence: Synthetic oligonucleotide
gcgcuuggguacccggugg

SEQ ID NO: 2623133 - RNA, 19 nt, Artificial Sequence
  Description of Artificial Sequence: Synthetic oligonucleotide
acacagaacgcgaccggaa

SEQ ID NO: 2623134 - RNA, 19 nt, Artificial Sequence
  Description of Artificial Sequence: Synthetic oligonucleotide
agcccgcucucgucuacca

SEQ ID NO: 2623135 - RNA, 19 nt, Artificial Sequence
  Description of Artificial Sequence: Synthetic oligonucleotide
cacccggcggccuuuguaa

SEQ ID NO: 2623136 - RNA, 19 nt, Artificial Sequence
  Description of Artificial Sequence: Synthetic oligonucleotide
aggacgccgcagaucauga

SEQ ID NO: 2623137 - RNA, 19 nt, Artificial Sequence
  Description of Artificial Sequence: Synthetic oligonucleotide
caccacauggcccguaccu

SEQ ID NO: 2623138 - RNA, 19 nt, Artificial Sequence
  Description of Artificial Sequence: Synthetic oligonucleotide
  modified_base (8)..(8): a, c, u, g, unknown or other
accuuggnucggccaggug

SEQ ID NO: 2623139 - RNA, 19 nt, Artificial Sequence
  Description of Artificial Sequence: Synthetic oligonucleotide
acacccggcggccuuugua

SEQ ID NO: 2623140 - RNA, 19 nt, Artificial Sequence
  Description of Artificial Sequence: Synthetic oligonucleotide
ggcauggagucgugccucc

SEQ ID NO: 2623141 - RNA, 19 nt, Artificial Sequence
  Description of Artificial Sequence: Synthetic oligonucleotide
cauggcccguaccugccca

SEQ ID NO: 2623142 - RNA, 19 nt, Artificial Sequence
  Description of Artificial Sequence: Synthetic oligonucleotide
accucacgaccuccagggu

SEQ ID NO: 2623143 - RNA, 19 nt, Artificial Sequence
  Description of Artificial Sequence: Synthetic oligonucleotide
cgaaucgggaccccauggc

SEQ ID NO: 2623144 - RNA, 19 nt, Artificial Sequence
  Description of Artificial Sequence: Synthetic oligonucleotide
gcugacaacgauguugccu

SEQ ID NO: 2623145 - RNA, 19 nt, Artificial Sequence
  Description of Artificial Sequence: Synthetic oligonucleotide
  modified_base (5)..(5): a, c, u, g, unknown or other
uuggnucggccaggugaga

SEQ ID NO: 2623146 - RNA, 19 nt, Artificial Sequence
  Description of Artificial Sequence: Synthetic oligonucleotide
  modified_base (2)..(2): a, c, u, g, unknown or other
gnucggccaggugagaguu

SEQ ID NO: 2623147 - RNA, 19 nt, Artificial Sequence
  Description of Artificial Sequence: Synthetic oligonucleotide
guuggugaguaggcaagua

SEQ ID NO: 2623148 - RNA, 19 nt, Artificial Sequence
  Description of Artificial Sequence: Synthetic oligonucleotide
  modified_base (8)..(8): a, c, u, g, unknown or other
cuggacgnguuggugagua

SEQ ID NO: 2623149 - RNA, 19 nt, Artificial Sequence
  Description of Artificial Sequence: Synthetic oligonucleotide
ggcccguaccugcccacgg

SEQ ID NO: 2623150 - RNA, 19 nt, Artificial Sequence
  Description of Artificial Sequence: Synthetic oligonucleotide
gcuucugcgcacaggcaug

SEQ ID NO: 2623151 - RNA, 19 nt, Artificial Sequence
  Description of Artificial Sequence: Synthetic oligonucleotide
gagaagcgccccaggaaua

SEQ ID NO: 2623152 - RNA, 19 nt, Artificial Sequence
  Description of Artificial Sequence: Synthetic oligonucleotide
cgaaugguaaugggguuac

SEQ ID NO: 2623153 - RNA, 19 nt, Artificial Sequence
  Description of Artificial Sequence: Synthetic oligonucleotide
gcaccaacacagaacgcga

SEQ ID NO: 2623154 - RNA, 19 nt, Artificial Sequence
  Description of Artificial Sequence: Synthetic oligonucleotide
ggguccagccggcugacaa

SEQ ID NO: 2623155 - RNA, 19 nt, Artificial Sequence
  Description of Artificial Sequence: Synthetic oligonucleotide
gaacgcgaccggaaguggu

SEQ ID NO: 2623156 - RNA, 19 nt, Artificial Sequence
  Description of Artificial Sequence: Synthetic oligonucleotide
cacugcgcuuggguacccg

SEQ ID NO: 2623157 - RNA, 19 nt, Artificial Sequence
  Description of Artificial Sequence: Synthetic oligonucleotide
ccgcacugcgcuuggguac

SEQ ID NO: 2623158 - RNA, 19 nt, Artificial Sequence
  Description of Artificial Sequence: Synthetic oligonucleotide
uucugcgcacaggcaugga

SEQ ID NO: 2623159 - RNA, 19 nt, Artificial Sequence
  Description of Artificial Sequence: Synthetic oligonucleotide
cguaccugcccacggcugc

SEQ ID NO: 2623160 - RNA, 19 nt, Artificial Sequence
  Description of Artificial Sequence: Synthetic oligonucleotide
  modified_base (3)..(3): a, c, u, g, unknown or other
cgnguuggugaguaggcaa

SEQ ID NO: 2623161 - RNA, 19 nt, Artificial Sequence
  Description of Artificial Sequence: Synthetic oligonucleotide
ucacgaccuccagggugug

SEQ ID NO: 2623162 - RNA, 19 nt, Artificial Sequence
  Description of Artificial Sequence: Synthetic oligonucleotide
gagccgaaucgggacccca

SEQ ID NO: 2623163 - RNA, 19 nt, Artificial Sequence
  Description of Artificial Sequence: Synthetic oligonucleotide
uggguacccggugguccca

SEQ ID NO: 2623164 - RNA, 19 nt, Artificial Sequence
  Description of Artificial Sequence: Synthetic oligonucleotide
cucgaaugguaaugggguu

SEQ ID NO: 2623165 - RNA, 19 nt, Artificial Sequence
  Description of Artificial Sequence: Synthetic oligonucleotide
cccagaguacggaacucca

SEQ ID NO: 2623166 - RNA, 19 nt, Artificial Sequence
  Description of Artificial Sequence: Synthetic oligonucleotide
acccggcggccuuuguaau

SEQ ID NO: 2623167 - RNA, 19 nt, Artificial Sequence
  Description of Artificial Sequence: Synthetic oligonucleotide
caggcauggagucgugccu

SEQ ID NO: 2623168 - RNA, 19 nt, Artificial Sequence
  Description of Artificial Sequence: Synthetic oligonucleotide
acgcgaccggaagugguau

SEQ ID NO: 2623169 - RNA, 19 nt, Artificial Sequence
  Description of Artificial Sequence: Synthetic oligonucleotide
gagccguuguacaccacau

SEQ ID NO: 2623170 - RNA, 19 nt, Artificial Sequence
  Description of Artificial Sequence: Synthetic oligonucleotide
ggcugacaacgauguugcc

SEQ ID NO: 2623171 - RNA, 19 nt, Artificial Sequence
  Description of Artificial Sequence: Synthetic oligonucleotide
cagcccgcucucgucuacc

SEQ ID NO: 2623172 - RNA, 19 nt, Artificial Sequence
  Description of Artificial Sequence: Synthetic oligonucleotide
aggcuccucugcaccaaca

SEQ ID NO: 2623173 - RNA, 19 nt, Artificial Sequence
  Description of Artificial Sequence: Synthetic oligonucleotide
cugcggcagcaggugcugg

SEQ ID NO: 2623174 - RNA, 19 nt, Artificial Sequence
  Description of Artificial Sequence: Synthetic oligonucleotide
cagacccggcugucugcac

SEQ ID NO: 2623175 - RNA, 19 nt, Artificial Sequence
  Description of Artificial Sequence: Synthetic oligonucleotide
ccuuuguaauaaccaucca

SEQ ID NO: 2623176 - RNA, 19 nt, Artificial Sequence
  Description of Artificial Sequence: Synthetic oligonucleotide
ccauguaccagacccggcu

SEQ ID NO: 2623177 - RNA, 19 nt, Artificial Sequence
  Description of Artificial Sequence: Synthetic oligonucleotide
gcgccccaggaauagggga

SEQ ID NO: 2623178 - RNA, 19 nt, Artificial Sequence
  Description of Artificial Sequence: Synthetic oligonucleotide
agccgaaucgggaccccau

SEQ ID NO: 2623179 - RNA, 19 nt, Artificial Sequence
  Description of Artificial Sequence: Synthetic oligonucleotide
  modified_base (3)..(3): a, c, u, g, unknown or other
ggnucggccaggugagagu

SEQ ID NO: 2623180 - RNA, 19 nt, Artificial Sequence
  Description of Artificial Sequence: Synthetic oligonucleotide
gcccguaccugcccacggc

SEQ ID NO: 2623181 - RNA, 19 nt, Artificial Sequence
  Description of Artificial Sequence: Synthetic oligonucleotide
cccauggcucgaaugguaa

SEQ ID NO: 2623182 - RNA, 19 nt, Artificial Sequence
  Description of Artificial Sequence: Synthetic oligonucleotide
gaaugguaaugggguuacu

SEQ ID NO: 2623183 - RNA, 19 nt, Artificial Sequence
  Description of Artificial Sequence: Synthetic oligonucleotide
gagagccguuguacaccac

SEQ ID NO: 2623184 - RNA, 19 nt, Artificial Sequence
  Description of Artificial Sequence: Synthetic oligonucleotide
  modified_base (9)..(9): a, c, u, g, unknown or other
gaccuuggnucggccaggu

SEQ ID NO: 2623185 - RNA, 19 nt, Artificial Sequence
  Description of Artificial Sequence: Synthetic oligonucleotide
gguggucccaggaccucac

SEQ ID NO: 2623186 - RNA, 19 nt, Artificial Sequence
  Description of Artificial Sequence: Synthetic oligonucleotide
ccaggaccucacgaccucc

SEQ ID NO: 2623187 - RNA, 19 nt, Artificial Sequence
  Description of Artificial Sequence: Synthetic oligonucleotide
agccccugggaggcuccuc

SEQ ID NO: 2623188 - RNA, 19 nt, Artificial Sequence
  Description of Artificial Sequence: Synthetic oligonucleotide
ggugagaguuggucacaua

SEQ ID NO: 2623189 - RNA, 19 nt, Artificial Sequence
  Description of Artificial Sequence: Synthetic oligonucleotide
ccagaguacggaacuccaa

SEQ ID NO: 2623190 - RNA, 19 nt, Artificial Sequence
  Description of Artificial Sequence: Synthetic oligonucleotide
ccguaccugcccacggcug

SEQ ID NO: 2623191 - RNA, 19 nt, Artificial Sequence
  Description of Artificial Sequence: Synthetic oligonucleotide
caacacccggcggccuuug

SEQ ID NO: 2623192 - RNA, 19 nt, Artificial Sequence
  Description of Artificial Sequence: Synthetic oligonucleotide
ccgcucucgucuaccauga

SEQ ID NO: 2623193 - RNA, 19 nt, Artificial Sequence
  Description of Artificial Sequence: Synthetic oligonucleotide
caacgauguugccugcauu

SEQ ID NO: 2623194 - RNA, 19 nt, Artificial Sequence
  Description of Artificial Sequence: Synthetic oligonucleotide
cugcgcuuggguacccggu

SEQ ID NO: 2623195 - RNA, 19 nt, Artificial Sequence
  Description of Artificial Sequence: Synthetic oligonucleotide
ucgggaccccauggcucga

SEQ ID NO: 2623196 - RNA, 19 nt, Artificial Sequence
  Description of Artificial Sequence: Synthetic oligonucleotide
ggagccgaaucgggacccc

SEQ ID NO: 2623197 - RNA, 19 nt, Artificial Sequence
  Description of Artificial Sequence: Synthetic oligonucleotide
guaccagacccggcugucu

SEQ ID NO: 2623198 - RNA, 19 nt, Artificial Sequence
  Description of Artificial Sequence: Synthetic oligonucleotide
cacagcccgcucucgucua

SEQ ID NO: 2623199 - RNA, 19 nt, Artificial Sequence
  Description of Artificial Sequence: Synthetic oligonucleotide
cgcacugcgcuuggguacc

SEQ ID NO: 2623200 - RNA, 19 nt, Artificial Sequence
  Description of Artificial Sequence: Synthetic oligonucleotide
cccaggaccucacgaccuc

SEQ ID NO: 2623201 - RNA, 19 nt, Artificial Sequence
  Description of Artificial Sequence: Synthetic oligonucleotide
ugccugcauucugguuggu

SEQ ID NO: 2623202 - RNA, 19 nt, Artificial Sequence
  Description of Artificial Sequence: Synthetic oligonucleotide
gcuuggguacccggugguc

SEQ ID NO: 2623203 - RNA, 19 nt, Artificial Sequence
  Description of Artificial Sequence: Synthetic oligonucleotide
ggguacccgguggucccag

SEQ ID NO: 2623204 - RNA, 19 nt, Artificial Sequence
  Description of Artificial Sequence: Synthetic oligonucleotide
ccccugucagcuucccaca

SEQ ID NO: 2623205 - RNA, 19 nt, Artificial Sequence
  Description of Artificial Sequence: Synthetic oligonucleotide
ccguguacucguagcugga

SEQ ID NO: 2623206 - RNA, 19 nt, Artificial Sequence
  Description of Artificial Sequence: Synthetic oligonucleotide
guacaccacauggcccgua

SEQ ID NO: 2623207 - RNA, 19 nt, Artificial Sequence
  Description of Artificial Sequence: Synthetic oligonucleotide
agaggacgccgcagaucau

SEQ ID NO: 2623208 - RNA, 19 nt, Artificial Sequence
  Description of Artificial Sequence: Synthetic oligonucleotide
gccgcagaucaugaaggcu

SEQ ID NO: 2623209 - RNA, 19 nt, Artificial Sequence
  Description of Artificial Sequence: Synthetic oligonucleotide
cgaccggaagugguauuug

SEQ ID NO: 2623210 - RNA, 19 nt, Artificial Sequence
  Description of Artificial Sequence: Synthetic oligonucleotide
ccggcggccuuuguaauaa

SEQ ID NO: 2623211 - RNA, 19 nt, Artificial Sequence
  Description of Artificial Sequence: Synthetic oligonucleotide
ccccauggcucgaauggua

SEQ ID NO: 2623212 - RNA, 19 nt, Artificial Sequence
  Description of Artificial Sequence: Synthetic oligonucleotide
cacgaccuccaggguguga

SEQ ID NO: 2623213 - RNA, 19 nt, Artificial Sequence
  Description of Artificial Sequence: Synthetic oligonucleotide
ccagacccggcugucugca

SEQ ID NO: 2623214 - RNA, 19 nt, Artificial Sequence
  Description of Artificial Sequence: Synthetic oligonucleotide
gcacaggcauggagucgug

SEQ ID NO: 2623215 - RNA, 19 nt, Artificial Sequence
  Description of Artificial Sequence: Synthetic oligonucleotide
gcauggagucgugccucca

SEQ ID NO: 2623216 - RNA, 19 nt, Artificial Sequence
  Description of Artificial Sequence: Synthetic oligonucleotide
ucgugccuccagggccauc

SEQ ID NO: 2623217 - RNA, 19 nt, Artificial Sequence
  Description of Artificial Sequence: Synthetic oligonucleotide
ccacagcccgcucucgucu

SEQ ID NO: 2623218 - RNA, 19 nt, Artificial Sequence
  Description of Artificial Sequence: Synthetic oligonucleotide
gcgaccggaagugguauuu

SEQ ID NO: 2623219 - RNA, 19 nt, Artificial Sequence
  Description of Artificial Sequence: Synthetic oligonucleotide
cggccuuuguaauaaccau

SEQ ID NO: 2623220 - RNA, 19 nt, Artificial Sequence
  Description of Artificial Sequence: Synthetic oligonucleotide
gcacugcgcuuggguaccc

SEQ ID NO: 2623221 - RNA, 19 nt, Artificial Sequence
  Description of Artificial Sequence: Synthetic oligonucleotide
cccaggaauaggggaaggu

SEQ ID NO: 2623222 - RNA, 19 nt, Artificial Sequence
  Description of Artificial Sequence: Synthetic oligonucleotide
cccguaccugcccacggcu

SEQ ID NO: 2623223 - RNA, 19 nt, Artificial Sequence
  Description of Artificial Sequence: Synthetic oligonucleotide
cgcacaggcauggagucgu

SEQ ID NO: 2623224 - RNA, 19 nt, Artificial Sequence
  Description of Artificial Sequence: Synthetic oligonucleotide
agccagccccugggaggcu

SEQ ID NO: 2623225 - RNA, 19 nt, Artificial Sequence
  Description of Artificial Sequence: Synthetic oligonucleotide
ccauggcucgaaugguaau

SEQ ID NO: 2623226 - RNA, 19 nt, Artificial Sequence
  Description of Artificial Sequence: Synthetic oligonucleotide
cccggcggccuuuguaaua

SEQ ID NO: 2623227 - RNA, 19 nt, Artificial Sequence
  Description of Artificial Sequence: Synthetic oligonucleotide
gggaccccauggcucgaau

SEQ ID NO: 2623228 - RNA, 19 nt, Artificial Sequence
  Description of Artificial Sequence: Synthetic oligonucleotide
  modified_base (9)..(9): a, c, u, g, unknown or other
gcuggacgnguuggugagu

SEQ ID NO: 2623229 - RNA, 19 nt, Artificial Sequence
  Description of Artificial Sequence: Synthetic oligonucleotide
ccagccggcugacaacgau

SEQ ID NO: 2623230 - RNA, 19 nt, Artificial Sequence
  Description of Artificial Sequence: Synthetic oligonucleotide
ccccgcacugcgcuugggu

SEQ ID NO: 2623231 - RNA, 19 nt, Artificial Sequence
  Description of Artificial Sequence: Synthetic oligonucleotide
gcccgcucucgucuaccau

SEQ ID NO: 2623232 - RNA, 19 nt, Artificial Sequence
  Description of Artificial Sequence: Synthetic oligonucleotide
gucgugccuccagggccau

SEQ ID NO: 2623233 - RNA, 19 nt, Artificial Sequence
  Description of Artificial Sequence: Synthetic oligonucleotide
ccaacacccggcggccuuu

SEQ ID NO: 2623234 - RNA, 19 nt, Artificial Sequence
  Description of Artificial Sequence: Synthetic oligonucleotide
cgcgaccggaagugguauu

SEQ ID NO: 2623235 - RNA, 19 nt, Artificial Sequence
  Description of Artificial Sequence: Synthetic oligonucleotide
  modified_base (1)..(1): a, c, u, g, unknown or other
nguuggugaguaggcaagu

SEQ ID NO: 2623236 - RNA, 19 nt, Artificial Sequence
  Description of Artificial Sequence: Synthetic oligonucleotide
  modified_base (1)..(1): a, c, u, g, unknown or other
nucggccaggugagaguug

SEQ ID NO: 2623237 - RNA, 19 nt, Artificial Sequence
  Description of Artificial Sequence: Synthetic oligonucleotide
aacgucugcauaaagagcc

SEQ ID NO: 2623238 - RNA, 19 nt, Artificial Sequence
  Description of Artificial Sequence: Synthetic oligonucleotide
uuuacuucauggcaaauag

SEQ ID NO: 2623239 - RNA, 19 nt, Artificial Sequence
  Description of Artificial Sequence: Synthetic oligonucleotide
ucaucgaagaaucugaccu

SEQ ID NO: 2623240 - RNA, 19 nt, Artificial Sequence
  Description of Artificial Sequence: Synthetic oligonucleotide
ugagcagcaagauaggccg

SEQ ID NO: 2623241 - RNA, 19 nt, Artificial Sequence
  Description of Artificial Sequence: Synthetic oligonucleotide
cucauuauuucucugagcc

SEQ ID NO: 2623242 - RNA, 19 nt, Artificial Sequence
  Description of Artificial Sequence: Synthetic oligonucleotide
auugaaagaagcaauagag

SEQ ID NO: 2623243 - RNA, 19 nt, Artificial Sequence
  Description of Artificial Sequence: Synthetic oligonucleotide
uacuucauggcaaauagca

SEQ ID NO: 2623244 - RNA, 19 nt, Artificial Sequence
  Description of Artificial Sequence: Synthetic oligonucleotide
gaagaaucugaccucauag

SEQ ID NO: 2623245 - RNA, 19 nt, Artificial Sequence
  Description of Artificial Sequence: Synthetic oligonucleotide
ugcauugaaggcuagguag

SEQ ID NO: 2623246 - RNA, 19 nt, Artificial Sequence
  Description of Artificial Sequence: Synthetic oligonucleotide
aaggcuagguaguagauca

SEQ ID NO: 2623247 - RNA, 19 nt, Artificial Sequence
  Description of Artificial Sequence: Synthetic oligonucleotide
uaguagaucacuaugccga

SEQ ID NO: 2623248 - RNA, 19 nt, Artificial Sequence
  Description of Artificial Sequence: Synthetic oligonucleotide
acuguuuauugaaagaagc

SEQ ID NO: 2623249 - RNA, 19 nt, Artificial Sequence
  Description of Artificial Sequence: Synthetic oligonucleotide
uguauaguaagaaggggug

SEQ ID NO: 2623250 - RNA, 19 nt, Artificial Sequence
  Description of Artificial Sequence: Synthetic oligonucleotide
uauugaaagaagcaauaga

SEQ ID NO: 2623251 - RNA, 19 nt, Artificial Sequence
  Description of Artificial Sequence: Synthetic oligonucleotide
cuaacgucugcauaaagag

SEQ ID NO: 2623252 - RNA, 19 nt, Artificial Sequence
  Description of Artificial Sequence: Synthetic oligonucleotide
ugcauaaagagccauguuc

SEQ ID NO: 2623253 - RNA, 19 nt, Artificial Sequence
  Description of Artificial Sequence: Synthetic oligonucleotide
uuguauaguaagaaggggu

SEQ ID NO: 2623254 - RNA, 19 nt, Artificial Sequence
  Description of Artificial Sequence: Synthetic oligonucleotide
gaaaugacggcaucugagg

SEQ ID NO: 2623255 - RNA, 19 nt, Artificial Sequence
  Description of Artificial Sequence: Synthetic oligonucleotide
ucugagguuguauaguaag

SEQ ID NO: 2623256 - RNA, 19 nt, Artificial Sequence
  Description of Artificial Sequence: Synthetic oligonucleotide
cugauaucggcccacaucc

SEQ ID NO: 2623257 - RNA, 19 nt, Artificial Sequence
  Description of Artificial Sequence: Synthetic oligonucleotide
aagucagugagaucuccac

SEQ ID NO: 2623258 - RNA, 19 nt, Artificial Sequence
  Description of Artificial Sequence: Synthetic oligonucleotide
aagagccauguucuggacc

SEQ ID NO: 2623259 - RNA, 19 nt, Artificial Sequence
  Description of Artificial Sequence: Synthetic oligonucleotide
ugccgaagggaaaagagag

SEQ ID NO: 2623260 - RNA, 19 nt, Artificial Sequence
  Description of Artificial Sequence: Synthetic oligonucleotide
uuuauugaaagaagcaaua

SEQ ID NO: 2623261 - RNA, 19 nt, Artificial Sequence
  Description of Artificial Sequence: Synthetic oligonucleotide
agcacuuccguggagaccc

SEQ ID NO: 2623262 - RNA, 19 nt, Artificial Sequence
  Description of Artificial Sequence: Synthetic oligonucleotide
augaauacggucucuguag

SEQ ID NO: 2623263 - RNA, 19 nt, Artificial Sequence
  Description of Artificial Sequence: Synthetic oligonucleotide
agcaauagaggguugagga

SEQ ID NO: 2623264 - RNA, 19 nt, Artificial Sequence
  Description of Artificial Sequence: Synthetic oligonucleotide
uugcaagucagugagaucu

SEQ ID NO: 2623265 - RNA, 19 nt, Artificial Sequence
  Description of Artificial Sequence: Synthetic oligonucleotide
aacuguuuuccacuaacgu

SEQ ID NO: 2623266 - RNA, 19 nt, Artificial Sequence
  Description of Artificial Sequence: Synthetic oligonucleotide
caugaaaccugauaucggc

SEQ ID NO: 2623267 - RNA, 19 nt, Artificial Sequence
  Description of Artificial Sequence: Synthetic oligonucleotide
agguuguauaguaagaagg

SEQ ID NO: 2623268 - RNA, 19 nt, Artificial Sequence
  Description of Artificial Sequence: Synthetic oligonucleotide
gaugccaucgccgccaucg

SEQ ID NO: 2623269 - RNA, 19 nt, Artificial Sequence
  Description of Artificial Sequence: Synthetic oligonucleotide
agaaggggugaucuggggc

SEQ ID NO: 2623270 - RNA, 19 nt, Artificial Sequence
  Description of Artificial Sequence: Synthetic oligonucleotide
agcaagauaggccggacag

SEQ ID NO: 2623271 - RNA, 19 nt, Artificial Sequence
  Description of Artificial Sequence: Synthetic oligonucleotide
ugaaaccugauaucggccc

SEQ ID NO: 2623272 - RNA, 19 nt, Artificial Sequence
  Description of Artificial Sequence: Synthetic oligonucleotide
uagguaguagaucacuaug

SEQ ID NO: 2623273 - RNA, 19 nt, Artificial Sequence
  Description of Artificial Sequence: Synthetic oligonucleotide
ugcaugagcgcucuugugc

SEQ ID NO: 2623274 - RNA, 19 nt, Artificial Sequence
  Description of Artificial Sequence: Synthetic oligonucleotide
uaagaaggggugaucuggg

SEQ ID NO: 2623275 - RNA, 19 nt, Artificial Sequence
  Description of Artificial Sequence: Synthetic oligonucleotide
uuccuuaggaggcuauagg

SEQ ID NO: 2623276 - RNA, 19 nt, Artificial Sequence
  Description of Artificial Sequence: Synthetic oligonucleotide
agauaggccggacagcagg

SEQ ID NO: 2623277 - RNA, 19 nt, Artificial Sequence
  Description of Artificial Sequence: Synthetic oligonucleotide
gagguuguauaguaagaag

SEQ ID NO: 2623278 - RNA, 19 nt, Artificial Sequence
  Description of Artificial Sequence: Synthetic oligonucleotide
uucauggcaaauagcaacu

SEQ ID NO: 2623279 - RNA, 19 nt, Artificial Sequence
  Description of Artificial Sequence: Synthetic oligonucleotide
aaacuguuuuccacuaacg

SEQ ID NO: 2623280 - RNA, 19 nt, Artificial Sequence
  Description of Artificial Sequence: Synthetic oligonucleotide
aaagagagcaagccgcccu

SEQ ID NO: 2623281 - RNA, 19 nt, Artificial Sequence
  Description of Artificial Sequence: Synthetic oligonucleotide
auaggugccugcaugagcg

SEQ ID NO: 2623282 - RNA, 19 nt, Artificial Sequence
  Description of Artificial Sequence: Synthetic oligonucleotide
uccacuaacgucugcauaa

SEQ ID NO: 2623283 - RNA, 19 nt, Artificial Sequence
  Description of Artificial Sequence: Synthetic oligonucleotide
guaagaaggggugaucugg

SEQ ID NO: 2623284 - RNA, 19 nt, Artificial Sequence
  Description of Artificial Sequence: Synthetic oligonucleotide
gcuauaggacucuucaucg

SEQ ID NO: 2623285 - RNA, 19 nt, Artificial Sequence
  Description of Artificial Sequence: Synthetic oligonucleotide
auaaagagccauguucugg

SEQ ID NO: 2623286 - RNA, 19 nt, Artificial Sequence
  Description of Artificial Sequence: Synthetic oligonucleotide
cugacuguaaacaggggug

SEQ ID NO: 2623287 - RNA, 19 nt, Artificial Sequence
  Description of Artificial Sequence: Synthetic oligonucleotide
cacacugacuguaaacagg

SEQ ID NO: 2623288 - RNA, 19 nt, Artificial Sequence
  Description of Artificial Sequence: Synthetic oligonucleotide
aaagagccauguucuggac

SEQ ID NO: 2623289 - RNA, 19 nt, Artificial Sequence
  Description of Artificial Sequence: Synthetic oligonucleotide
aaugacggaaauguccuca

SEQ ID NO: 2623290 - RNA, 19 nt, Artificial Sequence
  Description of Artificial Sequence: Synthetic oligonucleotide
gaacaugcggagcagacga

SEQ ID NO: 2623291 - RNA, 19 nt, Artificial Sequence
  Description of Artificial Sequence: Synthetic oligonucleotide
aagcaauagaggguugagg

SEQ ID NO: 2623292 - RNA, 19 nt, Artificial Sequence
  Description of Artificial Sequence: Synthetic oligonucleotide
uagaucacuaugccgauua

SEQ ID NO: 2623293 - RNA, 19 nt, Artificial Sequence
  Description of Artificial Sequence: Synthetic oligonucleotide
uauaggacucuucaucgaa

SEQ ID NO: 2623294 - RNA, 19 nt, Artificial Sequence
  Description of Artificial Sequence: Synthetic oligonucleotide
uuugcauugaaggcuaggu

SEQ ID NO: 2623295 - RNA, 19 nt, Artificial Sequence
  Description of Artificial Sequence: Synthetic oligonucleotide
uguaaacagggguggaaug

SEQ ID NO: 2623296 - RNA, 19 nt, Artificial Sequence
  Description of Artificial Sequence: Synthetic oligonucleotide
uaacgucugcauaaagagc

SEQ ID NO: 2623297 - RNA, 19 nt, Artificial Sequence
  Description of Artificial Sequence: Synthetic oligonucleotide
aagaaggggugaucugggg

SEQ ID NO: 2623298 - RNA, 19 nt, Artificial Sequence
  Description of Artificial Sequence: Synthetic oligonucleotide
aucacuaugccgauuacug

SEQ ID NO: 2623299 - RNA, 19 nt, Artificial Sequence
  Description of Artificial Sequence: Synthetic oligonucleotide
ugacuguaaacaggggugg

SEQ ID NO: 2623300 - RNA, 19 nt, Artificial Sequence
  Description of Artificial Sequence: Synthetic oligonucleotide
auguucuggacccuguucu

SEQ ID NO: 2623301 - RNA, 19 nt, Artificial Sequence
  Description of Artificial Sequence: Synthetic oligonucleotide
uucaucgaagaaucugacc

SEQ ID NO: 2623302 - RNA, 19 nt, Artificial Sequence
  Description of Artificial Sequence: Synthetic oligonucleotide
agugagaucuccacgauga

SEQ ID NO: 2623303 - RNA, 19 nt, Artificial Sequence
  Description of Artificial Sequence: Synthetic oligonucleotide
agaaaugacggcaucugag

SEQ ID NO: 2623304 - RNA, 19 nt, Artificial Sequence
  Description of Artificial Sequence: Synthetic oligonucleotide
ggaaaagagagcaagccgc

SEQ ID NO: 2623305 - RNA, 19 nt, Artificial Sequence
  Description of Artificial Sequence: Synthetic oligonucleotide
gagcagacgaggaagcgcg

SEQ ID NO: 2623306 - RNA, 19 nt, Artificial Sequence
  Description of Artificial Sequence: Synthetic oligonucleotide
agaucuccacgaugaauac

SEQ ID NO: 2623307 - RNA, 19 nt, Artificial Sequence
  Description of Artificial Sequence: Synthetic oligonucleotide
ugaauacggucucuguaga

SEQ ID NO: 2623308 - RNA, 19 nt, Artificial Sequence
  Description of Artificial Sequence: Synthetic oligonucleotide
ucuguagaaaugacggcau

SEQ ID NO: 2623309 - RNA, 19 nt, Artificial Sequence
  Description of Artificial Sequence: Synthetic oligonucleotide
uagaaaugacggcaucuga

SEQ ID NO: 2623310 - RNA, 19 nt, Artificial Sequence
  Description of Artificial Sequence: Synthetic oligonucleotide
ugagguuguauaguaagaa

SEQ ID NO: 2623311 - RNA, 19 nt, Artificial Sequence
  Description of Artificial Sequence: Synthetic oligonucleotide
uaguaagaaggggugaucu

SEQ ID NO: 2623312 - RNA, 19 nt, Artificial Sequence
  Description of Artificial Sequence: Synthetic oligonucleotide
gggaaaagagagcaagccg

SEQ ID NO: 2623313 - RNA, 19 nt, Artificial Sequence
  Description of Artificial Sequence: Synthetic oligonucleotide
gauuacugcagccagcacu

SEQ ID NO: 2623314 - RNA, 19 nt, Artificial Sequence
  Description of Artificial Sequence: Synthetic oligonucleotide
gauaucggcccacauccug

SEQ ID NO: 2623315 - RNA, 19 nt, Artificial Sequence
  Description of Artificial Sequence: Synthetic oligonucleotide
gaaucugaccucauaggug

SEQ ID NO: 2623316 - RNA, 19 nt, Artificial Sequence
  Description of Artificial Sequence: Synthetic oligonucleotide
uaugccgauuacugcagcc

SEQ ID NO: 2623317 - RNA, 19 nt, Artificial Sequence
  Description of Artificial Sequence: Synthetic oligonucleotide
uuuuacuucauggcaaaua

SEQ ID NO: 2623318 - RNA, 19 nt, Artificial Sequence
  Description of Artificial Sequence: Synthetic oligonucleotide
ugaacaugcggagcagacg

SEQ ID NO: 2623319 - RNA, 19 nt, Artificial Sequence
  Description of Artificial Sequence: Synthetic oligonucleotide
gagcaagccgcccugaaca

SEQ ID NO: 2623320 - RNA, 19 nt, Artificial Sequence
  Description of Artificial Sequence: Synthetic oligonucleotide
ucuugcaagucagugagau

SEQ ID NO: 2623321 - RNA, 19 nt, Artificial Sequence
  Description of Artificial Sequence: Synthetic oligonucleotide
aaugacggcaucugagguu

SEQ ID NO: 2623322 - RNA, 19 nt, Artificial Sequence
  Description of Artificial Sequence: Synthetic oligonucleotide
aaaccugauaucggcccac

SEQ ID NO: 2623323 - RNA, 19 nt, Artificial Sequence
  Description of Artificial Sequence: Synthetic oligonucleotide
acuaacgucugcauaaaga

SEQ ID NO: 2623324 - RNA, 19 nt, Artificial Sequence
  Description of Artificial Sequence: Synthetic oligonucleotide
cuguuuauugaaagaagca

SEQ ID NO: 2623325 - RNA, 19 nt, Artificial Sequence
  Description of Artificial Sequence: Synthetic oligonucleotide
uauaguaagaaggggugau

SEQ ID NO: 2623326 - RNA, 19 nt, Artificial Sequence
  Description of Artificial Sequence: Synthetic oligonucleotide
ucucuguagaaaugacggc

SEQ ID NO: 2623327 - RNA, 19 nt, Artificial Sequence
  Description of Artificial Sequence: Synthetic oligonucleotide
agacgaggaagcgcgacgc

SEQ ID NO: 2623328 - RNA, 19 nt, Artificial Sequence
  Description of Artificial Sequence: Synthetic oligonucleotide
guuacaggaaacuguuuuc

SEQ ID NO: 2623329 - RNA, 19 nt, Artificial Sequence
  Description of Artificial Sequence: Synthetic oligonucleotide
gaaaagagagcaagccgcc

SEQ ID NO: 2623330 - RNA, 19 nt, Artificial Sequence
  Description of Artificial Sequence: Synthetic oligonucleotide
ucacuaugccgauuacugc

SEQ ID NO: 2623331 - RNA, 19 nt, Artificial Sequence
  Description of Artificial Sequence: Synthetic oligonucleotide
agagcaagccgcccugaac

SEQ ID NO: 2623332 - RNA, 19 nt, Artificial Sequence
  Description of Artificial Sequence: Synthetic oligonucleotide
gucagugagaucuccacga

SEQ ID NO: 2623333 - RNA, 19 nt, Artificial Sequence
  Description of Artificial Sequence: Synthetic oligonucleotide
ucauuauuucucugagccu

SEQ ID NO: 2623334 - RNA, 19 nt, Artificial Sequence
  Description of Artificial Sequence: Synthetic oligonucleotide
ugccgauuacugcagccag

SEQ ID NO: 2623335 - RNA, 19 nt, Artificial Sequence
  Description of Artificial Sequence: Synthetic oligonucleotide
uacaggaaacuguuuucca

SEQ ID NO: 2623336 - RNA, 19 nt, Artificial Sequence
  Description of Artificial Sequence: Synthetic oligonucleotide
aguaagaaggggugaucug

SEQ ID NO: 2623337 - RNA, 19 nt, Artificial Sequence
  Description of Artificial Sequence: Synthetic oligonucleotide
ucucugagccuuccuuagg

SEQ ID NO: 2623338 - RNA, 19 nt, Artificial Sequence
  Description of Artificial Sequence: Synthetic oligonucleotide
gacggaaauguccucauua

SEQ ID NO: 2623339 - RNA, 19 nt, Artificial Sequence
  Description of Artificial Sequence: Synthetic oligonucleotide
uccucaagccuggaugugg

SEQ ID NO: 2623340 - RNA, 19 nt, Artificial Sequence
  Description of Artificial Sequence: Synthetic oligonucleotide
ugcggagcagacgaggaag

SEQ ID NO: 2623341 - RNA, 19 nt, Artificial Sequence
  Description of Artificial Sequence: Synthetic oligonucleotide
aggguugaggaugcugucc

SEQ ID NO: 2623342 - RNA, 19 nt, Artificial Sequence
  Description of Artificial Sequence: Synthetic oligonucleotide
gaagcaauagaggguugag

SEQ ID NO: 2623343 - RNA, 19 nt, Artificial Sequence
  Description of Artificial Sequence: Synthetic oligonucleotide
auaguaagaaggggugauc

SEQ ID NO: 2623344 - RNA, 19 nt, Artificial Sequence
  Description of Artificial Sequence: Synthetic oligonucleotide
gaaagaugccaucgccgcc

SEQ ID NO: 2623345 - RNA, 19 nt, Artificial Sequence
  Description of Artificial Sequence: Synthetic oligonucleotide
gaucuccacgaugaauacg

SEQ ID NO: 2623346 - RNA, 19 nt, Artificial Sequence
  Description of Artificial Sequence: Synthetic oligonucleotide
agcgcgacgcguaagcggc

SEQ ID NO: 2623347 - RNA, 19 nt, Artificial Sequence
  Description of Artificial Sequence: Synthetic oligonucleotide
cacuaugccgauuacugca

SEQ ID NO: 2623348 - RNA, 19 nt, Artificial Sequence
  Description of Artificial Sequence: Synthetic oligonucleotide
augagcgcucuugugcucc

SEQ ID NO: 2623349 - RNA, 19 nt, Artificial Sequence
  Description of Artificial Sequence: Synthetic oligonucleotide
agaucacuaugccgauuac

SEQ ID NO: 2623350 - RNA, 19 nt, Artificial Sequence
  Description of Artificial Sequence: Synthetic oligonucleotide
uuccguggagacccaaggc

SEQ ID NO: 2623351 - RNA, 19 nt, Artificial Sequence
  Description of Artificial Sequence: Synthetic oligonucleotide
uacggucucuguagaaaug

SEQ ID NO: 2623352 - RNA, 19 nt, Artificial Sequence
  Description of Artificial Sequence: Synthetic oligonucleotide
augacggcaucugagguug

SEQ ID NO: 2623353 - RNA, 19 nt, Artificial Sequence
  Description of Artificial Sequence: Synthetic oligonucleotide
cucuucaucgaagaaucug

SEQ ID NO: 2623354 - RNA, 19 nt, Artificial Sequence
  Description of Artificial Sequence: Synthetic oligonucleotide
cugaacaugcggagcagac

SEQ ID NO: 2623355 - RNA, 19 nt, Artificial Sequence
  Description of Artificial Sequence: Synthetic oligonucleotide
ucugcugagcagcaagaua

SEQ ID NO: 2623356 - RNA, 19 nt, Artificial Sequence
  Description of Artificial Sequence: Synthetic oligonucleotide
uaaacagggguggaaugac

SEQ ID NO: 2623357 - RNA, 19 nt, Artificial Sequence
  Description of Artificial Sequence: Synthetic oligonucleotide
ugaaggcuagguaguagau

SEQ ID NO: 2623358 - RNA, 19 nt, Artificial Sequence
  Description of Artificial Sequence: Synthetic oligonucleotide
uugcauugaaggcuaggua

SEQ ID NO: 2623359 - RNA, 19 nt, Artificial Sequence
  Description of Artificial Sequence: Synthetic oligonucleotide
cuuccuuaggaggcuauag

SEQ ID NO: 2623360 - RNA, 19 nt, Artificial Sequence
  Description of Artificial Sequence: Synthetic oligonucleotide
acggaaauguccucauuau

SEQ ID NO: 2623361 - RNA, 19 nt, Artificial Sequence
  Description of Artificial Sequence: Synthetic oligonucleotide
auaucggcccacauccugg

SEQ ID NO: 2623362 - RNA, 19 nt, Artificial Sequence
  Description of Artificial Sequence: Synthetic oligonucleotide
agaagcaauagaggguuga

SEQ ID NO: 2623363 - RNA, 19 nt, Artificial Sequence
  Description of Artificial Sequence: Synthetic oligonucleotide
cuuaggaggcuauaggacu

SEQ ID NO: 2623364 - RNA, 19 nt, Artificial Sequence
  Description of Artificial Sequence: Synthetic oligonucleotide
ggcuauaggacucuucauc

SEQ ID NO: 2623365 - RNA, 19 nt, Artificial Sequence
  Description of Artificial Sequence: Synthetic oligonucleotide
ugauccacacugacuguaa

SEQ ID NO: 2623366 - RNA, 19 nt, Artificial Sequence
  Description of Artificial Sequence: Synthetic oligonucleotide
aucgaagaaucugaccuca

SEQ ID NO: 2623367 - RNA, 19 nt, Artificial Sequence
  Description of Artificial Sequence: Synthetic oligonucleotide
gccccgaugauccacacug

SEQ ID NO: 2623368 - RNA, 19 nt, Artificial Sequence
  Description of Artificial Sequence: Synthetic oligonucleotide
cuuugcauugaaggcuagg

SEQ ID NO: 2623369 - RNA, 19 nt, Artificial Sequence
  Description of Artificial Sequence: Synthetic oligonucleotide
acaugcggagcagacgagg

SEQ ID NO: 2623370 - RNA, 19 nt, Artificial Sequence
  Description of Artificial Sequence: Synthetic oligonucleotide
caucgaagaaucugaccuc

SEQ ID NO: 2623371 - RNA, 19 nt, Artificial Sequence
  Description of Artificial Sequence: Synthetic oligonucleotide
guccucauuauuucucuga

SEQ ID NO: 2623372 - RNA, 19 nt, Artificial Sequence
  Description of Artificial Sequence: Synthetic oligonucleotide
auaggacucuucaucgaag

SEQ ID NO: 2623373 - RNA, 19 nt, Artificial Sequence
  Description of Artificial Sequence: Synthetic oligonucleotide
guaaacagggguggaauga

SEQ ID NO: 2623374 - RNA, 19 nt, Artificial Sequence
  Description of Artificial Sequence: Synthetic oligonucleotide
cagacgaggaagcgcgacg

SEQ ID NO: 2623375 - RNA, 19 nt, Artificial Sequence
  Description of Artificial Sequence: Synthetic oligonucleotide
ccaggugccccgaugaucc

SEQ ID NO: 2623376 - RNA, 19 nt, Artificial Sequence
  Description of Artificial Sequence: Synthetic oligonucleotide
caagauaggccggacagca

SEQ ID NO: 2623377 - RNA, 19 nt, Artificial Sequence
  Description of Artificial Sequence: Synthetic oligonucleotide
ucauggcaaauagcaacug

SEQ ID NO: 2623378 - RNA, 19 nt, Artificial Sequence
  Description of Artificial Sequence: Synthetic oligonucleotide
gaagcgcgacgcguaagcg

SEQ ID NO: 2623379 - RNA, 19 nt, Artificial Sequence
  Description of Artificial Sequence: Synthetic oligonucleotide
gguggaaugacggaaaugu

SEQ ID NO: 2623380 - RNA, 19 nt, Artificial Sequence
  Description of Artificial Sequence: Synthetic oligonucleotide
uuccacuaacgucugcaua

SEQ ID NO: 2623381 - RNA, 19 nt, Artificial Sequence
  Description of Artificial Sequence: Synthetic oligonucleotide
ccgaaagaugccaucgccg

SEQ ID NO: 2623382 - RNA, 19 nt, Artificial Sequence
  Description of Artificial Sequence: Synthetic oligonucleotide
acggucucuguagaaauga

SEQ ID NO: 2623383 - RNA, 19 nt, Artificial Sequence
  Description of Artificial Sequence: Synthetic oligonucleotide
ucagugagaucuccacgau

SEQ ID NO: 2623384 - RNA, 19 nt, Artificial Sequence
  Description of Artificial Sequence: Synthetic oligonucleotide
agcgcucuugugcuccagg

SEQ ID NO: 2623385 - RNA, 19 nt, Artificial Sequence
  Description of Artificial Sequence: Synthetic oligonucleotide
aguagaucacuaugccgau

SEQ ID NO: 2623386 - RNA, 19 nt, Artificial Sequence
  Description of Artificial Sequence: Synthetic oligonucleotide
cugagguuguauaguaaga

SEQ ID NO: 2623387 - RNA, 19 nt, Artificial Sequence
  Description of Artificial Sequence: Synthetic oligonucleotide
gaaggcuagguaguagauc

SEQ ID NO: 2623388 - RNA, 19 nt, Artificial Sequence
  Description of Artificial Sequence: Synthetic oligonucleotide
acccuguucuugcaaguca

SEQ ID NO: 2623389 - RNA, 19 nt, Artificial Sequence
  Description of Artificial Sequence: Synthetic oligonucleotide
aucgccucuucucugccga

SEQ ID NO: 2623390 - RNA, 19 nt, Artificial Sequence
  Description of Artificial Sequence: Synthetic oligonucleotide
acgaugaauacggucucug

SEQ ID NO: 2623391 - RNA, 19 nt, Artificial Sequence
  Description of Artificial Sequence: Synthetic oligonucleotide
uggauguggcucuuugcau

SEQ ID NO: 2623392 - RNA, 19 nt, Artificial Sequence
  Description of Artificial Sequence: Synthetic oligonucleotide
aggaaacuguuuuccacua

SEQ ID NO: 2623393 - RNA, 19 nt, Artificial Sequence
  Description of Artificial Sequence: Synthetic oligonucleotide
uaucggcccacauccuggc

SEQ ID NO: 2623394 - RNA, 19 nt, Artificial Sequence
  Description of Artificial Sequence: Synthetic oligonucleotide
ccaugaaaccugauaucgg

SEQ ID NO: 2623395 - RNA, 19 nt, Artificial Sequence
  Description of Artificial Sequence: Synthetic oligonucleotide
guauaguaagaagggguga

SEQ ID NO: 2623396 - RNA, 19 nt, Artificial Sequence
  Description of Artificial Sequence: Synthetic oligonucleotide
cacuaacgucugcauaaag

SEQ ID NO: 2623397 - RNA, 19 nt, Artificial Sequence
  Description of Artificial Sequence: Synthetic oligonucleotide
ccuuaggaggcuauaggac

SEQ ID NO: 2623398 - RNA, 19 nt, Artificial Sequence
  Description of Artificial Sequence: Synthetic oligonucleotide
uucuugcaagucagugaga

SEQ ID NO: 2623399 - RNA, 19 nt, Artificial Sequence
  Description of Artificial Sequence: Synthetic oligonucleotide
ugauaucggcccacauccu

SEQ ID NO: 2623400 - RNA, 19 nt, Artificial Sequence
  Description of Artificial Sequence: Synthetic oligonucleotide
gaauacggucucuguagaa

SEQ ID NO: 2623401 - RNA, 19 nt, Artificial Sequence
  Description of Artificial Sequence: Synthetic oligonucleotide
cuaugccgauuacugcagc

SEQ ID NO: 2623402 - RNA, 19 nt, Artificial Sequence
  Description of Artificial Sequence: Synthetic oligonucleotide
cucugagccuuccuuagga

SEQ ID NO: 2623403 - RNA, 19 nt, Artificial Sequence
  Description of Artificial Sequence: Synthetic oligonucleotide
gaaugacggaaauguccuc

SEQ ID NO: 2623404 - RNA, 19 nt, Artificial Sequence
  Description of Artificial Sequence: Synthetic oligonucleotide
aagaagcaauagaggguug

SEQ ID NO: 2623405 - RNA, 19 nt, Artificial Sequence
  Description of Artificial Sequence: Synthetic oligonucleotide
ggaagcgcgacgcguaagc

SEQ ID NO: 2623406 - RNA, 19 nt, Artificial Sequence
  Description of Artificial Sequence: Synthetic oligonucleotide
cagugagaucuccacgaug

SEQ ID NO: 2623407 - RNA, 19 nt, Artificial Sequence
  Description of Artificial Sequence: Synthetic oligonucleotide
caucugagguuguauagua

SEQ ID NO: 2623408 - RNA, 19 nt, Artificial Sequence
  Description of Artificial Sequence: Synthetic oligonucleotide
augacggaaauguccucau

SEQ ID NO: 2623409 - RNA, 19 nt, Artificial Sequence
  Description of Artificial Sequence: Synthetic oligonucleotide
cuauaggacucuucaucga

SEQ ID NO: 2623410 - RNA, 19 nt, Artificial Sequence
  Description of Artificial Sequence: Synthetic oligonucleotide
caagucagugagaucucca

SEQ ID NO: 2623411 - RNA, 19 nt, Artificial Sequence
  Description of Artificial Sequence: Synthetic oligonucleotide
ucugaccucauaggugccu

SEQ ID NO: 2623412 - RNA, 19 nt, Artificial Sequence
  Description of Artificial Sequence: Synthetic oligonucleotide
caucgccucuucucugccg

SEQ ID NO: 2623413 - RNA, 19 nt, Artificial Sequence
  Description of Artificial Sequence: Synthetic oligonucleotide
aacaugcggagcagacgag

SEQ ID NO: 2623414 - RNA, 19 nt, Artificial Sequence
  Description of Artificial Sequence: Synthetic oligonucleotide
cgaaagaugccaucgccgc

SEQ ID NO: 2623415 - RNA, 19 nt, Artificial Sequence
  Description of Artificial Sequence: Synthetic oligonucleotide
gccgaaagaugccaucgcc

SEQ ID NO: 2623416 - RNA, 19 nt, Artificial Sequence
  Description of Artificial Sequence: Synthetic oligonucleotide
cuguagaaaugacggcauc

SEQ ID NO: 2623417 - RNA, 19 nt, Artificial Sequence
  Description of Artificial Sequence: Synthetic oligonucleotide
aggacucuucaucgaagaa

SEQ ID NO: 2623418 - RNA, 19 nt, Artificial Sequence
  Description of Artificial Sequence: Synthetic oligonucleotide
gauccacacugacuguaaa

SEQ ID NO: 2623419 - RNA, 19 nt, Artificial Sequence
  Description of Artificial Sequence: Synthetic oligonucleotide
augccgauuacugcagcca

SEQ ID NO: 2623420 - RNA, 19 nt, Artificial Sequence
  Description of Artificial Sequence: Synthetic oligonucleotide
caugcggagcagacgagga

SEQ ID NO: 2623421 - RNA, 19 nt, Artificial Sequence
  Description of Artificial Sequence: Synthetic oligonucleotide
gguuacaggaaacuguuuu

SEQ ID NO: 2623422 - RNA, 19 nt, Artificial Sequence
  Description of Artificial Sequence: Synthetic oligonucleotide
ggcaaauagcaacuguuua

SEQ ID NO: 2623423 - RNA, 19 nt, Artificial Sequence
  Description of Artificial Sequence: Synthetic oligonucleotide
ucgaagaaucugaccucau

SEQ ID NO: 2623424 - RNA, 19 nt, Artificial Sequence
  Description of Artificial Sequence: Synthetic oligonucleotide
ucucugccgaagggaaaag

SEQ ID NO: 2623425 - RNA, 19 nt, Artificial Sequence
  Description of Artificial Sequence: Synthetic oligonucleotide
ccucauuauuucucugagc

SEQ ID NO: 2623426 - RNA, 19 nt, Artificial Sequence
  Description of Artificial Sequence: Synthetic oligonucleotide
gauaggccggacagcagga

SEQ ID NO: 2623427 - RNA, 19 nt, Artificial Sequence
  Description of Artificial Sequence: Synthetic oligonucleotide
gcauaaagagccauguucu

SEQ ID NO: 2623428 - RNA, 19 nt, Artificial Sequence
  Description of Artificial Sequence: Synthetic oligonucleotide
aggcuauaggacucuucau

SEQ ID NO: 2623429 - RNA, 19 nt, Artificial Sequence
  Description of Artificial Sequence: Synthetic oligonucleotide
cuggccccggguuacagga

SEQ ID NO: 2623430 - RNA, 19 nt, Artificial Sequence
  Description of Artificial Sequence: Synthetic oligonucleotide
ccugauaucggcccacauc

SEQ ID NO: 2623431 - RNA, 19 nt, Artificial Sequence
  Description of Artificial Sequence: Synthetic oligonucleotide
aaccugauaucggcccaca

SEQ ID NO: 2623432 - RNA, 19 nt, Artificial Sequence
  Description of Artificial Sequence: Synthetic oligonucleotide
ggaaugacggaaauguccu

SEQ ID NO: 2623433 - RNA, 19 nt, Artificial Sequence
  Description of Artificial Sequence: Synthetic oligonucleotide
agcagcaagauaggccgga

SEQ ID NO: 2623434 - RNA, 19 nt, Artificial Sequence
  Description of Artificial Sequence: Synthetic oligonucleotide
ugacggaaauguccucauu

SEQ ID NO: 2623435 - RNA, 19 nt, Artificial Sequence
  Description of Artificial Sequence: Synthetic oligonucleotide
cuagguaguagaucacuau

SEQ ID NO: 2623436 - RNA, 19 nt, Artificial Sequence
  Description of Artificial Sequence: Synthetic oligonucleotide
ggagcagacgaggaagcgc

SEQ ID NO: 2623437 - RNA, 19 nt, Artificial Sequence
  Description of Artificial Sequence: Synthetic oligonucleotide
cugcaugagcgcucuugug

SEQ ID NO: 2623438 - RNA, 19 nt, Artificial Sequence
  Description of Artificial Sequence: Synthetic oligonucleotide
uaggaggcuauaggacucu

SEQ ID NO: 2623439 - RNA, 19 nt, Artificial Sequence
  Description of Artificial Sequence: Synthetic oligonucleotide
uccaggugccccgaugauc

SEQ ID NO: 2623440 - RNA, 19 nt, Artificial Sequence
  Description of Artificial Sequence: Synthetic oligonucleotide
aggugccccgaugauccac

SEQ ID NO: 2623441 - RNA, 19 nt, Artificial Sequence
  Description of Artificial Sequence: Synthetic oligonucleotide
ccucauaggugccugcaug

SEQ ID NO: 2623442 - RNA, 19 nt, Artificial Sequence
  Description of Artificial Sequence: Synthetic oligonucleotide
gaugauccacacugacugu

SEQ ID NO: 2623443 - RNA, 19 nt, Artificial Sequence
  Description of Artificial Sequence: Synthetic oligonucleotide
ccagggcgccgaaagaugc

SEQ ID NO: 2623444 - RNA, 19 nt, Artificial Sequence
  Description of Artificial Sequence: Synthetic oligonucleotide
aggggugaucuggggcucc

SEQ ID NO: 2623445 - RNA, 19 nt, Artificial Sequence
  Description of Artificial Sequence: Synthetic oligonucleotide
accucauaggugccugcau

SEQ ID NO: 2623446 - RNA, 19 nt, Artificial Sequence
  Description of Artificial Sequence: Synthetic oligonucleotide
ccucaagccuggauguggc

SEQ ID NO: 2623447 - RNA, 19 nt, Artificial Sequence
  Description of Artificial Sequence: Synthetic oligonucleotide
gcgccgaaagaugccaucg

SEQ ID NO: 2623448 - RNA, 19 nt, Artificial Sequence
  Description of Artificial Sequence: Synthetic oligonucleotide
ccgaagggaaaagagagca

SEQ ID NO: 2623449 - RNA, 19 nt, Artificial Sequence
  Description of Artificial Sequence: Synthetic oligonucleotide
agcaagccgcccugaacau

SEQ ID NO: 2623450 - RNA, 19 nt, Artificial Sequence
  Description of Artificial Sequence: Synthetic oligonucleotide
acauccuggccccggguua

SEQ ID NO: 2623451 - RNA, 19 nt, Artificial Sequence
  Description of Artificial Sequence: Synthetic oligonucleotide
ugccccgaugauccacacu

SEQ ID NO: 2623452 - RNA, 19 nt, Artificial Sequence
  Description of Artificial Sequence: Synthetic oligonucleotide
ugagcgcucuugugcucca

SEQ ID NO: 2623453 - RNA, 19 nt, Artificial Sequence
  Description of Artificial Sequence: Synthetic oligonucleotide
guggaaugacggaaauguc

SEQ ID NO: 2623454 - RNA, 19 nt, Artificial Sequence
  Description of Artificial Sequence: Synthetic oligonucleotide
caugagcgcucuugugcuc

SEQ ID NO: 2623455 - RNA, 19 nt, Artificial Sequence
  Description of Artificial Sequence: Synthetic oligonucleotide
gcaagucagugagaucucc

SEQ ID NO: 2623456 - RNA, 19 nt, Artificial Sequence
  Description of Artificial Sequence: Synthetic oligonucleotide
augcggagcagacgaggaa

SEQ ID NO: 2623457 - RNA, 19 nt, Artificial Sequence
  Description of Artificial Sequence: Synthetic oligonucleotide
agggcgccgaaagaugcca

SEQ ID NO: 2623458 - RNA, 19 nt, Artificial Sequence
  Description of Artificial Sequence: Synthetic oligonucleotide
gccaucgccucuucucugc

SEQ ID NO: 2623459 - RNA, 19 nt, Artificial Sequence
  Description of Artificial Sequence: Synthetic oligonucleotide
accugauaucggcccacau

SEQ ID NO: 2623460 - RNA, 19 nt, Artificial Sequence
  Description of Artificial Sequence: Synthetic oligonucleotide
ggagacccaaggcccauuc

SEQ ID NO: 2623461 - RNA, 19 nt, Artificial Sequence
  Description of Artificial Sequence: Synthetic oligonucleotide
cagcaagauaggccggaca

SEQ ID NO: 2623462 - RNA, 19 nt, Artificial Sequence
  Description of Artificial Sequence: Synthetic oligonucleotide
aggaagcgcgacgcguaag

SEQ ID NO: 2623463 - RNA, 19 nt, Artificial Sequence
  Description of Artificial Sequence: Synthetic oligonucleotide
gaggaagcgcgacgcguaa

SEQ ID NO: 2623464 - RNA, 19 nt, Artificial Sequence
  Description of Artificial Sequence: Synthetic oligonucleotide
acggcaucugagguuguau

SEQ ID NO: 2623465 - RNA, 19 nt, Artificial Sequence
  Description of Artificial Sequence: Synthetic oligonucleotide
gcaagauaggccggacagc

SEQ ID NO: 2623466 - RNA, 19 nt, Artificial Sequence
  Description of Artificial Sequence: Synthetic oligonucleotide
cauccuggccccggguuac

SEQ ID NO: 2623467 - RNA, 19 nt, Artificial Sequence
  Description of Artificial Sequence: Synthetic oligonucleotide
aagccgcccugaacaugcg

SEQ ID NO: 2623468 - RNA, 19 nt, Artificial Sequence
  Description of Artificial Sequence: Synthetic oligonucleotide
agggguggaaugacggaaa

SEQ ID NO: 2623469 - RNA, 19 nt, Artificial Sequence
  Description of Artificial Sequence: Synthetic oligonucleotide
cccgaugauccacacugac

SEQ ID NO: 2623470 - RNA, 19 nt, Artificial Sequence
  Description of Artificial Sequence: Synthetic oligonucleotide
cagggguggaaugacggaa

SEQ ID NO: 2623471 - RNA, 19 nt, Artificial Sequence
  Description of Artificial Sequence: Synthetic oligonucleotide
acgucugcauaaagagcca

SEQ ID NO: 2623472 - RNA, 19 nt, Artificial Sequence
  Description of Artificial Sequence: Synthetic oligonucleotide
ggguggaaugacggaaaug

SEQ ID NO: 2623473 - RNA, 19 nt, Artificial Sequence
  Description of Artificial Sequence: Synthetic oligonucleotide
ggacucuucaucgaagaau

SEQ ID NO: 2623474 - RNA, 19 nt, Artificial Sequence
  Description of Artificial Sequence: Synthetic oligonucleotide
gccgccaucgccucuucuc

SEQ ID NO: 2623475 - RNA, 19 nt, Artificial Sequence
  Description of Artificial Sequence: Synthetic oligonucleotide
ugacggcaucugagguugu

SEQ ID NO: 2623476 - RNA, 19 nt, Artificial Sequence
  Description of Artificial Sequence: Synthetic oligonucleotide
gcaugagcgcucuugugcu

SEQ ID NO: 2623477 - RNA, 19 nt, Artificial Sequence
  Description of Artificial Sequence: Synthetic oligonucleotide
aggccggacagcaggagua

SEQ ID NO: 2623478 - RNA, 19 nt, Artificial Sequence
  Description of Artificial Sequence: Synthetic oligonucleotide
guccucaagccuggaugug

SEQ ID NO: 2623479 - RNA, 19 nt, Artificial Sequence
  Description of Artificial Sequence: Synthetic oligonucleotide
ggauguggcucuuugcauu

SEQ ID NO: 2623480 - RNA, 19 nt, Artificial Sequence
  Description of Artificial Sequence: Synthetic oligonucleotide
ggaguagcgccagggcgcc

SEQ ID NO: 2623481 - RNA, 19 nt, Artificial Sequence
  Description of Artificial Sequence: Synthetic oligonucleotide
ggaugcuguccucaagccu

SEQ ID NO: 2623482 - RNA, 19 nt, Artificial Sequence
  Description of Artificial Sequence: Synthetic oligonucleotide
ggcgccgaaagaugccauc

SEQ ID NO: 2623483 - RNA, 19 nt, Artificial Sequence
  Description of Artificial Sequence: Synthetic oligonucleotide
auguggcucuuugcauuga

SEQ ID NO: 2623484 - RNA, 19 nt, Artificial Sequence
  Description of Artificial Sequence: Synthetic oligonucleotide
ggaggcuauaggacucuuc

SEQ ID NO: 2623485 - RNA, 19 nt, Artificial Sequence
  Description of Artificial Sequence: Synthetic oligonucleotide
ccuggccccggguuacagg

SEQ ID NO: 2623486 - RNA, 19 nt, Artificial Sequence
  Description of Artificial Sequence: Synthetic oligonucleotide
uggccccggguuacaggaa

SEQ ID NO: 2623487 - RNA, 19 nt, Artificial Sequence
  Description of Artificial Sequence: Synthetic oligonucleotide
gagcgcucuugugcuccag

SEQ ID NO: 2623488 - RNA, 19 nt, Artificial Sequence
  Description of Artificial Sequence: Synthetic oligonucleotide
cccggguuacaggaaacug

SEQ ID NO: 2623489 - RNA, 19 nt, Artificial Sequence
  Description of Artificial Sequence: Synthetic oligonucleotide
gccgauuacugcagccagc

SEQ ID NO: 2623490 - RNA, 19 nt, Artificial Sequence
  Description of Artificial Sequence: Synthetic oligonucleotide
gcauugaaggcuagguagu

SEQ ID NO: 2623491 - RNA, 19 nt, Artificial Sequence
  Description of Artificial Sequence: Synthetic oligonucleotide
gcagacgaggaagcgcgac

SEQ ID NO: 2623492 - RNA, 19 nt, Artificial Sequence
  Description of Artificial Sequence: Synthetic oligonucleotide
gcaucugagguuguauagu

SEQ ID NO: 2623493 - RNA, 19 nt, Artificial Sequence
  Description of Artificial Sequence: Synthetic oligonucleotide
ccaucgccucuucucugcc

SEQ ID NO: 2623494 - RNA, 19 nt, Artificial Sequence
  Description of Artificial Sequence: Synthetic oligonucleotide
gacggcaucugagguugua

SEQ ID NO: 2623495 - RNA, 19 nt, Artificial Sequence
  Description of Artificial Sequence: Synthetic oligonucleotide
ggccggacagcaggaguag

SEQ ID NO: 2623496 - RNA, 19 nt, Artificial Sequence
  Description of Artificial Sequence: Synthetic oligonucleotide
ggugccccgaugauccaca

SEQ ID NO: 2623497 - RNA, 19 nt, Artificial Sequence
  Description of Artificial Sequence: Synthetic oligonucleotide
ccggguuacaggaaacugu

SEQ ID NO: 2623498 - RNA, 19 nt, Artificial Sequence
  Description of Artificial Sequence: Synthetic oligonucleotide
gaguagcgccagggcgccg

SEQ ID NO: 2623499 - RNA, 19 nt, Artificial Sequence
  Description of Artificial Sequence: Synthetic oligonucleotide
gccagggcgccgaaagaug

SEQ ID NO: 2623500 - RNA, 19 nt, Artificial Sequence
  Description of Artificial Sequence: Synthetic oligonucleotide
cggucucuguagaaaugac

SEQ ID NO: 2623501 - RNA, 19 nt, Artificial Sequence
  Description of Artificial Sequence: Synthetic oligonucleotide
agcagacgaggaagcgcga

SEQ ID NO: 2623502 - RNA, 19 nt, Artificial Sequence
  Description of Artificial Sequence: Synthetic oligonucleotide
gcaagccgcccugaacaug

SEQ ID NO: 2623503 - RNA, 19 nt, Artificial Sequence
  Description of Artificial Sequence: Synthetic oligonucleotide
gcagcaagauaggccggac

SEQ ID NO: 2623504 - RNA, 19 nt, Artificial Sequence
  Description of Artificial Sequence: Synthetic oligonucleotide
aggaggcuauaggacucuu

SEQ ID NO: 2623505 - RNA, 19 nt, Artificial Sequence
  Description of Artificial Sequence: Synthetic oligonucleotide
ggccccggguuacaggaaa

SEQ ID NO: 2623506 - RNA, 19 nt, Artificial Sequence
  Description of Artificial Sequence: Synthetic oligonucleotide
ggacccuguucuugcaagu

SEQ ID NO: 2623507 - RNA, 19 nt, Artificial Sequence
  Description of Artificial Sequence: Synthetic oligonucleotide
gagccuuccuuaggaggcu

SEQ ID NO: 2623508 - RNA, 19 nt, Artificial Sequence
  Description of Artificial Sequence: Synthetic oligonucleotide
cucaagccuggauguggcu

SEQ ID NO: 2623509 - RNA, 19 nt, Artificial Sequence
  Description of Artificial Sequence: Synthetic oligonucleotide
ccgaugauccacacugacu

SEQ ID NO: 2623510 - RNA, 19 nt, Artificial Sequence
  Description of Artificial Sequence: Synthetic oligonucleotide
cacgaugaauacggucucu

SEQ ID NO: 2623511 - RNA, 19 nt, Artificial Sequence
  Description of Artificial Sequence: Synthetic oligonucleotide
ccugaacaugcggagcaga

SEQ ID NO: 2623512 - RNA, 19 nt, Artificial Sequence
  Description of Artificial Sequence: Synthetic oligonucleotide
cggagcagacgaggaagcg

SEQ ID NO: 2623513 - RNA, 19 nt, Artificial Sequence
  Description of Artificial Sequence: Synthetic oligonucleotide
guagaucacuaugccgauu

SEQ ID NO: 2623514 - RNA, 19 nt, Artificial Sequence
  Description of Artificial Sequence: Synthetic oligonucleotide
cgaagaaucugaccucaua

SEQ ID NO: 2623515 - RNA, 19 nt, Artificial Sequence
  Description of Artificial Sequence: Synthetic oligonucleotide
gggguggaaugacggaaau

SEQ ID NO: 2623516 - RNA, 19 nt, Artificial Sequence
  Description of Artificial Sequence: Synthetic oligonucleotide
caggugccccgaugaucca

SEQ ID NO: 2623517 - RNA, 19 nt, Artificial Sequence
  Description of Artificial Sequence: Synthetic oligonucleotide
gugccugcaugagcgcucu

SEQ ID NO: 2623518 - RNA, 19 nt, Artificial Sequence
  Description of Artificial Sequence: Synthetic oligonucleotide
cgauuacugcagccagcac

SEQ ID NO: 2623519 - RNA, 19 nt, Artificial Sequence
  Description of Artificial Sequence: Synthetic oligonucleotide
auccuggccccggguuaca

SEQ ID NO: 2623520 - RNA, 19 nt, Artificial Sequence
  Description of Artificial Sequence: Synthetic oligonucleotide
guagcgccagggcgccgaa

SEQ ID NO: 2623521 - RNA, 19 nt, Artificial Sequence
  Description of Artificial Sequence: Synthetic oligonucleotide
ugccugcaugagcgcucuu

SEQ ID NO: 2623522 - RNA, 19 nt, Artificial Sequence
  Description of Artificial Sequence: Synthetic oligonucleotide
gccccggguuacaggaaac

SEQ ID NO: 2623523 - RNA, 19 nt, Artificial Sequence
  Description of Artificial Sequence: Synthetic oligonucleotide
cgaugaauacggucucugu

SEQ ID NO: 2623524 - RNA, 19 nt, Artificial Sequence
  Description of Artificial Sequence: Synthetic oligonucleotide
cggguuacaggaaacuguu

SEQ ID NO: 2623525 - RNA, 19 nt, Artificial Sequence
  Description of Artificial Sequence: Synthetic oligonucleotide
cacuuccguggagacccaa

SEQ ID NO: 2623526 - RNA, 19 nt, Artificial Sequence
  Description of Artificial Sequence: Synthetic oligonucleotide
ccacuaacgucugcauaaa

SEQ ID NO: 2623527 - RNA, 19 nt, Artificial Sequence
  Description of Artificial Sequence: Synthetic oligonucleotide
ccccgaugauccacacuga

SEQ ID NO: 2623528 - RNA, 19 nt, Artificial Sequence
  Description of Artificial Sequence: Synthetic oligonucleotide
cgccaucgccucuucucug

SEQ ID NO: 2623529 - RNA, 19 nt, Artificial Sequence
  Description of Artificial Sequence: Synthetic oligonucleotide
cgaggaagcgcgacgcgua

SEQ ID NO: 2623530 - RNA, 19 nt, Artificial Sequence
  Description of Artificial Sequence: Synthetic oligonucleotide
ggggugaucuggggcucca

SEQ ID NO: 2623531 - RNA, 19 nt, Artificial Sequence
  Description of Artificial Sequence: Synthetic oligonucleotide
cgccucuucucugccgaag

SEQ ID NO: 2623532 - RNA, 19 nt, Artificial Sequence
  Description of Artificial Sequence: Synthetic oligonucleotide
gcgccagggcgccgaaaga

SEQ ID NO: 2623533 - RNA, 19 nt, Artificial Sequence
  Description of Artificial Sequence: Synthetic oligonucleotide
gcgacgcguaagcggccuc

SEQ ID NO: 2623534 - RNA, 19 nt, Artificial Sequence
  Description of Artificial Sequence: Synthetic oligonucleotide
gcgcgacgcguaagcggcc

SEQ ID NO: 2623535 - RNA, 19 nt, Artificial Sequence
  Description of Artificial Sequence: Synthetic oligonucleotide
caucgccgccaucgccucu

SEQ ID NO: 2623536 - RNA, 19 nt, Artificial Sequence
  Description of Artificial Sequence: Synthetic oligonucleotide
cgacgcguaagcggccuca

SEQ ID NO: 2623537 - RNA, 19 nt, Artificial Sequence
  Description of Artificial Sequence: Synthetic oligonucleotide
gcacuuccguggagaccca

SEQ ID NO: 2623538 - RNA, 19 nt, Artificial Sequence
  Description of Artificial Sequence: Synthetic oligonucleotide
ggccucugcugagcagcaa

SEQ ID NO: 2623539 - RNA, 19 nt, Artificial Sequence
  Description of Artificial Sequence: Synthetic oligonucleotide
ccccggguuacaggaaacu

SEQ ID NO: 2623540 - RNA, 19 nt, Artificial Sequence
  Description of Artificial Sequence: Synthetic oligonucleotide
cgucugcauaaagagccau

SEQ ID NO: 2623541 - RNA, 19 nt, Artificial Sequence
  Description of Artificial Sequence: Synthetic oligonucleotide
gggcgccgaaagaugccau

SEQ ID NO: 2623542 - RNA, 19 nt, Artificial Sequence
  Description of Artificial Sequence: Synthetic oligonucleotide
cgccagggcgccgaaagau

SEQ ID NO: 2623543 - RNA, 19 nt, Artificial Sequence
  Description of Artificial Sequence: Synthetic oligonucleotide
cgcgacgcguaagcggccu

SEQ ID NO: 2623544 - RNA, 19 nt, Artificial Sequence
  Description of Artificial Sequence: Synthetic oligonucleotide
aaugugugcaacugggacc

SEQ ID NO: 2623545 - RNA, 19 nt, Artificial Sequence
  Description of Artificial Sequence: Synthetic oligonucleotide
ugagaucacuuccagaccg

SEQ ID NO: 2623546 - RNA, 19 nt, Artificial Sequence
  Description of Artificial Sequence: Synthetic oligonucleotide
augguuaguccuuugaugg

SEQ ID NO: 2623547 - RNA, 19 nt, Artificial Sequence
  Description of Artificial Sequence: Synthetic oligonucleotide
uuucuuacaaccugcauga

SEQ ID NO: 2623548 - RNA, 19 nt, Artificial Sequence
  Description of Artificial Sequence: Synthetic oligonucleotide
ucugaugugggucacuccc

SEQ ID NO: 2623549 - RNA, 19 nt, Artificial Sequence
  Description of Artificial Sequence: Synthetic oligonucleotide
guuucuuacaaccugcaug

SEQ ID NO: 2623550 - RNA, 19 nt, Artificial Sequence
  Description of Artificial Sequence: Synthetic oligonucleotide
ugugacugagaucacuucc

SEQ ID NO: 2623551 - RNA, 19 nt, Artificial Sequence
  Description of Artificial Sequence: Synthetic oligonucleotide
cagguccagaccaagaucg

SEQ ID NO: 2623552 - RNA, 19 nt, Artificial Sequence
  Description of Artificial Sequence: Synthetic oligonucleotide
uuuaggucagguucaagug

SEQ ID NO: 2623553 - RNA, 19 nt, Artificial Sequence
  Description of Artificial Sequence: Synthetic oligonucleotide
ucaaaucucauccccgccc

SEQ ID NO: 2623554 - RNA, 19 nt, Artificial Sequence
  Description of Artificial Sequence: Synthetic oligonucleotide
uuaggucagguucaagugc

SEQ ID NO: 2623555 - RNA, 19 nt, Artificial Sequence
  Description of Artificial Sequence: Synthetic oligonucleotide
uaaaugcugaagcggcucg

SEQ ID NO: 2623556 - RNA, 19 nt, Artificial Sequence
  Description of Artificial Sequence: Synthetic oligonucleotide
ucaacccagguccagacca

SEQ ID NO: 2623557 - RNA, 19 nt, Artificial Sequence
  Description of Artificial Sequence: Synthetic oligonucleotide
uaaugugugcaacugggac

SEQ ID NO: 2623558 - RNA, 19 nt, Artificial Sequence
  Description of Artificial Sequence: Synthetic oligonucleotide
gaggguaaaugcugaagcg

SEQ ID NO: 2623559 - RNA, 19 nt, Artificial Sequence
  Description of Artificial Sequence: Synthetic oligonucleotide
cagacuuuaggucagguuc

SEQ ID NO: 2623560 - RNA, 19 nt, Artificial Sequence
  Description of Artificial Sequence: Synthetic oligonucleotide
accugcaugacugaaauug

SEQ ID NO: 2623561 - RNA, 19 nt, Artificial Sequence
  Description of Artificial Sequence: Synthetic oligonucleotide
uguggauagucugagccgg

SEQ ID NO: 2623562 - RNA, 19 nt, Artificial Sequence
  Description of Artificial Sequence: Synthetic oligonucleotide
uccucaaaucucauccccg

SEQ ID NO: 2623563 - RNA, 19 nt, Artificial Sequence
  Description of Artificial Sequence: Synthetic oligonucleotide
ugcgaaagccuucugugcc

SEQ ID NO: 2623564 - RNA, 19 nt, Artificial Sequence
  Description of Artificial Sequence: Synthetic oligonucleotide
gauagucugagccggagca

SEQ ID NO: 2623565 - RNA, 19 nt, Artificial Sequence
  Description of Artificial Sequence: Synthetic oligonucleotide
uguggguugcuuuaaugug

SEQ ID NO: 2623566 - RNA, 19 nt, Artificial Sequence
  Description of Artificial Sequence: Synthetic oligonucleotide
uuguggguugcuuuaaugu

SEQ ID NO: 2623567 - RNA, 19 nt, Artificial Sequence
  Description of Artificial Sequence: Synthetic oligonucleotide
ucccguguuucuuacaacc

SEQ ID NO: 2623568 - RNA, 19 nt, Artificial Sequence
  Description of Artificial Sequence: Synthetic oligonucleotide
guuagcggcagauacuacc

SEQ ID NO: 2623569 - RNA, 19 nt, Artificial Sequence
  Description of Artificial Sequence: Synthetic oligonucleotide
acugggaccuccucaaauc

SEQ ID NO: 2623570 - RNA, 19 nt, Artificial Sequence
  Description of Artificial Sequence: Synthetic oligonucleotide
aagaucgcaggagccacgc

SEQ ID NO: 2623571 - RNA, 19 nt, Artificial Sequence
  Description of Artificial Sequence: Synthetic oligonucleotide
uuagcauugcgaaagccuu

SEQ ID NO: 2623572 - RNA, 19 nt, Artificial Sequence
  Description of Artificial Sequence: Synthetic oligonucleotide
caugguuaguccuuugaug

SEQ ID NO: 2623573 - RNA, 19 nt, Artificial Sequence
  Description of Artificial Sequence: Synthetic oligonucleotide
gguguggauagucugagcc

SEQ ID NO: 2623574 - RNA, 19 nt, Artificial Sequence
  Description of Artificial Sequence: Synthetic oligonucleotide
uuugauggcagaccagcgu

SEQ ID NO: 2623575 - RNA, 19 nt, Artificial Sequence
  Description of Artificial Sequence: Synthetic oligonucleotide
uuagcggcagauacuaccu

SEQ ID NO: 2623576 - RNA, 19 nt, Artificial Sequence
  Description of Artificial Sequence: Synthetic oligonucleotide
gaguccagacuuuagguca

SEQ ID NO: 2623577 - RNA, 19 nt, Artificial Sequence
  Description of Artificial Sequence: Synthetic oligonucleotide
augccuuucacuacaacuc

SEQ ID NO: 2623578 - RNA, 19 nt, Artificial Sequence
  Description of Artificial Sequence: Synthetic oligonucleotide
uuaaugugugcaacuggga

SEQ ID NO: 2623579 - RNA, 19 nt, Artificial Sequence
  Description of Artificial Sequence: Synthetic oligonucleotide
gauacuaccuggaucugug

SEQ ID NO: 2623580 - RNA, 19 nt, Artificial Sequence
  Description of Artificial Sequence: Synthetic oligonucleotide
cagaccagcguccuggucc

SEQ ID NO: 2623581 - RNA, 19 nt, Artificial Sequence
  Description of Artificial Sequence: Synthetic oligonucleotide
aggguaaaugcugaagcgg

SEQ ID NO: 2623582 - RNA, 19 nt, Artificial Sequence
  Description of Artificial Sequence: Synthetic oligonucleotide
cacuacaacucugaugugg

SEQ ID NO: 2623583 - RNA, 19 nt, Artificial Sequence
  Description of Artificial Sequence: Synthetic oligonucleotide
acuacaacucugauguggg

SEQ ID NO: 2623584 - RNA, 19 nt, Artificial Sequence
  Description of Artificial Sequence: Synthetic oligonucleotide
acaacucugauguggguca

SEQ ID NO: 2623585 - RNA, 19 nt, Artificial Sequence
  Description of Artificial Sequence: Synthetic oligonucleotide
uacuaccuggaucugugug

SEQ ID NO: 2623586 - RNA, 19 nt, Artificial Sequence
  Description of Artificial Sequence: Synthetic oligonucleotide
agcggcagauacuaccugg

SEQ ID NO: 2623587 - RNA, 19 nt, Artificial Sequence
  Description of Artificial Sequence: Synthetic oligonucleotide
ggaggguaaaugcugaagc

SEQ ID NO: 2623588 - RNA, 19 nt, Artificial Sequence
  Description of Artificial Sequence: Synthetic oligonucleotide
aucacuuccagaccgccca

SEQ ID NO: 2623589 - RNA, 19 nt, Artificial Sequence
  Description of Artificial Sequence: Synthetic oligonucleotide
cuggaguccagacuuuagg

SEQ ID NO: 2623590 - RNA, 19 nt, Artificial Sequence
  Description of Artificial Sequence: Synthetic oligonucleotide
acuuccagaccgcccaugg

SEQ ID NO: 2623591 - RNA, 19 nt, Artificial Sequence
  Description of Artificial Sequence: Synthetic oligonucleotide
uggaguccagacuuuaggu

SEQ ID NO: 2623592 - RNA, 19 nt, Artificial Sequence
  Description of Artificial Sequence: Synthetic oligonucleotide
cuuugauggcagaccagcg

SEQ ID NO: 2623593 - RNA, 19 nt, Artificial Sequence
  Description of Artificial Sequence: Synthetic oligonucleotide
cuuuccuguggcuuuugcc

SEQ ID NO: 2623594 - RNA, 19 nt, Artificial Sequence
  Description of Artificial Sequence: Synthetic oligonucleotide
ugcuuuaaugugugcaacu

SEQ ID NO: 2623595 - RNA, 19 nt, Artificial Sequence
  Description of Artificial Sequence: Synthetic oligonucleotide
acuaccuggaucugugugu

SEQ ID NO: 2623596 - RNA, 19 nt, Artificial Sequence
  Description of Artificial Sequence: Synthetic oligonucleotide
uggguugcuuuaaugugug

SEQ ID NO: 2623597 - RNA, 19 nt, Artificial Sequence
  Description of Artificial Sequence: Synthetic oligonucleotide
ucugugacugagaucacuu

SEQ ID NO: 2623598 - RNA, 19 nt, Artificial Sequence
  Description of Artificial Sequence: Synthetic oligonucleotide
guguggauagucugagccg

SEQ ID NO: 2623599 - RNA, 19 nt, Artificial Sequence
  Description of Artificial Sequence: Synthetic oligonucleotide
ucaagugcaggcuucuuuu

SEQ ID NO: 2623600 - RNA, 19 nt, Artificial Sequence
  Description of Artificial Sequence: Synthetic oligonucleotide
ugcccuucuuagcauugcg

SEQ ID NO: 2623601 - RNA, 19 nt, Artificial Sequence
  Description of Artificial Sequence: Synthetic oligonucleotide
agaccagcguccugguccc

SEQ ID NO: 2623602 - RNA, 19 nt, Artificial Sequence
  Description of Artificial Sequence: Synthetic oligonucleotide
ucuaaccucgggacuccgg

SEQ ID NO: 2623603 - RNA, 19 nt, Artificial Sequence
  Description of Artificial Sequence: Synthetic oligonucleotide
aacuuccugcuuggcagcc

SEQ ID NO: 2623604 - RNA, 19 nt, Artificial Sequence
  Description of Artificial Sequence: Synthetic oligonucleotide
aaaugcugaagcggcucgg

SEQ ID NO: 2623605 - RNA, 19 nt, Artificial Sequence
  Description of Artificial Sequence: Synthetic oligonucleotide
ugccuuucacuacaacucu

SEQ ID NO: 2623606 - RNA, 19 nt, Artificial Sequence
  Description of Artificial Sequence: Synthetic oligonucleotide
aacugggaccuccucaaau

SEQ ID NO: 2623607 - RNA, 19 nt, Artificial Sequence
  Description of Artificial Sequence: Synthetic oligonucleotide
uucuuagcauugcgaaagc

SEQ ID NO: 2623608 - RNA, 19 nt, Artificial Sequence
  Description of Artificial Sequence: Synthetic oligonucleotide
aucucauccccgcccaccg

SEQ ID NO: 2623609 - RNA, 19 nt, Artificial Sequence
  Description of Artificial Sequence: Synthetic oligonucleotide
uuugccgcugcugcuaugc

SEQ ID NO: 2623610 - RNA, 19 nt, Artificial Sequence
  Description of Artificial Sequence: Synthetic oligonucleotide
gaucgcaggagccacgcuc

SEQ ID NO: 2623611 - RNA, 19 nt, Artificial Sequence
  Description of Artificial Sequence: Synthetic oligonucleotide
cuucugugccacaggaggc

SEQ ID NO: 2623612 - RNA, 19 nt, Artificial Sequence
  Description of Artificial Sequence: Synthetic oligonucleotide
agaucacuuccagaccgcc

SEQ ID NO: 2623613 - RNA, 19 nt, Artificial Sequence
  Description of Artificial Sequence: Synthetic oligonucleotide
cuuuaggucagguucaagu

SEQ ID NO: 2623614 - RNA, 19 nt, Artificial Sequence
  Description of Artificial Sequence: Synthetic oligonucleotide
ucuuagcauugcgaaagcc

SEQ ID NO: 2623615 - RNA, 19 nt, Artificial Sequence
  Description of Artificial Sequence: Synthetic oligonucleotide
uacaacucugauguggguc

SEQ ID NO: 2623616 - RNA, 19 nt, Artificial Sequence
  Description of Artificial Sequence: Synthetic oligonucleotide
guugcuuuaaugugugcaa

SEQ ID NO: 2623617 - RNA, 19 nt, Artificial Sequence
  Description of Artificial Sequence: Synthetic oligonucleotide
uguuucuuacaaccugcau

SEQ ID NO: 2623618 - RNA, 19 nt, Artificial Sequence
  Description of Artificial Sequence: Synthetic oligonucleotide
uuccagaccgcccaugguu

SEQ ID NO: 2623619 - RNA, 19 nt, Artificial Sequence
  Description of Artificial Sequence: Synthetic oligonucleotide
aucgcaggagccacgcucc

SEQ ID NO: 2623620 - RNA, 19 nt, Artificial Sequence
  Description of Artificial Sequence: Synthetic oligonucleotide
ugucugugcugcgaugccg

SEQ ID NO: 2623621 - RNA, 19 nt, Artificial Sequence
  Description of Artificial Sequence: Synthetic oligonucleotide
ucugagccggagcaauggc

SEQ ID NO: 2623622 - RNA, 19 nt, Artificial Sequence
  Description of Artificial Sequence: Synthetic oligonucleotide
acucugaugugggucacuc

SEQ ID NO: 2623623 - RNA, 19 nt, Artificial Sequence
  Description of Artificial Sequence: Synthetic oligonucleotide
cugagccggagcaauggcc

SEQ ID NO: 2623624 - RNA, 19 nt, Artificial Sequence
  Description of Artificial Sequence: Synthetic oligonucleotide
ugguuaguccuuugauggc

SEQ ID NO: 2623625 - RNA, 19 nt, Artificial Sequence
  Description of Artificial Sequence: Synthetic oligonucleotide
gccuggucaacccaggucc

SEQ ID NO: 2623626 - RNA, 19 nt, Artificial Sequence
  Description of Artificial Sequence: Synthetic oligonucleotide
cugcaugacugaaauugac

SEQ ID NO: 2623627 - RNA, 19 nt, Artificial Sequence
  Description of Artificial Sequence: Synthetic oligonucleotide
cugagaucacuuccagacc

SEQ ID NO: 2623628 - RNA, 19 nt, Artificial Sequence
  Description of Artificial Sequence: Synthetic oligonucleotide
cuuagcauugcgaaagccu

SEQ ID NO: 2623629 - RNA, 19 nt, Artificial Sequence
  Description of Artificial Sequence: Synthetic oligonucleotide
uccuuugauggcagaccag

SEQ ID NO: 2623630 - RNA, 19 nt, Artificial Sequence
  Description of Artificial Sequence: Synthetic oligonucleotide
augccggugcccuucuuag

SEQ ID NO: 2623631 - RNA, 19 nt, Artificial Sequence
  Description of Artificial Sequence: Synthetic oligonucleotide
agccgcgucuucuaaccuc

SEQ ID NO: 2623632 - RNA, 19 nt, Artificial Sequence
  Description of Artificial Sequence: Synthetic oligonucleotide
cagaccaagaucgcaggag

SEQ ID NO: 2623633 - RNA, 19 nt, Artificial Sequence
  Description of Artificial Sequence: Synthetic oligonucleotide
agcguccuggucccaugcc

SEQ ID NO: 2623634 - RNA, 19 nt, Artificial Sequence
  Description of Artificial Sequence: Synthetic oligonucleotide
caagaucgcaggagccacg

SEQ ID NO: 2623635 - RNA, 19 nt, Artificial Sequence
  Description of Artificial Sequence: Synthetic oligonucleotide
uuuccaucacagccuucga

SEQ ID NO: 2623636 - RNA, 19 nt, Artificial Sequence
  Description of Artificial Sequence: Synthetic oligonucleotide
uggauagucugagccggag

SEQ ID NO: 2623637 - RNA, 19 nt, Artificial Sequence
  Description of Artificial Sequence: Synthetic oligonucleotide
gucugagccggagcaaugg

SEQ ID NO: 2623638 - RNA, 19 nt, Artificial Sequence
  Description of Artificial Sequence: Synthetic oligonucleotide
caagccuggucaacccagg

SEQ ID NO: 2623639 - RNA, 19 nt, Artificial Sequence
  Description of Artificial Sequence: Synthetic oligonucleotide
uguuguggguugcuuuaau

SEQ ID NO: 2623640 - RNA, 19 nt, Artificial Sequence
  Description of Artificial Sequence: Synthetic oligonucleotide
agacuuuaggucagguuca

SEQ ID NO: 2623641 - RNA, 19 nt, Artificial Sequence
  Description of Artificial Sequence: Synthetic oligonucleotide
aagccuggucaacccaggu

SEQ ID NO: 2623642 - RNA, 19 nt, Artificial Sequence
  Description of Artificial Sequence: Synthetic oligonucleotide
uccagaccgcccaugguua

SEQ ID NO: 2623643 - RNA, 19 nt, Artificial Sequence
  Description of Artificial Sequence: Synthetic oligonucleotide
uuacaaccugcaugacuga

SEQ ID NO: 2623644 - RNA, 19 nt, Artificial Sequence
  Description of Artificial Sequence: Synthetic oligonucleotide
agcauugcgaaagccuucu

SEQ ID NO: 2623645 - RNA, 19 nt, Artificial Sequence
  Description of Artificial Sequence: Synthetic oligonucleotide
guaaaugcugaagcggcuc

SEQ ID NO: 2623646 - RNA, 19 nt, Artificial Sequence
  Description of Artificial Sequence: Synthetic oligonucleotide
gucugugcugcgaugccgg

SEQ ID NO: 2623647 - RNA, 19 nt, Artificial Sequence
  Description of Artificial Sequence: Synthetic oligonucleotide
gaccaagaucgcaggagcc

SEQ ID NO: 2623648 - RNA, 19 nt, Artificial Sequence
  Description of Artificial Sequence: Synthetic oligonucleotide
gguugcuuuaaugugugca

SEQ ID NO: 2623649 - RNA, 19 nt, Artificial Sequence
  Description of Artificial Sequence: Synthetic oligonucleotide
guuguuguggguugcuuua

SEQ ID NO: 2623650 - RNA, 19 nt, Artificial Sequence
  Description of Artificial Sequence: Synthetic oligonucleotide
agauacuaccuggaucugu

SEQ ID NO: 2623651 - RNA, 19 nt, Artificial Sequence
  Description of Artificial Sequence: Synthetic oligonucleotide
gaucacuuccagaccgccc

SEQ ID NO: 2623652 - RNA, 19 nt, Artificial Sequence
  Description of Artificial Sequence: Synthetic oligonucleotide
uagcauugcgaaagccuuc

SEQ ID NO: 2623653 - RNA, 19 nt, Artificial Sequence
  Description of Artificial Sequence: Synthetic oligonucleotide
ugaagcggcucggagccgc

SEQ ID NO: 2623654 - RNA, 19 nt, Artificial Sequence
  Description of Artificial Sequence: Synthetic oligonucleotide
cuucgagccuuccggggcc

SEQ ID NO: 2623655 - RNA, 19 nt, Artificial Sequence
  Description of Artificial Sequence: Synthetic oligonucleotide
gcacguuagcggcagauac

SEQ ID NO: 2623656 - RNA, 19 nt, Artificial Sequence
  Description of Artificial Sequence: Synthetic oligonucleotide
uaaccucgggacuccggug

SEQ ID NO: 2623657 - RNA, 19 nt, Artificial Sequence
  Description of Artificial Sequence: Synthetic oligonucleotide
ggcagauacuaccuggauc

SEQ ID NO: 2623658 - RNA, 19 nt, Artificial Sequence
  Description of Artificial Sequence: Synthetic oligonucleotide
agaccgcccaugguuaguc

SEQ ID NO: 2623659 - RNA, 19 nt, Artificial Sequence
  Description of Artificial Sequence: Synthetic oligonucleotide
ugaugugggucacucccuu

SEQ ID NO: 2623660 - RNA, 19 nt, Artificial Sequence
  Description of Artificial Sequence: Synthetic oligonucleotide
ggaguccagacuuuagguc

SEQ ID NO: 2623661 - RNA, 19 nt, Artificial Sequence
  Description of Artificial Sequence: Synthetic oligonucleotide
ugggaccuccucaaaucuc

SEQ ID NO: 2623662 - RNA, 19 nt, Artificial Sequence
  Description of Artificial Sequence: Synthetic oligonucleotide
agagagcuuuccuguccag

SEQ ID NO: 2623663 - RNA, 19 nt, Artificial Sequence
  Description of Artificial Sequence: Synthetic oligonucleotide
ccuuugauggcagaccagc

SEQ ID NO: 2623664 - RNA, 19 nt, Artificial Sequence
  Description of Artificial Sequence: Synthetic oligonucleotide
caaaucucauccccgccca

SEQ ID NO: 2623665 - RNA, 19 nt, Artificial Sequence
  Description of Artificial Sequence: Synthetic oligonucleotide
cugugacugagaucacuuc

SEQ ID NO: 2623666 - RNA, 19 nt, Artificial Sequence
  Description of Artificial Sequence: Synthetic oligonucleotide
ugcuaugcccgcugucugu

SEQ ID NO: 2623667 - RNA, 19 nt, Artificial Sequence
  Description of Artificial Sequence: Synthetic oligonucleotide
accaagaucgcaggagcca

SEQ ID NO: 2623668 - RNA, 19 nt, Artificial Sequence
  Description of Artificial Sequence: Synthetic oligonucleotide
gagaucacuuccagaccgc

SEQ ID NO: 2623669 - RNA, 19 nt, Artificial Sequence
  Description of Artificial Sequence: Synthetic oligonucleotide
gugacugagaucacuucca

SEQ ID NO: 2623670 - RNA, 19 nt, Artificial Sequence
  Description of Artificial Sequence: Synthetic oligonucleotide
cucugaugugggucacucc

SEQ ID NO: 2623671 - RNA, 19 nt, Artificial Sequence
  Description of Artificial Sequence: Synthetic oligonucleotide
ggaucuguguguuguugug

SEQ ID NO: 2623672 - RNA, 19 nt, Artificial Sequence
  Description of Artificial Sequence: Synthetic oligonucleotide
gggguguugucugugacug

SEQ ID NO: 2623673 - RNA, 19 nt, Artificial Sequence
  Description of Artificial Sequence: Synthetic oligonucleotide
auacuaccuggaucugugu

SEQ ID NO: 2623674 - RNA, 19 nt, Artificial Sequence
  Description of Artificial Sequence: Synthetic oligonucleotide
accgcccaugguuaguccu

SEQ ID NO: 2623675 - RNA, 19 nt, Artificial Sequence
  Description of Artificial Sequence: Synthetic oligonucleotide
ccucaaaucucauccccgc

SEQ ID NO: 2623676 - RNA, 19 nt, Artificial Sequence
  Description of Artificial Sequence: Synthetic oligonucleotide
uacaaccugcaugacugaa

SEQ ID NO: 2623677 - RNA, 19 nt, Artificial Sequence
  Description of Artificial Sequence: Synthetic oligonucleotide
gggacuccgguguggauag

SEQ ID NO: 2623678 - RNA, 19 nt, Artificial Sequence
  Description of Artificial Sequence: Synthetic oligonucleotide
caagugcaggcuucuuuuc

SEQ ID NO: 2623679 - RNA, 19 nt, Artificial Sequence
  Description of Artificial Sequence: Synthetic oligonucleotide
uucuaaccucgggacuccg

SEQ ID NO: 2623680 - RNA, 19 nt, Artificial Sequence
  Description of Artificial Sequence: Synthetic oligonucleotide
aguccagacuuuaggucag

SEQ ID NO: 2623681 - RNA, 19 nt, Artificial Sequence
  Description of Artificial Sequence: Synthetic oligonucleotide
acgcucccguguuucuuac

SEQ ID NO: 2623682 - RNA, 19 nt, Artificial Sequence
  Description of Artificial Sequence: Synthetic oligonucleotide
ucugugccacaggaggcgc

SEQ ID NO: 2623683 - RNA, 19 nt, Artificial Sequence
  Description of Artificial Sequence: Synthetic oligonucleotide
ucacuacaacucugaugug

SEQ ID NO: 2623684 - RNA, 19 nt, Artificial Sequence
  Description of Artificial Sequence: Synthetic oligonucleotide
acguuagcggcagauacua

SEQ ID NO: 2623685 - RNA, 19 nt, Artificial Sequence
  Description of Artificial Sequence: Synthetic oligonucleotide
ggauagucugagccggagc

SEQ ID NO: 2623686 - RNA, 19 nt, Artificial Sequence
  Description of Artificial Sequence: Synthetic oligonucleotide
gcagccgcgucuucuaacc

SEQ ID NO: 2623687 - RNA, 19 nt, Artificial Sequence
  Description of Artificial Sequence: Synthetic oligonucleotide
gaccuccucaaaucucauc

SEQ ID NO: 2623688 - RNA, 19 nt, Artificial Sequence
  Description of Artificial Sequence: Synthetic oligonucleotide
agguccagaccaagaucgc

SEQ ID NO: 2623689 - RNA, 19 nt, Artificial Sequence
  Description of Artificial Sequence: Synthetic oligonucleotide
aaccugcaugacugaaauu

SEQ ID NO: 2623690 - RNA, 19 nt, Artificial Sequence
  Description of Artificial Sequence: Synthetic oligonucleotide
acuuuaggucagguucaag

SEQ ID NO: 2623691 - RNA, 19 nt, Artificial Sequence
  Description of Artificial Sequence: Synthetic oligonucleotide
gguuaguccuuugauggca

SEQ ID NO: 2623692 - RNA, 19 nt, Artificial Sequence
  Description of Artificial Sequence: Synthetic oligonucleotide
uggucaacccagguccaga

SEQ ID NO: 2623693 - RNA, 19 nt, Artificial Sequence
  Description of Artificial Sequence: Synthetic oligonucleotide
cugugccacaggaggcgcg

SEQ ID NO: 2623694 - RNA, 19 nt, Artificial Sequence
  Description of Artificial Sequence: Synthetic oligonucleotide
cugucugugcugcgaugcc

SEQ ID NO: 2623695 - RNA, 19 nt, Artificial Sequence
  Description of Artificial Sequence: Synthetic oligonucleotide
cauugcgaaagccuucugu

SEQ ID NO: 2623696 - RNA, 19 nt, Artificial Sequence
  Description of Artificial Sequence: Synthetic oligonucleotide
gcugucugugcugcgaugc

SEQ ID NO: 2623697 - RNA, 19 nt, Artificial Sequence
  Description of Artificial Sequence: Synthetic oligonucleotide
ugggaggguaaaugcugaa

SEQ ID NO: 2623698 - RNA, 19 nt, Artificial Sequence
  Description of Artificial Sequence: Synthetic oligonucleotide
gugugcaacugggaccucc

SEQ ID NO: 2623699 - RNA, 19 nt, Artificial Sequence
  Description of Artificial Sequence: Synthetic oligonucleotide
uccuguggcuuuugccgcu

SEQ ID NO: 2623700 - RNA, 19 nt, Artificial Sequence
  Description of Artificial Sequence: Synthetic oligonucleotide
gggaggguaaaugcugaag

SEQ ID NO: 2623701 - RNA, 19 nt, Artificial Sequence
  Description of Artificial Sequence: Synthetic oligonucleotide
gacuccgguguggauaguc

SEQ ID NO: 2623702 - RNA, 19 nt, Artificial Sequence
  Description of Artificial Sequence: Synthetic oligonucleotide
aacucugaugugggucacu

SEQ ID NO: 2623703 - RNA, 19 nt, Artificial Sequence
  Description of Artificial Sequence: Synthetic oligonucleotide
auccccgcccaccgcagag

SEQ ID NO: 2623704 - RNA, 19 nt, Artificial Sequence
  Description of Artificial Sequence: Synthetic oligonucleotide
cucccguguuucuuacaac

SEQ ID NO: 2623705 - RNA, 19 nt, Artificial Sequence
  Description of Artificial Sequence: Synthetic oligonucleotide
gcgucuucuaaccucggga

SEQ ID NO: 2623706 - RNA, 19 nt, Artificial Sequence
  Description of Artificial Sequence: Synthetic oligonucleotide
gagcaauggccacaagccu

SEQ ID NO: 2623707 - RNA, 19 nt, Artificial Sequence
  Description of Artificial Sequence: Synthetic oligonucleotide
cugcuaugcccgcugucug

SEQ ID NO: 2623708 - RNA, 19 nt, Artificial Sequence
  Description of Artificial Sequence: Synthetic oligonucleotide
acaaccugcaugacugaaa

SEQ ID NO: 2623709 - RNA, 19 nt, Artificial Sequence
  Description of Artificial Sequence: Synthetic oligonucleotide
agcggcucggagccgcuug

SEQ ID NO: 2623710 - RNA, 19 nt, Artificial Sequence
  Description of Artificial Sequence: Synthetic oligonucleotide
ggucaacccagguccagac

SEQ ID NO: 2623711 - RNA, 19 nt, Artificial Sequence
  Description of Artificial Sequence: Synthetic oligonucleotide
agccacgcucccguguuuc

SEQ ID NO: 2623712 - RNA, 19 nt, Artificial Sequence
  Description of Artificial Sequence: Synthetic oligonucleotide
uuuugccgcugcugcuaug

SEQ ID NO: 2623713 - RNA, 19 nt, Artificial Sequence
  Description of Artificial Sequence: Synthetic oligonucleotide
cuaugcccgcugucugugc

SEQ ID NO: 2623714 - RNA, 19 nt, Artificial Sequence
  Description of Artificial Sequence: Synthetic oligonucleotide
uuguuguggguugcuuuaa

SEQ ID NO: 2623715 - RNA, 19 nt, Artificial Sequence
  Description of Artificial Sequence: Synthetic oligonucleotide
ugucugugacugagaucac

SEQ ID NO: 2623716 - RNA, 19 nt, Artificial Sequence
  Description of Artificial Sequence: Synthetic oligonucleotide
gucccaugccuuucacuac

SEQ ID NO: 2623717 - RNA, 19 nt, Artificial Sequence
  Description of Artificial Sequence: Synthetic oligonucleotide
gaccgcccaugguuagucc

SEQ ID NO: 2623718 - RNA, 19 nt, Artificial Sequence
  Description of Artificial Sequence: Synthetic oligonucleotide
guguuucuuacaaccugca

SEQ ID NO: 2623719 - RNA, 19 nt, Artificial Sequence
  Description of Artificial Sequence: Synthetic oligonucleotide
ugcugcuaugcccgcuguc

SEQ ID NO: 2623720 - RNA, 19 nt, Artificial Sequence
  Description of Artificial Sequence: Synthetic oligonucleotide
aggagccacgcucccgugu

SEQ ID NO: 2623721 - RNA, 19 nt, Artificial Sequence
  Description of Artificial Sequence: Synthetic oligonucleotide
gccgcgucuucuaaccucg

SEQ ID NO: 2623722 - RNA, 19 nt, Artificial Sequence
  Description of Artificial Sequence: Synthetic oligonucleotide
gccacaagccuggucaacc

SEQ ID NO: 2623723 - RNA, 19 nt, Artificial Sequence
  Description of Artificial Sequence: Synthetic oligonucleotide
cagccguugugugggacag

SEQ ID NO: 2623724 - RNA, 19 nt, Artificial Sequence
  Description of Artificial Sequence: Synthetic oligonucleotide
caaccugcaugacugaaau

SEQ ID NO: 2623725 - RNA, 19 nt, Artificial Sequence
  Description of Artificial Sequence: Synthetic oligonucleotide
uaccuggaucuguguguug

SEQ ID NO: 2623726 - RNA, 19 nt, Artificial Sequence
  Description of Artificial Sequence: Synthetic oligonucleotide
ccguguuucuuacaaccug

SEQ ID NO: 2623727 - RNA, 19 nt, Artificial Sequence
  Description of Artificial Sequence: Synthetic oligonucleotide
cagcguccuggucccaugc

SEQ ID NO: 2623728 - RNA, 19 nt, Artificial Sequence
  Description of Artificial Sequence: Synthetic oligonucleotide
uucuuacaaccugcaugac

SEQ ID NO: 2623729 - RNA, 19 nt, Artificial Sequence
  Description of Artificial Sequence: Synthetic oligonucleotide
guggguugcuuuaaugugu

SEQ ID NO: 2623730 - RNA, 19 nt, Artificial Sequence
  Description of Artificial Sequence: Synthetic oligonucleotide
aggggcacguuagcggcag

SEQ ID NO: 2623731 - RNA, 19 nt, Artificial Sequence
  Description of Artificial Sequence: Synthetic oligonucleotide
cuaaccucgggacuccggu

SEQ ID NO: 2623732 - RNA, 19 nt, Artificial Sequence
  Description of Artificial Sequence: Synthetic oligonucleotide
ccuucgagccuuccggggc

SEQ ID NO: 2623733 - RNA, 19 nt, Artificial Sequence
  Description of Artificial Sequence: Synthetic oligonucleotide
gaaagccuucugugccaca

SEQ ID NO: 2623734 - RNA, 19 nt, Artificial Sequence
  Description of Artificial Sequence: Synthetic oligonucleotide
gccggugcccuucuuagca

SEQ ID NO: 2623735 - RNA, 19 nt, Artificial Sequence
  Description of Artificial Sequence: Synthetic oligonucleotide
ccacaagccuggucaaccc

SEQ ID NO: 2623736 - RNA, 19 nt, Artificial Sequence
  Description of Artificial Sequence: Synthetic oligonucleotide
auagucugagccggagcaa

SEQ ID NO: 2623737 - RNA, 19 nt, Artificial Sequence
  Description of Artificial Sequence: Synthetic oligonucleotide
gccuucgagccuuccgggg

SEQ ID NO: 2623738 - RNA, 19 nt, Artificial Sequence
  Description of Artificial Sequence: Synthetic oligonucleotide
uggccacaagccuggucaa

SEQ ID NO: 2623739 - RNA, 19 nt, Artificial Sequence
  Description of Artificial Sequence: Synthetic oligonucleotide
gcucccguguuucuuacaa

SEQ ID NO: 2623740 - RNA, 19 nt, Artificial Sequence
  Description of Artificial Sequence: Synthetic oligonucleotide
agaucgcaggagccacgcu

SEQ ID NO: 2623741 - RNA, 19 nt, Artificial Sequence
  Description of Artificial Sequence: Synthetic oligonucleotide
gucuucuaaccucgggacu

SEQ ID NO: 2623742 - RNA, 19 nt, Artificial Sequence
  Description of Artificial Sequence: Synthetic oligonucleotide
cuggucaacccagguccag

SEQ ID NO: 2623743 - RNA, 19 nt, Artificial Sequence
  Description of Artificial Sequence: Synthetic oligonucleotide
cccuucuuagcauugcgaa

SEQ ID NO: 2623744 - RNA, 19 nt, Artificial Sequence
  Description of Artificial Sequence: Synthetic oligonucleotide
gacuuuaggucagguucaa

SEQ ID NO: 2623745 - RNA, 19 nt, Artificial Sequence
  Description of Artificial Sequence: Synthetic oligonucleotide
agccuuccggggccggcag

SEQ ID NO: 2623746 - RNA, 19 nt, Artificial Sequence
  Description of Artificial Sequence: Synthetic oligonucleotide
ggauccaucuggaguccag

SEQ ID NO: 2623747 - RNA, 19 nt, Artificial Sequence
  Description of Artificial Sequence: Synthetic oligonucleotide
gugggcgcucugcaggauc

SEQ ID NO: 2623748 - RNA, 19 nt, Artificial Sequence
  Description of Artificial Sequence: Synthetic oligonucleotide
gugcccuucuuagcauugc

SEQ ID NO: 2623749 - RNA, 19 nt, Artificial Sequence
  Description of Artificial Sequence: Synthetic oligonucleotide
cagauacuaccuggaucug

SEQ ID NO: 2623750 - RNA, 19 nt, Artificial Sequence
  Description of Artificial Sequence: Synthetic oligonucleotide
acaggaggcgcgggccagg

SEQ ID NO: 2623751 - RNA, 19 nt, Artificial Sequence
  Description of Artificial Sequence: Synthetic oligonucleotide
cugggaccuccucaaaucu

SEQ ID NO: 2623752 - RNA, 19 nt, Artificial Sequence
  Description of Artificial Sequence: Synthetic oligonucleotide
ccaagaucgcaggagccac

SEQ ID NO: 2623753 - RNA, 19 nt, Artificial Sequence
  Description of Artificial Sequence: Synthetic oligonucleotide
ccggcagccguuguguggg

SEQ ID NO: 2623754 - RNA, 19 nt, Artificial Sequence
  Description of Artificial Sequence: Synthetic oligonucleotide
caacucugaugugggucac

SEQ ID NO: 2623755 - RNA, 19 nt, Artificial Sequence
  Description of Artificial Sequence: Synthetic oligonucleotide
cacguuagcggcagauacu

SEQ ID NO: 2623756 - RNA, 19 nt, Artificial Sequence
  Description of Artificial Sequence: Synthetic oligonucleotide
cuuucacuacaacucugau

SEQ ID NO: 2623757 - RNA, 19 nt, Artificial Sequence
  Description of Artificial Sequence: Synthetic oligonucleotide
gauggcagaccagcguccu

SEQ ID NO: 2623758 - RNA, 19 nt, Artificial Sequence
  Description of Artificial Sequence: Synthetic oligonucleotide
ggguugcuuuaaugugugc

SEQ ID NO: 2623759 - RNA, 19 nt, Artificial Sequence
  Description of Artificial Sequence: Synthetic oligonucleotide
cugugcugcgaugccggug

SEQ ID NO: 2623760 - RNA, 19 nt, Artificial Sequence
  Description of Artificial Sequence: Synthetic oligonucleotide
gcuaugcccgcugucugug

SEQ ID NO: 2623761 - RNA, 19 nt, Artificial Sequence
  Description of Artificial Sequence: Synthetic oligonucleotide
gcgaaagccuucugugcca

SEQ ID NO: 2623762 - RNA, 19 nt, Artificial Sequence
  Description of Artificial Sequence: Synthetic oligonucleotide
cagugggcgcucugcagga

SEQ ID NO: 2623763 - RNA, 19 nt, Artificial Sequence
  Description of Artificial Sequence: Synthetic oligonucleotide
gguccagaccaagaucgca

SEQ ID NO: 2623764 - RNA, 19 nt, Artificial Sequence
  Description of Artificial Sequence: Synthetic oligonucleotide
cacaggaggcgcgggccag

SEQ ID NO: 2623765 - RNA, 19 nt, Artificial Sequence
  Description of Artificial Sequence: Synthetic oligonucleotide
gcagccguugugugggaca

SEQ ID NO: 2623766 - RNA, 19 nt, Artificial Sequence
  Description of Artificial Sequence: Synthetic oligonucleotide
ggcagccgcgucuucuaac

SEQ ID NO: 2623767 - RNA, 19 nt, Artificial Sequence
  Description of Artificial Sequence: Synthetic oligonucleotide
agccggagcaauggccaca

SEQ ID NO: 2623768 - RNA, 19 nt, Artificial Sequence
  Description of Artificial Sequence: Synthetic oligonucleotide
cacuuccagaccgcccaug

SEQ ID NO: 2623769 - RNA, 19 nt, Artificial Sequence
  Description of Artificial Sequence: Synthetic oligonucleotide
gucugugacugagaucacu

SEQ ID NO: 2623770 - RNA, 19 nt, Artificial Sequence
  Description of Artificial Sequence: Synthetic oligonucleotide
cccaugguuaguccuuuga

SEQ ID NO: 2623771 - RNA, 19 nt, Artificial Sequence
  Description of Artificial Sequence: Synthetic oligonucleotide
ccgguguggauagucugag

SEQ ID NO: 2623772 - RNA, 19 nt, Artificial Sequence
  Description of Artificial Sequence: Synthetic oligonucleotide
caacccagguccagaccaa

SEQ ID NO: 2623773 - RNA, 19 nt, Artificial Sequence
  Description of Artificial Sequence: Synthetic oligonucleotide
gaugugggucacucccuuu

SEQ ID NO: 2623774 - RNA, 19 nt, Artificial Sequence
  Description of Artificial Sequence: Synthetic oligonucleotide
cacagccuucgagccuucc

SEQ ID NO: 2623775 - RNA, 19 nt, Artificial Sequence
  Description of Artificial Sequence: Synthetic oligonucleotide
caggagccacgcucccgug

SEQ ID NO: 2623776 - RNA, 19 nt, Artificial Sequence
  Description of Artificial Sequence: Synthetic oligonucleotide
gcauugcgaaagccuucug

SEQ ID NO: 2623777 - RNA, 19 nt, Artificial Sequence
  Description of Artificial Sequence: Synthetic oligonucleotide
cuuccggggccggcagccg

SEQ ID NO: 2623778 - RNA, 19 nt, Artificial Sequence
  Description of Artificial Sequence: Synthetic oligonucleotide
gguaaaugcugaagcggcu

SEQ ID NO: 2623779 - RNA, 19 nt, Artificial Sequence
  Description of Artificial Sequence: Synthetic oligonucleotide
uccccgcccaccgcagaga

SEQ ID NO: 2623780 - RNA, 19 nt, Artificial Sequence
  Description of Artificial Sequence: Synthetic oligonucleotide
ccagaccgcccaugguuag

SEQ ID NO: 2623781 - RNA, 19 nt, Artificial Sequence
  Description of Artificial Sequence: Synthetic oligonucleotide
gagccuuccggggccggca

SEQ ID NO: 2623782 - RNA, 19 nt, Artificial Sequence
  Description of Artificial Sequence: Synthetic oligonucleotide
guggauagucugagccgga

SEQ ID NO: 2623783 - RNA, 19 nt, Artificial Sequence
  Description of Artificial Sequence: Synthetic oligonucleotide
cucgggacuccggugugga

SEQ ID NO: 2623784 - RNA, 19 nt, Artificial Sequence
  Description of Artificial Sequence: Synthetic oligonucleotide
ucgggacuccgguguggau

SEQ ID NO: 2623785 - RNA, 19 nt, Artificial Sequence
  Description of Artificial Sequence: Synthetic oligonucleotide
accagcguccuggucccau

SEQ ID NO: 2623786 - RNA, 19 nt, Artificial Sequence
  Description of Artificial Sequence: Synthetic oligonucleotide
cgcgucuucuaaccucggg

SEQ ID NO: 2623787 - RNA, 19 nt, Artificial Sequence
  Description of Artificial Sequence: Synthetic oligonucleotide
ccguugugugggacagggg

SEQ ID NO: 2623788 - RNA, 19 nt, Artificial Sequence
  Description of Artificial Sequence: Synthetic oligonucleotide
ggggccggcagccguugug

SEQ ID NO: 2623789 - RNA, 19 nt, Artificial Sequence
  Description of Artificial Sequence: Synthetic oligonucleotide
gcggcagauacuaccugga

SEQ ID NO: 2623790 - RNA, 19 nt, Artificial Sequence
  Description of Artificial Sequence: Synthetic oligonucleotide
gugcugcgaugccggugcc

SEQ ID NO: 2623791 - RNA, 19 nt, Artificial Sequence
  Description of Artificial Sequence: Synthetic oligonucleotide
cuuuugccgcugcugcuau

SEQ ID NO: 2623792 - RNA, 19 nt, Artificial Sequence
  Description of Artificial Sequence: Synthetic oligonucleotide
caacugggaccuccucaaa

SEQ ID NO: 2623793 - RNA, 19 nt, Artificial Sequence
  Description of Artificial Sequence: Synthetic oligonucleotide
gcccaugguuaguccuuug

SEQ ID NO: 2623794 - RNA, 19 nt, Artificial Sequence
  Description of Artificial Sequence: Synthetic oligonucleotide
ucggagccgcuugcuuuuc

SEQ ID NO: 2623795 - RNA, 19 nt, Artificial Sequence
  Description of Artificial Sequence: Synthetic oligonucleotide
cuaccuggaucuguguguu

SEQ ID NO: 2623796 - RNA, 19 nt, Artificial Sequence
  Description of Artificial Sequence: Synthetic oligonucleotide
cuuccagaccgcccauggu

SEQ ID NO: 2623797 - RNA, 19 nt, Artificial Sequence
  Description of Artificial Sequence: Synthetic oligonucleotide
cucggagccgcuugcuuuu

SEQ ID NO: 2623798 - RNA, 19 nt, Artificial Sequence
  Description of Artificial Sequence: Synthetic oligonucleotide
ccagcguccuggucccaug

SEQ ID NO: 2623799 - RNA, 19 nt, Artificial Sequence
  Description of Artificial Sequence: Synthetic oligonucleotide
agugggcgcucugcaggau

SEQ ID NO: 2623800 - RNA, 19 nt, Artificial Sequence
  Description of Artificial Sequence: Synthetic oligonucleotide
cguuagcggcagauacuac

SEQ ID NO: 2623801 - RNA, 19 nt, Artificial Sequence
  Description of Artificial Sequence: Synthetic oligonucleotide
ccuggucaacccaggucca

SEQ ID NO: 2623802 - RNA, 19 nt, Artificial Sequence
  Description of Artificial Sequence: Synthetic oligonucleotide
cccaccgcagagagcuuuc

SEQ ID NO: 2623803 - RNA, 19 nt, Artificial Sequence
  Description of Artificial Sequence: Synthetic oligonucleotide
cgguguggauagucugagc

SEQ ID NO: 2623804 - RNA, 19 nt, Artificial Sequence
  Description of Artificial Sequence: Synthetic oligonucleotide
aagcggcucggagccgcuu

SEQ ID NO: 2623805 - RNA, 19 nt, Artificial Sequence
  Description of Artificial Sequence: Synthetic oligonucleotide
gcagaccagcguccugguc

SEQ ID NO: 2623806 - RNA, 19 nt, Artificial Sequence
  Description of Artificial Sequence: Synthetic oligonucleotide
cccguguuucuuacaaccu

SEQ ID NO: 2623807 - RNA, 19 nt, Artificial Sequence
  Description of Artificial Sequence: Synthetic oligonucleotide
ggccacaagccuggucaac

SEQ ID NO: 2623808 - RNA, 19 nt, Artificial Sequence
  Description of Artificial Sequence: Synthetic oligonucleotide
cauccccgcccaccgcaga

SEQ ID NO: 2623809 - RNA, 19 nt, Artificial Sequence
  Description of Artificial Sequence: Synthetic oligonucleotide
ccgcagagagcuuuccugu

SEQ ID NO: 2623810 - RNA, 19 nt, Artificial Sequence
  Description of Artificial Sequence: Synthetic oligonucleotide
ggcagccguugugugggac

SEQ ID NO: 2623811 - RNA, 19 nt, Artificial Sequence
  Description of Artificial Sequence: Synthetic oligonucleotide
ggcacguuagcggcagaua

SEQ ID NO: 2623812 - RNA, 19 nt, Artificial Sequence
  Description of Artificial Sequence: Synthetic oligonucleotide
ccaccgcagagagcuuucc

SEQ ID NO: 2623813 - RNA, 19 nt, Artificial Sequence
  Description of Artificial Sequence: Synthetic oligonucleotide
cacucccuuuccuguggcu

SEQ ID NO: 2623814 - RNA, 19 nt, Artificial Sequence
  Description of Artificial Sequence: Synthetic oligonucleotide
ccgcgucuucuaaccucgg

SEQ ID NO: 2623815 - RNA, 19 nt, Artificial Sequence
  Description of Artificial Sequence: Synthetic oligonucleotide
gccggagcaauggccacaa

SEQ ID NO: 2623816 - RNA, 19 nt, Artificial Sequence
  Description of Artificial Sequence: Synthetic oligonucleotide
ccgcccaccgcagagagcu

SEQ ID NO: 2623817 - RNA, 19 nt, Artificial Sequence
  Description of Artificial Sequence: Synthetic oligonucleotide
ccagacuuuaggucagguu

SEQ ID NO: 2623818 - RNA, 19 nt, Artificial Sequence
  Description of Artificial Sequence: Synthetic oligonucleotide
gcgcucugcaggauccauc

SEQ ID NO: 2623819 - RNA, 19 nt, Artificial Sequence
  Description of Artificial Sequence: Synthetic oligonucleotide
gcccgcugucugugcugcg

SEQ ID NO: 2623820 - RNA, 19 nt, Artificial Sequence
  Description of Artificial Sequence: Synthetic oligonucleotide
gccuuccggggccggcagc

SEQ ID NO: 2623821 - RNA, 19 nt, Artificial Sequence
  Description of Artificial Sequence: Synthetic oligonucleotide
guucaagugcaggcuucuu

SEQ ID NO: 2623822 - RNA, 19 nt, Artificial Sequence
  Description of Artificial Sequence: Synthetic oligonucleotide
cagccgcgucuucuaaccu

SEQ ID NO: 2623823 - RNA, 19 nt, Artificial Sequence
  Description of Artificial Sequence: Synthetic oligonucleotide
gaagcggcucggagccgcu

SEQ ID NO: 2623824 - RNA, 19 nt, Artificial Sequence
  Description of Artificial Sequence: Synthetic oligonucleotide
gcucccacagugggcgcuc

SEQ ID NO: 2623825 - RNA, 19 nt, Artificial Sequence
  Description of Artificial Sequence: Synthetic oligonucleotide
cccgcccaccgcagagagc

SEQ ID NO: 2623826 - RNA, 19 nt, Artificial Sequence
  Description of Artificial Sequence: Synthetic oligonucleotide
gagccacgcucccguguuu

SEQ ID NO: 2623827 - RNA, 19 nt, Artificial Sequence
  Description of Artificial Sequence: Synthetic oligonucleotide
gaccagcguccugguccca

SEQ ID NO: 2623828 - RNA, 19 nt, Artificial Sequence
  Description of Artificial Sequence: Synthetic oligonucleotide
cagaccgcccaugguuagu

SEQ ID NO: 2623829 - RNA, 19 nt, Artificial Sequence
  Description of Artificial Sequence: Synthetic oligonucleotide
gggcacguuagcggcagau

SEQ ID NO: 2623830 - RNA, 19 nt, Artificial Sequence
  Description of Artificial Sequence: Synthetic oligonucleotide
gggccggcagccguugugu

SEQ ID NO: 2623831 - RNA, 19 nt, Artificial Sequence
  Description of Artificial Sequence: Synthetic oligonucleotide
ccggagcaauggccacaag

SEQ ID NO: 2623832 - RNA, 19 nt, Artificial Sequence
  Description of Artificial Sequence: Synthetic oligonucleotide
gccacgcucccguguuucu

SEQ ID NO: 2623833 - RNA, 19 nt, Artificial Sequence
  Description of Artificial Sequence: Synthetic oligonucleotide
ggggcacguuagcggcaga

SEQ ID NO: 2623834 - RNA, 19 nt, Artificial Sequence
  Description of Artificial Sequence: Synthetic oligonucleotide
cgggacuccgguguggaua

SEQ ID NO: 2623835 - RNA, 19 nt, Artificial Sequence
  Description of Artificial Sequence: Synthetic oligonucleotide
ggaccuccucaaaucucau

SEQ ID NO: 2623836 - RNA, 19 nt, Artificial Sequence
  Description of Artificial Sequence: Synthetic oligonucleotide
caauggccacaagccuggu

SEQ ID NO: 2623837 - RNA, 19 nt, Artificial Sequence
  Description of Artificial Sequence: Synthetic oligonucleotide
cgagccuuccggggccggc

SEQ ID NO: 2623838 - RNA, 19 nt, Artificial Sequence
  Description of Artificial Sequence: Synthetic oligonucleotide
ggcgcucugcaggauccau

SEQ ID NO: 2623839 - RNA, 19 nt, Artificial Sequence
  Description of Artificial Sequence: Synthetic oligonucleotide
guccaggagcugggagggu

SEQ ID NO: 2623840 - RNA, 19 nt, Artificial Sequence
  Description of Artificial Sequence: Synthetic oligonucleotide
cgcucccguguuucuuaca

SEQ ID NO: 2623841 - RNA, 19 nt, Artificial Sequence
  Description of Artificial Sequence: Synthetic oligonucleotide
ccggugcccuucuuagcau

SEQ ID NO: 2623842 - RNA, 19 nt, Artificial Sequence
  Description of Artificial Sequence: Synthetic oligonucleotide
ccgcccaugguuaguccuu

SEQ ID NO: 2623843 - RNA, 19 nt, Artificial Sequence
  Description of Artificial Sequence: Synthetic oligonucleotide
cugcgaugccggugcccuu

SEQ ID NO: 2623844 - RNA, 19 nt, Artificial Sequence
  Description of Artificial Sequence: Synthetic oligonucleotide
cggcagauacuaccuggau

SEQ ID NO: 2623845 - RNA, 19 nt, Artificial Sequence
  Description of Artificial Sequence: Synthetic oligonucleotide
ggacuccgguguggauagu

SEQ ID NO: 2623846 - RNA, 19 nt, Artificial Sequence
  Description of Artificial Sequence: Synthetic oligonucleotide
cgcccaugguuaguccuuu

SEQ ID NO: 2623847 - RNA, 19 nt, Artificial Sequence
  Description of Artificial Sequence: Synthetic oligonucleotide
cgcccaccgcagagagcuu

SEQ ID NO: 2623848 - RNA, 19 nt, Artificial Sequence
  Description of Artificial Sequence: Synthetic oligonucleotide
cgcgggccaggggcacguu

SEQ ID NO: 2623849 - RNA, 19 nt, Artificial Sequence
  Description of Artificial Sequence: Synthetic oligonucleotide
aauaaugggaacuggaaaa

SEQ ID NO: 2623850 - RNA, 19 nt, Artificial Sequence
  Description of Artificial Sequence: Synthetic oligonucleotide
  modified_base (6)..(6): a, c, u, g, unknown or other
aaagunaggggugggaacc

SEQ ID NO: 2623851 - RNA, 19 nt, Artificial Sequence
  Description of Artificial Sequence: Synthetic oligonucleotide
aaaagcuaaagcgaacugg

SEQ ID NO: 2623852 - RNA, 19 nt, Artificial Sequence
  Description of Artificial Sequence: Synthetic oligonucleotide
ucuaccuggagucaggaag

SEQ ID NO: 2623853 - RNA, 19 nt, Artificial Sequence
  Description of Artificial Sequence: Synthetic oligonucleotide
uuaucagccugguagaggg

SEQ ID NO: 2623854 - RNA, 19 nt, Artificial Sequence
  Description of Artificial Sequence: Synthetic oligonucleotide
aggacaagaaccuaauggg

SEQ ID NO: 2623855 - RNA, 19 nt, Artificial Sequence
  Description of Artificial Sequence: Synthetic oligonucleotide
ucaggaagccacaagaccc

SEQ ID NO: 2623856 - RNA, 19 nt, Artificial Sequence
  Description of Artificial Sequence: Synthetic oligonucleotide
agcuaaagcgaacugggcc

SEQ ID NO: 2623857 - RNA, 19 nt, Artificial Sequence
  Description of Artificial Sequence: Synthetic oligonucleotide
aaagcuaaagcgaacuggg

SEQ ID NO: 2623858 - RNA, 19 nt, Artificial Sequence
  Description of Artificial Sequence: Synthetic oligonucleotide
agagccacuguguagaggg

SEQ ID NO: 2623859 - RNA, 19 nt, Artificial Sequence
  Description of Artificial Sequence: Synthetic oligonucleotide
cacuuuaucagccugguag

SEQ ID NO: 2623860 - RNA, 19 nt, Artificial Sequence
  Description of Artificial Sequence: Synthetic oligonucleotide
agugaucccaucuccaggc

SEQ ID NO: 2623861 - RNA, 19 nt, Artificial Sequence
  Description of Artificial Sequence: Synthetic oligonucleotide
  modified_base (13)..(13): a, c, u, g, unknown or other
aaacaguaaagunaggggu

SEQ ID NO: 2623862 - RNA, 19 nt, Artificial Sequence
  Description of Artificial Sequence: Synthetic oligonucleotide
agcgaacugggccagagac

SEQ ID NO: 2623863 - RNA, 19 nt, Artificial Sequence
  Description of Artificial Sequence: Synthetic oligonucleotide
acaagaaccuaaugggcac

SEQ ID NO: 2623864 - RNA, 19 nt, Artificial Sequence
  Description of Artificial Sequence: Synthetic oligonucleotide
aaugggcacuuuaucagcc

SEQ ID NO: 2623865 - RNA, 19 nt, Artificial Sequence
  Description of Artificial Sequence: Synthetic oligonucleotide
cuaaugggcacuuuaucag

SEQ ID NO: 2623866 - RNA, 19 nt, Artificial Sequence
  Description of Artificial Sequence: Synthetic oligonucleotide
acggggaaggacaagaacc

SEQ ID NO: 2623867 - RNA, 19 nt, Artificial Sequence
  Description of Artificial Sequence: Synthetic oligonucleotide
ucuagagcacauuuggacu

SEQ ID NO: 2623868 - RNA, 19 nt, Artificial Sequence
  Description of Artificial Sequence: Synthetic oligonucleotide
aagugaucccaucuccagg

SEQ ID NO: 2623869 - RNA, 19 nt, Artificial Sequence
  Description of Artificial Sequence: Synthetic oligonucleotide
aaaggccagaaccagacua

SEQ ID NO: 2623870 - RNA, 19 nt, Artificial Sequence
  Description of Artificial Sequence: Synthetic oligonucleotide
  modified_base (7)..(7): a, c, u, g, unknown or other
uaaagunaggggugggaac

SEQ ID NO: 2623871 - RNA, 19 nt, Artificial Sequence
  Description of Artificial Sequence: Synthetic oligonucleotide
ugggaacuggaaaacagca

SEQ ID NO: 2623872 - RNA, 19 nt, Artificial Sequence
  Description of Artificial Sequence: Synthetic oligonucleotide
auuaggaucucauguccuc

SEQ ID NO: 2623873 - RNA, 19 nt, Artificial Sequence
  Description of Artificial Sequence: Synthetic oligonucleotide
  modified_base (12)..(12): a, c, u, g, unknown or other
aacaguaaagunaggggug

SEQ ID NO: 2623874 - RNA, 19 nt, Artificial Sequence
  Description of Artificial Sequence: Synthetic oligonucleotide
auaaugggaacuggaaaac

SEQ ID NO: 2623875 - RNA, 19 nt, Artificial Sequence
  Description of Artificial Sequence: Synthetic oligonucleotide
gcuaggaaaggccagaacc

SEQ ID NO: 2623876 - RNA, 19 nt, Artificial Sequence
  Description of Artificial Sequence: Synthetic oligonucleotide
uguguagagggcugagugg

SEQ ID NO: 2623877 - RNA, 19 nt, Artificial Sequence
  Description of Artificial Sequence: Synthetic oligonucleotide
ugauaauaaugggaacugg

SEQ ID NO: 2623878 - RNA, 19 nt, Artificial Sequence
  Description of Artificial Sequence: Synthetic oligonucleotide
uggaaaacagcaagcaaaa

SEQ ID NO: 2623879 - RNA, 19 nt, Artificial Sequence
  Description of Artificial Sequence: Synthetic oligonucleotide
cucuagagcacauuuggac

SEQ ID NO: 2623880 - RNA, 19 nt, Artificial Sequence
  Description of Artificial Sequence: Synthetic oligonucleotide
aggcuaaccaagucgcccc

SEQ ID NO: 2623881 - RNA, 19 nt, Artificial Sequence
  Description of Artificial Sequence: Synthetic oligonucleotide
gauaauaaugggaacugga

SEQ ID NO: 2623882 - RNA, 19 nt, Artificial Sequence
  Description of Artificial Sequence: Synthetic oligonucleotide
auucaguuccggcucuacc

SEQ ID NO: 2623883 - RNA, 19 nt, Artificial Sequence
  Description of Artificial Sequence: Synthetic oligonucleotide
uugccugugaguagcauga

SEQ ID NO: 2623884 - RNA, 19 nt, Artificial Sequence
  Description of Artificial Sequence: Synthetic oligonucleotide
acauuuggacucuccuugc

SEQ ID NO: 2623885 - RNA, 19 nt, Artificial Sequence
  Description of Artificial Sequence: Synthetic oligonucleotide
agguguccaccacaaaagc

SEQ ID NO: 2623886 - RNA, 19 nt, Artificial Sequence
  Description of Artificial Sequence: Synthetic oligonucleotide
uuuaucagccugguagagg

SEQ ID NO: 2623887 - RNA, 19 nt, Artificial Sequence
  Description of Artificial Sequence: Synthetic oligonucleotide
ucucauguccuccuguagu

SEQ ID NO: 2623888 - RNA, 19 nt, Artificial Sequence
  Description of Artificial Sequence: Synthetic oligonucleotide
uucaguuccggcucuaccu

SEQ ID NO: 2623889 - RNA, 19 nt, Artificial Sequence
  Description of Artificial Sequence: Synthetic oligonucleotide
uuugccugugaguagcaug

SEQ ID NO: 2623890 - RNA, 19 nt, Artificial Sequence
  Description of Artificial Sequence: Synthetic oligonucleotide
uuuggacucuccuugccug

SEQ ID NO: 2623891 - RNA, 19 nt, Artificial Sequence
  Description of Artificial Sequence: Synthetic oligonucleotide
acagcagugcgccugccac

SEQ ID NO: 2623892 - RNA, 19 nt, Artificial Sequence
  Description of Artificial Sequence: Synthetic oligonucleotide
uaaugggcacuuuaucagc

SEQ ID NO: 2623893 - RNA, 19 nt, Artificial Sequence
  Description of Artificial Sequence: Synthetic oligonucleotide
aggcaggcuaaccaagucg

SEQ ID NO: 2623894 - RNA, 19 nt, Artificial Sequence
  Description of Artificial Sequence: Synthetic oligonucleotide
uccucugccaaaagggccc

SEQ ID NO: 2623895 - RNA, 19 nt, Artificial Sequence
  Description of Artificial Sequence: Synthetic oligonucleotide
ugugaguagcaugagccag

SEQ ID NO: 2623896 - RNA, 19 nt, Artificial Sequence
  Description of Artificial Sequence: Synthetic oligonucleotide
aagacccaccacuucagcu

SEQ ID NO: 2623897 - RNA, 19 nt, Artificial Sequence
  Description of Artificial Sequence: Synthetic oligonucleotide
gaagccacaagacccacca

SEQ ID NO: 2623898 - RNA, 19 nt, Artificial Sequence
  Description of Artificial Sequence: Synthetic oligonucleotide
acaaaagcuaaagcgaacu

SEQ ID NO: 2623899 - RNA, 19 nt, Artificial Sequence
  Description of Artificial Sequence: Synthetic oligonucleotide
accacacccucccaaggcc

SEQ ID NO: 2623900 - RNA, 19 nt, Artificial Sequence
  Description of Artificial Sequence: Synthetic oligonucleotide
  modified_base (5)..(5): a, c, u, g, unknown or other
aagunaggggugggaaccc

SEQ ID NO: 2623901 - RNA, 19 nt, Artificial Sequence
  Description of Artificial Sequence: Synthetic oligonucleotide
ccugugaguagcaugagcc

SEQ ID NO: 2623902 - RNA, 19 nt, Artificial Sequence
  Description of Artificial Sequence: Synthetic oligonucleotide
cagacuagggcccagcgug

SEQ ID NO: 2623903 - RNA, 19 nt, Artificial Sequence
  Description of Artificial Sequence: Synthetic oligonucleotide
acagguguccaccacaaaa

SEQ ID NO: 2623904 - RNA, 19 nt, Artificial Sequence
  Description of Artificial Sequence: Synthetic oligonucleotide
cagggcaacagcaggagag

SEQ ID NO: 2623905 - RNA, 19 nt, Artificial Sequence
  Description of Artificial Sequence: Synthetic oligonucleotide
  modified_base (11)..(11): a, c, u, g, unknown or other
acaguaaagunaggggugg

SEQ ID NO: 2623906 - RNA, 19 nt, Artificial Sequence
  Description of Artificial Sequence: Synthetic oligonucleotide
aaagggcccuauucaguuc

SEQ ID NO: 2623907 - RNA, 19 nt, Artificial Sequence
  Description of Artificial Sequence: Synthetic oligonucleotide
accuaaugggcacuuuauc

SEQ ID NO: 2623908 - RNA, 19 nt, Artificial Sequence
  Description of Artificial Sequence: Synthetic oligonucleotide
cuaccuggagucaggaagc

SEQ ID NO: 2623909 - RNA, 19 nt, Artificial Sequence
  Description of Artificial Sequence: Synthetic oligonucleotide
cagguguccaccacaaaag

SEQ ID NO: 2623910 - RNA, 19 nt, Artificial Sequence
  Description of Artificial Sequence: Synthetic oligonucleotide
augggaacuggaaaacagc

SEQ ID NO: 2623911 - RNA, 19 nt, Artificial Sequence
  Description of Artificial Sequence: Synthetic oligonucleotide
acuuuaucagccugguaga

SEQ ID NO: 2623912 - RNA, 19 nt, Artificial Sequence
  Description of Artificial Sequence: Synthetic oligonucleotide
cuagagcacauuuggacuc

SEQ ID NO: 2623913 - RNA, 19 nt, Artificial Sequence
  Description of Artificial Sequence: Synthetic oligonucleotide
uccuguagucuccaggccu

SEQ ID NO: 2623914 - RNA, 19 nt, Artificial Sequence
  Description of Artificial Sequence: Synthetic oligonucleotide
ugagccagggcaacagcag

SEQ ID NO: 2623915 - RNA, 19 nt, Artificial Sequence
  Description of Artificial Sequence: Synthetic oligonucleotide
aucagccugguagaggggc

SEQ ID NO: 2623916 - RNA, 19 nt, Artificial Sequence
  Description of Artificial Sequence: Synthetic oligonucleotide
cugauaauaaugggaacug

SEQ ID NO: 2623917 - RNA, 19 nt, Artificial Sequence
  Description of Artificial Sequence: Synthetic oligonucleotide
aagcuaaagcgaacugggc

SEQ ID NO: 2623918 - RNA, 19 nt, Artificial Sequence
  Description of Artificial Sequence: Synthetic oligonucleotide
uggaaagugaucccaucuc

SEQ ID NO: 2623919 - RNA, 19 nt, Artificial Sequence
  Description of Artificial Sequence: Synthetic oligonucleotide
accacaaaagcuaaagcga

SEQ ID NO: 2623920 - RNA, 19 nt, Artificial Sequence
  Description of Artificial Sequence: Synthetic oligonucleotide
ggugucuggaaagugaucc

SEQ ID NO: 2623921 - RNA, 19 nt, Artificial Sequence
  Description of Artificial Sequence: Synthetic oligonucleotide
gacaagaaccuaaugggca

SEQ ID NO: 2623922 - RNA, 19 nt, Artificial Sequence
  Description of Artificial Sequence: Synthetic oligonucleotide
agacccaccacuucagcug

SEQ ID NO: 2623923 - RNA, 19 nt, Artificial Sequence
  Description of Artificial Sequence: Synthetic oligonucleotide
aguccagcaccacacagca

SEQ ID NO: 2623924 - RNA, 19 nt, Artificial Sequence
  Description of Artificial Sequence: Synthetic oligonucleotide
gucaggaagccacaagacc

SEQ ID NO: 2623925 - RNA, 19 nt, Artificial Sequence
  Description of Artificial Sequence: Synthetic oligonucleotide
aacagcaggagagccacug

SEQ ID NO: 2623926 - RNA, 19 nt, Artificial Sequence
  Description of Artificial Sequence: Synthetic oligonucleotide
agugggccugacuagcagg

SEQ ID NO: 2623927 - RNA, 19 nt, Artificial Sequence
  Description of Artificial Sequence: Synthetic oligonucleotide
aacagcaagcaaaacagua

SEQ ID NO: 2623928 - RNA, 19 nt, Artificial Sequence
  Description of Artificial Sequence: Synthetic oligonucleotide
agccacaagacccaccacu

SEQ ID NO: 2623929 - RNA, 19 nt, Artificial Sequence
  Description of Artificial Sequence: Synthetic oligonucleotide
ucaguuccggcucuaccug

SEQ ID NO: 2623930 - RNA, 19 nt, Artificial Sequence
  Description of Artificial Sequence: Synthetic oligonucleotide
aaagcgaacugggccagag

SEQ ID NO: 2623931 - RNA, 19 nt, Artificial Sequence
  Description of Artificial Sequence: Synthetic oligonucleotide
agcaaagacggggaaggac

SEQ ID NO: 2623932 - RNA, 19 nt, Artificial Sequence
  Description of Artificial Sequence: Synthetic oligonucleotide
gacacuuugccugugagua

SEQ ID NO: 2623933 - RNA, 19 nt, Artificial Sequence
  Description of Artificial Sequence: Synthetic oligonucleotide
ugaguagcaugagccaggg

SEQ ID NO: 2623934 - RNA, 19 nt, Artificial Sequence
  Description of Artificial Sequence: Synthetic oligonucleotide
cuaggaaaggccagaacca

SEQ ID NO: 2623935 - RNA, 19 nt, Artificial Sequence
  Description of Artificial Sequence: Synthetic oligonucleotide
gaagcagcagcaucccaug

SEQ ID NO: 2623936 - RNA, 19 nt, Artificial Sequence
  Description of Artificial Sequence: Synthetic oligonucleotide
agcacauuuggacucuccu

SEQ ID NO: 2623937 - RNA, 19 nt, Artificial Sequence
  Description of Artificial Sequence: Synthetic oligonucleotide
ggaaagugaucccaucucc

SEQ ID NO: 2623938 - RNA, 19 nt, Artificial Sequence
  Description of Artificial Sequence: Synthetic oligonucleotide
auuuggacucuccuugccu

SEQ ID NO: 2623939 - RNA, 19 nt, Artificial Sequence
  Description of Artificial Sequence: Synthetic oligonucleotide
auaauaaugggaacuggaa

SEQ ID NO: 2623940 - RNA, 19 nt, Artificial Sequence
  Description of Artificial Sequence: Synthetic oligonucleotide
agucaggaagccacaagac

SEQ ID NO: 2623941 - RNA, 19 nt, Artificial Sequence
  Description of Artificial Sequence: Synthetic oligonucleotide
gacccaccacuucagcugg

SEQ ID NO: 2623942 - RNA, 19 nt, Artificial Sequence
  Description of Artificial Sequence: Synthetic oligonucleotide
caggccugauaauaauggg

SEQ ID NO: 2623943 - RNA, 19 nt, Artificial Sequence
  Description of Artificial Sequence: Synthetic oligonucleotide
  modified_base (2)..(2): a, c, u, g, unknown or other
unaggggugggaacccagc

SEQ ID NO: 2623944 - RNA, 19 nt, Artificial Sequence
  Description of Artificial Sequence: Synthetic oligonucleotide
cagaaccagacuagggccc

SEQ ID NO: 2623945 - RNA, 19 nt, Artificial Sequence
  Description of Artificial Sequence: Synthetic oligonucleotide
ccaggccugauaauaaugg

SEQ ID NO: 2623946 - RNA, 19 nt, Artificial Sequence
  Description of Artificial Sequence: Synthetic oligonucleotide
ugggcacuuuaucagccug

SEQ ID NO: 2623947 - RNA, 19 nt, Artificial Sequence
  Description of Artificial Sequence: Synthetic oligonucleotide
uuggacucuccuugccugg

SEQ ID NO: 2623948 - RNA, 19 nt, Artificial Sequence
  Description of Artificial Sequence: Synthetic oligonucleotide
ucuccaggcaaaggggagg

SEQ ID NO: 2623949 - RNA, 19 nt, Artificial Sequence
  Description of Artificial Sequence: Synthetic oligonucleotide
gucauaggagugcugcccc

SEQ ID NO: 2623950 - RNA, 19 nt, Artificial Sequence
  Description of Artificial Sequence: Synthetic oligonucleotide
cacaaaagcuaaagcgaac

SEQ ID NO: 2623951 - RNA, 19 nt, Artificial Sequence
  Description of Artificial Sequence: Synthetic oligonucleotide
aaccagacuagggcccagc

SEQ ID NO: 2623952 - RNA, 19 nt, Artificial Sequence
  Description of Artificial Sequence: Synthetic oligonucleotide
  modified_base (9)..(9): a, c, u, g, unknown or other
aguaaagunagggguggga

SEQ ID NO: 2623953 - RNA, 19 nt, Artificial Sequence
  Description of Artificial Sequence: Synthetic oligonucleotide
acccuccucugccaaaagg

SEQ ID NO: 2623954 - RNA, 19 nt, Artificial Sequence
  Description of Artificial Sequence: Synthetic oligonucleotide
ugggccagagacacuuugc

SEQ ID NO: 2623955 - RNA, 19 nt, Artificial Sequence
  Description of Artificial Sequence: Synthetic oligonucleotide
agagcaguccagcaccaca

SEQ ID NO: 2623956 - RNA, 19 nt, Artificial Sequence
  Description of Artificial Sequence: Synthetic oligonucleotide
uccggcucuaccuggaguc

SEQ ID NO: 2623957 - RNA, 19 nt, Artificial Sequence
  Description of Artificial Sequence: Synthetic oligonucleotide
accagacuagggcccagcg

SEQ ID NO: 2623958 - RNA, 19 nt, Artificial Sequence
  Description of Artificial Sequence: Synthetic oligonucleotide
aucucauguccuccuguag

SEQ ID NO: 2623959 - RNA, 19 nt, Artificial Sequence
  Description of Artificial Sequence: Synthetic oligonucleotide
aggagagccacuguguaga

SEQ ID NO: 2623960 - RNA, 19 nt, Artificial Sequence
  Description of Artificial Sequence: Synthetic oligonucleotide
cucauguccuccuguaguc

SEQ ID NO: 2623961 - RNA, 19 nt, Artificial Sequence
  Description of Artificial Sequence: Synthetic oligonucleotide
acucccagguggucuggcc

SEQ ID NO: 2623962 - RNA, 19 nt, Artificial Sequence
  Description of Artificial Sequence: Synthetic oligonucleotide
aggggaggcuaggaaaggc

SEQ ID NO: 2623963 - RNA, 19 nt, Artificial Sequence
  Description of Artificial Sequence: Synthetic oligonucleotide
cauuuggacucuccuugcc

SEQ ID NO: 2623964 - RNA, 19 nt, Artificial Sequence
  Description of Artificial Sequence: Synthetic oligonucleotide
cacuuugccugugaguagc

SEQ ID NO: 2623965 - RNA, 19 nt, Artificial Sequence
  Description of Artificial Sequence: Synthetic oligonucleotide
cuugccuggauccaccaca

SEQ ID NO: 2623966 - RNA, 19 nt, Artificial Sequence
  Description of Artificial Sequence: Synthetic oligonucleotide
aaggggaggcuaggaaagg

SEQ ID NO: 2623967 - RNA, 19 nt, Artificial Sequence
  Description of Artificial Sequence: Synthetic oligonucleotide
aaacagcaagcaaaacagu

SEQ ID NO: 2623968 - RNA, 19 nt, Artificial Sequence
  Description of Artificial Sequence: Synthetic oligonucleotide
uaucagccugguagagggg

SEQ ID NO: 2623969 - RNA, 19 nt, Artificial Sequence
  Description of Artificial Sequence: Synthetic oligonucleotide
gacggggaaggacaagaac

SEQ ID NO: 2623970 - RNA, 19 nt, Artificial Sequence
  Description of Artificial Sequence: Synthetic oligonucleotide
agacacuuugccugugagu

SEQ ID NO: 2623971 - RNA, 19 nt, Artificial Sequence
  Description of Artificial Sequence: Synthetic oligonucleotide
gaaccuaaugggcacuuua

SEQ ID NO: 2623972 - RNA, 19 nt, Artificial Sequence
  Description of Artificial Sequence: Synthetic oligonucleotide
auggaagagcaguccagca

SEQ ID NO: 2623973 - RNA, 19 nt, Artificial Sequence
  Description of Artificial Sequence: Synthetic oligonucleotide
gcuaaagcgaacugggcca

SEQ ID NO: 2623974 - RNA, 19 nt, Artificial Sequence
  Description of Artificial Sequence: Synthetic oligonucleotide
  modified_base (10)..(10): a, c, u, g, unknown or other
caguaaagunagggguggg

SEQ ID NO: 2623975 - RNA, 19 nt, Artificial Sequence
  Description of Artificial Sequence: Synthetic oligonucleotide
uguagagggcugagugggc

SEQ ID NO: 2623976 - RNA, 19 nt, Artificial Sequence
  Description of Artificial Sequence: Synthetic oligonucleotide
ugagugggccugacuagca

SEQ ID NO: 2623977 - RNA, 19 nt, Artificial Sequence
  Description of Artificial Sequence: Synthetic oligonucleotide
ugaucccaucuccaggcaa

SEQ ID NO: 2623978 - RNA, 19 nt, Artificial Sequence
  Description of Artificial Sequence: Synthetic oligonucleotide
ccauuaggaucucaugucc

SEQ ID NO: 2623979 - RNA, 19 nt, Artificial Sequence
  Description of Artificial Sequence: Synthetic oligonucleotide
aaccuaaugggcacuuuau

SEQ ID NO: 2623980 - RNA, 19 nt, Artificial Sequence
  Description of Artificial Sequence: Synthetic oligonucleotide
cuuuaucagccugguagag

SEQ ID NO: 2623981 - RNA, 19 nt, Artificial Sequence
  Description of Artificial Sequence: Synthetic oligonucleotide
acagcaagcaaaacaguaa

SEQ ID NO: 2623982 - RNA, 19 nt, Artificial Sequence
  Description of Artificial Sequence: Synthetic oligonucleotide
ccuaaugggcacuuuauca

SEQ ID NO: 2623983 - RNA, 19 nt, Artificial Sequence
  Description of Artificial Sequence: Synthetic oligonucleotide
aaagacggggaaggacaag

SEQ ID NO: 2623984 - RNA, 19 nt, Artificial Sequence
  Description of Artificial Sequence: Synthetic oligonucleotide
caggcuaaccaagucgccc

SEQ ID NO: 2623985 - RNA, 19 nt, Artificial Sequence
  Description of Artificial Sequence: Synthetic oligonucleotide
acacuuugccugugaguag

SEQ ID NO: 2623986 - RNA, 19 nt, Artificial Sequence
  Description of Artificial Sequence: Synthetic oligonucleotide
aggccugauaauaauggga

SEQ ID NO: 2623987 - RNA, 19 nt, Artificial Sequence
  Description of Artificial Sequence: Synthetic oligonucleotide
ggauccaccacacccuccc

SEQ ID NO: 2623988 - RNA, 19 nt, Artificial Sequence
  Description of Artificial Sequence: Synthetic oligonucleotide
agagacacuuugccuguga

SEQ ID NO: 2623989 - RNA, 19 nt, Artificial Sequence
  Description of Artificial Sequence: Synthetic oligonucleotide
  modified_base (8)..(8): a, c, u, g, unknown or other
guaaagunaggggugggaa

SEQ ID NO: 2623990 - RNA, 19 nt, Artificial Sequence
  Description of Artificial Sequence: Synthetic oligonucleotide
cuugccagacccuccucug

SEQ ID NO: 2623991 - RNA, 19 nt, Artificial Sequence
  Description of Artificial Sequence: Synthetic oligonucleotide
gagugggccugacuagcag

SEQ ID NO: 2623992 - RNA, 19 nt, Artificial Sequence
  Description of Artificial Sequence: Synthetic oligonucleotide
cagugcgccugccacacag

SEQ ID NO: 2623993 - RNA, 19 nt, Artificial Sequence
  Description of Artificial Sequence: Synthetic oligonucleotide
aacccagcaaagacgggga

SEQ ID NO: 2623994 - RNA, 19 nt, Artificial Sequence
  Description of Artificial Sequence: Synthetic oligonucleotide
ggacaagaaccuaaugggc

SEQ ID NO: 2623995 - RNA, 19 nt, Artificial Sequence
  Description of Artificial Sequence: Synthetic oligonucleotide
uggcccauuaggaucucau

SEQ ID NO: 2623996 - RNA, 19 nt, Artificial Sequence
  Description of Artificial Sequence: Synthetic oligonucleotide
acuagggcccagcguggac

SEQ ID NO: 2623997 - RNA, 19 nt, Artificial Sequence
  Description of Artificial Sequence: Synthetic oligonucleotide
ucagccugguagaggggca

SEQ ID NO: 2623998 - RNA, 19 nt, Artificial Sequence
  Description of Artificial Sequence: Synthetic oligonucleotide
ggaaaggccagaaccagac

SEQ ID NO: 2623999 - RNA, 19 nt, Artificial Sequence
  Description of Artificial Sequence: Synthetic oligonucleotide
cuagggcccagcguggacc

SEQ ID NO: 2624000 - RNA, 19 nt, Artificial Sequence
  Description of Artificial Sequence: Synthetic oligonucleotide
ucccagguggucuggcccc

SEQ ID NO: 2624001 - RNA, 19 nt, Artificial Sequence
  Description of Artificial Sequence: Synthetic oligonucleotide
ucccauggaagagcagucc

SEQ ID NO: 2624002 - RNA, 19 nt, Artificial Sequence
  Description of Artificial Sequence: Synthetic oligonucleotide
cuaaagcgaacugggccag

SEQ ID NO: 2624003 - RNA, 19 nt, Artificial Sequence
  Description of Artificial Sequence: Synthetic oligonucleotide
acaagacccaccacuucag

SEQ ID NO: 2624004 - RNA, 19 nt, Artificial Sequence
  Description of Artificial Sequence: Synthetic oligonucleotide
gaucucauguccuccugua

SEQ ID NO: 2624005 - RNA, 19 nt, Artificial Sequence
  Description of Artificial Sequence: Synthetic oligonucleotide
caugagccagggcaacagc

SEQ ID NO: 2624006 - RNA, 19 nt, Artificial Sequence
  Description of Artificial Sequence: Synthetic oligonucleotide
aagcgaacugggccagaga

SEQ ID NO: 2624007 - RNA, 19 nt, Artificial Sequence
  Description of Artificial Sequence: Synthetic oligonucleotide
cugagugggccugacuagc

SEQ ID NO: 2624008 - RNA, 19 nt, Artificial Sequence
  Description of Artificial Sequence: Synthetic oligonucleotide
accacuucagcuggugucu

SEQ ID NO: 2624009 - RNA, 19 nt, Artificial Sequence
  Description of Artificial Sequence: Synthetic oligonucleotide
ggcaggcuaaccaagucgc

SEQ ID NO: 2624010 - RNA, 19 nt, Artificial Sequence
  Description of Artificial Sequence: Synthetic oligonucleotide
caagacccaccacuucagc

SEQ ID NO: 2624011 - RNA, 19 nt, Artificial Sequence
  Description of Artificial Sequence: Synthetic oligonucleotide
caguuccggcucuaccugg

SEQ ID NO: 2624012 - RNA, 19 nt, Artificial Sequence
  Description of Artificial Sequence: Synthetic oligonucleotide
uuccggcucuaccuggagu

SEQ ID NO: 2624013 - RNA, 19 nt, Artificial Sequence
  Description of Artificial Sequence: Synthetic oligonucleotide
guguccaccacaaaagcua

SEQ ID NO: 2624014 - RNA, 19 nt, Artificial Sequence
  Description of Artificial Sequence: Synthetic oligonucleotide
ucccaaggccggaggaggc

SEQ ID NO: 2624015 - RNA, 19 nt, Artificial Sequence
  Description of Artificial Sequence: Synthetic oligonucleotide
cacuucagcuggugucugg

SEQ ID NO: 2624016 - RNA, 19 nt, Artificial Sequence
  Description of Artificial Sequence: Synthetic oligonucleotide
aaggccggaggaggcagag

SEQ ID NO: 2624017 - RNA, 19 nt, Artificial Sequence
  Description of Artificial Sequence: Synthetic oligonucleotide
gcaaagacggggaaggaca

SEQ ID NO: 2624018 - RNA, 19 nt, Artificial Sequence
  Description of Artificial Sequence: Synthetic oligonucleotide
ucauguccuccuguagucu

SEQ ID NO: 2624019 - RNA, 19 nt, Artificial Sequence
  Description of Artificial Sequence: Synthetic oligonucleotide
augagccagggcaacagca

SEQ ID NO: 2624020 - RNA, 19 nt, Artificial Sequence
  Description of Artificial Sequence: Synthetic oligonucleotide
aagaaccuaaugggcacuu

SEQ ID NO: 2624021 - RNA, 19 nt, Artificial Sequence
  Description of Artificial Sequence: Synthetic oligonucleotide
ggucauaggagugcugccc

SEQ ID NO: 2624022 - RNA, 19 nt, Artificial Sequence
  Description of Artificial Sequence: Synthetic oligonucleotide
  modified_base (3)..(3): a, c, u, g, unknown or other
gunaggggugggaacccag

SEQ ID NO: 2624023 - RNA, 19 nt, Artificial Sequence
  Description of Artificial Sequence: Synthetic oligonucleotide
gacucuccuugccuggauc

SEQ ID NO: 2624024 - RNA, 19 nt, Artificial Sequence
  Description of Artificial Sequence: Synthetic oligonucleotide
augggcacuuuaucagccu

SEQ ID NO: 2624025 - RNA, 19 nt, Artificial Sequence
  Description of Artificial Sequence: Synthetic oligonucleotide
ggagucaggaagccacaag

SEQ ID NO: 2624026 - RNA, 19 nt, Artificial Sequence
  Description of Artificial Sequence: Synthetic oligonucleotide
uauucaguuccggcucuac

SEQ ID NO: 2624027 - RNA, 19 nt, Artificial Sequence
  Description of Artificial Sequence: Synthetic oligonucleotide
ucugccaaaagggcccuau

SEQ ID NO: 2624028 - RNA, 19 nt, Artificial Sequence
  Description of Artificial Sequence: Synthetic oligonucleotide
aggccagaaccagacuagg

SEQ ID NO: 2624029 - RNA, 19 nt, Artificial Sequence
  Description of Artificial Sequence: Synthetic oligonucleotide
gggccagagacacuuugcc

SEQ ID NO: 2624030 - RNA, 19 nt, Artificial Sequence
  Description of Artificial Sequence: Synthetic oligonucleotide
uagagcacauuuggacucu

SEQ ID NO: 2624031 - RNA, 19 nt, Artificial Sequence
  Description of Artificial Sequence: Synthetic oligonucleotide
cuccuguagucuccaggcc

SEQ ID NO: 2624032 - RNA, 19 nt, Artificial Sequence
  Description of Artificial Sequence: Synthetic oligonucleotide
ugcgccugccacacaggug

SEQ ID NO: 2624033 - RNA, 19 nt, Artificial Sequence
  Description of Artificial Sequence: Synthetic oligonucleotide
cacacccucccaaggccgg

SEQ ID NO: 2624034 - RNA, 19 nt, Artificial Sequence
  Description of Artificial Sequence: Synthetic oligonucleotide
ucccaucuccaggcaaagg

SEQ ID NO: 2624035 - RNA, 19 nt, Artificial Sequence
  Description of Artificial Sequence: Synthetic oligonucleotide
agcaucccauggaagagca

SEQ ID NO: 2624036 - RNA, 19 nt, Artificial Sequence
  Description of Artificial Sequence: Synthetic oligonucleotide
cccauuaggaucucauguc

SEQ ID NO: 2624037 - RNA, 19 nt, Artificial Sequence
  Description of Artificial Sequence: Synthetic oligonucleotide
cugugaguagcaugagcca

SEQ ID NO: 2624038 - RNA, 19 nt, Artificial Sequence
  Description of Artificial Sequence: Synthetic oligonucleotide
aggaagccacaagacccac

SEQ ID NO: 2624039 - RNA, 19 nt, Artificial Sequence
  Description of Artificial Sequence: Synthetic oligonucleotide
uggugucuggaaagugauc

SEQ ID NO: 2624040 - RNA, 19 nt, Artificial Sequence
  Description of Artificial Sequence: Synthetic oligonucleotide
aggggcaggcaggcuaacc

SEQ ID NO: 2624041 - RNA, 19 nt, Artificial Sequence
  Description of Artificial Sequence: Synthetic oligonucleotide
ccaccacaaaagcuaaagc

SEQ ID NO: 2624042 - RNA, 19 nt, Artificial Sequence
  Description of Artificial Sequence: Synthetic oligonucleotide
agcguggacccagggcugc

SEQ ID NO: 2624043 - RNA, 19 nt, Artificial Sequence
  Description of Artificial Sequence: Synthetic oligonucleotide
acagcaggagagccacugu

SEQ ID NO: 2624044 - RNA, 19 nt, Artificial Sequence
  Description of Artificial Sequence: Synthetic oligonucleotide
uccuugccuggauccacca

SEQ ID NO: 2624045 - RNA, 19 nt, Artificial Sequence
  Description of Artificial Sequence: Synthetic oligonucleotide
gaucccaucuccaggcaaa

SEQ ID NO: 2624046 - RNA, 19 nt, Artificial Sequence
  Description of Artificial Sequence: Synthetic oligonucleotide
ggccugauaauaaugggaa

SEQ ID NO: 2624047 - RNA, 19 nt, Artificial Sequence
  Description of Artificial Sequence: Synthetic oligonucleotide
cacacagguguccaccaca

SEQ ID NO: 2624048 - RNA, 19 nt, Artificial Sequence
  Description of Artificial Sequence: Synthetic oligonucleotide
cagguuguggcaggugccc

SEQ ID NO: 2624049 - RNA, 19 nt, Artificial Sequence
  Description of Artificial Sequence: Synthetic oligonucleotide
aucuccaggcaaaggggag

SEQ ID NO: 2624050 - RNA, 19 nt, Artificial Sequence
  Description of Artificial Sequence: Synthetic oligonucleotide
caggaagccacaagaccca

SEQ ID NO: 2624051 - RNA, 19 nt, Artificial Sequence
  Description of Artificial Sequence: Synthetic oligonucleotide
  modified_base (4)..(4): a, c, u, g, unknown or other
agunaggggugggaaccca

SEQ ID NO: 2624052 - RNA, 19 nt, Artificial Sequence
  Description of Artificial Sequence: Synthetic oligonucleotide
cagcagcaucccauggaag

SEQ ID NO: 2624053 - RNA, 19 nt, Artificial Sequence
  Description of Artificial Sequence: Synthetic oligonucleotide
ucuccuugccuggauccac

SEQ ID NO: 2624054 - RNA, 19 nt, Artificial Sequence
  Description of Artificial Sequence: Synthetic oligonucleotide
gagcacauuuggacucucc

SEQ ID NO: 2624055 - RNA, 19 nt, Artificial Sequence
  Description of Artificial Sequence: Synthetic oligonucleotide
cauuaggaucucauguccu

SEQ ID NO: 2624056 - RNA, 19 nt, Artificial Sequence
  Description of Artificial Sequence: Synthetic oligonucleotide
gcugagugggccugacuag

SEQ ID NO: 2624057 - RNA, 19 nt, Artificial Sequence
  Description of Artificial Sequence: Synthetic oligonucleotide
agccacuguguagagggcu

SEQ ID NO: 2624058 - RNA, 19 nt, Artificial Sequence
  Description of Artificial Sequence: Synthetic oligonucleotide
agagcacauuuggacucuc

SEQ ID NO: 2624059 - RNA, 19 nt, Artificial Sequence
  Description of Artificial Sequence: Synthetic oligonucleotide
uaccuggagucaggaagcc

SEQ ID NO: 2624060 - RNA, 19 nt, Artificial Sequence
  Description of Artificial Sequence: Synthetic oligonucleotide
agaaccagacuagggccca

SEQ ID NO: 2624061 - RNA, 19 nt, Artificial Sequence
  Description of Artificial Sequence: Synthetic oligonucleotide
agguggucuggccccgaag

SEQ ID NO: 2624062 - RNA, 19 nt, Artificial Sequence
  Description of Artificial Sequence: Synthetic oligonucleotide
gaggcuaggaaaggccaga

SEQ ID NO: 2624063 - RNA, 19 nt, Artificial Sequence
  Description of Artificial Sequence: Synthetic oligonucleotide
ggcccuauucaguuccggc

SEQ ID NO: 2624064 - RNA, 19 nt, Artificial Sequence
  Description of Artificial Sequence: Synthetic oligonucleotide
gaagagcaguccagcacca

SEQ ID NO: 2624065 - RNA, 19 nt, Artificial Sequence
  Description of Artificial Sequence: Synthetic oligonucleotide
ccauggaagagcaguccag

SEQ ID NO: 2624066 - RNA, 19 nt, Artificial Sequence
  Description of Artificial Sequence: Synthetic oligonucleotide
auccaccacacccucccaa

SEQ ID NO: 2624067 - RNA, 19 nt, Artificial Sequence
  Description of Artificial Sequence: Synthetic oligonucleotide
caaagacggggaaggacaa

SEQ ID NO: 2624068 - RNA, 19 nt, Artificial Sequence
  Description of Artificial Sequence: Synthetic oligonucleotide
gguuguggcaggugcccag

SEQ ID NO: 2624069 - RNA, 19 nt, Artificial Sequence
  Description of Artificial Sequence: Synthetic oligonucleotide
agacuagggcccagcgugg

SEQ ID NO: 2624070 - RNA, 19 nt, Artificial Sequence
  Description of Artificial Sequence: Synthetic oligonucleotide
aggggugggaacccagcaa

SEQ ID NO: 2624071 - RNA, 19 nt, Artificial Sequence
  Description of Artificial Sequence: Synthetic oligonucleotide
agcccuggcccauuaggau

SEQ ID NO: 2624072 - RNA, 19 nt, Artificial Sequence
  Description of Artificial Sequence: Synthetic oligonucleotide
cuggauccaccacacccuc

SEQ ID NO: 2624073 - RNA, 19 nt, Artificial Sequence
  Description of Artificial Sequence: Synthetic oligonucleotide
caggugcccaggucauagg

SEQ ID NO: 2624074 - RNA, 19 nt, Artificial Sequence
  Description of Artificial Sequence: Synthetic oligonucleotide
uguccuccuguagucucca

SEQ ID NO: 2624075 - RNA, 19 nt, Artificial Sequence
  Description of Artificial Sequence: Synthetic oligonucleotide
uggacccagggcugccugc

SEQ ID NO: 2624076 - RNA, 19 nt, Artificial Sequence
  Description of Artificial Sequence: Synthetic oligonucleotide
caggcaggcuaaccaaguc

SEQ ID NO: 2624077 - RNA, 19 nt, Artificial Sequence
  Description of Artificial Sequence: Synthetic oligonucleotide
gagcccuggcccauuagga

SEQ ID NO: 2624078 - RNA, 19 nt, Artificial Sequence
  Description of Artificial Sequence: Synthetic oligonucleotide
uggagucaggaagccacaa

SEQ ID NO: 2624079 - RNA, 19 nt, Artificial Sequence
  Description of Artificial Sequence: Synthetic oligonucleotide
aucccaucuccaggcaaag

SEQ ID NO: 2624080 - RNA, 19 nt, Artificial Sequence
  Description of Artificial Sequence: Synthetic oligonucleotide
aggaaaggccagaaccaga

SEQ ID NO: 2624081 - RNA, 19 nt, Artificial Sequence
  Description of Artificial Sequence: Synthetic oligonucleotide
gggcacuuuaucagccugg

SEQ ID NO: 2624082 - RNA, 19 nt, Artificial Sequence
  Description of Artificial Sequence: Synthetic oligonucleotide
agcuggugucuggaaagug

SEQ ID NO: 2624083 - RNA, 19 nt, Artificial Sequence
  Description of Artificial Sequence: Synthetic oligonucleotide
gacccuccucugccaaaag

SEQ ID NO: 2624084 - RNA, 19 nt, Artificial Sequence
  Description of Artificial Sequence: Synthetic oligonucleotide
cugacuagcagggcugaca

SEQ ID NO: 2624085 - RNA, 19 nt, Artificial Sequence
  Description of Artificial Sequence: Synthetic oligonucleotide
guuccggcucuaccuggag

SEQ ID NO: 2624086 - RNA, 19 nt, Artificial Sequence
  Description of Artificial Sequence: Synthetic oligonucleotide
gguagaggggcaggcaggc

SEQ ID NO: 2624087 - RNA, 19 nt, Artificial Sequence
  Description of Artificial Sequence: Synthetic oligonucleotide
caucccauggaagagcagu

SEQ ID NO: 2624088 - RNA, 19 nt, Artificial Sequence
  Description of Artificial Sequence: Synthetic oligonucleotide
gcaggugcccaggucauag

SEQ ID NO: 2624089 - RNA, 19 nt, Artificial Sequence
  Description of Artificial Sequence: Synthetic oligonucleotide
ggcccauuaggaucucaug

SEQ ID NO: 2624090 - RNA, 19 nt, Artificial Sequence
  Description of Artificial Sequence: Synthetic oligonucleotide
gcccauuaggaucucaugu

SEQ ID NO: 2624091 - RNA, 19 nt, Artificial Sequence
  Description of Artificial Sequence: Synthetic oligonucleotide
aggcaaaggggaggcuagg

SEQ ID NO: 2624092 - RNA, 19 nt, Artificial Sequence
  Description of Artificial Sequence: Synthetic oligonucleotide
guagucuccaggccugaua

SEQ ID NO: 2624093 - RNA, 19 nt, Artificial Sequence
  Description of Artificial Sequence: Synthetic oligonucleotide
gccugugaguagcaugagc

SEQ ID NO: 2624094 - RNA, 19 nt, Artificial Sequence
  Description of Artificial Sequence: Synthetic oligonucleotide
gccugauaauaaugggaac

SEQ ID NO: 2624095 - RNA, 19 nt, Artificial Sequence
  Description of Artificial Sequence: Synthetic oligonucleotide
gcagcaucccauggaagag

SEQ ID NO: 2624096 - RNA, 19 nt, Artificial Sequence
  Description of Artificial Sequence: Synthetic oligonucleotide
ggccagaaccagacuaggg

SEQ ID NO: 2624097 - RNA, 19 nt, Artificial Sequence
  Description of Artificial Sequence: Synthetic oligonucleotide
ggggaggcuaggaaaggcc

SEQ ID NO: 2624098 - RNA, 19 nt, Artificial Sequence
  Description of Artificial Sequence: Synthetic oligonucleotide
ugccugugaguagcaugag

SEQ ID NO: 2624099 - RNA, 19 nt, Artificial Sequence
  Description of Artificial Sequence: Synthetic oligonucleotide
acacagguguccaccacaa

SEQ ID NO: 2624100 - RNA, 19 nt, Artificial Sequence
  Description of Artificial Sequence: Synthetic oligonucleotide
ccugauaauaaugggaacu

SEQ ID NO: 2624101 - RNA, 19 nt, Artificial Sequence
  Description of Artificial Sequence: Synthetic oligonucleotide
gaaaggccagaaccagacu

SEQ ID NO: 2624102 - RNA, 19 nt, Artificial Sequence
  Description of Artificial Sequence: Synthetic oligonucleotide
gcaugagccagggcaacag

SEQ ID NO: 2624103 - RNA, 19 nt, Artificial Sequence
  Description of Artificial Sequence: Synthetic oligonucleotide
ggaggcuaggaaaggccag

SEQ ID NO: 2624104 - RNA, 19 nt, Artificial Sequence
  Description of Artificial Sequence: Synthetic oligonucleotide
cccuauucaguuccggcuc

SEQ ID NO: 2624105 - RNA, 19 nt, Artificial Sequence
  Description of Artificial Sequence: Synthetic oligonucleotide
ggggugggaacccagcaaa

SEQ ID NO: 2624106 - RNA, 19 nt, Artificial Sequence
  Description of Artificial Sequence: Synthetic oligonucleotide
ggagagccacuguguagag

SEQ ID NO: 2624107 - RNA, 19 nt, Artificial Sequence
  Description of Artificial Sequence: Synthetic oligonucleotide
uaaagcgaacugggccaga

SEQ ID NO: 2624108 - RNA, 19 nt, Artificial Sequence
  Description of Artificial Sequence: Synthetic oligonucleotide
ccacacccucccaaggccg

SEQ ID NO: 2624109 - RNA, 19 nt, Artificial Sequence
  Description of Artificial Sequence: Synthetic oligonucleotide
cacuguguagagggcugag

SEQ ID NO: 2624110 - RNA, 19 nt, Artificial Sequence
  Description of Artificial Sequence: Synthetic oligonucleotide
agugcgccugccacacagg

SEQ ID NO: 2624111 - RNA, 19 nt, Artificial Sequence
  Description of Artificial Sequence: Synthetic oligonucleotide
guggacccagggcugccug

SEQ ID NO: 2624112 - RNA, 19 nt, Artificial Sequence
  Description of Artificial Sequence: Synthetic oligonucleotide
gaaccagacuagggcccag

SEQ ID NO: 2624113 - RNA, 19 nt, Artificial Sequence
  Description of Artificial Sequence: Synthetic oligonucleotide
cugccugcagguuguggca

SEQ ID NO: 2624114 - RNA, 19 nt, Artificial Sequence
  Description of Artificial Sequence: Synthetic oligonucleotide
cgagcccacucccaggugg

SEQ ID NO: 2624115 - RNA, 19 nt, Artificial Sequence
  Description of Artificial Sequence: Synthetic oligonucleotide
ggcuaggaaaggccagaac

SEQ ID NO: 2624116 - RNA, 19 nt, Artificial Sequence
  Description of Artificial Sequence: Synthetic oligonucleotide
gugaucccaucuccaggca

SEQ ID NO: 2624117 - RNA, 19 nt, Artificial Sequence
  Description of Artificial Sequence: Synthetic oligonucleotide
aguuccggcucuaccugga

SEQ ID NO: 2624118 - RNA, 19 nt, Artificial Sequence
  Description of Artificial Sequence: Synthetic oligonucleotide
gagccacuguguagagggc

SEQ ID NO: 2624119 - RNA, 19 nt, Artificial Sequence
  Description of Artificial Sequence: Synthetic oligonucleotide
ggucuggccccgaagcagc

SEQ ID NO: 2624120 - RNA, 19 nt, Artificial Sequence
  Description of Artificial Sequence: Synthetic oligonucleotide
aggccggaggaggcagagc

SEQ ID NO: 2624121 - RNA, 19 nt, Artificial Sequence
  Description of Artificial Sequence: Synthetic oligonucleotide
ggugggaacccagcaaaga

SEQ ID NO: 2624122 - RNA, 19 nt, Artificial Sequence
  Description of Artificial Sequence: Synthetic oligonucleotide
gcgccugccacacaggugu

SEQ ID NO: 2624123 - RNA, 19 nt, Artificial Sequence
  Description of Artificial Sequence: Synthetic oligonucleotide
cagccugguagaggggcag

SEQ ID NO: 2624124 - RNA, 19 nt, Artificial Sequence
  Description of Artificial Sequence: Synthetic oligonucleotide
gggaggcuaggaaaggcca

SEQ ID NO: 2624125 - RNA, 19 nt, Artificial Sequence
  Description of Artificial Sequence: Synthetic oligonucleotide
cagagcccuggcccauuag

SEQ ID NO: 2624126 - RNA, 19 nt, Artificial Sequence
  Description of Artificial Sequence: Synthetic oligonucleotide
gcccuggcccauuaggauc

SEQ ID NO: 2624127 - RNA, 19 nt, Artificial Sequence
  Description of Artificial Sequence: Synthetic oligonucleotide
accuggagucaggaagcca

SEQ ID NO: 2624128 - RNA, 19 nt, Artificial Sequence
  Description of Artificial Sequence: Synthetic oligonucleotide
agggcccuauucaguuccg

SEQ ID NO: 2624129 - RNA, 19 nt, Artificial Sequence
  Description of Artificial Sequence: Synthetic oligonucleotide
agacggggaaggacaagaa

SEQ ID NO: 2624130 - RNA, 19 nt, Artificial Sequence
  Description of Artificial Sequence: Synthetic oligonucleotide
ggaagccacaagacccacc

SEQ ID NO: 2624131 - RNA, 19 nt, Artificial Sequence
  Description of Artificial Sequence: Synthetic oligonucleotide
gcagguuguggcaggugcc

SEQ ID NO: 2624132 - RNA, 19 nt, Artificial Sequence
  Description of Artificial Sequence: Synthetic oligonucleotide
agaaccuaaugggcacuuu

SEQ ID NO: 2624133 - RNA, 19 nt, Artificial Sequence
  Description of Artificial Sequence: Synthetic oligonucleotide
gcagggcugacagggcagg

SEQ ID NO: 2624134 - RNA, 19 nt, Artificial Sequence
  Description of Artificial Sequence: Synthetic oligonucleotide
gacuagggcccagcgugga

SEQ ID NO: 2624135 - RNA, 19 nt, Artificial Sequence
  Description of Artificial Sequence: Synthetic oligonucleotide
ggaacccagcaaagacggg

SEQ ID NO: 2624136 - RNA, 19 nt, Artificial Sequence
  Description of Artificial Sequence: Synthetic oligonucleotide
gccagggcaacagcaggag

SEQ ID NO: 2624137 - RNA, 19 nt, Artificial Sequence
  Description of Artificial Sequence: Synthetic oligonucleotide
gccacuguguagagggcug

SEQ ID NO: 2624138 - RNA, 19 nt, Artificial Sequence
  Description of Artificial Sequence: Synthetic oligonucleotide
gguguccaccacaaaagcu

SEQ ID NO: 2624139 - RNA, 19 nt, Artificial Sequence
  Description of Artificial Sequence: Synthetic oligonucleotide
cucuaccuggagucaggaa

SEQ ID NO: 2624140 - RNA, 19 nt, Artificial Sequence
  Description of Artificial Sequence: Synthetic oligonucleotide
cccauggaagagcagucca

SEQ ID NO: 2624141 - RNA, 19 nt, Artificial Sequence
  Description of Artificial Sequence: Synthetic oligonucleotide
uccaggcaaaggggaggcu

SEQ ID NO: 2624142 - RNA, 19 nt, Artificial Sequence
  Description of Artificial Sequence: Synthetic oligonucleotide
gggugggaacccagcaaag

SEQ ID NO: 2624143 - RNA, 19 nt, Artificial Sequence
  Description of Artificial Sequence: Synthetic oligonucleotide
cccagcguggacccagggc

SEQ ID NO: 2624144 - RNA, 19 nt, Artificial Sequence
  Description of Artificial Sequence: Synthetic oligonucleotide
ggaucucauguccuccugu

SEQ ID NO: 2624145 - RNA, 19 nt, Artificial Sequence
  Description of Artificial Sequence: Synthetic oligonucleotide
ccagcguggacccagggcu

SEQ ID NO: 2624146 - RNA, 19 nt, Artificial Sequence
  Description of Artificial Sequence: Synthetic oligonucleotide
cagagacacuuugccugug

SEQ ID NO: 2624147 - RNA, 19 nt, Artificial Sequence
  Description of Artificial Sequence: Synthetic oligonucleotide
gccacacagguguccacca

SEQ ID NO: 2624148 - RNA, 19 nt, Artificial Sequence
  Description of Artificial Sequence: Synthetic oligonucleotide
ggcaaaggggaggcuagga

SEQ ID NO: 2624149 - RNA, 19 nt, Artificial Sequence
  Description of Artificial Sequence: Synthetic oligonucleotide
agcccacucccaggugguc

SEQ ID NO: 2624150 - RNA, 19 nt, Artificial Sequence
  Description of Artificial Sequence: Synthetic oligonucleotide
gggcccuauucaguuccgg

SEQ ID NO: 2624151 - RNA, 19 nt, Artificial Sequence
  Description of Artificial Sequence: Synthetic oligonucleotide
cacccucccaaggccggag

SEQ ID NO: 2624152 - RNA, 19 nt, Artificial Sequence
  Description of Artificial Sequence: Synthetic oligonucleotide
caagaaccuaaugggcacu

SEQ ID NO: 2624153 - RNA, 19 nt, Artificial Sequence
  Description of Artificial Sequence: Synthetic oligonucleotide
guccagcaccacacagcag

SEQ ID NO: 2624154 - RNA, 19 nt, Artificial Sequence
  Description of Artificial Sequence: Synthetic oligonucleotide
gcaggcuaaccaagucgcc

SEQ ID NO: 2624155 - RNA, 19 nt, Artificial Sequence
  Description of Artificial Sequence: Synthetic oligonucleotide
caaggccggaggaggcaga

SEQ ID NO: 2624156 - RNA, 19 nt, Artificial Sequence
  Description of Artificial Sequence: Synthetic oligonucleotide
gugcgccugccacacaggu

SEQ ID NO: 2624157 - RNA, 19 nt, Artificial Sequence
  Description of Artificial Sequence: Synthetic oligonucleotide
ccaaggccggaggaggcag

SEQ ID NO: 2624158 - RNA, 19 nt, Artificial Sequence
  Description of Artificial Sequence: Synthetic oligonucleotide
gucuggaaagugaucccau

SEQ ID NO: 2624159 - RNA, 19 nt, Artificial Sequence
  Description of Artificial Sequence: Synthetic oligonucleotide
ccaggucauaggagugcug

SEQ ID NO: 2624160 - RNA, 19 nt, Artificial Sequence
  Description of Artificial Sequence: Synthetic oligonucleotide
ccuggauccaccacacccu

SEQ ID NO: 2624161 - RNA, 19 nt, Artificial Sequence
  Description of Artificial Sequence: Synthetic oligonucleotide
cagcaaagacggggaagga

SEQ ID NO: 2624162 - RNA, 19 nt, Artificial Sequence
  Description of Artificial Sequence: Synthetic oligonucleotide
cccgaagcagcagcauccc

SEQ ID NO: 2624163 - RNA, 19 nt, Artificial Sequence
  Description of Artificial Sequence: Synthetic oligonucleotide
gcucuaccuggagucagga

SEQ ID NO: 2624164 - RNA, 19 nt, Artificial Sequence
  Description of Artificial Sequence: Synthetic oligonucleotide
ccuugccuggauccaccac

SEQ ID NO: 2624165 - RNA, 19 nt, Artificial Sequence
  Description of Artificial Sequence: Synthetic oligonucleotide
gggcccagcguggacccag

SEQ ID NO: 2624166 - RNA, 19 nt, Artificial Sequence
  Description of Artificial Sequence: Synthetic oligonucleotide
ccacacagguguccaccac

SEQ ID NO: 2624167 - RNA, 19 nt, Artificial Sequence
  Description of Artificial Sequence: Synthetic oligonucleotide
ggcacuuuaucagccuggu

SEQ ID NO: 2624168 - RNA, 19 nt, Artificial Sequence
  Description of Artificial Sequence: Synthetic oligonucleotide
gcgaacugggccagagaca

SEQ ID NO: 2624169 - RNA, 19 nt, Artificial Sequence
  Description of Artificial Sequence: Synthetic oligonucleotide
gagggcugagugggccuga

SEQ ID NO: 2624170 - RNA, 19 nt, Artificial Sequence
  Description of Artificial Sequence: Synthetic oligonucleotide
cuauucaguuccggcucua

SEQ ID NO: 2624171 - RNA, 19 nt, Artificial Sequence
  Description of Artificial Sequence: Synthetic oligonucleotide
gcccagcguggacccaggg

SEQ ID NO: 2624172 - RNA, 19 nt, Artificial Sequence
  Description of Artificial Sequence: Synthetic oligonucleotide
gaggggcaggcaggcuaac

SEQ ID NO: 2624173 - RNA, 19 nt, Artificial Sequence
  Description of Artificial Sequence: Synthetic oligonucleotide
gcaucccauggaagagcag

SEQ ID NO: 2624174 - RNA, 19 nt, Artificial Sequence
  Description of Artificial Sequence: Synthetic oligonucleotide
cuggcccauuaggaucuca

SEQ ID NO: 2624175 - RNA, 19 nt, Artificial Sequence
  Description of Artificial Sequence: Synthetic oligonucleotide
cccaccacuucagcuggug

SEQ ID NO: 2624176 - RNA, 19 nt, Artificial Sequence
  Description of Artificial Sequence: Synthetic oligonucleotide
gcacuuuaucagccuggua

SEQ ID NO: 2624177 - RNA, 19 nt, Artificial Sequence
  Description of Artificial Sequence: Synthetic oligonucleotide
ccuauucaguuccggcucu

SEQ ID NO: 2624178 - RNA, 19 nt, Artificial Sequence
  Description of Artificial Sequence: Synthetic oligonucleotide
cggggaaggacaagaaccu

SEQ ID NO: 2624179 - RNA, 19 nt, Artificial Sequence
  Description of Artificial Sequence: Synthetic oligonucleotide
cagguggucuggccccgaa

SEQ ID NO: 2624180 - RNA, 19 nt, Artificial Sequence
  Description of Artificial Sequence: Synthetic oligonucleotide
ggcccagcguggacccagg

SEQ ID NO: 2624181 - RNA, 19 nt, Artificial Sequence
  Description of Artificial Sequence: Synthetic oligonucleotide
ccacuucagcuggugucug

SEQ ID NO: 2624182 - RNA, 19 nt, Artificial Sequence
  Description of Artificial Sequence: Synthetic oligonucleotide
gccugacuagcagggcuga

SEQ ID NO: 2624183 - RNA, 19 nt, Artificial Sequence
  Description of Artificial Sequence: Synthetic oligonucleotide
gccacaagacccaccacuu

SEQ ID NO: 2624184 - RNA, 19 nt, Artificial Sequence
  Description of Artificial Sequence: Synthetic oligonucleotide
cccagguggucuggccccg

SEQ ID NO: 2624185 - RNA, 19 nt, Artificial Sequence
  Description of Artificial Sequence: Synthetic oligonucleotide
ccugacuagcagggcugac

SEQ ID NO: 2624186 - RNA, 19 nt, Artificial Sequence
  Description of Artificial Sequence: Synthetic oligonucleotide
guagaggggcaggcaggcu

SEQ ID NO: 2624187 - RNA, 19 nt, Artificial Sequence
  Description of Artificial Sequence: Synthetic oligonucleotide
gcagagcccuggcccauua

SEQ ID NO: 2624188 - RNA, 19 nt, Artificial Sequence
  Description of Artificial Sequence: Synthetic oligonucleotide
cccucccaaggccggagga

SEQ ID NO: 2624189 - RNA, 19 nt, Artificial Sequence
  Description of Artificial Sequence: Synthetic oligonucleotide
cggcucuaccuggagucag

SEQ ID NO: 2624190 - RNA, 19 nt, Artificial Sequence
  Description of Artificial Sequence: Synthetic oligonucleotide
ccagacuagggcccagcgu

SEQ ID NO: 2624191 - RNA, 19 nt, Artificial Sequence
  Description of Artificial Sequence: Synthetic oligonucleotide
ccgaagcagcagcauccca

SEQ ID NO: 2624192 - RNA, 19 nt, Artificial Sequence
  Description of Artificial Sequence: Synthetic oligonucleotide
ccacuguguagagggcuga

SEQ ID NO: 2624193 - RNA, 19 nt, Artificial Sequence
  Description of Artificial Sequence: Synthetic oligonucleotide
ggacucuccuugccuggau

SEQ ID NO: 2624194 - RNA, 19 nt, Artificial Sequence
  Description of Artificial Sequence: Synthetic oligonucleotide
ccgagcccacucccaggug

SEQ ID NO: 2624195 - RNA, 19 nt, Artificial Sequence
  Description of Artificial Sequence: Synthetic oligonucleotide
cccgagcccacucccaggu

SEQ ID NO: 2624196 - RNA, 19 nt, Artificial Sequence
  Description of Artificial Sequence: Synthetic oligonucleotide
cccuugccagacccuccuc

SEQ ID NO: 2624197 - RNA, 19 nt, Artificial Sequence
  Description of Artificial Sequence: Synthetic oligonucleotide
ccaccacuucagcuggugu

SEQ ID NO: 2624198 - RNA, 19 nt, Artificial Sequence
  Description of Artificial Sequence: Synthetic oligonucleotide
gcagugcgccugccacaca

SEQ ID NO: 2624199 - RNA, 19 nt, Artificial Sequence
  Description of Artificial Sequence: Synthetic oligonucleotide
gggcugagugggccugacu

SEQ ID NO: 2624200 - RNA, 19 nt, Artificial Sequence
  Description of Artificial Sequence: Synthetic oligonucleotide
ccggcucuaccuggaguca

SEQ ID NO: 2624201 - RNA, 19 nt, Artificial Sequence
  Description of Artificial Sequence: Synthetic oligonucleotide
ccccuugccagacccuccu

SEQ ID NO: 2624202 - RNA, 19 nt, Artificial Sequence
  Description of Artificial Sequence: Synthetic oligonucleotide
ggcaggugcccaggucaua

SEQ ID NO: 2624203 - RNA, 19 nt, Artificial Sequence
  Description of Artificial Sequence: Synthetic oligonucleotide
ggccccgaagcagcagcau

SEQ ID NO: 2624204 - RNA, 19 nt, Artificial Sequence
  Description of Artificial Sequence: Synthetic oligonucleotide
ccagguggucuggccccga

SEQ ID NO: 2624205 - RNA, 19 nt, Artificial Sequence
  Description of Artificial Sequence: Synthetic oligonucleotide
cguggacccagggcugccu

SEQ ID NO: 2624206 - RNA, 19 nt, Artificial Sequence
  Description of Artificial Sequence: Synthetic oligonucleotide
aauguuaguguucugaauc

SEQ ID NO: 2624207 - RNA, 19 nt, Artificial Sequence
  Description of Artificial Sequence: Synthetic oligonucleotide
uauggcaugacaaauauca

SEQ ID NO: 2624208 - RNA, 19 nt, Artificial Sequence
  Description of Artificial Sequence: Synthetic oligonucleotide
aaauaucaaaacaggagcc

SEQ ID NO: 2624209 - RNA, 19 nt, Artificial Sequence
  Description of Artificial Sequence: Synthetic oligonucleotide
ugacaaauaucaaaacagg

SEQ ID NO: 2624210 - RNA, 19 nt, Artificial Sequence
  Description of Artificial Sequence: Synthetic oligonucleotide
accuguuuuaccuuaggcc

SEQ ID NO: 2624211 - RNA, 19 nt, Artificial Sequence
  Description of Artificial Sequence: Synthetic oligonucleotide
aguaugaauguccuuggcg

SEQ ID NO: 2624212 - RNA, 19 nt, Artificial Sequence
  Description of Artificial Sequence: Synthetic oligonucleotide
cuagacacuugucaaaucg

SEQ ID NO: 2624213 - RNA, 19 nt, Artificial Sequence
  Description of Artificial Sequence: Synthetic oligonucleotide
uauagcuacaucgcuaugg

SEQ ID NO: 2624214 - RNA, 19 nt, Artificial Sequence
  Description of Artificial Sequence: Synthetic oligonucleotide
augacaaauaucaaaacag

SEQ ID NO: 2624215 - RNA, 19 nt, Artificial Sequence
  Description of Artificial Sequence: Synthetic oligonucleotide
auagcuacaucgcuauggc

SEQ ID NO: 2624216 - RNA, 19 nt, Artificial Sequence
  Description of Artificial Sequence: Synthetic oligonucleotide
uuuaccuuaggccauacuu

SEQ ID NO: 2624217 - RNA, 19 nt, Artificial Sequence
  Description of Artificial Sequence: Synthetic oligonucleotide
gcugguuauagcuacaucg

SEQ ID NO: 2624218 - RNA, 19 nt, Artificial Sequence
  Description of Artificial Sequence: Synthetic oligonucleotide
acaaauaucaaaacaggag

SEQ ID NO: 2624219 - RNA, 19 nt, Artificial Sequence
  Description of Artificial Sequence: Synthetic oligonucleotide
guaugaauguccuuggcgc

SEQ ID NO: 2624220 - RNA, 19 nt, Artificial Sequence
  Description of Artificial Sequence: Synthetic oligonucleotide
guaaaacuccucuagacac

SEQ ID NO: 2624221 - RNA, 19 nt, Artificial Sequence
  Description of Artificial Sequence: Synthetic oligonucleotide
ugucaaaucgcuguauggg

SEQ ID NO: 2624222 - RNA, 19 nt, Artificial Sequence
  Description of Artificial Sequence: Synthetic oligonucleotide
uuaguguucugaaucaggu

SEQ ID NO: 2624223 - RNA, 19 nt, Artificial Sequence
  Description of Artificial Sequence: Synthetic oligonucleotide
guaaucugggcuuugauga

SEQ ID NO: 2624224 - RNA, 19 nt, Artificial Sequence
  Description of Artificial Sequence: Synthetic oligonucleotide
uguccguugucaauguuag

SEQ ID NO: 2624225 - RNA, 19 nt, Artificial Sequence
  Description of Artificial Sequence: Synthetic oligonucleotide
uccguugucaauguuagug

SEQ ID NO: 2624226 - RNA, 19 nt, Artificial Sequence
  Description of Artificial Sequence: Synthetic oligonucleotide
aauaucaaaacaggagcca

SEQ ID NO: 2624227 - RNA, 19 nt, Artificial Sequence
  Description of Artificial Sequence: Synthetic oligonucleotide
gauagggcaagcugucugg

SEQ ID NO: 2624228 - RNA, 19 nt, Artificial Sequence
  Description of Artificial Sequence: Synthetic oligonucleotide
aacuccucuagacacuugu

SEQ ID NO: 2624229 - RNA, 19 nt, Artificial Sequence
  Description of Artificial Sequence: Synthetic oligonucleotide
auaucaaaacaggagccac

SEQ ID NO: 2624230 - RNA, 19 nt, Artificial Sequence
  Description of Artificial Sequence: Synthetic oligonucleotide
ugugaaaggcacucgugag

SEQ ID NO: 2624231 - RNA, 19 nt, Artificial Sequence
  Description of Artificial Sequence: Synthetic oligonucleotide
aucgcagagagcguaaaac

SEQ ID NO: 2624232 - RNA, 19 nt, Artificial Sequence
  Description of Artificial Sequence: Synthetic oligonucleotide
uuaccuuaggccauacuuc

SEQ ID NO: 2624233 - RNA, 19 nt, Artificial Sequence
  Description of Artificial Sequence: Synthetic oligonucleotide
cuuggcgcagguaaucugg

SEQ ID NO: 2624234 - RNA, 19 nt, Artificial Sequence
  Description of Artificial Sequence: Synthetic oligonucleotide
ugcaggagcgcacucgggg

SEQ ID NO: 2624235 - RNA, 19 nt, Artificial Sequence
  Description of Artificial Sequence: Synthetic oligonucleotide
cugguuauagcuacaucgc

SEQ ID NO: 2624236 - RNA, 19 nt, Artificial Sequence
  Description of Artificial Sequence: Synthetic oligonucleotide
gaaugcuuggcacugucac

SEQ ID NO: 2624237 - RNA, 19 nt, Artificial Sequence
  Description of Artificial Sequence: Synthetic oligonucleotide
aagacgucagaugcugccc

SEQ ID NO: 2624238 - RNA, 19 nt, Artificial Sequence
  Description of Artificial Sequence: Synthetic oligonucleotide
caucuuguagcgcugcacg

SEQ ID NO: 2624239 - RNA, 19 nt, Artificial Sequence
  Description of Artificial Sequence: Synthetic oligonucleotide
cagcugaucgcagagagcg

SEQ ID NO: 2624240 - RNA, 19 nt, Artificial Sequence
  Description of Artificial Sequence: Synthetic oligonucleotide
gagcguaaaacuccucuag

SEQ ID NO: 2624241 - RNA, 19 nt, Artificial Sequence
  Description of Artificial Sequence: Synthetic oligonucleotide
acacuugucaaaucgcugu

SEQ ID NO: 2624242 - RNA, 19 nt, Artificial Sequence
  Description of Artificial Sequence: Synthetic oligonucleotide
uagacacuugucaaaucgc

SEQ ID NO: 2624243 - RNA, 19 nt, Artificial Sequence
  Description of Artificial Sequence: Synthetic oligonucleotide
ugcgggaugagcaucuugu

SEQ ID NO: 2624244 - RNA, 19 nt, Artificial Sequence
  Description of Artificial Sequence: Synthetic oligonucleotide
ucaauguuaguguucugaa

SEQ ID NO: 2624245 - RNA, 19 nt, Artificial Sequence
  Description of Artificial Sequence: Synthetic oligonucleotide
aaagucuggaggcucuccu

SEQ ID NO: 2624246 - RNA, 19 nt, Artificial Sequence
  Description of Artificial Sequence: Synthetic oligonucleotide
agacgucagaugcugcccc

SEQ ID NO: 2624247 - RNA, 19 nt, Artificial Sequence
  Description of Artificial Sequence: Synthetic oligonucleotide
uugaugacagccagguacu

SEQ ID NO: 2624248 - RNA, 19 nt, Artificial Sequence
  Description of Artificial Sequence: Synthetic oligonucleotide
aaaggcacucgugagccag

SEQ ID NO: 2624249 - RNA, 19 nt, Artificial Sequence
  Description of Artificial Sequence: Synthetic oligonucleotide
caaaucgcuguaugggucc

SEQ ID NO: 2624250 - RNA, 19 nt, Artificial Sequence
  Description of Artificial Sequence: Synthetic oligonucleotide
ugaaucagguucugggcug

SEQ ID NO: 2624251 - RNA, 19 nt, Artificial Sequence
  Description of Artificial Sequence: Synthetic oligonucleotide
uaccuuaggccauacuuca

SEQ ID NO: 2624252 - RNA, 19 nt, Artificial Sequence
  Description of Artificial Sequence: Synthetic oligonucleotide
ucugugaaaggcacucgug

SEQ ID NO: 2624253 - RNA, 19 nt, Artificial Sequence
  Description of Artificial Sequence: Synthetic oligonucleotide
ucaaaucgcuguauggguc

SEQ ID NO: 2624254 - RNA, 19 nt, Artificial Sequence
  Description of Artificial Sequence: Synthetic oligonucleotide
guuaguguucugaaucagg

SEQ ID NO: 2624255 - RNA, 19 nt, Artificial Sequence
  Description of Artificial Sequence: Synthetic oligonucleotide
acugucacagcucugugaa

SEQ ID NO: 2624256 - RNA, 19 nt, Artificial Sequence
  Description of Artificial Sequence: Synthetic oligonucleotide
uaaaacuccucuagacacu

SEQ ID NO: 2624257 - RNA, 19 nt, Artificial Sequence
  Description of Artificial Sequence: Synthetic oligonucleotide
uggcaugacaaauaucaaa

SEQ ID NO: 2624258 - RNA, 19 nt, Artificial Sequence
  Description of Artificial Sequence: Synthetic oligonucleotide
auguuaguguucugaauca

SEQ ID NO: 2624259 - RNA, 19 nt, Artificial Sequence
  Description of Artificial Sequence: Synthetic oligonucleotide
ugucggagaaugcuuggca

SEQ ID NO: 2624260 - RNA, 19 nt, Artificial Sequence
  Description of Artificial Sequence: Synthetic oligonucleotide
cuuuuguccguugucaaug

SEQ ID NO: 2624261 - RNA, 19 nt, Artificial Sequence
  Description of Artificial Sequence: Synthetic oligonucleotide
caagacgucagaugcugcc

SEQ ID NO: 2624262 - RNA, 19 nt, Artificial Sequence
  Description of Artificial Sequence: Synthetic oligonucleotide
uaugaauguccuuggcgca

SEQ ID NO: 2624263 - RNA, 19 nt, Artificial Sequence
  Description of Artificial Sequence: Synthetic oligonucleotide
agguacugaggauagggca

SEQ ID NO: 2624264 - RNA, 19 nt, Artificial Sequence
  Description of Artificial Sequence: Synthetic oligonucleotide
uucucucugccccaccaag

SEQ ID NO: 2624265 - RNA, 19 nt, Artificial Sequence
  Description of Artificial Sequence: Synthetic oligonucleotide
cagggcaguaugaaugucc

SEQ ID NO: 2624266 - RNA, 19 nt, Artificial Sequence
  Description of Artificial Sequence: Synthetic oligonucleotide
ucuuguagcgcugcacggg

SEQ ID NO: 2624267 - RNA, 19 nt, Artificial Sequence
  Description of Artificial Sequence: Synthetic oligonucleotide
uaggccauacuucauucuc

SEQ ID NO: 2624268 - RNA, 19 nt, Artificial Sequence
  Description of Artificial Sequence: Synthetic oligonucleotide
ugcaaccuucaucaaaguc

SEQ ID NO: 2624269 - RNA, 19 nt, Artificial Sequence
  Description of Artificial Sequence: Synthetic oligonucleotide
ugguuauagcuacaucgcu

SEQ ID NO: 2624270 - RNA, 19 nt, Artificial Sequence
  Description of Artificial Sequence: Synthetic oligonucleotide
aacaggagccaccuguuuu

SEQ ID NO: 2624271 - RNA, 19 nt, Artificial Sequence
  Description of Artificial Sequence: Synthetic oligonucleotide
agucgucuugccugugacc

SEQ ID NO: 2624272 - RNA, 19 nt, Artificial Sequence
  Description of Artificial Sequence: Synthetic oligonucleotide
gguaaucugggcuuugaug

SEQ ID NO: 2624273 - RNA, 19 nt, Artificial Sequence
  Description of Artificial Sequence: Synthetic oligonucleotide
uccucuagacacuugucaa

SEQ ID NO: 2624274 - RNA, 19 nt, Artificial Sequence
  Description of Artificial Sequence: Synthetic oligonucleotide
cuuguagcgcugcacgggg

SEQ ID NO: 2624275 - RNA, 19 nt, Artificial Sequence
  Description of Artificial Sequence: Synthetic oligonucleotide
uuguccguugucaauguua

SEQ ID NO: 2624276 - RNA, 19 nt, Artificial Sequence
  Description of Artificial Sequence: Synthetic oligonucleotide
uguuaguguucugaaucag

SEQ ID NO: 2624277 - RNA, 19 nt, Artificial Sequence
  Description of Artificial Sequence: Synthetic oligonucleotide
agugucggagaaugcuugg

SEQ ID NO: 2624278 - RNA, 19 nt, Artificial Sequence
  Description of Artificial Sequence: Synthetic oligonucleotide
augcuuggcacugucacag

SEQ ID NO: 2624279 - RNA, 19 nt, Artificial Sequence
  Description of Artificial Sequence: Synthetic oligonucleotide
cugggcuuugaugacagcc

SEQ ID NO: 2624280 - RNA, 19 nt, Artificial Sequence
  Description of Artificial Sequence: Synthetic oligonucleotide
auguccuuggcgcagguaa

SEQ ID NO: 2624281 - RNA, 19 nt, Artificial Sequence
  Description of Artificial Sequence: Synthetic oligonucleotide
ucagguucugggcugcaac

SEQ ID NO: 2624282 - RNA, 19 nt, Artificial Sequence
  Description of Artificial Sequence: Synthetic oligonucleotide
cagaguuccagcugaucgc

SEQ ID NO: 2624283 - RNA, 19 nt, Artificial Sequence
  Description of Artificial Sequence: Synthetic oligonucleotide
uuggcacaguccagcaggg

SEQ ID NO: 2624284 - RNA, 19 nt, Artificial Sequence
  Description of Artificial Sequence: Synthetic oligonucleotide
aaccgcaucuggcuuggug

SEQ ID NO: 2624285 - RNA, 19 nt, Artificial Sequence
  Description of Artificial Sequence: Synthetic oligonucleotide
aucaaaacaggagccaccu

SEQ ID NO: 2624286 - RNA, 19 nt, Artificial Sequence
  Description of Artificial Sequence: Synthetic oligonucleotide
gugaaaggcacucgugagc

SEQ ID NO: 2624287 - RNA, 19 nt, Artificial Sequence
  Description of Artificial Sequence: Synthetic oligonucleotide
ggcaguaugaauguccuug

SEQ ID NO: 2624288 - RNA, 19 nt, Artificial Sequence
  Description of Artificial Sequence: Synthetic oligonucleotide
cugaggauagggcaagcug

SEQ ID NO: 2624289 - RNA, 19 nt, Artificial Sequence
  Description of Artificial Sequence: Synthetic oligonucleotide
caccuguuuuaccuuaggc

SEQ ID NO: 2624290 - RNA, 19 nt, Artificial Sequence
  Description of Artificial Sequence: Synthetic oligonucleotide
agcguaaaacuccucuaga

SEQ ID NO: 2624291 - RNA, 19 nt, Artificial Sequence
  Description of Artificial Sequence: Synthetic oligonucleotide
gucaauguuaguguucuga

SEQ ID NO: 2624292 - RNA, 19 nt, Artificial Sequence
  Description of Artificial Sequence: Synthetic oligonucleotide
uuuuguccguugucaaugu

SEQ ID NO: 2624293 - RNA, 19 nt, Artificial Sequence
  Description of Artificial Sequence: Synthetic oligonucleotide
gucgaaguccugcugcugc

SEQ ID NO: 2624294 - RNA, 19 nt, Artificial Sequence
  Description of Artificial Sequence: Synthetic oligonucleotide
agcugucuggcugaaccgc

SEQ ID NO: 2624295 - RNA, 19 nt, Artificial Sequence
  Description of Artificial Sequence: Synthetic oligonucleotide
agcuacaucgcuauggcau

SEQ ID NO: 2624296 - RNA, 19 nt, Artificial Sequence
  Description of Artificial Sequence: Synthetic oligonucleotide
cagguacugaggauagggc

SEQ ID NO: 2624297 - RNA, 19 nt, Artificial Sequence
  Description of Artificial Sequence: Synthetic oligonucleotide
ugaccuuguuggcacaguc

SEQ ID NO: 2624298 - RNA, 19 nt, Artificial Sequence
  Description of Artificial Sequence: Synthetic oligonucleotide
gcugcaaccuucaucaaag

SEQ ID NO: 2624299 - RNA, 19 nt, Artificial Sequence
  Description of Artificial Sequence: Synthetic oligonucleotide
uguauggguccaucacugc

SEQ ID NO: 2624300 - RNA, 19 nt, Artificial Sequence
  Description of Artificial Sequence: Synthetic oligonucleotide
ccaccaagacgucagaugc

SEQ ID NO: 2624301 - RNA, 19 nt, Artificial Sequence
  Description of Artificial Sequence: Synthetic oligonucleotide
aucgcuauggcaugacaaa

SEQ ID NO: 2624302 - RNA, 19 nt, Artificial Sequence
  Description of Artificial Sequence: Synthetic oligonucleotide
ucggagaaugcuuggcacu

SEQ ID NO: 2624303 - RNA, 19 nt, Artificial Sequence
  Description of Artificial Sequence: Synthetic oligonucleotide
ugaauguccuuggcgcagg

SEQ ID NO: 2624304 - RNA, 19 nt, Artificial Sequence
  Description of Artificial Sequence: Synthetic oligonucleotide
uuuuaccuuaggccauacu

SEQ ID NO: 2624305 - RNA, 19 nt, Artificial Sequence
  Description of Artificial Sequence: Synthetic oligonucleotide
accuucaucaaagucugga

SEQ ID NO: 2624306 - RNA, 19 nt, Artificial Sequence
  Description of Artificial Sequence: Synthetic oligonucleotide
auagggcaagcugucuggc

SEQ ID NO: 2624307 - RNA, 19 nt, Artificial Sequence
  Description of Artificial Sequence: Synthetic oligonucleotide
ccuguuuuaccuuaggcca

SEQ ID NO: 2624308 - RNA, 19 nt, Artificial Sequence
  Description of Artificial Sequence: Synthetic oligonucleotide
uuauagcuacaucgcuaug

SEQ ID NO: 2624309 - RNA, 19 nt, Artificial Sequence
  Description of Artificial Sequence: Synthetic oligonucleotide
gcugcagucgucuugccug

SEQ ID NO: 2624310 - RNA, 19 nt, Artificial Sequence
  Description of Artificial Sequence: Synthetic oligonucleotide
gcaguaugaauguccuugg

SEQ ID NO: 2624311 - RNA, 19 nt, Artificial Sequence
  Description of Artificial Sequence: Synthetic oligonucleotide
gagagcguaaaacuccucu

SEQ ID NO: 2624312 - RNA, 19 nt, Artificial Sequence
  Description of Artificial Sequence: Synthetic oligonucleotide
caagcagaguuccagcuga

SEQ ID NO: 2624313 - RNA, 19 nt, Artificial Sequence
  Description of Artificial Sequence: Synthetic oligonucleotide
ucuuuuguccguugucaau

SEQ ID NO: 2624314 - RNA, 19 nt, Artificial Sequence
  Description of Artificial Sequence: Synthetic oligonucleotide
ucgugagccaggcgcaagc

SEQ ID NO: 2624315 - RNA, 19 nt, Artificial Sequence
  Description of Artificial Sequence: Synthetic oligonucleotide
ugaaccgcaucuggcuugg

SEQ ID NO: 2624316 - RNA, 19 nt, Artificial Sequence
  Description of Artificial Sequence: Synthetic oligonucleotide
uaaucugggcuuugaugac

SEQ ID NO: 2624317 - RNA, 19 nt, Artificial Sequence
  Description of Artificial Sequence: Synthetic oligonucleotide
aggagccaccuguuuuacc

SEQ ID NO: 2624318 - RNA, 19 nt, Artificial Sequence
  Description of Artificial Sequence: Synthetic oligonucleotide
accaagacgucagaugcug

SEQ ID NO: 2624319 - RNA, 19 nt, Artificial Sequence
  Description of Artificial Sequence: Synthetic oligonucleotide
ucuggcuugguggccgugg

SEQ ID NO: 2624320 - RNA, 19 nt, Artificial Sequence
  Description of Artificial Sequence: Synthetic oligonucleotide
guuauagcuacaucgcuau

SEQ ID NO: 2624321 - RNA, 19 nt, Artificial Sequence
  Description of Artificial Sequence: Synthetic oligonucleotide
ucaucaaagucuggaggcu

SEQ ID NO: 2624322 - RNA, 19 nt, Artificial Sequence
  Description of Artificial Sequence: Synthetic oligonucleotide
ucuagacacuugucaaauc

SEQ ID NO: 2624323 - RNA, 19 nt, Artificial Sequence
  Description of Artificial Sequence: Synthetic oligonucleotide
gucggagaaugcuuggcac

SEQ ID NO: 2624324 - RNA, 19 nt, Artificial Sequence
  Description of Artificial Sequence: Synthetic oligonucleotide
cagugucggagaaugcuug

SEQ ID NO: 2624325 - RNA, 19 nt, Artificial Sequence
  Description of Artificial Sequence: Synthetic oligonucleotide
gaggcugcagucgucuugc

SEQ ID NO: 2624326 - RNA, 19 nt, Artificial Sequence
  Description of Artificial Sequence: Synthetic oligonucleotide
agagcguaaaacuccucua

SEQ ID NO: 2624327 - RNA, 19 nt, Artificial Sequence
  Description of Artificial Sequence: Synthetic oligonucleotide
gcacucgugagccaggcgc

SEQ ID NO: 2624328 - RNA, 19 nt, Artificial Sequence
  Description of Artificial Sequence: Synthetic oligonucleotide
uguagcgcugcacgggguc

SEQ ID NO: 2624329 - RNA, 19 nt, Artificial Sequence
  Description of Artificial Sequence: Synthetic oligonucleotide
augaauguccuuggcgcag

SEQ ID NO: 2624330 - RNA, 19 nt, Artificial Sequence
  Description of Artificial Sequence: Synthetic oligonucleotide
accagugucggagaaugcu

SEQ ID NO: 2624331 - RNA, 19 nt, Artificial Sequence
  Description of Artificial Sequence: Synthetic oligonucleotide
gaccuuguuggcacagucc

SEQ ID NO: 2624332 - RNA, 19 nt, Artificial Sequence
  Description of Artificial Sequence: Synthetic oligonucleotide
cuccucuagacacuuguca

SEQ ID NO: 2624333 - RNA, 19 nt, Artificial Sequence
  Description of Artificial Sequence: Synthetic oligonucleotide
caguaugaauguccuuggc

SEQ ID NO: 2624334 - RNA, 19 nt, Artificial Sequence
  Description of Artificial Sequence: Synthetic oligonucleotide
gugggcaccagugucggag

SEQ ID NO: 2624335 - RNA, 19 nt, Artificial Sequence
  Description of Artificial Sequence: Synthetic oligonucleotide
caucgcuauggcaugacaa

SEQ ID NO: 2624336 - RNA, 19 nt, Artificial Sequence
  Description of Artificial Sequence: Synthetic oligonucleotide
cuauggcaugacaaauauc

SEQ ID NO: 2624337 - RNA, 19 nt, Artificial Sequence
  Description of Artificial Sequence: Synthetic oligonucleotide
cugaaccgcaucuggcuug

SEQ ID NO: 2624338 - RNA, 19 nt, Artificial Sequence
  Description of Artificial Sequence: Synthetic oligonucleotide
aaacaggagccaccuguuu

SEQ ID NO: 2624339 - RNA, 19 nt, Artificial Sequence
  Description of Artificial Sequence: Synthetic oligonucleotide
gcguaaaacuccucuagac

SEQ ID NO: 2624340 - RNA, 19 nt, Artificial Sequence
  Description of Artificial Sequence: Synthetic oligonucleotide
gcagagagcguaaaacucc

SEQ ID NO: 2624341 - RNA, 19 nt, Artificial Sequence
  Description of Artificial Sequence: Synthetic oligonucleotide
ggauagggcaagcugucug

SEQ ID NO: 2624342 - RNA, 19 nt, Artificial Sequence
  Description of Artificial Sequence: Synthetic oligonucleotide
auggguccaucacugcucu

SEQ ID NO: 2624343 - RNA, 19 nt, Artificial Sequence
  Description of Artificial Sequence: Synthetic oligonucleotide
guugucaauguuaguguuc

SEQ ID NO: 2624344 - RNA, 19 nt, Artificial Sequence
  Description of Artificial Sequence: Synthetic oligonucleotide
ccagguacugaggauaggg

SEQ ID NO: 2624345 - RNA, 19 nt, Artificial Sequence
  Description of Artificial Sequence: Synthetic oligonucleotide
ggaggaaaccgccgaagcc

SEQ ID NO: 2624346 - RNA, 19 nt, Artificial Sequence
  Description of Artificial Sequence: Synthetic oligonucleotide
agaguuccagcugaucgca

SEQ ID NO: 2624347 - RNA, 19 nt, Artificial Sequence
  Description of Artificial Sequence: Synthetic oligonucleotide
acugcucuuuuguccguug

SEQ ID NO: 2624348 - RNA, 19 nt, Artificial Sequence
  Description of Artificial Sequence: Synthetic oligonucleotide
ugcugguuauagcuacauc

SEQ ID NO: 2624349 - RNA, 19 nt, Artificial Sequence
  Description of Artificial Sequence: Synthetic oligonucleotide
accggccgagcccggaccc

SEQ ID NO: 2624350 - RNA, 19 nt, Artificial Sequence
  Description of Artificial Sequence: Synthetic oligonucleotide
guacugaggauagggcaag

SEQ ID NO: 2624351 - RNA, 19 nt, Artificial Sequence
  Description of Artificial Sequence: Synthetic oligonucleotide
uagcuacaucgcuauggca

SEQ ID NO: 2624352 - RNA, 19 nt, Artificial Sequence
  Description of Artificial Sequence: Synthetic oligonucleotide
acaucgcuauggcaugaca

SEQ ID NO: 2624353 - RNA, 19 nt, Artificial Sequence
  Description of Artificial Sequence: Synthetic oligonucleotide
ucgcuguauggguccauca

SEQ ID NO: 2624354 - RNA, 19 nt, Artificial Sequence
  Description of Artificial Sequence: Synthetic oligonucleotide
gaggaaaccgccgaagccu

SEQ ID NO: 2624355 - RNA, 19 nt, Artificial Sequence
  Description of Artificial Sequence: Synthetic oligonucleotide
gucaaaucgcuguaugggu

SEQ ID NO: 2624356 - RNA, 19 nt, Artificial Sequence
  Description of Artificial Sequence: Synthetic oligonucleotide
gaugacagccagguacuga

SEQ ID NO: 2624357 - RNA, 19 nt, Artificial Sequence
  Description of Artificial Sequence: Synthetic oligonucleotide
ucgaaguccugcugcugcu

SEQ ID NO: 2624358 - RNA, 19 nt, Artificial Sequence
  Description of Artificial Sequence: Synthetic oligonucleotide
caucaaagucuggaggcuc

SEQ ID NO: 2624359 - RNA, 19 nt, Artificial Sequence
  Description of Artificial Sequence: Synthetic oligonucleotide
caggagcgcacucggggcg

SEQ ID NO: 2624360 - RNA, 19 nt, Artificial Sequence
  Description of Artificial Sequence: Synthetic oligonucleotide
gcuacaucgcuauggcaug

SEQ ID NO: 2624361 - RNA, 19 nt, Artificial Sequence
  Description of Artificial Sequence: Synthetic oligonucleotide
gcugcaggagcgcacucgg

SEQ ID NO: 2624362 - RNA, 19 nt, Artificial Sequence
  Description of Artificial Sequence: Synthetic oligonucleotide
ggggucgaaguccugcugc

SEQ ID NO: 2624363 - RNA, 19 nt, Artificial Sequence
  Description of Artificial Sequence: Synthetic oligonucleotide
agggcaguaugaauguccu

SEQ ID NO: 2624364 - RNA, 19 nt, Artificial Sequence
  Description of Artificial Sequence: Synthetic oligonucleotide
aucaaagucuggaggcucu

SEQ ID NO: 2624365 - RNA, 19 nt, Artificial Sequence
  Description of Artificial Sequence: Synthetic oligonucleotide
agguaaucugggcuuugau

SEQ ID NO: 2624366 - RNA, 19 nt, Artificial Sequence
  Description of Artificial Sequence: Synthetic oligonucleotide
ucgcuauggcaugacaaau

SEQ ID NO: 2624367 - RNA, 19 nt, Artificial Sequence
  Description of Artificial Sequence: Synthetic oligonucleotide
caaagucuggaggcucucc

SEQ ID NO: 2624368 - RNA, 19 nt, Artificial Sequence
  Description of Artificial Sequence: Synthetic oligonucleotide
uguccuuggcgcagguaau

SEQ ID NO: 2624369 - RNA, 19 nt, Artificial Sequence
  Description of Artificial Sequence: Synthetic oligonucleotide
uguuuuaccuuaggccaua

SEQ ID NO: 2624370 - RNA, 19 nt, Artificial Sequence
  Description of Artificial Sequence: Synthetic oligonucleotide
caggcgcaagcagaguucc

SEQ ID NO: 2624371 - RNA, 19 nt, Artificial Sequence
  Description of Artificial Sequence: Synthetic oligonucleotide
aggcacucgugagccaggc

SEQ ID NO: 2624372 - RNA, 19 nt, Artificial Sequence
  Description of Artificial Sequence: Synthetic oligonucleotide
agcagaguuccagcugauc

SEQ ID NO: 2624373 - RNA, 19 nt, Artificial Sequence
  Description of Artificial Sequence: Synthetic oligonucleotide
gaggauagggcaagcuguc

SEQ ID NO: 2624374 - RNA, 19 nt, Artificial Sequence
  Description of Artificial Sequence: Synthetic oligonucleotide
uuuguccguugucaauguu

SEQ ID NO: 2624375 - RNA, 19 nt, Artificial Sequence
  Description of Artificial Sequence: Synthetic oligonucleotide
uagggcaagcugucuggcu

SEQ ID NO: 2624376 - RNA, 19 nt, Artificial Sequence
  Description of Artificial Sequence: Synthetic oligonucleotide
uccuuggcgcagguaaucu

SEQ ID NO: 2624377 - RNA, 19 nt, Artificial Sequence
  Description of Artificial Sequence: Synthetic oligonucleotide
aaggcacucgugagccagg

SEQ ID NO: 2624378 - RNA, 19 nt, Artificial Sequence
  Description of Artificial Sequence: Synthetic oligonucleotide
ggccccaccaguugcggcg

SEQ ID NO: 2624379 - RNA, 19 nt, Artificial Sequence
  Description of Artificial Sequence: Synthetic oligonucleotide
cucugccccaccaagacgu

SEQ ID NO: 2624380 - RNA, 19 nt, Artificial Sequence
  Description of Artificial Sequence: Synthetic oligonucleotide
cauucucucugccccacca

SEQ ID NO: 2624381 - RNA, 19 nt, Artificial Sequence
  Description of Artificial Sequence: Synthetic oligonucleotide
aaccuucaucaaagucugg

SEQ ID NO: 2624382 - RNA, 19 nt, Artificial Sequence
  Description of Artificial Sequence: Synthetic oligonucleotide
gaucgcagagagcguaaaa

SEQ ID NO: 2624383 - RNA, 19 nt, Artificial Sequence
  Description of Artificial Sequence: Synthetic oligonucleotide
ggagccaccuguuuuaccu

SEQ ID NO: 2624384 - RNA, 19 nt, Artificial Sequence
  Description of Artificial Sequence: Synthetic oligonucleotide
uucauucucucugccccac

SEQ ID NO: 2624385 - RNA, 19 nt, Artificial Sequence
  Description of Artificial Sequence: Synthetic oligonucleotide
gacacgcccgccgcggagg

SEQ ID NO: 2624386 - RNA, 19 nt, Artificial Sequence
  Description of Artificial Sequence: Synthetic oligonucleotide
agcaucuuguagcgcugca

SEQ ID NO: 2624387 - RNA, 19 nt, Artificial Sequence
  Description of Artificial Sequence: Synthetic oligonucleotide
cugcacggggucgaagucc

SEQ ID NO: 2624388 - RNA, 19 nt, Artificial Sequence
  Description of Artificial Sequence: Synthetic oligonucleotide
cuggcuugguggccguggg

SEQ ID NO: 2624389 - RNA, 19 nt, Artificial Sequence
  Description of Artificial Sequence: Synthetic oligonucleotide
cacggggucgaaguccugc

SEQ ID NO: 2624390 - RNA, 19 nt, Artificial Sequence
  Description of Artificial Sequence: Synthetic oligonucleotide
gcaagcagaguuccagcug

SEQ ID NO: 2624391 - RNA, 19 nt, Artificial Sequence
  Description of Artificial Sequence: Synthetic oligonucleotide
acuugucaaaucgcuguau

SEQ ID NO: 2624392 - RNA, 19 nt, Artificial Sequence
  Description of Artificial Sequence: Synthetic oligonucleotide
gagcaucuuguagcgcugc

SEQ ID NO: 2624393 - RNA, 19 nt, Artificial Sequence
  Description of Artificial Sequence: Synthetic oligonucleotide
gcaccagugucggagaaug

SEQ ID NO: 2624394 - RNA, 19 nt, Artificial Sequence
  Description of Artificial Sequence: Synthetic oligonucleotide
agaaugcuuggcacuguca

SEQ ID NO: 2624395 - RNA, 19 nt, Artificial Sequence
  Description of Artificial Sequence: Synthetic oligonucleotide
cacugucacagcucuguga

SEQ ID NO: 2624396 - RNA, 19 nt, Artificial Sequence
  Description of Artificial Sequence: Synthetic oligonucleotide
ggcgcaagcagaguuccag

SEQ ID NO: 2624397 - RNA, 19 nt, Artificial Sequence
  Description of Artificial Sequence: Synthetic oligonucleotide
ugggcaccagugucggaga

SEQ ID NO: 2624398 - RNA, 19 nt, Artificial Sequence
  Description of Artificial Sequence: Synthetic oligonucleotide
guagcgcugcacggggucg

SEQ ID NO: 2624399 - RNA, 19 nt, Artificial Sequence
  Description of Artificial Sequence: Synthetic oligonucleotide
accaguugcggcggcugcg

SEQ ID NO: 2624400 - RNA, 19 nt, Artificial Sequence
  Description of Artificial Sequence: Synthetic oligonucleotide
uacaucgcuauggcaugac

SEQ ID NO: 2624401 - RNA, 19 nt, Artificial Sequence
  Description of Artificial Sequence: Synthetic oligonucleotide
auucucucugccccaccaa

SEQ ID NO: 2624402 - RNA, 19 nt, Artificial Sequence
  Description of Artificial Sequence: Synthetic oligonucleotide
cucuuuuguccguugucaa

SEQ ID NO: 2624403 - RNA, 19 nt, Artificial Sequence
  Description of Artificial Sequence: Synthetic oligonucleotide
uuguagcgcugcacggggu

SEQ ID NO: 2624404 - RNA, 19 nt, Artificial Sequence
  Description of Artificial Sequence: Synthetic oligonucleotide
agcgcacucggggcgggcc

SEQ ID NO: 2624405 - RNA, 19 nt, Artificial Sequence
  Description of Artificial Sequence: Synthetic oligonucleotide
gucgucuugccugugaccu

SEQ ID NO: 2624406 - RNA, 19 nt, Artificial Sequence
  Description of Artificial Sequence: Synthetic oligonucleotide
aggccauacuucauucucu

SEQ ID NO: 2624407 - RNA, 19 nt, Artificial Sequence
  Description of Artificial Sequence: Synthetic oligonucleotide
gacccgacacgcccgccgc

SEQ ID NO: 2624408 - RNA, 19 nt, Artificial Sequence
  Description of Artificial Sequence: Synthetic oligonucleotide
agagagcguaaaacuccuc

SEQ ID NO: 2624409 - RNA, 19 nt, Artificial Sequence
  Description of Artificial Sequence: Synthetic oligonucleotide
gacccggggccaccggccg

SEQ ID NO: 2624410 - RNA, 19 nt, Artificial Sequence
  Description of Artificial Sequence: Synthetic oligonucleotide
uacugaggauagggcaagc

SEQ ID NO: 2624411 - RNA, 19 nt, Artificial Sequence
  Description of Artificial Sequence: Synthetic oligonucleotide
guggccgugggcaccagug

SEQ ID NO: 2624412 - RNA, 19 nt, Artificial Sequence
  Description of Artificial Sequence: Synthetic oligonucleotide
acggggucgaaguccugcu

SEQ ID NO: 2624413 - RNA, 19 nt, Artificial Sequence
  Description of Artificial Sequence: Synthetic oligonucleotide
gguuauagcuacaucgcua

SEQ ID NO: 2624414 - RNA, 19 nt, Artificial Sequence
  Description of Artificial Sequence: Synthetic oligonucleotide
aggaaaccgccgaagccug

SEQ ID NO: 2624415 - RNA, 19 nt, Artificial Sequence
  Description of Artificial Sequence: Synthetic oligonucleotide
uuccagcugaucgcagaga

SEQ ID NO: 2624416 - RNA, 19 nt, Artificial Sequence
  Description of Artificial Sequence: Synthetic oligonucleotide
ggccauacuucauucucuc

SEQ ID NO: 2624417 - RNA, 19 nt, Artificial Sequence
  Description of Artificial Sequence: Synthetic oligonucleotide
gaaaggcacucgugagcca

SEQ ID NO: 2624418 - RNA, 19 nt, Artificial Sequence
  Description of Artificial Sequence: Synthetic oligonucleotide
ugaucgcagagagcguaaa

SEQ ID NO: 2624419 - RNA, 19 nt, Artificial Sequence
  Description of Artificial Sequence: Synthetic oligonucleotide
agccaccuguuuuaccuua

SEQ ID NO: 2624420 - RNA, 19 nt, Artificial Sequence
  Description of Artificial Sequence: Synthetic oligonucleotide
caccagugucggagaaugc

SEQ ID NO: 2624421 - RNA, 19 nt, Artificial Sequence
  Description of Artificial Sequence: Synthetic oligonucleotide
uggccgugggcaccagugu

SEQ ID NO: 2624422 - RNA, 19 nt, Artificial Sequence
  Description of Artificial Sequence: Synthetic oligonucleotide
aggcugcagucgucuugcc

SEQ ID NO: 2624423 - RNA, 19 nt, Artificial Sequence
  Description of Artificial Sequence: Synthetic oligonucleotide
gguacugaggauagggcaa

SEQ ID NO: 2624424 - RNA, 19 nt, Artificial Sequence
  Description of Artificial Sequence: Synthetic oligonucleotide
cguaaaacuccucuagaca

SEQ ID NO: 2624425 - RNA, 19 nt, Artificial Sequence
  Description of Artificial Sequence: Synthetic oligonucleotide
ucacugcucuuuuguccgu

SEQ ID NO: 2624426 - RNA, 19 nt, Artificial Sequence
  Description of Artificial Sequence: Synthetic oligonucleotide
ggacccgacacgcccgccg

SEQ ID NO: 2624427 - RNA, 19 nt, Artificial Sequence
  Description of Artificial Sequence: Synthetic oligonucleotide
cugcaggagcgcacucggg

SEQ ID NO: 2624428 - RNA, 19 nt, Artificial Sequence
  Description of Artificial Sequence: Synthetic oligonucleotide
gcuauggcaugacaaauau

SEQ ID NO: 2624429 - RNA, 19 nt, Artificial Sequence
  Description of Artificial Sequence: Synthetic oligonucleotide
aaucagguucugggcugca

SEQ ID NO: 2624430 - RNA, 19 nt, Artificial Sequence
  Description of Artificial Sequence: Synthetic oligonucleotide
guuuuaccuuaggccauac

SEQ ID NO: 2624431 - RNA, 19 nt, Artificial Sequence
  Description of Artificial Sequence: Synthetic oligonucleotide
gcaggagcgcacucggggc

SEQ ID NO: 2624432 - RNA, 19 nt, Artificial Sequence
  Description of Artificial Sequence: Synthetic oligonucleotide
gcuuugaugacagccaggu

SEQ ID NO: 2624433 - RNA, 19 nt, Artificial Sequence
  Description of Artificial Sequence: Synthetic oligonucleotide
uugguggccgugggcacca

SEQ ID NO: 2624434 - RNA, 19 nt, Artificial Sequence
  Description of Artificial Sequence: Synthetic oligonucleotide
auggcaugacaaauaucaa

SEQ ID NO: 2624435 - RNA, 19 nt, Artificial Sequence
  Description of Artificial Sequence: Synthetic oligonucleotide
cccugcugguuauagcuac

SEQ ID NO: 2624436 - RNA, 19 nt, Artificial Sequence
  Description of Artificial Sequence: Synthetic oligonucleotide
cagagagcguaaaacuccu

SEQ ID NO: 2624437 - RNA, 19 nt, Artificial Sequence
  Description of Artificial Sequence: Synthetic oligonucleotide
cgcagagagcguaaaacuc

SEQ ID NO: 2624438 - RNA, 19 nt, Artificial Sequence
  Description of Artificial Sequence: Synthetic oligonucleotide
gcggcugcgacccggggcc

SEQ ID NO: 2624439 - RNA, 19 nt, Artificial Sequence
  Description of Artificial Sequence: Synthetic oligonucleotide
aggagcgcacucggggcgg

SEQ ID NO: 2624440 - RNA, 19 nt, Artificial Sequence
  Description of Artificial Sequence: Synthetic oligonucleotide
aggauagggcaagcugucu

SEQ ID NO: 2624441 - RNA, 19 nt, Artificial Sequence
  Description of Artificial Sequence: Synthetic oligonucleotide
caccaguugcggcggcugc

SEQ ID NO: 2624442 - RNA, 19 nt, Artificial Sequence
  Description of Artificial Sequence: Synthetic oligonucleotide
ugcgacccggggccaccgg

SEQ ID NO: 2624443 - RNA, 19 nt, Artificial Sequence
  Description of Artificial Sequence: Synthetic oligonucleotide
caauguuaguguucugaau

SEQ ID NO: 2624444 - RNA, 19 nt, Artificial Sequence
  Description of Artificial Sequence: Synthetic oligonucleotide
cacucgugagccaggcgca

SEQ ID NO: 2624445 - RNA, 19 nt, Artificial Sequence
  Description of Artificial Sequence: Synthetic oligonucleotide
uggcacugucacagcucug

SEQ ID NO: 2624446 - RNA, 19 nt, Artificial Sequence
  Description of Artificial Sequence: Synthetic oligonucleotide
gucuggcugaaccgcaucu

SEQ ID NO: 2624447 - RNA, 19 nt, Artificial Sequence
  Description of Artificial Sequence: Synthetic oligonucleotide
cgggaugagcaucuuguag

SEQ ID NO: 2624448 - RNA, 19 nt, Artificial Sequence
  Description of Artificial Sequence: Synthetic oligonucleotide
ucugccccaccaagacguc

SEQ ID NO: 2624449 - RNA, 19 nt, Artificial Sequence
  Description of Artificial Sequence: Synthetic oligonucleotide
ggcgcagguaaucugggcu

SEQ ID NO: 2624450 - RNA, 19 nt, Artificial Sequence
  Description of Artificial Sequence: Synthetic oligonucleotide
ccaagacgucagaugcugc

SEQ ID NO: 2624451 - RNA, 19 nt, Artificial Sequence
  Description of Artificial Sequence: Synthetic oligonucleotide
ggcugcaaccuucaucaaa

SEQ ID NO: 2624452 - RNA, 19 nt, Artificial Sequence
  Description of Artificial Sequence: Synthetic oligonucleotide
aaucgcuguauggguccau

SEQ ID NO: 2624453 - RNA, 19 nt, Artificial Sequence
  Description of Artificial Sequence: Synthetic oligonucleotide
ccaccuguuuuaccuuagg

SEQ ID NO: 2624454 - RNA, 19 nt, Artificial Sequence
  Description of Artificial Sequence: Synthetic oligonucleotide
cucuagacacuugucaaau

SEQ ID NO: 2624455 - RNA, 19 nt, Artificial Sequence
  Description of Artificial Sequence: Synthetic oligonucleotide
gccgugggcaccagugucg

SEQ ID NO: 2624456 - RNA, 19 nt, Artificial Sequence
  Description of Artificial Sequence: Synthetic oligonucleotide
acccgacacgcccgccgcg

SEQ ID NO: 2624457 - RNA, 19 nt, Artificial Sequence
  Description of Artificial Sequence: Synthetic oligonucleotide
gcgcaagcagaguuccagc

SEQ ID NO: 2624458 - RNA, 19 nt, Artificial Sequence
  Description of Artificial Sequence: Synthetic oligonucleotide
cugaucgcagagagcguaa

SEQ ID NO: 2624459 - RNA, 19 nt, Artificial Sequence
  Description of Artificial Sequence: Synthetic oligonucleotide
uggcacaguccagcagggc

SEQ ID NO: 2624460 - RNA, 19 nt, Artificial Sequence
  Description of Artificial Sequence: Synthetic oligonucleotide
caccggccgagcccggacc

SEQ ID NO: 2624461 - RNA, 19 nt, Artificial Sequence
  Description of Artificial Sequence: Synthetic oligonucleotide
cucgugagccaggcgcaag

SEQ ID NO: 2624462 - RNA, 19 nt, Artificial Sequence
  Description of Artificial Sequence: Synthetic oligonucleotide
ggcacucgugagccaggcg

SEQ ID NO: 2624463 - RNA, 19 nt, Artificial Sequence
  Description of Artificial Sequence: Synthetic oligonucleotide
caggagccaccuguuuuac

SEQ ID NO: 2624464 - RNA, 19 nt, Artificial Sequence
  Description of Artificial Sequence: Synthetic oligonucleotide
ccagcugaucgcagagagc

SEQ ID NO: 2624465 - RNA, 19 nt, Artificial Sequence
  Description of Artificial Sequence: Synthetic oligonucleotide
gcaucuuguagcgcugcac

SEQ ID NO: 2624466 - RNA, 19 nt, Artificial Sequence
  Description of Artificial Sequence: Synthetic oligonucleotide
cuacaucgcuauggcauga

SEQ ID NO: 2624467 - RNA, 19 nt, Artificial Sequence
  Description of Artificial Sequence: Synthetic oligonucleotide
guccuuggcgcagguaauc

SEQ ID NO: 2624468 - RNA, 19 nt, Artificial Sequence
  Description of Artificial Sequence: Synthetic oligonucleotide
cggaggaaaccgccgaagc

SEQ ID NO: 2624469 - RNA, 19 nt, Artificial Sequence
  Description of Artificial Sequence: Synthetic oligonucleotide
ggcgggccccaccaguugc

SEQ ID NO: 2624470 - RNA, 19 nt, Artificial Sequence
  Description of Artificial Sequence: Synthetic oligonucleotide
cagguaaucugggcuuuga

SEQ ID NO: 2624471 - RNA, 19 nt, Artificial Sequence
  Description of Artificial Sequence: Synthetic oligonucleotide
ccgcaucuggcuugguggc

SEQ ID NO: 2624472 - RNA, 19 nt, Artificial Sequence
  Description of Artificial Sequence: Synthetic oligonucleotide
ccaggcgcaagcagaguuc

SEQ ID NO: 2624473 - RNA, 19 nt, Artificial Sequence
  Description of Artificial Sequence: Synthetic oligonucleotide
uagcgcugcacggggucga

SEQ ID NO: 2624474 - RNA, 19 nt, Artificial Sequence
  Description of Artificial Sequence: Synthetic oligonucleotide
ccuuggcgcagguaaucug

SEQ ID NO: 2624475 - RNA, 19 nt, Artificial Sequence
  Description of Artificial Sequence: Synthetic oligonucleotide
cuuugaugacagccaggua

SEQ ID NO: 2624476 - RNA, 19 nt, Artificial Sequence
  Description of Artificial Sequence: Synthetic oligonucleotide
gcacugucacagcucugug

SEQ ID NO: 2624477 - RNA, 19 nt, Artificial Sequence
  Description of Artificial Sequence: Synthetic oligonucleotide
ucgucuugccugugaccuu

SEQ ID NO: 2624478 - RNA, 19 nt, Artificial Sequence
  Description of Artificial Sequence: Synthetic oligonucleotide
gcggaggaaaccgccgaag

SEQ ID NO: 2624479 - RNA, 19 nt, Artificial Sequence
  Description of Artificial Sequence: Synthetic oligonucleotide
cccgccgcggaggaaaccg

SEQ ID NO: 2624480 - RNA, 19 nt, Artificial Sequence
  Description of Artificial Sequence: Synthetic oligonucleotide
gaauguccuuggcgcaggu

SEQ ID NO: 2624481 - RNA, 19 nt, Artificial Sequence
  Description of Artificial Sequence: Synthetic oligonucleotide
caguugcggcggcugcggc

SEQ ID NO: 2624482 - RNA, 19 nt, Artificial Sequence
  Description of Artificial Sequence: Synthetic oligonucleotide
ggcacugucacagcucugu

SEQ ID NO: 2624483 - RNA, 19 nt, Artificial Sequence
  Description of Artificial Sequence: Synthetic oligonucleotide
cucggggcgggccccacca

SEQ ID NO: 2624484 - RNA, 19 nt, Artificial Sequence
  Description of Artificial Sequence: Synthetic oligonucleotide
ccucuagacacuugucaaa

SEQ ID NO: 2624485 - RNA, 19 nt, Artificial Sequence
  Description of Artificial Sequence: Synthetic oligonucleotide
cgcuguauggguccaucac

SEQ ID NO: 2624486 - RNA, 19 nt, Artificial Sequence
  Description of Artificial Sequence: Synthetic oligonucleotide
gcccggacccgacacgccc

SEQ ID NO: 2624487 - RNA, 19 nt, Artificial Sequence
  Description of Artificial Sequence: Synthetic oligonucleotide
ggccgugggcaccaguguc

SEQ ID NO: 2624488 - RNA, 19 nt, Artificial Sequence
  Description of Artificial Sequence: Synthetic oligonucleotide
gcugaucgcagagagcgua

SEQ ID NO: 2624489 - RNA, 19 nt, Artificial Sequence
  Description of Artificial Sequence: Synthetic oligonucleotide
gccaccuguuuuaccuuag

SEQ ID NO: 2624490 - RNA, 19 nt, Artificial Sequence
  Description of Artificial Sequence: Synthetic oligonucleotide
cugugaccuuguuggcaca

SEQ ID NO: 2624491 - RNA, 19 nt, Artificial Sequence
  Description of Artificial Sequence: Synthetic oligonucleotide
acacgcccgccgcggagga

SEQ ID NO: 2624492 - RNA, 19 nt, Artificial Sequence
  Description of Artificial Sequence: Synthetic oligonucleotide
ggucgaaguccugcugcug

SEQ ID NO: 2624493 - RNA, 19 nt, Artificial Sequence
  Description of Artificial Sequence: Synthetic oligonucleotide
accuuaggccauacuucau

SEQ ID NO: 2624494 - RNA, 19 nt, Artificial Sequence
  Description of Artificial Sequence: Synthetic oligonucleotide
caccaagacgucagaugcu

SEQ ID NO: 2624495 - RNA, 19 nt, Artificial Sequence
  Description of Artificial Sequence: Synthetic oligonucleotide
agcugaucgcagagagcgu

SEQ ID NO: 2624496 - RNA, 19 nt, Artificial Sequence
  Description of Artificial Sequence: Synthetic oligonucleotide
gcugcacggggucgaaguc

SEQ ID NO: 2624497 - RNA, 19 nt, Artificial Sequence
  Description of Artificial Sequence: Synthetic oligonucleotide
acgcccgccgcggaggaaa

SEQ ID NO: 2624498 - RNA, 19 nt, Artificial Sequence
  Description of Artificial Sequence: Synthetic oligonucleotide
cccggacccgacacgcccg

SEQ ID NO: 2624499 - RNA, 19 nt, Artificial Sequence
  Description of Artificial Sequence: Synthetic oligonucleotide
ccguugucaauguuagugu

SEQ ID NO: 2624500 - RNA, 19 nt, Artificial Sequence
  Description of Artificial Sequence: Synthetic oligonucleotide
cugcgacccggggccaccg

SEQ ID NO: 2624501 - RNA, 19 nt, Artificial Sequence
  Description of Artificial Sequence: Synthetic oligonucleotide
cggagaaugcuuggcacug

SEQ ID NO: 2624502 - RNA, 19 nt, Artificial Sequence
  Description of Artificial Sequence: Synthetic oligonucleotide
cugcucuuuuguccguugu

SEQ ID NO: 2624503 - RNA, 19 nt, Artificial Sequence
  Description of Artificial Sequence: Synthetic oligonucleotide
gccugugaccuuguuggca

SEQ ID NO: 2624504 - RNA, 19 nt, Artificial Sequence
  Description of Artificial Sequence: Synthetic oligonucleotide
gcagguaaucugggcuuug

SEQ ID NO: 2624505 - RNA, 19 nt, Artificial Sequence
  Description of Artificial Sequence: Synthetic oligonucleotide
cugcaaccuucaucaaagu

SEQ ID NO: 2624506 - RNA, 19 nt, Artificial Sequence
  Description of Artificial Sequence: Synthetic oligonucleotide
acucgugagccaggcgcaa

SEQ ID NO: 2624507 - RNA, 19 nt, Artificial Sequence
  Description of Artificial Sequence: Synthetic oligonucleotide
ggcugcggcugcgacccgg

SEQ ID NO: 2624508 - RNA, 19 nt, Artificial Sequence
  Description of Artificial Sequence: Synthetic oligonucleotide
cgucuugccugugaccuug

SEQ ID NO: 2624509 - RNA, 19 nt, Artificial Sequence
  Description of Artificial Sequence: Synthetic oligonucleotide
gcgacccggggccaccggc

SEQ ID NO: 2624510 - RNA, 19 nt, Artificial Sequence
  Description of Artificial Sequence: Synthetic oligonucleotide
ccgagcccggacccgacac

SEQ ID NO: 2624511 - RNA, 19 nt, Artificial Sequence
  Description of Artificial Sequence: Synthetic oligonucleotide
cugcagucgucuugccugu

SEQ ID NO: 2624512 - RNA, 19 nt, Artificial Sequence
  Description of Artificial Sequence: Synthetic oligonucleotide
ccgugggcaccagugucgg

SEQ ID NO: 2624513 - RNA, 19 nt, Artificial Sequence
  Description of Artificial Sequence: Synthetic oligonucleotide
ccugcugguuauagcuaca

SEQ ID NO: 2624514 - RNA, 19 nt, Artificial Sequence
  Description of Artificial Sequence: Synthetic oligonucleotide
cugccccaccaagacguca

SEQ ID NO: 2624515 - RNA, 19 nt, Artificial Sequence
  Description of Artificial Sequence: Synthetic oligonucleotide
uggguccaucacugcucuu

SEQ ID NO: 2624516 - RNA, 19 nt, Artificial Sequence
  Description of Artificial Sequence: Synthetic oligonucleotide
cugcugguuauagcuacau

SEQ ID NO: 2624517 - RNA, 19 nt, Artificial Sequence
  Description of Artificial Sequence: Synthetic oligonucleotide
gggucgaaguccugcugcu

SEQ ID NO: 2624518 - RNA, 19 nt, Artificial Sequence
  Description of Artificial Sequence: Synthetic oligonucleotide
cgcuauggcaugacaaaua

SEQ ID NO: 2624519 - RNA, 19 nt, Artificial Sequence
  Description of Artificial Sequence: Synthetic oligonucleotide
gccccaccaguugcggcgg

SEQ ID NO: 2624520 - RNA, 19 nt, Artificial Sequence
  Description of Artificial Sequence: Synthetic oligonucleotide
gcugaaccgcaucuggcuu

SEQ ID NO: 2624521 - RNA, 19 nt, Artificial Sequence
  Description of Artificial Sequence: Synthetic oligonucleotide
gccaggcgcaagcagaguu

SEQ ID NO: 2624522 - RNA, 19 nt, Artificial Sequence
  Description of Artificial Sequence: Synthetic oligonucleotide
ggcugcagucgucuugccu

SEQ ID NO: 2624523 - RNA, 19 nt, Artificial Sequence
  Description of Artificial Sequence: Synthetic oligonucleotide
ggguccaucacugcucuuu

SEQ ID NO: 2624524 - RNA, 19 nt, Artificial Sequence
  Description of Artificial Sequence: Synthetic oligonucleotide
gagcgcacucggggcgggc

SEQ ID NO: 2624525 - RNA, 19 nt, Artificial Sequence
  Description of Artificial Sequence: Synthetic oligonucleotide
gcagggcaguaugaauguc

SEQ ID NO: 2624526 - RNA, 19 nt, Artificial Sequence
  Description of Artificial Sequence: Synthetic oligonucleotide
gcgggaugagcaucuugua

SEQ ID NO: 2624527 - RNA, 19 nt, Artificial Sequence
  Description of Artificial Sequence: Synthetic oligonucleotide
ccuuaggccauacuucauu

SEQ ID NO: 2624528 - RNA, 19 nt, Artificial Sequence
  Description of Artificial Sequence: Synthetic oligonucleotide
cccgacacgcccgccgcgg

SEQ ID NO: 2624529 - RNA, 19 nt, Artificial Sequence
  Description of Artificial Sequence: Synthetic oligonucleotide
ggagcgcacucggggcggg

SEQ ID NO: 2624530 - RNA, 19 nt, Artificial Sequence
  Description of Artificial Sequence: Synthetic oligonucleotide
gcgcacucggggcgggccc

SEQ ID NO: 2624531 - RNA, 19 nt, Artificial Sequence
  Description of Artificial Sequence: Synthetic oligonucleotide
gguucugggcugcaaccuu

SEQ ID NO: 2624532 - RNA, 19 nt, Artificial Sequence
  Description of Artificial Sequence: Synthetic oligonucleotide
gugaccuuguuggcacagu

SEQ ID NO: 2624533 - RNA, 19 nt, Artificial Sequence
  Description of Artificial Sequence: Synthetic oligonucleotide
gggcgggccccaccaguug

SEQ ID NO: 2624534 - RNA, 19 nt, Artificial Sequence
  Description of Artificial Sequence: Synthetic oligonucleotide
cgagcccggacccgacacg

SEQ ID NO: 2624535 - RNA, 19 nt, Artificial Sequence
  Description of Artificial Sequence: Synthetic oligonucleotide
cgccgcggaggaaaccgcc

SEQ ID NO: 2624536 - RNA, 19 nt, Artificial Sequence
  Description of Artificial Sequence: Synthetic oligonucleotide
ggccagcugaggcugcagu

SEQ ID NO: 2624537 - RNA, 19 nt, Artificial Sequence
  Description of Artificial Sequence: Synthetic oligonucleotide
cgacccggggccaccggcc

SEQ ID NO: 2624538 - RNA, 19 nt, Artificial Sequence
  Description of Artificial Sequence: Synthetic oligonucleotide
gcgcagguaaucugggcuu

SEQ ID NO: 2624539 - RNA, 19 nt, Artificial Sequence
  Description of Artificial Sequence: Synthetic oligonucleotide
ccgccgcggaggaaaccgc

SEQ ID NO: 2624540 - RNA, 19 nt, Artificial Sequence
  Description of Artificial Sequence: Synthetic oligonucleotide
gggcaccagugucggagaa

SEQ ID NO: 2624541 - RNA, 19 nt, Artificial Sequence
  Description of Artificial Sequence: Synthetic oligonucleotide
cgcaagcagaguuccagcu

SEQ ID NO: 2624542 - RNA, 19 nt, Artificial Sequence
  Description of Artificial Sequence: Synthetic oligonucleotide
gcaagcugucuggcugaac

SEQ ID NO: 2624543 - RNA, 19 nt, Artificial Sequence
  Description of Artificial Sequence: Synthetic oligonucleotide
ccggacccgacacgcccgc

SEQ ID NO: 2624544 - RNA, 19 nt, Artificial Sequence
  Description of Artificial Sequence: Synthetic oligonucleotide
ggagaaugcuuggcacugu

SEQ ID NO: 2624545 - RNA, 19 nt, Artificial Sequence
  Description of Artificial Sequence: Synthetic oligonucleotide
agcgcugcacggggucgaa

SEQ ID NO: 2624546 - RNA, 19 nt, Artificial Sequence
  Description of Artificial Sequence: Synthetic oligonucleotide
gcugcgacccggggccacc

SEQ ID NO: 2624547 - RNA, 19 nt, Artificial Sequence
  Description of Artificial Sequence: Synthetic oligonucleotide
caguccagcagggcaguau

SEQ ID NO: 2624548 - RNA, 19 nt, Artificial Sequence
  Description of Artificial Sequence: Synthetic oligonucleotide
cguugucaauguuaguguu

SEQ ID NO: 2624549 - RNA, 19 nt, Artificial Sequence
  Description of Artificial Sequence: Synthetic oligonucleotide
ccaccggccgagcccggac

SEQ ID NO: 2624550 - RNA, 19 nt, Artificial Sequence
  Description of Artificial Sequence: Synthetic oligonucleotide
cgcaucuggcuugguggcc

SEQ ID NO: 2624551 - RNA, 19 nt, Artificial Sequence
  Description of Artificial Sequence: Synthetic oligonucleotide
ccgcggaggaaaccgccga

SEQ ID NO: 2624552 - RNA, 19 nt, Artificial Sequence
  Description of Artificial Sequence: Synthetic oligonucleotide
cggggucgaaguccugcug

SEQ ID NO: 2624553 - RNA, 19 nt, Artificial Sequence
  Description of Artificial Sequence: Synthetic oligonucleotide
gccgagcccggacccgaca

SEQ ID NO: 2624554 - RNA, 19 nt, Artificial Sequence
  Description of Artificial Sequence: Synthetic oligonucleotide
ccccugcugguuauagcua

SEQ ID NO: 2624555 - RNA, 19 nt, Artificial Sequence
  Description of Artificial Sequence: Synthetic oligonucleotide
cgacacgcccgccgcggag

SEQ ID NO: 2624556 - RNA, 19 nt, Artificial Sequence
  Description of Artificial Sequence: Synthetic oligonucleotide
cacucggggcgggccccac

SEQ ID NO: 2624557 - RNA, 19 nt, Artificial Sequence
  Description of Artificial Sequence: Synthetic oligonucleotide
gcgcugcacggggucgaag

SEQ ID NO: 2624558 - RNA, 19 nt, Artificial Sequence
  Description of Artificial Sequence: Synthetic oligonucleotide
cgcugcacggggucgaagu

SEQ ID NO: 2624559 - RNA, 19 nt, Artificial Sequence
  Description of Artificial Sequence: Synthetic oligonucleotide
cacugcucuuuuguccguu

SEQ ID NO: 2624560 - RNA, 19 nt, Artificial Sequence
  Description of Artificial Sequence: Synthetic oligonucleotide
gguggccgugggcaccagu

SEQ ID NO: 2624561 - RNA, 19 nt, Artificial Sequence
  Description of Artificial Sequence: Synthetic oligonucleotide
gggcaguaugaauguccuu

SEQ ID NO: 2624562 - RNA, 19 nt, Artificial Sequence
  Description of Artificial Sequence: Synthetic oligonucleotide
ccggccgagcccggacccg

SEQ ID NO: 2624563 - RNA, 19 nt, Artificial Sequence
  Description of Artificial Sequence: Synthetic oligonucleotide
gaaccgcaucuggcuuggu

SEQ ID NO: 2624564 - RNA, 19 nt, Artificial Sequence
  Description of Artificial Sequence: Synthetic oligonucleotide
cgcacucggggcgggcccc

SEQ ID NO: 2624565 - RNA, 19 nt, Artificial Sequence
  Description of Artificial Sequence: Synthetic oligonucleotide
gcacggggucgaaguccug

SEQ ID NO: 2624566 - RNA, 19 nt, Artificial Sequence
  Description of Artificial Sequence: Synthetic oligonucleotide
gcccgccgcggaggaaacc

SEQ ID NO: 2624567 - RNA, 19 nt, Artificial Sequence
  Description of Artificial Sequence: Synthetic oligonucleotide
cgcggaggaaaccgccgaa

SEQ ID NO: 2624568 - RNA, 19 nt, Artificial Sequence
  Description of Artificial Sequence: Synthetic oligonucleotide
ggccaccggccgagcccgg

SEQ ID NO: 2624569 - RNA, 19 nt, Artificial Sequence
  Description of Artificial Sequence: Synthetic oligonucleotide
gccaccggccgagcccgga

SEQ ID NO: 2624570 - RNA, 19 nt, Artificial Sequence
  Description of Artificial Sequence: Synthetic oligonucleotide
ccgacacgcccgccgcgga

SEQ ID NO: 2624571 - RNA, 19 nt, Artificial Sequence
  Description of Artificial Sequence: Synthetic oligonucleotide
cgcccgccgcggaggaaac

SEQ ID NO: 2624572 - RNA, 19 nt, Artificial Sequence
  Description of Artificial Sequence: Synthetic oligonucleotide
gcacucggggcgggcccca

SEQ ID NO: 2624573 - RNA, 19 nt, Artificial Sequence
  Description of Artificial Sequence: Synthetic oligonucleotide
ggggcgggccccaccaguu

SEQ ID NO: 2624574 - RNA, 19 nt, Artificial Sequence
  Description of Artificial Sequence: Synthetic oligonucleotide
ccccaccaagacgucagau

SEQ ID NO: 2624575 - RNA, 19 nt, Artificial Sequence
  Description of Artificial Sequence: Synthetic oligonucleotide
cacgcccgccgcggaggaa

SEQ ID NO: 2624576 - RNA, 19 nt, Artificial Sequence
  Description of Artificial Sequence: Synthetic oligonucleotide
cgugggcaccagugucgga

SEQ ID NO: 2624577 - RNA, 19 nt, Artificial Sequence
  Description of Artificial Sequence: Synthetic oligonucleotide
cggacccgacacgcccgcc

SEQ ID NO: 2624578 - RNA, 19 nt, Artificial Sequence
  Description of Artificial Sequence: Synthetic oligonucleotide
cccaccaguugcggcggcu

SEQ ID NO: 2624579 - RNA, 19 nt, Artificial Sequence
  Description of Artificial Sequence: Synthetic oligonucleotide
cgcagguaaucugggcuuu

SEQ ID NO: 2624580 - RNA, 19 nt, Artificial Sequence
  Description of Artificial Sequence: Synthetic oligonucleotide
cggccgagcccggacccga

SEQ ID NO: 2624581 - RNA, 19 nt, Artificial Sequence
  Description of Artificial Sequence: Synthetic oligonucleotide
cggggcgggccccaccagu

SEQ ID NO: 2624582 - RNA, 19 nt, Artificial Sequence
  Description of Artificial Sequence: Synthetic oligonucleotide
uuaucugcaacacacacgg

SEQ ID NO: 2624583 - RNA, 19 nt, Artificial Sequence
  Description of Artificial Sequence: Synthetic oligonucleotide
ucuucaagaaguauggccg

SEQ ID NO: 2624584 - RNA, 19 nt, Artificial Sequence
  Description of Artificial Sequence: Synthetic oligonucleotide
uuugucaaauaucucaggg

SEQ ID NO: 2624585 - RNA, 19 nt, Artificial Sequence
  Description of Artificial Sequence: Synthetic oligonucleotide
ugacagaucaucaaagcgg

SEQ ID NO: 2624586 - RNA, 19 nt, Artificial Sequence
  Description of Artificial Sequence: Synthetic oligonucleotide
aaacucuccagcuucuugc

SEQ ID NO: 2624587 - RNA, 19 nt, Artificial Sequence
  Description of Artificial Sequence: Synthetic oligonucleotide
ucagauuucuucaagaagu

SEQ ID NO: 2624588 - RNA, 19 nt, Artificial Sequence
  Description of Artificial Sequence: Synthetic oligonucleotide
aaauaucucaggguuauac

SEQ ID NO: 2624589 - RNA, 19 nt, Artificial Sequence
  Description of Artificial Sequence: Synthetic oligonucleotide
agaaguauggccgaugacc

SEQ ID NO: 2624590 - RNA, 19 nt, Artificial Sequence
  Description of Artificial Sequence: Synthetic oligonucleotide
uuuacugaugggaacaacc

SEQ ID NO: 2624591 - RNA, 19 nt, Artificial Sequence
  Description of Artificial Sequence: Synthetic oligonucleotide
auuucuugcuguuccaucc

SEQ ID NO: 2624592 - RNA, 19 nt, Artificial Sequence
  Description of Artificial Sequence: Synthetic oligonucleotide
aguuuugucaaauaucuca

SEQ ID NO: 2624593 - RNA, 19 nt, Artificial Sequence
  Description of Artificial Sequence: Synthetic oligonucleotide
aacuuuggcugacauuucc

SEQ ID NO: 2624594 - RNA, 19 nt, Artificial Sequence
  Description of Artificial Sequence: Synthetic oligonucleotide
ucgaauaucguucaggaau

SEQ ID NO: 2624595 - RNA, 19 nt, Artificial Sequence
  Description of Artificial Sequence: Synthetic oligonucleotide
acucaagaaacucuccagc

SEQ ID NO: 2624596 - RNA, 19 nt, Artificial Sequence
  Description of Artificial Sequence: Synthetic oligonucleotide
auugcucagagggagaugc

SEQ ID NO: 2624597 - RNA, 19 nt, Artificial Sequence
  Description of Artificial Sequence: Synthetic oligonucleotide
cuugcuacguuucagcucc

SEQ ID NO: 2624598 - RNA, 19 nt, Artificial Sequence
  Description of Artificial Sequence: Synthetic oligonucleotide
gaauugguaaguuuuguca

SEQ ID NO: 2624599 - RNA, 19 nt, Artificial Sequence
  Description of Artificial Sequence: Synthetic oligonucleotide
uuuucuuuggcucgaauau

SEQ ID NO: 2624600 - RNA, 19 nt, Artificial Sequence
  Description of Artificial Sequence: Synthetic oligonucleotide
aauugguaaguuuugucaa

SEQ ID NO: 2624601 - RNA, 19 nt, Artificial Sequence
  Description of Artificial Sequence: Synthetic oligonucleotide
uuggcugacauuuccagag

SEQ ID NO: 2624602 - RNA, 19 nt, Artificial Sequence
  Description of Artificial Sequence: Synthetic oligonucleotide
aauaucucaggguuauacu

SEQ ID NO: 2624603 - RNA, 19 nt, Artificial Sequence
  Description of Artificial Sequence: Synthetic oligonucleotide
ucagcuagggccaacuggc

SEQ ID NO: 2624604 - RNA, 19 nt, Artificial Sequence
  Description of Artificial Sequence: Synthetic oligonucleotide
ugucaaauaucucaggguu

SEQ ID NO: 2624605 - RNA, 19 nt, Artificial Sequence
  Description of Artificial Sequence: Synthetic oligonucleotide
uccucaaaugacaugucag

SEQ ID NO: 2624606 - RNA, 19 nt, Artificial Sequence
  Description of Artificial Sequence: Synthetic oligonucleotide
acccuguugugccagagcc

SEQ ID NO: 2624607 - RNA, 19 nt, Artificial Sequence
  Description of Artificial Sequence: Synthetic oligonucleotide
ucaaaugacaugucagaug

SEQ ID NO: 2624608 - RNA, 19 nt, Artificial Sequence
  Description of Artificial Sequence: Synthetic oligonucleotide
aauaucguucaggaauugg

SEQ ID NO: 2624609 - RNA, 19 nt, Artificial Sequence
  Description of Artificial Sequence: Synthetic oligonucleotide
uuuugucaaauaucucagg

SEQ ID NO: 2624610 - RNA, 19 nt, Artificial Sequence
  Description of Artificial Sequence: Synthetic oligonucleotide
ucaggaauugguaaguuuu

SEQ ID NO: 2624611 - RNA, 19 nt, Artificial Sequence
  Description of Artificial Sequence: Synthetic oligonucleotide
cuuaucugcaacacacacg

SEQ ID NO: 2624612 - RNA, 19 nt, Artificial Sequence
  Description of Artificial Sequence: Synthetic oligonucleotide
guaagaauggcacucgaac

SEQ ID NO: 2624613 - RNA, 19 nt, Artificial Sequence
  Description of Artificial Sequence: Synthetic oligonucleotide
cugacagaucaucaaagcg

SEQ ID NO: 2624614 - RNA, 19 nt, Artificial Sequence
  Description of Artificial Sequence: Synthetic oligonucleotide
cauccgaugaagcagcugc

SEQ ID NO: 2624615 - RNA, 19 nt, Artificial Sequence
  Description of Artificial Sequence: Synthetic oligonucleotide
gacagaucaucaaagcggg

SEQ ID NO: 2624616 - RNA, 19 nt, Artificial Sequence
  Description of Artificial Sequence: Synthetic oligonucleotide
gguuauacuccccugacag

SEQ ID NO: 2624617 - RNA, 19 nt, Artificial Sequence
  Description of Artificial Sequence: Synthetic oligonucleotide
uaagaauggcacucgaacu

SEQ ID NO: 2624618 - RNA, 19 nt, Artificial Sequence
  Description of Artificial Sequence: Synthetic oligonucleotide
gaugggaacaaccugacgu

SEQ ID NO: 2624619 - RNA, 19 nt, Artificial Sequence
  Description of Artificial Sequence: Synthetic oligonucleotide
aacaaccugacguaagaau

SEQ ID NO: 2624620 - RNA, 19 nt, Artificial Sequence
  Description of Artificial Sequence: Synthetic oligonucleotide
uuacugaugggaacaaccu

SEQ ID NO: 2624621 - RNA, 19 nt, Artificial Sequence
  Description of Artificial Sequence: Synthetic oligonucleotide
aagaaguauggccgaugac

SEQ ID NO: 2624622 - RNA, 19 nt, Artificial Sequence
  Description of Artificial Sequence: Synthetic oligonucleotide
aagaauggcacucgaacuu

SEQ ID NO: 2624623 - RNA, 19 nt, Artificial Sequence
  Description of Artificial Sequence: Synthetic oligonucleotide
uugaacuucucagcuaggg

SEQ ID NO: 2624624 - RNA, 19 nt, Artificial Sequence
  Description of Artificial Sequence: Synthetic oligonucleotide
cugacauuuccagaggucg

SEQ ID NO: 2624625 - RNA, 19 nt, Artificial Sequence
  Description of Artificial Sequence: Synthetic oligonucleotide
gacucaagaaacucuccag

SEQ ID NO: 2624626 - RNA, 19 nt, Artificial Sequence
  Description of Artificial Sequence: Synthetic oligonucleotide
uuucgcaugccuugggucc

SEQ ID NO: 2624627 - RNA, 19 nt, Artificial Sequence
  Description of Artificial Sequence: Synthetic oligonucleotide
ugaacuucucagcuagggc

SEQ ID NO: 2624628 - RNA, 19 nt, Artificial Sequence
  Description of Artificial Sequence: Synthetic oligonucleotide
aucugcaacacacacgggu

SEQ ID NO: 2624629 - RNA, 19 nt, Artificial Sequence
  Description of Artificial Sequence: Synthetic oligonucleotide
uguuccauccgaugaagca

SEQ ID NO: 2624630 - RNA, 19 nt, Artificial Sequence
  Description of Artificial Sequence: Synthetic oligonucleotide
aaccugacguaagaauggc

SEQ ID NO: 2624631 - RNA, 19 nt, Artificial Sequence
  Description of Artificial Sequence: Synthetic oligonucleotide
caaccugacguaagaaugg

SEQ ID NO: 2624632 - RNA, 19 nt, Artificial Sequence
  Description of Artificial Sequence: Synthetic oligonucleotide
uuucgacucaagaaacucu

SEQ ID NO: 2624633 - RNA, 19 nt, Artificial Sequence
  Description of Artificial Sequence: Synthetic oligonucleotide
gaaguauggccgaugaccc

SEQ ID NO: 2624634 - RNA, 19 nt, Artificial Sequence
  Description of Artificial Sequence: Synthetic oligonucleotide
uugucaaauaucucagggu

SEQ ID NO: 2624635 - RNA, 19 nt, Artificial Sequence
  Description of Artificial Sequence: Synthetic oligonucleotide
uggccgaugacccuguugu

SEQ ID NO: 2624636 - RNA, 19 nt, Artificial Sequence
  Description of Artificial Sequence: Synthetic oligonucleotide
cucagauuucuucaagaag

SEQ ID NO: 2624637 - RNA, 19 nt, Artificial Sequence
  Description of Artificial Sequence: Synthetic oligonucleotide
uucgacucaagaaacucuc

SEQ ID NO: 2624638 - RNA, 19 nt, Artificial Sequence
  Description of Artificial Sequence: Synthetic oligonucleotide
ugucagaugugucugccgu

SEQ ID NO: 2624639 - RNA, 19 nt, Artificial Sequence
  Description of Artificial Sequence: Synthetic oligonucleotide
ucagaugugucugccgucg

SEQ ID NO: 2624640 - RNA, 19 nt, Artificial Sequence
  Description of Artificial Sequence: Synthetic oligonucleotide
ucguucaggaauugguaag

SEQ ID NO: 2624641 - RNA, 19 nt, Artificial Sequence
  Description of Artificial Sequence: Synthetic oligonucleotide
auggcacucgaacuuuggc

SEQ ID NO: 2624642 - RNA, 19 nt, Artificial Sequence
  Description of Artificial Sequence: Synthetic oligonucleotide
cuucuugcuacguuucagc

SEQ ID NO: 2624643 - RNA, 19 nt, Artificial Sequence
  Description of Artificial Sequence: Synthetic oligonucleotide
uucucagugcuccuuccag

SEQ ID NO: 2624644 - RNA, 19 nt, Artificial Sequence
  Description of Artificial Sequence: Synthetic oligonucleotide
uuccauccgaugaagcagc

SEQ ID NO: 2624645 - RNA, 19 nt, Artificial Sequence
  Description of Artificial Sequence: Synthetic oligonucleotide
uugcuguuccauccgauga

SEQ ID NO: 2624646 - RNA, 19 nt, Artificial Sequence
  Description of Artificial Sequence: Synthetic oligonucleotide
aggguuauacuccccugac

SEQ ID NO: 2624647 - RNA, 19 nt, Artificial Sequence
  Description of Artificial Sequence: Synthetic oligonucleotide
agaugcuuccuguccuugc

SEQ ID NO: 2624648 - RNA, 19 nt, Artificial Sequence
  Description of Artificial Sequence: Synthetic oligonucleotide
acaaccugacguaagaaug

SEQ ID NO: 2624649 - RNA, 19 nt, Artificial Sequence
  Description of Artificial Sequence: Synthetic oligonucleotide
aguguuccuuacucauugc

SEQ ID NO: 2624650 - RNA, 19 nt, Artificial Sequence
  Description of Artificial Sequence: Synthetic oligonucleotide
acaugucagaugugucugc

SEQ ID NO: 2624651 - RNA, 19 nt, Artificial Sequence
  Description of Artificial Sequence: Synthetic oligonucleotide
ucaaauaucucaggguuau

SEQ ID NO: 2624652 - RNA, 19 nt, Artificial Sequence
  Description of Artificial Sequence: Synthetic oligonucleotide
ugcucagauuucuucaaga

SEQ ID NO: 2624653 - RNA, 19 nt, Artificial Sequence
  Description of Artificial Sequence: Synthetic oligonucleotide
uacugaugggaacaaccug

SEQ ID NO: 2624654 - RNA, 19 nt, Artificial Sequence
  Description of Artificial Sequence: Synthetic oligonucleotide
uuauacuccccugacagau

SEQ ID NO: 2624655 - RNA, 19 nt, Artificial Sequence
  Description of Artificial Sequence: Synthetic oligonucleotide
guuccuuacucauugcuca

SEQ ID NO: 2624656 - RNA, 19 nt, Artificial Sequence
  Description of Artificial Sequence: Synthetic oligonucleotide
agaugugucugccgucggc

SEQ ID NO: 2624657 - RNA, 19 nt, Artificial Sequence
  Description of Artificial Sequence: Synthetic oligonucleotide
cucuuucgacucaagaaac

SEQ ID NO: 2624658 - RNA, 19 nt, Artificial Sequence
  Description of Artificial Sequence: Synthetic oligonucleotide
aacuccaacagcuccucaa

SEQ ID NO: 2624659 - RNA, 19 nt, Artificial Sequence
  Description of Artificial Sequence: Synthetic oligonucleotide
agcuccucaaaugacaugu

SEQ ID NO: 2624660 - RNA, 19 nt, Artificial Sequence
  Description of Artificial Sequence: Synthetic oligonucleotide
cuuugcuucucagugcucc

SEQ ID NO: 2624661 - RNA, 19 nt, Artificial Sequence
  Description of Artificial Sequence: Synthetic oligonucleotide
ucuuucgacucaagaaacu

SEQ ID NO: 2624662 - RNA, 19 nt, Artificial Sequence
  Description of Artificial Sequence: Synthetic oligonucleotide
agcuagggccaacuggcgc

SEQ ID NO: 2624663 - RNA, 19 nt, Artificial Sequence
  Description of Artificial Sequence: Synthetic oligonucleotide
ugaugggaacaaccugacg

SEQ ID NO: 2624664 - RNA, 19 nt, Artificial Sequence
  Description of Artificial Sequence: Synthetic oligonucleotide
uaucguucaggaauuggua

SEQ ID NO: 2624665 - RNA, 19 nt, Artificial Sequence
  Description of Artificial Sequence: Synthetic oligonucleotide
acucauugcucagagggag

SEQ ID NO: 2624666 - RNA, 19 nt, Artificial Sequence
  Description of Artificial Sequence: Synthetic oligonucleotide
uuuggcugacauuuccaga

SEQ ID NO: 2624667 - RNA, 19 nt, Artificial Sequence
  Description of Artificial Sequence: Synthetic oligonucleotide
caguguuccuuacucauug

SEQ ID NO: 2624668 - RNA, 19 nt, Artificial Sequence
  Description of Artificial Sequence: Synthetic oligonucleotide
gacaugucagaugugucug

SEQ ID NO: 2624669 - RNA, 19 nt, Artificial Sequence
  Description of Artificial Sequence: Synthetic oligonucleotide
uucuugcuacguuucagcu

SEQ ID NO: 2624670 - RNA, 19 nt, Artificial Sequence
  Description of Artificial Sequence: Synthetic oligonucleotide
gacguaagaauggcacucg

SEQ ID NO: 2624671 - RNA, 19 nt, Artificial Sequence
  Description of Artificial Sequence: Synthetic oligonucleotide
cuuacucauugcucagagg

SEQ ID NO: 2624672 - RNA, 19 nt, Artificial Sequence
  Description of Artificial Sequence: Synthetic oligonucleotide
auacuccccugacagauca

SEQ ID NO: 2624673 - RNA, 19 nt, Artificial Sequence
  Description of Artificial Sequence: Synthetic oligonucleotide
auaucguucaggaauuggu

SEQ ID NO: 2624674 - RNA, 19 nt, Artificial Sequence
  Description of Artificial Sequence: Synthetic oligonucleotide
gaugaagcagcugcugcag

SEQ ID NO: 2624675 - RNA, 19 nt, Artificial Sequence
  Description of Artificial Sequence: Synthetic oligonucleotide
uguuucgcaugccuugggu

SEQ ID NO: 2624676 - RNA, 19 nt, Artificial Sequence
  Description of Artificial Sequence: Synthetic oligonucleotide
aucguucaggaauugguaa

SEQ ID NO: 2624677 - RNA, 19 nt, Artificial Sequence
  Description of Artificial Sequence: Synthetic oligonucleotide
aacucuccagcuucuugcu

SEQ ID NO: 2624678 - RNA, 19 nt, Artificial Sequence
  Description of Artificial Sequence: Synthetic oligonucleotide
cauuccggcgccucuuucg

SEQ ID NO: 2624679 - RNA, 19 nt, Artificial Sequence
  Description of Artificial Sequence: Synthetic oligonucleotide
ucugcaacacacacggguu

SEQ ID NO: 2624680 - RNA, 19 nt, Artificial Sequence
  Description of Artificial Sequence: Synthetic oligonucleotide
ucgacucaagaaacucucc

SEQ ID NO: 2624681 - RNA, 19 nt, Artificial Sequence
  Description of Artificial Sequence: Synthetic oligonucleotide
ucucagugcuccuuccagc

SEQ ID NO: 2624682 - RNA, 19 nt, Artificial Sequence
  Description of Artificial Sequence: Synthetic oligonucleotide
ugcugugccauuucuugcu

SEQ ID NO: 2624683 - RNA, 19 nt, Artificial Sequence
  Description of Artificial Sequence: Synthetic oligonucleotide
uacucauugcucagaggga

SEQ ID NO: 2624684 - RNA, 19 nt, Artificial Sequence
  Description of Artificial Sequence: Synthetic oligonucleotide
auugguaaguuuugucaaa

SEQ ID NO: 2624685 - RNA, 19 nt, Artificial Sequence
  Description of Artificial Sequence: Synthetic oligonucleotide
ugacguaagaauggcacuc

SEQ ID NO: 2624686 - RNA, 19 nt, Artificial Sequence
  Description of Artificial Sequence: Synthetic oligonucleotide
uggcugacauuuccagagg

SEQ ID NO: 2624687 - RNA, 19 nt, Artificial Sequence
  Description of Artificial Sequence: Synthetic oligonucleotide
uacguuucagcuccuugaa

SEQ ID NO: 2624688 - RNA, 19 nt, Artificial Sequence
  Description of Artificial Sequence: Synthetic oligonucleotide
augucagaugugucugccg

SEQ ID NO: 2624689 - RNA, 19 nt, Artificial Sequence
  Description of Artificial Sequence: Synthetic oligonucleotide
cuugcuguuccauccgaug

SEQ ID NO: 2624690 - RNA, 19 nt, Artificial Sequence
  Description of Artificial Sequence: Synthetic oligonucleotide
cucagagggagaugcuucc

SEQ ID NO: 2624691 - RNA, 19 nt, Artificial Sequence
  Description of Artificial Sequence: Synthetic oligonucleotide
uggcucugcaacuccaaca

SEQ ID NO: 2624692 - RNA, 19 nt, Artificial Sequence
  Description of Artificial Sequence: Synthetic oligonucleotide
ucugccgucggcuggucgc

SEQ ID NO: 2624693 - RNA, 19 nt, Artificial Sequence
  Description of Artificial Sequence: Synthetic oligonucleotide
cuuucgacucaagaaacuc

SEQ ID NO: 2624694 - RNA, 19 nt, Artificial Sequence
  Description of Artificial Sequence: Synthetic oligonucleotide
caggaauugguaaguuuug

SEQ ID NO: 2624695 - RNA, 19 nt, Artificial Sequence
  Description of Artificial Sequence: Synthetic oligonucleotide
ccugacguaagaauggcac

SEQ ID NO: 2624696 - RNA, 19 nt, Artificial Sequence
  Description of Artificial Sequence: Synthetic oligonucleotide
uacagauccaggucucccu

SEQ ID NO: 2624697 - RNA, 19 nt, Artificial Sequence
  Description of Artificial Sequence: Synthetic oligonucleotide
ugcuuaucugcaacacaca

SEQ ID NO: 2624698 - RNA, 19 nt, Artificial Sequence
  Description of Artificial Sequence: Synthetic oligonucleotide
acguuucagcuccuugaac

SEQ ID NO: 2624699 - RNA, 19 nt, Artificial Sequence
  Description of Artificial Sequence: Synthetic oligonucleotide
gcuccuuccagcuaccacc

SEQ ID NO: 2624700 - RNA, 19 nt, Artificial Sequence
  Description of Artificial Sequence: Synthetic oligonucleotide
ucuugcuacguuucagcuc

SEQ ID NO: 2624701 - RNA, 19 nt, Artificial Sequence
  Description of Artificial Sequence: Synthetic oligonucleotide
ggcucugcaacuccaacag

SEQ ID NO: 2624702 - RNA, 19 nt, Artificial Sequence
  Description of Artificial Sequence: Synthetic oligonucleotide
uuccuuacucauugcucag

SEQ ID NO: 2624703 - RNA, 19 nt, Artificial Sequence
  Description of Artificial Sequence: Synthetic oligonucleotide
ucaagaaguauggccgaug

SEQ ID NO: 2624704 - RNA, 19 nt, Artificial Sequence
  Description of Artificial Sequence: Synthetic oligonucleotide
cuacguuucagcuccuuga

SEQ ID NO: 2624705 - RNA, 19 nt, Artificial Sequence
  Description of Artificial Sequence: Synthetic oligonucleotide
cucccugcgacaguguucc

SEQ ID NO: 2624706 - RNA, 19 nt, Artificial Sequence
  Description of Artificial Sequence: Synthetic oligonucleotide
aguauggccgaugacccug

SEQ ID NO: 2624707 - RNA, 19 nt, Artificial Sequence
  Description of Artificial Sequence: Synthetic oligonucleotide
uucaggaauugguaaguuu

SEQ ID NO: 2624708 - RNA, 19 nt, Artificial Sequence
  Description of Artificial Sequence: Synthetic oligonucleotide
ggcacucgaacuuuggcug

SEQ ID NO: 2624709 - RNA, 19 nt, Artificial Sequence
  Description of Artificial Sequence: Synthetic oligonucleotide
cugcaacuccaacagcucc

SEQ ID NO: 2624710 - RNA, 19 nt, Artificial Sequence
  Description of Artificial Sequence: Synthetic oligonucleotide
uuucguuccugcugugcca

SEQ ID NO: 2624711 - RNA, 19 nt, Artificial Sequence
  Description of Artificial Sequence: Synthetic oligonucleotide
caagaaguauggccgauga

SEQ ID NO: 2624712 - RNA, 19 nt, Artificial Sequence
  Description of Artificial Sequence: Synthetic oligonucleotide
uugguaaguuuugucaaau

SEQ ID NO: 2624713 - RNA, 19 nt, Artificial Sequence
  Description of Artificial Sequence: Synthetic oligonucleotide
uucuugcuguuccauccga

SEQ ID NO: 2624714 - RNA, 19 nt, Artificial Sequence
  Description of Artificial Sequence: Synthetic oligonucleotide
ucggugcuuaucugcaaca

SEQ ID NO: 2624715 - RNA, 19 nt, Artificial Sequence
  Description of Artificial Sequence: Synthetic oligonucleotide
ugcuuccuguccuugccug

SEQ ID NO: 2624716 - RNA, 19 nt, Artificial Sequence
  Description of Artificial Sequence: Synthetic oligonucleotide
ucuuuggcucgaauaucgu

SEQ ID NO: 2624717 - RNA, 19 nt, Artificial Sequence
  Description of Artificial Sequence: Synthetic oligonucleotide
uaucugcaacacacacggg

SEQ ID NO: 2624718 - RNA, 19 nt, Artificial Sequence
  Description of Artificial Sequence: Synthetic oligonucleotide
caugucagaugugucugcc

SEQ ID NO: 2624719 - RNA, 19 nt, Artificial Sequence
  Description of Artificial Sequence: Synthetic oligonucleotide
uguugugccagagcccgcc

SEQ ID NO: 2624720 - RNA, 19 nt, Artificial Sequence
  Description of Artificial Sequence: Synthetic oligonucleotide
gaugacccuguugugccag

SEQ ID NO: 2624721 - RNA, 19 nt, Artificial Sequence
  Description of Artificial Sequence: Synthetic oligonucleotide
aaguauggccgaugacccu

SEQ ID NO: 2624722 - RNA, 19 nt, Artificial Sequence
  Description of Artificial Sequence: Synthetic oligonucleotide
gcuuaucugcaacacacac

SEQ ID NO: 2624723 - RNA, 19 nt, Artificial Sequence
  Description of Artificial Sequence: Synthetic oligonucleotide
cugaugggaacaaccugac

SEQ ID NO: 2624724 - RNA, 19 nt, Artificial Sequence
  Description of Artificial Sequence: Synthetic oligonucleotide
accggugcuucuucaacug

SEQ ID NO: 2624725 - RNA, 19 nt, Artificial Sequence
  Description of Artificial Sequence: Synthetic oligonucleotide
uaccaccuguuucgcaugc

SEQ ID NO: 2624726 - RNA, 19 nt, Artificial Sequence
  Description of Artificial Sequence: Synthetic oligonucleotide
guuucgcaugccuuggguc

SEQ ID NO: 2624727 - RNA, 19 nt, Artificial Sequence
  Description of Artificial Sequence: Synthetic oligonucleotide
cagugcuccuuccagcuac

SEQ ID NO: 2624728 - RNA, 19 nt, Artificial Sequence
  Description of Artificial Sequence: Synthetic oligonucleotide
gguaaguuuugucaaauau

SEQ ID NO: 2624729 - RNA, 19 nt, Artificial Sequence
  Description of Artificial Sequence: Synthetic oligonucleotide
ccugacagaucaucaaagc

SEQ ID NO: 2624730 - RNA, 19 nt, Artificial Sequence
  Description of Artificial Sequence: Synthetic oligonucleotide
ugugccagagcccgccgcu

SEQ ID NO: 2624731 - RNA, 19 nt, Artificial Sequence
  Description of Artificial Sequence: Synthetic oligonucleotide
cugcugugccauuucuugc

SEQ ID NO: 2624732 - RNA, 19 nt, Artificial Sequence
  Description of Artificial Sequence: Synthetic oligonucleotide
ugcgacaguguuccuuacu

SEQ ID NO: 2624733 - RNA, 19 nt, Artificial Sequence
  Description of Artificial Sequence: Synthetic oligonucleotide
ugcuucgaggccaggcgca

SEQ ID NO: 2624734 - RNA, 19 nt, Artificial Sequence
  Description of Artificial Sequence: Synthetic oligonucleotide
augggaacaaccugacgua

SEQ ID NO: 2624735 - RNA, 19 nt, Artificial Sequence
  Description of Artificial Sequence: Synthetic oligonucleotide
caacagcuccucaaaugac

SEQ ID NO: 2624736 - RNA, 19 nt, Artificial Sequence
  Description of Artificial Sequence: Synthetic oligonucleotide
aggaauugguaaguuuugu

SEQ ID NO: 2624737 - RNA, 19 nt, Artificial Sequence
  Description of Artificial Sequence: Synthetic oligonucleotide
ugguaaguuuugucaaaua

SEQ ID NO: 2624738 - RNA, 19 nt, Artificial Sequence
  Description of Artificial Sequence: Synthetic oligonucleotide
ucuugcuguuccauccgau

SEQ ID NO: 2624739 - RNA, 19 nt, Artificial Sequence
  Description of Artificial Sequence: Synthetic oligonucleotide
gaauaucguucaggaauug

SEQ ID NO: 2624740 - RNA, 19 nt, Artificial Sequence
  Description of Artificial Sequence: Synthetic oligonucleotide
acuccaacagcuccucaaa

SEQ ID NO: 2624741 - RNA, 19 nt, Artificial Sequence
  Description of Artificial Sequence: Synthetic oligonucleotide
ucauugcucagagggagau

SEQ ID NO: 2624742 - RNA, 19 nt, Artificial Sequence
  Description of Artificial Sequence: Synthetic oligonucleotide
cuacagauccaggucuccc

SEQ ID NO: 2624743 - RNA, 19 nt, Artificial Sequence
  Description of Artificial Sequence: Synthetic oligonucleotide
uccuacagauccaggucuc

SEQ ID NO: 2624744 - RNA, 19 nt, Artificial Sequence
  Description of Artificial Sequence: Synthetic oligonucleotide
gcucgaauaucguucagga

SEQ ID NO: 2624745 - RNA, 19 nt, Artificial Sequence
  Description of Artificial Sequence: Synthetic oligonucleotide
cacacggguugucuggggc

SEQ ID NO: 2624746 - RNA, 19 nt, Artificial Sequence
  Description of Artificial Sequence: Synthetic oligonucleotide
cuucaagaaguauggccga

SEQ ID NO: 2624747 - RNA, 19 nt, Artificial Sequence
  Description of Artificial Sequence: Synthetic oligonucleotide
ggaacaaccugacguaaga

SEQ ID NO: 2624748 - RNA, 19 nt, Artificial Sequence
  Description of Artificial Sequence: Synthetic oligonucleotide
ucucaggguuauacucccc

SEQ ID NO: 2624749 - RNA, 19 nt, Artificial Sequence
  Description of Artificial Sequence: Synthetic oligonucleotide
ggcucgaauaucguucagg

SEQ ID NO: 2624750 - RNA, 19 nt, Artificial Sequence
  Description of Artificial Sequence: Synthetic oligonucleotide
gucggugcuuaucugcaac

SEQ ID NO: 2624751 - RNA, 19 nt, Artificial Sequence
  Description of Artificial Sequence: Synthetic oligonucleotide
uccgaugaagcagcugcug

SEQ ID NO: 2624752 - RNA, 19 nt, Artificial Sequence
  Description of Artificial Sequence: Synthetic oligonucleotide
uccggcgccucuuucgacu

SEQ ID NO: 2624753 - RNA, 19 nt, Artificial Sequence
  Description of Artificial Sequence: Synthetic oligonucleotide
cucaagaaacucuccagcu

SEQ ID NO: 2624754 - RNA, 19 nt, Artificial Sequence
  Description of Artificial Sequence: Synthetic oligonucleotide
aaaugacaugucagaugug

SEQ ID NO: 2624755 - RNA, 19 nt, Artificial Sequence
  Description of Artificial Sequence: Synthetic oligonucleotide
acguaagaauggcacucga

SEQ ID NO: 2624756 - RNA, 19 nt, Artificial Sequence
  Description of Artificial Sequence: Synthetic oligonucleotide
uugugccagagcccgccgc

SEQ ID NO: 2624757 - RNA, 19 nt, Artificial Sequence
  Description of Artificial Sequence: Synthetic oligonucleotide
guuauacuccccugacaga

SEQ ID NO: 2624758 - RNA, 19 nt, Artificial Sequence
  Description of Artificial Sequence: Synthetic oligonucleotide
agaggucggugcuuaucug

SEQ ID NO: 2624759 - RNA, 19 nt, Artificial Sequence
  Description of Artificial Sequence: Synthetic oligonucleotide
uccuugaacuucucagcua

SEQ ID NO: 2624760 - RNA, 19 nt, Artificial Sequence
  Description of Artificial Sequence: Synthetic oligonucleotide
uggggcuuugcuucucagu

SEQ ID NO: 2624761 - RNA, 19 nt, Artificial Sequence
  Description of Artificial Sequence: Synthetic oligonucleotide
cugcuucgaggccaggcgc

SEQ ID NO: 2624762 - RNA, 19 nt, Artificial Sequence
  Description of Artificial Sequence: Synthetic oligonucleotide
ucucccugcgacaguguuc

SEQ ID NO: 2624763 - RNA, 19 nt, Artificial Sequence
  Description of Artificial Sequence: Synthetic oligonucleotide
gaauggcacucgaacuuug

SEQ ID NO: 2624764 - RNA, 19 nt, Artificial Sequence
  Description of Artificial Sequence: Synthetic oligonucleotide
ccuuacucauugcucagag

SEQ ID NO: 2624765 - RNA, 19 nt, Artificial Sequence
  Description of Artificial Sequence: Synthetic oligonucleotide
ccuguugugccagagcccg

SEQ ID NO: 2624766 - RNA, 19 nt, Artificial Sequence
  Description of Artificial Sequence: Synthetic oligonucleotide
auuccggcgccucuuucga

SEQ ID NO: 2624767 - RNA, 19 nt, Artificial Sequence
  Description of Artificial Sequence: Synthetic oligonucleotide
gacccuguugugccagagc

SEQ ID NO: 2624768 - RNA, 19 nt, Artificial Sequence
  Description of Artificial Sequence: Synthetic oligonucleotide
uccccugacagaucaucaa

SEQ ID NO: 2624769 - RNA, 19 nt, Artificial Sequence
  Description of Artificial Sequence: Synthetic oligonucleotide
auggccgaugacccuguug

SEQ ID NO: 2624770 - RNA, 19 nt, Artificial Sequence
  Description of Artificial Sequence: Synthetic oligonucleotide
cccugacagaucaucaaag

SEQ ID NO: 2624771 - RNA, 19 nt, Artificial Sequence
  Description of Artificial Sequence: Synthetic oligonucleotide
uccuuacucauugcucaga

SEQ ID NO: 2624772 - RNA, 19 nt, Artificial Sequence
  Description of Artificial Sequence: Synthetic oligonucleotide
uccugcuucgaggccaggc

SEQ ID NO: 2624773 - RNA, 19 nt, Artificial Sequence
  Description of Artificial Sequence: Synthetic oligonucleotide
acacggguugucuggggcu

SEQ ID NO: 2624774 - RNA, 19 nt, Artificial Sequence
  Description of Artificial Sequence: Synthetic oligonucleotide
uccagcuucuugcuacguu

SEQ ID NO: 2624775 - RNA, 19 nt, Artificial Sequence
  Description of Artificial Sequence: Synthetic oligonucleotide
acacacggguugucugggg

SEQ ID NO: 2624776 - RNA, 19 nt, Artificial Sequence
  Description of Artificial Sequence: Synthetic oligonucleotide
cuguuucgcaugccuuggg

SEQ ID NO: 2624777 - RNA, 19 nt, Artificial Sequence
  Description of Artificial Sequence: Synthetic oligonucleotide
agugcuccuuccagcuacc

SEQ ID NO: 2624778 - RNA, 19 nt, Artificial Sequence
  Description of Artificial Sequence: Synthetic oligonucleotide
gcgacaguguuccuuacuc

SEQ ID NO: 2624779 - RNA, 19 nt, Artificial Sequence
  Description of Artificial Sequence: Synthetic oligonucleotide
ucgaacuuuggcugacauu

SEQ ID NO: 2624780 - RNA, 19 nt, Artificial Sequence
  Description of Artificial Sequence: Synthetic oligonucleotide
augugucugccgucggcug

SEQ ID NO: 2624781 - RNA, 19 nt, Artificial Sequence
  Description of Artificial Sequence: Synthetic oligonucleotide
uucgcaugccuuggguccc

SEQ ID NO: 2624782 - RNA, 19 nt, Artificial Sequence
  Description of Artificial Sequence: Synthetic oligonucleotide
ugggaacaaccugacguaa

SEQ ID NO: 2624783 - RNA, 19 nt, Artificial Sequence
  Description of Artificial Sequence: Synthetic oligonucleotide
guugugccagagcccgccg

SEQ ID NO: 2624784 - RNA, 19 nt, Artificial Sequence
  Description of Artificial Sequence: Synthetic oligonucleotide
uggcucgaauaucguucag

SEQ ID NO: 2624785 - RNA, 19 nt, Artificial Sequence
  Description of Artificial Sequence: Synthetic oligonucleotide
gaacaaccugacguaagaa

SEQ ID NO: 2624786 - RNA, 19 nt, Artificial Sequence
  Description of Artificial Sequence: Synthetic oligonucleotide
uucaagaaguauggccgau

SEQ ID NO: 2624787 - RNA, 19 nt, Artificial Sequence
  Description of Artificial Sequence: Synthetic oligonucleotide
agcuccuguugcugcuuuc

SEQ ID NO: 2624788 - RNA, 19 nt, Artificial Sequence
  Description of Artificial Sequence: Synthetic oligonucleotide
gagaugcuuccuguccuug

SEQ ID NO: 2624789 - RNA, 19 nt, Artificial Sequence
  Description of Artificial Sequence: Synthetic oligonucleotide
caggguuauacuccccuga

SEQ ID NO: 2624790 - RNA, 19 nt, Artificial Sequence
  Description of Artificial Sequence: Synthetic oligonucleotide
uccauccgaugaagcagcu

SEQ ID NO: 2624791 - RNA, 19 nt, Artificial Sequence
  Description of Artificial Sequence: Synthetic oligonucleotide
ugacccuguugugccagag

SEQ ID NO: 2624792 - RNA, 19 nt, Artificial Sequence
  Description of Artificial Sequence: Synthetic oligonucleotide
gcuacguuucagcuccuug

SEQ ID NO: 2624793 - RNA, 19 nt, Artificial Sequence
  Description of Artificial Sequence: Synthetic oligonucleotide
ccgaugacccuguugugcc

SEQ ID NO: 2624794 - RNA, 19 nt, Artificial Sequence
  Description of Artificial Sequence: Synthetic oligonucleotide
agaauggcacucgaacuuu

SEQ ID NO: 2624795 - RNA, 19 nt, Artificial Sequence
  Description of Artificial Sequence: Synthetic oligonucleotide
cuguccuugccugcauucc

SEQ ID NO: 2624796 - RNA, 19 nt, Artificial Sequence
  Description of Artificial Sequence: Synthetic oligonucleotide
gccucuuucgacucaagaa

SEQ ID NO: 2624797 - RNA, 19 nt, Artificial Sequence
  Description of Artificial Sequence: Synthetic oligonucleotide
ccugcuucgaggccaggcg

SEQ ID NO: 2624798 - RNA, 19 nt, Artificial Sequence
  Description of Artificial Sequence: Synthetic oligonucleotide
aggucucccugcgacagug

SEQ ID NO: 2624799 - RNA, 19 nt, Artificial Sequence
  Description of Artificial Sequence: Synthetic oligonucleotide
cagcuagggccaacuggcg

SEQ ID NO: 2624800 - RNA, 19 nt, Artificial Sequence
  Description of Artificial Sequence: Synthetic oligonucleotide
ggugcuuaucugcaacaca

SEQ ID NO: 2624801 - RNA, 19 nt, Artificial Sequence
  Description of Artificial Sequence: Synthetic oligonucleotide
acagaucaucaaagcgggg

SEQ ID NO: 2624802 - RNA, 19 nt, Artificial Sequence
  Description of Artificial Sequence: Synthetic oligonucleotide
uccugcugugccauuucuu

SEQ ID NO: 2624803 - RNA, 19 nt, Artificial Sequence
  Description of Artificial Sequence: Synthetic oligonucleotide
ugucuggggcuuugcuucu

SEQ ID NO: 2624804 - RNA, 19 nt, Artificial Sequence
  Description of Artificial Sequence: Synthetic oligonucleotide
ccucaaaugacaugucaga

SEQ ID NO: 2624805 - RNA, 19 nt, Artificial Sequence
  Description of Artificial Sequence: Synthetic oligonucleotide
ucagagggagaugcuuccu

SEQ ID NO: 2624806 - RNA, 19 nt, Artificial Sequence
  Description of Artificial Sequence: Synthetic oligonucleotide
cagaugugucugccgucgg

SEQ ID NO: 2624807 - RNA, 19 nt, Artificial Sequence
  Description of Artificial Sequence: Synthetic oligonucleotide
ccucuuucgacucaagaaa

SEQ ID NO: 2624808 - RNA, 19 nt, Artificial Sequence
  Description of Artificial Sequence: Synthetic oligonucleotide
caggcgcagcuccuguugc

SEQ ID NO: 2624809 - RNA, 19 nt, Artificial Sequence
  Description of Artificial Sequence: Synthetic oligonucleotide
uugcucagagggagaugcu

SEQ ID NO: 2624810 - RNA, 19 nt, Artificial Sequence
  Description of Artificial Sequence: Synthetic oligonucleotide
gaccggugcuucuucaacu

SEQ ID NO: 2624811 - RNA, 19 nt, Artificial Sequence
  Description of Artificial Sequence: Synthetic oligonucleotide
gaugugucugccgucggcu

SEQ ID NO: 2624812 - RNA, 19 nt, Artificial Sequence
  Description of Artificial Sequence: Synthetic oligonucleotide
gcuucuugcuacguuucag

SEQ ID NO: 2624813 - RNA, 19 nt, Artificial Sequence
  Description of Artificial Sequence: Synthetic oligonucleotide
ucagugcuccuuccagcua

SEQ ID NO: 2624814 - RNA, 19 nt, Artificial Sequence
  Description of Artificial Sequence: Synthetic oligonucleotide
ccgaugaagcagcugcugc

SEQ ID NO: 2624815 - RNA, 19 nt, Artificial Sequence
  Description of Artificial Sequence: Synthetic oligonucleotide
gucagaugugucugccguc

SEQ ID NO: 2624816 - RNA, 19 nt, Artificial Sequence
  Description of Artificial Sequence: Synthetic oligonucleotide
cucauugcucagagggaga

SEQ ID NO: 2624817 - RNA, 19 nt, Artificial Sequence
  Description of Artificial Sequence: Synthetic oligonucleotide
cucgaauaucguucaggaa

SEQ ID NO: 2624818 - RNA, 19 nt, Artificial Sequence
  Description of Artificial Sequence: Synthetic oligonucleotide
gucaaauaucucaggguua

SEQ ID NO: 2624819 - RNA, 19 nt, Artificial Sequence
  Description of Artificial Sequence: Synthetic oligonucleotide
cuggggcuuugcuucucag

SEQ ID NO: 2624820 - RNA, 19 nt, Artificial Sequence
  Description of Artificial Sequence: Synthetic oligonucleotide
agcuaccaccuguuucgca

SEQ ID NO: 2624821 - RNA, 19 nt, Artificial Sequence
  Description of Artificial Sequence: Synthetic oligonucleotide
cuucucagugcuccuucca

SEQ ID NO: 2624822 - RNA, 19 nt, Artificial Sequence
  Description of Artificial Sequence: Synthetic oligonucleotide
gcuguuccauccgaugaag

SEQ ID NO: 2624823 - RNA, 19 nt, Artificial Sequence
  Description of Artificial Sequence: Synthetic oligonucleotide
gggaacaaccugacguaag

SEQ ID NO: 2624824 - RNA, 19 nt, Artificial Sequence
  Description of Artificial Sequence: Synthetic oligonucleotide
ugcuuucguuccugcugug

SEQ ID NO: 2624825 - RNA, 19 nt, Artificial Sequence
  Description of Artificial Sequence: Synthetic oligonucleotide
cagcuccucaaaugacaug

SEQ ID NO: 2624826 - RNA, 19 nt, Artificial Sequence
  Description of Artificial Sequence: Synthetic oligonucleotide
gggcuuugcuucucagugc

SEQ ID NO: 2624827 - RNA, 19 nt, Artificial Sequence
  Description of Artificial Sequence: Synthetic oligonucleotide
aggucggugcuuaucugca

SEQ ID NO: 2624828 - RNA, 19 nt, Artificial Sequence
  Description of Artificial Sequence: Synthetic oligonucleotide
cucagugcuccuuccagcu

SEQ ID NO: 2624829 - RNA, 19 nt, Artificial Sequence
  Description of Artificial Sequence: Synthetic oligonucleotide
cagaggucggugcuuaucu

SEQ ID NO: 2624830 - RNA, 19 nt, Artificial Sequence
  Description of Artificial Sequence: Synthetic oligonucleotide
cucaggguuauacuccccu

SEQ ID NO: 2624831 - RNA, 19 nt, Artificial Sequence
  Description of Artificial Sequence: Synthetic oligonucleotide
cugacguaagaauggcacu

SEQ ID NO: 2624832 - RNA, 19 nt, Artificial Sequence
  Description of Artificial Sequence: Synthetic oligonucleotide
gucugccgucggcuggucg

SEQ ID NO: 2624833 - RNA, 19 nt, Artificial Sequence
  Description of Artificial Sequence: Synthetic oligonucleotide
ugcauuccggcgccucuuu

SEQ ID NO: 2624834 - RNA, 19 nt, Artificial Sequence
  Description of Artificial Sequence: Synthetic oligonucleotide
uccuguccuugccugcauu

SEQ ID NO: 2624835 - RNA, 19 nt, Artificial Sequence
  Description of Artificial Sequence: Synthetic oligonucleotide
accugacguaagaauggca

SEQ ID NO: 2624836 - RNA, 19 nt, Artificial Sequence
  Description of Artificial Sequence: Synthetic oligonucleotide
uccuuccagcuaccaccug

SEQ ID NO: 2624837 - RNA, 19 nt, Artificial Sequence
  Description of Artificial Sequence: Synthetic oligonucleotide
cauugcucagagggagaug

SEQ ID NO: 2624838 - RNA, 19 nt, Artificial Sequence
  Description of Artificial Sequence: Synthetic oligonucleotide
ccuguuucgcaugccuugg

SEQ ID NO: 2624839 - RNA, 19 nt, Artificial Sequence
  Description of Artificial Sequence: Synthetic oligonucleotide
uuccagcuaccaccuguuu

SEQ ID NO: 2624840 - RNA, 19 nt, Artificial Sequence
  Description of Artificial Sequence: Synthetic oligonucleotide
ggguuauacuccccugaca

SEQ ID NO: 2624841 - RNA, 19 nt, Artificial Sequence
  Description of Artificial Sequence: Synthetic oligonucleotide
cuguugugccagagcccgc

SEQ ID NO: 2624842 - RNA, 19 nt, Artificial Sequence
  Description of Artificial Sequence: Synthetic oligonucleotide
cugcuuucguuccugcugu

SEQ ID NO: 2624843 - RNA, 19 nt, Artificial Sequence
  Description of Artificial Sequence: Synthetic oligonucleotide
cacucgaacuuuggcugac

SEQ ID NO: 2624844 - RNA, 19 nt, Artificial Sequence
  Description of Artificial Sequence: Synthetic oligonucleotide
auccgaugaagcagcugcu

SEQ ID NO: 2624845 - RNA, 19 nt, Artificial Sequence
  Description of Artificial Sequence: Synthetic oligonucleotide
acaguguuccuuacucauu

SEQ ID NO: 2624846 - RNA, 19 nt, Artificial Sequence
  Description of Artificial Sequence: Synthetic oligonucleotide
augacccuguugugccaga

SEQ ID NO: 2624847 - RNA, 19 nt, Artificial Sequence
  Description of Artificial Sequence: Synthetic oligonucleotide
ccuguccuugccugcauuc

SEQ ID NO: 2624848 - RNA, 19 nt, Artificial Sequence
  Description of Artificial Sequence: Synthetic oligonucleotide
gcuaccaccuguuucgcau

SEQ ID NO: 2624849 - RNA, 19 nt, Artificial Sequence
  Description of Artificial Sequence: Synthetic oligonucleotide
aacuggcgcugcucagauu

SEQ ID NO: 2624850 - RNA, 19 nt, Artificial Sequence
  Description of Artificial Sequence: Synthetic oligonucleotide
acucgaacuuuggcugaca

SEQ ID NO: 2624851 - RNA, 19 nt, Artificial Sequence
  Description of Artificial Sequence: Synthetic oligonucleotide
gcucagagggagaugcuuc

SEQ ID NO: 2624852 - RNA, 19 nt, Artificial Sequence
  Description of Artificial Sequence: Synthetic oligonucleotide
cugcgacaguguuccuuac

SEQ ID NO: 2624853 - RNA, 19 nt, Artificial Sequence
  Description of Artificial Sequence: Synthetic oligonucleotide
agggccaacuggcgcugcu

SEQ ID NO: 2624854 - RNA, 19 nt, Artificial Sequence
  Description of Artificial Sequence: Synthetic oligonucleotide
gcugacauuuccagagguc

SEQ ID NO: 2624855 - RNA, 19 nt, Artificial Sequence
  Description of Artificial Sequence: Synthetic oligonucleotide
uuccggcgccucuuucgac

SEQ ID NO: 2624856 - RNA, 19 nt, Artificial Sequence
  Description of Artificial Sequence: Synthetic oligonucleotide
uacuccccugacagaucau

SEQ ID NO: 2624857 - RNA, 19 nt, Artificial Sequence
  Description of Artificial Sequence: Synthetic oligonucleotide
uugcuacguuucagcuccu

SEQ ID NO: 2624858 - RNA, 19 nt, Artificial Sequence
  Description of Artificial Sequence: Synthetic oligonucleotide
gcuagggccaacuggcgcu

SEQ ID NO: 2624859 - RNA, 19 nt, Artificial Sequence
  Description of Artificial Sequence: Synthetic oligonucleotide
ggcugacauuuccagaggu

SEQ ID NO: 2624860 - RNA, 19 nt, Artificial Sequence
  Description of Artificial Sequence: Synthetic oligonucleotide
cccuguugugccagagccc

SEQ ID NO: 2624861 - RNA, 19 nt, Artificial Sequence
  Description of Artificial Sequence: Synthetic oligonucleotide
cuucgaggccaggcgcagc

SEQ ID NO: 2624862 - RNA, 19 nt, Artificial Sequence
  Description of Artificial Sequence: Synthetic oligonucleotide
gggagaugcuuccuguccu

SEQ ID NO: 2624863 - RNA, 19 nt, Artificial Sequence
  Description of Artificial Sequence: Synthetic oligonucleotide
cuggcgcugcucagauuuc

SEQ ID NO: 2624864 - RNA, 19 nt, Artificial Sequence
  Description of Artificial Sequence: Synthetic oligonucleotide
cuccuuccagcuaccaccu

SEQ ID NO: 2624865 - RNA, 19 nt, Artificial Sequence
  Description of Artificial Sequence: Synthetic oligonucleotide
ccuacagauccaggucucc

SEQ ID NO: 2624866 - RNA, 19 nt, Artificial Sequence
  Description of Artificial Sequence: Synthetic oligonucleotide
uauggccgaugacccuguu

SEQ ID NO: 2624867 - RNA, 19 nt, Artificial Sequence
  Description of Artificial Sequence: Synthetic oligonucleotide
cucgaacuuuggcugacau

SEQ ID NO: 2624868 - RNA, 19 nt, Artificial Sequence
  Description of Artificial Sequence: Synthetic oligonucleotide
gcacucgaacuuuggcuga

SEQ ID NO: 2624869 - RNA, 19 nt, Artificial Sequence
  Description of Artificial Sequence: Synthetic oligonucleotide
cgaacuuuggcugacauuu

SEQ ID NO: 2624870 - RNA, 19 nt, Artificial Sequence
  Description of Artificial Sequence: Synthetic oligonucleotide
cugccgucggcuggucgcc

SEQ ID NO: 2624871 - RNA, 19 nt, Artificial Sequence
  Description of Artificial Sequence: Synthetic oligonucleotide
ucgcaugccuugggucccc

SEQ ID NO: 2624872 - RNA, 19 nt, Artificial Sequence
  Description of Artificial Sequence: Synthetic oligonucleotide
ccggugcuucuucaacugc

SEQ ID NO: 2624873 - RNA, 19 nt, Artificial Sequence
  Description of Artificial Sequence: Synthetic oligonucleotide
caacuccaacagcuccuca

SEQ ID NO: 2624874 - RNA, 19 nt, Artificial Sequence
  Description of Artificial Sequence: Synthetic oligonucleotide
ugcuacguuucagcuccuu

SEQ ID NO: 2624875 - RNA, 19 nt, Artificial Sequence
  Description of Artificial Sequence: Synthetic oligonucleotide
cgaugaagcagcugcugca

SEQ ID NO: 2624876 - RNA, 19 nt, Artificial Sequence
  Description of Artificial Sequence: Synthetic oligonucleotide
ccugcgacaguguuccuua

SEQ ID NO: 2624877 - RNA, 19 nt, Artificial Sequence
  Description of Artificial Sequence: Synthetic oligonucleotide
guucaggaauugguaaguu

SEQ ID NO: 2624878 - RNA, 19 nt, Artificial Sequence
  Description of Artificial Sequence: Synthetic oligonucleotide
ggccgaugacccuguugug

SEQ ID NO: 2624879 - RNA, 19 nt, Artificial Sequence
  Description of Artificial Sequence: Synthetic oligonucleotide
cgaggccaggcgcagcucc

SEQ ID NO: 2624880 - RNA, 19 nt, Artificial Sequence
  Description of Artificial Sequence: Synthetic oligonucleotide
cgcugcucagauuucuuca

SEQ ID NO: 2624881 - RNA, 19 nt, Artificial Sequence
  Description of Artificial Sequence: Synthetic oligonucleotide
cguaagaauggcacucgaa

SEQ ID NO: 2624882 - RNA, 19 nt, Artificial Sequence
  Description of Artificial Sequence: Synthetic oligonucleotide
gcuucgaggccaggcgcag

SEQ ID NO: 2624883 - RNA, 19 nt, Artificial Sequence
  Description of Artificial Sequence: Synthetic oligonucleotide
caaauaucucaggguuaua

SEQ ID NO: 2624884 - RNA, 19 nt, Artificial Sequence
  Description of Artificial Sequence: Synthetic oligonucleotide
ccccugacagaucaucaaa

SEQ ID NO: 2624885 - RNA, 19 nt, Artificial Sequence
  Description of Artificial Sequence: Synthetic oligonucleotide
caacuggcgcugcucagau

SEQ ID NO: 2624886 - RNA, 19 nt, Artificial Sequence
  Description of Artificial Sequence: Synthetic oligonucleotide
ggucggugcuuaucugcaa

SEQ ID NO: 2624887 - RNA, 19 nt, Artificial Sequence
  Description of Artificial Sequence: Synthetic oligonucleotide
cgaccggugcuucuucaac

SEQ ID NO: 2624888 - RNA, 19 nt, Artificial Sequence
  Description of Artificial Sequence: Synthetic oligonucleotide
ccagaggucggugcuuauc

SEQ ID NO: 2624889 - RNA, 19 nt, Artificial Sequence
  Description of Artificial Sequence: Synthetic oligonucleotide
ucgaggccaggcgcagcuc

SEQ ID NO: 2624890 - RNA, 19 nt, Artificial Sequence
  Description of Artificial Sequence: Synthetic oligonucleotide
ggggucucgggcuaccuuu

SEQ ID NO: 2624891 - RNA, 19 nt, Artificial Sequence
  Description of Artificial Sequence: Synthetic oligonucleotide
ucguuccugcugugccauu

SEQ ID NO: 2624892 - RNA, 19 nt, Artificial Sequence
  Description of Artificial Sequence: Synthetic oligonucleotide
gcaacacacacggguuguc

SEQ ID NO: 2624893 - RNA, 19 nt, Artificial Sequence
  Description of Artificial Sequence: Synthetic oligonucleotide
caccuguuucgcaugccuu

SEQ ID NO: 2624894 - RNA, 19 nt, Artificial Sequence
  Description of Artificial Sequence: Synthetic oligonucleotide
cgaauaucguucaggaauu

SEQ ID NO: 2624895 - RNA, 19 nt, Artificial Sequence
  Description of Artificial Sequence: Synthetic oligonucleotide
gcauuccggcgccucuuuc

SEQ ID NO: 2624896 - RNA, 19 nt, Artificial Sequence
  Description of Artificial Sequence: Synthetic oligonucleotide
cggugcuuaucugcaacac

SEQ ID NO: 2624897 - RNA, 19 nt, Artificial Sequence
  Description of Artificial Sequence: Synthetic oligonucleotide
ccauccgaugaagcagcug

SEQ ID NO: 2624898 - RNA, 19 nt, Artificial Sequence
  Description of Artificial Sequence: Synthetic oligonucleotide
ucccugcgacaguguuccu

SEQ ID NO: 2624899 - RNA, 19 nt, Artificial Sequence
  Description of Artificial Sequence: Synthetic oligonucleotide
guauggccgaugacccugu

SEQ ID NO: 2624900 - RNA, 19 nt, Artificial Sequence
  Description of Artificial Sequence: Synthetic oligonucleotide
ugucugccgucggcugguc

SEQ ID NO: 2624901 - RNA, 19 nt, Artificial Sequence
  Description of Artificial Sequence: Synthetic oligonucleotide
ccaacuggcgcugcucaga

SEQ ID NO: 2624902 - RNA, 19 nt, Artificial Sequence
  Description of Artificial Sequence: Synthetic oligonucleotide
gucuggggcuuugcuucuc

SEQ ID NO: 2624903 - RNA, 19 nt, Artificial Sequence
  Description of Artificial Sequence: Synthetic oligonucleotide
ggagaugcuuccuguccuu

SEQ ID NO: 2624904 - RNA, 19 nt, Artificial Sequence
  Description of Artificial Sequence: Synthetic oligonucleotide
ccggcgccucuuucgacuc

SEQ ID NO: 2624905 - RNA, 19 nt, Artificial Sequence
  Description of Artificial Sequence: Synthetic oligonucleotide
gagcccgccgcuccugcuu

SEQ ID NO: 2624906 - RNA, 19 nt, Artificial Sequence
  Description of Artificial Sequence: Synthetic oligonucleotide
ggcgccucuuucgacucaa

SEQ ID NO: 2624907 - RNA, 19 nt, Artificial Sequence
  Description of Artificial Sequence: Synthetic oligonucleotide
cgccucuuucgacucaaga

SEQ ID NO: 2624908 - RNA, 19 nt, Artificial Sequence
  Description of Artificial Sequence: Synthetic oligonucleotide
acggguugucuggggcuuu

SEQ ID NO: 2624909 - RNA, 19 nt, Artificial Sequence
  Description of Artificial Sequence: Synthetic oligonucleotide
gggccaacuggcgcugcuc

SEQ ID NO: 2624910 - RNA, 19 nt, Artificial Sequence
  Description of Artificial Sequence: Synthetic oligonucleotide
ccccuuggcucugcaacuc

SEQ ID NO: 2624911 - RNA, 19 nt, Artificial Sequence
  Description of Artificial Sequence: Synthetic oligonucleotide
cguucaggaauugguaagu

SEQ ID NO: 2624912 - RNA, 19 nt, Artificial Sequence
  Description of Artificial Sequence: Synthetic oligonucleotide
cccgaccggugcuucuuca

SEQ ID NO: 2624913 - RNA, 19 nt, Artificial Sequence
  Description of Artificial Sequence: Synthetic oligonucleotide
ccgaccggugcuucuucaa

SEQ ID NO: 2624914 - RNA, 19 nt, Artificial Sequence
  Description of Artificial Sequence: Synthetic oligonucleotide
cuccagcuucuugcuacgu

SEQ ID NO: 2624915 - RNA, 19 nt, Artificial Sequence
  Description of Artificial Sequence: Synthetic oligonucleotide
cacggguugucuggggcuu

SEQ ID NO: 2624916 - RNA, 19 nt, Artificial Sequence
  Description of Artificial Sequence: Synthetic oligonucleotide
caggucucccugcgacagu

SEQ ID NO: 2624917 - RNA, 19 nt, Artificial Sequence
  Description of Artificial Sequence: Synthetic oligonucleotide
ccauuucuugcuguuccau

SEQ ID NO: 2624918 - RNA, 19 nt, Artificial Sequence
  Description of Artificial Sequence: Synthetic oligonucleotide
ccccgaccggugcuucuuc

SEQ ID NO: 2624919 - RNA, 19 nt, Artificial Sequence
  Description of Artificial Sequence: Synthetic oligonucleotide
ggccaggcgcagcuccugu

SEQ ID NO: 2624920 - RNA, 19 nt, Artificial Sequence
  Description of Artificial Sequence: Synthetic oligonucleotide
gggucucgggcuaccuuuu

SEQ ID NO: 2624921 - RNA, 19 nt, Artificial Sequence
  Description of Artificial Sequence: Synthetic oligonucleotide
gccaggcgcagcuccuguu

SEQ ID NO: 2624922 - RNA, 19 nt, Artificial Sequence
  Description of Artificial Sequence: Synthetic oligonucleotide
cccugcgacaguguuccuu

SEQ ID NO: 2624923 - RNA, 19 nt, Artificial Sequence
  Description of Artificial Sequence: Synthetic oligonucleotide
cguuccugcugugccauuu

SEQ ID NO: 2624924 - RNA, 19 nt, Artificial Sequence
  Description of Artificial Sequence: Synthetic oligonucleotide
cggcgccucuuucgacuca

SEQ ID NO: 2624925 - RNA, 19 nt, Artificial Sequence
  Description of Artificial Sequence: Synthetic oligonucleotide
aacauauaauccuaccacc

SEQ ID NO: 2624926 - RNA, 19 nt, Artificial Sequence
  Description of Artificial Sequence: Synthetic oligonucleotide
acauauggcaggcagaugc

SEQ ID NO: 2624927 - RNA, 19 nt, Artificial Sequence
  Description of Artificial Sequence: Synthetic oligonucleotide
auaaucauaucacuaaggg

SEQ ID NO: 2624928 - RNA, 19 nt, Artificial Sequence
  Description of Artificial Sequence: Synthetic oligonucleotide
aaucauaucacuaaggggu

SEQ ID NO: 2624929 - RNA, 19 nt, Artificial Sequence
  Description of Artificial Sequence: Synthetic oligonucleotide
uauacuuucauuacaauaa

SEQ ID NO: 2624930 - RNA, 19 nt, Artificial Sequence
  Description of Artificial Sequence: Synthetic oligonucleotide
aguauaugaauugauauac

SEQ ID NO: 2624931 - RNA, 19 nt, Artificial Sequence
  Description of Artificial Sequence: Synthetic oligonucleotide
aaaauaauguuugugacca

SEQ ID NO: 2624932 - RNA, 19 nt, Artificial Sequence
  Description of Artificial Sequence: Synthetic oligonucleotide
aauauguuaauaucaguga

SEQ ID NO: 2624933 - RNA, 19 nt, Artificial Sequence
  Description of Artificial Sequence: Synthetic oligonucleotide
uuucauuacaauaaauucu

SEQ ID NO: 2624934 - RNA, 19 nt, Artificial Sequence
  Description of Artificial Sequence: Synthetic oligonucleotide
aacuucaaacauauaaucc

SEQ ID NO: 2624935 - RNA, 19 nt, Artificial Sequence
  Description of Artificial Sequence: Synthetic oligonucleotide
uuacuuaucauuucuacca

SEQ ID NO: 2624936 - RNA, 19 nt, Artificial Sequence
  Description of Artificial Sequence: Synthetic oligonucleotide
uuaucaauggauucuauga

SEQ ID NO: 2624937 - RNA, 19 nt, Artificial Sequence
  Description of Artificial Sequence: Synthetic oligonucleotide
ucuauauauacuuucauua

SEQ ID NO: 2624938 - RNA, 19 nt, Artificial Sequence
  Description of Artificial Sequence: Synthetic oligonucleotide
auauguuaauaucagugac

SEQ ID NO: 2624939 - RNA, 19 nt, Artificial Sequence
  Description of Artificial Sequence: Synthetic oligonucleotide
aaauuaaaggacaagcuug

SEQ ID NO: 2624940 - RNA, 19 nt, Artificial Sequence
  Description of Artificial Sequence: Synthetic oligonucleotide
caauauguuaauaucagug

SEQ ID NO: 2624941 - RNA, 19 nt, Artificial Sequence
  Description of Artificial Sequence: Synthetic oligonucleotide
uauacuagauaauuccuag

SEQ ID NO: 2624942 - RNA, 19 nt, Artificial Sequence
  Description of Artificial Sequence: Synthetic oligonucleotide
gauaauuccuaguauauga

SEQ ID NO: 2624943 - RNA, 19 nt, Artificial Sequence
  Description of Artificial Sequence: Synthetic oligonucleotide
uauaacaugacagaguuuc

SEQ ID NO: 2624944 - RNA, 19 nt, Artificial Sequence
  Description of Artificial Sequence: Synthetic oligonucleotide
auggucuuacaguaaaugc

SEQ ID NO: 2624945 - RNA, 19 nt, Artificial Sequence
  Description of Artificial Sequence: Synthetic oligonucleotide
uaagucaggaguuacauaa

SEQ ID NO: 2624946 - RNA, 19 nt, Artificial Sequence
  Description of Artificial Sequence: Synthetic oligonucleotide
uguaacccaaauuaaagga

SEQ ID NO: 2624947 - RNA, 19 nt, Artificial Sequence
  Description of Artificial Sequence: Synthetic oligonucleotide
aaugcaagugaaauacugc

SEQ ID NO: 2624948 - RNA, 19 nt, Artificial Sequence
  Description of Artificial Sequence: Synthetic oligonucleotide
uguuuacucaguaacacac

SEQ ID NO: 2624949 - RNA, 19 nt, Artificial Sequence
  Description of Artificial Sequence: Synthetic oligonucleotide
ugauauacuaauuacuuau

SEQ ID NO: 2624950 - RNA, 19 nt, Artificial Sequence
  Description of Artificial Sequence: Synthetic oligonucleotide
uaaucauaucacuaagggg

SEQ ID NO: 2624951 - RNA, 19 nt, Artificial Sequence
  Description of Artificial Sequence: Synthetic oligonucleotide
ucauuucaauuucucaugg

SEQ ID NO: 2624952 - RNA, 19 nt, Artificial Sequence
  Description of Artificial Sequence: Synthetic oligonucleotide
auugcuguaacccaaauua

SEQ ID NO: 2624953 - RNA, 19 nt, Artificial Sequence
  Description of Artificial Sequence: Synthetic oligonucleotide
ugaauugauauacuaauua

SEQ ID NO: 2624954 - RNA, 19 nt, Artificial Sequence
  Description of Artificial Sequence: Synthetic oligonucleotide
uccaauauguuaauaucag

SEQ ID NO: 2624955 - RNA, 19 nt, Artificial Sequence
  Description of Artificial Sequence: Synthetic oligonucleotide
ucuaccagaacuucaaaca

SEQ ID NO: 2624956 - RNA, 19 nt, Artificial Sequence
  Description of Artificial Sequence: Synthetic oligonucleotide
agcaaaauaauguuuguga

SEQ ID NO: 2624957 - RNA, 19 nt, Artificial Sequence
  Description of Artificial Sequence: Synthetic oligonucleotide
aaaauuuggcuuucuggag

SEQ ID NO: 2624958 - RNA, 19 nt, Artificial Sequence
  Description of Artificial Sequence: Synthetic oligonucleotide
aucuuuauccccuugguug

SEQ ID NO: 2624959 - RNA, 19 nt, Artificial Sequence
  Description of Artificial Sequence: Synthetic oligonucleotide
gaauugauauacuaauuac

SEQ ID NO: 2624960 - RNA, 19 nt, Artificial Sequence
  Description of Artificial Sequence: Synthetic oligonucleotide
auacugaugauuuuagaug

SEQ ID NO: 2624961 - RNA, 19 nt, Artificial Sequence
  Description of Artificial Sequence: Synthetic oligonucleotide
aguuacauaaucauaucac

SEQ ID NO: 2624962 - RNA, 19 nt, Artificial Sequence
  Description of Artificial Sequence: Synthetic oligonucleotide
aggggugugauuuaucugg

SEQ ID NO: 2624963 - RNA, 19 nt, Artificial Sequence
  Description of Artificial Sequence: Synthetic oligonucleotide
cauaaucauaucacuaagg

SEQ ID NO: 2624964 - RNA, 19 nt, Artificial Sequence
  Description of Artificial Sequence: Synthetic oligonucleotide
guaaaugcaagugaaauac

SEQ ID NO: 2624965 - RNA, 19 nt, Artificial Sequence
  Description of Artificial Sequence: Synthetic oligonucleotide
aauaucagugacuccucuc

SEQ ID NO: 2624966 - RNA, 19 nt, Artificial Sequence
  Description of Artificial Sequence: Synthetic oligonucleotide
uacugaugauuuuagauga

SEQ ID NO: 2624967 - RNA, 19 nt, Artificial Sequence
  Description of Artificial Sequence: Synthetic oligonucleotide
aauugauauacuaauuacu

SEQ ID NO: 2624968 - RNA, 19 nt, Artificial Sequence
  Description of Artificial Sequence: Synthetic oligonucleotide
uucauuacaauaaauucuu

SEQ ID NO: 2624969 - RNA, 19 nt, Artificial Sequence
  Description of Artificial Sequence: Synthetic oligonucleotide
ucaauggauucuaugagcu

SEQ ID NO: 2624970 - RNA, 19 nt, Artificial Sequence
  Description of Artificial Sequence: Synthetic oligonucleotide
caaaauaauguuugugacc

SEQ ID NO: 2624971 - RNA, 19 nt, Artificial Sequence
  Description of Artificial Sequence: Synthetic oligonucleotide
aaaaugguauuucaacuau

SEQ ID NO: 2624972 - RNA, 19 nt, Artificial Sequence
  Description of Artificial Sequence: Synthetic oligonucleotide
uuuaucaauggauucuaug

SEQ ID NO: 2624973 - RNA, 19 nt, Artificial Sequence
  Description of Artificial Sequence: Synthetic oligonucleotide
gaugauuuuagaugaacuc

SEQ ID NO: 2624974 - RNA, 19 nt, Artificial Sequence
  Description of Artificial Sequence: Synthetic oligonucleotide
aacucuccuacacuggguc

SEQ ID NO: 2624975 - RNA, 19 nt, Artificial Sequence
  Description of Artificial Sequence: Synthetic oligonucleotide
ugaugauuuuagaugaacu

SEQ ID NO: 2624976 - RNA, 19 nt, Artificial Sequence
  Description of Artificial Sequence: Synthetic oligonucleotide
uuacaguaaaugcaaguga

SEQ ID NO: 2624977 - RNA, 19 nt, Artificial Sequence
  Description of Artificial Sequence: Synthetic oligonucleotide
uggucuuacaguaaaugca

SEQ ID NO: 2624978 - RNA, 19 nt, Artificial Sequence
  Description of Artificial Sequence: Synthetic oligonucleotide
auauacuaauuacuuauca

SEQ ID NO: 2624979 - RNA, 19 nt, Artificial Sequence
  Description of Artificial Sequence: Synthetic oligonucleotide
auuacaauaaauucuuaua

SEQ ID NO: 2624980 - RNA, 19 nt, Artificial Sequence
  Description of Artificial Sequence: Synthetic oligonucleotide
uauaugaauugauauacua

SEQ ID NO: 2624981 - RNA, 19 nt, Artificial Sequence
  Description of Artificial Sequence: Synthetic oligonucleotide
cuguaacccaaauuaaagg

SEQ ID NO: 2624982 - RNA, 19 nt, Artificial Sequence
  Description of Artificial Sequence: Synthetic oligonucleotide
cugauuaauacagagauca

SEQ ID NO: 2624983 - RNA, 19 nt, Artificial Sequence
  Description of Artificial Sequence: Synthetic oligonucleotide
ucuuuauccccuugguugg

SEQ ID NO: 2624984 - RNA, 19 nt, Artificial Sequence
  Description of Artificial Sequence: Synthetic oligonucleotide
aucuuagggauacugauga

SEQ ID NO: 2624985 - RNA, 19 nt, Artificial Sequence
  Description of Artificial Sequence: Synthetic oligonucleotide
auuccuaguauaugaauug

SEQ ID NO: 2624986 - RNA, 19 nt, Artificial Sequence
  Description of Artificial Sequence: Synthetic oligonucleotide
aguuuccaucuauauauac

SEQ ID NO: 2624987 - RNA, 19 nt, Artificial Sequence
  Description of Artificial Sequence: Synthetic oligonucleotide
acauauaauccuaccaccc

SEQ ID NO: 2624988 - RNA, 19 nt, Artificial Sequence
  Description of Artificial Sequence: Synthetic oligonucleotide
gauuuaucuggagauauug

SEQ ID NO: 2624989 - RNA, 19 nt, Artificial Sequence
  Description of Artificial Sequence: Synthetic oligonucleotide
aaaugcaagugaaauacug

SEQ ID NO: 2624990 - RNA, 19 nt, Artificial Sequence
  Description of Artificial Sequence: Synthetic oligonucleotide
ucaaacauauaauccuacc

SEQ ID NO: 2624991 - RNA, 19 nt, Artificial Sequence
  Description of Artificial Sequence: Synthetic oligonucleotide
ugauuuuagaugaacucuc

SEQ ID NO: 2624992 - RNA, 19 nt, Artificial Sequence
  Description of Artificial Sequence: Synthetic oligonucleotide
auaauccuaccacccagcc

SEQ ID NO: 2624993 - RNA, 19 nt, Artificial Sequence
  Description of Artificial Sequence: Synthetic oligonucleotide
auauaauccuaccacccag

SEQ ID NO: 2624994 - RNA, 19 nt, Artificial Sequence
  Description of Artificial Sequence: Synthetic oligonucleotide
gauauugcuugcuucugag

SEQ ID NO: 2624995 - RNA, 19 nt, Artificial Sequence
  Description of Artificial Sequence: Synthetic oligonucleotide
acauaaucauaucacuaag

SEQ ID NO: 2624996 - RNA, 19 nt, Artificial Sequence
  Description of Artificial Sequence: Synthetic oligonucleotide
uacuagauaauuccuagua

SEQ ID NO: 2624997 - RNA, 19 nt, Artificial Sequence
  Description of Artificial Sequence: Synthetic oligonucleotide
uacucaguaacacacucac

SEQ ID NO: 2624998 - RNA, 19 nt, Artificial Sequence
  Description of Artificial Sequence: Synthetic oligonucleotide
uacuaauuacuuaucauuu

SEQ ID NO: 2624999 - RNA, 19 nt, Artificial Sequence
  Description of Artificial Sequence: Synthetic oligonucleotide
uuacauaaucauaucacua

SEQ ID NO: 2625000 - RNA, 19 nt, Artificial Sequence
  Description of Artificial Sequence: Synthetic oligonucleotide
aacacacucacuuuaucaa

SEQ ID NO: 2625001 - RNA, 19 nt, Artificial Sequence
  Description of Artificial Sequence: Synthetic oligonucleotide
ugaugagugggauacuuug

SEQ ID NO: 2625002 - RNA, 19 nt, Artificial Sequence
  Description of Artificial Sequence: Synthetic oligonucleotide
uuuacucaguaacacacuc

SEQ ID NO: 2625003 - RNA, 19 nt, Artificial Sequence
  Description of Artificial Sequence: Synthetic oligonucleotide
uauacuaauuacuuaucau

SEQ ID NO: 2625004 - RNA, 19 nt, Artificial Sequence
  Description of Artificial Sequence: Synthetic oligonucleotide
gugaccaugaguuuucccc

SEQ ID NO: 2625005 - RNA, 19 nt, Artificial Sequence
  Description of Artificial Sequence: Synthetic oligonucleotide
ugccguaucaucuuaggga

SEQ ID NO: 2625006 - RNA, 19 nt, Artificial Sequence
  Description of Artificial Sequence: Synthetic oligonucleotide
cuuacaguaaaugcaagug

SEQ ID NO: 2625007 - RNA, 19 nt, Artificial Sequence
  Description of Artificial Sequence: Synthetic oligonucleotide
uaaauucuuauacuagaua

SEQ ID NO: 2625008 - RNA, 19 nt, Artificial Sequence
  Description of Artificial Sequence: Synthetic oligonucleotide
auauacuuucauuacaaua

SEQ ID NO: 2625009 - RNA, 19 nt, Artificial Sequence
  Description of Artificial Sequence: Synthetic oligonucleotide
uuauacuagauaauuccua

SEQ ID NO: 2625010 - RNA, 19 nt, Artificial Sequence
  Description of Artificial Sequence: Synthetic oligonucleotide
ugcaagugaaauacugcag

SEQ ID NO: 2625011 - RNA, 19 nt, Artificial Sequence
  Description of Artificial Sequence: Synthetic oligonucleotide
ucuuacaguaaaugcaagu

SEQ ID NO: 2625012 - RNA, 19 nt, Artificial Sequence
  Description of Artificial Sequence: Synthetic oligonucleotide
uauaauccuaccacccagc

SEQ ID NO: 2625013 - RNA, 19 nt, Artificial Sequence
  Description of Artificial Sequence: Synthetic oligonucleotide
uagauaauuccuaguauau

SEQ ID NO: 2625014 - RNA, 19 nt, Artificial Sequence
  Description of Artificial Sequence: Synthetic oligonucleotide
uuuuagaugaacucuccua

SEQ ID NO: 2625015 - RNA, 19 nt, Artificial Sequence
  Description of Artificial Sequence: Synthetic oligonucleotide
auuuaucuggagauauugc

SEQ ID NO: 2625016 - RNA, 19 nt, Artificial Sequence
  Description of Artificial Sequence: Synthetic oligonucleotide
uuucucauggucuuacagu

SEQ ID NO: 2625017 - RNA, 19 nt, Artificial Sequence
  Description of Artificial Sequence: Synthetic oligonucleotide
gaguuacauaaucauauca

SEQ ID NO: 2625018 - RNA, 19 nt, Artificial Sequence
  Description of Artificial Sequence: Synthetic oligonucleotide
uuaaaggacaagcuugcau

SEQ ID NO: 2625019 - RNA, 19 nt, Artificial Sequence
  Description of Artificial Sequence: Synthetic oligonucleotide
uaaggggugugauuuaucu

SEQ ID NO: 2625020 - RNA, 19 nt, Artificial Sequence
  Description of Artificial Sequence: Synthetic oligonucleotide
guauguagacuugagagug

SEQ ID NO: 2625021 - RNA, 19 nt, Artificial Sequence
  Description of Artificial Sequence: Synthetic oligonucleotide
uacuuaucauuucuaccag

SEQ ID NO: 2625022 - RNA, 19 nt, Artificial Sequence
  Description of Artificial Sequence: Synthetic oligonucleotide
auaucagugacuccucuca

SEQ ID NO: 2625023 - RNA, 19 nt, Artificial Sequence
  Description of Artificial Sequence: Synthetic oligonucleotide
uccaucuauauauacuuuc

SEQ ID NO: 2625024 - RNA, 19 nt, Artificial Sequence
  Description of Artificial Sequence: Synthetic oligonucleotide
auacuuuggaauucauuug

SEQ ID NO: 2625025 - RNA, 19 nt, Artificial Sequence
  Description of Artificial Sequence: Synthetic oligonucleotide
cagaacuucaaacauauaa

SEQ ID NO: 2625026 - RNA, 19 nt, Artificial Sequence
  Description of Artificial Sequence: Synthetic oligonucleotide
augcaagugaaauacugca

SEQ ID NO: 2625027 - RNA, 19 nt, Artificial Sequence
  Description of Artificial Sequence: Synthetic oligonucleotide
uucuaccagaacuucaaac

SEQ ID NO: 2625028 - RNA, 19 nt, Artificial Sequence
  Description of Artificial Sequence: Synthetic oligonucleotide
uaauguuugugaccaugag

SEQ ID NO: 2625029 - RNA, 19 nt, Artificial Sequence
  Description of Artificial Sequence: Synthetic oligonucleotide
augauuuuagaugaacucu

SEQ ID NO: 2625030 - RNA, 19 nt, Artificial Sequence
  Description of Artificial Sequence: Synthetic oligonucleotide
uagaugaacucuccuacac

SEQ ID NO: 2625031 - RNA, 19 nt, Artificial Sequence
  Description of Artificial Sequence: Synthetic oligonucleotide
uuuuccccacauauggcag

SEQ ID NO: 2625032 - RNA, 19 nt, Artificial Sequence
  Description of Artificial Sequence: Synthetic oligonucleotide
acacucacuuuaucaaugg

SEQ ID NO: 2625033 - RNA, 19 nt, Artificial Sequence
  Description of Artificial Sequence: Synthetic oligonucleotide
gagcuguuuacucaguaac

SEQ ID NO: 2625034 - RNA, 19 nt, Artificial Sequence
  Description of Artificial Sequence: Synthetic oligonucleotide
ugaguuuuccccacauaug

SEQ ID NO: 2625035 - RNA, 19 nt, Artificial Sequence
  Description of Artificial Sequence: Synthetic oligonucleotide
gauacugaugauuuuagau

SEQ ID NO: 2625036 - RNA, 19 nt, Artificial Sequence
  Description of Artificial Sequence: Synthetic oligonucleotide
aacaugacagaguuuccau

SEQ ID NO: 2625037 - RNA, 19 nt, Artificial Sequence
  Description of Artificial Sequence: Synthetic oligonucleotide
ugagcuguccaauauguua

SEQ ID NO: 2625038 - RNA, 19 nt, Artificial Sequence
  Description of Artificial Sequence: Synthetic oligonucleotide
guuaauaucagugacuccu

SEQ ID NO: 2625039 - RNA, 19 nt, Artificial Sequence
  Description of Artificial Sequence: Synthetic oligonucleotide
ucaucuuagggauacugau

SEQ ID NO: 2625040 - RNA, 19 nt, Artificial Sequence
  Description of Artificial Sequence: Synthetic oligonucleotide
agugacuccucucauuuca

SEQ ID NO: 2625041 - RNA, 19 nt, Artificial Sequence
  Description of Artificial Sequence: Synthetic oligonucleotide
gauucuaugagcuguccaa

SEQ ID NO: 2625042 - RNA, 19 nt, Artificial Sequence
  Description of Artificial Sequence: Synthetic oligonucleotide
ucuaugagcuguccaauau

SEQ ID NO: 2625043 - RNA, 19 nt, Artificial Sequence
  Description of Artificial Sequence: Synthetic oligonucleotide
uucucauggucuuacagua

SEQ ID NO: 2625044 - RNA, 19 nt, Artificial Sequence
  Description of Artificial Sequence: Synthetic oligonucleotide
aguaaaugcaagugaaaua

SEQ ID NO: 2625045 - RNA, 19 nt, Artificial Sequence
  Description of Artificial Sequence: Synthetic oligonucleotide
uacugcaguauguagacuu

SEQ ID NO: 2625046 - RNA, 19 nt, Artificial Sequence
  Description of Artificial Sequence: Synthetic oligonucleotide
auauugcuugcuucugagg

SEQ ID NO: 2625047 - RNA, 19 nt, Artificial Sequence
  Description of Artificial Sequence: Synthetic oligonucleotide
uugauauacuaauuacuua

SEQ ID NO: 2625048 - RNA, 19 nt, Artificial Sequence
  Description of Artificial Sequence: Synthetic oligonucleotide
uuaucauuucuaccagaac

SEQ ID NO: 2625049 - RNA, 19 nt, Artificial Sequence
  Description of Artificial Sequence: Synthetic oligonucleotide
ugcuguaacccaaauuaaa

SEQ ID NO: 2625050 - RNA, 19 nt, Artificial Sequence
  Description of Artificial Sequence: Synthetic oligonucleotide
uaaaugcaagugaaauacu

SEQ ID NO: 2625051 - RNA, 19 nt, Artificial Sequence
  Description of Artificial Sequence: Synthetic oligonucleotide
aggaguuacauaaucauau

SEQ ID NO: 2625052 - RNA, 19 nt, Artificial Sequence
  Description of Artificial Sequence: Synthetic oligonucleotide
gauuuuagaugaacucucc

SEQ ID NO: 2625053 - RNA, 19 nt, Artificial Sequence
  Description of Artificial Sequence: Synthetic oligonucleotide
ucaucuuuauccccuuggu

SEQ ID NO: 2625054 - RNA, 19 nt, Artificial Sequence
  Description of Artificial Sequence: Synthetic oligonucleotide
cuagauaauuccuaguaua

SEQ ID NO: 2625055 - RNA, 19 nt, Artificial Sequence
  Description of Artificial Sequence: Synthetic oligonucleotide
uaauuccuaguauaugaau

SEQ ID NO: 2625056 - RNA, 19 nt, Artificial Sequence
  Description of Artificial Sequence: Synthetic oligonucleotide
uugagagugggcagggaca

SEQ ID NO: 2625057 - RNA, 19 nt, Artificial Sequence
  Description of Artificial Sequence: Synthetic oligonucleotide
uuaauaucagugacuccuc

SEQ ID NO: 2625058 - RNA, 19 nt, Artificial Sequence
  Description of Artificial Sequence: Synthetic oligonucleotide
agaacuucaaacauauaau

SEQ ID NO: 2625059 - RNA, 19 nt, Artificial Sequence
  Description of Artificial Sequence: Synthetic oligonucleotide
uaauaucagugacuccucu

SEQ ID NO: 2625060 - RNA, 19 nt, Artificial Sequence
  Description of Artificial Sequence: Synthetic oligonucleotide
aaggggugugauuuaucug

SEQ ID NO: 2625061 - RNA, 19 nt, Artificial Sequence
  Description of Artificial Sequence: Synthetic oligonucleotide
uugguuggcaguugaugag

SEQ ID NO: 2625062 - RNA, 19 nt, Artificial Sequence
  Description of Artificial Sequence: Synthetic oligonucleotide
gagcaaaauaauguuugug

SEQ ID NO: 2625063 - RNA, 19 nt, Artificial Sequence
  Description of Artificial Sequence: Synthetic oligonucleotide
ugaaauacugcaguaugua

SEQ ID NO: 2625064 - RNA, 19 nt, Artificial Sequence
  Description of Artificial Sequence: Synthetic oligonucleotide
cuugguuggcaguugauga

SEQ ID NO: 2625065 - RNA, 19 nt, Artificial Sequence
  Description of Artificial Sequence: Synthetic oligonucleotide
gauauacuaauuacuuauc

SEQ ID NO: 2625066 - RNA, 19 nt, Artificial Sequence
  Description of Artificial Sequence: Synthetic oligonucleotide
cacacucacuuuaucaaug

SEQ ID NO: 2625067 - RNA, 19 nt, Artificial Sequence
  Description of Artificial Sequence: Synthetic oligonucleotide
gcaaaauaauguuugugac

SEQ ID NO: 2625068 - RNA, 19 nt, Artificial Sequence
  Description of Artificial Sequence: Synthetic oligonucleotide
ugaccaugaguuuucccca

SEQ ID NO: 2625069 - RNA, 19 nt, Artificial Sequence
  Description of Artificial Sequence: Synthetic oligonucleotide
uucaauuucucauggucuu

SEQ ID NO: 2625070 - RNA, 19 nt, Artificial Sequence
  Description of Artificial Sequence: Synthetic oligonucleotide
acucuccuacacugggucc

SEQ ID NO: 2625071 - RNA, 19 nt, Artificial Sequence
  Description of Artificial Sequence: Synthetic oligonucleotide
auaugaauugauauacuaa

SEQ ID NO: 2625072 - RNA, 19 nt, Artificial Sequence
  Description of Artificial Sequence: Synthetic oligonucleotide
cuugagagugggcagggac

SEQ ID NO: 2625073 - RNA, 19 nt, Artificial Sequence
  Description of Artificial Sequence: Synthetic oligonucleotide
cuaguauaugaauugauau

SEQ ID NO: 2625074 - RNA, 19 nt, Artificial Sequence
  Description of Artificial Sequence: Synthetic oligonucleotide
guaacccaaauuaaaggac

SEQ ID NO: 2625075 - RNA, 19 nt, Artificial Sequence
  Description of Artificial Sequence: Synthetic oligonucleotide
caucuuuuauaacaugaca

SEQ ID NO: 2625076 - RNA, 19 nt, Artificial Sequence
  Description of Artificial Sequence: Synthetic oligonucleotide
cauggucuuacaguaaaug

SEQ ID NO: 2625077 - RNA, 19 nt, Artificial Sequence
  Description of Artificial Sequence: Synthetic oligonucleotide
auacuagauaauuccuagu

SEQ ID NO: 2625078 - RNA, 19 nt, Artificial Sequence
  Description of Artificial Sequence: Synthetic oligonucleotide
uccuaguauaugaauugau

SEQ ID NO: 2625079 - RNA, 19 nt, Artificial Sequence
  Description of Artificial Sequence: Synthetic oligonucleotide
guagacuugagagugggca

SEQ ID NO: 2625080 - RNA, 19 nt, Artificial Sequence
  Description of Artificial Sequence: Synthetic oligonucleotide
auaacaugacagaguuucc

SEQ ID NO: 2625081 - RNA, 19 nt, Artificial Sequence
  Description of Artificial Sequence: Synthetic oligonucleotide
uggagauauugcuugcuuc

SEQ ID NO: 2625082 - RNA, 19 nt, Artificial Sequence
  Description of Artificial Sequence: Synthetic oligonucleotide
agauaauuccuaguauaug

SEQ ID NO: 2625083 - RNA, 19 nt, Artificial Sequence
  Description of Artificial Sequence: Synthetic oligonucleotide
aagugaaauacugcaguau

SEQ ID NO: 2625084 - RNA, 19 nt, Artificial Sequence
  Description of Artificial Sequence: Synthetic oligonucleotide
agauauugcuugcuucuga

SEQ ID NO: 2625085 - RNA, 19 nt, Artificial Sequence
  Description of Artificial Sequence: Synthetic oligonucleotide
ucacuaaggggugugauuu

SEQ ID NO: 2625086 - RNA, 19 nt, Artificial Sequence
  Description of Artificial Sequence: Synthetic oligonucleotide
cuaauuacuuaucauuucu

SEQ ID NO: 2625087 - RNA, 19 nt, Artificial Sequence
  Description of Artificial Sequence: Synthetic oligonucleotide
acaagcuugcaucuuuuau

SEQ ID NO: 2625088 - RNA, 19 nt, Artificial Sequence
  Description of Artificial Sequence: Synthetic oligonucleotide
acuccucucauuucaauuu

SEQ ID NO: 2625089 - RNA, 19 nt, Artificial Sequence
  Description of Artificial Sequence: Synthetic oligonucleotide
cccaaauuaaaggacaagc

SEQ ID NO: 2625090 - RNA, 19 nt, Artificial Sequence
  Description of Artificial Sequence: Synthetic oligonucleotide
ugauuaauacagagaucaa

SEQ ID NO: 2625091 - RNA, 19 nt, Artificial Sequence
  Description of Artificial Sequence: Synthetic oligonucleotide
cuaugagcuguccaauaug

SEQ ID NO: 2625092 - RNA, 19 nt, Artificial Sequence
  Description of Artificial Sequence: Synthetic oligonucleotide
acuuaucauuucuaccaga

SEQ ID NO: 2625093 - RNA, 19 nt, Artificial Sequence
  Description of Artificial Sequence: Synthetic oligonucleotide
auaauguuugugaccauga

SEQ ID NO: 2625094 - RNA, 19 nt, Artificial Sequence
  Description of Artificial Sequence: Synthetic oligonucleotide
gcuguaacccaaauuaaag

SEQ ID NO: 2625095 - RNA, 19 nt, Artificial Sequence
  Description of Artificial Sequence: Synthetic oligonucleotide
ugcuucugagggcugauua

SEQ ID NO: 2625096 - RNA, 19 nt, Artificial Sequence
  Description of Artificial Sequence: Synthetic oligonucleotide
uuccuaguauaugaauuga

SEQ ID NO: 2625097 - RNA, 19 nt, Artificial Sequence
  Description of Artificial Sequence: Synthetic oligonucleotide
uugcuguaacccaaauuaa

SEQ ID NO: 2625098 - RNA, 19 nt, Artificial Sequence
  Description of Artificial Sequence: Synthetic oligonucleotide
cugaugauuuuagaugaac

SEQ ID NO: 2625099 - RNA, 19 nt, Artificial Sequence
  Description of Artificial Sequence: Synthetic oligonucleotide
uguagacuugagagugggc

SEQ ID NO: 2625100 - RNA, 19 nt, Artificial Sequence
  Description of Artificial Sequence: Synthetic oligonucleotide
cugccguaucaucuuaggg

SEQ ID NO: 2625101 - RNA, 19 nt, Artificial Sequence
  Description of Artificial Sequence: Synthetic oligonucleotide
ugacagaguuuccaucuau

SEQ ID NO: 2625102 - RNA, 19 nt, Artificial Sequence
  Description of Artificial Sequence: Synthetic oligonucleotide
guuggcaguugaugagugg

SEQ ID NO: 2625103 - RNA, 19 nt, Artificial Sequence
  Description of Artificial Sequence: Synthetic oligonucleotide
uccucucauuucaauuucu

SEQ ID NO: 2625104 - RNA, 19 nt, Artificial Sequence
  Description of Artificial Sequence: Synthetic oligonucleotide
ucauuacaauaaauucuua

SEQ ID NO: 2625105 - RNA, 19 nt, Artificial Sequence
  Description of Artificial Sequence: Synthetic oligonucleotide
acucacuuuaucaauggau

SEQ ID NO: 2625106 - RNA, 19 nt, Artificial Sequence
  Description of Artificial Sequence: Synthetic oligonucleotide
cuacacuggguccaggcuc

SEQ ID NO: 2625107 - RNA, 19 nt, Artificial Sequence
  Description of Artificial Sequence: Synthetic oligonucleotide
agugggcagggacacaacu

SEQ ID NO: 2625108 - RNA, 19 nt, Artificial Sequence
  Description of Artificial Sequence: Synthetic oligonucleotide
uuaagucaggaguuacaua

SEQ ID NO: 2625109 - RNA, 19 nt, Artificial Sequence
  Description of Artificial Sequence: Synthetic oligonucleotide
uuauccccuugguuggcag

SEQ ID NO: 2625110 - RNA, 19 nt, Artificial Sequence
  Description of Artificial Sequence: Synthetic oligonucleotide
aaaauugcuguaacccaaa

SEQ ID NO: 2625111 - RNA, 19 nt, Artificial Sequence
  Description of Artificial Sequence: Synthetic oligonucleotide
ugagugggauacuuuggaa

SEQ ID NO: 2625112 - RNA, 19 nt, Artificial Sequence
  Description of Artificial Sequence: Synthetic oligonucleotide
ucaguaacacacucacuuu

SEQ ID NO: 2625113 - RNA, 19 nt, Artificial Sequence
  Description of Artificial Sequence: Synthetic oligonucleotide
ggugugauuuaucuggaga

SEQ ID NO: 2625114 - RNA, 19 nt, Artificial Sequence
  Description of Artificial Sequence: Synthetic oligonucleotide
cauuacaauaaauucuuau

SEQ ID NO: 2625115 - RNA, 19 nt, Artificial Sequence
  Description of Artificial Sequence: Synthetic oligonucleotide
ugggauacuuuggaauuca

SEQ ID NO: 2625116 - RNA, 19 nt, Artificial Sequence
  Description of Artificial Sequence: Synthetic oligonucleotide
ugcugccguaucaucuuag

SEQ ID NO: 2625117 - RNA, 19 nt, Artificial Sequence
  Description of Artificial Sequence: Synthetic oligonucleotide
cauuucuaccagaacuuca

SEQ ID NO: 2625118 - RNA, 19 nt, Artificial Sequence
  Description of Artificial Sequence: Synthetic oligonucleotide
acacacucacuuuaucaau

SEQ ID NO: 2625119 - RNA, 19 nt, Artificial Sequence
  Description of Artificial Sequence: Synthetic oligonucleotide
caugacagaguuuccaucu

SEQ ID NO: 2625120 - RNA, 19 nt, Artificial Sequence
  Description of Artificial Sequence: Synthetic oligonucleotide
gacuugagagugggcaggg

SEQ ID NO: 2625121 - RNA, 19 nt, Artificial Sequence
  Description of Artificial Sequence: Synthetic oligonucleotide
uucuaugagcuguccaaua

SEQ ID NO: 2625122 - RNA, 19 nt, Artificial Sequence
  Description of Artificial Sequence: Synthetic oligonucleotide
uuccaucuauauauacuuu

SEQ ID NO: 2625123 - RNA, 19 nt, Artificial Sequence
  Description of Artificial Sequence: Synthetic oligonucleotide
aucauuucuaccagaacuu

SEQ ID NO: 2625124 - RNA, 19 nt, Artificial Sequence
  Description of Artificial Sequence: Synthetic oligonucleotide
ucauggucuuacaguaaau

SEQ ID NO: 2625125 - RNA, 19 nt, Artificial Sequence
  Description of Artificial Sequence: Synthetic oligonucleotide
uugaugagugggauacuuu

SEQ ID NO: 2625126 - RNA, 19 nt, Artificial Sequence
  Description of Artificial Sequence: Synthetic oligonucleotide
uggcaguugaugaguggga

SEQ ID NO: 2625127 - RNA, 19 nt, Artificial Sequence
  Description of Artificial Sequence: Synthetic oligonucleotide
gagcuguccaauauguuaa

SEQ ID NO: 2625128 - RNA, 19 nt, Artificial Sequence
  Description of Artificial Sequence: Synthetic oligonucleotide
ucucauggucuuacaguaa

SEQ ID NO: 2625129 - RNA, 19 nt, Artificial Sequence
  Description of Artificial Sequence: Synthetic oligonucleotide
aucaucuuagggauacuga

SEQ ID NO: 2625130 - RNA, 19 nt, Artificial Sequence
  Description of Artificial Sequence: Synthetic oligonucleotide
ucuggagauauugcuugcu

SEQ ID NO: 2625131 - RNA, 19 nt, Artificial Sequence
  Description of Artificial Sequence: Synthetic oligonucleotide
acuuuaucaauggauucua

SEQ ID NO: 2625132 - RNA, 19 nt, Artificial Sequence
  Description of Artificial Sequence: Synthetic oligonucleotide
cuguuuacucaguaacaca

SEQ ID NO: 2625133 - RNA, 19 nt, Artificial Sequence
  Description of Artificial Sequence: Synthetic oligonucleotide
aucauaucacuaaggggug

SEQ ID NO: 2625134 - RNA, 19 nt, Artificial Sequence
  Description of Artificial Sequence: Synthetic oligonucleotide
uaucagugacuccucucau

SEQ ID NO: 2625135 - RNA, 19 nt, Artificial Sequence
  Description of Artificial Sequence: Synthetic oligonucleotide
augaacucuccuacacugg

SEQ ID NO: 2625136 - RNA, 19 nt, Artificial Sequence
  Description of Artificial Sequence: Synthetic oligonucleotide
guaacacacucacuuuauc

SEQ ID NO: 2625137 - RNA, 19 nt, Artificial Sequence
  Description of Artificial Sequence: Synthetic oligonucleotide
uccccuggagcaaaauaau

SEQ ID NO: 2625138 - RNA, 19 nt, Artificial Sequence
  Description of Artificial Sequence: Synthetic oligonucleotide
acccaaauuaaaggacaag

SEQ ID NO: 2625139 - RNA, 19 nt, Artificial Sequence
  Description of Artificial Sequence: Synthetic oligonucleotide
cucauggucuuacaguaaa

SEQ ID NO: 2625140 - RNA, 19 nt, Artificial Sequence
  Description of Artificial Sequence: Synthetic oligonucleotide
aggcagaugcugccguauc

SEQ ID NO: 2625141 - RNA, 19 nt, Artificial Sequence
  Description of Artificial Sequence: Synthetic oligonucleotide
augaauugauauacuaauu

SEQ ID NO: 2625142 - RNA, 19 nt, Artificial Sequence
  Description of Artificial Sequence: Synthetic oligonucleotide
uggauucuaugagcugucc

SEQ ID NO: 2625143 - RNA, 19 nt, Artificial Sequence
  Description of Artificial Sequence: Synthetic oligonucleotide
gcuguuuacucaguaacac

SEQ ID NO: 2625144 - RNA, 19 nt, Artificial Sequence
  Description of Artificial Sequence: Synthetic oligonucleotide
cuccucucauuucaauuuc

SEQ ID NO: 2625145 - RNA, 19 nt, Artificial Sequence
  Description of Artificial Sequence: Synthetic oligonucleotide
cuaaggggugugauuuauc

SEQ ID NO: 2625146 - RNA, 19 nt, Artificial Sequence
  Description of Artificial Sequence: Synthetic oligonucleotide
gaccaugaguuuuccccac

SEQ ID NO: 2625147 - RNA, 19 nt, Artificial Sequence
  Description of Artificial Sequence: Synthetic oligonucleotide
uuuauccccuugguuggca

SEQ ID NO: 2625148 - RNA, 19 nt, Artificial Sequence
  Description of Artificial Sequence: Synthetic oligonucleotide
uaucacuaaggggugugau

SEQ ID NO: 2625149 - RNA, 19 nt, Artificial Sequence
  Description of Artificial Sequence: Synthetic oligonucleotide
ggaguuacauaaucauauc

SEQ ID NO: 2625150 - RNA, 19 nt, Artificial Sequence
  Description of Artificial Sequence: Synthetic oligonucleotide
gggauacugaugauuuuag

SEQ ID NO: 2625151 - RNA, 19 nt, Artificial Sequence
  Description of Artificial Sequence: Synthetic oligonucleotide
gcugccguaucaucuuagg

SEQ ID NO: 2625152 - RNA, 19 nt, Artificial Sequence
  Description of Artificial Sequence: Synthetic oligonucleotide
auauggcaggcagaugcug

SEQ ID NO: 2625153 - RNA, 19 nt, Artificial Sequence
  Description of Artificial Sequence: Synthetic oligonucleotide
gcaagugaaauacugcagu

SEQ ID NO: 2625154 - RNA, 19 nt, Artificial Sequence
  Description of Artificial Sequence: Synthetic oligonucleotide
acuaaggggugugauuuau

SEQ ID NO: 2625155 - RNA, 19 nt, Artificial Sequence
  Description of Artificial Sequence: Synthetic oligonucleotide
aguccccuggagcaaaaua

SEQ ID NO: 2625156 - RNA, 19 nt, Artificial Sequence
  Description of Artificial Sequence: Synthetic oligonucleotide
ggucuuacaguaaaugcaa

SEQ ID NO: 2625157 - RNA, 19 nt, Artificial Sequence
  Description of Artificial Sequence: Synthetic oligonucleotide
ucuuagggauacugaugau

SEQ ID NO: 2625158 - RNA, 19 nt, Artificial Sequence
  Description of Artificial Sequence: Synthetic oligonucleotide
gcaucuuuuauaacaugac

SEQ ID NO: 2625159 - RNA, 19 nt, Artificial Sequence
  Description of Artificial Sequence: Synthetic oligonucleotide
ucaauuucucauggucuua

SEQ ID NO: 2625160 - RNA, 19 nt, Artificial Sequence
  Description of Artificial Sequence: Synthetic oligonucleotide
guccccuggagcaaaauaa

SEQ ID NO: 2625161 - RNA, 19 nt, Artificial Sequence
  Description of Artificial Sequence: Synthetic oligonucleotide
caguaacacacucacuuua

SEQ ID NO: 2625162 - RNA, 19 nt, Artificial Sequence
  Description of Artificial Sequence: Synthetic oligonucleotide
aggagcuguuuacucagua

SEQ ID NO: 2625163 - RNA, 19 nt, Artificial Sequence
  Description of Artificial Sequence: Synthetic oligonucleotide
gcaguauguagacuugaga

SEQ ID NO: 2625164 - RNA, 19 nt, Artificial Sequence
  Description of Artificial Sequence: Synthetic oligonucleotide
caggaguuacauaaucaua

SEQ ID NO: 2625165 - RNA, 19 nt, Artificial Sequence
  Description of Artificial Sequence: Synthetic oligonucleotide
auaucacuaagggguguga

SEQ ID NO: 2625166 - RNA, 19 nt, Artificial Sequence
  Description of Artificial Sequence: Synthetic oligonucleotide
uugugaccaugaguuuucc

SEQ ID NO: 2625167 - RNA, 19 nt, Artificial Sequence
  Description of Artificial Sequence: Synthetic oligonucleotide
cagaguuuccaucuauaua

SEQ ID NO: 2625168 - RNA, 19 nt, Artificial Sequence
  Description of Artificial Sequence: Synthetic oligonucleotide
aagucaggaguuacauaau

SEQ ID NO: 2625169 - RNA, 19 nt, Artificial Sequence
  Description of Artificial Sequence: Synthetic oligonucleotide
ggauucuaugagcugucca

SEQ ID NO: 2625170 - RNA, 19 nt, Artificial Sequence
  Description of Artificial Sequence: Synthetic oligonucleotide
ggauacugaugauuuuaga

SEQ ID NO: 2625171 - RNA, 19 nt, Artificial Sequence
  Description of Artificial Sequence: Synthetic oligonucleotide
uggcaggcagaugcugccg

SEQ ID NO: 2625172 - RNA, 19 nt, Artificial Sequence
  Description of Artificial Sequence: Synthetic oligonucleotide
ccuaguauaugaauugaua

SEQ ID NO: 2625173 - RNA, 19 nt, Artificial Sequence
  Description of Artificial Sequence: Synthetic oligonucleotide
ccaaauuaaaggacaagcu

SEQ ID NO: 2625174 - RNA, 19 nt, Artificial Sequence
  Description of Artificial Sequence: Synthetic oligonucleotide
ucuccuacacuggguccag

SEQ ID NO: 2625175 - RNA, 19 nt, Artificial Sequence
  Description of Artificial Sequence: Synthetic oligonucleotide
cuuucuggaguccccugga

SEQ ID NO: 2625176 - RNA, 19 nt, Artificial Sequence
  Description of Artificial Sequence: Synthetic oligonucleotide
cguaucaucuuagggauac

SEQ ID NO: 2625177 - RNA, 19 nt, Artificial Sequence
  Description of Artificial Sequence: Synthetic oligonucleotide
cuuuauccccuugguuggc

SEQ ID NO: 2625178 - RNA, 19 nt, Artificial Sequence
  Description of Artificial Sequence: Synthetic oligonucleotide
gacuccucucauuucaauu

SEQ ID NO: 2625179 - RNA, 19 nt, Artificial Sequence
  Description of Artificial Sequence: Synthetic oligonucleotide
ucccgacaaguucuucauc

SEQ ID NO: 2625180 - RNA, 19 nt, Artificial Sequence
  Description of Artificial Sequence: Synthetic oligonucleotide
gugaaauacugcaguaugu

SEQ ID NO: 2625181 - RNA, 19 nt, Artificial Sequence
  Description of Artificial Sequence: Synthetic oligonucleotide
guauaugaauugauauacu

SEQ ID NO: 2625182 - RNA, 19 nt, Artificial Sequence
  Description of Artificial Sequence: Synthetic oligonucleotide
aaggacaagcuugcaucuu

SEQ ID NO: 2625183 - RNA, 19 nt, Artificial Sequence
  Description of Artificial Sequence: Synthetic oligonucleotide
cacucacuuuaucaaugga

SEQ ID NO: 2625184 - RNA, 19 nt, Artificial Sequence
  Description of Artificial Sequence: Synthetic oligonucleotide
gugggauacuuuggaauuc

SEQ ID NO: 2625185 - RNA, 19 nt, Artificial Sequence
  Description of Artificial Sequence: Synthetic oligonucleotide
ggagcuguuuacucaguaa

SEQ ID NO: 2625186 - RNA, 19 nt, Artificial Sequence
  Description of Artificial Sequence: Synthetic oligonucleotide
gggugugauuuaucuggag

SEQ ID NO: 2625187 - RNA, 19 nt, Artificial Sequence
  Description of Artificial Sequence: Synthetic oligonucleotide
ugcuugcuucugagggcug

SEQ ID NO: 2625188 - RNA, 19 nt, Artificial Sequence
  Description of Artificial Sequence: Synthetic oligonucleotide
guuugugaccaugaguuuu

SEQ ID NO: 2625189 - RNA, 19 nt, Artificial Sequence
  Description of Artificial Sequence: Synthetic oligonucleotide
gcucccgacaaguucuuca

SEQ ID NO: 2625190 - RNA, 19 nt, Artificial Sequence
  Description of Artificial Sequence: Synthetic oligonucleotide
auacugcaguauguagacu

SEQ ID NO: 2625191 - RNA, 19 nt, Artificial Sequence
  Description of Artificial Sequence: Synthetic oligonucleotide
caggcucccgacaaguucu

SEQ ID NO: 2625192 - RNA, 19 nt, Artificial Sequence
  Description of Artificial Sequence: Synthetic oligonucleotide
cucuccuacacugggucca

SEQ ID NO: 2625193 - RNA, 19 nt, Artificial Sequence
  Description of Artificial Sequence: Synthetic oligonucleotide
cagugacuccucucauuuc

SEQ ID NO: 2625194 - RNA, 19 nt, Artificial Sequence
  Description of Artificial Sequence: Synthetic oligonucleotide
ggagcaaaauaauguuugu

SEQ ID NO: 2625195 - RNA, 19 nt, Artificial Sequence
  Description of Artificial Sequence: Synthetic oligonucleotide
guuuacucaguaacacacu

SEQ ID NO: 2625196 - RNA, 19 nt, Artificial Sequence
  Description of Artificial Sequence: Synthetic oligonucleotide
aguugaugagugggauacu

SEQ ID NO: 2625197 - RNA, 19 nt, Artificial Sequence
  Description of Artificial Sequence: Synthetic oligonucleotide
ggcagaugcugccguauca

SEQ ID NO: 2625198 - RNA, 19 nt, Artificial Sequence
  Description of Artificial Sequence: Synthetic oligonucleotide
uccaggcucccgacaaguu

SEQ ID NO: 2625199 - RNA, 19 nt, Artificial Sequence
  Description of Artificial Sequence: Synthetic oligonucleotide
gaguuuccaucuauauaua

SEQ ID NO: 2625200 - RNA, 19 nt, Artificial Sequence
  Description of Artificial Sequence: Synthetic oligonucleotide
gcugauuaauacagagauc

SEQ ID NO: 2625201 - RNA, 19 nt, Artificial Sequence
  Description of Artificial Sequence: Synthetic oligonucleotide
guugaugagugggauacuu

SEQ ID NO: 2625202 - RNA, 19 nt, Artificial Sequence
  Description of Artificial Sequence: Synthetic oligonucleotide
uggaguccccuggagcaaa

SEQ ID NO: 2625203 - RNA, 19 nt, Artificial Sequence
  Description of Artificial Sequence: Synthetic oligonucleotide
gccguaucaucuuagggau

SEQ ID NO: 2625204 - RNA, 19 nt, Artificial Sequence
  Description of Artificial Sequence: Synthetic oligonucleotide
caugaguuuuccccacaua

SEQ ID NO: 2625205 - RNA, 19 nt, Artificial Sequence
  Description of Artificial Sequence: Synthetic oligonucleotide
cuuuaucaauggauucuau

SEQ ID NO: 2625206 - RNA, 19 nt, Artificial Sequence
  Description of Artificial Sequence: Synthetic oligonucleotide
cacauauggcaggcagaug

SEQ ID NO: 2625207 - RNA, 19 nt, Artificial Sequence
  Description of Artificial Sequence: Synthetic oligonucleotide
gggcugauuaauacagaga

SEQ ID NO: 2625208 - RNA, 19 nt, Artificial Sequence
  Description of Artificial Sequence: Synthetic oligonucleotide
augcugccguaucaucuua

SEQ ID NO: 2625209 - RNA, 19 nt, Artificial Sequence
  Description of Artificial Sequence: Synthetic oligonucleotide
cccgacaaguucuucaucu

SEQ ID NO: 2625210 - RNA, 19 nt, Artificial Sequence
  Description of Artificial Sequence: Synthetic oligonucleotide
gaacucuccuacacugggu

SEQ ID NO: 2625211 - RNA, 19 nt, Artificial Sequence
  Description of Artificial Sequence: Synthetic oligonucleotide
ccaauauguuaauaucagu

SEQ ID NO: 2625212 - RNA, 19 nt, Artificial Sequence
  Description of Artificial Sequence: Synthetic oligonucleotide
augagcuguccaauauguu

SEQ ID NO: 2625213 - RNA, 19 nt, Artificial Sequence
  Description of Artificial Sequence: Synthetic oligonucleotide
cuccuacacuggguccagg

SEQ ID NO: 2625214 - RNA, 19 nt, Artificial Sequence
  Description of Artificial Sequence: Synthetic oligonucleotide
uccccacauauggcaggca

SEQ ID NO: 2625215 - RNA, 19 nt, Artificial Sequence
  Description of Artificial Sequence: Synthetic oligonucleotide
cacuggguccaggcucccg

SEQ ID NO: 2625216 - RNA, 19 nt, Artificial Sequence
  Description of Artificial Sequence: Synthetic oligonucleotide
cuggagauauugcuugcuu

SEQ ID NO: 2625217 - RNA, 19 nt, Artificial Sequence
  Description of Artificial Sequence: Synthetic oligonucleotide
cucccgacaaguucuucau

SEQ ID NO: 2625218 - RNA, 19 nt, Artificial Sequence
  Description of Artificial Sequence: Synthetic oligonucleotide
cacuaaggggugugauuua

SEQ ID NO: 2625219 - RNA, 19 nt, Artificial Sequence
  Description of Artificial Sequence: Synthetic oligonucleotide
ggggugugauuuaucugga

SEQ ID NO: 2625220 - RNA, 19 nt, Artificial Sequence
  Description of Artificial Sequence: Synthetic oligonucleotide
cccacauauggcaggcaga

SEQ ID NO: 2625221 - RNA, 19 nt, Artificial Sequence
  Description of Artificial Sequence: Synthetic oligonucleotide
gcuguccaauauguuaaua

SEQ ID NO: 2625222 - RNA, 19 nt, Artificial Sequence
  Description of Artificial Sequence: Synthetic oligonucleotide
ggcaguugaugagugggau

SEQ ID NO: 2625223 - RNA, 19 nt, Artificial Sequence
  Description of Artificial Sequence: Synthetic oligonucleotide
ggcaggcagaugcugccgu

SEQ ID NO: 2625224 - RNA, 19 nt, Artificial Sequence
  Description of Artificial Sequence: Synthetic oligonucleotide
cuaccacccagcccagguu

SEQ ID NO: 2625225 - RNA, 19 nt, Artificial Sequence
  Description of Artificial Sequence: Synthetic oligonucleotide
cuugcuucugagggcugau

SEQ ID NO: 2625226 - RNA, 19 nt, Artificial Sequence
  Description of Artificial Sequence: Synthetic oligonucleotide
ccaugaguuuuccccacau

SEQ ID NO: 2625227 - RNA, 19 nt, Artificial Sequence
  Description of Artificial Sequence: Synthetic oligonucleotide
caggcagaugcugccguau

SEQ ID NO: 2625228 - RNA, 19 nt, Artificial Sequence
  Description of Artificial Sequence: Synthetic oligonucleotide
gaguccccuggagcaaaau

SEQ ID NO: 2625229 - RNA, 19 nt, Artificial Sequence
  Description of Artificial Sequence: Synthetic oligonucleotide
aggcucccgacaaguucuu

SEQ ID NO: 2625230 - RNA, 19 nt, Artificial Sequence
  Description of Artificial Sequence: Synthetic oligonucleotide
ccguaucaucuuagggaua

SEQ ID NO: 2625231 - RNA, 19 nt, Artificial Sequence
  Description of Artificial Sequence: Synthetic oligonucleotide
ggaguccccuggagcaaaa

SEQ ID NO: 2625232 - RNA, 19 nt, Artificial Sequence
  Description of Artificial Sequence: Synthetic oligonucleotide
ccgacaaguucuucaucuu

SEQ ID NO: 2625233 - RNA, 19 nt, Artificial Sequence
  Description of Artificial Sequence: Synthetic oligonucleotide
aaagguaucuguuucauug

SEQ ID NO: 2625234 - RNA, 19 nt, Artificial Sequence
  Description of Artificial Sequence: Synthetic oligonucleotide
auuacaaucaagaugauag

SEQ ID NO: 2625235 - RNA, 19 nt, Artificial Sequence
  Description of Artificial Sequence: Synthetic oligonucleotide
uuauucuugggcauggcgg

SEQ ID NO: 2625236 - RNA, 19 nt, Artificial Sequence
  Description of Artificial Sequence: Synthetic oligonucleotide
acuuuaaaaugacaucugc

SEQ ID NO: 2625237 - RNA, 19 nt, Artificial Sequence
  Description of Artificial Sequence: Synthetic oligonucleotide
aauguaaaauguugaguuc

SEQ ID NO: 2625238 - RNA, 19 nt, Artificial Sequence
  Description of Artificial Sequence: Synthetic oligonucleotide
uaugccuugagacuucugg

SEQ ID NO: 2625239 - RNA, 19 nt, Artificial Sequence
  Description of Artificial Sequence: Synthetic oligonucleotide
cagauuucaaacuugcagg

SEQ ID NO: 2625240 - RNA, 19 nt, Artificial Sequence
  Description of Artificial Sequence: Synthetic oligonucleotide
ucugauauggcacagucuc

SEQ ID NO: 2625241 - RNA, 19 nt, Artificial Sequence
  Description of Artificial Sequence: Synthetic oligonucleotide
uuuauucuugggcauggcg

SEQ ID NO: 2625242 - RNA, 19 nt, Artificial Sequence
  Description of Artificial Sequence: Synthetic oligonucleotide
uugaguucauuuuagauau

SEQ ID NO: 2625243 - RNA, 19 nt, Artificial Sequence
  Description of Artificial Sequence: Synthetic oligonucleotide
ugauagugaaaacuuuucc

SEQ ID NO: 2625244 - RNA, 19 nt, Artificial Sequence
  Description of Artificial Sequence: Synthetic oligonucleotide
uuuccuuuauucuugggca

SEQ ID NO: 2625245 - RNA, 19 nt, Artificial Sequence
  Description of Artificial Sequence: Synthetic oligonucleotide
uguuauccugguaaucucg

SEQ ID NO: 2625246 - RNA, 19 nt, Artificial Sequence
  Description of Artificial Sequence: Synthetic oligonucleotide
ucuaugacuggccagauuu

SEQ ID NO: 2625247 - RNA, 19 nt, Artificial Sequence
  Description of Artificial Sequence: Synthetic oligonucleotide
agauuucaaacuugcaggg

SEQ ID NO: 2625248 - RNA, 19 nt, Artificial Sequence
  Description of Artificial Sequence: Synthetic oligonucleotide
aaugacaucugcuuuguua

SEQ ID NO: 2625249 - RNA, 19 nt, Artificial Sequence
  Description of Artificial Sequence: Synthetic oligonucleotide
aacauuuugauuaccugag

SEQ ID NO: 2625250 - RNA, 19 nt, Artificial Sequence
  Description of Artificial Sequence: Synthetic oligonucleotide
ugaaaacuuuuccuugagg

SEQ ID NO: 2625251 - RNA, 19 nt, Artificial Sequence
  Description of Artificial Sequence: Synthetic oligonucleotide
aaacuuuuccuugaggucu

SEQ ID NO: 2625252 - RNA, 19 nt, Artificial Sequence
  Description of Artificial Sequence: Synthetic oligonucleotide
aggaccagaauguaaaaug

SEQ ID NO: 2625253 - RNA, 19 nt, Artificial Sequence
  Description of Artificial Sequence: Synthetic oligonucleotide
gagacugugcuccggaugg

SEQ ID NO: 2625254 - RNA, 19 nt, Artificial Sequence
  Description of Artificial Sequence: Synthetic oligonucleotide
uccucuuugaacaccagcu

SEQ ID NO: 2625255 - RNA, 19 nt, Artificial Sequence
  Description of Artificial Sequence: Synthetic oligonucleotide
aaauguugaguucauuuua

SEQ ID NO: 2625256 - RNA, 19 nt, Artificial Sequence
  Description of Artificial Sequence: Synthetic oligonucleotide
uguacuuuaaaaugacauc

SEQ ID NO: 2625257 - RNA, 19 nt, Artificial Sequence
  Description of Artificial Sequence: Synthetic oligonucleotide
uauccugguaaucucggag

SEQ ID NO: 2625258 - RNA, 19 nt, Artificial Sequence
  Description of Artificial Sequence: Synthetic oligonucleotide
cuuccaaucguccauuccc

SEQ ID NO: 2625259 - RNA, 19 nt, Artificial Sequence
  Description of Artificial Sequence: Synthetic oligonucleotide
auuuuagauaucaucaaug

SEQ ID NO: 2625260 - RNA, 19 nt, Artificial Sequence
  Description of Artificial Sequence: Synthetic oligonucleotide
aucaagaugauagugaaaa

SEQ ID NO: 2625261 - RNA, 19 nt, Artificial Sequence
  Description of Artificial Sequence: Synthetic oligonucleotide
gauucauucucauucuuuc

SEQ ID NO: 2625262 - RNA, 19 nt, Artificial Sequence
  Description of Artificial Sequence: Synthetic oligonucleotide
uccuugaggucuaugacug

SEQ ID NO: 2625263 - RNA, 19 nt, Artificial Sequence
  Description of Artificial Sequence: Synthetic oligonucleotide
ucucauucuuuccucuacg

SEQ ID NO: 2625264 - RNA, 19 nt, Artificial Sequence
  Description of Artificial Sequence: Synthetic oligonucleotide
uucaggaccagaauguaaa

SEQ ID NO: 2625265 - RNA, 19 nt, Artificial Sequence
  Description of Artificial Sequence: Synthetic oligonucleotide
gaauguaaaauguugaguu

SEQ ID NO: 2625266 - RNA, 19 nt, Artificial Sequence
  Description of Artificial Sequence: Synthetic oligonucleotide
uacuuuaaaaugacaucug

SEQ ID NO: 2625267 - RNA, 19 nt, Artificial Sequence
  Description of Artificial Sequence: Synthetic oligonucleotide
uacaaucaagaugauagug

SEQ ID NO: 2625268 - RNA, 19 nt, Artificial Sequence
  Description of Artificial Sequence: Synthetic oligonucleotide
guucauuuuagauaucauc

SEQ ID NO: 2625269 - RNA, 19 nt, Artificial Sequence
  Description of Artificial Sequence: Synthetic oligonucleotide
ucugcguuguacuuuaaaa

SEQ ID NO: 2625270 - RNA, 19 nt, Artificial Sequence
  Description of Artificial Sequence: Synthetic oligonucleotide
cucuuuacaccaucgaaac

SEQ ID NO: 2625271 - RNA, 19 nt, Artificial Sequence
  Description of Artificial Sequence: Synthetic oligonucleotide
uagugaaaacuuuuccuug

SEQ ID NO: 2625272 - RNA, 19 nt, Artificial Sequence
  Description of Artificial Sequence: Synthetic oligonucleotide
gccucaauaaauuacaauc

SEQ ID NO: 2625273 - RNA, 19 nt, Artificial Sequence
  Description of Artificial Sequence: Synthetic oligonucleotide
uguugaguucauuuuagau

SEQ ID NO: 2625274 - RNA, 19 nt, Artificial Sequence
  Description of Artificial Sequence: Synthetic oligonucleotide
ugcccauccucuuugaaca

SEQ ID NO: 2625275 - RNA, 19 nt, Artificial Sequence
  Description of Artificial Sequence: Synthetic oligonucleotide
uuaccugagcauauucuug

SEQ ID NO: 2625276 - RNA, 19 nt, Artificial Sequence
  Description of Artificial Sequence: Synthetic oligonucleotide
aagaugauagugaaaacuu

SEQ ID NO: 2625277 - RNA, 19 nt, Artificial Sequence
  Description of Artificial Sequence: Synthetic oligonucleotide
uauucuugggcauggcggc

SEQ ID NO: 2625278 - RNA, 19 nt, Artificial Sequence
  Description of Artificial Sequence: Synthetic oligonucleotide
agugaaaacuuuuccuuga

SEQ ID NO: 2625279 - RNA, 19 nt, Artificial Sequence
  Description of Artificial Sequence: Synthetic oligonucleotide
uuucccucugauauggcac

SEQ ID NO: 2625280 - RNA, 19 nt, Artificial Sequence
  Description of Artificial Sequence: Synthetic oligonucleotide
caauuucccucugauaugg

SEQ ID NO: 2625281 - RNA, 19 nt, Artificial Sequence
  Description of Artificial Sequence: Synthetic oligonucleotide
auuuugauuaccugagcau

SEQ ID NO: 2625282 - RNA, 19 nt, Artificial Sequence
  Description of Artificial Sequence: Synthetic oligonucleotide
augacaucugcuuuguuau

SEQ ID NO: 2625283 - RNA, 19 nt, Artificial Sequence
  Description of Artificial Sequence: Synthetic oligonucleotide
uugcagggcaaucuucagg

SEQ ID NO: 2625284 - RNA, 19 nt, Artificial Sequence
  Description of Artificial Sequence: Synthetic oligonucleotide
auguaaaauguugaguuca

SEQ ID NO: 2625285 - RNA, 19 nt, Artificial Sequence
  Description of Artificial Sequence: Synthetic oligonucleotide
uuugauuaccugagcauau

SEQ ID NO: 2625286 - RNA, 19 nt, Artificial Sequence
  Description of Artificial Sequence: Synthetic oligonucleotide
gagugugagacugugcucc

SEQ ID NO: 2625287 - RNA, 19 nt, Artificial Sequence
  Description of Artificial Sequence: Synthetic oligonucleotide
agaauguaaaauguugagu

SEQ ID NO: 2625288 - RNA, 19 nt, Artificial Sequence
  Description of Artificial Sequence: Synthetic oligonucleotide
uuuccuugaggucuaugac

SEQ ID NO: 2625289 - RNA, 19 nt, Artificial Sequence
  Description of Artificial Sequence: Synthetic oligonucleotide
ucgccauaugccuugagac

SEQ ID NO: 2625290 - RNA, 19 nt, Artificial Sequence
  Description of Artificial Sequence: Synthetic oligonucleotide
aagguaucuguuucauuga

SEQ ID NO: 2625291 - RNA, 19 nt, Artificial Sequence
  Description of Artificial Sequence: Synthetic oligonucleotide
caacauuuugauuaccuga

SEQ ID NO: 2625292 - RNA, 19 nt, Artificial Sequence
  Description of Artificial Sequence: Synthetic oligonucleotide
ugugcgggaggccaagaag

SEQ ID NO: 2625293 - RNA, 19 nt, Artificial Sequence
  Description of Artificial Sequence: Synthetic oligonucleotide
augauagugaaaacuuuuc

SEQ ID NO: 2625294 - RNA, 19 nt, Artificial Sequence
  Description of Artificial Sequence: Synthetic oligonucleotide
aaaaugacaucugcuuugu

SEQ ID NO: 2625295 - RNA, 19 nt, Artificial Sequence
  Description of Artificial Sequence: Synthetic oligonucleotide
acaaucaagaugauaguga

SEQ ID NO: 2625296 - RNA, 19 nt, Artificial Sequence
  Description of Artificial Sequence: Synthetic oligonucleotide
uuacaaucaagaugauagu

SEQ ID NO: 2625297 - RNA, 19 nt, Artificial Sequence
  Description of Artificial Sequence: Synthetic oligonucleotide
ugauuaccugagcauauuc

SEQ ID NO: 2625298 - RNA, 19 nt, Artificial Sequence
  Description of Artificial Sequence: Synthetic oligonucleotide
uauggcacagucucuuuac

SEQ ID NO: 2625299 - RNA, 19 nt, Artificial Sequence
  Description of Artificial Sequence: Synthetic oligonucleotide
ucaucauccccaaugucau

SEQ ID NO: 2625300 - RNA, 19 nt, Artificial Sequence
  Description of Artificial Sequence: Synthetic oligonucleotide
uuccaaucguccauucccc

SEQ ID NO: 2625301 - RNA, 19 nt, Artificial Sequence
  Description of Artificial Sequence: Synthetic oligonucleotide
uguaaaauguugaguucau

SEQ ID NO: 2625302 - RNA, 19 nt, Artificial Sequence
  Description of Artificial Sequence: Synthetic oligonucleotide
uggaagcucgccauaugcc

SEQ ID NO: 2625303 - RNA, 19 nt, Artificial Sequence
  Description of Artificial Sequence: Synthetic oligonucleotide
uaaucucggagccccacca

SEQ ID NO: 2625304 - RNA, 19 nt, Artificial Sequence
  Description of Artificial Sequence: Synthetic oligonucleotide
gaguucauuuuagauauca

SEQ ID NO: 2625305 - RNA, 19 nt, Artificial Sequence
  Description of Artificial Sequence: Synthetic oligonucleotide
ugaggucuaugacuggcca

SEQ ID NO: 2625306 - RNA, 19 nt, Artificial Sequence
  Description of Artificial Sequence: Synthetic oligonucleotide
ucaagucugccucaauaaa

SEQ ID NO: 2625307 - RNA, 19 nt, Artificial Sequence
  Description of Artificial Sequence: Synthetic oligonucleotide
ccagauuucaaacuugcag

SEQ ID NO: 2625308 - RNA, 19 nt, Artificial Sequence
  Description of Artificial Sequence: Synthetic oligonucleotide
cuggaagcucgccauaugc

SEQ ID NO: 2625309 - RNA, 19 nt, Artificial Sequence
  Description of Artificial Sequence: Synthetic oligonucleotide
aaagcugugcgggaggcca

SEQ ID NO: 2625310 - RNA, 19 nt, Artificial Sequence
  Description of Artificial Sequence: Synthetic oligonucleotide
uucucauucuuuccucuac

SEQ ID NO: 2625311 - RNA, 19 nt, Artificial Sequence
  Description of Artificial Sequence: Synthetic oligonucleotide
ugagacugugcuccggaug

SEQ ID NO: 2625312 - RNA, 19 nt, Artificial Sequence
  Description of Artificial Sequence: Synthetic oligonucleotide
aucaagucugccucaauaa

SEQ ID NO: 2625313 - RNA, 19 nt, Artificial Sequence
  Description of Artificial Sequence: Synthetic oligonucleotide
agccccaccaauaugaugu

SEQ ID NO: 2625314 - RNA, 19 nt, Artificial Sequence
  Description of Artificial Sequence: Synthetic oligonucleotide
acagucucuuuacaccauc

SEQ ID NO: 2625315 - RNA, 19 nt, Artificial Sequence
  Description of Artificial Sequence: Synthetic oligonucleotide
ucugcuuuguuauccuggu

SEQ ID NO: 2625316 - RNA, 19 nt, Artificial Sequence
  Description of Artificial Sequence: Synthetic oligonucleotide
ugugagacugugcuccgga

SEQ ID NO: 2625317 - RNA, 19 nt, Artificial Sequence
  Description of Artificial Sequence: Synthetic oligonucleotide
uucuugcccauccucuuug

SEQ ID NO: 2625318 - RNA, 19 nt, Artificial Sequence
  Description of Artificial Sequence: Synthetic oligonucleotide
ucuccaggaccaaagguau

SEQ ID NO: 2625319 - RNA, 19 nt, Artificial Sequence
  Description of Artificial Sequence: Synthetic oligonucleotide
ucauucuuuccucuacguc

SEQ ID NO: 2625320 - RNA, 19 nt, Artificial Sequence
  Description of Artificial Sequence: Synthetic oligonucleotide
uugaggucuaugacuggcc

SEQ ID NO: 2625321 - RNA, 19 nt, Artificial Sequence
  Description of Artificial Sequence: Synthetic oligonucleotide
auuucccucugauauggca

SEQ ID NO: 2625322 - RNA, 19 nt, Artificial Sequence
  Description of Artificial Sequence: Synthetic oligonucleotide
ucuuuacaccaucgaaaca

SEQ ID NO: 2625323 - RNA, 19 nt, Artificial Sequence
  Description of Artificial Sequence: Synthetic oligonucleotide
guuauccugguaaucucgg

SEQ ID NO: 2625324 - RNA, 19 nt, Artificial Sequence
  Description of Artificial Sequence: Synthetic oligonucleotide
aggccaagaagcgugcucg

SEQ ID NO: 2625325 - RNA, 19 nt, Artificial Sequence
  Description of Artificial Sequence: Synthetic oligonucleotide
ugucaucaaacugaauuuc

SEQ ID NO: 2625326 - RNA, 19 nt, Artificial Sequence
  Description of Artificial Sequence: Synthetic oligonucleotide
cuugaggucuaugacuggc

SEQ ID NO: 2625327 - RNA, 19 nt, Artificial Sequence
  Description of Artificial Sequence: Synthetic oligonucleotide
cagucucuuuacaccaucg

SEQ ID NO: 2625328 - RNA, 19 nt, Artificial Sequence
  Description of Artificial Sequence: Synthetic oligonucleotide
aacggcggcgacuccgagg

SEQ ID NO: 2625329 - RNA, 19 nt, Artificial Sequence
  Description of Artificial Sequence: Synthetic oligonucleotide
aucugcuuuguuauccugg

SEQ ID NO: 2625330 - RNA, 19 nt, Artificial Sequence
  Description of Artificial Sequence: Synthetic oligonucleotide
aagaagcgugcucggaaga

SEQ ID NO: 2625331 - RNA, 19 nt, Artificial Sequence
  Description of Artificial Sequence: Synthetic oligonucleotide
cauucuuuccucuacgucu

SEQ ID NO: 2625332 - RNA, 19 nt, Artificial Sequence
  Description of Artificial Sequence: Synthetic oligonucleotide
ugagaaaggcgcgggauga

SEQ ID NO: 2625333 - RNA, 19 nt, Artificial Sequence
  Description of Artificial Sequence: Synthetic oligonucleotide
aauuucccucugauauggc

SEQ ID NO: 2625334 - RNA, 19 nt, Artificial Sequence
  Description of Artificial Sequence: Synthetic oligonucleotide
aaucguccauuccccaaca

SEQ ID NO: 2625335 - RNA, 19 nt, Artificial Sequence
  Description of Artificial Sequence: Synthetic oligonucleotide
cugagcauauucuugccca

SEQ ID NO: 2625336 - RNA, 19 nt, Artificial Sequence
  Description of Artificial Sequence: Synthetic oligonucleotide
cucaauaaauuacaaucaa

SEQ ID NO: 2625337 - RNA, 19 nt, Artificial Sequence
  Description of Artificial Sequence: Synthetic oligonucleotide
ugccuugagacuucuggcu

SEQ ID NO: 2625338 - RNA, 19 nt, Artificial Sequence
  Description of Artificial Sequence: Synthetic oligonucleotide
aaacuugcagggcaaucuu

SEQ ID NO: 2625339 - RNA, 19 nt, Artificial Sequence
  Description of Artificial Sequence: Synthetic oligonucleotide
aacuugcagggcaaucuuc

SEQ ID NO: 2625340 - RNA, 19 nt, Artificial Sequence
  Description of Artificial Sequence: Synthetic oligonucleotide
gaaaggcgcgggaugaaag

SEQ ID NO: 2625341 - RNA, 19 nt, Artificial Sequence
  Description of Artificial Sequence: Synthetic oligonucleotide
aagcucgccauaugccuug

SEQ ID NO: 2625342 - RNA, 19 nt, Artificial Sequence
  Description of Artificial Sequence: Synthetic oligonucleotide
aggggcgacgcugagaaag

SEQ ID NO: 2625343 - RNA, 19 nt, Artificial Sequence
  Description of Artificial Sequence: Synthetic oligonucleotide
cuuugaacaccagcucucg

SEQ ID NO: 2625344 - RNA, 19 nt, Artificial Sequence
  Description of Artificial Sequence: Synthetic oligonucleotide
ugccucaauaaauuacaau

SEQ ID NO: 2625345 - RNA, 19 nt, Artificial Sequence
  Description of Artificial Sequence: Synthetic oligonucleotide
ucaucugcguuguacuuua

SEQ ID NO: 2625346 - RNA, 19 nt, Artificial Sequence
  Description of Artificial Sequence: Synthetic oligonucleotide
uggccagauuucaaacuug

SEQ ID NO: 2625347 - RNA, 19 nt, Artificial Sequence
  Description of Artificial Sequence: Synthetic oligonucleotide
gaagcgugcucggaagagg

SEQ ID NO: 2625348 - RNA, 19 nt, Artificial Sequence
  Description of Artificial Sequence: Synthetic oligonucleotide
ggcacagucucuuuacacc

SEQ ID NO: 2625349 - RNA, 19 nt, Artificial Sequence
  Description of Artificial Sequence: Synthetic oligonucleotide
ugagacuucuggcuucauc

SEQ ID NO: 2625350 - RNA, 19 nt, Artificial Sequence
  Description of Artificial Sequence: Synthetic oligonucleotide
gaggucuaugacuggccag

SEQ ID NO: 2625351 - RNA, 19 nt, Artificial Sequence
  Description of Artificial Sequence: Synthetic oligonucleotide
uuccucuacgucuuguuuu

SEQ ID NO: 2625352 - RNA, 19 nt, Artificial Sequence
  Description of Artificial Sequence: Synthetic oligonucleotide
ugcuccggauggcagcagg

SEQ ID NO: 2625353 - RNA, 19 nt, Artificial Sequence
  Description of Artificial Sequence: Synthetic oligonucleotide
aagucugccucaauaaauu

SEQ ID NO: 2625354 - RNA, 19 nt, Artificial Sequence
  Description of Artificial Sequence: Synthetic oligonucleotide
gggaugaaagcugugcggg

SEQ ID NO: 2625355 - RNA, 19 nt, Artificial Sequence
  Description of Artificial Sequence: Synthetic oligonucleotide
agucucuuuacaccaucga

SEQ ID NO: 2625356 - RNA, 19 nt, Artificial Sequence
  Description of Artificial Sequence: Synthetic oligonucleotide
uggcacagucucuuuacac

SEQ ID NO: 2625357 - RNA, 19 nt, Artificial Sequence
  Description of Artificial Sequence: Synthetic oligonucleotide
uucccucugauauggcaca

SEQ ID NO: 2625358 - RNA, 19 nt, Artificial Sequence
  Description of Artificial Sequence: Synthetic oligonucleotide
agugugagacugugcuccg

SEQ ID NO: 2625359 - RNA, 19 nt, Artificial Sequence
  Description of Artificial Sequence: Synthetic oligonucleotide
caaucguccauuccccaac

SEQ ID NO: 2625360 - RNA, 19 nt, Artificial Sequence
  Description of Artificial Sequence: Synthetic oligonucleotide
uuauccugguaaucucgga

SEQ ID NO: 2625361 - RNA, 19 nt, Artificial Sequence
  Description of Artificial Sequence: Synthetic oligonucleotide
ucuggaagcucgccauaug

SEQ ID NO: 2625362 - RNA, 19 nt, Artificial Sequence
  Description of Artificial Sequence: Synthetic oligonucleotide
uuuccucuacgucuuguuu

SEQ ID NO: 2625363 - RNA, 19 nt, Artificial Sequence
  Description of Artificial Sequence: Synthetic oligonucleotide
gacgcugagaaaggcgcgg

SEQ ID NO: 2625364 - RNA, 19 nt, Artificial Sequence
  Description of Artificial Sequence: Synthetic oligonucleotide
ugaaagcugugcgggaggc

SEQ ID NO: 2625365 - RNA, 19 nt, Artificial Sequence
  Description of Artificial Sequence: Synthetic oligonucleotide
uuaccuuccuuuuccuuua

SEQ ID NO: 2625366 - RNA, 19 nt, Artificial Sequence
  Description of Artificial Sequence: Synthetic oligonucleotide
cccaaugucaucaaacuga

SEQ ID NO: 2625367 - RNA, 19 nt, Artificial Sequence
  Description of Artificial Sequence: Synthetic oligonucleotide
ugauauggcacagucucuu

SEQ ID NO: 2625368 - RNA, 19 nt, Artificial Sequence
  Description of Artificial Sequence: Synthetic oligonucleotide
uccggauggcagcaggaac

SEQ ID NO: 2625369 - RNA, 19 nt, Artificial Sequence
  Description of Artificial Sequence: Synthetic oligonucleotide
ccucaauaaauuacaauca

SEQ ID NO: 2625370 - RNA, 19 nt, Artificial Sequence
  Description of Artificial Sequence: Synthetic oligonucleotide
cugagaaaggcgcgggaug

SEQ ID NO: 2625371 - RNA, 19 nt, Artificial Sequence
  Description of Artificial Sequence: Synthetic oligonucleotide
uuuuaccuuccuuuuccuu

SEQ ID NO: 2625372 - RNA, 19 nt, Artificial Sequence
  Description of Artificial Sequence: Synthetic oligonucleotide
guaaucucggagccccacc

SEQ ID NO: 2625373 - RNA, 19 nt, Artificial Sequence
  Description of Artificial Sequence: Synthetic oligonucleotide
accagcucucgcuuuucag

SEQ ID NO: 2625374 - RNA, 19 nt, Artificial Sequence
  Description of Artificial Sequence: Synthetic oligonucleotide
gugcgggaggccaagaagc

SEQ ID NO: 2625375 - RNA, 19 nt, Artificial Sequence
  Description of Artificial Sequence: Synthetic oligonucleotide
agguaucuguuucauugau

SEQ ID NO: 2625376 - RNA, 19 nt, Artificial Sequence
  Description of Artificial Sequence: Synthetic oligonucleotide
gaugauagugaaaacuuuu

SEQ ID NO: 2625377 - RNA, 19 nt, Artificial Sequence
  Description of Artificial Sequence: Synthetic oligonucleotide
uuccuuuauucuugggcau

SEQ ID NO: 2625378 - RNA, 19 nt, Artificial Sequence
  Description of Artificial Sequence: Synthetic oligonucleotide
gucugccucaauaaauuac

SEQ ID NO: 2625379 - RNA, 19 nt, Artificial Sequence
  Description of Artificial Sequence: Synthetic oligonucleotide
uccccaacauuuugauuac

SEQ ID NO: 2625380 - RNA, 19 nt, Artificial Sequence
  Description of Artificial Sequence: Synthetic oligonucleotide
gauuaccugagcauauucu

SEQ ID NO: 2625381 - RNA, 19 nt, Artificial Sequence
  Description of Artificial Sequence: Synthetic oligonucleotide
aaggcgcgggaugaaagcu

SEQ ID NO: 2625382 - RNA, 19 nt, Artificial Sequence
  Description of Artificial Sequence: Synthetic oligonucleotide
cugguggagugugagacug

SEQ ID NO: 2625383 - RNA, 19 nt, Artificial Sequence
  Description of Artificial Sequence: Synthetic oligonucleotide
agaagcgugcucggaagag

SEQ ID NO: 2625384 - RNA, 19 nt, Artificial Sequence
  Description of Artificial Sequence: Synthetic oligonucleotide
ccggauggcagcaggaacg

SEQ ID NO: 2625385 - RNA, 19 nt, Artificial Sequence
  Description of Artificial Sequence: Synthetic oligonucleotide
auauggcacagucucuuua

SEQ ID NO: 2625386 - RNA, 19 nt, Artificial Sequence
  Description of Artificial Sequence: Synthetic oligonucleotide
aggucuaugacuggccaga

SEQ ID NO: 2625387 - RNA, 19 nt, Artificial Sequence
  Description of Artificial Sequence: Synthetic oligonucleotide
guuguacuuuaaaaugaca

SEQ ID NO: 2625388 - RNA, 19 nt, Artificial Sequence
  Description of Artificial Sequence: Synthetic oligonucleotide
uccaaucguccauucccca

SEQ ID NO: 2625389 - RNA, 19 nt, Artificial Sequence
  Description of Artificial Sequence: Synthetic oligonucleotide
caagcugguggagugugag

SEQ ID NO: 2625390 - RNA, 19 nt, Artificial Sequence
  Description of Artificial Sequence: Synthetic oligonucleotide
cuuuguuauccugguaauc

SEQ ID NO: 2625391 - RNA, 19 nt, Artificial Sequence
  Description of Artificial Sequence: Synthetic oligonucleotide
ucaaacuugcagggcaauc

SEQ ID NO: 2625392 - RNA, 19 nt, Artificial Sequence
  Description of Artificial Sequence: Synthetic oligonucleotide
ccagaauguaaaauguuga

SEQ ID NO: 2625393 - RNA, 19 nt, Artificial Sequence
  Description of Artificial Sequence: Synthetic oligonucleotide
gcgggaugaaagcugugcg

SEQ ID NO: 2625394 - RNA, 19 nt, Artificial Sequence
  Description of Artificial Sequence: Synthetic oligonucleotide
ugggcauggcggcaagcug

SEQ ID NO: 2625395 - RNA, 19 nt, Artificial Sequence
  Description of Artificial Sequence: Synthetic oligonucleotide
aggaacggcggcgacuccg

SEQ ID NO: 2625396 - RNA, 19 nt, Artificial Sequence
  Description of Artificial Sequence: Synthetic oligonucleotide
cuaugacuggccagauuuc

SEQ ID NO: 2625397 - RNA, 19 nt, Artificial Sequence
  Description of Artificial Sequence: Synthetic oligonucleotide
ugagcauauucuugcccau

SEQ ID NO: 2625398 - RNA, 19 nt, Artificial Sequence
  Description of Artificial Sequence: Synthetic oligonucleotide
ccaacauuuugauuaccug

SEQ ID NO: 2625399 - RNA, 19 nt, Artificial Sequence
  Description of Artificial Sequence: Synthetic oligonucleotide
auggcggcaagcuggugga

SEQ ID NO: 2625400 - RNA, 19 nt, Artificial Sequence
  Description of Artificial Sequence: Synthetic oligonucleotide
uugggcauggcggcaagcu

SEQ ID NO: 2625401 - RNA, 19 nt, Artificial Sequence
  Description of Artificial Sequence: Synthetic oligonucleotide
aaucucggagccccaccaa

SEQ ID NO: 2625402 - RNA, 19 nt, Artificial Sequence
  Description of Artificial Sequence: Synthetic oligonucleotide
ugugcuccggauggcagca

SEQ ID NO: 2625403 - RNA, 19 nt, Artificial Sequence
  Description of Artificial Sequence: Synthetic oligonucleotide
uucaucugcguuguacuuu

SEQ ID NO: 2625404 - RNA, 19 nt, Artificial Sequence
  Description of Artificial Sequence: Synthetic oligonucleotide
ucuuuccucuacgucuugu

SEQ ID NO: 2625405 - RNA, 19 nt, Artificial Sequence
  Description of Artificial Sequence: Synthetic oligonucleotide
aucugcguuguacuuuaaa

SEQ ID NO: 2625406 - RNA, 19 nt, Artificial Sequence
  Description of Artificial Sequence: Synthetic oligonucleotide
ucucggagccccaccaaua

SEQ ID NO: 2625407 - RNA, 19 nt, Artificial Sequence
  Description of Artificial Sequence: Synthetic oligonucleotide
cugugcuccggauggcagc

SEQ ID NO: 2625408 - RNA, 19 nt, Artificial Sequence
  Description of Artificial Sequence: Synthetic oligonucleotide
cccaccaauaugaugucug

SEQ ID NO: 2625409 - RNA, 19 nt, Artificial Sequence
  Description of Artificial Sequence: Synthetic oligonucleotide
auggcacagucucuuuaca

SEQ ID NO: 2625410 - RNA, 19 nt, Artificial Sequence
  Description of Artificial Sequence: Synthetic oligonucleotide
ucggagccccaccaauaug

SEQ ID NO: 2625411 - RNA, 19 nt, Artificial Sequence
  Description of Artificial Sequence: Synthetic oligonucleotide
cucgccauaugccuugaga

SEQ ID NO: 2625412 - RNA, 19 nt, Artificial Sequence
  Description of Artificial Sequence: Synthetic oligonucleotide
ugaguucauuuuagauauc

SEQ ID NO: 2625413 - RNA, 19 nt, Artificial Sequence
  Description of Artificial Sequence: Synthetic oligonucleotide
gaggccaagaagcgugcuc

SEQ ID NO: 2625414 - RNA, 19 nt, Artificial Sequence
  Description of Artificial Sequence: Synthetic oligonucleotide
agaugauagugaaaacuuu

SEQ ID NO: 2625415 - RNA, 19 nt, Artificial Sequence
  Description of Artificial Sequence: Synthetic oligonucleotide
cuuuauucuugggcauggc

SEQ ID NO: 2625416 - RNA, 19 nt, Artificial Sequence
  Description of Artificial Sequence: Synthetic oligonucleotide
gcucucgcuuuucagauuc

SEQ ID NO: 2625417 - RNA, 19 nt, Artificial Sequence
  Description of Artificial Sequence: Synthetic oligonucleotide
ucuugcccauccucuuuga

SEQ ID NO: 2625418 - RNA, 19 nt, Artificial Sequence
  Description of Artificial Sequence: Synthetic oligonucleotide
ucuucaggaccagaaugua

SEQ ID NO: 2625419 - RNA, 19 nt, Artificial Sequence
  Description of Artificial Sequence: Synthetic oligonucleotide
aguucauuuuagauaucau

SEQ ID NO: 2625420 - RNA, 19 nt, Artificial Sequence
  Description of Artificial Sequence: Synthetic oligonucleotide
gggcauggcggcaagcugg

SEQ ID NO: 2625421 - RNA, 19 nt, Artificial Sequence
  Description of Artificial Sequence: Synthetic oligonucleotide
cuucaggaccagaauguaa

SEQ ID NO: 2625422 - RNA, 19 nt, Artificial Sequence
  Description of Artificial Sequence: Synthetic oligonucleotide
gcacagucucuuuacacca

SEQ ID NO: 2625423 - RNA, 19 nt, Artificial Sequence
  Description of Artificial Sequence: Synthetic oligonucleotide
cguuguacuuuaaaaugac

SEQ ID NO: 2625424 - RNA, 19 nt, Artificial Sequence
  Description of Artificial Sequence: Synthetic oligonucleotide
ggccagauuucaaacuugc

SEQ ID NO: 2625425 - RNA, 19 nt, Artificial Sequence
  Description of Artificial Sequence: Synthetic oligonucleotide
ccugagcauauucuugccc

SEQ ID NO: 2625426 - RNA, 19 nt, Artificial Sequence
  Description of Artificial Sequence: Synthetic oligonucleotide
caagucugccucaauaaau

SEQ ID NO: 2625427 - RNA, 19 nt, Artificial Sequence
  Description of Artificial Sequence: Synthetic oligonucleotide
aucucggagccccaccaau

SEQ ID NO: 2625428 - RNA, 19 nt, Artificial Sequence
  Description of Artificial Sequence: Synthetic oligonucleotide
uugauuaccugagcauauu

SEQ ID NO: 2625429 - RNA, 19 nt, Artificial Sequence
  Description of Artificial Sequence: Synthetic oligonucleotide
cugcguuguacuuuaaaau

SEQ ID NO: 2625430 - RNA, 19 nt, Artificial Sequence
  Description of Artificial Sequence: Synthetic oligonucleotide
ucucgcuuuucagauucau

SEQ ID NO: 2625431 - RNA, 19 nt, Artificial Sequence
  Description of Artificial Sequence: Synthetic oligonucleotide
cauccucuuugaacaccag

SEQ ID NO: 2625432 - RNA, 19 nt, Artificial Sequence
  Description of Artificial Sequence: Synthetic oligonucleotide
gaaagcugugcgggaggcc

SEQ ID NO: 2625433 - RNA, 19 nt, Artificial Sequence
  Description of Artificial Sequence: Synthetic oligonucleotide
gcguuguacuuuaaaauga

SEQ ID NO: 2625434 - RNA, 19 nt, Artificial Sequence
  Description of Artificial Sequence: Synthetic oligonucleotide
uucaaacuugcagggcaau

SEQ ID NO: 2625435 - RNA, 19 nt, Artificial Sequence
  Description of Artificial Sequence: Synthetic oligonucleotide
caaacuugcagggcaaucu

SEQ ID NO: 2625436 - RNA, 19 nt, Artificial Sequence
  Description of Artificial Sequence: Synthetic oligonucleotide
ccucugauauggcacaguc

SEQ ID NO: 2625437 - RNA, 19 nt, Artificial Sequence
  Description of Artificial Sequence: Synthetic oligonucleotide
uucuggcuucaucugcguu

SEQ ID NO: 2625438 - RNA, 19 nt, Artificial Sequence
  Description of Artificial Sequence: Synthetic oligonucleotide
acugugcuccggauggcag

SEQ ID NO: 2625439 - RNA, 19 nt, Artificial Sequence
  Description of Artificial Sequence: Synthetic oligonucleotide
aacuuuuccuugaggucua

SEQ ID NO: 2625440 - RNA, 19 nt, Artificial Sequence
  Description of Artificial Sequence: Synthetic oligonucleotide
acgcugagaaaggcgcggg

SEQ ID NO: 2625441 - RNA, 19 nt, Artificial Sequence
  Description of Artificial Sequence: Synthetic oligonucleotide
gcuuccaaucguccauucc

SEQ ID NO: 2625442 - RNA, 19 nt, Artificial Sequence
  Description of Artificial Sequence: Synthetic oligonucleotide
ucccucugauauggcacag

SEQ ID NO: 2625443 - RNA, 19 nt, Artificial Sequence
  Description of Artificial Sequence: Synthetic oligonucleotide
gcgacgcugagaaaggcgc

SEQ ID NO: 2625444 - RNA, 19 nt, Artificial Sequence
  Description of Artificial Sequence: Synthetic oligonucleotide
ugguaaucucggagcccca

SEQ ID NO: 2625445 - RNA, 19 nt, Artificial Sequence
  Description of Artificial Sequence: Synthetic oligonucleotide
ggcgacgcugagaaaggcg

SEQ ID NO: 2625446 - RNA, 19 nt, Artificial Sequence
  Description of Artificial Sequence: Synthetic oligonucleotide
gguggagugugagacugug

SEQ ID NO: 2625447 - RNA, 19 nt, Artificial Sequence
  Description of Artificial Sequence: Synthetic oligonucleotide
ugguggagugugagacugu

SEQ ID NO: 2625448 - RNA, 19 nt, Artificial Sequence
  Description of Artificial Sequence: Synthetic oligonucleotide
agaaaggcgcgggaugaaa

SEQ ID NO: 2625449 - RNA, 19 nt, Artificial Sequence
  Description of Artificial Sequence: Synthetic oligonucleotide
cucauucuuuccucuacgu

SEQ ID NO: 2625450 - RNA, 19 nt, Artificial Sequence
  Description of Artificial Sequence: Synthetic oligonucleotide
cugccucaauaaauuacaa

SEQ ID NO: 2625451 - RNA, 19 nt, Artificial Sequence
  Description of Artificial Sequence: Synthetic oligonucleotide
cgggaugaaagcugugcgg

SEQ ID NO: 2625452 - RNA, 19 nt, Artificial Sequence
  Description of Artificial Sequence: Synthetic oligonucleotide
cuugagacuucuggcuuca

SEQ ID NO: 2625453 - RNA, 19 nt, Artificial Sequence
  Description of Artificial Sequence: Synthetic oligonucleotide
gacugugcuccggauggca

SEQ ID NO: 2625454 - RNA, 19 nt, Artificial Sequence
  Description of Artificial Sequence: Synthetic oligonucleotide
ggaccagaauguaaaaugu

SEQ ID NO: 2625455 - RNA, 19 nt, Artificial Sequence
  Description of Artificial Sequence: Synthetic oligonucleotide
gugugagacugugcuccgg

SEQ ID NO: 2625456 - RNA, 19 nt, Artificial Sequence
  Description of Artificial Sequence: Synthetic oligonucleotide
uccgaggggcgacgcugag

SEQ ID NO: 2625457 - RNA, 19 nt, Artificial Sequence
  Description of Artificial Sequence: Synthetic oligonucleotide
cauuccccaacauuuugau

SEQ ID NO: 2625458 - RNA, 19 nt, Artificial Sequence
  Description of Artificial Sequence: Synthetic oligonucleotide
caucuccaggaccaaaggu

SEQ ID NO: 2625459 - RNA, 19 nt, Artificial Sequence
  Description of Artificial Sequence: Synthetic oligonucleotide
ccaaugucaucaaacugaa

SEQ ID NO: 2625460 - RNA, 19 nt, Artificial Sequence
  Description of Artificial Sequence: Synthetic oligonucleotide
guggagugugagacugugc

SEQ ID NO: 2625461 - RNA, 19 nt, Artificial Sequence
  Description of Artificial Sequence: Synthetic oligonucleotide
ggagugugagacugugcuc

SEQ ID NO: 2625462 - RNA, 19 nt, Artificial Sequence
  Description of Artificial Sequence: Synthetic oligonucleotide
ggccaagaagcgugcucgg

SEQ ID NO: 2625463 - RNA, 19 nt, Artificial Sequence
  Description of Artificial Sequence: Synthetic oligonucleotide
auucuugggcauggcggca

SEQ ID NO: 2625464 - RNA, 19 nt, Artificial Sequence
  Description of Artificial Sequence: Synthetic oligonucleotide
gaacggcggcgacuccgag

SEQ ID NO: 2625465 - RNA, 19 nt, Artificial Sequence
  Description of Artificial Sequence: Synthetic oligonucleotide
ggaugaaagcugugcggga

SEQ ID NO: 2625466 - RNA, 19 nt, Artificial Sequence
  Description of Artificial Sequence: Synthetic oligonucleotide
cuugggcauggcggcaagc

SEQ ID NO: 2625467 - RNA, 19 nt, Artificial Sequence
  Description of Artificial Sequence: Synthetic oligonucleotide
ccuugagacuucuggcuuc

SEQ ID NO: 2625468 - RNA, 19 nt, Artificial Sequence
  Description of Artificial Sequence: Synthetic oligonucleotide
gauauggcacagucucuuu

SEQ ID NO: 2625469 - RNA, 19 nt, Artificial Sequence
  Description of Artificial Sequence: Synthetic oligonucleotide
ccagcucucgcuuuucaga

SEQ ID NO: 2625470 - RNA, 19 nt, Artificial Sequence
  Description of Artificial Sequence: Synthetic oligonucleotide
ggcaagcugguggagugug

SEQ ID NO: 2625471 - RNA, 19 nt, Artificial Sequence
  Description of Artificial Sequence: Synthetic oligonucleotide
cuggccagauuucaaacuu

SEQ ID NO: 2625472 - RNA, 19 nt, Artificial Sequence
  Description of Artificial Sequence: Synthetic oligonucleotide
gaccagaauguaaaauguu

SEQ ID NO: 2625473 - RNA, 19 nt, Artificial Sequence
  Description of Artificial Sequence: Synthetic oligonucleotide
aggcgcgggaugaaagcug

SEQ ID NO: 2625474 - RNA, 19 nt, Artificial Sequence
  Description of Artificial Sequence: Synthetic oligonucleotide
gguaaucucggagccccac

SEQ ID NO: 2625475 - RNA, 19 nt, Artificial Sequence
  Description of Artificial Sequence: Synthetic oligonucleotide
caggaccaaagguaucugu

SEQ ID NO: 2625476 - RNA, 19 nt, Artificial Sequence
  Description of Artificial Sequence: Synthetic oligonucleotide
ggggcgacgcugagaaagg

SEQ ID NO: 2625477 - RNA, 19 nt, Artificial Sequence
  Description of Artificial Sequence: Synthetic oligonucleotide
cugauauggcacagucucu

SEQ ID NO: 2625478 - RNA, 19 nt, Artificial Sequence
  Description of Artificial Sequence: Synthetic oligonucleotide
agcugugcgggaggccaag

SEQ ID NO: 2625479 - RNA, 19 nt, Artificial Sequence
  Description of Artificial Sequence: Synthetic oligonucleotide
cuugcccauccucuuugaa

SEQ ID NO: 2625480 - RNA, 19 nt, Artificial Sequence
  Description of Artificial Sequence: Synthetic oligonucleotide
cggagccccaccaauauga

SEQ ID NO: 2625481 - RNA, 19 nt, Artificial Sequence
  Description of Artificial Sequence: Synthetic oligonucleotide
cagcucucgcuuuucagau

SEQ ID NO: 2625482 - RNA, 19 nt, Artificial Sequence
  Description of Artificial Sequence: Synthetic oligonucleotide
ccaagaagcgugcucggaa

SEQ ID NO: 2625483 - RNA, 19 nt, Artificial Sequence
  Description of Artificial Sequence: Synthetic oligonucleotide
cucucgcuuuucagauuca

SEQ ID NO: 2625484 - RNA, 19 nt, Artificial Sequence
  Description of Artificial Sequence: Synthetic oligonucleotide
ccugguaaucucggagccc

SEQ ID NO: 2625485 - RNA, 19 nt, Artificial Sequence
  Description of Artificial Sequence: Synthetic oligonucleotide
gagaaaggcgcgggaugaa

SEQ ID NO: 2625486 - RNA, 19 nt, Artificial Sequence
  Description of Artificial Sequence: Synthetic oligonucleotide
gcuuuguuauccugguaau

SEQ ID NO: 2625487 - RNA, 19 nt, Artificial Sequence
  Description of Artificial Sequence: Synthetic oligonucleotide
gaagcucgccauaugccuu

SEQ ID NO: 2625488 - RNA, 19 nt, Artificial Sequence
  Description of Artificial Sequence: Synthetic oligonucleotide
cugugcgggaggccaagaa

SEQ ID NO: 2625489 - RNA, 19 nt, Artificial Sequence
  Description of Artificial Sequence: Synthetic oligonucleotide
cgcgggaugaaagcugugc

SEQ ID NO: 2625490 - RNA, 19 nt, Artificial Sequence
  Description of Artificial Sequence: Synthetic oligonucleotide
cucgcuuuucagauucauu

SEQ ID NO: 2625491 - RNA, 19 nt, Artificial Sequence
  Description of Artificial Sequence: Synthetic oligonucleotide
cuccgaggggcgacgcuga

SEQ ID NO: 2625492 - RNA, 19 nt, Artificial Sequence
  Description of Artificial Sequence: Synthetic oligonucleotide
aagcugugcgggaggccaa

SEQ ID NO: 2625493 - RNA, 19 nt, Artificial Sequence
  Description of Artificial Sequence: Synthetic oligonucleotide
cuggcuucaucugcguugu

SEQ ID NO: 2625494 - RNA, 19 nt, Artificial Sequence
  Description of Artificial Sequence: Synthetic oligonucleotide
uggcggcaagcugguggag

SEQ ID NO: 2625495 - RNA, 19 nt, Artificial Sequence
  Description of Artificial Sequence: Synthetic oligonucleotide
gggaggccaagaagcgugc

SEQ ID NO: 2625496 - RNA, 19 nt, Artificial Sequence
  Description of Artificial Sequence: Synthetic oligonucleotide
gccagauuucaaacuugca

SEQ ID NO: 2625497 - RNA, 19 nt, Artificial Sequence
  Description of Artificial Sequence: Synthetic oligonucleotide
acuuuuccuugaggucuau

SEQ ID NO: 2625498 - RNA, 19 nt, Artificial Sequence
  Description of Artificial Sequence: Synthetic oligonucleotide
cucggagccccaccaauau

SEQ ID NO: 2625499 - RNA, 19 nt, Artificial Sequence
  Description of Artificial Sequence: Synthetic oligonucleotide
ccaaucguccauuccccaa

SEQ ID NO: 2625500 - RNA, 19 nt, Artificial Sequence
  Description of Artificial Sequence: Synthetic oligonucleotide
uugagacuucuggcuucau

SEQ ID NO: 2625501 - RNA, 19 nt, Artificial Sequence
  Description of Artificial Sequence: Synthetic oligonucleotide
cugcuuuguuauccuggua

SEQ ID NO: 2625502 - RNA, 19 nt, Artificial Sequence
  Description of Artificial Sequence: Synthetic oligonucleotide
gcauauucuugcccauccu

SEQ ID NO: 2625503 - RNA, 19 nt, Artificial Sequence
  Description of Artificial Sequence: Synthetic oligonucleotide
ccucaauuucccucugaua

SEQ ID NO: 2625504 - RNA, 19 nt, Artificial Sequence
  Description of Artificial Sequence: Synthetic oligonucleotide
cuccggauggcagcaggaa

SEQ ID NO: 2625505 - RNA, 19 nt, Artificial Sequence
  Description of Artificial Sequence: Synthetic oligonucleotide
cacagucucuuuacaccau

SEQ ID NO: 2625506 - RNA, 19 nt, Artificial Sequence
  Description of Artificial Sequence: Synthetic oligonucleotide
cggauggcagcaggaacgg

SEQ ID NO: 2625507 - RNA, 19 nt, Artificial Sequence
  Description of Artificial Sequence: Synthetic oligonucleotide
ccaggaccaaagguaucug

SEQ ID NO: 2625508 - RNA, 19 nt, Artificial Sequence
  Description of Artificial Sequence: Synthetic oligonucleotide
gcucgccauaugccuugag

SEQ ID NO: 2625509 - RNA, 19 nt, Artificial Sequence
  Description of Artificial Sequence: Synthetic oligonucleotide
gcggcgacuccgaggggcg

SEQ ID NO: 2625510 - RNA, 19 nt, Artificial Sequence
  Description of Artificial Sequence: Synthetic oligonucleotide
agcucgccauaugccuuga

SEQ ID NO: 2625511 - RNA, 19 nt, Artificial Sequence
  Description of Artificial Sequence: Synthetic oligonucleotide
gggcgacgcugagaaaggc

SEQ ID NO: 2625512 - RNA, 19 nt, Artificial Sequence
  Description of Artificial Sequence: Synthetic oligonucleotide
gcgacuccgaggggcgacg

SEQ ID NO: 2625513 - RNA, 19 nt, Artificial Sequence
  Description of Artificial Sequence: Synthetic oligonucleotide
ccccaacauuuugauuacc

SEQ ID NO: 2625514 - RNA, 19 nt, Artificial Sequence
  Description of Artificial Sequence: Synthetic oligonucleotide
gucuaugacuggccagauu

SEQ ID NO: 2625515 - RNA, 19 nt, Artificial Sequence
  Description of Artificial Sequence: Synthetic oligonucleotide
gacuccgaggggcgacgcu

SEQ ID NO: 2625516 - RNA, 19 nt, Artificial Sequence
  Description of Artificial Sequence: Synthetic oligonucleotide
ggaacggcggcgacuccga

SEQ ID NO: 2625517 - RNA, 19 nt, Artificial Sequence
  Description of Artificial Sequence: Synthetic oligonucleotide
caucugcguuguacuuuaa

SEQ ID NO: 2625518 - RNA, 19 nt, Artificial Sequence
  Description of Artificial Sequence: Synthetic oligonucleotide
gcugagaaaggcgcgggau

SEQ ID NO: 2625519 - RNA, 19 nt, Artificial Sequence
  Description of Artificial Sequence: Synthetic oligonucleotide
gccaagaagcgugcucgga

SEQ ID NO: 2625520 - RNA, 19 nt, Artificial Sequence
  Description of Artificial Sequence: Synthetic oligonucleotide
gccuugagacuucuggcuu

SEQ ID NO: 2625521 - RNA, 19 nt, Artificial Sequence
  Description of Artificial Sequence: Synthetic oligonucleotide
gaggggcgacgcugagaaa

SEQ ID NO: 2625522 - RNA, 19 nt, Artificial Sequence
  Description of Artificial Sequence: Synthetic oligonucleotide
gcuccggauggcagcagga

SEQ ID NO: 2625523 - RNA, 19 nt, Artificial Sequence
  Description of Artificial Sequence: Synthetic oligonucleotide
ggcgcgggaugaaagcugu

SEQ ID NO: 2625524 - RNA, 19 nt, Artificial Sequence
  Description of Artificial Sequence: Synthetic oligonucleotide
gcaagcugguggaguguga

SEQ ID NO: 2625525 - RNA, 19 nt, Artificial Sequence
  Description of Artificial Sequence: Synthetic oligonucleotide
gcucuggaagcucgccaua

SEQ ID NO: 2625526 - RNA, 19 nt, Artificial Sequence
  Description of Artificial Sequence: Synthetic oligonucleotide
ggcggcaagcugguggagu

SEQ ID NO: 2625527 - RNA, 19 nt, Artificial Sequence
  Description of Artificial Sequence: Synthetic oligonucleotide
cgccauaugccuugagacu

SEQ ID NO: 2625528 - RNA, 19 nt, Artificial Sequence
  Description of Artificial Sequence: Synthetic oligonucleotide
gcugugcgggaggccaaga

SEQ ID NO: 2625529 - RNA, 19 nt, Artificial Sequence
  Description of Artificial Sequence: Synthetic oligonucleotide
gcauggcggcaagcuggug

SEQ ID NO: 2625530 - RNA, 19 nt, Artificial Sequence
  Description of Artificial Sequence: Synthetic oligonucleotide
gcgcgggaugaaagcugug

SEQ ID NO: 2625531 - RNA, 19 nt, Artificial Sequence
  Description of Artificial Sequence: Synthetic oligonucleotide
cgacuccgaggggcgacgc

SEQ ID NO: 2625532 - RNA, 19 nt, Artificial Sequence
  Description of Artificial Sequence: Synthetic oligonucleotide
ccgaggggcgacgcugaga

SEQ ID NO: 2625533 - RNA, 19 nt, Artificial Sequence
  Description of Artificial Sequence: Synthetic oligonucleotide
ccccaccaauaugaugucu

SEQ ID NO: 2625534 - RNA, 19 nt, Artificial Sequence
  Description of Artificial Sequence: Synthetic oligonucleotide
cggcggcgacuccgagggg

SEQ ID NO: 2625535 - RNA, 19 nt, Artificial Sequence
  Description of Artificial Sequence: Synthetic oligonucleotide
cggcgacuccgaggggcga

SEQ ID NO: 2625536 - RNA, 19 nt, Artificial Sequence
  Description of Artificial Sequence: Synthetic oligonucleotide
uauacugaaacuuccagcc

SEQ ID NO: 2625537 - RNA, 19 nt, Artificial Sequence
  Description of Artificial Sequence: Synthetic oligonucleotide
agugauugaguccaaggcc

SEQ ID NO: 2625538 - RNA, 19 nt, Artificial Sequence
  Description of Artificial Sequence: Synthetic oligonucleotide
cauggacucauuuugaggg

SEQ ID NO: 2625539 - RNA, 19 nt, Artificial Sequence
  Description of Artificial Sequence: Synthetic oligonucleotide
ucuucaagcagccuuaucu

SEQ ID NO: 2625540 - RNA, 19 nt, Artificial Sequence
  Description of Artificial Sequence: Synthetic oligonucleotide
acugaaaccgcguaggguc

SEQ ID NO: 2625541 - RNA, 19 nt, Artificial Sequence
  Description of Artificial Sequence: Synthetic oligonucleotide
acauuuaccacauuacgug

SEQ ID NO: 2625542 - RNA, 19 nt, Artificial Sequence
  Description of Artificial Sequence: Synthetic oligonucleotide
ugugcagucaucaggcagg

SEQ ID NO: 2625543 - RNA, 19 nt, Artificial Sequence
  Description of Artificial Sequence: Synthetic oligonucleotide
cauuuugagggcaaggccc

SEQ ID NO: 2625544 - RNA, 19 nt, Artificial Sequence
  Description of Artificial Sequence: Synthetic oligonucleotide
aacuucacuguguuugagg

SEQ ID NO: 2625545 - RNA, 19 nt, Artificial Sequence
  Description of Artificial Sequence: Synthetic oligonucleotide
uuaccgaaaagcuaccuca

SEQ ID NO: 2625546 - RNA, 19 nt, Artificial Sequence
  Description of Artificial Sequence: Synthetic oligonucleotide
gauggggugguccagacug

SEQ ID NO: 2625547 - RNA, 19 nt, Artificial Sequence
  Description of Artificial Sequence: Synthetic oligonucleotide
ugagugauugaguccaagg

SEQ ID NO: 2625548 - RNA, 19 nt, Artificial Sequence
  Description of Artificial Sequence: Synthetic oligonucleotide
ucgguuaccgaaaagcuac

SEQ ID NO: 2625549 - RNA, 19 nt, Artificial Sequence
  Description of Artificial Sequence: Synthetic oligonucleotide
uucacaggacaccaguggg

SEQ ID NO: 2625550 - RNA, 19 nt, Artificial Sequence
  Description of Artificial Sequence: Synthetic oligonucleotide
gaaggcagugcacagacug

SEQ ID NO: 2625551 - RNA, 19 nt, Artificial Sequence
  Description of Artificial Sequence: Synthetic oligonucleotide
ucaggguucacguaguugu

SEQ ID NO: 2625552 - RNA, 19 nt, Artificial Sequence
  Description of Artificial Sequence: Synthetic oligonucleotide
ugaguccaaggccugaggg

SEQ ID NO: 2625553 - RNA, 19 nt, Artificial Sequence
  Description of Artificial Sequence: Synthetic oligonucleotide
ucaucgguuaccgaaaagc

SEQ ID NO: 2625554 - RNA, 19 nt, Artificial Sequence
  Description of Artificial Sequence: Synthetic oligonucleotide
aaacugccuaggcuggccc

SEQ ID NO: 2625555 - RNA, 19 nt, Artificial Sequence
  Description of Artificial Sequence: Synthetic oligonucleotide
ugcacagacugaaaccgcg

SEQ ID NO: 2625556 - RNA, 19 nt, Artificial Sequence
  Description of Artificial Sequence: Synthetic oligonucleotide
auuacguggguucucagga

SEQ ID NO: 2625557 - RNA, 19 nt, Artificial Sequence
  Description of Artificial Sequence: Synthetic oligonucleotide
accaguagcaaaccagaac

SEQ ID NO: 2625558 - RNA, 19 nt, Artificial Sequence
  Description of Artificial Sequence: Synthetic oligonucleotide
guauacugaaacuuccagc

SEQ ID NO: 2625559 - RNA, 19 nt, Artificial Sequence
  Description of Artificial Sequence: Synthetic oligonucleotide
cauuuaccacauuacgugg

SEQ ID NO: 2625560 - RNA, 19 nt, Artificial Sequence
  Description of Artificial Sequence: Synthetic oligonucleotide
cagacgggcacccagaagc

SEQ ID NO: 2625561 - RNA, 19 nt, Artificial Sequence
  Description of Artificial Sequence: Synthetic oligonucleotide
uacugaaacuuccagccac

SEQ ID NO: 2625562 - RNA, 19 nt, Artificial Sequence
  Description of Artificial Sequence: Synthetic oligonucleotide
agagcagccaccugggguc

SEQ ID NO: 2625563 - RNA, 19 nt, Artificial Sequence
  Description of Artificial Sequence: Synthetic oligonucleotide
aaagcuaccucaccccugu

SEQ ID NO: 2625564 - RNA, 19 nt, Artificial Sequence
  Description of Artificial Sequence: Synthetic oligonucleotide
aacuuccagccacauuuac

SEQ ID NO: 2625565 - RNA, 19 nt, Artificial Sequence
  Description of Artificial Sequence: Synthetic oligonucleotide
ucaugaaacugccuaggcu

SEQ ID NO: 2625566 - RNA, 19 nt, Artificial Sequence
  Description of Artificial Sequence: Synthetic oligonucleotide
acuucacuguguuugaggu

SEQ ID NO: 2625567 - RNA, 19 nt, Artificial Sequence
  Description of Artificial Sequence: Synthetic oligonucleotide
cacaauguagcccacugug

SEQ ID NO: 2625568 - RNA, 19 nt, Artificial Sequence
  Description of Artificial Sequence: Synthetic oligonucleotide
agcccuuccacaauguagc

SEQ ID NO: 2625569 - RNA, 19 nt, Artificial Sequence
  Description of Artificial Sequence: Synthetic oligonucleotide
ugcagaacggcaucggaug

SEQ ID NO: 2625570 - RNA, 19 nt, Artificial Sequence
  Description of Artificial Sequence: Synthetic oligonucleotide
cacugugcagucaucaggc

SEQ ID NO: 2625571 - RNA, 19 nt, Artificial Sequence
  Description of Artificial Sequence: Synthetic oligonucleotide
cuucacaggacaccagugg

SEQ ID NO: 2625572 - RNA, 19 nt, Artificial Sequence
  Description of Artificial Sequence: Synthetic oligonucleotide
uagauguccugguuggaag

SEQ ID NO: 2625573 - RNA, 19 nt, Artificial Sequence
  Description of Artificial Sequence: Synthetic oligonucleotide
uggaagagggaucucggga

SEQ ID NO: 2625574 - RNA, 19 nt, Artificial Sequence
  Description of Artificial Sequence: Synthetic oligonucleotide
cuuccagccacauuuacca

SEQ ID NO: 2625575 - RNA, 19 nt, Artificial Sequence
  Description of Artificial Sequence: Synthetic oligonucleotide
acugggucgccccagguag

SEQ ID NO: 2625576 - RNA, 19 nt, Artificial Sequence
  Description of Artificial Sequence: Synthetic oligonucleotide
auggacucauuuugagggc

SEQ ID NO: 2625577 - RNA, 19 nt, Artificial Sequence
  Description of Artificial Sequence: Synthetic oligonucleotide
ugcugagugauugagucca

SEQ ID NO: 2625578 - RNA, 19 nt, Artificial Sequence
  Description of Artificial Sequence: Synthetic oligonucleotide
ucucgggaggucuucaagc

SEQ ID NO: 2625579 - RNA, 19 nt, Artificial Sequence
  Description of Artificial Sequence: Synthetic oligonucleotide
ugaggugcggccacccugg

SEQ ID NO: 2625580 - RNA, 19 nt, Artificial Sequence
  Description of Artificial Sequence: Synthetic oligonucleotide
cauuacguggguucucagg

SEQ ID NO: 2625581 - RNA, 19 nt, Artificial Sequence
  Description of Artificial Sequence: Synthetic oligonucleotide
accgaaaagcuaccucacc

SEQ ID NO: 2625582 - RNA, 19 nt, Artificial Sequence
  Description of Artificial Sequence: Synthetic oligonucleotide
uuuaccacauuacgugggu

SEQ ID NO: 2625583 - RNA, 19 nt, Artificial Sequence
  Description of Artificial Sequence: Synthetic oligonucleotide
uucuucacaggacaccagu

SEQ ID NO: 2625584 - RNA, 19 nt, Artificial Sequence
  Description of Artificial Sequence: Synthetic oligonucleotide
uucaagcagccuuaucugc

SEQ ID NO: 2625585 - RNA, 19 nt, Artificial Sequence
  Description of Artificial Sequence: Synthetic oligonucleotide
uguucuucacaggacacca

SEQ ID NO: 2625586 - RNA, 19 nt, Artificial Sequence
  Description of Artificial Sequence: Synthetic oligonucleotide
auuuugagggcaaggcccc

SEQ ID NO: 2625587 - RNA, 19 nt, Artificial Sequence
  Description of Artificial Sequence: Synthetic oligonucleotide
ucuucacaggacaccagug

SEQ ID NO: 2625588 - RNA, 19 nt, Artificial Sequence
  Description of Artificial Sequence: Synthetic oligonucleotide
acuguguuugaggugcggc

SEQ ID NO: 2625589 - RNA, 19 nt, Artificial Sequence
  Description of Artificial Sequence: Synthetic oligonucleotide
ugcucaugaaacugccuag

SEQ ID NO: 2625590 - RNA, 19 nt, Artificial Sequence
  Description of Artificial Sequence: Synthetic oligonucleotide
acagacugaaaccgcguag

SEQ ID NO: 2625591 - RNA, 19 nt, Artificial Sequence
  Description of Artificial Sequence: Synthetic oligonucleotide
ugggaguggaacagggugc

SEQ ID NO: 2625592 - RNA, 19 nt, Artificial Sequence
  Description of Artificial Sequence: Synthetic oligonucleotide
uacguggguucucaggacc

SEQ ID NO: 2625593 - RNA, 19 nt, Artificial Sequence
  Description of Artificial Sequence: Synthetic oligonucleotide
gaagagggaucucgggagg

SEQ ID NO: 2625594 - RNA, 19 nt, Artificial Sequence
  Description of Artificial Sequence: Synthetic oligonucleotide
aacggcaucggauggcagu

SEQ ID NO: 2625595 - RNA, 19 nt, Artificial Sequence
  Description of Artificial Sequence: Synthetic oligonucleotide
auuuaccacauuacguggg

SEQ ID NO: 2625596 - RNA, 19 nt, Artificial Sequence
  Description of Artificial Sequence: Synthetic oligonucleotide
acaauguagcccacugugc

SEQ ID NO: 2625597 - RNA, 19 nt, Artificial Sequence
  Description of Artificial Sequence: Synthetic oligonucleotide
guaccugguguccaacugg

SEQ ID NO: 2625598 - RNA, 19 nt, Artificial Sequence
  Description of Artificial Sequence: Synthetic oligonucleotide
gaagcagacgggcacccag

SEQ ID NO: 2625599 - RNA, 19 nt, Artificial Sequence
  Description of Artificial Sequence: Synthetic oligonucleotide
aagcccuuccacaauguag

SEQ ID NO: 2625600 - RNA, 19 nt, Artificial Sequence
  Description of Artificial Sequence: Synthetic oligonucleotide
uagcaaaccagaacuucac

SEQ ID NO: 2625601 - RNA, 19 nt, Artificial Sequence
  Description of Artificial Sequence: Synthetic oligonucleotide
uuaucugcugcugagugau

SEQ ID NO: 2625602 - RNA, 19 nt, Artificial Sequence
  Description of Artificial Sequence: Synthetic oligonucleotide
uugaguccaaggccugagg

SEQ ID NO: 2625603 - RNA, 19 nt, Artificial Sequence
  Description of Artificial Sequence: Synthetic oligonucleotide
ggugucuggguagagaagg

SEQ ID NO: 2625604 - RNA, 19 nt, Artificial Sequence
  Description of Artificial Sequence: Synthetic oligonucleotide
cagugcacagacugaaacc

SEQ ID NO: 2625605 - RNA, 19 nt, Artificial Sequence
  Description of Artificial Sequence: Synthetic oligonucleotide
gaacagggugcugugaagc

SEQ ID NO: 2625606 - RNA, 19 nt, Artificial Sequence
  Description of Artificial Sequence: Synthetic oligonucleotide
aacagggugcugugaagca

SEQ ID NO: 2625607 - RNA, 19 nt, Artificial Sequence
  Description of Artificial Sequence: Synthetic oligonucleotide
agacugaaaccgcguaggg

SEQ ID NO: 2625608 - RNA, 19 nt, Artificial Sequence
  Description of Artificial Sequence: Synthetic oligonucleotide
ucuggguagagaaggcagu

SEQ ID NO: 2625609 - RNA, 19 nt, Artificial Sequence
  Description of Artificial Sequence: Synthetic oligonucleotide
cagacugaaaccgcguagg

SEQ ID NO: 2625610 - RNA, 19 nt, Artificial Sequence
  Description of Artificial Sequence: Synthetic oligonucleotide
uaccacauuacguggguuc

SEQ ID NO: 2625611 - RNA, 19 nt, Artificial Sequence
  Description of Artificial Sequence: Synthetic oligonucleotide
aguccaaggccugagggag

SEQ ID NO: 2625612 - RNA, 19 nt, Artificial Sequence
  Description of Artificial Sequence: Synthetic oligonucleotide
ggaagagggaucucgggag

SEQ ID NO: 2625613 - RNA, 19 nt, Artificial Sequence
  Description of Artificial Sequence: Synthetic oligonucleotide
gcuuucaggguucacguag

SEQ ID NO: 2625614 - RNA, 19 nt, Artificial Sequence
  Description of Artificial Sequence: Synthetic oligonucleotide
ugggugucuggguagagaa

SEQ ID NO: 2625615 - RNA, 19 nt, Artificial Sequence
  Description of Artificial Sequence: Synthetic oligonucleotide
ggugaccugcugcagaacg

SEQ ID NO: 2625616 - RNA, 19 nt, Artificial Sequence
  Description of Artificial Sequence: Synthetic oligonucleotide
cucaugaaacugccuaggc

SEQ ID NO: 2625617 - RNA, 19 nt, Artificial Sequence
  Description of Artificial Sequence: Synthetic oligonucleotide
agcuaccucaccccuguuc

SEQ ID NO: 2625618 - RNA, 19 nt, Artificial Sequence
  Description of Artificial Sequence: Synthetic oligonucleotide
uggaacagggugcugugaa

SEQ ID NO: 2625619 - RNA, 19 nt, Artificial Sequence
  Description of Artificial Sequence: Synthetic oligonucleotide
uugaggugcggccacccug

SEQ ID NO: 2625620 - RNA, 19 nt, Artificial Sequence
  Description of Artificial Sequence: Synthetic oligonucleotide
agccacauuuaccacauua

SEQ ID NO: 2625621 - RNA, 19 nt, Artificial Sequence
  Description of Artificial Sequence: Synthetic oligonucleotide
guuaccgaaaagcuaccuc

SEQ ID NO: 2625622 - RNA, 19 nt, Artificial Sequence
  Description of Artificial Sequence: Synthetic oligonucleotide
uucccgagguaccuggugu

SEQ ID NO: 2625623 - RNA, 19 nt, Artificial Sequence
  Description of Artificial Sequence: Synthetic oligonucleotide
uuggaagagaagguggaaa

SEQ ID NO: 2625624 - RNA, 19 nt, Artificial Sequence
  Description of Artificial Sequence: Synthetic oligonucleotide
caggcuuucaggguucacg

SEQ ID NO: 2625625 - RNA, 19 nt, Artificial Sequence
  Description of Artificial Sequence: Synthetic oligonucleotide
uguccucacuuucccgagg

SEQ ID NO: 2625626 - RNA, 19 nt, Artificial Sequence
  Description of Artificial Sequence: Synthetic oligonucleotide
uguguuugaggugcggcca

SEQ ID NO: 2625627 - RNA, 19 nt, Artificial Sequence
  Description of Artificial Sequence: Synthetic oligonucleotide
uaccugguguccaacugga

SEQ ID NO: 2625628 - RNA, 19 nt, Artificial Sequence
  Description of Artificial Sequence: Synthetic oligonucleotide
ugauugaguccaaggccug

SEQ ID NO: 2625629 - RNA, 19 nt, Artificial Sequence
  Description of Artificial Sequence: Synthetic oligonucleotide
accccuguucuucacagga

SEQ ID NO: 2625630 - RNA, 19 nt, Artificial Sequence
  Description of Artificial Sequence: Synthetic oligonucleotide
uaccgaaaagcuaccucac

SEQ ID NO: 2625631 - RNA, 19 nt, Artificial Sequence
  Description of Artificial Sequence: Synthetic oligonucleotide
agaacuucacuguguuuga

SEQ ID NO: 2625632 - RNA, 19 nt, Artificial Sequence
  Description of Artificial Sequence: Synthetic oligonucleotide
ggugcggccacccuggacc

SEQ ID NO: 2625633 - RNA, 19 nt, Artificial Sequence
  Description of Artificial Sequence: Synthetic oligonucleotide
gacaccagugggugucugg

SEQ ID NO: 2625634 - RNA, 19 nt, Artificial Sequence
  Description of Artificial Sequence: Synthetic oligonucleotide
aggcuuucaggguucacgu

SEQ ID NO: 2625635 - RNA, 19 nt, Artificial Sequence
  Description of Artificial Sequence: Synthetic oligonucleotide
uuuuccaggugggagugga

SEQ ID NO: 2625636 - RNA, 19 nt, Artificial Sequence
  Description of Artificial Sequence: Synthetic oligonucleotide
cugguguccaacuggaaga

SEQ ID NO: 2625637 - RNA, 19 nt, Artificial Sequence
  Description of Artificial Sequence: Synthetic oligonucleotide
uccaacuggaagagggauc

SEQ ID NO: 2625638 - RNA, 19 nt, Artificial Sequence
  Description of Artificial Sequence: Synthetic oligonucleotide
cugugcagucaucaggcag

SEQ ID NO: 2625639 - RNA, 19 nt, Artificial Sequence
  Description of Artificial Sequence: Synthetic oligonucleotide
agauguccugguuggaaga

SEQ ID NO: 2625640 - RNA, 19 nt, Artificial Sequence
  Description of Artificial Sequence: Synthetic oligonucleotide
cuggaagagggaucucggg

SEQ ID NO: 2625641 - RNA, 19 nt, Artificial Sequence
  Description of Artificial Sequence: Synthetic oligonucleotide
uuucccgagguaccuggug

SEQ ID NO: 2625642 - RNA, 19 nt, Artificial Sequence
  Description of Artificial Sequence: Synthetic oligonucleotide
agccuuaucugcugcugag

SEQ ID NO: 2625643 - RNA, 19 nt, Artificial Sequence
  Description of Artificial Sequence: Synthetic oligonucleotide
uccaggugggaguggaaca

SEQ ID NO: 2625644 - RNA, 19 nt, Artificial Sequence
  Description of Artificial Sequence: Synthetic oligonucleotide
auacugaaacuuccagcca

SEQ ID NO: 2625645 - RNA, 19 nt, Artificial Sequence
  Description of Artificial Sequence: Synthetic oligonucleotide
agggcaaggccccugcuca

SEQ ID NO: 2625646 - RNA, 19 nt, Artificial Sequence
  Description of Artificial Sequence: Synthetic oligonucleotide
aaaagcuaccucaccccug

SEQ ID NO: 2625647 - RNA, 19 nt, Artificial Sequence
  Description of Artificial Sequence: Synthetic oligonucleotide
guagcaaaccagaacuuca

SEQ ID NO: 2625648 - RNA, 19 nt, Artificial Sequence
  Description of Artificial Sequence: Synthetic oligonucleotide
agcaaaccagaacuucacu

SEQ ID NO: 2625649 - RNA, 19 nt, Artificial Sequence
  Description of Artificial Sequence: Synthetic oligonucleotide
gucuggguagagaaggcag

SEQ ID NO: 2625650 - RNA, 19 nt, Artificial Sequence
  Description of Artificial Sequence: Synthetic oligonucleotide
agccccaccaguagcaaac

SEQ ID NO: 2625651 - RNA, 19 nt, Artificial Sequence
  Description of Artificial Sequence: Synthetic oligonucleotide
aucucgggaggucuucaag

SEQ ID NO: 2625652 - RNA, 19 nt, Artificial Sequence
  Description of Artificial Sequence: Synthetic oligonucleotide
aggguccuguuguauacug

SEQ ID NO: 2625653 - RNA, 19 nt, Artificial Sequence
  Description of Artificial Sequence: Synthetic oligonucleotide
augaaacugccuaggcugg

SEQ ID NO: 2625654 - RNA, 19 nt, Artificial Sequence
  Description of Artificial Sequence: Synthetic oligonucleotide
acaccagugggugucuggg

SEQ ID NO: 2625655 - RNA, 19 nt, Artificial Sequence
  Description of Artificial Sequence: Synthetic oligonucleotide
ccgaaaagcuaccucaccc

SEQ ID NO: 2625656 - RNA, 19 nt, Artificial Sequence
  Description of Artificial Sequence: Synthetic oligonucleotide
cugaaaccgcguagggucc

SEQ ID NO: 2625657 - RNA, 19 nt, Artificial Sequence
  Description of Artificial Sequence: Synthetic oligonucleotide
auugaguccaaggccugag

SEQ ID NO: 2625658 - RNA, 19 nt, Artificial Sequence
  Description of Artificial Sequence: Synthetic oligonucleotide
cugugaagcagacgggcac

SEQ ID NO: 2625659 - RNA, 19 nt, Artificial Sequence
  Description of Artificial Sequence: Synthetic oligonucleotide
ucacuguguuugaggugcg

SEQ ID NO: 2625660 - RNA, 19 nt, Artificial Sequence
  Description of Artificial Sequence: Synthetic oligonucleotide
ugguguccaacuggaagag

SEQ ID NO: 2625661 - RNA, 19 nt, Artificial Sequence
  Description of Artificial Sequence: Synthetic oligonucleotide
ggugguccagacugggucg

SEQ ID NO: 2625662 - RNA, 19 nt, Artificial Sequence
  Description of Artificial Sequence: Synthetic oligonucleotide
aagguggaaagcaggugca

SEQ ID NO: 2625663 - RNA, 19 nt, Artificial Sequence
  Description of Artificial Sequence: Synthetic oligonucleotide
cagguuuuccaggugggag

SEQ ID NO: 2625664 - RNA, 19 nt, Artificial Sequence
  Description of Artificial Sequence: Synthetic oligonucleotide
ugccuaggcuggcccaugg

SEQ ID NO: 2625665 - RNA, 19 nt, Artificial Sequence
  Description of Artificial Sequence: Synthetic oligonucleotide
gaaacugccuaggcuggcc

SEQ ID NO: 2625666 - RNA, 19 nt, Artificial Sequence
  Description of Artificial Sequence: Synthetic oligonucleotide
caagcagccuuaucugcug

SEQ ID NO: 2625667 - RNA, 19 nt, Artificial Sequence
  Description of Artificial Sequence: Synthetic oligonucleotide
aagcaggugcagcaggcuu

SEQ ID NO: 2625668 - RNA, 19 nt, Artificial Sequence
  Description of Artificial Sequence: Synthetic oligonucleotide
cugcugagugauugagucc

SEQ ID NO: 2625669 - RNA, 19 nt, Artificial Sequence
  Description of Artificial Sequence: Synthetic oligonucleotide
gaaaagcuaccucaccccu

SEQ ID NO: 2625670 - RNA, 19 nt, Artificial Sequence
  Description of Artificial Sequence: Synthetic oligonucleotide
ugcugcugagugauugagu

SEQ ID NO: 2625671 - RNA, 19 nt, Artificial Sequence
  Description of Artificial Sequence: Synthetic oligonucleotide
uaggcuggcccauggacuc

SEQ ID NO: 2625672 - RNA, 19 nt, Artificial Sequence
  Description of Artificial Sequence: Synthetic oligonucleotide
gaguccaaggccugaggga

SEQ ID NO: 2625673 - RNA, 19 nt, Artificial Sequence
  Description of Artificial Sequence: Synthetic oligonucleotide
aacugccuaggcuggccca

SEQ ID NO: 2625674 - RNA, 19 nt, Artificial Sequence
  Description of Artificial Sequence: Synthetic oligonucleotide
aaagcaggugcagcaggcu

SEQ ID NO: 2625675 - RNA, 19 nt, Artificial Sequence
  Description of Artificial Sequence: Synthetic oligonucleotide
cuguucuucacaggacacc

SEQ ID NO: 2625676 - RNA, 19 nt, Artificial Sequence
  Description of Artificial Sequence: Synthetic oligonucleotide
uuacguggguucucaggac

SEQ ID NO: 2625677 - RNA, 19 nt, Artificial Sequence
  Description of Artificial Sequence: Synthetic oligonucleotide
ugaaacuuccagccacauu

SEQ ID NO: 2625678 - RNA, 19 nt, Artificial Sequence
  Description of Artificial Sequence: Synthetic oligonucleotide
ccauggacucauuuugagg

SEQ ID NO: 2625679 - RNA, 19 nt, Artificial Sequence
  Description of Artificial Sequence: Synthetic oligonucleotide
gaacuucacuguguuugag

SEQ ID NO: 2625680 - RNA, 19 nt, Artificial Sequence
  Description of Artificial Sequence: Synthetic oligonucleotide
uuccaggugggaguggaac

SEQ ID NO: 2625681 - RNA, 19 nt, Artificial Sequence
  Description of Artificial Sequence: Synthetic oligonucleotide
acauuacguggguucucag

SEQ ID NO: 2625682 - RNA, 19 nt, Artificial Sequence
  Description of Artificial Sequence: Synthetic oligonucleotide
gucaucgguuaccgaaaag

SEQ ID NO: 2625683 - RNA, 19 nt, Artificial Sequence
  Description of Artificial Sequence: Synthetic oligonucleotide
gugcucaugaaacugccua

SEQ ID NO: 2625684 - RNA, 19 nt, Artificial Sequence
  Description of Artificial Sequence: Synthetic oligonucleotide
uagcccacugugcagucau

SEQ ID NO: 2625685 - RNA, 19 nt, Artificial Sequence
  Description of Artificial Sequence: Synthetic oligonucleotide
uuugaggugcggccacccu

SEQ ID NO: 2625686 - RNA, 19 nt, Artificial Sequence
  Description of Artificial Sequence: Synthetic oligonucleotide
cuuaucugcugcugaguga

SEQ ID NO: 2625687 - RNA, 19 nt, Artificial Sequence
  Description of Artificial Sequence: Synthetic oligonucleotide
gacucauuuugagggcaag

SEQ ID NO: 2625688 - RNA, 19 nt, Artificial Sequence
  Description of Artificial Sequence: Synthetic oligonucleotide
ugcugcagaacggcaucgg

SEQ ID NO: 2625689 - RNA, 19 nt, Artificial Sequence
  Description of Artificial Sequence: Synthetic oligonucleotide
agacgggcacccagaagcc

SEQ ID NO: 2625690 - RNA, 19 nt, Artificial Sequence
  Description of Artificial Sequence: Synthetic oligonucleotide
acggcaucggauggcaguc

SEQ ID NO: 2625691 - RNA, 19 nt, Artificial Sequence
  Description of Artificial Sequence: Synthetic oligonucleotide
cuggggucaucgguuaccg

SEQ ID NO: 2625692 - RNA, 19 nt, Artificial Sequence
  Description of Artificial Sequence: Synthetic oligonucleotide
agucaucaggcaggcguac

SEQ ID NO: 2625693 - RNA, 19 nt, Artificial Sequence
  Description of Artificial Sequence: Synthetic oligonucleotide
caucggauggcagucucug

SEQ ID NO: 2625694 - RNA, 19 nt, Artificial Sequence
  Description of Artificial Sequence: Synthetic oligonucleotide
accgcguaggguccuguug

SEQ ID NO: 2625695 - RNA, 19 nt, Artificial Sequence
  Description of Artificial Sequence: Synthetic oligonucleotide
gugauugaguccaaggccu

SEQ ID NO: 2625696 - RNA, 19 nt, Artificial Sequence
  Description of Artificial Sequence: Synthetic oligonucleotide
aggcaggcguacccgcucg

SEQ ID NO: 2625697 - RNA, 19 nt, Artificial Sequence
  Description of Artificial Sequence: Synthetic oligonucleotide
ggguagagaaggcagugca

SEQ ID NO: 2625698 - RNA, 19 nt, Artificial Sequence
  Description of Artificial Sequence: Synthetic oligonucleotide
agaacggcaucggauggca

SEQ ID NO: 2625699 - RNA, 19 nt, Artificial Sequence
  Description of Artificial Sequence: Synthetic oligonucleotide
aggcguacccgcucggcug

SEQ ID NO: 2625700 - RNA, 19 nt, Artificial Sequence
  Description of Artificial Sequence: Synthetic oligonucleotide
accacauuacguggguucu

SEQ ID NO: 2625701 - RNA, 19 nt, Artificial Sequence
  Description of Artificial Sequence: Synthetic oligonucleotide
gcucaugaaacugccuagg

SEQ ID NO: 2625702 - RNA, 19 nt, Artificial Sequence
  Description of Artificial Sequence: Synthetic oligonucleotide
gaggucuucaagcagccuu

SEQ ID NO: 2625703 - RNA, 19 nt, Artificial Sequence
  Description of Artificial Sequence: Synthetic oligonucleotide
ucaggcaggcguacccgcu

SEQ ID NO: 2625704 - RNA, 19 nt, Artificial Sequence
  Description of Artificial Sequence: Synthetic oligonucleotide
ugaaacugccuaggcuggc

SEQ ID NO: 2625705 - RNA, 19 nt, Artificial Sequence
  Description of Artificial Sequence: Synthetic oligonucleotide
ggauggcagucucugcagg

SEQ ID NO: 2625706 - RNA, 19 nt, Artificial Sequence
  Description of Artificial Sequence: Synthetic oligonucleotide
auguagcccacugugcagu

SEQ ID NO: 2625707 - RNA, 19 nt, Artificial Sequence
  Description of Artificial Sequence: Synthetic oligonucleotide
ucacuuucccgagguaccu

SEQ ID NO: 2625708 - RNA, 19 nt, Artificial Sequence
  Description of Artificial Sequence: Synthetic oligonucleotide
accagugggugucugggua

SEQ ID NO: 2625709 - RNA, 19 nt, Artificial Sequence
  Description of Artificial Sequence: Synthetic oligonucleotide
cgaaaagcuaccucacccc

SEQ ID NO: 2625710 - RNA, 19 nt, Artificial Sequence
  Description of Artificial Sequence: Synthetic oligonucleotide
agagaaggcagugcacaga

SEQ ID NO: 2625711 - RNA, 19 nt, Artificial Sequence
  Description of Artificial Sequence: Synthetic oligonucleotide
agggugaccugcugcagaa

SEQ ID NO: 2625712 - RNA, 19 nt, Artificial Sequence
  Description of Artificial Sequence: Synthetic oligonucleotide
caaggccugagggagccag

SEQ ID NO: 2625713 - RNA, 19 nt, Artificial Sequence
  Description of Artificial Sequence: Synthetic oligonucleotide
cucgggaggucuucaagca

SEQ ID NO: 2625714 - RNA, 19 nt, Artificial Sequence
  Description of Artificial Sequence: Synthetic oligonucleotide
caucgguuaccgaaaagcu

SEQ ID NO: 2625715 - RNA, 19 nt, Artificial Sequence
  Description of Artificial Sequence: Synthetic oligonucleotide
uuucaggguucacguaguu

SEQ ID NO: 2625716 - RNA, 19 nt, Artificial Sequence
  Description of Artificial Sequence: Synthetic oligonucleotide
gguccuguuguauacugaa

SEQ ID NO: 2625717 - RNA, 19 nt, Artificial Sequence
  Description of Artificial Sequence: Synthetic oligonucleotide
agagggaucucgggagguc

SEQ ID NO: 2625718 - RNA, 19 nt, Artificial Sequence
  Description of Artificial Sequence: Synthetic oligonucleotide
agcagccuuaucugcugcu

SEQ ID NO: 2625719 - RNA, 19 nt, Artificial Sequence
  Description of Artificial Sequence: Synthetic oligonucleotide
accuggggucaucgguuac

SEQ ID NO: 2625720 - RNA, 19 nt, Artificial Sequence
  Description of Artificial Sequence: Synthetic oligonucleotide
acugaaacuuccagccaca

SEQ ID NO: 2625721 - RNA, 19 nt, Artificial Sequence
  Description of Artificial Sequence: Synthetic oligonucleotide
cugagugauugaguccaag

SEQ ID NO: 2625722 - RNA, 19 nt, Artificial Sequence
  Description of Artificial Sequence: Synthetic oligonucleotide
uggcccauggacucauuuu

SEQ ID NO: 2625723 - RNA, 19 nt, Artificial Sequence
  Description of Artificial Sequence: Synthetic oligonucleotide
uccagacugggucgcccca

SEQ ID NO: 2625724 - RNA, 19 nt, Artificial Sequence
  Description of Artificial Sequence: Synthetic oligonucleotide
ucgauggggugguccagac

SEQ ID NO: 2625725 - RNA, 19 nt, Artificial Sequence
  Description of Artificial Sequence: Synthetic oligonucleotide
ggggucaucgguuaccgaa

SEQ ID NO: 2625726 - RNA, 19 nt, Artificial Sequence
  Description of Artificial Sequence: Synthetic oligonucleotide
uggcagucucugcagguuu

SEQ ID NO: 2625727 - RNA, 19 nt, Artificial Sequence
  Description of Artificial Sequence: Synthetic oligonucleotide
cugcugcugagugauugag

SEQ ID NO: 2625728 - RNA, 19 nt, Artificial Sequence
  Description of Artificial Sequence: Synthetic oligonucleotide
uggacccucuccguggccu

SEQ ID NO: 2625729 - RNA, 19 nt, Artificial Sequence
  Description of Artificial Sequence: Synthetic oligonucleotide
gauggcagucucugcaggu

SEQ ID NO: 2625730 - RNA, 19 nt, Artificial Sequence
  Description of Artificial Sequence: Synthetic oligonucleotide
gcugugcucaugaaacugc

SEQ ID NO: 2625731 - RNA, 19 nt, Artificial Sequence
  Description of Artificial Sequence: Synthetic oligonucleotide
aggguucacguaguuguca

SEQ ID NO: 2625732 - RNA, 19 nt, Artificial Sequence
  Description of Artificial Sequence: Synthetic oligonucleotide
uaccucaccccuguucuuc

SEQ ID NO: 2625733 - RNA, 19 nt, Artificial Sequence
  Description of Artificial Sequence: Synthetic oligonucleotide
gguggaaagcaggugcagc

SEQ ID NO: 2625734 - RNA, 19 nt, Artificial Sequence
  Description of Artificial Sequence: Synthetic oligonucleotide
gauugaguccaaggccuga

SEQ ID NO: 2625735 - RNA, 19 nt, Artificial Sequence
  Description of Artificial Sequence: Synthetic oligonucleotide
guuugaggugcggccaccc

SEQ ID NO: 2625736 - RNA, 19 nt, Artificial Sequence
  Description of Artificial Sequence: Synthetic oligonucleotide
guagauguccugguuggaa

SEQ ID NO: 2625737 - RNA, 19 nt, Artificial Sequence
  Description of Artificial Sequence: Synthetic oligonucleotide
uguagcccacugugcaguc

SEQ ID NO: 2625738 - RNA, 19 nt, Artificial Sequence
  Description of Artificial Sequence: Synthetic oligonucleotide
aaacuuccagccacauuua

SEQ ID NO: 2625739 - RNA, 19 nt, Artificial Sequence
  Description of Artificial Sequence: Synthetic oligonucleotide
guccagacugggucgcccc

SEQ ID NO: 2625740 - RNA, 19 nt, Artificial Sequence
  Description of Artificial Sequence: Synthetic oligonucleotide
guucuucacaggacaccag

SEQ ID NO: 2625741 - RNA, 19 nt, Artificial Sequence
  Description of Artificial Sequence: Synthetic oligonucleotide
uuuccaggugggaguggaa

SEQ ID NO: 2625742 - RNA, 19 nt, Artificial Sequence
  Description of Artificial Sequence: Synthetic oligonucleotide
caggacaccaguggguguc

SEQ ID NO: 2625743 - RNA, 19 nt, Artificial Sequence
  Description of Artificial Sequence: Synthetic oligonucleotide
cagaacggcaucggauggc

SEQ ID NO: 2625744 - RNA, 19 nt, Artificial Sequence
  Description of Artificial Sequence: Synthetic oligonucleotide
cacauuacguggguucuca

SEQ ID NO: 2625745 - RNA, 19 nt, Artificial Sequence
  Description of Artificial Sequence: Synthetic oligonucleotide
acaggacaccagugggugu

SEQ ID NO: 2625746 - RNA, 19 nt, Artificial Sequence
  Description of Artificial Sequence: Synthetic oligonucleotide
aaggccugagggagccagg

SEQ ID NO: 2625747 - RNA, 19 nt, Artificial Sequence
  Description of Artificial Sequence: Synthetic oligonucleotide
gggugguccagacuggguc

SEQ ID NO: 2625748 - RNA, 19 nt, Artificial Sequence
  Description of Artificial Sequence: Synthetic oligonucleotide
cuccguggccucgaugggg

SEQ ID NO: 2625749 - RNA, 19 nt, Artificial Sequence
  Description of Artificial Sequence: Synthetic oligonucleotide
gcucaggcagaacccagcc

SEQ ID NO: 2625750 - RNA, 19 nt, Artificial Sequence
  Description of Artificial Sequence: Synthetic oligonucleotide
guguuugaggugcggccac

SEQ ID NO: 2625751 - RNA, 19 nt, Artificial Sequence
  Description of Artificial Sequence: Synthetic oligonucleotide
ucccgagguaccugguguc

SEQ ID NO: 2625752 - RNA, 19 nt, Artificial Sequence
  Description of Artificial Sequence: Synthetic oligonucleotide
gaagcccuuccacaaugua

SEQ ID NO: 2625753 - RNA, 19 nt, Artificial Sequence
  Description of Artificial Sequence: Synthetic oligonucleotide
aucgguuaccgaaaagcua

SEQ ID NO: 2625754 - RNA, 19 nt, Artificial Sequence
  Description of Artificial Sequence: Synthetic oligonucleotide
caccccuguucuucacagg

SEQ ID NO: 2625755 - RNA, 19 nt, Artificial Sequence
  Description of Artificial Sequence: Synthetic oligonucleotide
cagacugggucgccccagg

SEQ ID NO: 2625756 - RNA, 19 nt, Artificial Sequence
  Description of Artificial Sequence: Synthetic oligonucleotide
acccuggacccucuccgug

SEQ ID NO: 2625757 - RNA, 19 nt, Artificial Sequence
  Description of Artificial Sequence: Synthetic oligonucleotide
ggcugugcucaugaaacug

SEQ ID NO: 2625758 - RNA, 19 nt, Artificial Sequence
  Description of Artificial Sequence: Synthetic oligonucleotide
gguuggaagagaaggugga

SEQ ID NO: 2625759 - RNA, 19 nt, Artificial Sequence
  Description of Artificial Sequence: Synthetic oligonucleotide
gugaagcagacgggcaccc

SEQ ID NO: 2625760 - RNA, 19 nt, Artificial Sequence
  Description of Artificial Sequence: Synthetic oligonucleotide
caggugggaguggaacagg

SEQ ID NO: 2625761 - RNA, 19 nt, Artificial Sequence
  Description of Artificial Sequence: Synthetic oligonucleotide
ucgccccagguagaugucc

SEQ ID NO: 2625762 - RNA, 19 nt, Artificial Sequence
  Description of Artificial Sequence: Synthetic oligonucleotide
ugaaaccgcguaggguccu

SEQ ID NO: 2625763 - RNA, 19 nt, Artificial Sequence
  Description of Artificial Sequence: Synthetic oligonucleotide
agcagacgggcacccagaa

SEQ ID NO: 2625764 - RNA, 19 nt, Artificial Sequence
  Description of Artificial Sequence: Synthetic oligonucleotide
ccccugcucaggcagaacc

SEQ ID NO: 2625765 - RNA, 19 nt, Artificial Sequence
  Description of Artificial Sequence: Synthetic oligonucleotide
cugagggagccagguagag

SEQ ID NO: 2625766 - RNA, 19 nt, Artificial Sequence
  Description of Artificial Sequence: Synthetic oligonucleotide
caggguucacguaguuguc

SEQ ID NO: 2625767 - RNA, 19 nt, Artificial Sequence
  Description of Artificial Sequence: Synthetic oligonucleotide
gugcacagacugaaaccgc

SEQ ID NO: 2625768 - RNA, 19 nt, Artificial Sequence
  Description of Artificial Sequence: Synthetic oligonucleotide
gaucucgggaggucuucaa

SEQ ID NO: 2625769 - RNA, 19 nt, Artificial Sequence
  Description of Artificial Sequence: Synthetic oligonucleotide
uuaccacauuacguggguu

SEQ ID NO: 2625770 - RNA, 19 nt, Artificial Sequence
  Description of Artificial Sequence: Synthetic oligonucleotide
cacuguguuugaggugcgg

SEQ ID NO: 2625771 - RNA, 19 nt, Artificial Sequence
  Description of Artificial Sequence: Synthetic oligonucleotide
gucaucaggcaggcguacc

SEQ ID NO: 2625772 - RNA, 19 nt, Artificial Sequence
  Description of Artificial Sequence: Synthetic oligonucleotide
agccaccuggggucaucgg

SEQ ID NO: 2625773 - RNA, 19 nt, Artificial Sequence
  Description of Artificial Sequence: Synthetic oligonucleotide
aaaccgcguaggguccugu

SEQ ID NO: 2625774 - RNA, 19 nt, Artificial Sequence
  Description of Artificial Sequence: Synthetic oligonucleotide
gguagagaaggcagugcac

SEQ ID NO: 2625775 - RNA, 19 nt, Artificial Sequence
  Description of Artificial Sequence: Synthetic oligonucleotide
gacgggcacccagaagccc

SEQ ID NO: 2625776 - RNA, 19 nt, Artificial Sequence
  Description of Artificial Sequence: Synthetic oligonucleotide
gacugaaaccgcguagggu

SEQ ID NO: 2625777 - RNA, 19 nt, Artificial Sequence
  Description of Artificial Sequence: Synthetic oligonucleotide
aaccgcguaggguccuguu

SEQ ID NO: 2625778 - RNA, 19 nt, Artificial Sequence
  Description of Artificial Sequence: Synthetic oligonucleotide
cucggcugugcucaugaaa

SEQ ID NO: 2625779 - RNA, 19 nt, Artificial Sequence
  Description of Artificial Sequence: Synthetic oligonucleotide
gcuaccucaccccuguucu

SEQ ID NO: 2625780 - RNA, 19 nt, Artificial Sequence
  Description of Artificial Sequence: Synthetic oligonucleotide
ugaagcagacgggcaccca

SEQ ID NO: 2625781 - RNA, 19 nt, Artificial Sequence
  Description of Artificial Sequence: Synthetic oligonucleotide
guuggaagagaagguggaa

SEQ ID NO: 2625782 - RNA, 19 nt, Artificial Sequence
  Description of Artificial Sequence: Synthetic oligonucleotide
gaacggcaucggauggcag

SEQ ID NO: 2625783 - RNA, 19 nt, Artificial Sequence
  Description of Artificial Sequence: Synthetic oligonucleotide
agacugggucgccccaggu

SEQ ID NO: 2625784 - RNA, 19 nt, Artificial Sequence
  Description of Artificial Sequence: Synthetic oligonucleotide
acccgcucggcugugcuca

SEQ ID NO: 2625785 - RNA, 19 nt, Artificial Sequence
  Description of Artificial Sequence: Synthetic oligonucleotide
ccaccaguagcaaaccaga

SEQ ID NO: 2625786 - RNA, 19 nt, Artificial Sequence
  Description of Artificial Sequence: Synthetic oligonucleotide
cuuucaggguucacguagu

SEQ ID NO: 2625787 - RNA, 19 nt, Artificial Sequence
  Description of Artificial Sequence: Synthetic oligonucleotide
gacugggucgccccaggua

SEQ ID NO: 2625788 - RNA, 19 nt, Artificial Sequence
  Description of Artificial Sequence: Synthetic oligonucleotide
agugggugucuggguagag

SEQ ID NO: 2625789 - RNA, 19 nt, Artificial Sequence
  Description of Artificial Sequence: Synthetic oligonucleotide
auggggugguccagacugg

SEQ ID NO: 2625790 - RNA, 19 nt, Artificial Sequence
  Description of Artificial Sequence: Synthetic oligonucleotide
gaaaccgcguaggguccug

SEQ ID NO: 2625791 - RNA, 19 nt, Artificial Sequence
  Description of Artificial Sequence: Synthetic oligonucleotide
gugcagucaucaggcaggc

SEQ ID NO: 2625792 - RNA, 19 nt, Artificial Sequence
  Description of Artificial Sequence: Synthetic oligonucleotide
ccagugggugucuggguag

SEQ ID NO: 2625793 - RNA, 19 nt, Artificial Sequence
  Description of Artificial Sequence: Synthetic oligonucleotide
cagccuuaucugcugcuga

SEQ ID NO: 2625794 - RNA, 19 nt, Artificial Sequence
  Description of Artificial Sequence: Synthetic oligonucleotide
cacagacugaaaccgcgua

SEQ ID NO: 2625795 - RNA, 19 nt, Artificial Sequence
  Description of Artificial Sequence: Synthetic oligonucleotide
gacccucuccguggccucg

SEQ ID NO: 2625796 - RNA, 19 nt, Artificial Sequence
  Description of Artificial Sequence: Synthetic oligonucleotide
gagguaccugguguccaac

SEQ ID NO: 2625797 - RNA, 19 nt, Artificial Sequence
  Description of Artificial Sequence: Synthetic oligonucleotide
uggggucaucgguuaccga

SEQ ID NO: 2625798 - RNA, 19 nt, Artificial Sequence
  Description of Artificial Sequence: Synthetic oligonucleotide
ggucgccccagguagaugu

SEQ ID NO: 2625799 - RNA, 19 nt, Artificial Sequence
  Description of Artificial Sequence: Synthetic oligonucleotide
caccaguagcaaaccagaa

SEQ ID NO: 2625800 - RNA, 19 nt, Artificial Sequence
  Description of Artificial Sequence: Synthetic oligonucleotide
cucaccccuguucuucaca

SEQ ID NO: 2625801 - RNA, 19 nt, Artificial Sequence
  Description of Artificial Sequence: Synthetic oligonucleotide
ggagccagguagagcagcc

SEQ ID NO: 2625802 - RNA, 19 nt, Artificial Sequence
  Description of Artificial Sequence: Synthetic oligonucleotide
cccuggacccucuccgugg

SEQ ID NO: 2625803 - RNA, 19 nt, Artificial Sequence
  Description of Artificial Sequence: Synthetic oligonucleotide
gugguccagacugggucgc

SEQ ID NO: 2625804 - RNA, 19 nt, Artificial Sequence
  Description of Artificial Sequence: Synthetic oligonucleotide
gcaaggccccugcucaggc

SEQ ID NO: 2625805 - RNA, 19 nt, Artificial Sequence
  Description of Artificial Sequence: Synthetic oligonucleotide
agcaggugcagcaggcuuu

SEQ ID NO: 2625806 - RNA, 19 nt, Artificial Sequence
  Description of Artificial Sequence: Synthetic oligonucleotide
cagucaucaggcaggcgua

SEQ ID NO: 2625807 - RNA, 19 nt, Artificial Sequence
  Description of Artificial Sequence: Synthetic oligonucleotide
ggcacccagaagcccuucc

SEQ ID NO: 2625808 - RNA, 19 nt, Artificial Sequence
  Description of Artificial Sequence: Synthetic oligonucleotide
auggcagucucugcagguu

SEQ ID NO: 2625809 - RNA, 19 nt, Artificial Sequence
  Description of Artificial Sequence: Synthetic oligonucleotide
cugcagaacggcaucggau

SEQ ID NO: 2625810 - RNA, 19 nt, Artificial Sequence
  Description of Artificial Sequence: Synthetic oligonucleotide
cacuuucccgagguaccug

SEQ ID NO: 2625811 - RNA, 19 nt, Artificial Sequence
  Description of Artificial Sequence: Synthetic oligonucleotide
caggcaggcguacccgcuc

SEQ ID NO: 2625812 - RNA, 19 nt, Artificial Sequence
  Description of Artificial Sequence: Synthetic oligonucleotide
gagggaucucgggaggucu

SEQ ID NO: 2625813 - RNA, 19 nt, Artificial Sequence
  Description of Artificial Sequence: Synthetic oligonucleotide
cagguagagcagccaccug

SEQ ID NO: 2625814 - RNA, 19 nt, Artificial Sequence
  Description of Artificial Sequence: Synthetic oligonucleotide
gcagccuuaucugcugcug

SEQ ID NO: 2625815 - RNA, 19 nt, Artificial Sequence
  Description of Artificial Sequence: Synthetic oligonucleotide
gcagacgggcacccagaag

SEQ ID NO: 2625816 - RNA, 19 nt, Artificial Sequence
  Description of Artificial Sequence: Synthetic oligonucleotide
acugccuaggcuggcccau

SEQ ID NO: 2625817 - RNA, 19 nt, Artificial Sequence
  Description of Artificial Sequence: Synthetic oligonucleotide
ggucaucgguuaccgaaaa

SEQ ID NO: 2625818 - RNA, 19 nt, Artificial Sequence
  Description of Artificial Sequence: Synthetic oligonucleotide
uacccgcucggcugugcuc

SEQ ID NO: 2625819 - RNA, 19 nt, Artificial Sequence
  Description of Artificial Sequence: Synthetic oligonucleotide
cccuuccacaauguagccc

SEQ ID NO: 2625820 - RNA, 19 nt, Artificial Sequence
  Description of Artificial Sequence: Synthetic oligonucleotide
ugguccagacugggucgcc

SEQ ID NO: 2625821 - RNA, 19 nt, Artificial Sequence
  Description of Artificial Sequence: Synthetic oligonucleotide
gcccuuccacaauguagcc

SEQ ID NO: 2625822 - RNA, 19 nt, Artificial Sequence
  Description of Artificial Sequence: Synthetic oligonucleotide
ugggucgccccagguagau

SEQ ID NO: 2625823 - RNA, 19 nt, Artificial Sequence
  Description of Artificial Sequence: Synthetic oligonucleotide
aagcuaccucaccccuguu

SEQ ID NO: 2625824 - RNA, 19 nt, Artificial Sequence
  Description of Artificial Sequence: Synthetic oligonucleotide
caggcagaacccagcccca

SEQ ID NO: 2625825 - RNA, 19 nt, Artificial Sequence
  Description of Artificial Sequence: Synthetic oligonucleotide
gagccagguagagcagcca

SEQ ID NO: 2625826 - RNA, 19 nt, Artificial Sequence
  Description of Artificial Sequence: Synthetic oligonucleotide
agcaggcuuucaggguuca

SEQ ID NO: 2625827 - RNA, 19 nt, Artificial Sequence
  Description of Artificial Sequence: Synthetic oligonucleotide
gguccagacugggucgccc

SEQ ID NO: 2625828 - RNA, 19 nt, Artificial Sequence
  Description of Artificial Sequence: Synthetic oligonucleotide
aggacaccagugggugucu

SEQ ID NO: 2625829 - RNA, 19 nt, Artificial Sequence
  Description of Artificial Sequence: Synthetic oligonucleotide
cccagaagcccuuccacaa

SEQ ID NO: 2625830 - RNA, 19 nt, Artificial Sequence
  Description of Artificial Sequence: Synthetic oligonucleotide
gccucgaugggguggucca

SEQ ID NO: 2625831 - RNA, 19 nt, Artificial Sequence
  Description of Artificial Sequence: Synthetic oligonucleotide
guccaacuggaagagggau

SEQ ID NO: 2625832 - RNA, 19 nt, Artificial Sequence
  Description of Artificial Sequence: Synthetic oligonucleotide
gggugcugugaagcagacg

SEQ ID NO: 2625833 - RNA, 19 nt, Artificial Sequence
  Description of Artificial Sequence: Synthetic oligonucleotide
ggcaggcguacccgcucgg

SEQ ID NO: 2625834 - RNA, 19 nt, Artificial Sequence
  Description of Artificial Sequence: Synthetic oligonucleotide
ccaacuggaagagggaucu

SEQ ID NO: 2625835 - RNA, 19 nt, Artificial Sequence
  Description of Artificial Sequence: Synthetic oligonucleotide
caaggccccugcucaggca

SEQ ID NO: 2625836 - RNA, 19 nt, Artificial Sequence
  Description of Artificial Sequence: Synthetic oligonucleotide
ccuggacccucuccguggc

SEQ ID NO: 2625837 - RNA, 19 nt, Artificial Sequence
  Description of Artificial Sequence: Synthetic oligonucleotide
cggauggcagucucugcag

SEQ ID NO: 2625838 - RNA, 19 nt, Artificial Sequence
  Description of Artificial Sequence: Synthetic oligonucleotide
guagcccacugugcaguca

SEQ ID NO: 2625839 - RNA, 19 nt, Artificial Sequence
  Description of Artificial Sequence: Synthetic oligonucleotide
ccccuguucuucacaggac

SEQ ID NO: 2625840 - RNA, 19 nt, Artificial Sequence
  Description of Artificial Sequence: Synthetic oligonucleotide
ccugguuggaagagaaggu

SEQ ID NO: 2625841 - RNA, 19 nt, Artificial Sequence
  Description of Artificial Sequence: Synthetic oligonucleotide
ggccucgaugggguggucc

SEQ ID NO: 2625842 - RNA, 19 nt, Artificial Sequence
  Description of Artificial Sequence: Synthetic oligonucleotide
gcagcaggcuuucaggguu

SEQ ID NO: 2625843 - RNA, 19 nt, Artificial Sequence
  Description of Artificial Sequence: Synthetic oligonucleotide
gcccacugugcagucauca

SEQ ID NO: 2625844 - RNA, 19 nt, Artificial Sequence
  Description of Artificial Sequence: Synthetic oligonucleotide
gguagauguccugguugga

SEQ ID NO: 2625845 - RNA, 19 nt, Artificial Sequence
  Description of Artificial Sequence: Synthetic oligonucleotide
cgguuaccgaaaagcuacc

SEQ ID NO: 2625846 - RNA, 19 nt, Artificial Sequence
  Description of Artificial Sequence: Synthetic oligonucleotide
caacuggaagagggaucuc

SEQ ID NO: 2625847 - RNA, 19 nt, Artificial Sequence
  Description of Artificial Sequence: Synthetic oligonucleotide
gguuaccgaaaagcuaccu

SEQ ID NO: 2625848 - RNA, 19 nt, Artificial Sequence
  Description of Artificial Sequence: Synthetic oligonucleotide
gggucaucgguuaccgaaa

SEQ ID NO: 2625849 - RNA, 19 nt, Artificial Sequence
  Description of Artificial Sequence: Synthetic oligonucleotide
cugggucgccccagguaga

SEQ ID NO: 2625850 - RNA, 19 nt, Artificial Sequence
  Description of Artificial Sequence: Synthetic oligonucleotide
caccuggggucaucgguua

SEQ ID NO: 2625851 - RNA, 19 nt, Artificial Sequence
  Description of Artificial Sequence: Synthetic oligonucleotide
ggguccuguuguauacuga

SEQ ID NO: 2625852 - RNA, 19 nt, Artificial Sequence
  Description of Artificial Sequence: Synthetic oligonucleotide
cccgagguaccuggugucc

SEQ ID NO: 2625853 - RNA, 19 nt, Artificial Sequence
  Description of Artificial Sequence: Synthetic oligonucleotide
cuuucccgagguaccuggu

SEQ ID NO: 2625854 - RNA, 19 nt, Artificial Sequence
  Description of Artificial Sequence: Synthetic oligonucleotide
guacccgcucggcugugcu

SEQ ID NO: 2625855 - RNA, 19 nt, Artificial Sequence
  Description of Artificial Sequence: Synthetic oligonucleotide
gccaccuggggucaucggu

SEQ ID NO: 2625856 - RNA, 19 nt, Artificial Sequence
  Description of Artificial Sequence: Synthetic oligonucleotide
gcccauggacucauuuuga

SEQ ID NO: 2625857 - RNA, 19 nt, Artificial Sequence
  Description of Artificial Sequence: Synthetic oligonucleotide
cagccccaccaguagcaaa

SEQ ID NO: 2625858 - RNA, 19 nt, Artificial Sequence
  Description of Artificial Sequence: Synthetic oligonucleotide
gaggugcggccacccugga

SEQ ID NO: 2625859 - RNA, 19 nt, Artificial Sequence
  Description of Artificial Sequence: Synthetic oligonucleotide
agggaucucgggaggucuu

SEQ ID NO: 2625860 - RNA, 19 nt, Artificial Sequence
  Description of Artificial Sequence: Synthetic oligonucleotide
ggcuuucaggguucacgua

SEQ ID NO: 2625861 - RNA, 19 nt, Artificial Sequence
  Description of Artificial Sequence: Synthetic oligonucleotide
ccauagcucagggugaccu

SEQ ID NO: 2625862 - RNA, 19 nt, Artificial Sequence
  Description of Artificial Sequence: Synthetic oligonucleotide
caggcguacccgcucggcu

SEQ ID NO: 2625863 - RNA, 19 nt, Artificial Sequence
  Description of Artificial Sequence: Synthetic oligonucleotide
gcagucucugcagguuuuc

SEQ ID NO: 2625864 - RNA, 19 nt, Artificial Sequence
  Description of Artificial Sequence: Synthetic oligonucleotide
gcaggcguacccgcucggc

SEQ ID NO: 2625865 - RNA, 19 nt, Artificial Sequence
  Description of Artificial Sequence: Synthetic oligonucleotide
gggaguggaacagggugcu

SEQ ID NO: 2625866 - RNA, 19 nt, Artificial Sequence
  Description of Artificial Sequence: Synthetic oligonucleotide
aggcuggcccauggacuca

SEQ ID NO: 2625867 - RNA, 19 nt, Artificial Sequence
  Description of Artificial Sequence: Synthetic oligonucleotide
ccagacugggucgccccag

SEQ ID NO: 2625868 - RNA, 19 nt, Artificial Sequence
  Description of Artificial Sequence: Synthetic oligonucleotide
cugaaacuuccagccacau

SEQ ID NO: 2625869 - RNA, 19 nt, Artificial Sequence
  Description of Artificial Sequence: Synthetic oligonucleotide
ggacccucuccguggccuc

SEQ ID NO: 2625870 - RNA, 19 nt, Artificial Sequence
  Description of Artificial Sequence: Synthetic oligonucleotide
ccccauagcucagggugac

SEQ ID NO: 2625871 - RNA, 19 nt, Artificial Sequence
  Description of Artificial Sequence: Synthetic oligonucleotide
gucgccccagguagauguc

SEQ ID NO: 2625872 - RNA, 19 nt, Artificial Sequence
  Description of Artificial Sequence: Synthetic oligonucleotide
acccucuccguggccucga

SEQ ID NO: 2625873 - RNA, 19 nt, Artificial Sequence
  Description of Artificial Sequence: Synthetic oligonucleotide
ggcagugcacagacugaaa

SEQ ID NO: 2625874 - RNA, 19 nt, Artificial Sequence
  Description of Artificial Sequence: Synthetic oligonucleotide
ccacauuacguggguucuc

SEQ ID NO: 2625875 - RNA, 19 nt, Artificial Sequence
  Description of Artificial Sequence: Synthetic oligonucleotide
ccagguagagcagccaccu

SEQ ID NO: 2625876 - RNA, 19 nt, Artificial Sequence
  Description of Artificial Sequence: Synthetic oligonucleotide
ugcggccacccuggacccu

SEQ ID NO: 2625877 - RNA, 19 nt, Artificial Sequence
  Description of Artificial Sequence: Synthetic oligonucleotide
gccuaggcuggcccaugga

SEQ ID NO: 2625878 - RNA, 19 nt, Artificial Sequence
  Description of Artificial Sequence: Synthetic oligonucleotide
ccucuccguggccucgaug

SEQ ID NO: 2625879 - RNA, 19 nt, Artificial Sequence
  Description of Artificial Sequence: Synthetic oligonucleotide
cccauagcucagggugacc

SEQ ID NO: 2625880 - RNA, 19 nt, Artificial Sequence
  Description of Artificial Sequence: Synthetic oligonucleotide
ccgcguaggguccuguugu

SEQ ID NO: 2625881 - RNA, 19 nt, Artificial Sequence
  Description of Artificial Sequence: Synthetic oligonucleotide
ggcguacccgcucggcugu

SEQ ID NO: 2625882 - RNA, 19 nt, Artificial Sequence
  Description of Artificial Sequence: Synthetic oligonucleotide
cacccuggacccucuccgu

SEQ ID NO: 2625883 - RNA, 19 nt, Artificial Sequence
  Description of Artificial Sequence: Synthetic oligonucleotide
ccacaauguagcccacugu

SEQ ID NO: 2625884 - RNA, 19 nt, Artificial Sequence
  Description of Artificial Sequence: Synthetic oligonucleotide
gggugaccugcugcagaac

SEQ ID NO: 2625885 - RNA, 19 nt, Artificial Sequence
  Description of Artificial Sequence: Synthetic oligonucleotide
cgcucggcugugcucauga

SEQ ID NO: 2625886 - RNA, 19 nt, Artificial Sequence
  Description of Artificial Sequence: Synthetic oligonucleotide
gcacagacugaaaccgcgu

SEQ ID NO: 2625887 - RNA, 19 nt, Artificial Sequence
  Description of Artificial Sequence: Synthetic oligonucleotide
ccccaccaguagcaaacca

SEQ ID NO: 2625888 - RNA, 19 nt, Artificial Sequence
  Description of Artificial Sequence: Synthetic oligonucleotide
gccuuaucugcugcugagu

SEQ ID NO: 2625889 - RNA, 19 nt, Artificial Sequence
  Description of Artificial Sequence: Synthetic oligonucleotide
cccagguagauguccuggu

SEQ ID NO: 2625890 - RNA, 19 nt, Artificial Sequence
  Description of Artificial Sequence: Synthetic oligonucleotide
cuaccucaccccuguucuu

SEQ ID NO: 2625891 - RNA, 19 nt, Artificial Sequence
  Description of Artificial Sequence: Synthetic oligonucleotide
gggucgccccagguagaug

SEQ ID NO: 2625892 - RNA, 19 nt, Artificial Sequence
  Description of Artificial Sequence: Synthetic oligonucleotide
ccgagguaccuggugucca

SEQ ID NO: 2625893 - RNA, 19 nt, Artificial Sequence
  Description of Artificial Sequence: Synthetic oligonucleotide
gcugagugauugaguccaa

SEQ ID NO: 2625894 - RNA, 19 nt, Artificial Sequence
  Description of Artificial Sequence: Synthetic oligonucleotide
ggccugagggagccaggua

SEQ ID NO: 2625895 - RNA, 19 nt, Artificial Sequence
  Description of Artificial Sequence: Synthetic oligonucleotide
gcaucggauggcagucucu

SEQ ID NO: 2625896 - RNA, 19 nt, Artificial Sequence
  Description of Artificial Sequence: Synthetic oligonucleotide
ccaccuggggucaucgguu

SEQ ID NO: 2625897 - RNA, 19 nt, Artificial Sequence
  Description of Artificial Sequence: Synthetic oligonucleotide
cgagguaccugguguccaa

SEQ ID NO: 2625898 - RNA, 19 nt, Artificial Sequence
  Description of Artificial Sequence: Synthetic oligonucleotide
ggucuucaagcagccuuau

SEQ ID NO: 2625899 - RNA, 19 nt, Artificial Sequence
  Description of Artificial Sequence: Synthetic oligonucleotide
ggaggucuucaagcagccu

SEQ ID NO: 2625900 - RNA, 19 nt, Artificial Sequence
  Description of Artificial Sequence: Synthetic oligonucleotide
cguacccgcucggcugugc

SEQ ID NO: 2625901 - RNA, 19 nt, Artificial Sequence
  Description of Artificial Sequence: Synthetic oligonucleotide
ggccccugcucaggcagaa

SEQ ID NO: 2625902 - RNA, 19 nt, Artificial Sequence
  Description of Artificial Sequence: Synthetic oligonucleotide
gggcacccagaagcccuuc

SEQ ID NO: 2625903 - RNA, 19 nt, Artificial Sequence
  Description of Artificial Sequence: Synthetic oligonucleotide
gcguaggguccuguuguau

SEQ ID NO: 2625904 - RNA, 19 nt, Artificial Sequence
  Description of Artificial Sequence: Synthetic oligonucleotide
gccccugcucaggcagaac

SEQ ID NO: 2625905 - RNA, 19 nt, Artificial Sequence
  Description of Artificial Sequence: Synthetic oligonucleotide
ggcuggcccauggacucau

SEQ ID NO: 2625906 - RNA, 19 nt, Artificial Sequence
  Description of Artificial Sequence: Synthetic oligonucleotide
gcguacccgcucggcugug

SEQ ID NO: 2625907 - RNA, 19 nt, Artificial Sequence
  Description of Artificial Sequence: Synthetic oligonucleotide
cggcugugcucaugaaacu

SEQ ID NO: 2625908 - RNA, 19 nt, Artificial Sequence
  Description of Artificial Sequence: Synthetic oligonucleotide
cgcguaggguccuguugua

SEQ ID NO: 2625909 - RNA, 19 nt, Artificial Sequence
  Description of Artificial Sequence: Synthetic oligonucleotide
ccgcucggcugugcucaug

SEQ ID NO: 2625910 - RNA, 19 nt, Artificial Sequence
  Description of Artificial Sequence: Synthetic oligonucleotide
cccucuccguggccucgau

SEQ ID NO: 2625911 - RNA, 19 nt, Artificial Sequence
  Description of Artificial Sequence: Synthetic oligonucleotide
cccgcucggcugugcucau

SEQ ID NO: 2625912 - RNA, 19 nt, Artificial Sequence
  Description of Artificial Sequence: Synthetic oligonucleotide
aaguuaaaauccuauaauc

SEQ ID NO: 2625913 - RNA, 19 nt, Artificial Sequence
  Description of Artificial Sequence: Synthetic oligonucleotide
uacauuaaaaccagcaccg

SEQ ID NO: 2625914 - RNA, 19 nt, Artificial Sequence
  Description of Artificial Sequence: Synthetic oligonucleotide
uucaguuaaguuaaaaucc

SEQ ID NO: 2625915 - RNA, 19 nt, Artificial Sequence
  Description of Artificial Sequence: Synthetic oligonucleotide
uuaaaauccuauaaucagg

SEQ ID NO: 2625916 - RNA, 19 nt, Artificial Sequence
  Description of Artificial Sequence: Synthetic oligonucleotide
aaccccaacacauuuauuc

SEQ ID NO: 2625917 - RNA, 19 nt, Artificial Sequence
  Description of Artificial Sequence: Synthetic oligonucleotide
uuacauuaaaaccagcacc

SEQ ID NO: 2625918 - RNA, 19 nt, Artificial Sequence
  Description of Artificial Sequence: Synthetic oligonucleotide
ucuacuuaggcccaagagg

SEQ ID NO: 2625919 - RNA, 19 nt, Artificial Sequence
  Description of Artificial Sequence: Synthetic oligonucleotide
guuacuucuacuuaggccc

SEQ ID NO: 2625920 - RNA, 19 nt, Artificial Sequence
  Description of Artificial Sequence: Synthetic oligonucleotide
aauuguuacuucuacuuag

SEQ ID NO: 2625921 - RNA, 19 nt, Artificial Sequence
  Description of Artificial Sequence: Synthetic oligonucleotide
aaauccuauaaucaggaca

SEQ ID NO: 2625922 - RNA, 19 nt, Artificial Sequence
  Description of Artificial Sequence: Synthetic oligonucleotide
uuuuacauuaaaaccagca

SEQ ID NO: 2625923 - RNA, 19 nt, Artificial Sequence
  Description of Artificial Sequence: Synthetic oligonucleotide
aauccuauaaucaggacag

SEQ ID NO: 2625924 - RNA, 19 nt, Artificial Sequence
  Description of Artificial Sequence: Synthetic oligonucleotide
acuacauccauucuuguuc

SEQ ID NO: 2625925 - RNA, 19 nt, Artificial Sequence
  Description of Artificial Sequence: Synthetic oligonucleotide
aaaagguacagacaggcga

SEQ ID NO: 2625926 - RNA, 19 nt, Artificial Sequence
  Description of Artificial Sequence: Synthetic oligonucleotide
uuaaguuaaaauccuauaa

SEQ ID NO: 2625927 - RNA, 19 nt, Artificial Sequence
  Description of Artificial Sequence: Synthetic oligonucleotide
aaaauuguuacuucuacuu

SEQ ID NO: 2625928 - RNA, 19 nt, Artificial Sequence
  Description of Artificial Sequence: Synthetic oligonucleotide
guuaaaauccuauaaucag

SEQ ID NO: 2625929 - RNA, 19 nt, Artificial Sequence
  Description of Artificial Sequence: Synthetic oligonucleotide
uuuaacugccauaaaaugu

SEQ ID NO: 2625930 - RNA, 19 nt, Artificial Sequence
  Description of Artificial Sequence: Synthetic oligonucleotide
ucaaguguaguauuuuggg

SEQ ID NO: 2625931 - RNA, 19 nt, Artificial Sequence
  Description of Artificial Sequence: Synthetic oligonucleotide
uaaaauccuauaaucagga

SEQ ID NO: 2625932 - RNA, 19 nt, Artificial Sequence
  Description of Artificial Sequence: Synthetic oligonucleotide
aaguguaguauuuuggggu

SEQ ID NO: 2625933 - RNA, 19 nt, Artificial Sequence
  Description of Artificial Sequence: Synthetic oligonucleotide
cuacuuaggcccaagaggg

SEQ ID NO: 2625934 - RNA, 19 nt, Artificial Sequence
  Description of Artificial Sequence: Synthetic oligonucleotide
uucaaguguaguauuuugg

SEQ ID NO: 2625935 - RNA, 19 nt, Artificial Sequence
  Description of Artificial Sequence: Synthetic oligonucleotide
uuuacauuaaaaccagcac

SEQ ID NO: 2625936 - RNA, 19 nt, Artificial Sequence
  Description of Artificial Sequence: Synthetic oligonucleotide
ucuuuuaacugccauaaaa

SEQ ID NO: 2625937 - RNA, 19 nt, Artificial Sequence
  Description of Artificial Sequence: Synthetic oligonucleotide
aaacagugaccuugaaccc

SEQ ID NO: 2625938 - RNA, 19 nt, Artificial Sequence
  Description of Artificial Sequence: Synthetic oligonucleotide
caaguaacugugaucaucg

SEQ ID NO: 2625939 - RNA, 19 nt, Artificial Sequence
  Description of Artificial Sequence: Synthetic oligonucleotide
uuuuaacugccauaaaaug

SEQ ID NO: 2625940 - RNA, 19 nt, Artificial Sequence
  Description of Artificial Sequence: Synthetic oligonucleotide
aauugcagcuaccaggcug

SEQ ID NO: 2625941 - RNA, 19 nt, Artificial Sequence
  Description of Artificial Sequence: Synthetic oligonucleotide
aaaacaguuauuucaguua

SEQ ID NO: 2625942 - RNA, 19 nt, Artificial Sequence
  Description of Artificial Sequence: Synthetic oligonucleotide
aaaauguucaaguguagua

SEQ ID NO: 2625943 - RNA, 19 nt, Artificial Sequence
  Description of Artificial Sequence: Synthetic oligonucleotide
aguauuuugggguguuccc

SEQ ID NO: 2625944 - RNA, 19 nt, Artificial Sequence
  Description of Artificial Sequence: Synthetic oligonucleotide
uccugaaaaguacagcaag

SEQ ID NO: 2625945 - RNA, 19 nt, Artificial Sequence
  Description of Artificial Sequence: Synthetic oligonucleotide
uguuacuucuacuuaggcc

SEQ ID NO: 2625946 - RNA, 19 nt, Artificial Sequence
  Description of Artificial Sequence: Synthetic oligonucleotide
aaacaguuauuucaguuaa

SEQ ID NO: 2625947 - RNA, 19 nt, Artificial Sequence
  Description of Artificial Sequence: Synthetic oligonucleotide
guaacugugaucaucgucc

SEQ ID NO: 2625948 - RNA, 19 nt, Artificial Sequence
  Description of Artificial Sequence: Synthetic oligonucleotide
aaguacagcaaguaacugu

SEQ ID NO: 2625949 - RNA, 19 nt, Artificial Sequence
  Description of Artificial Sequence: Synthetic oligonucleotide
uuaacugccauaaaauguu

SEQ ID NO: 2625950 - RNA, 19 nt, Artificial Sequence
  Description of Artificial Sequence: Synthetic oligonucleotide
ucaguuaaguuaaaauccu

SEQ ID NO: 2625951 - RNA, 19 nt, Artificial Sequence
  Description of Artificial Sequence: Synthetic oligonucleotide
uugacguacccuuccaucg

SEQ ID NO: 2625952 - RNA, 19 nt, Artificial Sequence
  Description of Artificial Sequence: Synthetic oligonucleotide
aaaaguacagcaaguaacu

SEQ ID NO: 2625953 - RNA, 19 nt, Artificial Sequence
  Description of Artificial Sequence: Synthetic oligonucleotide
gguaacagcaaccaguugc

SEQ ID NO: 2625954 - RNA, 19 nt, Artificial Sequence
  Description of Artificial Sequence: Synthetic oligonucleotide
aaacacuuuaggaaggcag

SEQ ID NO: 2625955 - RNA, 19 nt, Artificial Sequence
  Description of Artificial Sequence: Synthetic oligonucleotide
aacaccgcuucacugccgc

SEQ ID NO: 2625956 - RNA, 19 nt, Artificial Sequence
  Description of Artificial Sequence: Synthetic oligonucleotide
uucaauccaggcuuugacg

SEQ ID NO: 2625957 - RNA, 19 nt, Artificial Sequence
  Description of Artificial Sequence: Synthetic oligonucleotide
gaagccaggaaacagugac

SEQ ID NO: 2625958 - RNA, 19 nt, Artificial Sequence
  Description of Artificial Sequence: Synthetic oligonucleotide
aguaacugugaucaucguc

SEQ ID NO: 2625959 - RNA, 19 nt, Artificial Sequence
  Description of Artificial Sequence: Synthetic oligonucleotide
cuuccaucgcccaacaccg

SEQ ID NO: 2625960 - RNA, 19 nt, Artificial Sequence
  Description of Artificial Sequence: Synthetic oligonucleotide
uucuacuuaggcccaagag

SEQ ID NO: 2625961 - RNA, 19 nt, Artificial Sequence
  Description of Artificial Sequence: Synthetic oligonucleotide
aagaggguccuuuaguggu

SEQ ID NO: 2625962 - RNA, 19 nt, Artificial Sequence
  Description of Artificial Sequence: Synthetic oligonucleotide
ugaaaaguacagcaaguaa

SEQ ID NO: 2625963 - RNA, 19 nt, Artificial Sequence
  Description of Artificial Sequence: Synthetic oligonucleotide
aggcaggagaguucaaucc

SEQ ID NO: 2625964 - RNA, 19 nt, Artificial Sequence
  Description of Artificial Sequence: Synthetic oligonucleotide
aaaaccccaacacauuuau

SEQ ID NO: 2625965 - RNA, 19 nt, Artificial Sequence
  Description of Artificial Sequence: Synthetic oligonucleotide
uauuuugggguguuccccg

SEQ ID NO: 2625966 - RNA, 19 nt, Artificial Sequence
  Description of Artificial Sequence: Synthetic oligonucleotide
aacacuuuaggaaggcagg

SEQ ID NO: 2625967 - RNA, 19 nt, Artificial Sequence
  Description of Artificial Sequence: Synthetic oligonucleotide
ucaauccaggcuuugacgu

SEQ ID NO: 2625968 - RNA, 19 nt, Artificial Sequence
  Description of Artificial Sequence: Synthetic oligonucleotide
aaauguucaaguguaguau

SEQ ID NO: 2625969 - RNA, 19 nt, Artificial Sequence
  Description of Artificial Sequence: Synthetic oligonucleotide
aguuaaaauccuauaauca

SEQ ID NO: 2625970 - RNA, 19 nt, Artificial Sequence
  Description of Artificial Sequence: Synthetic oligonucleotide
caaguguaguauuuugggg

SEQ ID NO: 2625971 - RNA, 19 nt, Artificial Sequence
  Description of Artificial Sequence: Synthetic oligonucleotide
acugugaucaucguccuuc

SEQ ID NO: 2625972 - RNA, 19 nt, Artificial Sequence
  Description of Artificial Sequence: Synthetic oligonucleotide
gagacggucuuuuaacugc

SEQ ID NO: 2625973 - RNA, 19 nt, Artificial Sequence
  Description of Artificial Sequence: Synthetic oligonucleotide
cuauaaucaggacagccac

SEQ ID NO: 2625974 - RNA, 19 nt, Artificial Sequence
  Description of Artificial Sequence: Synthetic oligonucleotide
aggagaguucaauccaggc

SEQ ID NO: 2625975 - RNA, 19 nt, Artificial Sequence
  Description of Artificial Sequence: Synthetic oligonucleotide
accgcaaagacaugagacg

SEQ ID NO: 2625976 - RNA, 19 nt, Artificial Sequence
  Description of Artificial Sequence: Synthetic oligonucleotide
uccgguaacagcaaccagu

SEQ ID NO: 2625977 - RNA, 19 nt, Artificial Sequence
  Description of Artificial Sequence: Synthetic oligonucleotide
aauccaggcuuugacguac

SEQ ID NO: 2625978 - RNA, 19 nt, Artificial Sequence
  Description of Artificial Sequence: Synthetic oligonucleotide
cauaaaauguucaagugua

SEQ ID NO: 2625979 - RNA, 19 nt, Artificial Sequence
  Description of Artificial Sequence: Synthetic oligonucleotide
aaagacaugagacggucuu

SEQ ID NO: 2625980 - RNA, 19 nt, Artificial Sequence
  Description of Artificial Sequence: Synthetic oligonucleotide
aaauuguuacuucuacuua

SEQ ID NO: 2625981 - RNA, 19 nt, Artificial Sequence
  Description of Artificial Sequence: Synthetic oligonucleotide
gagagcaugcaccauggcc

SEQ ID NO: 2625982 - RNA, 19 nt, Artificial Sequence
  Description of Artificial Sequence: Synthetic oligonucleotide
uugaacccaagcaggaacc

SEQ ID NO: 2625983 - RNA, 19 nt, Artificial Sequence
  Description of Artificial Sequence: Synthetic oligonucleotide
cuuuaggaaggcaggagag

SEQ ID NO: 2625984 - RNA, 19 nt, Artificial Sequence
  Description of Artificial Sequence: Synthetic oligonucleotide
acagcaaguaacugugauc

SEQ ID NO: 2625985 - RNA, 19 nt, Artificial Sequence
  Description of Artificial Sequence: Synthetic oligonucleotide
uggaucaggaagcaguccu

SEQ ID NO: 2625986 - RNA, 19 nt, Artificial Sequence
  Description of Artificial Sequence: Synthetic oligonucleotide
agugaccuugaacccaagc

SEQ ID NO: 2625987 - RNA, 19 nt, Artificial Sequence
  Description of Artificial Sequence: Synthetic oligonucleotide
caugagacggucuuuuaac

SEQ ID NO: 2625988 - RNA, 19 nt, Artificial Sequence
  Description of Artificial Sequence: Synthetic oligonucleotide
aguacagcaaguaacugug

SEQ ID NO: 2625989 - RNA, 19 nt, Artificial Sequence
  Description of Artificial Sequence: Synthetic oligonucleotide
aguguaguauuuuggggug

SEQ ID NO: 2625990 - RNA, 19 nt, Artificial Sequence
  Description of Artificial Sequence: Synthetic oligonucleotide
acuuuaggaaggcaggaga

SEQ ID NO: 2625991 - RNA, 19 nt, Artificial Sequence
  Description of Artificial Sequence: Synthetic oligonucleotide
uaaaauguucaaguguagu

SEQ ID NO: 2625992 - RNA, 19 nt, Artificial Sequence
  Description of Artificial Sequence: Synthetic oligonucleotide
guuccccgaaacuacaucc

SEQ ID NO: 2625993 - RNA, 19 nt, Artificial Sequence
  Description of Artificial Sequence: Synthetic oligonucleotide
uuguuacuucuacuuaggc

SEQ ID NO: 2625994 - RNA, 19 nt, Artificial Sequence
  Description of Artificial Sequence: Synthetic oligonucleotide
uccuauaaucaggacagcc

SEQ ID NO: 2625995 - RNA, 19 nt, Artificial Sequence
  Description of Artificial Sequence: Synthetic oligonucleotide
acaguuauuucaguuaagu

SEQ ID NO: 2625996 - RNA, 19 nt, Artificial Sequence
  Description of Artificial Sequence: Synthetic oligonucleotide
cuugaacccaagcaggaac

SEQ ID NO: 2625997 - RNA, 19 nt, Artificial Sequence
  Description of Artificial Sequence: Synthetic oligonucleotide
cuacauccauucuuguucc

SEQ ID NO: 2625998 - RNA, 19 nt, Artificial Sequence
  Description of Artificial Sequence: Synthetic oligonucleotide
ugagacggucuuuuaacug

SEQ ID NO: 2625999 - RNA, 19 nt, Artificial Sequence
  Description of Artificial Sequence: Synthetic oligonucleotide
ugaucaucguccuucguuc

SEQ ID NO: 2626000 - RNA, 19 nt, Artificial Sequence
  Description of Artificial Sequence: Synthetic oligonucleotide
uaccgcauguuuuacauua

SEQ ID NO: 2626001 - RNA, 19 nt, Artificial Sequence
  Description of Artificial Sequence: Synthetic oligonucleotide
guucaaguguaguauuuug

SEQ ID NO: 2626002 - RNA, 19 nt, Artificial Sequence
  Description of Artificial Sequence: Synthetic oligonucleotide
acauccauucuuguucccc

SEQ ID NO: 2626003 - RNA, 19 nt, Artificial Sequence
  Description of Artificial Sequence: Synthetic oligonucleotide
uaguauuuugggguguucc

SEQ ID NO: 2626004 - RNA, 19 nt, Artificial Sequence
  Description of Artificial Sequence: Synthetic oligonucleotide
caccgcaaagacaugagac

SEQ ID NO: 2626005 - RNA, 19 nt, Artificial Sequence
  Description of Artificial Sequence: Synthetic oligonucleotide
aacagcaaccaguugccaa

SEQ ID NO: 2626006 - RNA, 19 nt, Artificial Sequence
  Description of Artificial Sequence: Synthetic oligonucleotide
caagaggguccuuuagugg

SEQ ID NO: 2626007 - RNA, 19 nt, Artificial Sequence
  Description of Artificial Sequence: Synthetic oligonucleotide
auuguuacuucuacuuagg

SEQ ID NO: 2626008 - RNA, 19 nt, Artificial Sequence
  Description of Artificial Sequence: Synthetic oligonucleotide
ugcaccauggccacguggu

SEQ ID NO: 2626009 - RNA, 19 nt, Artificial Sequence
  Description of Artificial Sequence: Synthetic oligonucleotide
uacgacauucccucaacac

SEQ ID NO: 2626010 - RNA, 19 nt, Artificial Sequence
  Description of Artificial Sequence: Synthetic oligonucleotide
aaaguacagcaaguaacug

SEQ ID NO: 2626011 - RNA, 19 nt, Artificial Sequence
  Description of Artificial Sequence: Synthetic oligonucleotide
accauggccacguggucgc

SEQ ID NO: 2626012 - RNA, 19 nt, Artificial Sequence
  Description of Artificial Sequence: Synthetic oligonucleotide
gaccuugaacccaagcagg

SEQ ID NO: 2626013 - RNA, 19 nt, Artificial Sequence
  Description of Artificial Sequence: Synthetic oligonucleotide
acgacauucccucaacacu

SEQ ID NO: 2626014 - RNA, 19 nt, Artificial Sequence
  Description of Artificial Sequence: Synthetic oligonucleotide
ucaggaagcaguccugaaa

SEQ ID NO: 2626015 - RNA, 19 nt, Artificial Sequence
  Description of Artificial Sequence: Synthetic oligonucleotide
uacagcaaguaacugugau

SEQ ID NO: 2626016 - RNA, 19 nt, Artificial Sequence
  Description of Artificial Sequence: Synthetic oligonucleotide
aagccaggaaacagugacc

SEQ ID NO: 2626017 - RNA, 19 nt, Artificial Sequence
  Description of Artificial Sequence: Synthetic oligonucleotide
gaaccggucgccuuuaaaa

SEQ ID NO: 2626018 - RNA, 19 nt, Artificial Sequence
  Description of Artificial Sequence: Synthetic oligonucleotide
acauuaaaaccagcaccgc

SEQ ID NO: 2626019 - RNA, 19 nt, Artificial Sequence
  Description of Artificial Sequence: Synthetic oligonucleotide
cuaccaggcugaauuacgc

SEQ ID NO: 2626020 - RNA, 19 nt, Artificial Sequence
  Description of Artificial Sequence: Synthetic oligonucleotide
aacuacauccauucuuguu

SEQ ID NO: 2626021 - RNA, 19 nt, Artificial Sequence
  Description of Artificial Sequence: Synthetic oligonucleotide
agagcaugcaccauggcca

SEQ ID NO: 2626022 - RNA, 19 nt, Artificial Sequence
  Description of Artificial Sequence: Synthetic oligonucleotide
ugcgaagccaggaaacagu

SEQ ID NO: 2626023 - RNA, 19 nt, Artificial Sequence
  Description of Artificial Sequence: Synthetic oligonucleotide
agagucugcgcggaauugc

SEQ ID NO: 2626024 - RNA, 19 nt, Artificial Sequence
  Description of Artificial Sequence: Synthetic oligonucleotide
ucccucaacacuccgguaa

SEQ ID NO: 2626025 - RNA, 19 nt, Artificial Sequence
  Description of Artificial Sequence: Synthetic oligonucleotide
aaacuacauccauucuugu

SEQ ID NO: 2626026 - RNA, 19 nt, Artificial Sequence
  Description of Artificial Sequence: Synthetic oligonucleotide
ugauccugagagcaugcac

SEQ ID NO: 2626027 - RNA, 19 nt, Artificial Sequence
  Description of Artificial Sequence: Synthetic oligonucleotide
aguuaaguuaaaauccuau

SEQ ID NO: 2626028 - RNA, 19 nt, Artificial Sequence
  Description of Artificial Sequence: Synthetic oligonucleotide
gugaccuugaacccaagca

SEQ ID NO: 2626029 - RNA, 19 nt, Artificial Sequence
  Description of Artificial Sequence: Synthetic oligonucleotide
auucccucaacacuccggu

SEQ ID NO: 2626030 - RNA, 19 nt, Artificial Sequence
  Description of Artificial Sequence: Synthetic oligonucleotide
acugccauaaaauguucaa

SEQ ID NO: 2626031 - RNA, 19 nt, Artificial Sequence
  Description of Artificial Sequence: Synthetic oligonucleotide
cagcaaguaacugugauca

SEQ ID NO: 2626032 - RNA, 19 nt, Artificial Sequence
  Description of Artificial Sequence: Synthetic oligonucleotide
caacacuccgguaacagca

SEQ ID NO: 2626033 - RNA, 19 nt, Artificial Sequence
  Description of Artificial Sequence: Synthetic oligonucleotide
aacagugaccuugaaccca

SEQ ID NO: 2626034 - RNA, 19 nt, Artificial Sequence
  Description of Artificial Sequence: Synthetic oligonucleotide
cauucccucaacacuccgg

SEQ ID NO: 2626035 - RNA, 19 nt, Artificial Sequence
  Description of Artificial Sequence: Synthetic oligonucleotide
ccaaaguggaucaggaagc

SEQ ID NO: 2626036 - RNA, 19 nt, Artificial Sequence
  Description of Artificial Sequence: Synthetic oligonucleotide
guaacagcaaccaguugcc

SEQ ID NO: 2626037 - RNA, 19 nt, Artificial Sequence
  Description of Artificial Sequence: Synthetic oligonucleotide
uuagugguaccgcauguuu

SEQ ID NO: 2626038 - RNA, 19 nt, Artificial Sequence
  Description of Artificial Sequence: Synthetic oligonucleotide
aaagguacagacaggcgaa

SEQ ID NO: 2626039 - RNA, 19 nt, Artificial Sequence
  Description of Artificial Sequence: Synthetic oligonucleotide
acuuaggcccaagaggguc

SEQ ID NO: 2626040 - RNA, 19 nt, Artificial Sequence
  Description of Artificial Sequence: Synthetic oligonucleotide
cuuaggcccaagagggucc

SEQ ID NO: 2626041 - RNA, 19 nt, Artificial Sequence
  Description of Artificial Sequence: Synthetic oligonucleotide
augagacggucuuuuaacu

SEQ ID NO: 2626042 - RNA, 19 nt, Artificial Sequence
  Description of Artificial Sequence: Synthetic oligonucleotide
cuuuuaacugccauaaaau

SEQ ID NO: 2626043 - RNA, 19 nt, Artificial Sequence
  Description of Artificial Sequence: Synthetic oligonucleotide
uccuucguuccauggcugg

SEQ ID NO: 2626044 - RNA, 19 nt, Artificial Sequence
  Description of Artificial Sequence: Synthetic oligonucleotide
cccaaaguggaucaggaag

SEQ ID NO: 2626045 - RNA, 19 nt, Artificial Sequence
  Description of Artificial Sequence: Synthetic oligonucleotide
gagaguucaauccaggcuu

SEQ ID NO: 2626046 - RNA, 19 nt, Artificial Sequence
  Description of Artificial Sequence: Synthetic oligonucleotide
ugaacccaagcaggaaccg

SEQ ID NO: 2626047 - RNA, 19 nt, Artificial Sequence
  Description of Artificial Sequence: Synthetic oligonucleotide
gcugaauuacgccagaaaa

SEQ ID NO: 2626048 - RNA, 19 nt, Artificial Sequence
  Description of Artificial Sequence: Synthetic oligonucleotide
ugacguacccuuccaucgc

SEQ ID NO: 2626049 - RNA, 19 nt, Artificial Sequence
  Description of Artificial Sequence: Synthetic oligonucleotide
accagcaccgcaaagacau

SEQ ID NO: 2626050 - RNA, 19 nt, Artificial Sequence
  Description of Artificial Sequence: Synthetic oligonucleotide
ugccacagcagagucugcg

SEQ ID NO: 2626051 - RNA, 19 nt, Artificial Sequence
  Description of Artificial Sequence: Synthetic oligonucleotide
uuaggaaggcaggagaguu

SEQ ID NO: 2626052 - RNA, 19 nt, Artificial Sequence
  Description of Artificial Sequence: Synthetic oligonucleotide
acagcaaccaguugccaaa

SEQ ID NO: 2626053 - RNA, 19 nt, Artificial Sequence
  Description of Artificial Sequence: Synthetic oligonucleotide
accccaacacauuuauuca

SEQ ID NO: 2626054 - RNA, 19 nt, Artificial Sequence
  Description of Artificial Sequence: Synthetic oligonucleotide
cauuaaaaccagcaccgca

SEQ ID NO: 2626055 - RNA, 19 nt, Artificial Sequence
  Description of Artificial Sequence: Synthetic oligonucleotide
ucguccuucguuccauggc

SEQ ID NO: 2626056 - RNA, 19 nt, Artificial Sequence
  Description of Artificial Sequence: Synthetic oligonucleotide
ggaauugcagcuaccaggc

SEQ ID NO: 2626057 - RNA, 19 nt, Artificial Sequence
  Description of Artificial Sequence: Synthetic oligonucleotide
aguggaucaggaagcaguc

SEQ ID NO: 2626058 - RNA, 19 nt, Artificial Sequence
  Description of Artificial Sequence: Synthetic oligonucleotide
gaucaucguccuucguucc

SEQ ID NO: 2626059 - RNA, 19 nt, Artificial Sequence
  Description of Artificial Sequence: Synthetic oligonucleotide
acaugagacggucuuuuaa

SEQ ID NO: 2626060 - RNA, 19 nt, Artificial Sequence
  Description of Artificial Sequence: Synthetic oligonucleotide
caggagaguucaauccagg

SEQ ID NO: 2626061 - RNA, 19 nt, Artificial Sequence
  Description of Artificial Sequence: Synthetic oligonucleotide
agacggucuuuuaacugcc

SEQ ID NO: 2626062 - RNA, 19 nt, Artificial Sequence
  Description of Artificial Sequence: Synthetic oligonucleotide
gccauaaaauguucaagug

SEQ ID NO: 2626063 - RNA, 19 nt, Artificial Sequence
  Description of Artificial Sequence: Synthetic oligonucleotide
aacugccauaaaauguuca

SEQ ID NO: 2626064 - RNA, 19 nt, Artificial Sequence
  Description of Artificial Sequence: Synthetic oligonucleotide
uuccccgaaacuacaucca

SEQ ID NO: 2626065 - RNA, 19 nt, Artificial Sequence
  Description of Artificial Sequence: Synthetic oligonucleotide
uguuccccgaaacuacauc

SEQ ID NO: 2626066 - RNA, 19 nt, Artificial Sequence
  Description of Artificial Sequence: Synthetic oligonucleotide
agugguaccgcauguuuua

SEQ ID NO: 2626067 - RNA, 19 nt, Artificial Sequence
  Description of Artificial Sequence: Synthetic oligonucleotide
uaccaggcugaauuacgcc

SEQ ID NO: 2626068 - RNA, 19 nt, Artificial Sequence
  Description of Artificial Sequence: Synthetic oligonucleotide
aaguaacugugaucaucgu

SEQ ID NO: 2626069 - RNA, 19 nt, Artificial Sequence
  Description of Artificial Sequence: Synthetic oligonucleotide
aacccaagcaggaaccggu

SEQ ID NO: 2626070 - RNA, 19 nt, Artificial Sequence
  Description of Artificial Sequence: Synthetic oligonucleotide
cacagcagagucugcgcgg

SEQ ID NO: 2626071 - RNA, 19 nt, Artificial Sequence
  Description of Artificial Sequence: Synthetic oligonucleotide
ucugcgcggaauugcagcu

SEQ ID NO: 2626072 - RNA, 19 nt, Artificial Sequence
  Description of Artificial Sequence: Synthetic oligonucleotide
cacuccgguaacagcaacc

SEQ ID NO: 2626073 - RNA, 19 nt, Artificial Sequence
  Description of Artificial Sequence: Synthetic oligonucleotide
gaagcaguccugaaaagua

SEQ ID NO: 2626074 - RNA, 19 nt, Artificial Sequence
  Description of Artificial Sequence: Synthetic oligonucleotide
acauucccucaacacuccg

SEQ ID NO: 2626075 - RNA, 19 nt, Artificial Sequence
  Description of Artificial Sequence: Synthetic oligonucleotide
uccaucgcccaacaccgcu

SEQ ID NO: 2626076 - RNA, 19 nt, Artificial Sequence
  Description of Artificial Sequence: Synthetic oligonucleotide
cugugaucaucguccuucg

SEQ ID NO: 2626077 - RNA, 19 nt, Artificial Sequence
  Description of Artificial Sequence: Synthetic oligonucleotide
uucguuccauggcuggcug

SEQ ID NO: 2626078 - RNA, 19 nt, Artificial Sequence
  Description of Artificial Sequence: Synthetic oligonucleotide
gaacccaagcaggaaccgg

SEQ ID NO: 2626079 - RNA, 19 nt, Artificial Sequence
  Description of Artificial Sequence: Synthetic oligonucleotide
gacguacccuuccaucgcc

SEQ ID NO: 2626080 - RNA, 19 nt, Artificial Sequence
  Description of Artificial Sequence: Synthetic oligonucleotide
ugcgcggaauugcagcuac

SEQ ID NO: 2626081 - RNA, 19 nt, Artificial Sequence
  Description of Artificial Sequence: Synthetic oligonucleotide
agcuaccaggcugaauuac

SEQ ID NO: 2626082 - RNA, 19 nt, Artificial Sequence
  Description of Artificial Sequence: Synthetic oligonucleotide
uaacugugaucaucguccu

SEQ ID NO: 2626083 - RNA, 19 nt, Artificial Sequence
  Description of Artificial Sequence: Synthetic oligonucleotide
gucugcgcggaauugcagc

SEQ ID NO: 2626084 - RNA, 19 nt, Artificial Sequence
  Description of Artificial Sequence: Synthetic oligonucleotide
acacuccgguaacagcaac

SEQ ID NO: 2626085 - RNA, 19 nt, Artificial Sequence
  Description of Artificial Sequence: Synthetic oligonucleotide
cggaauugcagcuaccagg

SEQ ID NO: 2626086 - RNA, 19 nt, Artificial Sequence
  Description of Artificial Sequence: Synthetic oligonucleotide
augcaccauggccacgugg

SEQ ID NO: 2626087 - RNA, 19 nt, Artificial Sequence
  Description of Artificial Sequence: Synthetic oligonucleotide
uugggguguuccccgaaac

SEQ ID NO: 2626088 - RNA, 19 nt, Artificial Sequence
  Description of Artificial Sequence: Synthetic oligonucleotide
ugguacgacauucccucaa

SEQ ID NO: 2626089 - RNA, 19 nt, Artificial Sequence
  Description of Artificial Sequence: Synthetic oligonucleotide
uuugggguguuccccgaaa

SEQ ID NO: 2626090 - RNA, 19 nt, Artificial Sequence
  Description of Artificial Sequence: Synthetic oligonucleotide
uccuuuagugguaccgcau

SEQ ID NO: 2626091 - RNA, 19 nt, Artificial Sequence
  Description of Artificial Sequence: Synthetic oligonucleotide
ugggguguuccccgaaacu

SEQ ID NO: 2626092 - RNA, 19 nt, Artificial Sequence
  Description of Artificial Sequence: Synthetic oligonucleotide
ucggugcgaagccaggaaa

SEQ ID NO: 2626093 - RNA, 19 nt, Artificial Sequence
  Description of Artificial Sequence: Synthetic oligonucleotide
uagugguaccgcauguuuu

SEQ ID NO: 2626094 - RNA, 19 nt, Artificial Sequence
  Description of Artificial Sequence: Synthetic oligonucleotide
ucgccggauugccacagca

SEQ ID NO: 2626095 - RNA, 19 nt, Artificial Sequence
  Description of Artificial Sequence: Synthetic oligonucleotide
uucggugcgaagccaggaa

SEQ ID NO: 2626096 - RNA, 19 nt, Artificial Sequence
  Description of Artificial Sequence: Synthetic oligonucleotide
cccgaaacuacauccauuc

SEQ ID NO: 2626097 - RNA, 19 nt, Artificial Sequence
  Description of Artificial Sequence: Synthetic oligonucleotide
auggccacguggucgccgg

SEQ ID NO: 2626098 - RNA, 19 nt, Artificial Sequence
  Description of Artificial Sequence: Synthetic oligonucleotide
cacuucggugcgaagccag

SEQ ID NO: 2626099 - RNA, 19 nt, Artificial Sequence
  Description of Artificial Sequence: Synthetic oligonucleotide
acuccgguaacagcaacca

SEQ ID NO: 2626100 - RNA, 19 nt, Artificial Sequence
  Description of Artificial Sequence: Synthetic oligonucleotide
ccaagaggguccuuuagug

SEQ ID NO: 2626101 - RNA, 19 nt, Artificial Sequence
  Description of Artificial Sequence: Synthetic oligonucleotide
ugguaccgcauguuuuaca

SEQ ID NO: 2626102 - RNA, 19 nt, Artificial Sequence
  Description of Artificial Sequence: Synthetic oligonucleotide
cacuuuaggaaggcaggag

SEQ ID NO: 2626103 - RNA, 19 nt, Artificial Sequence
  Description of Artificial Sequence: Synthetic oligonucleotide
ggucuuuuaacugccauaa

SEQ ID NO: 2626104 - RNA, 19 nt, Artificial Sequence
  Description of Artificial Sequence: Synthetic oligonucleotide
auccuauaaucaggacagc

SEQ ID NO: 2626105 - RNA, 19 nt, Artificial Sequence
  Description of Artificial Sequence: Synthetic oligonucleotide
acgugugguacgacauucc

SEQ ID NO: 2626106 - RNA, 19 nt, Artificial Sequence
  Description of Artificial Sequence: Synthetic oligonucleotide
caguccugaaaaguacagc

SEQ ID NO: 2626107 - RNA, 19 nt, Artificial Sequence
  Description of Artificial Sequence: Synthetic oligonucleotide
gacauucccucaacacucc

SEQ ID NO: 2626108 - RNA, 19 nt, Artificial Sequence
  Description of Artificial Sequence: Synthetic oligonucleotide
uuuagugguaccgcauguu

SEQ ID NO: 2626109 - RNA, 19 nt, Artificial Sequence
  Description of Artificial Sequence: Synthetic oligonucleotide
aggguccuuuagugguacc

SEQ ID NO: 2626110 - RNA, 19 nt, Artificial Sequence
  Description of Artificial Sequence: Synthetic oligonucleotide
cuggcugauccugagagca

SEQ ID NO: 2626111 - RNA, 19 nt, Artificial Sequence
  Description of Artificial Sequence: Synthetic oligonucleotide
aucaucguccuucguucca

SEQ ID NO: 2626112 - RNA, 19 nt, Artificial Sequence
  Description of Artificial Sequence: Synthetic oligonucleotide
ccuauaaucaggacagcca

SEQ ID NO: 2626113 - RNA, 19 nt, Artificial Sequence
  Description of Artificial Sequence: Synthetic oligonucleotide
aguucaauccaggcuuuga

SEQ ID NO: 2626114 - RNA, 19 nt, Artificial Sequence
  Description of Artificial Sequence: Synthetic oligonucleotide
uacuuaggcccaagagggu

SEQ ID NO: 2626115 - RNA, 19 nt, Artificial Sequence
  Description of Artificial Sequence: Synthetic oligonucleotide
uacauccauucuuguuccc

SEQ ID NO: 2626116 - RNA, 19 nt, Artificial Sequence
  Description of Artificial Sequence: Synthetic oligonucleotide
acacuuuaggaaggcagga

SEQ ID NO: 2626117 - RNA, 19 nt, Artificial Sequence
  Description of Artificial Sequence: Synthetic oligonucleotide
uccccgaaacuacauccau

SEQ ID NO: 2626118 - RNA, 19 nt, Artificial Sequence
  Description of Artificial Sequence: Synthetic oligonucleotide
ugugaucaucguccuucgu

SEQ ID NO: 2626119 - RNA, 19 nt, Artificial Sequence
  Description of Artificial Sequence: Synthetic oligonucleotide
uccaggcuuugacguaccc

SEQ ID NO: 2626120 - RNA, 19 nt, Artificial Sequence
  Description of Artificial Sequence: Synthetic oligonucleotide
uguaguauuuugggguguu

SEQ ID NO: 2626121 - RNA, 19 nt, Artificial Sequence
  Description of Artificial Sequence: Synthetic oligonucleotide
acggucuuuuaacugccau

SEQ ID NO: 2626122 - RNA, 19 nt, Artificial Sequence
  Description of Artificial Sequence: Synthetic oligonucleotide
caagcaggaaccggucgcc

SEQ ID NO: 2626123 - RNA, 19 nt, Artificial Sequence
  Description of Artificial Sequence: Synthetic oligonucleotide
agcaguccugaaaaguaca

SEQ ID NO: 2626124 - RNA, 19 nt, Artificial Sequence
  Description of Artificial Sequence: Synthetic oligonucleotide
cccaacaccgcuucacugc

SEQ ID NO: 2626125 - RNA, 19 nt, Artificial Sequence
  Description of Artificial Sequence: Synthetic oligonucleotide
ggguccuuuagugguaccg

SEQ ID NO: 2626126 - RNA, 19 nt, Artificial Sequence
  Description of Artificial Sequence: Synthetic oligonucleotide
gagcaugcaccauggccac

SEQ ID NO: 2626127 - RNA, 19 nt, Artificial Sequence
  Description of Artificial Sequence: Synthetic oligonucleotide
ucacugccgccucccaccc

SEQ ID NO: 2626128 - RNA, 19 nt, Artificial Sequence
  Description of Artificial Sequence: Synthetic oligonucleotide
cacgugugguacgacauuc

SEQ ID NO: 2626129 - RNA, 19 nt, Artificial Sequence
  Description of Artificial Sequence: Synthetic oligonucleotide
ccgcaaagacaugagacgg

SEQ ID NO: 2626130 - RNA, 19 nt, Artificial Sequence
  Description of Artificial Sequence: Synthetic oligonucleotide
cugaaaaguacagcaagua

SEQ ID NO: 2626131 - RNA, 19 nt, Artificial Sequence
  Description of Artificial Sequence: Synthetic oligonucleotide
gugcgaagccaggaaacag

SEQ ID NO: 2626132 - RNA, 19 nt, Artificial Sequence
  Description of Artificial Sequence: Synthetic oligonucleotide
acguggucgccggauugcc

SEQ ID NO: 2626133 - RNA, 19 nt, Artificial Sequence
  Description of Artificial Sequence: Synthetic oligonucleotide
guacgacauucccucaaca

SEQ ID NO: 2626134 - RNA, 19 nt, Artificial Sequence
  Description of Artificial Sequence: Synthetic oligonucleotide
ccugagagcaugcaccaug

SEQ ID NO: 2626135 - RNA, 19 nt, Artificial Sequence
  Description of Artificial Sequence: Synthetic oligonucleotide
caggaaacagugaccuuga

SEQ ID NO: 2626136 - RNA, 19 nt, Artificial Sequence
  Description of Artificial Sequence: Synthetic oligonucleotide
agacaugagacggucuuuu

SEQ ID NO: 2626137 - RNA, 19 nt, Artificial Sequence
  Description of Artificial Sequence: Synthetic oligonucleotide
acaccgcuucacugccgcc

SEQ ID NO: 2626138 - RNA, 19 nt, Artificial Sequence
  Description of Artificial Sequence: Synthetic oligonucleotide
aagacaugagacggucuuu

SEQ ID NO: 2626139 - RNA, 19 nt, Artificial Sequence
  Description of Artificial Sequence: Synthetic oligonucleotide
ggcaggagaguucaaucca

SEQ ID NO: 2626140 - RNA, 19 nt, Artificial Sequence
  Description of Artificial Sequence: Synthetic oligonucleotide
ggcuuugacguacccuucc

SEQ ID NO: 2626141 - RNA, 19 nt, Artificial Sequence
  Description of Artificial Sequence: Synthetic oligonucleotide
uacccuuccaucgcccaac

SEQ ID NO: 2626142 - RNA, 19 nt, Artificial Sequence
  Description of Artificial Sequence: Synthetic oligonucleotide
gguacgacauucccucaac

SEQ ID NO: 2626143 - RNA, 19 nt, Artificial Sequence
  Description of Artificial Sequence: Synthetic oligonucleotide
gcaaguaacugugaucauc

SEQ ID NO: 2626144 - RNA, 19 nt, Artificial Sequence
  Description of Artificial Sequence: Synthetic oligonucleotide
aacugugaucaucguccuu

SEQ ID NO: 2626145 - RNA, 19 nt, Artificial Sequence
  Description of Artificial Sequence: Synthetic oligonucleotide
ccaagcaggaaccggucgc

SEQ ID NO: 2626146 - RNA, 19 nt, Artificial Sequence
  Description of Artificial Sequence: Synthetic oligonucleotide
agcaccgcaaagacaugag

SEQ ID NO: 2626147 - RNA, 19 nt, Artificial Sequence
  Description of Artificial Sequence: Synthetic oligonucleotide
aacacuccgguaacagcaa

SEQ ID NO: 2626148 - RNA, 19 nt, Artificial Sequence
  Description of Artificial Sequence: Synthetic oligonucleotide
ccaggcugaauuacgccag

SEQ ID NO: 2626149 - RNA, 19 nt, Artificial Sequence
  Description of Artificial Sequence: Synthetic oligonucleotide
cuucuacuuaggcccaaga

SEQ ID NO: 2626150 - RNA, 19 nt, Artificial Sequence
  Description of Artificial Sequence: Synthetic oligonucleotide
ucaucguccuucguuccau

SEQ ID NO: 2626151 - RNA, 19 nt, Artificial Sequence
  Description of Artificial Sequence: Synthetic oligonucleotide
cgacauucccucaacacuc

SEQ ID NO: 2626152 - RNA, 19 nt, Artificial Sequence
  Description of Artificial Sequence: Synthetic oligonucleotide
caacaccgcuucacugccg

SEQ ID NO: 2626153 - RNA, 19 nt, Artificial Sequence
  Description of Artificial Sequence: Synthetic oligonucleotide
aaccagcaccgcaaagaca

SEQ ID NO: 2626154 - RNA, 19 nt, Artificial Sequence
  Description of Artificial Sequence: Synthetic oligonucleotide
ccuuuagugguaccgcaug

SEQ ID NO: 2626155 - RNA, 19 nt, Artificial Sequence
  Description of Artificial Sequence: Synthetic oligonucleotide
gguccuuuagugguaccgc

SEQ ID NO: 2626156 - RNA, 19 nt, Artificial Sequence
  Description of Artificial Sequence: Synthetic oligonucleotide
accuugaacccaagcagga

SEQ ID NO: 2626157 - RNA, 19 nt, Artificial Sequence
  Description of Artificial Sequence: Synthetic oligonucleotide
gcaguccugaaaaguacag

SEQ ID NO: 2626158 - RNA, 19 nt, Artificial Sequence
  Description of Artificial Sequence: Synthetic oligonucleotide
gugaucaucguccuucguu

SEQ ID NO: 2626159 - RNA, 19 nt, Artificial Sequence
  Description of Artificial Sequence: Synthetic oligonucleotide
caaaguggaucaggaagca

SEQ ID NO: 2626160 - RNA, 19 nt, Artificial Sequence
  Description of Artificial Sequence: Synthetic oligonucleotide
uuccaucgcccaacaccgc

SEQ ID NO: 2626161 - RNA, 19 nt, Artificial Sequence
  Description of Artificial Sequence: Synthetic oligonucleotide
gaguucaauccaggcuuug

SEQ ID NO: 2626162 - RNA, 19 nt, Artificial Sequence
  Description of Artificial Sequence: Synthetic oligonucleotide
ccacagcagagucugcgcg

SEQ ID NO: 2626163 - RNA, 19 nt, Artificial Sequence
  Description of Artificial Sequence: Synthetic oligonucleotide
ccauaaaauguucaagugu

SEQ ID NO: 2626164 - RNA, 19 nt, Artificial Sequence
  Description of Artificial Sequence: Synthetic oligonucleotide
ggauugccacagcagaguc

SEQ ID NO: 2626165 - RNA, 19 nt, Artificial Sequence
  Description of Artificial Sequence: Synthetic oligonucleotide
gcaggagaguucaauccag

SEQ ID NO: 2626166 - RNA, 19 nt, Artificial Sequence
  Description of Artificial Sequence: Synthetic oligonucleotide
cuccgguaacagcaaccag

SEQ ID NO: 2626167 - RNA, 19 nt, Artificial Sequence
  Description of Artificial Sequence: Synthetic oligonucleotide
auccaggcuuugacguacc

SEQ ID NO: 2626168 - RNA, 19 nt, Artificial Sequence
  Description of Artificial Sequence: Synthetic oligonucleotide
acuucggugcgaagccagg

SEQ ID NO: 2626169 - RNA, 19 nt, Artificial Sequence
  Description of Artificial Sequence: Synthetic oligonucleotide
gagucugcgcggaauugca

SEQ ID NO: 2626170 - RNA, 19 nt, Artificial Sequence
  Description of Artificial Sequence: Synthetic oligonucleotide
agcaaguaacugugaucau

SEQ ID NO: 2626171 - RNA, 19 nt, Artificial Sequence
  Description of Artificial Sequence: Synthetic oligonucleotide
acagugaccuugaacccaa

SEQ ID NO: 2626172 - RNA, 19 nt, Artificial Sequence
  Description of Artificial Sequence: Synthetic oligonucleotide
acagcagagucugcgcgga

SEQ ID NO: 2626173 - RNA, 19 nt, Artificial Sequence
  Description of Artificial Sequence: Synthetic oligonucleotide
guggaucaggaagcagucc

SEQ ID NO: 2626174 - RNA, 19 nt, Artificial Sequence
  Description of Artificial Sequence: Synthetic oligonucleotide
ucgcccaacaccgcuucac

SEQ ID NO: 2626175 - RNA, 19 nt, Artificial Sequence
  Description of Artificial Sequence: Synthetic oligonucleotide
ucguuccauggcuggcuga

SEQ ID NO: 2626176 - RNA, 19 nt, Artificial Sequence
  Description of Artificial Sequence: Synthetic oligonucleotide
uuaggcccaagaggguccu

SEQ ID NO: 2626177 - RNA, 19 nt, Artificial Sequence
  Description of Artificial Sequence: Synthetic oligonucleotide
gcggaauugcagcuaccag

SEQ ID NO: 2626178 - RNA, 19 nt, Artificial Sequence
  Description of Artificial Sequence: Synthetic oligonucleotide
gguaccgcauguuuuacau

SEQ ID NO: 2626179 - RNA, 19 nt, Artificial Sequence
  Description of Artificial Sequence: Synthetic oligonucleotide
ccaacaccgcuucacugcc

SEQ ID NO: 2626180 - RNA, 19 nt, Artificial Sequence
  Description of Artificial Sequence: Synthetic oligonucleotide
aagcaggaaccggucgccu

SEQ ID NO: 2626181 - RNA, 19 nt, Artificial Sequence
  Description of Artificial Sequence: Synthetic oligonucleotide
gacaugagacggucuuuua

SEQ ID NO: 2626182 - RNA, 19 nt, Artificial Sequence
  Description of Artificial Sequence: Synthetic oligonucleotide
caucgcccaacaccgcuuc

SEQ ID NO: 2626183 - RNA, 19 nt, Artificial Sequence
  Description of Artificial Sequence: Synthetic oligonucleotide
cauggccacguggucgccg

SEQ ID NO: 2626184 - RNA, 19 nt, Artificial Sequence
  Description of Artificial Sequence: Synthetic oligonucleotide
cuuuagugguaccgcaugu

SEQ ID NO: 2626185 - RNA, 19 nt, Artificial Sequence
  Description of Artificial Sequence: Synthetic oligonucleotide
caggcuuugacguacccuu

SEQ ID NO: 2626186 - RNA, 19 nt, Artificial Sequence
  Description of Artificial Sequence: Synthetic oligonucleotide
caucguccuucguuccaug

SEQ ID NO: 2626187 - RNA, 19 nt, Artificial Sequence
  Description of Artificial Sequence: Synthetic oligonucleotide
cacguggucgccggauugc

SEQ ID NO: 2626188 - RNA, 19 nt, Artificial Sequence
  Description of Artificial Sequence: Synthetic oligonucleotide
gccggauugccacagcaga

SEQ ID NO: 2626189 - RNA, 19 nt, Artificial Sequence
  Description of Artificial Sequence: Synthetic oligonucleotide
aggcuuugacguacccuuc

SEQ ID NO: 2626190 - RNA, 19 nt, Artificial Sequence
  Description of Artificial Sequence: Synthetic oligonucleotide
guaguauuuugggguguuc

SEQ ID NO: 2626191 - RNA, 19 nt, Artificial Sequence
  Description of Artificial Sequence: Synthetic oligonucleotide
gcgaagccaggaaacagug

SEQ ID NO: 2626192 - RNA, 19 nt, Artificial Sequence
  Description of Artificial Sequence: Synthetic oligonucleotide
caguuauuucaguuaaguu

SEQ ID NO: 2626193 - RNA, 19 nt, Artificial Sequence
  Description of Artificial Sequence: Synthetic oligonucleotide
cagagucugcgcggaauug

SEQ ID NO: 2626194 - RNA, 19 nt, Artificial Sequence
  Description of Artificial Sequence: Synthetic oligonucleotide
agucugcgcggaauugcag

SEQ ID NO: 2626195 - RNA, 19 nt, Artificial Sequence
  Description of Artificial Sequence: Synthetic oligonucleotide
agguacagacaggcgaaaa

SEQ ID NO: 2626196 - RNA, 19 nt, Artificial Sequence
  Description of Artificial Sequence: Synthetic oligonucleotide
ggcugaauuacgccagaaa

SEQ ID NO: 2626197 - RNA, 19 nt, Artificial Sequence
  Description of Artificial Sequence: Synthetic oligonucleotide
ccggauugccacagcagag

SEQ ID NO: 2626198 - RNA, 19 nt, Artificial Sequence
  Description of Artificial Sequence: Synthetic oligonucleotide
aggaaacagugaccuugaa

SEQ ID NO: 2626199 - RNA, 19 nt, Artificial Sequence
  Description of Artificial Sequence: Synthetic oligonucleotide
agcaggaaccggucgccuu

SEQ ID NO: 2626200 - RNA, 19 nt, Artificial Sequence
  Description of Artificial Sequence: Synthetic oligonucleotide
aaaccccaacacauuuauu

SEQ ID NO: 2626201 - RNA, 19 nt, Artificial Sequence
  Description of Artificial Sequence: Synthetic oligonucleotide
ggaucaggaagcaguccug

SEQ ID NO: 2626202 - RNA, 19 nt, Artificial Sequence
  Description of Artificial Sequence: Synthetic oligonucleotide
gccacagcagagucugcgc

SEQ ID NO: 2626203 - RNA, 19 nt, Artificial Sequence
  Description of Artificial Sequence: Synthetic oligonucleotide
cagcaccgcaaagacauga

SEQ ID NO: 2626204 - RNA, 19 nt, Artificial Sequence
  Description of Artificial Sequence: Synthetic oligonucleotide
caaagacaugagacggucu

SEQ ID NO: 2626205 - RNA, 19 nt, Artificial Sequence
  Description of Artificial Sequence: Synthetic oligonucleotide
uggucgccggauugccaca

SEQ ID NO: 2626206 - RNA, 19 nt, Artificial Sequence
  Description of Artificial Sequence: Synthetic oligonucleotide
gauugccacagcagagucu

SEQ ID NO: 2626207 - RNA, 19 nt, Artificial Sequence
  Description of Artificial Sequence: Synthetic oligonucleotide
uucccucaacacuccggua

SEQ ID NO: 2626208 - RNA, 19 nt, Artificial Sequence
  Description of Artificial Sequence: Synthetic oligonucleotide
acccuuccaucgcccaaca

SEQ ID NO: 2626209 - RNA, 19 nt, Artificial Sequence
  Description of Artificial Sequence: Synthetic oligonucleotide
ggguguuccccgaaacuac

SEQ ID NO: 2626210 - RNA, 19 nt, Artificial Sequence
  Description of Artificial Sequence: Synthetic oligonucleotide
agcaugcaccauggccacg

SEQ ID NO: 2626211 - RNA, 19 nt, Artificial Sequence
  Description of Artificial Sequence: Synthetic oligonucleotide
gacggucuuuuaacugcca

SEQ ID NO: 2626212 - RNA, 19 nt, Artificial Sequence
  Description of Artificial Sequence: Synthetic oligonucleotide
agaguucaauccaggcuuu

SEQ ID NO: 2626213 - RNA, 19 nt, Artificial Sequence
  Description of Artificial Sequence: Synthetic oligonucleotide
guacagcaaguaacuguga

SEQ ID NO: 2626214 - RNA, 19 nt, Artificial Sequence
  Description of Artificial Sequence: Synthetic oligonucleotide
gugguaccgcauguuuuac

SEQ ID NO: 2626215 - RNA, 19 nt, Artificial Sequence
  Description of Artificial Sequence: Synthetic oligonucleotide
gcuuugacguacccuucca

SEQ ID NO: 2626216 - RNA, 19 nt, Artificial Sequence
  Description of Artificial Sequence: Synthetic oligonucleotide
gcugauccugagagcaugc

SEQ ID NO: 2626217 - RNA, 19 nt, Artificial Sequence
  Description of Artificial Sequence: Synthetic oligonucleotide
gcccaacaccgcuucacug

SEQ ID NO: 2626218 - RNA, 19 nt, Artificial Sequence
  Description of Artificial Sequence: Synthetic oligonucleotide
cccaacacauuuauucaaa

SEQ ID NO: 2626219 - RNA, 19 nt, Artificial Sequence
  Description of Artificial Sequence: Synthetic oligonucleotide
ggugcgaagccaggaaaca

SEQ ID NO: 2626220 - RNA, 19 nt, Artificial Sequence
  Description of Artificial Sequence: Synthetic oligonucleotide
ccugaaaaguacagcaagu

SEQ ID NO: 2626221 - RNA, 19 nt, Artificial Sequence
  Description of Artificial Sequence: Synthetic oligonucleotide
gcaccgcaaagacaugaga

SEQ ID NO: 2626222 - RNA, 19 nt, Artificial Sequence
  Description of Artificial Sequence: Synthetic oligonucleotide
gaauugcagcuaccaggcu

SEQ ID NO: 2626223 - RNA, 19 nt, Artificial Sequence
  Description of Artificial Sequence: Synthetic oligonucleotide
aucgcccaacaccgcuuca

SEQ ID NO: 2626224 - RNA, 19 nt, Artificial Sequence
  Description of Artificial Sequence: Synthetic oligonucleotide
cagugaccuugaacccaag

SEQ ID NO: 2626225 - RNA, 19 nt, Artificial Sequence
  Description of Artificial Sequence: Synthetic oligonucleotide
cuucggugcgaagccagga

SEQ ID NO: 2626226 - RNA, 19 nt, Artificial Sequence
  Description of Artificial Sequence: Synthetic oligonucleotide
gguguuccccgaaacuaca

SEQ ID NO: 2626227 - RNA, 19 nt, Artificial Sequence
  Description of Artificial Sequence: Synthetic oligonucleotide
aggcugaauuacgccagaa

SEQ ID NO: 2626228 - RNA, 19 nt, Artificial Sequence
  Description of Artificial Sequence: Synthetic oligonucleotide
caugcaccauggccacgug

SEQ ID NO: 2626229 - RNA, 19 nt, Artificial Sequence
  Description of Artificial Sequence: Synthetic oligonucleotide
guacccuuccaucgcccaa

SEQ ID NO: 2626230 - RNA, 19 nt, Artificial Sequence
  Description of Artificial Sequence: Synthetic oligonucleotide
cugauccugagagcaugca

SEQ ID NO: 2626231 - RNA, 19 nt, Artificial Sequence
  Description of Artificial Sequence: Synthetic oligonucleotide
cccucaacacuccgguaac

SEQ ID NO: 2626232 - RNA, 19 nt, Artificial Sequence
  Description of Artificial Sequence: Synthetic oligonucleotide
aggcccaagaggguccuuu

SEQ ID NO: 2626233 - RNA, 19 nt, Artificial Sequence
  Description of Artificial Sequence: Synthetic oligonucleotide
ugcagcuaccaggcugaau

SEQ ID NO: 2626234 - RNA, 19 nt, Artificial Sequence
  Description of Artificial Sequence: Synthetic oligonucleotide
gggguguuccccgaaacua

SEQ ID NO: 2626235 - RNA, 19 nt, Artificial Sequence
  Description of Artificial Sequence: Synthetic oligonucleotide
caggcugaauuacgccaga

SEQ ID NO: 2626236 - RNA, 19 nt, Artificial Sequence
  Description of Artificial Sequence: Synthetic oligonucleotide
accgcauguuuuacauuaa

SEQ ID NO: 2626237 - RNA, 19 nt, Artificial Sequence
  Description of Artificial Sequence: Synthetic oligonucleotide
agaggguccuuuaguggua

SEQ ID NO: 2626238 - RNA, 19 nt, Artificial Sequence
  Description of Artificial Sequence: Synthetic oligonucleotide
gucgccggauugccacagc

SEQ ID NO: 2626239 - RNA, 19 nt, Artificial Sequence
  Description of Artificial Sequence: Synthetic oligonucleotide
cggugcgaagccaggaaac

SEQ ID NO: 2626240 - RNA, 19 nt, Artificial Sequence
  Description of Artificial Sequence: Synthetic oligonucleotide
ggucgccggauugccacag

SEQ ID NO: 2626241 - RNA, 19 nt, Artificial Sequence
  Description of Artificial Sequence: Synthetic oligonucleotide
cuucguuccauggcuggcu

SEQ ID NO: 2626242 - RNA, 19 nt, Artificial Sequence
  Description of Artificial Sequence: Synthetic oligonucleotide
ccccaacacauuuauucaa

SEQ ID NO: 2626243 - RNA, 19 nt, Artificial Sequence
  Description of Artificial Sequence: Synthetic oligonucleotide
ggaaccggucgccuuuaaa

SEQ ID NO: 2626244 - RNA, 19 nt, Artificial Sequence
  Description of Artificial Sequence: Synthetic oligonucleotide
cagcuaccaggcugaauua

SEQ ID NO: 2626245 - RNA, 19 nt, Artificial Sequence
  Description of Artificial Sequence: Synthetic oligonucleotide
guguaguauuuuggggugu

SEQ ID NO: 2626246 - RNA, 19 nt, Artificial Sequence
  Description of Artificial Sequence: Synthetic oligonucleotide
ccuucguuccauggcuggc

SEQ ID NO: 2626247 - RNA, 19 nt, Artificial Sequence
  Description of Artificial Sequence: Synthetic oligonucleotide
aggaaccggucgccuuuaa

SEQ ID NO: 2626248 - RNA, 19 nt, Artificial Sequence
  Description of Artificial Sequence: Synthetic oligonucleotide
ccacguggucgccggauug

SEQ ID NO: 2626249 - RNA, 19 nt, Artificial Sequence
  Description of Artificial Sequence: Synthetic oligonucleotide
uggccacguggucgccgga

SEQ ID NO: 2626250 - RNA, 19 nt, Artificial Sequence
  Description of Artificial Sequence: Synthetic oligonucleotide
cgaaacuacauccauucuu

SEQ ID NO: 2626251 - RNA, 19 nt, Artificial Sequence
  Description of Artificial Sequence: Synthetic oligonucleotide
guaccgcauguuuuacauu

SEQ ID NO: 2626252 - RNA, 19 nt, Artificial Sequence
  Description of Artificial Sequence: Synthetic oligonucleotide
cacugccgccucccacccc

SEQ ID NO: 2626253 - RNA, 19 nt, Artificial Sequence
  Description of Artificial Sequence: Synthetic oligonucleotide
cgccggauugccacagcag

SEQ ID NO: 2626254 - RNA, 19 nt, Artificial Sequence
  Description of Artificial Sequence: Synthetic oligonucleotide
cagcaaccaguugccaaaa

SEQ ID NO: 2626255 - RNA, 19 nt, Artificial Sequence
  Description of Artificial Sequence: Synthetic oligonucleotide
uugcagcuaccaggcugaa

SEQ ID NO: 2626256 - RNA, 19 nt, Artificial Sequence
  Description of Artificial Sequence: Synthetic oligonucleotide
gcaugcaccauggccacgu

SEQ ID NO: 2626257 - RNA, 19 nt, Artificial Sequence
  Description of Artificial Sequence: Synthetic oligonucleotide
ccgcauguuuuacauuaaa

SEQ ID NO: 2626258 - RNA, 19 nt, Artificial Sequence
  Description of Artificial Sequence: Synthetic oligonucleotide
gcaccauggccacgugguc

SEQ ID NO: 2626259 - RNA, 19 nt, Artificial Sequence
  Description of Artificial Sequence: Synthetic oligonucleotide
ccccacgugugguacgaca

SEQ ID NO: 2626260 - RNA, 19 nt, Artificial Sequence
  Description of Artificial Sequence: Synthetic oligonucleotide
caccgcuucacugccgccu

SEQ ID NO: 2626261 - RNA, 19 nt, Artificial Sequence
  Description of Artificial Sequence: Synthetic oligonucleotide
ccagcaccgcaaagacaug

SEQ ID NO: 2626262 - RNA, 19 nt, Artificial Sequence
  Description of Artificial Sequence: Synthetic oligonucleotide
ccgguaacagcaaccaguu

SEQ ID NO: 2626263 - RNA, 19 nt, Artificial Sequence
  Description of Artificial Sequence: Synthetic oligonucleotide
gcagagucugcgcggaauu

SEQ ID NO: 2626264 - RNA, 19 nt, Artificial Sequence
  Description of Artificial Sequence: Synthetic oligonucleotide
ggcccaagaggguccuuua

SEQ ID NO: 2626265 - RNA, 19 nt, Artificial Sequence
  Description of Artificial Sequence: Synthetic oligonucleotide
guguuccccgaaacuacau

SEQ ID NO: 2626266 - RNA, 19 nt, Artificial Sequence
  Description of Artificial Sequence: Synthetic oligonucleotide
cgcggaauugcagcuacca

SEQ ID NO: 2626267 - RNA, 19 nt, Artificial Sequence
  Description of Artificial Sequence: Synthetic oligonucleotide
cggucuuuuaacugccaua

SEQ ID NO: 2626268 - RNA, 19 nt, Artificial Sequence
  Description of Artificial Sequence: Synthetic oligonucleotide
cguccuucguuccauggcu

SEQ ID NO: 2626269 - RNA, 19 nt, Artificial Sequence
  Description of Artificial Sequence: Synthetic oligonucleotide
gcaggaaccggucgccuuu

SEQ ID NO: 2626270 - RNA, 19 nt, Artificial Sequence
  Description of Artificial Sequence: Synthetic oligonucleotide
ccuugaacccaagcaggaa

SEQ ID NO: 2626271 - RNA, 19 nt, Artificial Sequence
  Description of Artificial Sequence: Synthetic oligonucleotide
cccacgugugguacgacau

SEQ ID NO: 2626272 - RNA, 19 nt, Artificial Sequence
  Description of Artificial Sequence: Synthetic oligonucleotide
cugcgcggaauugcagcua

SEQ ID NO: 2626273 - RNA, 19 nt, Artificial Sequence
  Description of Artificial Sequence: Synthetic oligonucleotide
caggaaccggucgccuuua

SEQ ID NO: 2626274 - RNA, 19 nt, Artificial Sequence
  Description of Artificial Sequence: Synthetic oligonucleotide
gcgcggaauugcagcuacc

SEQ ID NO: 2626275 - RNA, 19 nt, Artificial Sequence
  Description of Artificial Sequence: Synthetic oligonucleotide
ccgaaacuacauccauucu

SEQ ID NO: 2626276 - RNA, 19 nt, Artificial Sequence
  Description of Artificial Sequence: Synthetic oligonucleotide
uaggcccaagaggguccuu

SEQ ID NO: 2626277 - RNA, 19 nt, Artificial Sequence
  Description of Artificial Sequence: Synthetic oligonucleotide
cagcagagucugcgcggaa

SEQ ID NO: 2626278 - RNA, 19 nt, Artificial Sequence
  Description of Artificial Sequence: Synthetic oligonucleotide
cgcaaagacaugagacggu

SEQ ID NO: 2626279 - RNA, 19 nt, Artificial Sequence
  Description of Artificial Sequence: Synthetic oligonucleotide
ggaaggcaggagaguucaa

SEQ ID NO: 2626280 - RNA, 19 nt, Artificial Sequence
  Description of Artificial Sequence: Synthetic oligonucleotide
ccaggcuuugacguacccu

SEQ ID NO: 2626281 - RNA, 19 nt, Artificial Sequence
  Description of Artificial Sequence: Synthetic oligonucleotide
cguggucgccggauugcca

SEQ ID NO: 2626282 - RNA, 19 nt, Artificial Sequence
  Description of Artificial Sequence: Synthetic oligonucleotide
ccccgaaacuacauccauu

SEQ ID NO: 2626283 - RNA, 19 nt, Artificial Sequence
  Description of Artificial Sequence: Synthetic oligonucleotide
cggauugccacagcagagu

SEQ ID NO: 2626284 - RNA, 19 nt, Artificial Sequence
  Description of Artificial Sequence: Synthetic oligonucleotide
ccauggccacguggucgcc

SEQ ID NO: 2626285 - RNA, 19 nt, Artificial Sequence
  Description of Artificial Sequence: Synthetic oligonucleotide
gccacguggucgccggauu

SEQ ID NO: 2626286 - RNA, 19 nt, Artificial Sequence
  Description of Artificial Sequence: Synthetic oligonucleotide
ccaucgcccaacaccgcuu

SEQ ID NO: 2626287 - RNA, 19 nt, Artificial Sequence
  Description of Artificial Sequence: Synthetic oligonucleotide
ggccacguggucgccggau

SEQ ID NO: 2626288 - RNA, 19 nt, Artificial Sequence
  Description of Artificial Sequence: Synthetic oligonucleotide
ccacgugugguacgacauu

SEQ ID NO: 2626289 - RNA, 19 nt, Artificial Sequence
  Description of Artificial Sequence: Synthetic oligonucleotide
cgcccaacaccgcuucacu

SEQ ID NO: 2626290 - RNA, 19 nt, Artificial Sequence
  Description of Artificial Sequence: Synthetic oligonucleotide
gauuacaagaauuacaugg

SEQ ID NO: 2626291 - RNA, 19 nt, Artificial Sequence
  Description of Artificial Sequence: Synthetic oligonucleotide
acuacaaagguccugagcc

SEQ ID NO: 2626292 - RNA, 19 nt, Artificial Sequence
  Description of Artificial Sequence: Synthetic oligonucleotide
aaugguaacaaugucauuc

SEQ ID NO: 2626293 - RNA, 19 nt, Artificial Sequence
  Description of Artificial Sequence: Synthetic oligonucleotide
aacaaugucauucaaagau

SEQ ID NO: 2626294 - RNA, 19 nt, Artificial Sequence
  Description of Artificial Sequence: Synthetic oligonucleotide
aauagauagcccuugagcu

SEQ ID NO: 2626295 - RNA, 19 nt, Artificial Sequence
  Description of Artificial Sequence: Synthetic oligonucleotide
auacucugaaaauacauac

SEQ ID NO: 2626296 - RNA, 19 nt, Artificial Sequence
  Description of Artificial Sequence: Synthetic oligonucleotide
auuuacaaaacacggaguc

SEQ ID NO: 2626297 - RNA, 19 nt, Artificial Sequence
  Description of Artificial Sequence: Synthetic oligonucleotide
aaggcuuauuuguagacac

SEQ ID NO: 2626298 - RNA, 19 nt, Artificial Sequence
  Description of Artificial Sequence: Synthetic oligonucleotide
aauacauacgacuucauuu

SEQ ID NO: 2626299 - RNA, 19 nt, Artificial Sequence
  Description of Artificial Sequence: Synthetic oligonucleotide
guaacaaugucauucaaag

SEQ ID NO: 2626300 - RNA, 19 nt, Artificial Sequence
  Description of Artificial Sequence: Synthetic oligonucleotide
uuaagaaaugcacugaaaa

SEQ ID NO: 2626301 - RNA, 19 nt, Artificial Sequence
  Description of Artificial Sequence: Synthetic oligonucleotide
acaacugcuauccagggac

SEQ ID NO: 2626302 - RNA, 19 nt, Artificial Sequence
  Description of Artificial Sequence: Synthetic oligonucleotide
uuugaagaaucucugcagg

SEQ ID NO: 2626303 - RNA, 19 nt, Artificial Sequence
  Description of Artificial Sequence: Synthetic oligonucleotide
uucaaagaugccuugaggc

SEQ ID NO: 2626304 - RNA, 19 nt, Artificial Sequence
  Description of Artificial Sequence: Synthetic oligonucleotide
uguagggucaaccuuugcg

SEQ ID NO: 2626305 - RNA, 19 nt, Artificial Sequence
  Description of Artificial Sequence: Synthetic oligonucleotide
ucuuuugaaaagaugauau

SEQ ID NO: 2626306 - RNA, 19 nt, Artificial Sequence
  Description of Artificial Sequence: Synthetic oligonucleotide
aagaauuacaugguugugg

SEQ ID NO: 2626307 - RNA, 19 nt, Artificial Sequence
  Description of Artificial Sequence: Synthetic oligonucleotide
uuauuuguagacaccggcg

SEQ ID NO: 2626308 - RNA, 19 nt, Artificial Sequence
  Description of Artificial Sequence: Synthetic oligonucleotide
aagaugauaucuuacagua

SEQ ID NO: 2626309 - RNA, 19 nt, Artificial Sequence
  Description of Artificial Sequence: Synthetic oligonucleotide
gauaucuuacaguacauac

SEQ ID NO: 2626310 - RNA, 19 nt, Artificial Sequence
  Description of Artificial Sequence: Synthetic oligonucleotide
ugaaauccggcuuacauca

SEQ ID NO: 2626311 - RNA, 19 nt, Artificial Sequence
  Description of Artificial Sequence: Synthetic oligonucleotide
gaggauacagcuuuuacug

SEQ ID NO: 2626312 - RNA, 19 nt, Artificial Sequence
  Description of Artificial Sequence: Synthetic oligonucleotide
aaagacaacucauauaguu

SEQ ID NO: 2626313 - RNA, 19 nt, Artificial Sequence
  Description of Artificial Sequence: Synthetic oligonucleotide
aauuaaaagguguuccacu

SEQ ID NO: 2626314 - RNA, 19 nt, Artificial Sequence
  Description of Artificial Sequence: Synthetic oligonucleotide
aacuacaaagguccugagc

SEQ ID NO: 2626315 - RNA, 19 nt, Artificial Sequence
  Description of Artificial Sequence: Synthetic oligonucleotide
augacuggaauagauagcc

SEQ ID NO: 2626316 - RNA, 19 nt, Artificial Sequence
  Description of Artificial Sequence: Synthetic oligonucleotide
uauucugcaugccuaaucc

SEQ ID NO: 2626317 - RNA, 19 nt, Artificial Sequence
  Description of Artificial Sequence: Synthetic oligonucleotide
gaauagauagcccuugagc

SEQ ID NO: 2626318 - RNA, 19 nt, Artificial Sequence
  Description of Artificial Sequence: Synthetic oligonucleotide
uuaaugguaacaaugucau

SEQ ID NO: 2626319 - RNA, 19 nt, Artificial Sequence
  Description of Artificial Sequence: Synthetic oligonucleotide
caaugacuggaauagauag

SEQ ID NO: 2626320 - RNA, 19 nt, Artificial Sequence
  Description of Artificial Sequence: Synthetic oligonucleotide
aacacuuggcagcuucucc

SEQ ID NO: 2626321 - RNA, 19 nt, Artificial Sequence
  Description of Artificial Sequence: Synthetic oligonucleotide
uuuugaagaaucucugcag

SEQ ID NO: 2626322 - RNA, 19 nt, Artificial Sequence
  Description of Artificial Sequence: Synthetic oligonucleotide
aacagauuacaagaauuac

SEQ ID NO: 2626323 - RNA, 19 nt, Artificial Sequence
  Description of Artificial Sequence: Synthetic oligonucleotide
acaccggcgaauuaaaagg

SEQ ID NO: 2626324 - RNA, 19 nt, Artificial Sequence
  Description of Artificial Sequence: Synthetic oligonucleotide
auaaacugagcaugcauuc

SEQ ID NO: 2626325 - RNA, 19 nt, Artificial Sequence
  Description of Artificial Sequence: Synthetic oligonucleotide
aaagguguuccacuaucgg

SEQ ID NO: 2626326 - RNA, 19 nt, Artificial Sequence
  Description of Artificial Sequence: Synthetic oligonucleotide
aucuuuuggacugaaggcc

SEQ ID NO: 2626327 - RNA, 19 nt, Artificial Sequence
  Description of Artificial Sequence: Synthetic oligonucleotide
uacucugaaaauacauacg

SEQ ID NO: 2626328 - RNA, 19 nt, Artificial Sequence
  Description of Artificial Sequence: Synthetic oligonucleotide
aaaacuacaaagguccuga

SEQ ID NO: 2626329 - RNA, 19 nt, Artificial Sequence
  Description of Artificial Sequence: Synthetic oligonucleotide
acuucauuuacaaaacacg

SEQ ID NO: 2626330 - RNA, 19 nt, Artificial Sequence
  Description of Artificial Sequence: Synthetic oligonucleotide
uccggcuuacaucagagag

SEQ ID NO: 2626331 - RNA, 19 nt, Artificial Sequence
  Description of Artificial Sequence: Synthetic oligonucleotide
gagucaacagauuacaaga

SEQ ID NO: 2626332 - RNA, 19 nt, Artificial Sequence
  Description of Artificial Sequence: Synthetic oligonucleotide
ugcagguagguaaugauga

SEQ ID NO: 2626333 - RNA, 19 nt, Artificial Sequence
  Description of Artificial Sequence: Synthetic oligonucleotide
aguacuauuccuuucugcu

SEQ ID NO: 2626334 - RNA, 19 nt, Artificial Sequence
  Description of Artificial Sequence: Synthetic oligonucleotide
gaucuuuuggacugaaggc

SEQ ID NO: 2626335 - RNA, 19 nt, Artificial Sequence
  Description of Artificial Sequence: Synthetic oligonucleotide
acucugaaaauacauacga

SEQ ID NO: 2626336 - RNA, 19 nt, Artificial Sequence
  Description of Artificial Sequence: Synthetic oligonucleotide
cuuauuuguagacaccggc

SEQ ID NO: 2626337 - RNA, 19 nt, Artificial Sequence
  Description of Artificial Sequence: Synthetic oligonucleotide
acaagaauuacaugguugu

SEQ ID NO: 2626338 - RNA, 19 nt, Artificial Sequence
  Description of Artificial Sequence: Synthetic oligonucleotide
gaagaaucucugcagguag

SEQ ID NO: 2626339 - RNA, 19 nt, Artificial Sequence
  Description of Artificial Sequence: Synthetic oligonucleotide
uuuacuguagggucaaccu

SEQ ID NO: 2626340 - RNA, 19 nt, Artificial Sequence
  Description of Artificial Sequence: Synthetic oligonucleotide
aaucucugcagguagguaa

SEQ ID NO: 2626341 - RNA, 19 nt, Artificial Sequence
  Description of Artificial Sequence: Synthetic oligonucleotide
caaugucauucaaagaugc

SEQ ID NO: 2626342 - RNA, 19 nt, Artificial Sequence
  Description of Artificial Sequence: Synthetic oligonucleotide
ucaacagauuacaagaauu

SEQ ID NO: 2626343 - RNA, 19 nt, Artificial Sequence
  Description of Artificial Sequence: Synthetic oligonucleotide
uauuuguagacaccggcga

SEQ ID NO: 2626344 - RNA, 19 nt, Artificial Sequence
  Description of Artificial Sequence: Synthetic oligonucleotide
uccacaauuacaguagcag

SEQ ID NO: 2626345 - RNA, 19 nt, Artificial Sequence
  Description of Artificial Sequence: Synthetic oligonucleotide
aaaacacggagucaacaga

SEQ ID NO: 2626346 - RNA, 19 nt, Artificial Sequence
  Description of Artificial Sequence: Synthetic oligonucleotide
auuaaugguaacaauguca

SEQ ID NO: 2626347 - RNA, 19 nt, Artificial Sequence
  Description of Artificial Sequence: Synthetic oligonucleotide
ugagcaugcauucaugaaa

SEQ ID NO: 2626348 - RNA, 19 nt, Artificial Sequence
  Description of Artificial Sequence: Synthetic oligonucleotide
uuugaaaagaugauaucuu

SEQ ID NO: 2626349 - RNA, 19 nt, Artificial Sequence
  Description of Artificial Sequence: Synthetic oligonucleotide
auccagacaacugcuaucc

SEQ ID NO: 2626350 - RNA, 19 nt, Artificial Sequence
  Description of Artificial Sequence: Synthetic oligonucleotide
aaugucauucaaagaugcc

SEQ ID NO: 2626351 - RNA, 19 nt, Artificial Sequence
  Description of Artificial Sequence: Synthetic oligonucleotide
uucaguacuauuccuuucu

SEQ ID NO: 2626352 - RNA, 19 nt, Artificial Sequence
  Description of Artificial Sequence: Synthetic oligonucleotide
aauuacaugguuguggauu

SEQ ID NO: 2626353 - RNA, 19 nt, Artificial Sequence
  Description of Artificial Sequence: Synthetic oligonucleotide
agaauuacaugguugugga

SEQ ID NO: 2626354 - RNA, 19 nt, Artificial Sequence
  Description of Artificial Sequence: Synthetic oligonucleotide
ugaaaauacauacgacuuc

SEQ ID NO: 2626355 - RNA, 19 nt, Artificial Sequence
  Description of Artificial Sequence: Synthetic oligonucleotide
uucaaguuuucucuuuuga

SEQ ID NO: 2626356 - RNA, 19 nt, Artificial Sequence
  Description of Artificial Sequence: Synthetic oligonucleotide
aaaagguguuccacuaucg

SEQ ID NO: 2626357 - RNA, 19 nt, Artificial Sequence
  Description of Artificial Sequence: Synthetic oligonucleotide
gaaaauacauacgacuuca

SEQ ID NO: 2626358 - RNA, 19 nt, Artificial Sequence
  Description of Artificial Sequence: Synthetic oligonucleotide
gacaccggcgaauuaaaag

SEQ ID NO: 2626359 - RNA, 19 nt, Artificial Sequence
  Description of Artificial Sequence: Synthetic oligonucleotide
caugaagagacuguugggg

SEQ ID NO: 2626360 - RNA, 19 nt, Artificial Sequence
  Description of Artificial Sequence: Synthetic oligonucleotide
uuucucuuuugaaaagaug

SEQ ID NO: 2626361 - RNA, 19 nt, Artificial Sequence
  Description of Artificial Sequence: Synthetic oligonucleotide
caaaacacggagucaacag

SEQ ID NO: 2626362 - RNA, 19 nt, Artificial Sequence
  Description of Artificial Sequence: Synthetic oligonucleotide
uccagggacgaucuuuugg

SEQ ID NO: 2626363 - RNA, 19 nt, Artificial Sequence
  Description of Artificial Sequence: Synthetic oligonucleotide
uacaguagcagguucagua

SEQ ID NO: 2626364 - RNA, 19 nt, Artificial Sequence
  Description of Artificial Sequence: Synthetic oligonucleotide
uagauagcccuugagcugg

SEQ ID NO: 2626365 - RNA, 19 nt, Artificial Sequence
  Description of Artificial Sequence: Synthetic oligonucleotide
uaaaagguguuccacuauc

SEQ ID NO: 2626366 - RNA, 19 nt, Artificial Sequence
  Description of Artificial Sequence: Synthetic oligonucleotide
acaguagcagguucaguac

SEQ ID NO: 2626367 - RNA, 19 nt, Artificial Sequence
  Description of Artificial Sequence: Synthetic oligonucleotide
ucuuuuggacugaaggcca

SEQ ID NO: 2626368 - RNA, 19 nt, Artificial Sequence
  Description of Artificial Sequence: Synthetic oligonucleotide
ccaauuaaugguaacaaug

SEQ ID NO: 2626369 - RNA, 19 nt, Artificial Sequence
  Description of Artificial Sequence: Synthetic oligonucleotide
aagguguuccacuaucggu

SEQ ID NO: 2626370 - RNA, 19 nt, Artificial Sequence
  Description of Artificial Sequence: Synthetic oligonucleotide
aaauacauacgacuucauu

SEQ ID NO: 2626371 - RNA, 19 nt, Artificial Sequence
  Description of Artificial Sequence: Synthetic oligonucleotide
ucaaccuuugcgccaauga

SEQ ID NO: 2626372 - RNA, 19 nt, Artificial Sequence
  Description of Artificial Sequence: Synthetic oligonucleotide
agacaacucauauaguuaa

SEQ ID NO: 2626373 - RNA, 19 nt, Artificial Sequence
  Description of Artificial Sequence: Synthetic oligonucleotide
uaaaauccacugcuuauuc

SEQ ID NO: 2626374 - RNA, 19 nt, Artificial Sequence
  Description of Artificial Sequence: Synthetic oligonucleotide
aauaaacugagcaugcauu

SEQ ID NO: 2626375 - RNA, 19 nt, Artificial Sequence
  Description of Artificial Sequence: Synthetic oligonucleotide
uuacaaaacacggagucaa

SEQ ID NO: 2626376 - RNA, 19 nt, Artificial Sequence
  Description of Artificial Sequence: Synthetic oligonucleotide
uuuuacuguagggucaacc

SEQ ID NO: 2626377 - RNA, 19 nt, Artificial Sequence
  Description of Artificial Sequence: Synthetic oligonucleotide
guagggucaaccuuugcgc

SEQ ID NO: 2626378 - RNA, 19 nt, Artificial Sequence
  Description of Artificial Sequence: Synthetic oligonucleotide
uaauccaugaagagacugu

SEQ ID NO: 2626379 - RNA, 19 nt, Artificial Sequence
  Description of Artificial Sequence: Synthetic oligonucleotide
uuggaaggcuuauuuguag

SEQ ID NO: 2626380 - RNA, 19 nt, Artificial Sequence
  Description of Artificial Sequence: Synthetic oligonucleotide
gacuucauuuacaaaacac

SEQ ID NO: 2626381 - RNA, 19 nt, Artificial Sequence
  Description of Artificial Sequence: Synthetic oligonucleotide
gagcuauccagacaacugc

SEQ ID NO: 2626382 - RNA, 19 nt, Artificial Sequence
  Description of Artificial Sequence: Synthetic oligonucleotide
uugaaaagaugauaucuua

SEQ ID NO: 2626383 - RNA, 19 nt, Artificial Sequence
  Description of Artificial Sequence: Synthetic oligonucleotide
auuaaaagguguuccacua

SEQ ID NO: 2626384 - RNA, 19 nt, Artificial Sequence
  Description of Artificial Sequence: Synthetic oligonucleotide
cuaucggugucucuggagc

SEQ ID NO: 2626385 - RNA, 19 nt, Artificial Sequence
  Description of Artificial Sequence: Synthetic oligonucleotide
uccugagccaauuaauggu

SEQ ID NO: 2626386 - RNA, 19 nt, Artificial Sequence
  Description of Artificial Sequence: Synthetic oligonucleotide
agcagguucaguacuauuc

SEQ ID NO: 2626387 - RNA, 19 nt, Artificial Sequence
  Description of Artificial Sequence: Synthetic oligonucleotide
auacauacgacuucauuua

SEQ ID NO: 2626388 - RNA, 19 nt, Artificial Sequence
  Description of Artificial Sequence: Synthetic oligonucleotide
ugucauucaaagaugccuu

SEQ ID NO: 2626389 - RNA, 19 nt, Artificial Sequence
  Description of Artificial Sequence: Synthetic oligonucleotide
auagauagcccuugagcug

SEQ ID NO: 2626390 - RNA, 19 nt, Artificial Sequence
  Description of Artificial Sequence: Synthetic oligonucleotide
uuauucugcaugccuaauc

SEQ ID NO: 2626391 - RNA, 19 nt, Artificial Sequence
  Description of Artificial Sequence: Synthetic oligonucleotide
gaauuaaaagguguuccac

SEQ ID NO: 2626392 - RNA, 19 nt, Artificial Sequence
  Description of Artificial Sequence: Synthetic oligonucleotide
aauacucugaaaauacaua

SEQ ID NO: 2626393 - RNA, 19 nt, Artificial Sequence
  Description of Artificial Sequence: Synthetic oligonucleotide
cauucaaagaugccuugag

SEQ ID NO: 2626394 - RNA, 19 nt, Artificial Sequence
  Description of Artificial Sequence: Synthetic oligonucleotide
caugccuaauccaugaaga

SEQ ID NO: 2626395 - RNA, 19 nt, Artificial Sequence
  Description of Artificial Sequence: Synthetic oligonucleotide
auuacaagaauuacauggu

SEQ ID NO: 2626396 - RNA, 19 nt, Artificial Sequence
  Description of Artificial Sequence: Synthetic oligonucleotide
aaauccggcuuacaucaga

SEQ ID NO: 2626397 - RNA, 19 nt, Artificial Sequence
  Description of Artificial Sequence: Synthetic oligonucleotide
uccacuaucggugucucug

SEQ ID NO: 2626398 - RNA, 19 nt, Artificial Sequence
  Description of Artificial Sequence: Synthetic oligonucleotide
augucauucaaagaugccu

SEQ ID NO: 2626399 - RNA, 19 nt, Artificial Sequence
  Description of Artificial Sequence: Synthetic oligonucleotide
aaacuacaaagguccugag

SEQ ID NO: 2626400 - RNA, 19 nt, Artificial Sequence
  Description of Artificial Sequence: Synthetic oligonucleotide
cuuuugaaaagaugauauc

SEQ ID NO: 2626401 - RNA, 19 nt, Artificial Sequence
  Description of Artificial Sequence: Synthetic oligonucleotide
ucucuuuugaaaagaugau

SEQ ID NO: 2626402 - RNA, 19 nt, Artificial Sequence
  Description of Artificial Sequence: Synthetic oligonucleotide
gauacagcuuuuacuguag

SEQ ID NO: 2626403 - RNA, 19 nt, Artificial Sequence
  Description of Artificial Sequence: Synthetic oligonucleotide
ucugcaugccuaauccaug

SEQ ID NO: 2626404 - RNA, 19 nt, Artificial Sequence
  Description of Artificial Sequence: Synthetic oligonucleotide
aaagaugccuugaggcuuc

SEQ ID NO: 2626405 - RNA, 19 nt, Artificial Sequence
  Description of Artificial Sequence: Synthetic oligonucleotide
acugaaggccaccugaaau

SEQ ID NO: 2626406 - RNA, 19 nt, Artificial Sequence
  Description of Artificial Sequence: Synthetic oligonucleotide
acugagcaugcauucauga

SEQ ID NO: 2626407 - RNA, 19 nt, Artificial Sequence
  Description of Artificial Sequence: Synthetic oligonucleotide
aaggccaccugaaauccgg

SEQ ID NO: 2626408 - RNA, 19 nt, Artificial Sequence
  Description of Artificial Sequence: Synthetic oligonucleotide
aagguccugagccaauuaa

SEQ ID NO: 2626409 - RNA, 19 nt, Artificial Sequence
  Description of Artificial Sequence: Synthetic oligonucleotide
cucugaaaauacauacgac

SEQ ID NO: 2626410 - RNA, 19 nt, Artificial Sequence
  Description of Artificial Sequence: Synthetic oligonucleotide
aauccggcuuacaucagag

SEQ ID NO: 2626411 - RNA, 19 nt, Artificial Sequence
  Description of Artificial Sequence: Synthetic oligonucleotide
gcuuacaucagagagacuc

SEQ ID NO: 2626412 - RNA, 19 nt, Artificial Sequence
  Description of Artificial Sequence: Synthetic oligonucleotide
uucugcaugccuaauccau

SEQ ID NO: 2626413 - RNA, 19 nt, Artificial Sequence
  Description of Artificial Sequence: Synthetic oligonucleotide
auauuaagaaaugcacuga

SEQ ID NO: 2626414 - RNA, 19 nt, Artificial Sequence
  Description of Artificial Sequence: Synthetic oligonucleotide
uuaaaagguguuccacuau

SEQ ID NO: 2626415 - RNA, 19 nt, Artificial Sequence
  Description of Artificial Sequence: Synthetic oligonucleotide
uacuguagggucaaccuuu

SEQ ID NO: 2626416 - RNA, 19 nt, Artificial Sequence
  Description of Artificial Sequence: Synthetic oligonucleotide
auacagcuuuuacuguagg

SEQ ID NO: 2626417 - RNA, 19 nt, Artificial Sequence
  Description of Artificial Sequence: Synthetic oligonucleotide
aagaaucucugcagguagg

SEQ ID NO: 2626418 - RNA, 19 nt, Artificial Sequence
  Description of Artificial Sequence: Synthetic oligonucleotide
cugaaauccggcuuacauc

SEQ ID NO: 2626419 - RNA, 19 nt, Artificial Sequence
  Description of Artificial Sequence: Synthetic oligonucleotide
uggaaggcuuauuuguaga

SEQ ID NO: 2626420 - RNA, 19 nt, Artificial Sequence
  Description of Artificial Sequence: Synthetic oligonucleotide
ggcuuauuuguagacaccg

SEQ ID NO: 2626421 - RNA, 19 nt, Artificial Sequence
  Description of Artificial Sequence: Synthetic oligonucleotide
augccuaauccaugaagag

SEQ ID NO: 2626422 - RNA, 19 nt, Artificial Sequence
  Description of Artificial Sequence: Synthetic oligonucleotide
cauacgacuucauuuacaa

SEQ ID NO: 2626423 - RNA, 19 nt, Artificial Sequence
  Description of Artificial Sequence: Synthetic oligonucleotide
caugcauucaugaaacuua

SEQ ID NO: 2626424 - RNA, 19 nt, Artificial Sequence
  Description of Artificial Sequence: Synthetic oligonucleotide
aaacacggagucaacagau

SEQ ID NO: 2626425 - RNA, 19 nt, Artificial Sequence
  Description of Artificial Sequence: Synthetic oligonucleotide
aaccuuugcgccaaugacu

SEQ ID NO: 2626426 - RNA, 19 nt, Artificial Sequence
  Description of Artificial Sequence: Synthetic oligonucleotide
cugaaggccaccugaaauc

SEQ ID NO: 2626427 - RNA, 19 nt, Artificial Sequence
  Description of Artificial Sequence: Synthetic oligonucleotide
gagcaugcauucaugaaac

SEQ ID NO: 2626428 - RNA, 19 nt, Artificial Sequence
  Description of Artificial Sequence: Synthetic oligonucleotide
cuaauccaugaagagacug

SEQ ID NO: 2626429 - RNA, 19 nt, Artificial Sequence
  Description of Artificial Sequence: Synthetic oligonucleotide
uacauacgacuucauuuac

SEQ ID NO: 2626430 - RNA, 19 nt, Artificial Sequence
  Description of Artificial Sequence: Synthetic oligonucleotide
ugcuuauucugcaugccua

SEQ ID NO: 2626431 - RNA, 19 nt, Artificial Sequence
  Description of Artificial Sequence: Synthetic oligonucleotide
acaaugucauucaaagaug

SEQ ID NO: 2626432 - RNA, 19 nt, Artificial Sequence
  Description of Artificial Sequence: Synthetic oligonucleotide
gcauucaugaaacuuaaaa

SEQ ID NO: 2626433 - RNA, 19 nt, Artificial Sequence
  Description of Artificial Sequence: Synthetic oligonucleotide
cgaucuuuuggacugaagg

SEQ ID NO: 2626434 - RNA, 19 nt, Artificial Sequence
  Description of Artificial Sequence: Synthetic oligonucleotide
cuucuuuugaagaaucucu

SEQ ID NO: 2626435 - RNA, 19 nt, Artificial Sequence
  Description of Artificial Sequence: Synthetic oligonucleotide
uggguuggaaggcuuauuu

SEQ ID NO: 2626436 - RNA, 19 nt, Artificial Sequence
  Description of Artificial Sequence: Synthetic oligonucleotide
uagggucaaccuuugcgcc

SEQ ID NO: 2626437 - RNA, 19 nt, Artificial Sequence
  Description of Artificial Sequence: Synthetic oligonucleotide
aagacaacucauauaguua

SEQ ID NO: 2626438 - RNA, 19 nt, Artificial Sequence
  Description of Artificial Sequence: Synthetic oligonucleotide
acuaucggugucucuggag

SEQ ID NO: 2626439 - RNA, 19 nt, Artificial Sequence
  Description of Artificial Sequence: Synthetic oligonucleotide
uggaauagauagcccuuga

SEQ ID NO: 2626440 - RNA, 19 nt, Artificial Sequence
  Description of Artificial Sequence: Synthetic oligonucleotide
ugccuugaggcuucaauaa

SEQ ID NO: 2626441 - RNA, 19 nt, Artificial Sequence
  Description of Artificial Sequence: Synthetic oligonucleotide
gacuggaauagauagcccu

SEQ ID NO: 2626442 - RNA, 19 nt, Artificial Sequence
  Description of Artificial Sequence: Synthetic oligonucleotide
ugcuauccagggacgaucu

SEQ ID NO: 2626443 - RNA, 19 nt, Artificial Sequence
  Description of Artificial Sequence: Synthetic oligonucleotide
ugccuaauccaugaagaga

SEQ ID NO: 2626444 - RNA, 19 nt, Artificial Sequence
  Description of Artificial Sequence: Synthetic oligonucleotide
agaugauaucuuacaguac

SEQ ID NO: 2626445 - RNA, 19 nt, Artificial Sequence
  Description of Artificial Sequence: Synthetic oligonucleotide
agguguuccacuaucggug

SEQ ID NO: 2626446 - RNA, 19 nt, Artificial Sequence
  Description of Artificial Sequence: Synthetic oligonucleotide
cagcuuuuacuguaggguc

SEQ ID NO: 2626447 - RNA, 19 nt, Artificial Sequence
  Description of Artificial Sequence: Synthetic oligonucleotide
caaccuuugcgccaaugac

SEQ ID NO: 2626448 - RNA, 19 nt, Artificial Sequence
  Description of Artificial Sequence: Synthetic oligonucleotide
ugagccaauuaaugguaac

SEQ ID NO: 2626449 - RNA, 19 nt, Artificial Sequence
  Description of Artificial Sequence: Synthetic oligonucleotide
aaaagacaacucauauagu

SEQ ID NO: 2626450 - RNA, 19 nt, Artificial Sequence
  Description of Artificial Sequence: Synthetic oligonucleotide
gggacgaucuuuuggacug

SEQ ID NO: 2626451 - RNA, 19 nt, Artificial Sequence
  Description of Artificial Sequence: Synthetic oligonucleotide
acaaaacacggagucaaca

SEQ ID NO: 2626452 - RNA, 19 nt, Artificial Sequence
  Description of Artificial Sequence: Synthetic oligonucleotide
acaacucauauaguuaaau

SEQ ID NO: 2626453 - RNA, 19 nt, Artificial Sequence
  Description of Artificial Sequence: Synthetic oligonucleotide
uuacuguagggucaaccuu

SEQ ID NO: 2626454 - RNA, 19 nt, Artificial Sequence
  Description of Artificial Sequence: Synthetic oligonucleotide
caacagauuacaagaauua

SEQ ID NO: 2626455 - RNA, 19 nt, Artificial Sequence
  Description of Artificial Sequence: Synthetic oligonucleotide
auaaaauccacugcuuauu

SEQ ID NO: 2626456 - RNA, 19 nt, Artificial Sequence
  Description of Artificial Sequence: Synthetic oligonucleotide
ccacaauuacaguagcagg

SEQ ID NO: 2626457 - RNA, 19 nt, Artificial Sequence
  Description of Artificial Sequence: Synthetic oligonucleotide
cacggagucaacagauuac

SEQ ID NO: 2626458 - RNA, 19 nt, Artificial Sequence
  Description of Artificial Sequence: Synthetic oligonucleotide
uacaaaacacggagucaac

SEQ ID NO: 2626459 - RNA, 19 nt, Artificial Sequence
  Description of Artificial Sequence: Synthetic oligonucleotide
gccuaauccaugaagagac

SEQ ID NO: 2626460 - RNA, 19 nt, Artificial Sequence
  Description of Artificial Sequence: Synthetic oligonucleotide
uguuccacuaucggugucu

SEQ ID NO: 2626461 - RNA, 19 nt, Artificial Sequence
  Description of Artificial Sequence: Synthetic oligonucleotide
ggaauagauagcccuugag

SEQ ID NO: 2626462 - RNA, 19 nt, Artificial Sequence
  Description of Artificial Sequence: Synthetic oligonucleotide
uauccagggacgaucuuuu

SEQ ID NO: 2626463 - RNA, 19 nt, Artificial Sequence
  Description of Artificial Sequence: Synthetic oligonucleotide
gcgaauuaaaagguguucc

SEQ ID NO: 2626464 - RNA, 19 nt, Artificial Sequence
  Description of Artificial Sequence: Synthetic oligonucleotide
gagccaauuaaugguaaca

SEQ ID NO: 2626465 - RNA, 19 nt, Artificial Sequence
  Description of Artificial Sequence: Synthetic oligonucleotide
cacaauuacaguagcaggu

SEQ ID NO: 2626466 - RNA, 19 nt, Artificial Sequence
  Description of Artificial Sequence: Synthetic oligonucleotide
agggacgaucuuuuggacu

SEQ ID NO: 2626467 - RNA, 19 nt, Artificial Sequence
  Description of Artificial Sequence: Synthetic oligonucleotide
ugcgccaaugacuggaaua

SEQ ID NO: 2626468 - RNA, 19 nt, Artificial Sequence
  Description of Artificial Sequence: Synthetic oligonucleotide
caauuacaguagcagguuc

SEQ ID NO: 2626469 - RNA, 19 nt, Artificial Sequence
  Description of Artificial Sequence: Synthetic oligonucleotide
gaaggcuuauuuguagaca

SEQ ID NO: 2626470 - RNA, 19 nt, Artificial Sequence
  Description of Artificial Sequence: Synthetic oligonucleotide
ugaggggcugucuggguug

SEQ ID NO: 2626471 - RNA, 19 nt, Artificial Sequence
  Description of Artificial Sequence: Synthetic oligonucleotide
acacggagucaacagauua

SEQ ID NO: 2626472 - RNA, 19 nt, Artificial Sequence
  Description of Artificial Sequence: Synthetic oligonucleotide
auuuguagacaccggcgaa

SEQ ID NO: 2626473 - RNA, 19 nt, Artificial Sequence
  Description of Artificial Sequence: Synthetic oligonucleotide
ugauaucuuacaguacaua

SEQ ID NO: 2626474 - RNA, 19 nt, Artificial Sequence
  Description of Artificial Sequence: Synthetic oligonucleotide
gcagguucaguacuauucc

SEQ ID NO: 2626475 - RNA, 19 nt, Artificial Sequence
  Description of Artificial Sequence: Synthetic oligonucleotide
agccaauuaaugguaacaa

SEQ ID NO: 2626476 - RNA, 19 nt, Artificial Sequence
  Description of Artificial Sequence: Synthetic oligonucleotide
uggagcuauccagacaacu

SEQ ID NO: 2626477 - RNA, 19 nt, Artificial Sequence
  Description of Artificial Sequence: Synthetic oligonucleotide
aggauacagcuuuuacugu

SEQ ID NO: 2626478 - RNA, 19 nt, Artificial Sequence
  Description of Artificial Sequence: Synthetic oligonucleotide
uuuggacugaaggccaccu

SEQ ID NO: 2626479 - RNA, 19 nt, Artificial Sequence
  Description of Artificial Sequence: Synthetic oligonucleotide
aacugagcaugcauucaug

SEQ ID NO: 2626480 - RNA, 19 nt, Artificial Sequence
  Description of Artificial Sequence: Synthetic oligonucleotide
uaucggugucucuggagcu

SEQ ID NO: 2626481 - RNA, 19 nt, Artificial Sequence
  Description of Artificial Sequence: Synthetic oligonucleotide
aaagguccugagccaauua

SEQ ID NO: 2626482 - RNA, 19 nt, Artificial Sequence
  Description of Artificial Sequence: Synthetic oligonucleotide
ucucuggagcuauccagac

SEQ ID NO: 2626483 - RNA, 19 nt, Artificial Sequence
  Description of Artificial Sequence: Synthetic oligonucleotide
uagacaccggcgaauuaaa

SEQ ID NO: 2626484 - RNA, 19 nt, Artificial Sequence
  Description of Artificial Sequence: Synthetic oligonucleotide
aggcuuauuuguagacacc

SEQ ID NO: 2626485 - RNA, 19 nt, Artificial Sequence
  Description of Artificial Sequence: Synthetic oligonucleotide
gcaugccuaauccaugaag

SEQ ID NO: 2626486 - RNA, 19 nt, Artificial Sequence
  Description of Artificial Sequence: Synthetic oligonucleotide
acggagucaacagauuaca

SEQ ID NO: 2626487 - RNA, 19 nt, Artificial Sequence
  Description of Artificial Sequence: Synthetic oligonucleotide
uuggacugaaggccaccug

SEQ ID NO: 2626488 - RNA, 19 nt, Artificial Sequence
  Description of Artificial Sequence: Synthetic oligonucleotide
ggaaggcuuauuuguagac

SEQ ID NO: 2626489 - RNA, 19 nt, Artificial Sequence
  Description of Artificial Sequence: Synthetic oligonucleotide
cuuuuggacugaaggccac

SEQ ID NO: 2626490 - RNA, 19 nt, Artificial Sequence
  Description of Artificial Sequence: Synthetic oligonucleotide
uuuuggacugaaggccacc

SEQ ID NO: 2626491 - RNA, 19 nt, Artificial Sequence
  Description of Artificial Sequence: Synthetic oligonucleotide
ccagacaacugcuauccag

SEQ ID NO: 2626492 - RNA, 19 nt, Artificial Sequence
  Description of Artificial Sequence: Synthetic oligonucleotide
uuugcgccaaugacuggaa

SEQ ID NO: 2626493 - RNA, 19 nt, Artificial Sequence
  Description of Artificial Sequence: Synthetic oligonucleotide
acaauuacaguagcagguu

SEQ ID NO: 2626494 - RNA, 19 nt, Artificial Sequence
  Description of Artificial Sequence: Synthetic oligonucleotide
caagaauuacaugguugug

SEQ ID NO: 2626495 - RNA, 19 nt, Artificial Sequence
  Description of Artificial Sequence: Synthetic oligonucleotide
gacaacugcuauccaggga

SEQ ID NO: 2626496 - RNA, 19 nt, Artificial Sequence
  Description of Artificial Sequence: Synthetic oligonucleotide
gaaggccaccugaaauccg

SEQ ID NO: 2626497 - RNA, 19 nt, Artificial Sequence
  Description of Artificial Sequence: Synthetic oligonucleotide
ugcauucaugaaacuuaaa

SEQ ID NO: 2626498 - RNA, 19 nt, Artificial Sequence
  Description of Artificial Sequence: Synthetic oligonucleotide
gguuggaaggcuuauuugu

SEQ ID NO: 2626499 - RNA, 19 nt, Artificial Sequence
  Description of Artificial Sequence: Synthetic oligonucleotide
guagacaccggcgaauuaa

SEQ ID NO: 2626500 - RNA, 19 nt, Artificial Sequence
  Description of Artificial Sequence: Synthetic oligonucleotide
ggagcuauccagacaacug

SEQ ID NO: 2626501 - RNA, 19 nt, Artificial Sequence
  Description of Artificial Sequence: Synthetic oligonucleotide
agcuuuuacuguaggguca

SEQ ID NO: 2626502 - RNA, 19 nt, Artificial Sequence
  Description of Artificial Sequence: Synthetic oligonucleotide
uccacugcuuauucugcau

SEQ ID NO: 2626503 - RNA, 19 nt, Artificial Sequence
  Description of Artificial Sequence: Synthetic oligonucleotide
acauacgacuucauuuaca

SEQ ID NO: 2626504 - RNA, 19 nt, Artificial Sequence
  Description of Artificial Sequence: Synthetic oligonucleotide
gaugccuugaggcuucaau

SEQ ID NO: 2626505 - RNA, 19 nt, Artificial Sequence
  Description of Artificial Sequence: Synthetic oligonucleotide
uuacaucagagagacucuu

SEQ ID NO: 2626506 - RNA, 19 nt, Artificial Sequence
  Description of Artificial Sequence: Synthetic oligonucleotide
cuuugcgccaaugacugga

SEQ ID NO: 2626507 - RNA, 19 nt, Artificial Sequence
  Description of Artificial Sequence: Synthetic oligonucleotide
agucaacagauuacaagaa

SEQ ID NO: 2626508 - RNA, 19 nt, Artificial Sequence
  Description of Artificial Sequence: Synthetic oligonucleotide
gguccugagccaauuaaug

SEQ ID NO: 2626509 - RNA, 19 nt, Artificial Sequence
  Description of Artificial Sequence: Synthetic oligonucleotide
uccagacaacugcuaucca

SEQ ID NO: 2626510 - RNA, 19 nt, Artificial Sequence
  Description of Artificial Sequence: Synthetic oligonucleotide
ccaugaagagacuguuggg

SEQ ID NO: 2626511 - RNA, 19 nt, Artificial Sequence
  Description of Artificial Sequence: Synthetic oligonucleotide
cuacaaagguccugagcca

SEQ ID NO: 2626512 - RNA, 19 nt, Artificial Sequence
  Description of Artificial Sequence: Synthetic oligonucleotide
gcgccaaugacuggaauag

SEQ ID NO: 2626513 - RNA, 19 nt, Artificial Sequence
  Description of Artificial Sequence: Synthetic oligonucleotide
agcaugcauucaugaaacu

SEQ ID NO: 2626514 - RNA, 19 nt, Artificial Sequence
  Description of Artificial Sequence: Synthetic oligonucleotide
uguagacaccggcgaauua

SEQ ID NO: 2626515 - RNA, 19 nt, Artificial Sequence
  Description of Artificial Sequence: Synthetic oligonucleotide
ugcaugccuaauccaugaa

SEQ ID NO: 2626516 - RNA, 19 nt, Artificial Sequence
  Description of Artificial Sequence: Synthetic oligonucleotide
cucuuuugaaaagaugaua

SEQ ID NO: 2626517 - RNA, 19 nt, Artificial Sequence
  Description of Artificial Sequence: Synthetic oligonucleotide
ggaggauacagcuuuuacu

SEQ ID NO: 2626518 - RNA, 19 nt, Artificial Sequence
  Description of Artificial Sequence: Synthetic oligonucleotide
auacgacuucauuuacaaa

SEQ ID NO: 2626519 - RNA, 19 nt, Artificial Sequence
  Description of Artificial Sequence: Synthetic oligonucleotide
gcuuauuuguagacaccgg

SEQ ID NO: 2626520 - RNA, 19 nt, Artificial Sequence
  Description of Artificial Sequence: Synthetic oligonucleotide
cuuggcagcuucuccacaa

SEQ ID NO: 2626521 - RNA, 19 nt, Artificial Sequence
  Description of Artificial Sequence: Synthetic oligonucleotide
agcuauccagacaacugcu

SEQ ID NO: 2626522 - RNA, 19 nt, Artificial Sequence
  Description of Artificial Sequence: Synthetic oligonucleotide
gguaacaaugucauucaaa

SEQ ID NO: 2626523 - RNA, 19 nt, Artificial Sequence
  Description of Artificial Sequence: Synthetic oligonucleotide
ggauacagcuuuuacugua

SEQ ID NO: 2626524 - RNA, 19 nt, Artificial Sequence
  Description of Artificial Sequence: Synthetic oligonucleotide
gaaauccggcuuacaucag

SEQ ID NO: 2626525 - RNA, 19 nt, Artificial Sequence
  Description of Artificial Sequence: Synthetic oligonucleotide
augcauucaugaaacuuaa

SEQ ID NO: 2626526 - RNA, 19 nt, Artificial Sequence
  Description of Artificial Sequence: Synthetic oligonucleotide
augauaucuuacaguacau

SEQ ID NO: 2626527 - RNA, 19 nt, Artificial Sequence
  Description of Artificial Sequence: Synthetic oligonucleotide
gucaacagauuacaagaau

SEQ ID NO: 2626528 - RNA, 19 nt, Artificial Sequence
  Description of Artificial Sequence: Synthetic oligonucleotide
uuacaguagcagguucagu

SEQ ID NO: 2626529 - RNA, 19 nt, Artificial Sequence
  Description of Artificial Sequence: Synthetic oligonucleotide
cagggacgaucuuuuggac

SEQ ID NO: 2626530 - RNA, 19 nt, Artificial Sequence
  Description of Artificial Sequence: Synthetic oligonucleotide
uuguagacaccggcgaauu

SEQ ID NO: 2626531 - RNA, 19 nt, Artificial Sequence
  Description of Artificial Sequence: Synthetic oligonucleotide
gggaggauacagcuuuuac

SEQ ID NO: 2626532 - RNA, 19 nt, Artificial Sequence
  Description of Artificial Sequence: Synthetic oligonucleotide
cuuacaucagagagacucu

SEQ ID NO: 2626533 - RNA, 19 nt, Artificial Sequence
  Description of Artificial Sequence: Synthetic oligonucleotide
cuugaggcuucaauaaaau

SEQ ID NO: 2626534 - RNA, 19 nt, Artificial Sequence
  Description of Artificial Sequence: Synthetic oligonucleotide
gaacacuuggcagcuucuc

SEQ ID NO: 2626535 - RNA, 19 nt, Artificial Sequence
  Description of Artificial Sequence: Synthetic oligonucleotide
cugagcaugcauucaugaa

SEQ ID NO: 2626536 - RNA, 19 nt, Artificial Sequence
  Description of Artificial Sequence: Synthetic oligonucleotide
ggugucucuggagcuaucc

SEQ ID NO: 2626537 - RNA, 19 nt, Artificial Sequence
  Description of Artificial Sequence: Synthetic oligonucleotide
ugucuggguuggaaggcuu

SEQ ID NO: 2626538 - RNA, 19 nt, Artificial Sequence
  Description of Artificial Sequence: Synthetic oligonucleotide
cugcuauccagggacgauc

SEQ ID NO: 2626539 - RNA, 19 nt, Artificial Sequence
  Description of Artificial Sequence: Synthetic oligonucleotide
acuggaauagauagcccuu

SEQ ID NO: 2626540 - RNA, 19 nt, Artificial Sequence
  Description of Artificial Sequence: Synthetic oligonucleotide
gauagcccuugagcugggg

SEQ ID NO: 2626541 - RNA, 19 nt, Artificial Sequence
  Description of Artificial Sequence: Synthetic oligonucleotide
gggaacacuuggcagcuuc

SEQ ID NO: 2626542 - RNA, 19 nt, Artificial Sequence
  Description of Artificial Sequence: Synthetic oligonucleotide
acuguagggucaaccuuug

SEQ ID NO: 2626543 - RNA, 19 nt, Artificial Sequence
  Description of Artificial Sequence: Synthetic oligonucleotide
accggcgaauuaaaaggug

SEQ ID NO: 2626544 - RNA, 19 nt, Artificial Sequence
  Description of Artificial Sequence: Synthetic oligonucleotide
cugagccaauuaaugguaa

SEQ ID NO: 2626545 - RNA, 19 nt, Artificial Sequence
  Description of Artificial Sequence: Synthetic oligonucleotide
guuggaaggcuuauuugua

SEQ ID NO: 2626546 - RNA, 19 nt, Artificial Sequence
  Description of Artificial Sequence: Synthetic oligonucleotide
auccggcuuacaucagaga

SEQ ID NO: 2626547 - RNA, 19 nt, Artificial Sequence
  Description of Artificial Sequence: Synthetic oligonucleotide
agguucaguacuauuccuu

SEQ ID NO: 2626548 - RNA, 19 nt, Artificial Sequence
  Description of Artificial Sequence: Synthetic oligonucleotide
gacugaaggccaccugaaa

SEQ ID NO: 2626549 - RNA, 19 nt, Artificial Sequence
  Description of Artificial Sequence: Synthetic oligonucleotide
ggcgaauuaaaagguguuc

SEQ ID NO: 2626550 - RNA, 19 nt, Artificial Sequence
  Description of Artificial Sequence: Synthetic oligonucleotide
ccagggacgaucuuuugga

SEQ ID NO: 2626551 - RNA, 19 nt, Artificial Sequence
  Description of Artificial Sequence: Synthetic oligonucleotide
aacacggagucaacagauu

SEQ ID NO: 2626552 - RNA, 19 nt, Artificial Sequence
  Description of Artificial Sequence: Synthetic oligonucleotide
auccagggacgaucuuuug

SEQ ID NO: 2626553 - RNA, 19 nt, Artificial Sequence
  Description of Artificial Sequence: Synthetic oligonucleotide
aggccaccugaaauccggc

SEQ ID NO: 2626554 - RNA, 19 nt, Artificial Sequence
  Description of Artificial Sequence: Synthetic oligonucleotide
acgaucuuuuggacugaag

SEQ ID NO: 2626555 - RNA, 19 nt, Artificial Sequence
  Description of Artificial Sequence: Synthetic oligonucleotide
cuauccagacaacugcuau

SEQ ID NO: 2626556 - RNA, 19 nt, Artificial Sequence
  Description of Artificial Sequence: Synthetic oligonucleotide
ccacuaucggugucucugg

SEQ ID NO: 2626557 - RNA, 19 nt, Artificial Sequence
  Description of Artificial Sequence: Synthetic oligonucleotide
agguccugagccaauuaau

SEQ ID NO: 2626558 - RNA, 19 nt, Artificial Sequence
  Description of Artificial Sequence: Synthetic oligonucleotide
gggcugucuggguuggaag

SEQ ID NO: 2626559 - RNA, 19 nt, Artificial Sequence
  Description of Artificial Sequence: Synthetic oligonucleotide
uugcgccaaugacuggaau

SEQ ID NO: 2626560 - RNA, 19 nt, Artificial Sequence
  Description of Artificial Sequence: Synthetic oligonucleotide
gcuuauucugcaugccuaa

SEQ ID NO: 2626561 - RNA, 19 nt, Artificial Sequence
  Description of Artificial Sequence: Synthetic oligonucleotide
cuggagcuauccagacaac

SEQ ID NO: 2626562 - RNA, 19 nt, Artificial Sequence
  Description of Artificial Sequence: Synthetic oligonucleotide
cgaauuaaaagguguucca

SEQ ID NO: 2626563 - RNA, 19 nt, Artificial Sequence
  Description of Artificial Sequence: Synthetic oligonucleotide
gucaaccuuugcgccaaug

SEQ ID NO: 2626564 - RNA, 19 nt, Artificial Sequence
  Description of Artificial Sequence: Synthetic oligonucleotide
gaauuacaugguuguggau

SEQ ID NO: 2626565 - RNA, 19 nt, Artificial Sequence
  Description of Artificial Sequence: Synthetic oligonucleotide
acugcuauccagggacgau

SEQ ID NO: 2626566 - RNA, 19 nt, Artificial Sequence
  Description of Artificial Sequence: Synthetic oligonucleotide
uucuccugaggggcugucu

SEQ ID NO: 2626567 - RNA, 19 nt, Artificial Sequence
  Description of Artificial Sequence: Synthetic oligonucleotide
cugcuuauucugcaugccu

SEQ ID NO: 2626568 - RNA, 19 nt, Artificial Sequence
  Description of Artificial Sequence: Synthetic oligonucleotide
cggcuuacaucagagagac

SEQ ID NO: 2626569 - RNA, 19 nt, Artificial Sequence
  Description of Artificial Sequence: Synthetic oligonucleotide
cucuggagcuauccagaca

SEQ ID NO: 2626570 - RNA, 19 nt, Artificial Sequence
  Description of Artificial Sequence: Synthetic oligonucleotide
guacuauuccuuucugcuu

SEQ ID NO: 2626571 - RNA, 19 nt, Artificial Sequence
  Description of Artificial Sequence: Synthetic oligonucleotide
guuccacuaucggugucuc

SEQ ID NO: 2626572 - RNA, 19 nt, Artificial Sequence
  Description of Artificial Sequence: Synthetic oligonucleotide
gguucaguacuauuccuuu

SEQ ID NO: 2626573 - RNA, 19 nt, Artificial Sequence
  Description of Artificial Sequence: Synthetic oligonucleotide
caccggcgaauuaaaaggu

SEQ ID NO: 2626574 - RNA, 19 nt, Artificial Sequence
  Description of Artificial Sequence: Synthetic oligonucleotide
ccaaugacuggaauagaua

SEQ ID NO: 2626575 - RNA, 19 nt, Artificial Sequence
  Description of Artificial Sequence: Synthetic oligonucleotide
gacgaucuuuuggacugaa

SEQ ID NO: 2626576 - RNA, 19 nt, Artificial Sequence
  Description of Artificial Sequence: Synthetic oligonucleotide
cagguucaguacuauuccu

SEQ ID NO: 2626577 - RNA, 19 nt, Artificial Sequence
  Description of Artificial Sequence: Synthetic oligonucleotide
agauagcccuugagcuggg

SEQ ID NO: 2626578 - RNA, 19 nt, Artificial Sequence
  Description of Artificial Sequence: Synthetic oligonucleotide
ggcuucaauaaaauccacu

SEQ ID NO: 2626579 - RNA, 19 nt, Artificial Sequence
  Description of Artificial Sequence: Synthetic oligonucleotide
aagaugccuugaggcuuca

SEQ ID NO: 2626580 - RNA, 19 nt, Artificial Sequence
  Description of Artificial Sequence: Synthetic oligonucleotide
uuacaugguuguggauuuu

SEQ ID NO: 2626581 - RNA, 19 nt, Artificial Sequence
  Description of Artificial Sequence: Synthetic oligonucleotide
ccugagccaauuaauggua

SEQ ID NO: 2626582 - RNA, 19 nt, Artificial Sequence
  Description of Artificial Sequence: Synthetic oligonucleotide
cacuaucggugucucugga

SEQ ID NO: 2626583 - RNA, 19 nt, Artificial Sequence
  Description of Artificial Sequence: Synthetic oligonucleotide
caccugaaauccggcuuac

SEQ ID NO: 2626584 - RNA, 19 nt, Artificial Sequence
  Description of Artificial Sequence: Synthetic oligonucleotide
gccaauuaaugguaacaau

SEQ ID NO: 2626585 - RNA, 19 nt, Artificial Sequence
  Description of Artificial Sequence: Synthetic oligonucleotide
guguuccacuaucgguguc

SEQ ID NO: 2626586 - RNA, 19 nt, Artificial Sequence
  Description of Artificial Sequence: Synthetic oligonucleotide
ccggcuuacaucagagaga

SEQ ID NO: 2626587 - RNA, 19 nt, Artificial Sequence
  Description of Artificial Sequence: Synthetic oligonucleotide
agacaccggcgaauuaaaa

SEQ ID NO: 2626588 - RNA, 19 nt, Artificial Sequence
  Description of Artificial Sequence: Synthetic oligonucleotide
gguguuccacuaucggugu

SEQ ID NO: 2626589 - RNA, 19 nt, Artificial Sequence
  Description of Artificial Sequence: Synthetic oligonucleotide
accugaaauccggcuuaca

SEQ ID NO: 2626590 - RNA, 19 nt, Artificial Sequence
  Description of Artificial Sequence: Synthetic oligonucleotide
cuauccagggacgaucuuu

SEQ ID NO: 2626591 - RNA, 19 nt, Artificial Sequence
  Description of Artificial Sequence: Synthetic oligonucleotide
gccuugaggcuucaauaaa

SEQ ID NO: 2626592 - RNA, 19 nt, Artificial Sequence
  Description of Artificial Sequence: Synthetic oligonucleotide
gccaaugacuggaauagau

SEQ ID NO: 2626593 - RNA, 19 nt, Artificial Sequence
  Description of Artificial Sequence: Synthetic oligonucleotide
ccggcgaauuaaaaggugu

SEQ ID NO: 2626594 - RNA, 19 nt, Artificial Sequence
  Description of Artificial Sequence: Synthetic oligonucleotide
gcaugcauucaugaaacuu

SEQ ID NO: 2626595 - RNA, 19 nt, Artificial Sequence
  Description of Artificial Sequence: Synthetic oligonucleotide
cgacuucauuuacaaaaca

SEQ ID NO: 2626596 - RNA, 19 nt, Artificial Sequence
  Description of Artificial Sequence: Synthetic oligonucleotide
ggacugaaggccaccugaa

SEQ ID NO: 2626597 - RNA, 19 nt, Artificial Sequence
  Description of Artificial Sequence: Synthetic oligonucleotide
guagcagguucaguacuau

SEQ ID NO: 2626598 - RNA, 19 nt, Artificial Sequence
  Description of Artificial Sequence: Synthetic oligonucleotide
cuuauucugcaugccuaau

SEQ ID NO: 2626599 - RNA, 19 nt, Artificial Sequence
  Description of Artificial Sequence: Synthetic oligonucleotide
gucuggguuggaaggcuua

SEQ ID NO: 2626600 - RNA, 19 nt, Artificial Sequence
  Description of Artificial Sequence: Synthetic oligonucleotide
gcuauccagacaacugcua

SEQ ID NO: 2626601 - RNA, 19 nt, Artificial Sequence
  Description of Artificial Sequence: Synthetic oligonucleotide
gggucaaccuuugcgccaa

SEQ ID NO: 2626602 - RNA, 19 nt, Artificial Sequence
  Description of Artificial Sequence: Synthetic oligonucleotide
gccaccugaaauccggcuu

SEQ ID NO: 2626603 - RNA, 19 nt, Artificial Sequence
  Description of Artificial Sequence: Synthetic oligonucleotide
ggaacacuuggcagcuucu

SEQ ID NO: 2626604 - RNA, 19 nt, Artificial Sequence
  Description of Artificial Sequence: Synthetic oligonucleotide
ggccaccugaaauccggcu

SEQ ID NO: 2626605 - RNA, 19 nt, Artificial Sequence
  Description of Artificial Sequence: Synthetic oligonucleotide
ggacgaucuuuuggacuga

SEQ ID NO: 2626606 - RNA, 19 nt, Artificial Sequence
  Description of Artificial Sequence: Synthetic oligonucleotide
ggggaggauacagcuuuua

SEQ ID NO: 2626607 - RNA, 19 nt, Artificial Sequence
  Description of Artificial Sequence: Synthetic oligonucleotide
cggagucaacagauuacaa

SEQ ID NO: 2626608 - RNA, 19 nt, Artificial Sequence
  Description of Artificial Sequence: Synthetic oligonucleotide
cuggguuggaaggcuuauu

SEQ ID NO: 2626609 - RNA, 19 nt, Artificial Sequence
  Description of Artificial Sequence: Synthetic oligonucleotide
cggcgaauuaaaagguguu

SEQ ID NO: 2626610 - RNA, 19 nt, Artificial Sequence
  Description of Artificial Sequence: Synthetic oligonucleotide
gcuauccagggacgaucuu

SEQ ID NO: 2626611 - RNA, 19 nt, Artificial Sequence
  Description of Artificial Sequence: Synthetic oligonucleotide
cgccaaugacuggaauaga

SEQ ID NO: 2626612 - RNA, 19 nt, Artificial Sequence
  Description of Artificial Sequence: Synthetic oligonucleotide
ggcuuacaucagagagacu

SEQ ID NO: 2626613 - RNA, 19 nt, Artificial Sequence
  Description of Artificial Sequence: Synthetic oligonucleotide
ggucaaccuuugcgccaau

SEQ ID NO: 2626614 - RNA, 19 nt, Artificial Sequence
  Description of Artificial Sequence: Synthetic oligonucleotide
ggggaacacuuggcagcuu

SEQ ID NO: 2626615 - RNA, 19 nt, Artificial Sequence
  Description of Artificial Sequence: Synthetic oligonucleotide
aaauggaauaucuccacag

SEQ ID NO: 2626616 - RNA, 19 nt, Artificial Sequence
  Description of Artificial Sequence: Synthetic oligonucleotide
aacacuugacccuugauga

SEQ ID NO: 2626617 - RNA, 19 nt, Artificial Sequence
  Description of Artificial Sequence: Synthetic oligonucleotide
aaaggcugcuauuugcugg

SEQ ID NO: 2626618 - RNA, 19 nt, Artificial Sequence
  Description of Artificial Sequence: Synthetic oligonucleotide
agcgaauccacucuggagg

SEQ ID NO: 2626619 - RNA, 19 nt, Artificial Sequence
  Description of Artificial Sequence: Synthetic oligonucleotide
gaccauaucauagagcagg

SEQ ID NO: 2626620 - RNA, 19 nt, Artificial Sequence
  Description of Artificial Sequence: Synthetic oligonucleotide
auuucuucgaaggauggcc

SEQ ID NO: 2626621 - RNA, 19 nt, Artificial Sequence
  Description of Artificial Sequence: Synthetic oligonucleotide
uuuaaugagaugcuggcau

SEQ ID NO: 2626622 - RNA, 19 nt, Artificial Sequence
  Description of Artificial Sequence: Synthetic oligonucleotide
aggagaacauccugcaucc

SEQ ID NO: 2626623 - RNA, 19 nt, Artificial Sequence
  Description of Artificial Sequence: Synthetic oligonucleotide
uccacagaccauaucauag

SEQ ID NO: 2626624 - RNA, 19 nt, Artificial Sequence
  Description of Artificial Sequence: Synthetic oligonucleotide
aggauggccgaucugaugg

SEQ ID NO: 2626625 - RNA, 19 nt, Artificial Sequence
  Description of Artificial Sequence: Synthetic oligonucleotide
aucugauggucucagggcc

SEQ ID NO: 2626626 - RNA, 19 nt, Artificial Sequence
  Description of Artificial Sequence: Synthetic oligonucleotide
ucgaaguccguguagacug

SEQ ID NO: 2626627 - RNA, 19 nt, Artificial Sequence
  Description of Artificial Sequence: Synthetic oligonucleotide
gaacacuugacccuugaug

SEQ ID NO: 2626628 - RNA, 19 nt, Artificial Sequence
  Description of Artificial Sequence: Synthetic oligonucleotide
aauggaauaucuccacaga

SEQ ID NO: 2626629 - RNA, 19 nt, Artificial Sequence
  Description of Artificial Sequence: Synthetic oligonucleotide
cagaccauaucauagagca

SEQ ID NO: 2626630 - RNA, 19 nt, Artificial Sequence
  Description of Artificial Sequence: Synthetic oligonucleotide
aaggcugcuauuugcuggg

SEQ ID NO: 2626631 - RNA, 19 nt, Artificial Sequence
  Description of Artificial Sequence: Synthetic oligonucleotide
uggauuucuucgaaggaug

SEQ ID NO: 2626632 - RNA, 19 nt, Artificial Sequence
  Description of Artificial Sequence: Synthetic oligonucleotide
caugguaucgaugguagcg

SEQ ID NO: 2626633 - RNA, 19 nt, Artificial Sequence
  Description of Artificial Sequence: Synthetic oligonucleotide
uggaggacuguacacucgg

SEQ ID NO: 2626634 - RNA, 19 nt, Artificial Sequence
  Description of Artificial Sequence: Synthetic oligonucleotide
uucgucaugcucaaaugga

SEQ ID NO: 2626635 - RNA, 19 nt, Artificial Sequence
  Description of Artificial Sequence: Synthetic oligonucleotide
gaacauccugcauccaugg

SEQ ID NO: 2626636 - RNA, 19 nt, Artificial Sequence
  Description of Artificial Sequence: Synthetic oligonucleotide
gaugaucucuucgucaugc

SEQ ID NO: 2626637 - RNA, 19 nt, Artificial Sequence
  Description of Artificial Sequence: Synthetic oligonucleotide
guacacucggguuccaucg

SEQ ID NO: 2626638 - RNA, 19 nt, Artificial Sequence
  Description of Artificial Sequence: Synthetic oligonucleotide
uagacugugugccaccggc

SEQ ID NO: 2626639 - RNA, 19 nt, Artificial Sequence
  Description of Artificial Sequence: Synthetic oligonucleotide
aauaucuccacagaccaua

SEQ ID NO: 2626640 - RNA, 19 nt, Artificial Sequence
  Description of Artificial Sequence: Synthetic oligonucleotide
gaugguagcgaauccacuc

SEQ ID NO: 2626641 - RNA, 19 nt, Artificial Sequence
  Description of Artificial Sequence: Synthetic oligonucleotide
uuugccugaagaacacuug

SEQ ID NO: 2626642 - RNA, 19 nt, Artificial Sequence
  Description of Artificial Sequence: Synthetic oligonucleotide
ugauaggcugcgcagguga

SEQ ID NO: 2626643 - RNA, 19 nt, Artificial Sequence
  Description of Artificial Sequence: Synthetic oligonucleotide
gcucaaauggaauaucucc

SEQ ID NO: 2626644 - RNA, 19 nt, Artificial Sequence
  Description of Artificial Sequence: Synthetic oligonucleotide
ucagaaaggcugcuauuug

SEQ ID NO: 2626645 - RNA, 19 nt, Artificial Sequence
  Description of Artificial Sequence: Synthetic oligonucleotide
ugguacugcgacuccaggg

SEQ ID NO: 2626646 - RNA, 19 nt, Artificial Sequence
  Description of Artificial Sequence: Synthetic oligonucleotide
ugcaggucgcugcagggcg

SEQ ID NO: 2626647 - RNA, 19 nt, Artificial Sequence
  Description of Artificial Sequence: Synthetic oligonucleotide
aggggaguugaucuuggac

SEQ ID NO: 2626648 - RNA, 19 nt, Artificial Sequence
  Description of Artificial Sequence: Synthetic oligonucleotide
ucggguuccaucgaagucc

SEQ ID NO: 2626649 - RNA, 19 nt, Artificial Sequence
  Description of Artificial Sequence: Synthetic oligonucleotide
uucugaagagacucuuugc

SEQ ID NO: 2626650 - RNA, 19 nt, Artificial Sequence
  Description of Artificial Sequence: Synthetic oligonucleotide
gaguagaccgagccgaagc

SEQ ID NO: 2626651 - RNA, 19 nt, Artificial Sequence
  Description of Artificial Sequence: Synthetic oligonucleotide
ucuucgucaugcucaaaug

SEQ ID NO: 2626652 - RNA, 19 nt, Artificial Sequence
  Description of Artificial Sequence: Synthetic oligonucleotide
gguacugcgacuccagggg

SEQ ID NO: 2626653 - RNA, 19 nt, Artificial Sequence
  Description of Artificial Sequence: Synthetic oligonucleotide
caaguugucggcgacgcgg

SEQ ID NO: 2626654 - RNA, 19 nt, Artificial Sequence
  Description of Artificial Sequence: Synthetic oligonucleotide
ccagacaccauuuaaugag

SEQ ID NO: 2626655 - RNA, 19 nt, Artificial Sequence
  Description of Artificial Sequence: Synthetic oligonucleotide
acucuggaggacuguacac

SEQ ID NO: 2626656 - RNA, 19 nt, Artificial Sequence
  Description of Artificial Sequence: Synthetic oligonucleotide
uugucggcgacgcggaugc

SEQ ID NO: 2626657 - RNA, 19 nt, Artificial Sequence
  Description of Artificial Sequence: Synthetic oligonucleotide
ccugaagaacacuugaccc

SEQ ID NO: 2626658 - RNA, 19 nt, Artificial Sequence
  Description of Artificial Sequence: Synthetic oligonucleotide
uccguguagacugugugcc

SEQ ID NO: 2626659 - RNA, 19 nt, Artificial Sequence
  Description of Artificial Sequence: Synthetic oligonucleotide
acccuugaugaucucuucg

SEQ ID NO: 2626660 - RNA, 19 nt, Artificial Sequence
  Description of Artificial Sequence: Synthetic oligonucleotide
acagaccauaucauagagc

SEQ ID NO: 2626661 - RNA, 19 nt, Artificial Sequence
  Description of Artificial Sequence: Synthetic oligonucleotide
cauccugcauccauggaug

SEQ ID NO: 2626662 - RNA, 19 nt, Artificial Sequence
  Description of Artificial Sequence: Synthetic oligonucleotide
gacaccauuuaaugagaug

SEQ ID NO: 2626663 - RNA, 19 nt, Artificial Sequence
  Description of Artificial Sequence: Synthetic oligonucleotide
acauccugcauccauggau

SEQ ID NO: 2626664 - RNA, 19 nt, Artificial Sequence
  Description of Artificial Sequence: Synthetic oligonucleotide
cacagaccauaucauagag

SEQ ID NO: 2626665 - RNA, 19 nt, Artificial Sequence
  Description of Artificial Sequence: Synthetic oligonucleotide
uguagacugugugccaccg

SEQ ID NO: 2626666 - RNA, 19 nt, Artificial Sequence
  Description of Artificial Sequence: Synthetic oligonucleotide
ugcccgaguagaccgagcc

SEQ ID NO: 2626667 - RNA, 19 nt, Artificial Sequence
  Description of Artificial Sequence: Synthetic oligonucleotide
aagaacacuugacccuuga

SEQ ID NO: 2626668 - RNA, 19 nt, Artificial Sequence
  Description of Artificial Sequence: Synthetic oligonucleotide
gagacucuuugccugaaga

SEQ ID NO: 2626669 - RNA, 19 nt, Artificial Sequence
  Description of Artificial Sequence: Synthetic oligonucleotide
ugaaucucagccguugccu

SEQ ID NO: 2626670 - RNA, 19 nt, Artificial Sequence
  Description of Artificial Sequence: Synthetic oligonucleotide
ugcucaaauggaauaucuc

SEQ ID NO: 2626671 - RNA, 19 nt, Artificial Sequence
  Description of Artificial Sequence: Synthetic oligonucleotide
gacucuuugccugaagaac

SEQ ID NO: 2626672 - RNA, 19 nt, Artificial Sequence
  Description of Artificial Sequence: Synthetic oligonucleotide
ugugcaggucgcugcaggg

SEQ ID NO: 2626673 - RNA, 19 nt, Artificial Sequence
  Description of Artificial Sequence: Synthetic oligonucleotide
uagcgaauccacucuggag

SEQ ID NO: 2626674 - RNA, 19 nt, Artificial Sequence
  Description of Artificial Sequence: Synthetic oligonucleotide
uaucgaugguagcgaaucc

SEQ ID NO: 2626675 - RNA, 19 nt, Artificial Sequence
  Description of Artificial Sequence: Synthetic oligonucleotide
aaggauggccgaucugaug

SEQ ID NO: 2626676 - RNA, 19 nt, Artificial Sequence
  Description of Artificial Sequence: Synthetic oligonucleotide
uucgaaggauggccgaucu

SEQ ID NO: 2626677 - RNA, 19 nt, Artificial Sequence
  Description of Artificial Sequence: Synthetic oligonucleotide
uucagaaaggcugcuauuu

SEQ ID NO: 2626678 - RNA, 19 nt, Artificial Sequence
  Description of Artificial Sequence: Synthetic oligonucleotide
ucgucaugcucaaauggaa

SEQ ID NO: 2626679 - RNA, 19 nt, Artificial Sequence
  Description of Artificial Sequence: Synthetic oligonucleotide
ucuggaggacuguacacuc

SEQ ID NO: 2626680 - RNA, 19 nt, Artificial Sequence
  Description of Artificial Sequence: Synthetic oligonucleotide
agcagcaacggcgacgggg

SEQ ID NO: 2626681 - RNA, 19 nt, Artificial Sequence
  Description of Artificial Sequence: Synthetic oligonucleotide
aaugagaugcuggcauucu

SEQ ID NO: 2626682 - RNA, 19 nt, Artificial Sequence
  Description of Artificial Sequence: Synthetic oligonucleotide
uggcauucugaagagacuc

SEQ ID NO: 2626683 - RNA, 19 nt, Artificial Sequence
  Description of Artificial Sequence: Synthetic oligonucleotide
ucugauggucucagggcca

SEQ ID NO: 2626684 - RNA, 19 nt, Artificial Sequence
  Description of Artificial Sequence: Synthetic oligonucleotide
cauagagcaggauccccag

SEQ ID NO: 2626685 - RNA, 19 nt, Artificial Sequence
  Description of Artificial Sequence: Synthetic oligonucleotide
guaucgaugguagcgaauc

SEQ ID NO: 2626686 - RNA, 19 nt, Artificial Sequence
  Description of Artificial Sequence: Synthetic oligonucleotide
accauuuaaugagaugcug

SEQ ID NO: 2626687 - RNA, 19 nt, Artificial Sequence
  Description of Artificial Sequence: Synthetic oligonucleotide
augguagcgaauccacucu

SEQ ID NO: 2626688 - RNA, 19 nt, Artificial Sequence
  Description of Artificial Sequence: Synthetic oligonucleotide
ggggaguugaucuuggaca

SEQ ID NO: 2626689 - RNA, 19 nt, Artificial Sequence
  Description of Artificial Sequence: Synthetic oligonucleotide
gauuucuucgaaggauggc

SEQ ID NO: 2626690 - RNA, 19 nt, Artificial Sequence
  Description of Artificial Sequence: Synthetic oligonucleotide
ugguagcgaauccacucug

SEQ ID NO: 2626691 - RNA, 19 nt, Artificial Sequence
  Description of Artificial Sequence: Synthetic oligonucleotide
auuuaaugagaugcuggca

SEQ ID NO: 2626692 - RNA, 19 nt, Artificial Sequence
  Description of Artificial Sequence: Synthetic oligonucleotide
cugggugccggugauaggc

SEQ ID NO: 2626693 - RNA, 19 nt, Artificial Sequence
  Description of Artificial Sequence: Synthetic oligonucleotide
uguacacucggguuccauc

SEQ ID NO: 2626694 - RNA, 19 nt, Artificial Sequence
  Description of Artificial Sequence: Synthetic oligonucleotide
gaguugaucuuggacagga

SEQ ID NO: 2626695 - RNA, 19 nt, Artificial Sequence
  Description of Artificial Sequence: Synthetic oligonucleotide
gggaguugaucuuggacag

SEQ ID NO: 2626696 - RNA, 19 nt, Artificial Sequence
  Description of Artificial Sequence: Synthetic oligonucleotide
uuaaugagaugcuggcauu

SEQ ID NO: 2626697 - RNA, 19 nt, Artificial Sequence
  Description of Artificial Sequence: Synthetic oligonucleotide
uuugcccggcgccagcuug

SEQ ID NO: 2626698 - RNA, 19 nt, Artificial Sequence
  Description of Artificial Sequence: Synthetic oligonucleotide
gggacgagcagcaacggcg

SEQ ID NO: 2626699 - RNA, 19 nt, Artificial Sequence
  Description of Artificial Sequence: Synthetic oligonucleotide
ucuccacagaccauaucau

SEQ ID NO: 2626700 - RNA, 19 nt, Artificial Sequence
  Description of Artificial Sequence: Synthetic oligonucleotide
ugcugggugccggugauag

SEQ ID NO: 2626701 - RNA, 19 nt, Artificial Sequence
  Description of Artificial Sequence: Synthetic oligonucleotide
ugguucuggauuucuucga

SEQ ID NO: 2626702 - RNA, 19 nt, Artificial Sequence
  Description of Artificial Sequence: Synthetic oligonucleotide
gcugcuauuugcugggugc

SEQ ID NO: 2626703 - RNA, 19 nt, Artificial Sequence
  Description of Artificial Sequence: Synthetic oligonucleotide
agacucuuugccugaagaa

SEQ ID NO: 2626704 - RNA, 19 nt, Artificial Sequence
  Description of Artificial Sequence: Synthetic oligonucleotide
uggggaaggagaacauccu

SEQ ID NO: 2626705 - RNA, 19 nt, Artificial Sequence
  Description of Artificial Sequence: Synthetic oligonucleotide
agaacauccugcauccaug

SEQ ID NO: 2626706 - RNA, 19 nt, Artificial Sequence
  Description of Artificial Sequence: Synthetic oligonucleotide
uaaugagaugcuggcauuc

SEQ ID NO: 2626707 - RNA, 19 nt, Artificial Sequence
  Description of Artificial Sequence: Synthetic oligonucleotide
ugaugaucucuucgucaug

SEQ ID NO: 2626708 - RNA, 19 nt, Artificial Sequence
  Description of Artificial Sequence: Synthetic oligonucleotide
gccugaagaacacuugacc

SEQ ID NO: 2626709 - RNA, 19 nt, Artificial Sequence
  Description of Artificial Sequence: Synthetic oligonucleotide
ugcugggacgagcagcaac

SEQ ID NO: 2626710 - RNA, 19 nt, Artificial Sequence
  Description of Artificial Sequence: Synthetic oligonucleotide
aacauccugcauccaugga

SEQ ID NO: 2626711 - RNA, 19 nt, Artificial Sequence
  Description of Artificial Sequence: Synthetic oligonucleotide
cuggaggacuguacacucg

SEQ ID NO: 2626712 - RNA, 19 nt, Artificial Sequence
  Description of Artificial Sequence: Synthetic oligonucleotide
cuuggacaggagcaucccc

SEQ ID NO: 2626713 - RNA, 19 nt, Artificial Sequence
  Description of Artificial Sequence: Synthetic oligonucleotide
ugccuggggaaggagaaca

SEQ ID NO: 2626714 - RNA, 19 nt, Artificial Sequence
  Description of Artificial Sequence: Synthetic oligonucleotide
auccugcauccauggaugg

SEQ ID NO: 2626715 - RNA, 19 nt, Artificial Sequence
  Description of Artificial Sequence: Synthetic oligonucleotide
ucagccguugccuggggaa

SEQ ID NO: 2626716 - RNA, 19 nt, Artificial Sequence
  Description of Artificial Sequence: Synthetic oligonucleotide
ugcuauuugcugggugccg

SEQ ID NO: 2626717 - RNA, 19 nt, Artificial Sequence
  Description of Artificial Sequence: Synthetic oligonucleotide
uucuucgaaggauggccga

SEQ ID NO: 2626718 - RNA, 19 nt, Artificial Sequence
  Description of Artificial Sequence: Synthetic oligonucleotide
auuugcugggugccgguga

SEQ ID NO: 2626719 - RNA, 19 nt, Artificial Sequence
  Description of Artificial Sequence: Synthetic oligonucleotide
acucggguuccaucgaagu

SEQ ID NO: 2626720 - RNA, 19 nt, Artificial Sequence
  Description of Artificial Sequence: Synthetic oligonucleotide
augcucaaauggaauaucu

SEQ ID NO: 2626721 - RNA, 19 nt, Artificial Sequence
  Description of Artificial Sequence: Synthetic oligonucleotide
guccguguagacugugugc

SEQ ID NO: 2626722 - RNA, 19 nt, Artificial Sequence
  Description of Artificial Sequence: Synthetic oligonucleotide
aggacuguacacucggguu

SEQ ID NO: 2626723 - RNA, 19 nt, Artificial Sequence
  Description of Artificial Sequence: Synthetic oligonucleotide
caaauggaauaucuccaca

SEQ ID NO: 2626724 - RNA, 19 nt, Artificial Sequence
  Description of Artificial Sequence: Synthetic oligonucleotide
ggccagacaccauuuaaug

SEQ ID NO: 2626725 - RNA, 19 nt, Artificial Sequence
  Description of Artificial Sequence: Synthetic oligonucleotide
uuucagaaaggcugcuauu

SEQ ID NO: 2626726 - RNA, 19 nt, Artificial Sequence
  Description of Artificial Sequence: Synthetic oligonucleotide
gacaggagcauccccaccu

SEQ ID NO: 2626727 - RNA, 19 nt, Artificial Sequence
  Description of Artificial Sequence: Synthetic oligonucleotide
aucgaugguagcgaaucca

SEQ ID NO: 2626728 - RNA, 19 nt, Artificial Sequence
  Description of Artificial Sequence: Synthetic oligonucleotide
gucaugcucaaauggaaua

SEQ ID NO: 2626729 - RNA, 19 nt, Artificial Sequence
  Description of Artificial Sequence: Synthetic oligonucleotide
ggauuucuucgaaggaugg

SEQ ID NO: 2626730 - RNA, 19 nt, Artificial Sequence
  Description of Artificial Sequence: Synthetic oligonucleotide
agagacucuuugccugaag

SEQ ID NO: 2626731 - RNA, 19 nt, Artificial Sequence
  Description of Artificial Sequence: Synthetic oligonucleotide
acaggagcauccccaccuc

SEQ ID NO: 2626732 - RNA, 19 nt, Artificial Sequence
  Description of Artificial Sequence: Synthetic oligonucleotide
ugggacgagcagcaacggc

SEQ ID NO: 2626733 - RNA, 19 nt, Artificial Sequence
  Description of Artificial Sequence: Synthetic oligonucleotide
uagugugcaggucgcugca

SEQ ID NO: 2626734 - RNA, 19 nt, Artificial Sequence
  Description of Artificial Sequence: Synthetic oligonucleotide
acuugacccuugaugaucu

SEQ ID NO: 2626735 - RNA, 19 nt, Artificial Sequence
  Description of Artificial Sequence: Synthetic oligonucleotide
aucgaaguccguguagacu

SEQ ID NO: 2626736 - RNA, 19 nt, Artificial Sequence
  Description of Artificial Sequence: Synthetic oligonucleotide
augguaucgaugguagcga

SEQ ID NO: 2626737 - RNA, 19 nt, Artificial Sequence
  Description of Artificial Sequence: Synthetic oligonucleotide
gcugggacgagcagcaacg

SEQ ID NO: 2626738 - RNA, 19 nt, Artificial Sequence
  Description of Artificial Sequence: Synthetic oligonucleotide
acgagcagcaacggcgacg

SEQ ID NO: 2626739 - RNA, 19 nt, Artificial Sequence
  Description of Artificial Sequence: Synthetic oligonucleotide
guagcgaauccacucugga

SEQ ID NO: 2626740 - RNA, 19 nt, Artificial Sequence
  Description of Artificial Sequence: Synthetic oligonucleotide
uacacucggguuccaucga

SEQ ID NO: 2626741 - RNA, 19 nt, Artificial Sequence
  Description of Artificial Sequence: Synthetic oligonucleotide
cgaucugauggucucaggg

SEQ ID NO: 2626742 - RNA, 19 nt, Artificial Sequence
  Description of Artificial Sequence: Synthetic oligonucleotide
ugaucuuggacaggagcau

SEQ ID NO: 2626743 - RNA, 19 nt, Artificial Sequence
  Description of Artificial Sequence: Synthetic oligonucleotide
gacgcggaugcccgaguag

SEQ ID NO: 2626744 - RNA, 19 nt, Artificial Sequence
  Description of Artificial Sequence: Synthetic oligonucleotide
caugcucaaauggaauauc

SEQ ID NO: 2626745 - RNA, 19 nt, Artificial Sequence
  Description of Artificial Sequence: Synthetic oligonucleotide
caacagcgggcccaccugg

SEQ ID NO: 2626746 - RNA, 19 nt, Artificial Sequence
  Description of Artificial Sequence: Synthetic oligonucleotide
caucgaaguccguguagac

SEQ ID NO: 2626747 - RNA, 19 nt, Artificial Sequence
  Description of Artificial Sequence: Synthetic oligonucleotide
guagacugugugccaccgg

SEQ ID NO: 2626748 - RNA, 19 nt, Artificial Sequence
  Description of Artificial Sequence: Synthetic oligonucleotide
gagccgaagccaccgcugc

SEQ ID NO: 2626749 - RNA, 19 nt, Artificial Sequence
  Description of Artificial Sequence: Synthetic oligonucleotide
gaccgagccgaagccaccg

SEQ ID NO: 2626750 - RNA, 19 nt, Artificial Sequence
  Description of Artificial Sequence: Synthetic oligonucleotide
gcuggcauucugaagagac

SEQ ID NO: 2626751 - RNA, 19 nt, Artificial Sequence
  Description of Artificial Sequence: Synthetic oligonucleotide
agggccagacaccauuuaa

SEQ ID NO: 2626752 - RNA, 19 nt, Artificial Sequence
  Description of Artificial Sequence: Synthetic oligonucleotide
cagaccgcagccgaccugc

SEQ ID NO: 2626753 - RNA, 19 nt, Artificial Sequence
  Description of Artificial Sequence: Synthetic oligonucleotide
uugcccggcgccagcuugg

SEQ ID NO: 2626754 - RNA, 19 nt, Artificial Sequence
  Description of Artificial Sequence: Synthetic oligonucleotide
gguuccaucgaaguccgug

SEQ ID NO: 2626755 - RNA, 19 nt, Artificial Sequence
  Description of Artificial Sequence: Synthetic oligonucleotide
agaacacuugacccuugau

SEQ ID NO: 2626756 - RNA, 19 nt, Artificial Sequence
  Description of Artificial Sequence: Synthetic oligonucleotide
ucgaaggauggccgaucug

SEQ ID NO: 2626757 - RNA, 19 nt, Artificial Sequence
  Description of Artificial Sequence: Synthetic oligonucleotide
uaggcugcgcaggugaauc

SEQ ID NO: 2626758 - RNA, 19 nt, Artificial Sequence
  Description of Artificial Sequence: Synthetic oligonucleotide
aggugaaucucagccguug

SEQ ID NO: 2626759 - RNA, 19 nt, Artificial Sequence
  Description of Artificial Sequence: Synthetic oligonucleotide
gaugcccgaguagaccgag

SEQ ID NO: 2626760 - RNA, 19 nt, Artificial Sequence
  Description of Artificial Sequence: Synthetic oligonucleotide
aucucagccguugccuggg

SEQ ID NO: 2626761 - RNA, 19 nt, Artificial Sequence
  Description of Artificial Sequence: Synthetic oligonucleotide
ugcgcaggugaaucucagc

SEQ ID NO: 2626762 - RNA, 19 nt, Artificial Sequence
  Description of Artificial Sequence: Synthetic oligonucleotide
ugguaucgaugguagcgaa

SEQ ID NO: 2626763 - RNA, 19 nt, Artificial Sequence
  Description of Artificial Sequence: Synthetic oligonucleotide
uauuugcugggugccggug

SEQ ID NO: 2626764 - RNA, 19 nt, Artificial Sequence
  Description of Artificial Sequence: Synthetic oligonucleotide
cagggugccgguguggggc

SEQ ID NO: 2626765 - RNA, 19 nt, Artificial Sequence
  Description of Artificial Sequence: Synthetic oligonucleotide
agagcaggauccccaggga

SEQ ID NO: 2626766 - RNA, 19 nt, Artificial Sequence
  Description of Artificial Sequence: Synthetic oligonucleotide
uguuucagaaaggcugcua

SEQ ID NO: 2626767 - RNA, 19 nt, Artificial Sequence
  Description of Artificial Sequence: Synthetic oligonucleotide
agggugccgguguggggcc

SEQ ID NO: 2626768 - RNA, 19 nt, Artificial Sequence
  Description of Artificial Sequence: Synthetic oligonucleotide
guacugcgacuccaggggc

SEQ ID NO: 2626769 - RNA, 19 nt, Artificial Sequence
  Description of Artificial Sequence: Synthetic oligonucleotide
uuccaucgaaguccgugua

SEQ ID NO: 2626770 - RNA, 19 nt, Artificial Sequence
  Description of Artificial Sequence: Synthetic oligonucleotide
uggaugguucuggauuucu

SEQ ID NO: 2626771 - RNA, 19 nt, Artificial Sequence
  Description of Artificial Sequence: Synthetic oligonucleotide
cugcuauuugcugggugcc

SEQ ID NO: 2626772 - RNA, 19 nt, Artificial Sequence
  Description of Artificial Sequence: Synthetic oligonucleotide
cacucggguuccaucgaag

SEQ ID NO: 2626773 - RNA, 19 nt, Artificial Sequence
  Description of Artificial Sequence: Synthetic oligonucleotide
cacuugacccuugaugauc

SEQ ID NO: 2626774 - RNA, 19 nt, Artificial Sequence
  Description of Artificial Sequence: Synthetic oligonucleotide
ggacuguacacucggguuc

SEQ ID NO: 2626775 - RNA, 19 nt, Artificial Sequence
  Description of Artificial Sequence: Synthetic oligonucleotide
ugcauccauggaugguucu

SEQ ID NO: 2626776 - RNA, 19 nt, Artificial Sequence
  Description of Artificial Sequence: Synthetic oligonucleotide
uccccagggaccagaccgc

SEQ ID NO: 2626777 - RNA, 19 nt, Artificial Sequence
  Description of Artificial Sequence: Synthetic oligonucleotide
gaggacuguacacucgggu

SEQ ID NO: 2626778 - RNA, 19 nt, Artificial Sequence
  Description of Artificial Sequence: Synthetic oligonucleotide
accgcagccgaccugccau

SEQ ID NO: 2626779 - RNA, 19 nt, Artificial Sequence
  Description of Artificial Sequence: Synthetic oligonucleotide
gaucuuggacaggagcauc

SEQ ID NO: 2626780 - RNA, 19 nt, Artificial Sequence
  Description of Artificial Sequence: Synthetic oligonucleotide
gcuauuugcugggugccgg

SEQ ID NO: 2626781 - RNA, 19 nt, Artificial Sequence
  Description of Artificial Sequence: Synthetic oligonucleotide
ugccaugguaucgauggua

SEQ ID NO: 2626782 - RNA, 19 nt, Artificial Sequence
  Description of Artificial Sequence: Synthetic oligonucleotide
accgagccgaagccaccgc

SEQ ID NO: 2626783 - RNA, 19 nt, Artificial Sequence
  Description of Artificial Sequence: Synthetic oligonucleotide
ggugaaucucagccguugc

SEQ ID NO: 2626784 - RNA, 19 nt, Artificial Sequence
  Description of Artificial Sequence: Synthetic oligonucleotide
ucuuugccugaagaacacu

SEQ ID NO: 2626785 - RNA, 19 nt, Artificial Sequence
  Description of Artificial Sequence: Synthetic oligonucleotide
guguagacugugugccacc

SEQ ID NO: 2626786 - RNA, 19 nt, Artificial Sequence
  Description of Artificial Sequence: Synthetic oligonucleotide
cucggguuccaucgaaguc

SEQ ID NO: 2626787 - RNA, 19 nt, Artificial Sequence
  Description of Artificial Sequence: Synthetic oligonucleotide
aacggcgacggggcgagcu

SEQ ID NO: 2626788 - RNA, 19 nt, Artificial Sequence
  Description of Artificial Sequence: Synthetic oligonucleotide
aaguugucggcgacgcgga

SEQ ID NO: 2626789 - RNA, 19 nt, Artificial Sequence
  Description of Artificial Sequence: Synthetic oligonucleotide
gccaugguaucgaugguag

SEQ ID NO: 2626790 - RNA, 19 nt, Artificial Sequence
  Description of Artificial Sequence: Synthetic oligonucleotide
ucucagccguugccugggg

SEQ ID NO: 2626791 - RNA, 19 nt, Artificial Sequence
  Description of Artificial Sequence: Synthetic oligonucleotide
gaagaacacuugacccuug

SEQ ID NO: 2626792 - RNA, 19 nt, Artificial Sequence
  Description of Artificial Sequence: Synthetic oligonucleotide
acacuugacccuugaugau

SEQ ID NO: 2626793 - RNA, 19 nt, Artificial Sequence
  Description of Artificial Sequence: Synthetic oligonucleotide
ggggaaggagaacauccug

SEQ ID NO: 2626794 - RNA, 19 nt, Artificial Sequence
  Description of Artificial Sequence: Synthetic oligonucleotide
cugaagagacucuuugccu

SEQ ID NO: 2626795 - RNA, 19 nt, Artificial Sequence
  Description of Artificial Sequence: Synthetic oligonucleotide
gaccagaccgcagccgacc

SEQ ID NO: 2626796 - RNA, 19 nt, Artificial Sequence
  Description of Artificial Sequence: Synthetic oligonucleotide
aaguccguguagacugugu

SEQ ID NO: 2626797 - RNA, 19 nt, Artificial Sequence
  Description of Artificial Sequence: Synthetic oligonucleotide
gacccuugaugaucucuuc

SEQ ID NO: 2626798 - RNA, 19 nt, Artificial Sequence
  Description of Artificial Sequence: Synthetic oligonucleotide
gaaguccguguagacugug

SEQ ID NO: 2626799 - RNA, 19 nt, Artificial Sequence
  Description of Artificial Sequence: Synthetic oligonucleotide
ucuucgaaggauggccgau

SEQ ID NO: 2626800 - RNA, 19 nt, Artificial Sequence
  Description of Artificial Sequence: Synthetic oligonucleotide
accauaucauagagcagga

SEQ ID NO: 2626801 - RNA, 19 nt, Artificial Sequence
  Description of Artificial Sequence: Synthetic oligonucleotide
guuccaucgaaguccgugu

SEQ ID NO: 2626802 - RNA, 19 nt, Artificial Sequence
  Description of Artificial Sequence: Synthetic oligonucleotide
cugcauccauggaugguuc

SEQ ID NO: 2626803 - RNA, 19 nt, Artificial Sequence
  Description of Artificial Sequence: Synthetic oligonucleotide
agaccauaucauagagcag

SEQ ID NO: 2626804 - RNA, 19 nt, Artificial Sequence
  Description of Artificial Sequence: Synthetic oligonucleotide
cugcgcaggugaaucucag

SEQ ID NO: 2626805 - RNA, 19 nt, Artificial Sequence
  Description of Artificial Sequence: Synthetic oligonucleotide
gaauccacucuggaggacu

SEQ ID NO: 2626806 - RNA, 19 nt, Artificial Sequence
  Description of Artificial Sequence: Synthetic oligonucleotide
gucgcugcagggcgcggcg

SEQ ID NO: 2626807 - RNA, 19 nt, Artificial Sequence
  Description of Artificial Sequence: Synthetic oligonucleotide
caggagcauccccaccucc

SEQ ID NO: 2626808 - RNA, 19 nt, Artificial Sequence
  Description of Artificial Sequence: Synthetic oligonucleotide
accggcaaguugucggcga

SEQ ID NO: 2626809 - RNA, 19 nt, Artificial Sequence
  Description of Artificial Sequence: Synthetic oligonucleotide
cccggcgccagcuugguag

SEQ ID NO: 2626810 - RNA, 19 nt, Artificial Sequence
  Description of Artificial Sequence: Synthetic oligonucleotide
guugucggcgacgcggaug

SEQ ID NO: 2626811 - RNA, 19 nt, Artificial Sequence
  Description of Artificial Sequence: Synthetic oligonucleotide
uggccgaucugauggucuc

SEQ ID NO: 2626812 - RNA, 19 nt, Artificial Sequence
  Description of Artificial Sequence: Synthetic oligonucleotide
auggucucagggccagaca

SEQ ID NO: 2626813 - RNA, 19 nt, Artificial Sequence
  Description of Artificial Sequence: Synthetic oligonucleotide
ugggugccggugauaggcu

SEQ ID NO: 2626814 - RNA, 19 nt, Artificial Sequence
  Description of Artificial Sequence: Synthetic oligonucleotide
gcggccggggcucagacug

SEQ ID NO: 2626815 - RNA, 19 nt, Artificial Sequence
  Description of Artificial Sequence: Synthetic oligonucleotide
cugauggucucagggccag

SEQ ID NO: 2626816 - RNA, 19 nt, Artificial Sequence
  Description of Artificial Sequence: Synthetic oligonucleotide
cggaugcccgaguagaccg

SEQ ID NO: 2626817 - RNA, 19 nt, Artificial Sequence
  Description of Artificial Sequence: Synthetic oligonucleotide
cucuucgucaugcucaaau

SEQ ID NO: 2626818 - RNA, 19 nt, Artificial Sequence
  Description of Artificial Sequence: Synthetic oligonucleotide
ggcaaguugucggcgacgc

SEQ ID NO: 2626819 - RNA, 19 nt, Artificial Sequence
  Description of Artificial Sequence: Synthetic oligonucleotide
gucucagggccagacacca

SEQ ID NO: 2626820 - RNA, 19 nt, Artificial Sequence
  Description of Artificial Sequence: Synthetic oligonucleotide
agaccgagccgaagccacc

SEQ ID NO: 2626821 - RNA, 19 nt, Artificial Sequence
  Description of Artificial Sequence: Synthetic oligonucleotide
ucuuugcccggcgccagcu

SEQ ID NO: 2626822 - RNA, 19 nt, Artificial Sequence
  Description of Artificial Sequence: Synthetic oligonucleotide
gguagugugcaggucgcug

SEQ ID NO: 2626823 - RNA, 19 nt, Artificial Sequence
  Description of Artificial Sequence: Synthetic oligonucleotide
aagccaccgcugcccaaca

SEQ ID NO: 2626824 - RNA, 19 nt, Artificial Sequence
  Description of Artificial Sequence: Synthetic oligonucleotide
acacucggguuccaucgaa

SEQ ID NO: 2626825 - RNA, 19 nt, Artificial Sequence
  Description of Artificial Sequence: Synthetic oligonucleotide
gggcccaccugguacugcg

SEQ ID NO: 2626826 - RNA, 19 nt, Artificial Sequence
  Description of Artificial Sequence: Synthetic oligonucleotide
aagagacucuuugccugaa

SEQ ID NO: 2626827 - RNA, 19 nt, Artificial Sequence
  Description of Artificial Sequence: Synthetic oligonucleotide
cuucgaaggauggccgauc

SEQ ID NO: 2626828 - RNA, 19 nt, Artificial Sequence
  Description of Artificial Sequence: Synthetic oligonucleotide
gauggccgaucugaugguc

SEQ ID NO: 2626829 - RNA, 19 nt, Artificial Sequence
  Description of Artificial Sequence: Synthetic oligonucleotide
agcgggcccaccugguacu

SEQ ID NO: 2626830 - RNA, 19 nt, Artificial Sequence
  Description of Artificial Sequence: Synthetic oligonucleotide
accagaccgcagccgaccu

SEQ ID NO: 2626831 - RNA, 19 nt, Artificial Sequence
  Description of Artificial Sequence: Synthetic oligonucleotide
acgcggaugcccgaguaga

SEQ ID NO: 2626832 - RNA, 19 nt, Artificial Sequence
  Description of Artificial Sequence: Synthetic oligonucleotide
agccguugccuggggaagg

SEQ ID NO: 2626833 - RNA, 19 nt, Artificial Sequence
  Description of Artificial Sequence: Synthetic oligonucleotide
uccugcauccauggauggu

SEQ ID NO: 2626834 - RNA, 19 nt, Artificial Sequence
  Description of Artificial Sequence: Synthetic oligonucleotide
gugccggugauaggcugcg

SEQ ID NO: 2626835 - RNA, 19 nt, Artificial Sequence
  Description of Artificial Sequence: Synthetic oligonucleotide
gacuccaggggcuccuucu

SEQ ID NO: 2626836 - RNA, 19 nt, Artificial Sequence
  Description of Artificial Sequence: Synthetic oligonucleotide
cagcgggcccaccugguac

SEQ ID NO: 2626837 - RNA, 19 nt, Artificial Sequence
  Description of Artificial Sequence: Synthetic oligonucleotide
gcagcaacggcgacggggc

SEQ ID NO: 2626838 - RNA, 19 nt, Artificial Sequence
  Description of Artificial Sequence: Synthetic oligonucleotide
auggccgaucugauggucu

SEQ ID NO: 2626839 - RNA, 19 nt, Artificial Sequence
  Description of Artificial Sequence: Synthetic oligonucleotide
cugggacgagcagcaacgg

SEQ ID NO: 2626840 - RNA, 19 nt, Artificial Sequence
  Description of Artificial Sequence: Synthetic oligonucleotide
guagaccgagccgaagcca

SEQ ID NO: 2626841 - RNA, 19 nt, Artificial Sequence
  Description of Artificial Sequence: Synthetic oligonucleotide
cauggaugguucuggauuu

SEQ ID NO: 2626842 - RNA, 19 nt, Artificial Sequence
  Description of Artificial Sequence: Synthetic oligonucleotide
cgcaggugaaucucagccg

SEQ ID NO: 2626843 - RNA, 19 nt, Artificial Sequence
  Description of Artificial Sequence: Synthetic oligonucleotide
gaaggagaacauccugcau

SEQ ID NO: 2626844 - RNA, 19 nt, Artificial Sequence
  Description of Artificial Sequence: Synthetic oligonucleotide
gucggcgacgcggaugccc

SEQ ID NO: 2626845 - RNA, 19 nt, Artificial Sequence
  Description of Artificial Sequence: Synthetic oligonucleotide
ggcugcuauuugcugggug

SEQ ID NO: 2626846 - RNA, 19 nt, Artificial Sequence
  Description of Artificial Sequence: Synthetic oligonucleotide
ugcgccggcggccggggcu

SEQ ID NO: 2626847 - RNA, 19 nt, Artificial Sequence
  Description of Artificial Sequence: Synthetic oligonucleotide
ggaguugaucuuggacagg

SEQ ID NO: 2626848 - RNA, 19 nt, Artificial Sequence
  Description of Artificial Sequence: Synthetic oligonucleotide
ccuugaugaucucuucguc

SEQ ID NO: 2626849 - RNA, 19 nt, Artificial Sequence
  Description of Artificial Sequence: Synthetic oligonucleotide
gacggggcgagcuggggcu

SEQ ID NO: 2626850 - RNA, 19 nt, Artificial Sequence
  Description of Artificial Sequence: Synthetic oligonucleotide
aacagcgggcccaccuggu

SEQ ID NO: 2626851 - RNA, 19 nt, Artificial Sequence
  Description of Artificial Sequence: Synthetic oligonucleotide
gugcaggucgcugcagggc

SEQ ID NO: 2626852 - RNA, 19 nt, Artificial Sequence
  Description of Artificial Sequence: Synthetic oligonucleotide
cgagcagcaacggcgacgg

SEQ ID NO: 2626853 - RNA, 19 nt, Artificial Sequence
  Description of Artificial Sequence: Synthetic oligonucleotide
gggcgcggcgcgcaggugg

SEQ ID NO: 2626854 - RNA, 19 nt, Artificial Sequence
  Description of Artificial Sequence: Synthetic oligonucleotide
augcccgaguagaccgagc

SEQ ID NO: 2626855 - RNA, 19 nt, Artificial Sequence
  Description of Artificial Sequence: Synthetic oligonucleotide
gcgaauccacucuggagga

SEQ ID NO: 2626856 - RNA, 19 nt, Artificial Sequence
  Description of Artificial Sequence: Synthetic oligonucleotide
gguguggggccggugcugg

SEQ ID NO: 2626857 - RNA, 19 nt, Artificial Sequence
  Description of Artificial Sequence: Synthetic oligonucleotide
gacgagcagcaacggcgac

SEQ ID NO: 2626858 - RNA, 19 nt, Artificial Sequence
  Description of Artificial Sequence: Synthetic oligonucleotide
gcaggugaaucucagccgu

SEQ ID NO: 2626859 - RNA, 19 nt, Artificial Sequence
  Description of Artificial Sequence: Synthetic oligonucleotide
gugauaggcugcgcaggug

SEQ ID NO: 2626860 - RNA, 19 nt, Artificial Sequence
  Description of Artificial Sequence: Synthetic oligonucleotide
cucuuugcccggcgccagc

SEQ ID NO: 2626861 - RNA, 19 nt, Artificial Sequence
  Description of Artificial Sequence: Synthetic oligonucleotide
ccggugauaggcugcgcag

SEQ ID NO: 2626862 - RNA, 19 nt, Artificial Sequence
  Description of Artificial Sequence: Synthetic oligonucleotide
ggaggacuguacacucggg

SEQ ID NO: 2626863 - RNA, 19 nt, Artificial Sequence
  Description of Artificial Sequence: Synthetic oligonucleotide
caccggcaaguugucggcg

SEQ ID NO: 2626864 - RNA, 19 nt, Artificial Sequence
  Description of Artificial Sequence: Synthetic oligonucleotide
gggaccagaccgcagccga

SEQ ID NO: 2626865 - RNA, 19 nt, Artificial Sequence
  Description of Artificial Sequence: Synthetic oligonucleotide
cuugacccuugaugaucuc

SEQ ID NO: 2626866 - RNA, 19 nt, Artificial Sequence
  Description of Artificial Sequence: Synthetic oligonucleotide
ccacagaccauaucauaga

SEQ ID NO: 2626867 - RNA, 19 nt, Artificial Sequence
  Description of Artificial Sequence: Synthetic oligonucleotide
acggcgacggggcgagcug

SEQ ID NO: 2626868 - RNA, 19 nt, Artificial Sequence
  Description of Artificial Sequence: Synthetic oligonucleotide
caggucgcugcagggcgcg

SEQ ID NO: 2626869 - RNA, 19 nt, Artificial Sequence
  Description of Artificial Sequence: Synthetic oligonucleotide
gcaaguugucggcgacgcg

SEQ ID NO: 2626870 - RNA, 19 nt, Artificial Sequence
  Description of Artificial Sequence: Synthetic oligonucleotide
gauaggcugcgcaggugaa

SEQ ID NO: 2626871 - RNA, 19 nt, Artificial Sequence
  Description of Artificial Sequence: Synthetic oligonucleotide
ggggcuccuucucuuugcc

SEQ ID NO: 2626872 - RNA, 19 nt, Artificial Sequence
  Description of Artificial Sequence: Synthetic oligonucleotide
cagccguugccuggggaag

SEQ ID NO: 2626873 - RNA, 19 nt, Artificial Sequence
  Description of Artificial Sequence: Synthetic oligonucleotide
uugccuggggaaggagaac

SEQ ID NO: 2626874 - RNA, 19 nt, Artificial Sequence
  Description of Artificial Sequence: Synthetic oligonucleotide
ccaugguaucgaugguagc

SEQ ID NO: 2626875 - RNA, 19 nt, Artificial Sequence
  Description of Artificial Sequence: Synthetic oligonucleotide
ggugccggugauaggcugc

SEQ ID NO: 2626876 - RNA, 19 nt, Artificial Sequence
  Description of Artificial Sequence: Synthetic oligonucleotide
auaggcugcgcaggugaau

SEQ ID NO: 2626877 - RNA, 19 nt, Artificial Sequence
  Description of Artificial Sequence: Synthetic oligonucleotide
ugguagugugcaggucgcu

SEQ ID NO: 2626878 - RNA, 19 nt, Artificial Sequence
  Description of Artificial Sequence: Synthetic oligonucleotide
ccuucucuuugcccggcgc

SEQ ID NO: 2626879 - RNA, 19 nt, Artificial Sequence
  Description of Artificial Sequence: Synthetic oligonucleotide
ggacaggagcauccccacc

SEQ ID NO: 2626880 - RNA, 19 nt, Artificial Sequence
  Description of Artificial Sequence: Synthetic oligonucleotide
gccgguguggggccggugc

SEQ ID NO: 2626881 - RNA, 19 nt, Artificial Sequence
  Description of Artificial Sequence: Synthetic oligonucleotide
gccggugauaggcugcgca

SEQ ID NO: 2626882 - RNA, 19 nt, Artificial Sequence
  Description of Artificial Sequence: Synthetic oligonucleotide
ccaccggcaaguugucggc

SEQ ID NO: 2626883 - RNA, 19 nt, Artificial Sequence
  Description of Artificial Sequence: Synthetic oligonucleotide
cauucugaagagacucuuu

SEQ ID NO: 2626884 - RNA, 19 nt, Artificial Sequence
  Description of Artificial Sequence: Synthetic oligonucleotide
cggguuccaucgaaguccg

SEQ ID NO: 2626885 - RNA, 19 nt, Artificial Sequence
  Description of Artificial Sequence: Synthetic oligonucleotide
guggggccggugcugggac

SEQ ID NO: 2626886 - RNA, 19 nt, Artificial Sequence
  Description of Artificial Sequence: Synthetic oligonucleotide
accugccaugguaucgaug

SEQ ID NO: 2626887 - RNA, 19 nt, Artificial Sequence
  Description of Artificial Sequence: Synthetic oligonucleotide
cagcaacggcgacggggcg

SEQ ID NO: 2626888 - RNA, 19 nt, Artificial Sequence
  Description of Artificial Sequence: Synthetic oligonucleotide
ggugauaggcugcgcaggu

SEQ ID NO: 2626889 - RNA, 19 nt, Artificial Sequence
  Description of Artificial Sequence: Synthetic oligonucleotide
gcgcaggugggccagggga

SEQ ID NO: 2626890 - RNA, 19 nt, Artificial Sequence
  Description of Artificial Sequence: Synthetic oligonucleotide
cgaaggauggccgaucuga

SEQ ID NO: 2626891 - RNA, 19 nt, Artificial Sequence
  Description of Artificial Sequence: Synthetic oligonucleotide
ccgaccugccaugguaucg

SEQ ID NO: 2626892 - RNA, 19 nt, Artificial Sequence
  Description of Artificial Sequence: Synthetic oligonucleotide
gaccgcagccgaccugcca

SEQ ID NO: 2626893 - RNA, 19 nt, Artificial Sequence
  Description of Artificial Sequence: Synthetic oligonucleotide
gcaacggcgacggggcgag

SEQ ID NO: 2626894 - RNA, 19 nt, Artificial Sequence
  Description of Artificial Sequence: Synthetic oligonucleotide
gggugccggugauaggcug

SEQ ID NO: 2626895 - RNA, 19 nt, Artificial Sequence
  Description of Artificial Sequence: Synthetic oligonucleotide
agaccgcagccgaccugcc

SEQ ID NO: 2626896 - RNA, 19 nt, Artificial Sequence
  Description of Artificial Sequence: Synthetic oligonucleotide
gaauaucuccacagaccau

SEQ ID NO: 2626897 - RNA, 19 nt, Artificial Sequence
  Description of Artificial Sequence: Synthetic oligonucleotide
acagcgggcccaccuggua

SEQ ID NO: 2626898 - RNA, 19 nt, Artificial Sequence
  Description of Artificial Sequence: Synthetic oligonucleotide
gaaggauggccgaucugau

SEQ ID NO: 2626899 - RNA, 19 nt, Artificial Sequence
  Description of Artificial Sequence: Synthetic oligonucleotide
aguugucggcgacgcggau

SEQ ID NO: 2626900 - RNA, 19 nt, Artificial Sequence
  Description of Artificial Sequence: Synthetic oligonucleotide
gagcagcaacggcgacggg

SEQ ID NO: 2626901 - RNA, 19 nt, Artificial Sequence
  Description of Artificial Sequence: Synthetic oligonucleotide
agccgaccugccaugguau

SEQ ID NO: 2626902 - RNA, 19 nt, Artificial Sequence
  Description of Artificial Sequence: Synthetic oligonucleotide
ugcccaacagcgggcccac

SEQ ID NO: 2626903 - RNA, 19 nt, Artificial Sequence
  Description of Artificial Sequence: Synthetic oligonucleotide
ccaacagcgggcccaccug

SEQ ID NO: 2626904 - RNA, 19 nt, Artificial Sequence
  Description of Artificial Sequence: Synthetic oligonucleotide
gcggaugcccgaguagacc

SEQ ID NO: 2626905 - RNA, 19 nt, Artificial Sequence
  Description of Artificial Sequence: Synthetic oligonucleotide
gcgccagcuugguagugug

SEQ ID NO: 2626906 - RNA, 19 nt, Artificial Sequence
  Description of Artificial Sequence: Synthetic oligonucleotide
ugauggucucagggccaga

SEQ ID NO: 2626907 - RNA, 19 nt, Artificial Sequence
  Description of Artificial Sequence: Synthetic oligonucleotide
cagccgaccugccauggua

SEQ ID NO: 2626908 - RNA, 19 nt, Artificial Sequence
  Description of Artificial Sequence: Synthetic oligonucleotide
ccgaucugauggucucagg

SEQ ID NO: 2626909 - RNA, 19 nt, Artificial Sequence
  Description of Artificial Sequence: Synthetic oligonucleotide
cucagccguugccugggga

SEQ ID NO: 2626910 - RNA, 19 nt, Artificial Sequence
  Description of Artificial Sequence: Synthetic oligonucleotide
gcugggugccggugauagg

SEQ ID NO: 2626911 - RNA, 19 nt, Artificial Sequence
  Description of Artificial Sequence: Synthetic oligonucleotide
cccgaguagaccgagccga

SEQ ID NO: 2626912 - RNA, 19 nt, Artificial Sequence
  Description of Artificial Sequence: Synthetic oligonucleotide
cugcccaacagcgggccca

SEQ ID NO: 2626913 - RNA, 19 nt, Artificial Sequence
  Description of Artificial Sequence: Synthetic oligonucleotide
ccaucgaaguccguguaga

SEQ ID NO: 2626914 - RNA, 19 nt, Artificial Sequence
  Description of Artificial Sequence: Synthetic oligonucleotide
ggacgagcagcaacggcga

SEQ ID NO: 2626915 - RNA, 19 nt, Artificial Sequence
  Description of Artificial Sequence: Synthetic oligonucleotide
cguguagacugugugccac

SEQ ID NO: 2626916 - RNA, 19 nt, Artificial Sequence
  Description of Artificial Sequence: Synthetic oligonucleotide
ugugugccaccggcaaguu

SEQ ID NO: 2626917 - RNA, 19 nt, Artificial Sequence
  Description of Artificial Sequence: Synthetic oligonucleotide
gcccaccugguacugcgac

SEQ ID NO: 2626918 - RNA, 19 nt, Artificial Sequence
  Description of Artificial Sequence: Synthetic oligonucleotide
acuguacacucggguucca

SEQ ID NO: 2626919 - RNA, 19 nt, Artificial Sequence
  Description of Artificial Sequence: Synthetic oligonucleotide
ucucuucgucaugcucaaa

SEQ ID NO: 2626920 - RNA, 19 nt, Artificial Sequence
  Description of Artificial Sequence: Synthetic oligonucleotide
ucgcugcagggcgcggcgc

SEQ ID NO: 2626921 - RNA, 19 nt, Artificial Sequence
  Description of Artificial Sequence: Synthetic oligonucleotide
cgagccgaagccaccgcug

SEQ ID NO: 2626922 - RNA, 19 nt, Artificial Sequence
  Description of Artificial Sequence: Synthetic oligonucleotide
ugccggugauaggcugcgc

SEQ ID NO: 2626923 - RNA, 19 nt, Artificial Sequence
  Description of Artificial Sequence: Synthetic oligonucleotide
cggugauaggcugcgcagg

SEQ ID NO: 2626924 - RNA, 19 nt, Artificial Sequence
  Description of Artificial Sequence: Synthetic oligonucleotide
ggccggggcucagacugcg

SEQ ID NO: 2626925 - RNA, 19 nt, Artificial Sequence
  Description of Artificial Sequence: Synthetic oligonucleotide
ggcgacgcggaugcccgag

SEQ ID NO: 2626926 - RNA, 19 nt, Artificial Sequence
  Description of Artificial Sequence: Synthetic oligonucleotide
ggucgcugcagggcgcggc

SEQ ID NO: 2626927 - RNA, 19 nt, Artificial Sequence
  Description of Artificial Sequence: Synthetic oligonucleotide
ccagggugccggugugggg

SEQ ID NO: 2626928 - RNA, 19 nt, Artificial Sequence
  Description of Artificial Sequence: Synthetic oligonucleotide
aggcugcuauuugcugggu

SEQ ID NO: 2626929 - RNA, 19 nt, Artificial Sequence
  Description of Artificial Sequence: Synthetic oligonucleotide
ggugccgguguggggccgg

SEQ ID NO: 2626930 - RNA, 19 nt, Artificial Sequence
  Description of Artificial Sequence: Synthetic oligonucleotide
gcugcccaacagcgggccc

SEQ ID NO: 2626931 - RNA, 19 nt, Artificial Sequence
  Description of Artificial Sequence: Synthetic oligonucleotide
ccggcaaguugucggcgac

SEQ ID NO: 2626932 - RNA, 19 nt, Artificial Sequence
  Description of Artificial Sequence: Synthetic oligonucleotide
gccggugcugggacgagca

SEQ ID NO: 2626933 - RNA, 19 nt, Artificial Sequence
  Description of Artificial Sequence: Synthetic oligonucleotide
ggcgacggggcgagcuggg

SEQ ID NO: 2626934 - RNA, 19 nt, Artificial Sequence
  Description of Artificial Sequence: Synthetic oligonucleotide
gaccugccaugguaucgau

SEQ ID NO: 2626935 - RNA, 19 nt, Artificial Sequence
  Description of Artificial Sequence: Synthetic oligonucleotide
gggccagacaccauuuaau

SEQ ID NO: 2626936 - RNA, 19 nt, Artificial Sequence
  Description of Artificial Sequence: Synthetic oligonucleotide
ggauggccgaucugauggu

SEQ ID NO: 2626937 - RNA, 19 nt, Artificial Sequence
  Description of Artificial Sequence: Synthetic oligonucleotide
ggagaacauccugcaucca

SEQ ID NO: 2626938 - RNA, 19 nt, Artificial Sequence
  Description of Artificial Sequence: Synthetic oligonucleotide
gccgaccugccaugguauc

SEQ ID NO: 2626939 - RNA, 19 nt, Artificial Sequence
  Description of Artificial Sequence: Synthetic oligonucleotide
ugcccggcgccagcuuggu

SEQ ID NO: 2626940 - RNA, 19 nt, Artificial Sequence
  Description of Artificial Sequence: Synthetic oligonucleotide
acggggcgagcuggggcug

SEQ ID NO: 2626941 - RNA, 19 nt, Artificial Sequence
  Description of Artificial Sequence: Synthetic oligonucleotide
cgacggggcgagcuggggc

SEQ ID NO: 2626942 - RNA, 19 nt, Artificial Sequence
  Description of Artificial Sequence: Synthetic oligonucleotide
gcaggucgcugcagggcgc

SEQ ID NO: 2626943 - RNA, 19 nt, Artificial Sequence
  Description of Artificial Sequence: Synthetic oligonucleotide
gguaucgaugguagcgaau

SEQ ID NO: 2626944 - RNA, 19 nt, Artificial Sequence
  Description of Artificial Sequence: Synthetic oligonucleotide
ggaccagaccgcagccgac

SEQ ID NO: 2626945 - RNA, 19 nt, Artificial Sequence
  Description of Artificial Sequence: Synthetic oligonucleotide
ccagaccgcagccgaccug

SEQ ID NO: 2626946 - RNA, 19 nt, Artificial Sequence
  Description of Artificial Sequence: Synthetic oligonucleotide
cgcggaugcccgaguagac

SEQ ID NO: 2626947 - RNA, 19 nt, Artificial Sequence
  Description of Artificial Sequence: Synthetic oligonucleotide
ccguguagacugugugcca

SEQ ID NO: 2626948 - RNA, 19 nt, Artificial Sequence
  Description of Artificial Sequence: Synthetic oligonucleotide
cugccaugguaucgauggu

SEQ ID NO: 2626949 - RNA, 19 nt, Artificial Sequence
  Description of Artificial Sequence: Synthetic oligonucleotide
gcgacggggcgagcugggg

SEQ ID NO: 2626950 - RNA, 19 nt, Artificial Sequence
  Description of Artificial Sequence: Synthetic oligonucleotide
ggggcgagcuggggcugcg

SEQ ID NO: 2626951 - RNA, 19 nt, Artificial Sequence
  Description of Artificial Sequence: Synthetic oligonucleotide
ccugcauccauggaugguu

SEQ ID NO: 2626952 - RNA, 19 nt, Artificial Sequence
  Description of Artificial Sequence: Synthetic oligonucleotide
ggccgaucugauggucuca

SEQ ID NO: 2626953 - RNA, 19 nt, Artificial Sequence
  Description of Artificial Sequence: Synthetic oligonucleotide
cgccagcuugguagugugc

SEQ ID NO: 2626954 - RNA, 19 nt, Artificial Sequence
  Description of Artificial Sequence: Synthetic oligonucleotide
cggcaaguugucggcgacg

SEQ ID NO: 2626955 - RNA, 19 nt, Artificial Sequence
  Description of Artificial Sequence: Synthetic oligonucleotide
ggccggugcugggacgagc

SEQ ID NO: 2626956 - RNA, 19 nt, Artificial Sequence
  Description of Artificial Sequence: Synthetic oligonucleotide
caggugaaucucagccguu

SEQ ID NO: 2626957 - RNA, 19 nt, Artificial Sequence
  Description of Artificial Sequence: Synthetic oligonucleotide
ggaugguucuggauuucuu

SEQ ID NO: 2626958 - RNA, 19 nt, Artificial Sequence
  Description of Artificial Sequence: Synthetic oligonucleotide
gcgcgcaggugggccaggg

SEQ ID NO: 2626959 - RNA, 19 nt, Artificial Sequence
  Description of Artificial Sequence: Synthetic oligonucleotide
gcugcagggcgcggcgcgc

SEQ ID NO: 2626960 - RNA, 19 nt, Artificial Sequence
  Description of Artificial Sequence: Synthetic oligonucleotide
gcugcgccggcggccgggg

SEQ ID NO: 2626961 - RNA, 19 nt, Artificial Sequence
  Description of Artificial Sequence: Synthetic oligonucleotide
ccgcagccgaccugccaug

SEQ ID NO: 2626962 - RNA, 19 nt, Artificial Sequence
  Description of Artificial Sequence: Synthetic oligonucleotide
gccguugccuggggaagga

SEQ ID NO: 2626963 - RNA, 19 nt, Artificial Sequence
  Description of Artificial Sequence: Synthetic oligonucleotide
cugcgccggcggccggggc

SEQ ID NO: 2626964 - RNA, 19 nt, Artificial Sequence
  Description of Artificial Sequence: Synthetic oligonucleotide
cugcagggcgcggcgcgca

SEQ ID NO: 2626965 - RNA, 19 nt, Artificial Sequence
  Description of Artificial Sequence: Synthetic oligonucleotide
cccaacagcgggcccaccu

SEQ ID NO: 2626966 - RNA, 19 nt, Artificial Sequence
  Description of Artificial Sequence: Synthetic oligonucleotide
ggcgccagcuugguagugu

SEQ ID NO: 2626967 - RNA, 19 nt, Artificial Sequence
  Description of Artificial Sequence: Synthetic oligonucleotide
cgcagccgaccugccaugg

SEQ ID NO: 2626968 - RNA, 19 nt, Artificial Sequence
  Description of Artificial Sequence: Synthetic oligonucleotide
cgaccugccaugguaucga

SEQ ID NO: 2626969 - RNA, 19 nt, Artificial Sequence
  Description of Artificial Sequence: Synthetic oligonucleotide
ccgaguagaccgagccgaa

SEQ ID NO: 2626970 - RNA, 19 nt, Artificial Sequence
  Description of Artificial Sequence: Synthetic oligonucleotide
ccguugccuggggaaggag

SEQ ID NO: 2626971 - RNA, 19 nt, Artificial Sequence
  Description of Artificial Sequence: Synthetic oligonucleotide
ccgaagccaccgcugccca

SEQ ID NO: 2626972 - RNA, 19 nt, Artificial Sequence
  Description of Artificial Sequence: Synthetic oligonucleotide
cgaugguagcgaauccacu

SEQ ID NO: 2626973 - RNA, 19 nt, Artificial Sequence
  Description of Artificial Sequence: Synthetic oligonucleotide
caacggcgacggggcgagc

SEQ ID NO: 2626974 - RNA, 19 nt, Artificial Sequence
  Description of Artificial Sequence: Synthetic oligonucleotide
cggcgacggggcgagcugg

SEQ ID NO: 2626975 - RNA, 19 nt, Artificial Sequence
  Description of Artificial Sequence: Synthetic oligonucleotide
ggcgcgcaggugggccagg

SEQ ID NO: 2626976 - RNA, 19 nt, Artificial Sequence
  Description of Artificial Sequence: Synthetic oligonucleotide
gcgggcccaccugguacug

SEQ ID NO: 2626977 - RNA, 19 nt, Artificial Sequence
  Description of Artificial Sequence: Synthetic oligonucleotide
gugcugggacgagcagcaa

SEQ ID NO: 2626978 - RNA, 19 nt, Artificial Sequence
  Description of Artificial Sequence: Synthetic oligonucleotide
ggcccaccugguacugcga

SEQ ID NO: 2626979 - RNA, 19 nt, Artificial Sequence
  Description of Artificial Sequence: Synthetic oligonucleotide
cuuugcccggcgccagcuu

SEQ ID NO: 2626980 - RNA, 19 nt, Artificial Sequence
  Description of Artificial Sequence: Synthetic oligonucleotide
cccaccugguacugcgacu

SEQ ID NO: 2626981 - RNA, 19 nt, Artificial Sequence
  Description of Artificial Sequence: Synthetic oligonucleotide
gcagccgaccugccauggu

SEQ ID NO: 2626982 - RNA, 19 nt, Artificial Sequence
  Description of Artificial Sequence: Synthetic oligonucleotide
gggcgagcuggggcugcgc

SEQ ID NO: 2626983 - RNA, 19 nt, Artificial Sequence
  Description of Artificial Sequence: Synthetic oligonucleotide
cgcggcgcgcaggugggcc

SEQ ID NO: 2626984 - RNA, 19 nt, Artificial Sequence
  Description of Artificial Sequence: Synthetic oligonucleotide
ccauaucauagagcaggau

SEQ ID NO: 2626985 - RNA, 19 nt, Artificial Sequence
  Description of Artificial Sequence: Synthetic oligonucleotide
cggccggggcucagacugc

SEQ ID NO: 2626986 - RNA, 19 nt, Artificial Sequence
  Description of Artificial Sequence: Synthetic oligonucleotide
gcgacgcggaugcccgagu

SEQ ID NO: 2626987 - RNA, 19 nt, Artificial Sequence
  Description of Artificial Sequence: Synthetic oligonucleotide
ggcggccggggcucagacu

SEQ ID NO: 2626988 - RNA, 19 nt, Artificial Sequence
  Description of Artificial Sequence: Synthetic oligonucleotide
cggcggccggggcucagac

SEQ ID NO: 2626989 - RNA, 19 nt, Artificial Sequence
  Description of Artificial Sequence: Synthetic oligonucleotide
cgacgcggaugcccgagua

SEQ ID NO: 2626990 - RNA, 19 nt, Artificial Sequence
  Description of Artificial Sequence: Synthetic oligonucleotide
gcccaacagcgggcccacc

SEQ ID NO: 2626991 - RNA, 19 nt, Artificial Sequence
  Description of Artificial Sequence: Synthetic oligonucleotide
gcgccggcggccggggcuc

SEQ ID NO: 2626992 - RNA, 19 nt, Artificial Sequence
  Description of Artificial Sequence: Synthetic oligonucleotide
ccggcgccagcuugguagu

SEQ ID NO: 2626993 - RNA, 19 nt, Artificial Sequence
  Description of Artificial Sequence: Synthetic oligonucleotide
cggggcgagcuggggcugc

SEQ ID NO: 2626994 - RNA, 19 nt, Artificial Sequence
  Description of Artificial Sequence: Synthetic oligonucleotide
gugccgguguggggccggu

SEQ ID NO: 2626995 - RNA, 19 nt, Artificial Sequence
  Description of Artificial Sequence: Synthetic oligonucleotide
gcgcggcgcgcaggugggc

SEQ ID NO: 2626996 - RNA, 19 nt, Artificial Sequence
  Description of Artificial Sequence: Synthetic oligonucleotide
gccggcggccggggcucag

SEQ ID NO: 2626997 - RNA, 19 nt, Artificial Sequence
  Description of Artificial Sequence: Synthetic oligonucleotide
cggcgccagcuugguagug

SEQ ID NO: 2626998 - RNA, 19 nt, Artificial Sequence
  Description of Artificial Sequence: Synthetic oligonucleotide
ggguuccaucgaaguccgu

SEQ ID NO: 2626999 - RNA, 19 nt, Artificial Sequence
  Description of Artificial Sequence: Synthetic oligonucleotide
gcccggcgccagcuuggua

SEQ ID NO: 2627000 - RNA, 19 nt, Artificial Sequence
  Description of Artificial Sequence: Synthetic oligonucleotide
ccggcggccggggcucaga

SEQ ID NO: 2627001 - RNA, 19 nt, Artificial Sequence
  Description of Artificial Sequence: Synthetic oligonucleotide
cgccggcggccggggcuca

SEQ ID NO: 2627002 - RNA, 19 nt, Artificial Sequence
  Description of Artificial Sequence: Synthetic oligonucleotide
aaaacuuugaucuuacugg

SEQ ID NO: 2627003 - RNA, 19 nt, Artificial Sequence
  Description of Artificial Sequence: Synthetic oligonucleotide
guaauuacgguuuaaaucc

SEQ ID NO: 2627004 - RNA, 19 nt, Artificial Sequence
  Description of Artificial Sequence: Synthetic oligonucleotide
aaaauauaaucuaggaagc

SEQ ID NO: 2627005 - RNA, 19 nt, Artificial Sequence
  Description of Artificial Sequence: Synthetic oligonucleotide
aauaguaccacugaguaug

SEQ ID NO: 2627006 - RNA, 19 nt, Artificial Sequence
  Description of Artificial Sequence: Synthetic oligonucleotide
aagacauaaaccauauucc

SEQ ID NO: 2627007 - RNA, 19 nt, Artificial Sequence
  Description of Artificial Sequence: Synthetic oligonucleotide
aaaaucacagccuugcgcu

SEQ ID NO: 2627008 - RNA, 19 nt, Artificial Sequence
  Description of Artificial Sequence: Synthetic oligonucleotide
uucagaauagaacaguggc

SEQ ID NO: 2627009 - RNA, 19 nt, Artificial Sequence
  Description of Artificial Sequence: Synthetic oligonucleotide
uguaauuacgguuuaaauc

SEQ ID NO: 2627010 - RNA, 19 nt, Artificial Sequence
  Description of Artificial Sequence: Synthetic oligonucleotide
aaguugacaauagugaauc

SEQ ID NO: 2627011 - RNA, 19 nt, Artificial Sequence
  Description of Artificial Sequence: Synthetic oligonucleotide
acauaaaccauauuccuag

SEQ ID NO: 2627012 - RNA, 19 nt, Artificial Sequence
  Description of Artificial Sequence: Synthetic oligonucleotide
aaauauaaucuaggaagcc

SEQ ID NO: 2627013 - RNA, 19 nt, Artificial Sequence
  Description of Artificial Sequence: Synthetic oligonucleotide
uugaguauuagugaccugg

SEQ ID NO: 2627014 - RNA, 19 nt, Artificial Sequence
  Description of Artificial Sequence: Synthetic oligonucleotide
ugauugucaagacauaaac

SEQ ID NO: 2627015 - RNA, 19 nt, Artificial Sequence
  Description of Artificial Sequence: Synthetic oligonucleotide
uuucagaauagaacagugg

SEQ ID NO: 2627016 - RNA, 19 nt, Artificial Sequence
  Description of Artificial Sequence: Synthetic oligonucleotide
ucuaggaagccuuucauga

SEQ ID NO: 2627017 - RNA, 19 nt, Artificial Sequence
  Description of Artificial Sequence: Synthetic oligonucleotide
acaauagugaaucuguaga

SEQ ID NO: 2627018 - RNA, 19 nt, Artificial Sequence
  Description of Artificial Sequence: Synthetic oligonucleotide
uauucuugaagguuggugu

SEQ ID NO: 2627019 - RNA, 19 nt, Artificial Sequence
  Description of Artificial Sequence: Synthetic oligonucleotide
acuuugaucuuacuggguc

SEQ ID NO: 2627020 - RNA, 19 nt, Artificial Sequence
  Description of Artificial Sequence: Synthetic oligonucleotide
uugacaauagugaaucugu

SEQ ID NO: 2627021 - RNA, 19 nt, Artificial Sequence
  Description of Artificial Sequence: Synthetic oligonucleotide
ugcuuauuugugaagaggu

SEQ ID NO: 2627022 - RNA, 19 nt, Artificial Sequence
  Description of Artificial Sequence: Synthetic oligonucleotide
ugaaauguccacgucagag

SEQ ID NO: 2627023 - RNA, 19 nt, Artificial Sequence
  Description of Artificial Sequence: Synthetic oligonucleotide
aucuguagacuauuucugc

SEQ ID NO: 2627024 - RNA, 19 nt, Artificial Sequence
  Description of Artificial Sequence: Synthetic oligonucleotide
uuugugaaguugacaauag

SEQ ID NO: 2627025 - RNA, 19 nt, Artificial Sequence
  Description of Artificial Sequence: Synthetic oligonucleotide
uacgguuuaaaucccgucc

SEQ ID NO: 2627026 - RNA, 19 nt, Artificial Sequence
  Description of Artificial Sequence: Synthetic oligonucleotide
caaaacuuugaucuuacug

SEQ ID NO: 2627027 - RNA, 19 nt, Artificial Sequence
  Description of Artificial Sequence: Synthetic oligonucleotide
agcaaaguagcacgugucc

SEQ ID NO: 2627028 - RNA, 19 nt, Artificial Sequence
  Description of Artificial Sequence: Synthetic oligonucleotide
ucagaauagaacaguggcc

SEQ ID NO: 2627029 - RNA, 19 nt, Artificial Sequence
  Description of Artificial Sequence: Synthetic oligonucleotide
aaccauauuccuagcaagc

SEQ ID NO: 2627030 - RNA, 19 nt, Artificial Sequence
  Description of Artificial Sequence: Synthetic oligonucleotide
agucgccuaaaauauaauc

SEQ ID NO: 2627031 - RNA, 19 nt, Artificial Sequence
  Description of Artificial Sequence: Synthetic oligonucleotide
aaaauggcgcccaucuugc

SEQ ID NO: 2627032 - RNA, 19 nt, Artificial Sequence
  Description of Artificial Sequence: Synthetic oligonucleotide
gacaauagugaaucuguag

SEQ ID NO: 2627033 - RNA, 19 nt, Artificial Sequence
  Description of Artificial Sequence: Synthetic oligonucleotide
uguguggaaacugaaaugu

SEQ ID NO: 2627034 - RNA, 19 nt, Artificial Sequence
  Description of Artificial Sequence: Synthetic oligonucleotide
auagcagugagcaaaguag

SEQ ID NO: 2627035 - RNA, 19 nt, Artificial Sequence
  Description of Artificial Sequence: Synthetic oligonucleotide
uguagacuauuucugcuug

SEQ ID NO: 2627036 - RNA, 19 nt, Artificial Sequence
  Description of Artificial Sequence: Synthetic oligonucleotide
auguuaugaaucuuggccu

SEQ ID NO: 2627037 - RNA, 19 nt, Artificial Sequence
  Description of Artificial Sequence: Synthetic oligonucleotide
gaaauaguaccacugagua

SEQ ID NO: 2627038 - RNA, 19 nt, Artificial Sequence
  Description of Artificial Sequence: Synthetic oligonucleotide
aaauguccacgucagagaa

SEQ ID NO: 2627039 - RNA, 19 nt, Artificial Sequence
  Description of Artificial Sequence: Synthetic oligonucleotide
aguauuagugaccuggaaa

SEQ ID NO: 2627040 - RNA, 19 nt, Artificial Sequence
  Description of Artificial Sequence: Synthetic oligonucleotide
ugagucacuguucuucaag

SEQ ID NO: 2627041 - RNA, 19 nt, Artificial Sequence
  Description of Artificial Sequence: Synthetic oligonucleotide
uaauacuugauuuggucuc

SEQ ID NO: 2627042 - RNA, 19 nt, Artificial Sequence
  Description of Artificial Sequence: Synthetic oligonucleotide
aauagugaaucuguagacu

SEQ ID NO: 2627043 - RNA, 19 nt, Artificial Sequence
  Description of Artificial Sequence: Synthetic oligonucleotide
acacguauuuuacaaaacu

SEQ ID NO: 2627044 - RNA, 19 nt, Artificial Sequence
  Description of Artificial Sequence: Synthetic oligonucleotide
uaaucuaggaagccuuuca

SEQ ID NO: 2627045 - RNA, 19 nt, Artificial Sequence
  Description of Artificial Sequence: Synthetic oligonucleotide
cauauuccuagcaagcgug

SEQ ID NO: 2627046 - RNA, 19 nt, Artificial Sequence
  Description of Artificial Sequence: Synthetic oligonucleotide
ugaaguugacaauagugaa

SEQ ID NO: 2627047 - RNA, 19 nt, Artificial Sequence
  Description of Artificial Sequence: Synthetic oligonucleotide
acgguuuaaaucccguccg

SEQ ID NO: 2627048 - RNA, 19 nt, Artificial Sequence
  Description of Artificial Sequence: Synthetic oligonucleotide
ucaaaaucacagccuugcg

SEQ ID NO: 2627049 - RNA, 19 nt, Artificial Sequence
  Description of Artificial Sequence: Synthetic oligonucleotide
agacauaaaccauauuccu

SEQ ID NO: 2627050 - RNA, 19 nt, Artificial Sequence
  Description of Artificial Sequence: Synthetic oligonucleotide
auuagugaccuggaaauag

SEQ ID NO: 2627051 - RNA, 19 nt, Artificial Sequence
  Description of Artificial Sequence: Synthetic oligonucleotide
gauugucaagacauaaacc

SEQ ID NO: 2627052 - RNA, 19 nt, Artificial Sequence
  Description of Artificial Sequence: Synthetic oligonucleotide
uuauaauacuugauuuggu

SEQ ID NO: 2627053 - RNA, 19 nt, Artificial Sequence
  Description of Artificial Sequence: Synthetic oligonucleotide
caaaaucacagccuugcgc

SEQ ID NO: 2627054 - RNA, 19 nt, Artificial Sequence
  Description of Artificial Sequence: Synthetic oligonucleotide
gacuauuucugcuugagua

SEQ ID NO: 2627055 - RNA, 19 nt, Artificial Sequence
  Description of Artificial Sequence: Synthetic oligonucleotide
acugaguaugcuuauuugu

SEQ ID NO: 2627056 - RNA, 19 nt, Artificial Sequence
  Description of Artificial Sequence: Synthetic oligonucleotide
aaagugucccgaagcaacc

SEQ ID NO: 2627057 - RNA, 19 nt, Artificial Sequence
  Description of Artificial Sequence: Synthetic oligonucleotide
cagugagcaaaguagcacg

SEQ ID NO: 2627058 - RNA, 19 nt, Artificial Sequence
  Description of Artificial Sequence: Synthetic oligonucleotide
uaaguguauggauagcagu

SEQ ID NO: 2627059 - RNA, 19 nt, Artificial Sequence
  Description of Artificial Sequence: Synthetic oligonucleotide
ucgguaauuccccacaauc

SEQ ID NO: 2627060 - RNA, 19 nt, Artificial Sequence
  Description of Artificial Sequence: Synthetic oligonucleotide
auuccuagcaagcgugugg

SEQ ID NO: 2627061 - RNA, 19 nt, Artificial Sequence
  Description of Artificial Sequence: Synthetic oligonucleotide
gaacaguggccucauaccc

SEQ ID NO: 2627062 - RNA, 19 nt, Artificial Sequence
  Description of Artificial Sequence: Synthetic oligonucleotide
aauuccccacaaucacacc

SEQ ID NO: 2627063 - RNA, 19 nt, Artificial Sequence
  Description of Artificial Sequence: Synthetic oligonucleotide
ugaguaugcuuauuuguga

SEQ ID NO: 2627064 - RNA, 19 nt, Artificial Sequence
  Description of Artificial Sequence: Synthetic oligonucleotide
uucaagggaguagugauug

SEQ ID NO: 2627065 - RNA, 19 nt, Artificial Sequence
  Description of Artificial Sequence: Synthetic oligonucleotide
aauuacgguuuaaaucccg

SEQ ID NO: 2627066 - RNA, 19 nt, Artificial Sequence
  Description of Artificial Sequence: Synthetic oligonucleotide
cugaguaugcuuauuugug

SEQ ID NO: 2627067 - RNA, 19 nt, Artificial Sequence
  Description of Artificial Sequence: Synthetic oligonucleotide
uacaaaacuuugaucuuac

SEQ ID NO: 2627068 - RNA, 19 nt, Artificial Sequence
  Description of Artificial Sequence: Synthetic oligonucleotide
ugaccuggaaauaguacca

SEQ ID NO: 2627069 - RNA, 19 nt, Artificial Sequence
  Description of Artificial Sequence: Synthetic oligonucleotide
cuaaaauauaaucuaggaa

SEQ ID NO: 2627070 - RNA, 19 nt, Artificial Sequence
  Description of Artificial Sequence: Synthetic oligonucleotide
aaggagcaucgguaauucc

SEQ ID NO: 2627071 - RNA, 19 nt, Artificial Sequence
  Description of Artificial Sequence: Synthetic oligonucleotide
uuguguggaaacugaaaug

SEQ ID NO: 2627072 - RNA, 19 nt, Artificial Sequence
  Description of Artificial Sequence: Synthetic oligonucleotide
auaaaccauauuccuagca

SEQ ID NO: 2627073 - RNA, 19 nt, Artificial Sequence
  Description of Artificial Sequence: Synthetic oligonucleotide
aacaguggccucauacccc

SEQ ID NO: 2627074 - RNA, 19 nt, Artificial Sequence
  Description of Artificial Sequence: Synthetic oligonucleotide
uugauuuggucuccuauuc

SEQ ID NO: 2627075 - RNA, 19 nt, Artificial Sequence
  Description of Artificial Sequence: Synthetic oligonucleotide
uaauuacgguuuaaauccc

SEQ ID NO: 2627076 - RNA, 19 nt, Artificial Sequence
  Description of Artificial Sequence: Synthetic oligonucleotide
gauuuggucuccuauucuc

SEQ ID NO: 2627077 - RNA, 19 nt, Artificial Sequence
  Description of Artificial Sequence: Synthetic oligonucleotide
aguagugauugucaagaca

SEQ ID NO: 2627078 - RNA, 19 nt, Artificial Sequence
  Description of Artificial Sequence: Synthetic oligonucleotide
ucuguagacuauuucugcu

SEQ ID NO: 2627079 - RNA, 19 nt, Artificial Sequence
  Description of Artificial Sequence: Synthetic oligonucleotide
uguucuucaagggaguagu

SEQ ID NO: 2627080 - RNA, 19 nt, Artificial Sequence
  Description of Artificial Sequence: Synthetic oligonucleotide
cacuguugaugccagaaag

SEQ ID NO: 2627081 - RNA, 19 nt, Artificial Sequence
  Description of Artificial Sequence: Synthetic oligonucleotide
gguguaaguguauggauag

SEQ ID NO: 2627082 - RNA, 19 nt, Artificial Sequence
  Description of Artificial Sequence: Synthetic oligonucleotide
auagugaaucuguagacua

SEQ ID NO: 2627083 - RNA, 19 nt, Artificial Sequence
  Description of Artificial Sequence: Synthetic oligonucleotide
gucaaaaucacagccuugc

SEQ ID NO: 2627084 - RNA, 19 nt, Artificial Sequence
  Description of Artificial Sequence: Synthetic oligonucleotide
aaauaguaccacugaguau

SEQ ID NO: 2627085 - RNA, 19 nt, Artificial Sequence
  Description of Artificial Sequence: Synthetic oligonucleotide
uuuaaaucccguccggcua

SEQ ID NO: 2627086 - RNA, 19 nt, Artificial Sequence
  Description of Artificial Sequence: Synthetic oligonucleotide
guauggauagcagugagca

SEQ ID NO: 2627087 - RNA, 19 nt, Artificial Sequence
  Description of Artificial Sequence: Synthetic oligonucleotide
ugccagaaagguauucuug

SEQ ID NO: 2627088 - RNA, 19 nt, Artificial Sequence
  Description of Artificial Sequence: Synthetic oligonucleotide
uuagugaccuggaaauagu

SEQ ID NO: 2627089 - RNA, 19 nt, Artificial Sequence
  Description of Artificial Sequence: Synthetic oligonucleotide
gaaagugucccgaagcaac

SEQ ID NO: 2627090 - RNA, 19 nt, Artificial Sequence
  Description of Artificial Sequence: Synthetic oligonucleotide
ucuuacugggucacuguug

SEQ ID NO: 2627091 - RNA, 19 nt, Artificial Sequence
  Description of Artificial Sequence: Synthetic oligonucleotide
aagccuuucaugauccaag

SEQ ID NO: 2627092 - RNA, 19 nt, Artificial Sequence
  Description of Artificial Sequence: Synthetic oligonucleotide
guugacaauagugaaucug

SEQ ID NO: 2627093 - RNA, 19 nt, Artificial Sequence
  Description of Artificial Sequence: Synthetic oligonucleotide
aagagcuguuggucucucc

SEQ ID NO: 2627094 - RNA, 19 nt, Artificial Sequence
  Description of Artificial Sequence: Synthetic oligonucleotide
uggauagcagugagcaaag

SEQ ID NO: 2627095 - RNA, 19 nt, Artificial Sequence
  Description of Artificial Sequence: Synthetic oligonucleotide
uguguaauuacgguuuaaa

SEQ ID NO: 2627096 - RNA, 19 nt, Artificial Sequence
  Description of Artificial Sequence: Synthetic oligonucleotide
ucgccuaaaauauaaucua

SEQ ID NO: 2627097 - RNA, 19 nt, Artificial Sequence
  Description of Artificial Sequence: Synthetic oligonucleotide
aggaagccuuucaugaucc

SEQ ID NO: 2627098 - RNA, 19 nt, Artificial Sequence
  Description of Artificial Sequence: Synthetic oligonucleotide
acucgagucgccuaaaaua

SEQ ID NO: 2627099 - RNA, 19 nt, Artificial Sequence
  Description of Artificial Sequence: Synthetic oligonucleotide
uguuggucucuccuggaug

SEQ ID NO: 2627100 - RNA, 19 nt, Artificial Sequence
  Description of Artificial Sequence: Synthetic oligonucleotide
ugaguauuagugaccugga

SEQ ID NO: 2627101 - RNA, 19 nt, Artificial Sequence
  Description of Artificial Sequence: Synthetic oligonucleotide
gaaacugaaauguccacgu

SEQ ID NO: 2627102 - RNA, 19 nt, Artificial Sequence
  Description of Artificial Sequence: Synthetic oligonucleotide
acuauuucugcuugaguau

SEQ ID NO: 2627103 - RNA, 19 nt, Artificial Sequence
  Description of Artificial Sequence: Synthetic oligonucleotide
cacaagacacguauuuuac

SEQ ID NO: 2627104 - RNA, 19 nt, Artificial Sequence
  Description of Artificial Sequence: Synthetic oligonucleotide
aaucccguccggcuaagga

SEQ ID NO: 2627105 - RNA, 19 nt, Artificial Sequence
  Description of Artificial Sequence: Synthetic oligonucleotide
ucauaccccgauuguaaag

SEQ ID NO: 2627106 - RNA, 19 nt, Artificial Sequence
  Description of Artificial Sequence: Synthetic oligonucleotide
uguuguguggaaacugaaa

SEQ ID NO: 2627107 - RNA, 19 nt, Artificial Sequence
  Description of Artificial Sequence: Synthetic oligonucleotide
uuuggucuccuauucucug

SEQ ID NO: 2627108 - RNA, 19 nt, Artificial Sequence
  Description of Artificial Sequence: Synthetic oligonucleotide
aagacacguauuuuacaaa

SEQ ID NO: 2627109 - RNA, 19 nt, Artificial Sequence
  Description of Artificial Sequence: Synthetic oligonucleotide
ugguguaaguguauggaua

SEQ ID NO: 2627110 - RNA, 19 nt, Artificial Sequence
  Description of Artificial Sequence: Synthetic oligonucleotide
uguuaugaaucuuggccuc

SEQ ID NO: 2627111 - RNA, 19 nt, Artificial Sequence
  Description of Artificial Sequence: Synthetic oligonucleotide
uuaaaucccguccggcuaa

SEQ ID NO: 2627112 - RNA, 19 nt, Artificial Sequence
  Description of Artificial Sequence: Synthetic oligonucleotide
ugauccaagagcuguuggu

SEQ ID NO: 2627113 - RNA, 19 nt, Artificial Sequence
  Description of Artificial Sequence: Synthetic oligonucleotide
uugucaagacauaaaccau

SEQ ID NO: 2627114 - RNA, 19 nt, Artificial Sequence
  Description of Artificial Sequence: Synthetic oligonucleotide
uagacuauuucugcuugag

SEQ ID NO: 2627115 - RNA, 19 nt, Artificial Sequence
  Description of Artificial Sequence: Synthetic oligonucleotide
aaaguagcacguguccuug

SEQ ID NO: 2627116 - RNA, 19 nt, Artificial Sequence
  Description of Artificial Sequence: Synthetic oligonucleotide
agugaccuggaaauaguac

SEQ ID NO: 2627117 - RNA, 19 nt, Artificial Sequence
  Description of Artificial Sequence: Synthetic oligonucleotide
gauagcagugagcaaagua

SEQ ID NO: 2627118 - RNA, 19 nt, Artificial Sequence
  Description of Artificial Sequence: Synthetic oligonucleotide
auaccccgauuguaaagac

SEQ ID NO: 2627119 - RNA, 19 nt, Artificial Sequence
  Description of Artificial Sequence: Synthetic oligonucleotide
cugcuugaguauuagugac

SEQ ID NO: 2627120 - RNA, 19 nt, Artificial Sequence
  Description of Artificial Sequence: Synthetic oligonucleotide
caagacacguauuuuacaa

SEQ ID NO: 2627121 - RNA, 19 nt, Artificial Sequence
  Description of Artificial Sequence: Synthetic oligonucleotide
gaagaugaaagugucccga

SEQ ID NO: 2627122 - RNA, 19 nt, Artificial Sequence
  Description of Artificial Sequence: Synthetic oligonucleotide
agcaucgguaauuccccac

SEQ ID NO: 2627123 - RNA, 19 nt, Artificial Sequence
  Description of Artificial Sequence: Synthetic oligonucleotide
agcguguggcacaagacac

SEQ ID NO: 2627124 - RNA, 19 nt, Artificial Sequence
  Description of Artificial Sequence: Synthetic oligonucleotide
uacugggucacuguugaug

SEQ ID NO: 2627125 - RNA, 19 nt, Artificial Sequence
  Description of Artificial Sequence: Synthetic oligonucleotide
auaaucuaggaagccuuuc

SEQ ID NO: 2627126 - RNA, 19 nt, Artificial Sequence
  Description of Artificial Sequence: Synthetic oligonucleotide
auggauagcagugagcaaa

SEQ ID NO: 2627127 - RNA, 19 nt, Artificial Sequence
  Description of Artificial Sequence: Synthetic oligonucleotide
cauaaaccauauuccuagc

SEQ ID NO: 2627128 - RNA, 19 nt, Artificial Sequence
  Description of Artificial Sequence: Synthetic oligonucleotide
aagaugaaagugucccgaa

SEQ ID NO: 2627129 - RNA, 19 nt, Artificial Sequence
  Description of Artificial Sequence: Synthetic oligonucleotide
guaaguguauggauagcag

SEQ ID NO: 2627130 - RNA, 19 nt, Artificial Sequence
  Description of Artificial Sequence: Synthetic oligonucleotide
guauucuugaagguuggug

SEQ ID NO: 2627131 - RNA, 19 nt, Artificial Sequence
  Description of Artificial Sequence: Synthetic oligonucleotide
aguaccacugaguaugcuu

SEQ ID NO: 2627132 - RNA, 19 nt, Artificial Sequence
  Description of Artificial Sequence: Synthetic oligonucleotide
guauuagugaccuggaaau

SEQ ID NO: 2627133 - RNA, 19 nt, Artificial Sequence
  Description of Artificial Sequence: Synthetic oligonucleotide
uggccucauaccccgauug

SEQ ID NO: 2627134 - RNA, 19 nt, Artificial Sequence
  Description of Artificial Sequence: Synthetic oligonucleotide
ucuugaagguugguguaag

SEQ ID NO: 2627135 - RNA, 19 nt, Artificial Sequence
  Description of Artificial Sequence: Synthetic oligonucleotide
gguaauuccccacaaucac

SEQ ID NO: 2627136 - RNA, 19 nt, Artificial Sequence
  Description of Artificial Sequence: Synthetic oligonucleotide
uugcagucaaaaucacagc

SEQ ID NO: 2627137 - RNA, 19 nt, Artificial Sequence
  Description of Artificial Sequence: Synthetic oligonucleotide
guaugcuuauuugugaaga

SEQ ID NO: 2627138 - RNA, 19 nt, Artificial Sequence
  Description of Artificial Sequence: Synthetic oligonucleotide
uuugaucuuacugggucac

SEQ ID NO: 2627139 - RNA, 19 nt, Artificial Sequence
  Description of Artificial Sequence: Synthetic oligonucleotide
cuggauucagcaugggcac

SEQ ID NO: 2627140 - RNA, 19 nt, Artificial Sequence
  Description of Artificial Sequence: Synthetic oligonucleotide
ucuccuauucucugccagc

SEQ ID NO: 2627141 - RNA, 19 nt, Artificial Sequence
  Description of Artificial Sequence: Synthetic oligonucleotide
uagcacguguccuuguugu

SEQ ID NO: 2627142 - RNA, 19 nt, Artificial Sequence
  Description of Artificial Sequence: Synthetic oligonucleotide
aucccguccggcuaaggag

SEQ ID NO: 2627143 - RNA, 19 nt, Artificial Sequence
  Description of Artificial Sequence: Synthetic oligonucleotide
uauaaucuaggaagccuuu

SEQ ID NO: 2627144 - RNA, 19 nt, Artificial Sequence
  Description of Artificial Sequence: Synthetic oligonucleotide
uugguguaaguguauggau

SEQ ID NO: 2627145 - RNA, 19 nt, Artificial Sequence
  Description of Artificial Sequence: Synthetic oligonucleotide
agugauugucaagacauaa

SEQ ID NO: 2627146 - RNA, 19 nt, Artificial Sequence
  Description of Artificial Sequence: Synthetic oligonucleotide
uuccuagcaagcguguggc

SEQ ID NO: 2627147 - RNA, 19 nt, Artificial Sequence
  Description of Artificial Sequence: Synthetic oligonucleotide
cuuacugggucacuguuga

SEQ ID NO: 2627148 - RNA, 19 nt, Artificial Sequence
  Description of Artificial Sequence: Synthetic oligonucleotide
aagugucccgaagcaaccg

SEQ ID NO: 2627149 - RNA, 19 nt, Artificial Sequence
  Description of Artificial Sequence: Synthetic oligonucleotide
cuuguuguguggaaacuga

SEQ ID NO: 2627150 - RNA, 19 nt, Artificial Sequence
  Description of Artificial Sequence: Synthetic oligonucleotide
gguugguguaaguguaugg

SEQ ID NO: 2627151 - RNA, 19 nt, Artificial Sequence
  Description of Artificial Sequence: Synthetic oligonucleotide
gaguaugcuuauuugugaa

SEQ ID NO: 2627152 - RNA, 19 nt, Artificial Sequence
  Description of Artificial Sequence: Synthetic oligonucleotide
cacugaguaugcuuauuug

SEQ ID NO: 2627153 - RNA, 19 nt, Artificial Sequence
  Description of Artificial Sequence: Synthetic oligonucleotide
acaccgucuggauucagca

SEQ ID NO: 2627154 - RNA, 19 nt, Artificial Sequence
  Description of Artificial Sequence: Synthetic oligonucleotide
ggcuuugugaaguugacaa

SEQ ID NO: 2627155 - RNA, 19 nt, Artificial Sequence
  Description of Artificial Sequence: Synthetic oligonucleotide
ucccguccggcuaaggagc

SEQ ID NO: 2627156 - RNA, 19 nt, Artificial Sequence
  Description of Artificial Sequence: Synthetic oligonucleotide
guuguguggaaacugaaau

SEQ ID NO: 2627157 - RNA, 19 nt, Artificial Sequence
  Description of Artificial Sequence: Synthetic oligonucleotide
caccuugaagaugaaagug

SEQ ID NO: 2627158 - RNA, 19 nt, Artificial Sequence
  Description of Artificial Sequence: Synthetic oligonucleotide
cguauuuuacaaaacuuug

SEQ ID NO: 2627159 - RNA, 19 nt, Artificial Sequence
  Description of Artificial Sequence: Synthetic oligonucleotide
acguauuuuacaaaacuuu

SEQ ID NO: 2627160 - RNA, 19 nt, Artificial Sequence
  Description of Artificial Sequence: Synthetic oligonucleotide
guagugauugucaagacau

SEQ ID NO: 2627161 - RNA, 19 nt, Artificial Sequence
  Description of Artificial Sequence: Synthetic oligonucleotide
guugguguaaguguaugga

SEQ ID NO: 2627162 - RNA, 19 nt, Artificial Sequence
  Description of Artificial Sequence: Synthetic oligonucleotide
ugacaauagugaaucugua

SEQ ID NO: 2627163 - RNA, 19 nt, Artificial Sequence
  Description of Artificial Sequence: Synthetic oligonucleotide
guugaugccagaaagguau

SEQ ID NO: 2627164 - RNA, 19 nt, Artificial Sequence
  Description of Artificial Sequence: Synthetic oligonucleotide
uuacgguuuaaaucccguc

SEQ ID NO: 2627165 - RNA, 19 nt, Artificial Sequence
  Description of Artificial Sequence: Synthetic oligonucleotide
auauaaucuaggaagccuu

SEQ ID NO: 2627166 - RNA, 19 nt, Artificial Sequence
  Description of Artificial Sequence: Synthetic oligonucleotide
auaguaccacugaguaugc

SEQ ID NO: 2627167 - RNA, 19 nt, Artificial Sequence
  Description of Artificial Sequence: Synthetic oligonucleotide
uagugaaucuguagacuau

SEQ ID NO: 2627168 - RNA, 19 nt, Artificial Sequence
  Description of Artificial Sequence: Synthetic oligonucleotide
ggaguagugauugucaaga

SEQ ID NO: 2627169 - RNA, 19 nt, Artificial Sequence
  Description of Artificial Sequence: Synthetic oligonucleotide
uuguuguguggaaacugaa

SEQ ID NO: 2627170 - RNA, 19 nt, Artificial Sequence
  Description of Artificial Sequence: Synthetic oligonucleotide
uaaggagcaucgguaauuc

SEQ ID NO: 2627171 - RNA, 19 nt, Artificial Sequence
  Description of Artificial Sequence: Synthetic oligonucleotide
gacacguauuuuacaaaac

SEQ ID NO: 2627172 - RNA, 19 nt, Artificial Sequence
  Description of Artificial Sequence: Synthetic oligonucleotide
agacuauuucugcuugagu

SEQ ID NO: 2627173 - RNA, 19 nt, Artificial Sequence
  Description of Artificial Sequence: Synthetic oligonucleotide
gaguagugauugucaagac

SEQ ID NO: 2627174 - RNA, 19 nt, Artificial Sequence
  Description of Artificial Sequence: Synthetic oligonucleotide
aguguauggauagcaguga

SEQ ID NO: 2627175 - RNA, 19 nt, Artificial Sequence
  Description of Artificial Sequence: Synthetic oligonucleotide
cuuauuugugaagaggucu

SEQ ID NO: 2627176 - RNA, 19 nt, Artificial Sequence
  Description of Artificial Sequence: Synthetic oligonucleotide
ugucccgaagcaaccgcgc

SEQ ID NO: 2627177 - RNA, 19 nt, Artificial Sequence
  Description of Artificial Sequence: Synthetic oligonucleotide
uagugaccuggaaauagua

SEQ ID NO: 2627178 - RNA, 19 nt, Artificial Sequence
  Description of Artificial Sequence: Synthetic oligonucleotide
gucgccuaaaauauaaucu

SEQ ID NO: 2627179 - RNA, 19 nt, Artificial Sequence
  Description of Artificial Sequence: Synthetic oligonucleotide
guggaaacugaaaugucca

SEQ ID NO: 2627180 - RNA, 19 nt, Artificial Sequence
  Description of Artificial Sequence: Synthetic oligonucleotide
accuggaaauaguaccacu

SEQ ID NO: 2627181 - RNA, 19 nt, Artificial Sequence
  Description of Artificial Sequence: Synthetic oligonucleotide
uauuccuagcaagcgugug

SEQ ID NO: 2627182 - RNA, 19 nt, Artificial Sequence
  Description of Artificial Sequence: Synthetic oligonucleotide
gacauaaaccauauuccua

SEQ ID NO: 2627183 - RNA, 19 nt, Artificial Sequence
  Description of Artificial Sequence: Synthetic oligonucleotide
ugaaagugucccgaagcaa

SEQ ID NO: 2627184 - RNA, 19 nt, Artificial Sequence
  Description of Artificial Sequence: Synthetic oligonucleotide
uaccccgauuguaaagacu

SEQ ID NO: 2627185 - RNA, 19 nt, Artificial Sequence
  Description of Artificial Sequence: Synthetic oligonucleotide
cacaccgucuggauucagc

SEQ ID NO: 2627186 - RNA, 19 nt, Artificial Sequence
  Description of Artificial Sequence: Synthetic oligonucleotide
acaaucacaccgucuggau

SEQ ID NO: 2627187 - RNA, 19 nt, Artificial Sequence
  Description of Artificial Sequence: Synthetic oligonucleotide
uggauggacccuugcaguc

SEQ ID NO: 2627188 - RNA, 19 nt, Artificial Sequence
  Description of Artificial Sequence: Synthetic oligonucleotide
augaaucuuggccucuuuu

SEQ ID NO: 2627189 - RNA, 19 nt, Artificial Sequence
  Description of Artificial Sequence: Synthetic oligonucleotide
aacuuugaucuuacugggu

SEQ ID NO: 2627190 - RNA, 19 nt, Artificial Sequence
  Description of Artificial Sequence: Synthetic oligonucleotide
guagcacguguccuuguug

SEQ ID NO: 2627191 - RNA, 19 nt, Artificial Sequence
  Description of Artificial Sequence: Synthetic oligonucleotide
ucaugauccaagagcuguu

SEQ ID NO: 2627192 - RNA, 19 nt, Artificial Sequence
  Description of Artificial Sequence: Synthetic oligonucleotide
gaagguugguguaagugua

SEQ ID NO: 2627193 - RNA, 19 nt, Artificial Sequence
  Description of Artificial Sequence: Synthetic oligonucleotide
gacuagcaggcuuugugaa

SEQ ID NO: 2627194 - RNA, 19 nt, Artificial Sequence
  Description of Artificial Sequence: Synthetic oligonucleotide
cauaccccgauuguaaaga

SEQ ID NO: 2627195 - RNA, 19 nt, Artificial Sequence
  Description of Artificial Sequence: Synthetic oligonucleotide
guuuaaaucccguccggcu

SEQ ID NO: 2627196 - RNA, 19 nt, Artificial Sequence
  Description of Artificial Sequence: Synthetic oligonucleotide
aagcaaccgcgcgucacuc

SEQ ID NO: 2627197 - RNA, 19 nt, Artificial Sequence
  Description of Artificial Sequence: Synthetic oligonucleotide
caagggaguagugauuguc

SEQ ID NO: 2627198 - RNA, 19 nt, Artificial Sequence
  Description of Artificial Sequence: Synthetic oligonucleotide
cacguguccuuguugugug

SEQ ID NO: 2627199 - RNA, 19 nt, Artificial Sequence
  Description of Artificial Sequence: Synthetic oligonucleotide
agggaguagugauugucaa

SEQ ID NO: 2627200 - RNA, 19 nt, Artificial Sequence
  Description of Artificial Sequence: Synthetic oligonucleotide
uauggauagcagugagcaa

SEQ ID NO: 2627201 - RNA, 19 nt, Artificial Sequence
  Description of Artificial Sequence: Synthetic oligonucleotide
ucaagacauaaaccauauu

SEQ ID NO: 2627202 - RNA, 19 nt, Artificial Sequence
  Description of Artificial Sequence: Synthetic oligonucleotide
auuuggucuccuauucucu

SEQ ID NO: 2627203 - RNA, 19 nt, Artificial Sequence
  Description of Artificial Sequence: Synthetic oligonucleotide
aaagacuagcaggcuuugu

SEQ ID NO: 2627204 - RNA, 19 nt, Artificial Sequence
  Description of Artificial Sequence: Synthetic oligonucleotide
ugcgcuuucuugagucacu

SEQ ID NO: 2627205 - RNA, 19 nt, Artificial Sequence
  Description of Artificial Sequence: Synthetic oligonucleotide
aaguagcacguguccuugu

SEQ ID NO: 2627206 - RNA, 19 nt, Artificial Sequence
  Description of Artificial Sequence: Synthetic oligonucleotide
gauguguaauuacgguuua

SEQ ID NO: 2627207 - RNA, 19 nt, Artificial Sequence
  Description of Artificial Sequence: Synthetic oligonucleotide
guaauuccccacaaucaca

SEQ ID NO: 2627208 - RNA, 19 nt, Artificial Sequence
  Description of Artificial Sequence: Synthetic oligonucleotide
uccuauucucugccagcca

SEQ ID NO: 2627209 - RNA, 19 nt, Artificial Sequence
  Description of Artificial Sequence: Synthetic oligonucleotide
caugauccaagagcuguug

SEQ ID NO: 2627210 - RNA, 19 nt, Artificial Sequence
  Description of Artificial Sequence: Synthetic oligonucleotide
uuguaaagacuagcaggcu

SEQ ID NO: 2627211 - RNA, 19 nt, Artificial Sequence
  Description of Artificial Sequence: Synthetic oligonucleotide
uucuugaagguugguguaa

SEQ ID NO: 2627212 - RNA, 19 nt, Artificial Sequence
  Description of Artificial Sequence: Synthetic oligonucleotide
aucuuacugggucacuguu

SEQ ID NO: 2627213 - RNA, 19 nt, Artificial Sequence
  Description of Artificial Sequence: Synthetic oligonucleotide
cuguucuucaagggaguag

SEQ ID NO: 2627214 - RNA, 19 nt, Artificial Sequence
  Description of Artificial Sequence: Synthetic oligonucleotide
uauuagugaccuggaaaua

SEQ ID NO: 2627215 - RNA, 19 nt, Artificial Sequence
  Description of Artificial Sequence: Synthetic oligonucleotide
aaccgcgcgucacucgagu

SEQ ID NO: 2627216 - RNA, 19 nt, Artificial Sequence
  Description of Artificial Sequence: Synthetic oligonucleotide
cugccagccaauguuauga

SEQ ID NO: 2627217 - RNA, 19 nt, Artificial Sequence
  Description of Artificial Sequence: Synthetic oligonucleotide
gaugccagaaagguauucu

SEQ ID NO: 2627218 - RNA, 19 nt, Artificial Sequence
  Description of Artificial Sequence: Synthetic oligonucleotide
uagugauugucaagacaua

SEQ ID NO: 2627219 - RNA, 19 nt, Artificial Sequence
  Description of Artificial Sequence: Synthetic oligonucleotide
accccgauuguaaagacua

SEQ ID NO: 2627220 - RNA, 19 nt, Artificial Sequence
  Description of Artificial Sequence: Synthetic oligonucleotide
ucccgaagcaaccgcgcgu

SEQ ID NO: 2627221 - RNA, 19 nt, Artificial Sequence
  Description of Artificial Sequence: Synthetic oligonucleotide
gagcaaaguagcacguguc

SEQ ID NO: 2627222 - RNA, 19 nt, Artificial Sequence
  Description of Artificial Sequence: Synthetic oligonucleotide
agcaaccgcgcgucacucg

SEQ ID NO: 2627223 - RNA, 19 nt, Artificial Sequence
  Description of Artificial Sequence: Synthetic oligonucleotide
gaguauuagugaccuggaa

SEQ ID NO: 2627224 - RNA, 19 nt, Artificial Sequence
  Description of Artificial Sequence: Synthetic oligonucleotide
gucccgaagcaaccgcgcg

SEQ ID NO: 2627225 - RNA, 19 nt, Artificial Sequence
  Description of Artificial Sequence: Synthetic oligonucleotide
agccuugcgcuuucuugag

SEQ ID NO: 2627226 - RNA, 19 nt, Artificial Sequence
  Description of Artificial Sequence: Synthetic oligonucleotide
ggagcaucgguaauucccc

SEQ ID NO: 2627227 - RNA, 19 nt, Artificial Sequence
  Description of Artificial Sequence: Synthetic oligonucleotide
cuugaguauuagugaccug

SEQ ID NO: 2627228 - RNA, 19 nt, Artificial Sequence
  Description of Artificial Sequence: Synthetic oligonucleotide
aaaucccguccggcuaagg

SEQ ID NO: 2627229 - RNA, 19 nt, Artificial Sequence
  Description of Artificial Sequence: Synthetic oligonucleotide
gggaguagugauugucaag

SEQ ID NO: 2627230 - RNA, 19 nt, Artificial Sequence
  Description of Artificial Sequence: Synthetic oligonucleotide
guagacuauuucugcuuga

SEQ ID NO: 2627231 - RNA, 19 nt, Artificial Sequence
  Description of Artificial Sequence: Synthetic oligonucleotide
agugagcaaaguagcacgu

SEQ ID NO: 2627232 - RNA, 19 nt, Artificial Sequence
  Description of Artificial Sequence: Synthetic oligonucleotide
gguuuaaaucccguccggc

SEQ ID NO: 2627233 - RNA, 19 nt, Artificial Sequence
  Description of Artificial Sequence: Synthetic oligonucleotide
gaaguugacaauagugaau

SEQ ID NO: 2627234 - RNA, 19 nt, Artificial Sequence
  Description of Artificial Sequence: Synthetic oligonucleotide
agguugguguaaguguaug

SEQ ID NO: 2627235 - RNA, 19 nt, Artificial Sequence
  Description of Artificial Sequence: Synthetic oligonucleotide
gaagccuuucaugauccaa

SEQ ID NO: 2627236 - RNA, 19 nt, Artificial Sequence
  Description of Artificial Sequence: Synthetic oligonucleotide
gugucccgaagcaaccgcg

SEQ ID NO: 2627237 - RNA, 19 nt, Artificial Sequence
  Description of Artificial Sequence: Synthetic oligonucleotide
ucacucgagucgccuaaaa

SEQ ID NO: 2627238 - RNA, 19 nt, Artificial Sequence
  Description of Artificial Sequence: Synthetic oligonucleotide
uugcgcuuucuugagucac

SEQ ID NO: 2627239 - RNA, 19 nt, Artificial Sequence
  Description of Artificial Sequence: Synthetic oligonucleotide
ugaugccagaaagguauuc

SEQ ID NO: 2627240 - RNA, 19 nt, Artificial Sequence
  Description of Artificial Sequence: Synthetic oligonucleotide
gaccuggaaauaguaccac

SEQ ID NO: 2627241 - RNA, 19 nt, Artificial Sequence
  Description of Artificial Sequence: Synthetic oligonucleotide
cucgagucgccuaaaauau

SEQ ID NO: 2627242 - RNA, 19 nt, Artificial Sequence
  Description of Artificial Sequence: Synthetic oligonucleotide
cagccuugcgcuuucuuga

SEQ ID NO: 2627243 - RNA, 19 nt, Artificial Sequence
  Description of Artificial Sequence: Synthetic oligonucleotide
aguagcacguguccuuguu

SEQ ID NO: 2627244 - RNA, 19 nt, Artificial Sequence
  Description of Artificial Sequence: Synthetic oligonucleotide
aucgguaauuccccacaau

SEQ ID NO: 2627245 - RNA, 19 nt, Artificial Sequence
  Description of Artificial Sequence: Synthetic oligonucleotide
cgauuguaaagacuagcag

SEQ ID NO: 2627246 - RNA, 19 nt, Artificial Sequence
  Description of Artificial Sequence: Synthetic oligonucleotide
acguguccuuguugugugg

SEQ ID NO: 2627247 - RNA, 19 nt, Artificial Sequence
  Description of Artificial Sequence: Synthetic oligonucleotide
gauggacccuugcagucaa

SEQ ID NO: 2627248 - RNA, 19 nt, Artificial Sequence
  Description of Artificial Sequence: Synthetic oligonucleotide
ccgauuguaaagacuagca

SEQ ID NO: 2627249 - RNA, 19 nt, Artificial Sequence
  Description of Artificial Sequence: Synthetic oligonucleotide
ucgagucgccuaaaauaua

SEQ ID NO: 2627250 - RNA, 19 nt, Artificial Sequence
  Description of Artificial Sequence: Synthetic oligonucleotide
agcagugagcaaaguagca

SEQ ID NO: 2627251 - RNA, 19 nt, Artificial Sequence
  Description of Artificial Sequence: Synthetic oligonucleotide
guaccacugaguaugcuua

SEQ ID NO: 2627252 - RNA, 19 nt, Artificial Sequence
  Description of Artificial Sequence: Synthetic oligonucleotide
agcacguguccuuguugug

SEQ ID NO: 2627253 - RNA, 19 nt, Artificial Sequence
  Description of Artificial Sequence: Synthetic oligonucleotide
uccggcuaaggagcaucgg

SEQ ID NO: 2627254 - RNA, 19 nt, Artificial Sequence
  Description of Artificial Sequence: Synthetic oligonucleotide
aagguugguguaaguguau

SEQ ID NO: 2627255 - RNA, 19 nt, Artificial Sequence
  Description of Artificial Sequence: Synthetic oligonucleotide
ccuugcgcuuucuugaguc

SEQ ID NO: 2627256 - RNA, 19 nt, Artificial Sequence
  Description of Artificial Sequence: Synthetic oligonucleotide
uuaugaaucuuggccucuu

SEQ ID NO: 2627257 - RNA, 19 nt, Artificial Sequence
  Description of Artificial Sequence: Synthetic oligonucleotide
auauuccuagcaagcgugu

SEQ ID NO: 2627258 - RNA, 19 nt, Artificial Sequence
  Description of Artificial Sequence: Synthetic oligonucleotide
accgcgcgucacucgaguc

SEQ ID NO: 2627259 - RNA, 19 nt, Artificial Sequence
  Description of Artificial Sequence: Synthetic oligonucleotide
uggauucagcaugggcacc

SEQ ID NO: 2627260 - RNA, 19 nt, Artificial Sequence
  Description of Artificial Sequence: Synthetic oligonucleotide
uugaugccagaaagguauu

SEQ ID NO: 2627261 - RNA, 19 nt, Artificial Sequence
  Description of Artificial Sequence: Synthetic oligonucleotide
ggaaauaguaccacugagu

SEQ ID NO: 2627262 - RNA, 19 nt, Artificial Sequence
  Description of Artificial Sequence: Synthetic oligonucleotide
gcacaagacacguauuuua

SEQ ID NO: 2627263 - RNA, 19 nt, Artificial Sequence
  Description of Artificial Sequence: Synthetic oligonucleotide
uaaaucccguccggcuaag

SEQ ID NO: 2627264 - RNA, 19 nt, Artificial Sequence
  Description of Artificial Sequence: Synthetic oligonucleotide
gugagcaaaguagcacgug

SEQ ID NO: 2627265 - RNA, 19 nt, Artificial Sequence
  Description of Artificial Sequence: Synthetic oligonucleotide
uaccacugaguaugcuuau

SEQ ID NO: 2627266 - RNA, 19 nt, Artificial Sequence
  Description of Artificial Sequence: Synthetic oligonucleotide
agcaggcuuugugaaguug

SEQ ID NO: 2627267 - RNA, 19 nt, Artificial Sequence
  Description of Artificial Sequence: Synthetic oligonucleotide
gaagcaaccgcgcgucacu

SEQ ID NO: 2627268 - RNA, 19 nt, Artificial Sequence
  Description of Artificial Sequence: Synthetic oligonucleotide
cuguugaugccagaaaggu

SEQ ID NO: 2627269 - RNA, 19 nt, Artificial Sequence
  Description of Artificial Sequence: Synthetic oligonucleotide
guccggcuaaggagcaucg

SEQ ID NO: 2627270 - RNA, 19 nt, Artificial Sequence
  Description of Artificial Sequence: Synthetic oligonucleotide
cucauaccccgauuguaaa

SEQ ID NO: 2627271 - RNA, 19 nt, Artificial Sequence
  Description of Artificial Sequence: Synthetic oligonucleotide
uccccacaaucacaccguc

SEQ ID NO: 2627272 - RNA, 19 nt, Artificial Sequence
  Description of Artificial Sequence: Synthetic oligonucleotide
uccuagcaagcguguggca

SEQ ID NO: 2627273 - RNA, 19 nt, Artificial Sequence
  Description of Artificial Sequence: Synthetic oligonucleotide
cccgauuguaaagacuagc

SEQ ID NO: 2627274 - RNA, 19 nt, Artificial Sequence
  Description of Artificial Sequence: Synthetic oligonucleotide
cuugcgcuuucuugaguca

SEQ ID NO: 2627275 - RNA, 19 nt, Artificial Sequence
  Description of Artificial Sequence: Synthetic oligonucleotide
uugaucuuacugggucacu

SEQ ID NO: 2627276 - RNA, 19 nt, Artificial Sequence
  Description of Artificial Sequence: Synthetic oligonucleotide
uggucucuccuggauggac

SEQ ID NO: 2627277 - RNA, 19 nt, Artificial Sequence
  Description of Artificial Sequence: Synthetic oligonucleotide
aggcuuugugaaguugaca

SEQ ID NO: 2627278 - RNA, 19 nt, Artificial Sequence
  Description of Artificial Sequence: Synthetic oligonucleotide
ccgucuggauucagcaugg

SEQ ID NO: 2627279 - RNA, 19 nt, Artificial Sequence
  Description of Artificial Sequence: Synthetic oligonucleotide
gagcaucgguaauucccca

SEQ ID NO: 2627280 - RNA, 19 nt, Artificial Sequence
  Description of Artificial Sequence: Synthetic oligonucleotide
guguggaaacugaaauguc

SEQ ID NO: 2627281 - RNA, 19 nt, Artificial Sequence
  Description of Artificial Sequence: Synthetic oligonucleotide
gcaucgguaauuccccaca

SEQ ID NO: 2627282 - RNA, 19 nt, Artificial Sequence
  Description of Artificial Sequence: Synthetic oligonucleotide
ggcuaaggagcaucgguaa

SEQ ID NO: 2627283 - RNA, 19 nt, Artificial Sequence
  Description of Artificial Sequence: Synthetic oligonucleotide
ggucucuccuggauggacc

SEQ ID NO: 2627284 - RNA, 19 nt, Artificial Sequence
  Description of Artificial Sequence: Synthetic oligonucleotide
ccuagcaagcguguggcac

SEQ ID NO: 2627285 - RNA, 19 nt, Artificial Sequence
  Description of Artificial Sequence: Synthetic oligonucleotide
auguguaauuacgguuuaa

SEQ ID NO: 2627286 - RNA, 19 nt, Artificial Sequence
  Description of Artificial Sequence: Synthetic oligonucleotide
gcuuauuugugaagagguc

SEQ ID NO: 2627287 - RNA, 19 nt, Artificial Sequence
  Description of Artificial Sequence: Synthetic oligonucleotide
gcuugaguauuagugaccu

SEQ ID NO: 2627288 - RNA, 19 nt, Artificial Sequence
  Description of Artificial Sequence: Synthetic oligonucleotide
uuacugggucacuguugau

SEQ ID NO: 2627289 - RNA, 19 nt, Artificial Sequence
  Description of Artificial Sequence: Synthetic oligonucleotide
uagcaagcguguggcacaa

SEQ ID NO: 2627290 - RNA, 19 nt, Artificial Sequence
  Description of Artificial Sequence: Synthetic oligonucleotide
guuaugaaucuuggccucu

SEQ ID NO: 2627291 - RNA, 19 nt, Artificial Sequence
  Description of Artificial Sequence: Synthetic oligonucleotide
caaccgcgcgucacucgag

SEQ ID NO: 2627292 - RNA, 19 nt, Artificial Sequence
  Description of Artificial Sequence: Synthetic oligonucleotide
gcguguggcacaagacacg

SEQ ID NO: 2627293 - RNA, 19 nt, Artificial Sequence
  Description of Artificial Sequence: Synthetic oligonucleotide
ccucauaccccgauuguaa

SEQ ID NO: 2627294 - RNA, 19 nt, Artificial Sequence
  Description of Artificial Sequence: Synthetic oligonucleotide
cgguaauuccccacaauca

SEQ ID NO: 2627295 - RNA, 19 nt, Artificial Sequence
  Description of Artificial Sequence: Synthetic oligonucleotide
ccuauucucugccagccaa

SEQ ID NO: 2627296 - RNA, 19 nt, Artificial Sequence
  Description of Artificial Sequence: Synthetic oligonucleotide
aucacaccgucuggauuca

SEQ ID NO: 2627297 - RNA, 19 nt, Artificial Sequence
  Description of Artificial Sequence: Synthetic oligonucleotide
cuaggaagccuuucaugau

SEQ ID NO: 2627298 - RNA, 19 nt, Artificial Sequence
  Description of Artificial Sequence: Synthetic oligonucleotide
guguccuuguuguguggaa

SEQ ID NO: 2627299 - RNA, 19 nt, Artificial Sequence
  Description of Artificial Sequence: Synthetic oligonucleotide
cgagucgccuaaaauauaa

SEQ ID NO: 2627300 - RNA, 19 nt, Artificial Sequence
  Description of Artificial Sequence: Synthetic oligonucleotide
cgguuuaaaucccguccgg

SEQ ID NO: 2627301 - RNA, 19 nt, Artificial Sequence
  Description of Artificial Sequence: Synthetic oligonucleotide
cuucaagggaguagugauu

SEQ ID NO: 2627302 - RNA, 19 nt, Artificial Sequence
  Description of Artificial Sequence: Synthetic oligonucleotide
ggauggacccuugcaguca

SEQ ID NO: 2627303 - RNA, 19 nt, Artificial Sequence
  Description of Artificial Sequence: Synthetic oligonucleotide
ccccgauuguaaagacuag

SEQ ID NO: 2627304 - RNA, 19 nt, Artificial Sequence
  Description of Artificial Sequence: Synthetic oligonucleotide
gcgcuuucuugagucacug

SEQ ID NO: 2627305 - RNA, 19 nt, Artificial Sequence
  Description of Artificial Sequence: Synthetic oligonucleotide
ggucuccuauucucugcca

SEQ ID NO: 2627306 - RNA, 19 nt, Artificial Sequence
  Description of Artificial Sequence: Synthetic oligonucleotide
cuauucucugccagccaau

SEQ ID NO: 2627307 - RNA, 19 nt, Artificial Sequence
  Description of Artificial Sequence: Synthetic oligonucleotide
gcaaaguagcacguguccu

SEQ ID NO: 2627308 - RNA, 19 nt, Artificial Sequence
  Description of Artificial Sequence: Synthetic oligonucleotide
cacucgagucgccuaaaau

SEQ ID NO: 2627309 - RNA, 19 nt, Artificial Sequence
  Description of Artificial Sequence: Synthetic oligonucleotide
cccuugcagucaaaaucac

SEQ ID NO: 2627310 - RNA, 19 nt, Artificial Sequence
  Description of Artificial Sequence: Synthetic oligonucleotide
caaucacaccgucuggauu

SEQ ID NO: 2627311 - RNA, 19 nt, Artificial Sequence
  Description of Artificial Sequence: Synthetic oligonucleotide
ccauauuccuagcaagcgu

SEQ ID NO: 2627312 - RNA, 19 nt, Artificial Sequence
  Description of Artificial Sequence: Synthetic oligonucleotide
gagucgccuaaaauauaau

SEQ ID NO: 2627313 - RNA, 19 nt, Artificial Sequence
  Description of Artificial Sequence: Synthetic oligonucleotide
gcuuugugaaguugacaau

SEQ ID NO: 2627314 - RNA, 19 nt, Artificial Sequence
  Description of Artificial Sequence: Synthetic oligonucleotide
agcaagcguguggcacaag

SEQ ID NO: 2627315 - RNA, 19 nt, Artificial Sequence
  Description of Artificial Sequence: Synthetic oligonucleotide
cccgaagcaaccgcgcguc

SEQ ID NO: 2627316 - RNA, 19 nt, Artificial Sequence
  Description of Artificial Sequence: Synthetic oligonucleotide
cuguuggucucuccuggau

SEQ ID NO: 2627317 - RNA, 19 nt, Artificial Sequence
  Description of Artificial Sequence: Synthetic oligonucleotide
ggacccuugcagucaaaau

SEQ ID NO: 2627318 - RNA, 19 nt, Artificial Sequence
  Description of Artificial Sequence: Synthetic oligonucleotide
gcuaaggagcaucgguaau

SEQ ID NO: 2627319 - RNA, 19 nt, Artificial Sequence
  Description of Artificial Sequence: Synthetic oligonucleotide
gucacucgagucgccuaaa

SEQ ID NO: 2627320 - RNA, 19 nt, Artificial Sequence
  Description of Artificial Sequence: Synthetic oligonucleotide
gcacguguccuuguugugu

SEQ ID NO: 2627321 - RNA, 19 nt, Artificial Sequence
  Description of Artificial Sequence: Synthetic oligonucleotide
gguauucuugaagguuggu

SEQ ID NO: 2627322 - RNA, 19 nt, Artificial Sequence
  Description of Artificial Sequence: Synthetic oligonucleotide
gccucauaccccgauugua

SEQ ID NO: 2627323 - RNA, 19 nt, Artificial Sequence
  Description of Artificial Sequence: Synthetic oligonucleotide
cgcgcgucacucgagucgc

SEQ ID NO: 2627324 - RNA, 19 nt, Artificial Sequence
  Description of Artificial Sequence: Synthetic oligonucleotide
cgaagcaaccgcgcgucac

SEQ ID NO: 2627325 - RNA, 19 nt, Artificial Sequence
  Description of Artificial Sequence: Synthetic oligonucleotide
ggccucauaccccgauugu

SEQ ID NO: 2627326 - RNA, 19 nt, Artificial Sequence
  Description of Artificial Sequence: Synthetic oligonucleotide
ccggcuaaggagcaucggu

SEQ ID NO: 2627327 - RNA, 19 nt, Artificial Sequence
  Description of Artificial Sequence: Synthetic oligonucleotide
caccgucuggauucagcau

SEQ ID NO: 2627328 - RNA, 19 nt, Artificial Sequence
  Description of Artificial Sequence: Synthetic oligonucleotide
cggcuaaggagcaucggua

SEQ ID NO: 2627329 - RNA, 19 nt, Artificial Sequence
  Description of Artificial Sequence: Synthetic oligonucleotide
guggccucauaccccgauu

SEQ ID NO: 2627330 - RNA, 19 nt, Artificial Sequence
  Description of Artificial Sequence: Synthetic oligonucleotide
gcaugggcaccaccuugaa

SEQ ID NO: 2627331 - RNA, 19 nt, Artificial Sequence
  Description of Artificial Sequence: Synthetic oligonucleotide
cguccggcuaaggagcauc

SEQ ID NO: 2627332 - RNA, 19 nt, Artificial Sequence
  Description of Artificial Sequence: Synthetic oligonucleotide
caguggccucauaccccga

SEQ ID NO: 2627333 - RNA, 19 nt, Artificial Sequence
  Description of Artificial Sequence: Synthetic oligonucleotide
cucuccuggauggacccuu

SEQ ID NO: 2627334 - RNA, 19 nt, Artificial Sequence
  Description of Artificial Sequence: Synthetic oligonucleotide
guguggcacaagacacgua

SEQ ID NO: 2627335 - RNA, 19 nt, Artificial Sequence
  Description of Artificial Sequence: Synthetic oligonucleotide
cguguccuuguugugugga

SEQ ID NO: 2627336 - RNA, 19 nt, Artificial Sequence
  Description of Artificial Sequence: Synthetic oligonucleotide
ggauagcagugagcaaagu

SEQ ID NO: 2627337 - RNA, 19 nt, Artificial Sequence
  Description of Artificial Sequence: Synthetic oligonucleotide
gcgucacucgagucgccua

SEQ ID NO: 2627338 - RNA, 19 nt, Artificial Sequence
  Description of Artificial Sequence: Synthetic oligonucleotide
cgucuggauucagcauggg

SEQ ID NO: 2627339 - RNA, 19 nt, Artificial Sequence
  Description of Artificial Sequence: Synthetic oligonucleotide
auggacccuugcagucaaa

SEQ ID NO: 2627340 - RNA, 19 nt, Artificial Sequence
  Description of Artificial Sequence: Synthetic oligonucleotide
cgucacucgagucgccuaa

SEQ ID NO: 2627341 - RNA, 19 nt, Artificial Sequence
  Description of Artificial Sequence: Synthetic oligonucleotide
cacagccuugcgcuuucuu

SEQ ID NO: 2627342 - RNA, 19 nt, Artificial Sequence
  Description of Artificial Sequence: Synthetic oligonucleotide
cccguccggcuaaggagca

SEQ ID NO: 2627343 - RNA, 19 nt, Artificial Sequence
  Description of Artificial Sequence: Synthetic oligonucleotide
gccuugcgcuuucuugagu

SEQ ID NO: 2627344 - RNA, 19 nt, Artificial Sequence
  Description of Artificial Sequence: Synthetic oligonucleotide
ggcgcccaucuugcccaag

SEQ ID NO: 2627345 - RNA, 19 nt, Artificial Sequence
  Description of Artificial Sequence: Synthetic oligonucleotide
ccccacaaucacaccgucu

SEQ ID NO: 2627346 - RNA, 19 nt, Artificial Sequence
  Description of Artificial Sequence: Synthetic oligonucleotide
ccgaagcaaccgcgcguca

SEQ ID NO: 2627347 - RNA, 19 nt, Artificial Sequence
  Description of Artificial Sequence: Synthetic oligonucleotide
gcgcgucacucgagucgcc

SEQ ID NO: 2627348 - RNA, 19 nt, Artificial Sequence
  Description of Artificial Sequence: Synthetic oligonucleotide
cgcccaucuugcccaagau

SEQ ID NO: 2627349 - RNA, 19 nt, Artificial Sequence
  Description of Artificial Sequence: Synthetic oligonucleotide
cgcgucacucgagucgccu

SEQ ID NO: 2627350 - RNA, 19 nt, Artificial Sequence
  Description of Artificial Sequence: Synthetic oligonucleotide
ccguccggcuaaggagcau

SEQ ID NO: 2627351 - RNA, 19 nt, Artificial Sequence
  Description of Artificial Sequence: Synthetic oligonucleotide
aggaaauugaaauacuucc

SEQ ID NO: 2627352 - RNA, 19 nt, Artificial Sequence
  Description of Artificial Sequence: Synthetic oligonucleotide
aaauacuuccccuugaaug

SEQ ID NO: 2627353 - RNA, 19 nt, Artificial Sequence
  Description of Artificial Sequence: Synthetic oligonucleotide
uuuacaucgaacuggaucc

SEQ ID NO: 2627354 - RNA, 19 nt, Artificial Sequence
  Description of Artificial Sequence: Synthetic oligonucleotide
uugaauaagagucagauuu

SEQ ID NO: 2627355 - RNA, 19 nt, Artificial Sequence
  Description of Artificial Sequence: Synthetic oligonucleotide
aggacaaugacauuggagg

SEQ ID NO: 2627356 - RNA, 19 nt, Artificial Sequence
  Description of Artificial Sequence: Synthetic oligonucleotide
ucgaucaagaacaauauug

SEQ ID NO: 2627357 - RNA, 19 nt, Artificial Sequence
  Description of Artificial Sequence: Synthetic oligonucleotide
gaagagacgaaguacaugc

SEQ ID NO: 2627358 - RNA, 19 nt, Artificial Sequence
  Description of Artificial Sequence: Synthetic oligonucleotide
aaauuuuccaaacacagua

SEQ ID NO: 2627359 - RNA, 19 nt, Artificial Sequence
  Description of Artificial Sequence: Synthetic oligonucleotide
uagaggaacaguaugcugg

SEQ ID NO: 2627360 - RNA, 19 nt, Artificial Sequence
  Description of Artificial Sequence: Synthetic oligonucleotide
auaagagucagauuuucac

SEQ ID NO: 2627361 - RNA, 19 nt, Artificial Sequence
  Description of Artificial Sequence: Synthetic oligonucleotide
aacaguaugcuggagaggg

SEQ ID NO: 2627362 - RNA, 19 nt, Artificial Sequence
  Description of Artificial Sequence: Synthetic oligonucleotide
cuuaguagcauacagauca

SEQ ID NO: 2627363 - RNA, 19 nt, Artificial Sequence
  Description of Artificial Sequence: Synthetic oligonucleotide
aauguuuuggaguauucga

SEQ ID NO: 2627364 - RNA, 19 nt, Artificial Sequence
  Description of Artificial Sequence: Synthetic oligonucleotide
gaaauugaaauacuucccc

SEQ ID NO: 2627365 - RNA, 19 nt, Artificial Sequence
  Description of Artificial Sequence: Synthetic oligonucleotide
uucacagugaucucaaugc

SEQ ID NO: 2627366 - RNA, 19 nt, Artificial Sequence
  Description of Artificial Sequence: Synthetic oligonucleotide
auacagaucagcuguuucc

SEQ ID NO: 2627367 - RNA, 19 nt, Artificial Sequence
  Description of Artificial Sequence: Synthetic oligonucleotide
aacaauauugaugguugcc

SEQ ID NO: 2627368 - RNA, 19 nt, Artificial Sequence
  Description of Artificial Sequence: Synthetic oligonucleotide
auuccaaccagaaugaagg

SEQ ID NO: 2627369 - RNA, 19 nt, Artificial Sequence
  Description of Artificial Sequence: Synthetic oligonucleotide
gaugguacgguauucuggg

SEQ ID NO: 2627370 - RNA, 19 nt, Artificial Sequence
  Description of Artificial Sequence: Synthetic oligonucleotide
ucagauuuucacuuccugg

SEQ ID NO: 2627371 - RNA, 19 nt, Artificial Sequence
  Description of Artificial Sequence: Synthetic oligonucleotide
uuccuguugaauaagaguc

SEQ ID NO: 2627372 - RNA, 19 nt, Artificial Sequence
  Description of Artificial Sequence: Synthetic oligonucleotide
ugaauugaaguucuccgag

SEQ ID NO: 2627373 - RNA, 19 nt, Artificial Sequence
  Description of Artificial Sequence: Synthetic oligonucleotide
ucugauagagcugacaaug

SEQ ID NO: 2627374 - RNA, 19 nt, Artificial Sequence
  Description of Artificial Sequence: Synthetic oligonucleotide
uaaaagaacuuggugagag

SEQ ID NO: 2627375 - RNA, 19 nt, Artificial Sequence
  Description of Artificial Sequence: Synthetic oligonucleotide
uuuccuuaguagcauacag

SEQ ID NO: 2627376 - RNA, 19 nt, Artificial Sequence
  Description of Artificial Sequence: Synthetic oligonucleotide
ugugcuaacagcaggacaa

SEQ ID NO: 2627377 - RNA, 19 nt, Artificial Sequence
  Description of Artificial Sequence: Synthetic oligonucleotide
gaacuuuacaucgaacugg

SEQ ID NO: 2627378 - RNA, 19 nt, Artificial Sequence
  Description of Artificial Sequence: Synthetic oligonucleotide
uuccaaacacaguaaauag

SEQ ID NO: 2627379 - RNA, 19 nt, Artificial Sequence
  Description of Artificial Sequence: Synthetic oligonucleotide
agaaguugaauugaaguuc

SEQ ID NO: 2627380 - RNA, 19 nt, Artificial Sequence
  Description of Artificial Sequence: Synthetic oligonucleotide
aaauugaaauacuuccccu

SEQ ID NO: 2627381 - RNA, 19 nt, Artificial Sequence
  Description of Artificial Sequence: Synthetic oligonucleotide
aaaguaacccaggaaauug

SEQ ID NO: 2627382 - RNA, 19 nt, Artificial Sequence
  Description of Artificial Sequence: Synthetic oligonucleotide
aaugccucuggugacaggg

SEQ ID NO: 2627383 - RNA, 19 nt, Artificial Sequence
  Description of Artificial Sequence: Synthetic oligonucleotide
aaagaacuuggugagagug

SEQ ID NO: 2627384 - RNA, 19 nt, Artificial Sequence
  Description of Artificial Sequence: Synthetic oligonucleotide
cagauuuucacuuccuggg

SEQ ID NO: 2627385 - RNA, 19 nt, Artificial Sequence
  Description of Artificial Sequence: Synthetic oligonucleotide
aagaugacgucaaaccagc

SEQ ID NO: 2627386 - RNA, 19 nt, Artificial Sequence
  Description of Artificial Sequence: Synthetic oligonucleotide
uauuccaaccagaaugaag

SEQ ID NO: 2627387 - RNA, 19 nt, Artificial Sequence
  Description of Artificial Sequence: Synthetic oligonucleotide
acauuggaggacuuacugc

SEQ ID NO: 2627388 - RNA, 19 nt, Artificial Sequence
  Description of Artificial Sequence: Synthetic oligonucleotide
ugaugguacgguauucugg

SEQ ID NO: 2627389 - RNA, 19 nt, Artificial Sequence
  Description of Artificial Sequence: Synthetic oligonucleotide
gaugacgucaaaccagcgg

SEQ ID NO: 2627390 - RNA, 19 nt, Artificial Sequence
  Description of Artificial Sequence: Synthetic oligonucleotide
aacuuggugagagugauca

SEQ ID NO: 2627391 - RNA, 19 nt, Artificial Sequence
  Description of Artificial Sequence: Synthetic oligonucleotide
uagcauacagaucagcugu

SEQ ID NO: 2627392 - RNA, 19 nt, Artificial Sequence
  Description of Artificial Sequence: Synthetic oligonucleotide
acuugugugaugaugguac

SEQ ID NO: 2627393 - RNA, 19 nt, Artificial Sequence
  Description of Artificial Sequence: Synthetic oligonucleotide
uaacccaggaaauugaaau

SEQ ID NO: 2627394 - RNA, 19 nt, Artificial Sequence
  Description of Artificial Sequence: Synthetic oligonucleotide
cuuuacaucgaacuggauc

SEQ ID NO: 2627395 - RNA, 19 nt, Artificial Sequence
  Description of Artificial Sequence: Synthetic oligonucleotide
accagaaugaaggagaugu

SEQ ID NO: 2627396 - RNA, 19 nt, Artificial Sequence
  Description of Artificial Sequence: Synthetic oligonucleotide
gacaaugauuauuccaacc

SEQ ID NO: 2627397 - RNA, 19 nt, Artificial Sequence
  Description of Artificial Sequence: Synthetic oligonucleotide
uguugaauaagagucagau

SEQ ID NO: 2627398 - RNA, 19 nt, Artificial Sequence
  Description of Artificial Sequence: Synthetic oligonucleotide
uaucugugcuaacagcagg

SEQ ID NO: 2627399 - RNA, 19 nt, Artificial Sequence
  Description of Artificial Sequence: Synthetic oligonucleotide
aaguacaugcccauuaucu

SEQ ID NO: 2627400 - RNA, 19 nt, Artificial Sequence
  Description of Artificial Sequence: Synthetic oligonucleotide
gaauguuuuggaguauucg

SEQ ID NO: 2627401 - RNA, 19 nt, Artificial Sequence
  Description of Artificial Sequence: Synthetic oligonucleotide
agaacuuuacaucgaacug

SEQ ID NO: 2627402 - RNA, 19 nt, Artificial Sequence
  Description of Artificial Sequence: Synthetic oligonucleotide
gaauugaaguucuccgagg

SEQ ID NO: 2627403 - RNA, 19 nt, Artificial Sequence
  Description of Artificial Sequence: Synthetic oligonucleotide
aagagucagauuuucacuu

SEQ ID NO: 2627404 - RNA, 19 nt, Artificial Sequence
  Description of Artificial Sequence: Synthetic oligonucleotide
aucucaaugccucugguga

SEQ ID NO: 2627405 - RNA, 19 nt, Artificial Sequence
  Description of Artificial Sequence: Synthetic oligonucleotide
gaagaugacgucaaaccag

SEQ ID NO: 2627406 - RNA, 19 nt, Artificial Sequence
  Description of Artificial Sequence: Synthetic oligonucleotide
uccuuaguagcauacagau

SEQ ID NO: 2627407 - RNA, 19 nt, Artificial Sequence
  Description of Artificial Sequence: Synthetic oligonucleotide
auucacagugaucucaaug

SEQ ID NO: 2627408 - RNA, 19 nt, Artificial Sequence
  Description of Artificial Sequence: Synthetic oligonucleotide
agaacaauauugaugguug

SEQ ID NO: 2627409 - RNA, 19 nt, Artificial Sequence
  Description of Artificial Sequence: Synthetic oligonucleotide
gacauuggaggacuuacug

SEQ ID NO: 2627410 - RNA, 19 nt, Artificial Sequence
  Description of Artificial Sequence: Synthetic oligonucleotide
uaagagucagauuuucacu

SEQ ID NO: 2627411 - RNA, 19 nt, Artificial Sequence
  Description of Artificial Sequence: Synthetic oligonucleotide
uuaucugugcuaacagcag

SEQ ID NO: 2627412 - RNA, 19 nt, Artificial Sequence
  Description of Artificial Sequence: Synthetic oligonucleotide
aaugauuauuccaaccaga

SEQ ID NO: 2627413 - RNA, 19 nt, Artificial Sequence
  Description of Artificial Sequence: Synthetic oligonucleotide
cugcuugugagccagguag

SEQ ID NO: 2627414 - RNA, 19 nt, Artificial Sequence
  Description of Artificial Sequence: Synthetic oligonucleotide
uuucccaacucgaucaaga

SEQ ID NO: 2627415 - RNA, 19 nt, Artificial Sequence
  Description of Artificial Sequence: Synthetic oligonucleotide
ucuacuuccuguugaauaa

SEQ ID NO: 2627416 - RNA, 19 nt, Artificial Sequence
  Description of Artificial Sequence: Synthetic oligonucleotide
gcauaaaagaacuugguga

SEQ ID NO: 2627417 - RNA, 19 nt, Artificial Sequence
  Description of Artificial Sequence: Synthetic oligonucleotide
gauuuucacuuccuggggc

SEQ ID NO: 2627418 - RNA, 19 nt, Artificial Sequence
  Description of Artificial Sequence: Synthetic oligonucleotide
augacgucaaaccagcggu

SEQ ID NO: 2627419 - RNA, 19 nt, Artificial Sequence
  Description of Artificial Sequence: Synthetic oligonucleotide
agagcugccugcuuaguuc

SEQ ID NO: 2627420 - RNA, 19 nt, Artificial Sequence
  Description of Artificial Sequence: Synthetic oligonucleotide
uugaauugaaguucuccga

SEQ ID NO: 2627421 - RNA, 19 nt, Artificial Sequence
  Description of Artificial Sequence: Synthetic oligonucleotide
uggguaugaggucagggug

SEQ ID NO: 2627422 - RNA, 19 nt, Artificial Sequence
  Description of Artificial Sequence: Synthetic oligonucleotide
aacucgaucaagaacaaua

SEQ ID NO: 2627423 - RNA, 19 nt, Artificial Sequence
  Description of Artificial Sequence: Synthetic oligonucleotide
aagaacaauauugaugguu

SEQ ID NO: 2627424 - RNA, 19 nt, Artificial Sequence
  Description of Artificial Sequence: Synthetic oligonucleotide
auuaucugugcuaacagca

SEQ ID NO: 2627425 - RNA, 19 nt, Artificial Sequence
  Description of Artificial Sequence: Synthetic oligonucleotide
cauuaucugugcuaacagc

SEQ ID NO: 2627426 - RNA, 19 nt, Artificial Sequence
  Description of Artificial Sequence: Synthetic oligonucleotide
gaaugaaggagaugugcug

SEQ ID NO: 2627427 - RNA, 19 nt, Artificial Sequence
  Description of Artificial Sequence: Synthetic oligonucleotide
ucgauucuuuccuuaguag

SEQ ID NO: 2627428 - RNA, 19 nt, Artificial Sequence
  Description of Artificial Sequence: Synthetic oligonucleotide
uuccccuugaauguuuugg

SEQ ID NO: 2627429 - RNA, 19 nt, Artificial Sequence
  Description of Artificial Sequence: Synthetic oligonucleotide
augacauuggaggacuuac

SEQ ID NO: 2627430 - RNA, 19 nt, Artificial Sequence
  Description of Artificial Sequence: Synthetic oligonucleotide
auggcauaaaagaacuugg

SEQ ID NO: 2627431 - RNA, 19 nt, Artificial Sequence
  Description of Artificial Sequence: Synthetic oligonucleotide
aggacuugugugaugaugg

SEQ ID NO: 2627432 - RNA, 19 nt, Artificial Sequence
  Description of Artificial Sequence: Synthetic oligonucleotide
auugaaguucuccgaggac

SEQ ID NO: 2627433 - RNA, 19 nt, Artificial Sequence
  Description of Artificial Sequence: Synthetic oligonucleotide
aguacaugcccauuaucug

SEQ ID NO: 2627434 - RNA, 19 nt, Artificial Sequence
  Description of Artificial Sequence: Synthetic oligonucleotide
uuccuuaguagcauacaga

SEQ ID NO: 2627435 - RNA, 19 nt, Artificial Sequence
  Description of Artificial Sequence: Synthetic oligonucleotide
uugaaguucuccgaggacu

SEQ ID NO: 2627436 - RNA, 19 nt, Artificial Sequence
  Description of Artificial Sequence: Synthetic oligonucleotide
ggugguagaaguugaauug

SEQ ID NO: 2627437 - RNA, 19 nt, Artificial Sequence
  Description of Artificial Sequence: Synthetic oligonucleotide
guagaaguugaauugaagu

SEQ ID NO: 2627438 - RNA, 19 nt, Artificial Sequence
  Description of Artificial Sequence: Synthetic oligonucleotide
ugagaccagaacuuuacau

SEQ ID NO: 2627439 - RNA, 19 nt, Artificial Sequence
  Description of Artificial Sequence: Synthetic oligonucleotide
ugugaugaugguacgguau

SEQ ID NO: 2627440 - RNA, 19 nt, Artificial Sequence
  Description of Artificial Sequence: Synthetic oligonucleotide
gacuuacugcuggagaugg

SEQ ID NO: 2627441 - RNA, 19 nt, Artificial Sequence
  Description of Artificial Sequence: Synthetic oligonucleotide
cuaacagcaggacaaugac

SEQ ID NO: 2627442 - RNA, 19 nt, Artificial Sequence
  Description of Artificial Sequence: Synthetic oligonucleotide
auugaugguugccauaaaa

SEQ ID NO: 2627443 - RNA, 19 nt, Artificial Sequence
  Description of Artificial Sequence: Synthetic oligonucleotide
uacaugcccauuaucugug

SEQ ID NO: 2627444 - RNA, 19 nt, Artificial Sequence
  Description of Artificial Sequence: Synthetic oligonucleotide
guagcauacagaucagcug

SEQ ID NO: 2627445 - RNA, 19 nt, Artificial Sequence
  Description of Artificial Sequence: Synthetic oligonucleotide
caggaaauugaaauacuuc

SEQ ID NO: 2627446 - RNA, 19 nt, Artificial Sequence
  Description of Artificial Sequence: Synthetic oligonucleotide
acaauauugaugguugcca

SEQ ID NO: 2627447 - RNA, 19 nt, Artificial Sequence
  Description of Artificial Sequence: Synthetic oligonucleotide
agagucagauuuucacuuc

SEQ ID NO: 2627448 - RNA, 19 nt, Artificial Sequence
  Description of Artificial Sequence: Synthetic oligonucleotide
ugugcugagaccagaacuu

SEQ ID NO: 2627449 - RNA, 19 nt, Artificial Sequence
  Description of Artificial Sequence: Synthetic oligonucleotide
aauauugaugguugccaua

SEQ ID NO: 2627450 - RNA, 19 nt, Artificial Sequence
  Description of Artificial Sequence: Synthetic oligonucleotide
gagucagauuuucacuucc

SEQ ID NO: 2627451 - RNA, 19 nt, Artificial Sequence
  Description of Artificial Sequence: Synthetic oligonucleotide
uucuccgaggacuugugug

SEQ ID NO: 2627452 - RNA, 19 nt, Artificial Sequence
  Description of Artificial Sequence: Synthetic oligonucleotide
aauaagagucagauuuuca

SEQ ID NO: 2627453 - RNA, 19 nt, Artificial Sequence
  Description of Artificial Sequence: Synthetic oligonucleotide
uuaguagcauacagaucag

SEQ ID NO: 2627454 - RNA, 19 nt, Artificial Sequence
  Description of Artificial Sequence: Synthetic oligonucleotide
ggaacaguaugcuggagag

SEQ ID NO: 2627455 - RNA, 19 nt, Artificial Sequence
  Description of Artificial Sequence: Synthetic oligonucleotide
acagugaucucaaugccuc

SEQ ID NO: 2627456 - RNA, 19 nt, Artificial Sequence
  Description of Artificial Sequence: Synthetic oligonucleotide
gauucuuuccuuaguagca

SEQ ID NO: 2627457 - RNA, 19 nt, Artificial Sequence
  Description of Artificial Sequence: Synthetic oligonucleotide
gaacaauauugaugguugc

SEQ ID NO: 2627458 - RNA, 19 nt, Artificial Sequence
  Description of Artificial Sequence: Synthetic oligonucleotide
acacaguaaauagagaaaa

SEQ ID NO: 2627459 - RNA, 19 nt, Artificial Sequence
  Description of Artificial Sequence: Synthetic oligonucleotide
agcugacaaugauuauucc

SEQ ID NO: 2627460 - RNA, 19 nt, Artificial Sequence
  Description of Artificial Sequence: Synthetic oligonucleotide
guuuuggaguauucgauuc

SEQ ID NO: 2627461 - RNA, 19 nt, Artificial Sequence
  Description of Artificial Sequence: Synthetic oligonucleotide
auuauuccaaccagaauga

SEQ ID NO: 2627462 - RNA, 19 nt, Artificial Sequence
  Description of Artificial Sequence: Synthetic oligonucleotide
ucgaacuggauccccaggu

SEQ ID NO: 2627463 - RNA, 19 nt, Artificial Sequence
  Description of Artificial Sequence: Synthetic oligonucleotide
uccuguugaauaagaguca

SEQ ID NO: 2627464 - RNA, 19 nt, Artificial Sequence
  Description of Artificial Sequence: Synthetic oligonucleotide
cagaaugaaggagaugugc

SEQ ID NO: 2627465 - RNA, 19 nt, Artificial Sequence
  Description of Artificial Sequence: Synthetic oligonucleotide
caggacaaugacauuggag

SEQ ID NO: 2627466 - RNA, 19 nt, Artificial Sequence
  Description of Artificial Sequence: Synthetic oligonucleotide
aggaacaguaugcuggaga

SEQ ID NO: 2627467 - RNA, 19 nt, Artificial Sequence
  Description of Artificial Sequence: Synthetic oligonucleotide
aacuuuacaucgaacugga

SEQ ID NO: 2627468 - RNA, 19 nt, Artificial Sequence
  Description of Artificial Sequence: Synthetic oligonucleotide
uggaguauucgauucuuuc

SEQ ID NO: 2627469 - RNA, 19 nt, Artificial Sequence
  Description of Artificial Sequence: Synthetic oligonucleotide
uggcauaaaagaacuuggu

SEQ ID NO: 2627470 - RNA, 19 nt, Artificial Sequence
  Description of Artificial Sequence: Synthetic oligonucleotide
auuuucacuuccuggggcu

SEQ ID NO: 2627471 - RNA, 19 nt, Artificial Sequence
  Description of Artificial Sequence: Synthetic oligonucleotide
ugaauaagagucagauuuu

SEQ ID NO: 2627472 - RNA, 19 nt, Artificial Sequence
  Description of Artificial Sequence: Synthetic oligonucleotide
ggaguauucgauucuuucc

SEQ ID NO: 2627473 - RNA, 19 nt, Artificial Sequence
  Description of Artificial Sequence: Synthetic oligonucleotide
uccaaccagaaugaaggag

SEQ ID NO: 2627474 - RNA, 19 nt, Artificial Sequence
  Description of Artificial Sequence: Synthetic oligonucleotide
aacacaguaaauagagaaa

SEQ ID NO: 2627475 - RNA, 19 nt, Artificial Sequence
  Description of Artificial Sequence: Synthetic oligonucleotide
ugaauguuuuggaguauuc

SEQ ID NO: 2627476 - RNA, 19 nt, Artificial Sequence
  Description of Artificial Sequence: Synthetic oligonucleotide
agcaucuacuuccuguuga

SEQ ID NO: 2627477 - RNA, 19 nt, Artificial Sequence
  Description of Artificial Sequence: Synthetic oligonucleotide
auccccagguaauucacag

SEQ ID NO: 2627478 - RNA, 19 nt, Artificial Sequence
  Description of Artificial Sequence: Synthetic oligonucleotide
auagagcugacaaugauua

SEQ ID NO: 2627479 - RNA, 19 nt, Artificial Sequence
  Description of Artificial Sequence: Synthetic oligonucleotide
ggcauaaaagaacuuggug

SEQ ID NO: 2627480 - RNA, 19 nt, Artificial Sequence
  Description of Artificial Sequence: Synthetic oligonucleotide
ugauagagcugacaaugau

SEQ ID NO: 2627481 - RNA, 19 nt, Artificial Sequence
  Description of Artificial Sequence: Synthetic oligonucleotide
uacuuccuguugaauaaga

SEQ ID NO: 2627482 - RNA, 19 nt, Artificial Sequence
  Description of Artificial Sequence: Synthetic oligonucleotide
uguuuuggaguauucgauu

SEQ ID NO: 2627483 - RNA, 19 nt, Artificial Sequence
  Description of Artificial Sequence: Synthetic oligonucleotide
aauuuuccaaacacaguaa

SEQ ID NO: 2627484 - RNA, 19 nt, Artificial Sequence
  Description of Artificial Sequence: Synthetic oligonucleotide
cuugugugaugaugguacg

SEQ ID NO: 2627485 - RNA, 19 nt, Artificial Sequence
  Description of Artificial Sequence: Synthetic oligonucleotide
ugauuauuccaaccagaau

SEQ ID NO: 2627486 - RNA, 19 nt, Artificial Sequence
  Description of Artificial Sequence: Synthetic oligonucleotide
agaaugaaggagaugugcu

SEQ ID NO: 2627487 - RNA, 19 nt, Artificial Sequence
  Description of Artificial Sequence: Synthetic oligonucleotide
ugacaaugauuauuccaac

SEQ ID NO: 2627488 - RNA, 19 nt, Artificial Sequence
  Description of Artificial Sequence: Synthetic oligonucleotide
gugaucucaaugccucugg

SEQ ID NO: 2627489 - RNA, 19 nt, Artificial Sequence
  Description of Artificial Sequence: Synthetic oligonucleotide
gaauaagagucagauuuuc

SEQ ID NO: 2627490 - RNA, 19 nt, Artificial Sequence
  Description of Artificial Sequence: Synthetic oligonucleotide
agcagcacggaagagacga

SEQ ID NO: 2627491 - RNA, 19 nt, Artificial Sequence
  Description of Artificial Sequence: Synthetic oligonucleotide
aggagaugugcugagacca

SEQ ID NO: 2627492 - RNA, 19 nt, Artificial Sequence
  Description of Artificial Sequence: Synthetic oligonucleotide
gagcugacaaugauuauuc

SEQ ID NO: 2627493 - RNA, 19 nt, Artificial Sequence
  Description of Artificial Sequence: Synthetic oligonucleotide
ugaucagcaguccucugau

SEQ ID NO: 2627494 - RNA, 19 nt, Artificial Sequence
  Description of Artificial Sequence: Synthetic oligonucleotide
ggaaauugaaauacuuccc

SEQ ID NO: 2627495 - RNA, 19 nt, Artificial Sequence
  Description of Artificial Sequence: Synthetic oligonucleotide
gaguauucgauucuuuccu

SEQ ID NO: 2627496 - RNA, 19 nt, Artificial Sequence
  Description of Artificial Sequence: Synthetic oligonucleotide
aggacuuacugcuggagau

SEQ ID NO: 2627497 - RNA, 19 nt, Artificial Sequence
  Description of Artificial Sequence: Synthetic oligonucleotide
gacaaugacauuggaggac

SEQ ID NO: 2627498 - RNA, 19 nt, Artificial Sequence
  Description of Artificial Sequence: Synthetic oligonucleotide
guagaggaacaguaugcug

SEQ ID NO: 2627499 - RNA, 19 nt, Artificial Sequence
  Description of Artificial Sequence: Synthetic oligonucleotide
acaaugacauuggaggacu

SEQ ID NO: 2627500 - RNA, 19 nt, Artificial Sequence
  Description of Artificial Sequence: Synthetic oligonucleotide
cauucggaucagcagcacg

SEQ ID NO: 2627501 - RNA, 19 nt, Artificial Sequence
  Description of Artificial Sequence: Synthetic oligonucleotide
cugcuuaguucuuccagag

SEQ ID NO: 2627502 - RNA, 19 nt, Artificial Sequence
  Description of Artificial Sequence: Synthetic oligonucleotide
gacgucaaaccagcggugg

SEQ ID NO: 2627503 - RNA, 19 nt, Artificial Sequence
  Description of Artificial Sequence: Synthetic oligonucleotide
augaugguacgguauucug

SEQ ID NO: 2627504 - RNA, 19 nt, Artificial Sequence
  Description of Artificial Sequence: Synthetic oligonucleotide
agagugaucagcaguccuc

SEQ ID NO: 2627505 - RNA, 19 nt, Artificial Sequence
  Description of Artificial Sequence: Synthetic oligonucleotide
aguggguaugaggucaggg

SEQ ID NO: 2627506 - RNA, 19 nt, Artificial Sequence
  Description of Artificial Sequence: Synthetic oligonucleotide
gacgcaguuacgcucuuca

SEQ ID NO: 2627507 - RNA, 19 nt, Artificial Sequence
  Description of Artificial Sequence: Synthetic oligonucleotide
agaucagcuguuuccagaa

SEQ ID NO: 2627508 - RNA, 19 nt, Artificial Sequence
  Description of Artificial Sequence: Synthetic oligonucleotide
ugguagaaguugaauugaa

SEQ ID NO: 2627509 - RNA, 19 nt, Artificial Sequence
  Description of Artificial Sequence: Synthetic oligonucleotide
gucagauuuucacuuccug

SEQ ID NO: 2627510 - RNA, 19 nt, Artificial Sequence
  Description of Artificial Sequence: Synthetic oligonucleotide
cagaacuuuacaucgaacu

SEQ ID NO: 2627511 - RNA, 19 nt, Artificial Sequence
  Description of Artificial Sequence: Synthetic oligonucleotide
aaaccagcggugguagaag

SEQ ID NO: 2627512 - RNA, 19 nt, Artificial Sequence
  Description of Artificial Sequence: Synthetic oligonucleotide
uggauccccagguaauuca

SEQ ID NO: 2627513 - RNA, 19 nt, Artificial Sequence
  Description of Artificial Sequence: Synthetic oligonucleotide
gcucauucggaucagcagc

SEQ ID NO: 2627514 - RNA, 19 nt, Artificial Sequence
  Description of Artificial Sequence: Synthetic oligonucleotide
acaugcccauuaucugugc

SEQ ID NO: 2627515 - RNA, 19 nt, Artificial Sequence
  Description of Artificial Sequence: Synthetic oligonucleotide
ugcuuaguucuuccagagc

SEQ ID NO: 2627516 - RNA, 19 nt, Artificial Sequence
  Description of Artificial Sequence: Synthetic oligonucleotide
uccccuugaauguuuugga

SEQ ID NO: 2627517 - RNA, 19 nt, Artificial Sequence
  Description of Artificial Sequence: Synthetic oligonucleotide
cauacagaucagcuguuuc

SEQ ID NO: 2627518 - RNA, 19 nt, Artificial Sequence
  Description of Artificial Sequence: Synthetic oligonucleotide
aaguaacccaggaaauuga

SEQ ID NO: 2627519 - RNA, 19 nt, Artificial Sequence
  Description of Artificial Sequence: Synthetic oligonucleotide
cccaacucgaucaagaaca

SEQ ID NO: 2627520 - RNA, 19 nt, Artificial Sequence
  Description of Artificial Sequence: Synthetic oligonucleotide
aucgaacuggauccccagg

SEQ ID NO: 2627521 - RNA, 19 nt, Artificial Sequence
  Description of Artificial Sequence: Synthetic oligonucleotide
acugaccaggaagaugacg

SEQ ID NO: 2627522 - RNA, 19 nt, Artificial Sequence
  Description of Artificial Sequence: Synthetic oligonucleotide
ugaaguucuccgaggacuu

SEQ ID NO: 2627523 - RNA, 19 nt, Artificial Sequence
  Description of Artificial Sequence: Synthetic oligonucleotide
gaggacuugugugaugaug

SEQ ID NO: 2627524 - RNA, 19 nt, Artificial Sequence
  Description of Artificial Sequence: Synthetic oligonucleotide
gguccguuuucccaacucg

SEQ ID NO: 2627525 - RNA, 19 nt, Artificial Sequence
  Description of Artificial Sequence: Synthetic oligonucleotide
cuggagagggcacugacca

SEQ ID NO: 2627526 - RNA, 19 nt, Artificial Sequence
  Description of Artificial Sequence: Synthetic oligonucleotide
aaccagcggugguagaagu

SEQ ID NO: 2627527 - RNA, 19 nt, Artificial Sequence
  Description of Artificial Sequence: Synthetic oligonucleotide
gaugugcugagaccagaac

SEQ ID NO: 2627528 - RNA, 19 nt, Artificial Sequence
  Description of Artificial Sequence: Synthetic oligonucleotide
ggaagaugacgucaaacca

SEQ ID NO: 2627529 - RNA, 19 nt, Artificial Sequence
  Description of Artificial Sequence: Synthetic oligonucleotide
ugccaugugcuucucuggu

SEQ ID NO: 2627530 - RNA, 19 nt, Artificial Sequence
  Description of Artificial Sequence: Synthetic oligonucleotide
ugacgucaaaccagcggug

SEQ ID NO: 2627531 - RNA, 19 nt, Artificial Sequence
  Description of Artificial Sequence: Synthetic oligonucleotide
augauuauuccaaccagaa

SEQ ID NO: 2627532 - RNA, 19 nt, Artificial Sequence
  Description of Artificial Sequence: Synthetic oligonucleotide
gagacgaaguacaugccca

SEQ ID NO: 2627533 - RNA, 19 nt, Artificial Sequence
  Description of Artificial Sequence: Synthetic oligonucleotide
agagcugacaaugauuauu

SEQ ID NO: 2627534 - RNA, 19 nt, Artificial Sequence
  Description of Artificial Sequence: Synthetic oligonucleotide
gaggacuuacugcuggaga

SEQ ID NO: 2627535 - RNA, 19 nt, Artificial Sequence
  Description of Artificial Sequence: Synthetic oligonucleotide
acgaaguacaugcccauua

SEQ ID NO: 2627536 - RNA, 19 nt, Artificial Sequence
  Description of Artificial Sequence: Synthetic oligonucleotide
aaguucuccgaggacuugu

SEQ ID NO: 2627537 - RNA, 19 nt, Artificial Sequence
  Description of Artificial Sequence: Synthetic oligonucleotide
cauuggaggacuuacugcu

SEQ ID NO: 2627538 - RNA, 19 nt, Artificial Sequence
  Description of Artificial Sequence: Synthetic oligonucleotide
gaacaguaugcuggagagg

SEQ ID NO: 2627539 - RNA, 19 nt, Artificial Sequence
  Description of Artificial Sequence: Synthetic oligonucleotide
gaaguugaauugaaguucu

SEQ ID NO: 2627540 - RNA, 19 nt, Artificial Sequence
  Description of Artificial Sequence: Synthetic oligonucleotide
acggaagagacgaaguaca

SEQ ID NO: 2627541 - RNA, 19 nt, Artificial Sequence
  Description of Artificial Sequence: Synthetic oligonucleotide
accagaacuuuacaucgaa

SEQ ID NO: 2627542 - RNA, 19 nt, Artificial Sequence
  Description of Artificial Sequence: Synthetic oligonucleotide
gcugacaaugauuauucca

SEQ ID NO: 2627543 - RNA, 19 nt, Artificial Sequence
  Description of Artificial Sequence: Synthetic oligonucleotide
uuuucccaacucgaucaag

SEQ ID NO: 2627544 - RNA, 19 nt, Artificial Sequence
  Description of Artificial Sequence: Synthetic oligonucleotide
ucucaaugccucuggugac

SEQ ID NO: 2627545 - RNA, 19 nt, Artificial Sequence
  Description of Artificial Sequence: Synthetic oligonucleotide
aucagcagcacggaagaga

SEQ ID NO: 2627546 - RNA, 19 nt, Artificial Sequence
  Description of Artificial Sequence: Synthetic oligonucleotide
cugaccaggaagaugacgu

SEQ ID NO: 2627547 - RNA, 19 nt, Artificial Sequence
  Description of Artificial Sequence: Synthetic oligonucleotide
aauucacagugaucucaau

SEQ ID NO: 2627548 - RNA, 19 nt, Artificial Sequence
  Description of Artificial Sequence: Synthetic oligonucleotide
gcuguuuccagaaagagcu

SEQ ID NO: 2627549 - RNA, 19 nt, Artificial Sequence
  Description of Artificial Sequence: Synthetic oligonucleotide
cacggaagagacgaaguac

SEQ ID NO: 2627550 - RNA, 19 nt, Artificial Sequence
  Description of Artificial Sequence: Synthetic oligonucleotide
agugaucucaaugccucug

SEQ ID NO: 2627551 - RNA, 19 nt, Artificial Sequence
  Description of Artificial Sequence: Synthetic oligonucleotide
agaacuuggugagagugau

SEQ ID NO: 2627552 - RNA, 19 nt, Artificial Sequence
  Description of Artificial Sequence: Synthetic oligonucleotide
uaguagcauacagaucagc

SEQ ID NO: 2627553 - RNA, 19 nt, Artificial Sequence
  Description of Artificial Sequence: Synthetic oligonucleotide
uuccaaccagaaugaagga

SEQ ID NO: 2627554 - RNA, 19 nt, Artificial Sequence
  Description of Artificial Sequence: Synthetic oligonucleotide
aaugacauuggaggacuua

SEQ ID NO: 2627555 - RNA, 19 nt, Artificial Sequence
  Description of Artificial Sequence: Synthetic oligonucleotide
ggugccaugugcuucucug

SEQ ID NO: 2627556 - RNA, 19 nt, Artificial Sequence
  Description of Artificial Sequence: Synthetic oligonucleotide
aaguugaauugaaguucuc

SEQ ID NO: 2627557 - RNA, 19 nt, Artificial Sequence
  Description of Artificial Sequence: Synthetic oligonucleotide
cacuuccuggggcugacgc

SEQ ID NO: 2627558 - RNA, 19 nt, Artificial Sequence
  Description of Artificial Sequence: Synthetic oligonucleotide
uucccaacucgaucaagaa

SEQ ID NO: 2627559 - RNA, 19 nt, Artificial Sequence
  Description of Artificial Sequence: Synthetic oligonucleotide
auaaaagaacuuggugaga

SEQ ID NO: 2627560 - RNA, 19 nt, Artificial Sequence
  Description of Artificial Sequence: Synthetic oligonucleotide
uccguuuucccaacucgau

SEQ ID NO: 2627561 - RNA, 19 nt, Artificial Sequence
  Description of Artificial Sequence: Synthetic oligonucleotide
cuuacugcuggagauggca

SEQ ID NO: 2627562 - RNA, 19 nt, Artificial Sequence
  Description of Artificial Sequence: Synthetic oligonucleotide
caucgaacuggauccccag

SEQ ID NO: 2627563 - RNA, 19 nt, Artificial Sequence
  Description of Artificial Sequence: Synthetic oligonucleotide
ugcccauuaucugugcuaa

SEQ ID NO: 2627564 - RNA, 19 nt, Artificial Sequence
  Description of Artificial Sequence: Synthetic oligonucleotide
gugccaugugcuucucugg

SEQ ID NO: 2627565 - RNA, 19 nt, Artificial Sequence
  Description of Artificial Sequence: Synthetic oligonucleotide
augguacgguauucugggg

SEQ ID NO: 2627566 - RNA, 19 nt, Artificial Sequence
  Description of Artificial Sequence: Synthetic oligonucleotide
ggagagggcacugaccagg

SEQ ID NO: 2627567 - RNA, 19 nt, Artificial Sequence
  Description of Artificial Sequence: Synthetic oligonucleotide
uggugagagugaucagcag

SEQ ID NO: 2627568 - RNA, 19 nt, Artificial Sequence
  Description of Artificial Sequence: Synthetic oligonucleotide
aguaugcuggagagggcac

SEQ ID NO: 2627569 - RNA, 19 nt, Artificial Sequence
  Description of Artificial Sequence: Synthetic oligonucleotide
aguauucgauucuuuccuu

SEQ ID NO: 2627570 - RNA, 19 nt, Artificial Sequence
  Description of Artificial Sequence: Synthetic oligonucleotide
auguuuuggaguauucgau

SEQ ID NO: 2627571 - RNA, 19 nt, Artificial Sequence
  Description of Artificial Sequence: Synthetic oligonucleotide
cuuccuguugaauaagagu

SEQ ID NO: 2627572 - RNA, 19 nt, Artificial Sequence
  Description of Artificial Sequence: Synthetic oligonucleotide
ccaaccagaaugaaggaga

SEQ ID NO: 2627573 - RNA, 19 nt, Artificial Sequence
  Description of Artificial Sequence: Synthetic oligonucleotide
uacaucgaacuggaucccc

SEQ ID NO: 2627574 - RNA, 19 nt, Artificial Sequence
  Description of Artificial Sequence: Synthetic oligonucleotide
acucgaucaagaacaauau

SEQ ID NO: 2627575 - RNA, 19 nt, Artificial Sequence
  Description of Artificial Sequence: Synthetic oligonucleotide
cucauucggaucagcagca

SEQ ID NO: 2627576 - RNA, 19 nt, Artificial Sequence
  Description of Artificial Sequence: Synthetic oligonucleotide
uuacaucgaacuggauccc

SEQ ID NO: 2627577 - RNA, 19 nt, Artificial Sequence
  Description of Artificial Sequence: Synthetic oligonucleotide
ccauuaucugugcuaacag

SEQ ID NO: 2627578 - RNA, 19 nt, Artificial Sequence
  Description of Artificial Sequence: Synthetic oligonucleotide
gcacugaccaggaagauga

SEQ ID NO: 2627579 - RNA, 19 nt, Artificial Sequence
  Description of Artificial Sequence: Synthetic oligonucleotide
guacaugcccauuaucugu

SEQ ID NO: 2627580 - RNA, 19 nt, Artificial Sequence
  Description of Artificial Sequence: Synthetic oligonucleotide
gagcaucuacuuccuguug

SEQ ID NO: 2627581 - RNA, 19 nt, Artificial Sequence
  Description of Artificial Sequence: Synthetic oligonucleotide
cagguaauucacagugauc

SEQ ID NO: 2627582 - RNA, 19 nt, Artificial Sequence
  Description of Artificial Sequence: Synthetic oligonucleotide
ugcuaacagcaggacaaug

SEQ ID NO: 2627583 - RNA, 19 nt, Artificial Sequence
  Description of Artificial Sequence: Synthetic oligonucleotide
aaccagaaugaaggagaug

SEQ ID NO: 2627584 - RNA, 19 nt, Artificial Sequence
  Description of Artificial Sequence: Synthetic oligonucleotide
uuuucacuuccuggggcug

SEQ ID NO: 2627585 - RNA, 19 nt, Artificial Sequence
  Description of Artificial Sequence: Synthetic oligonucleotide
acuuggugagagugaucag

SEQ ID NO: 2627586 - RNA, 19 nt, Artificial Sequence
  Description of Artificial Sequence: Synthetic oligonucleotide
uauugaugguugccauaaa

SEQ ID NO: 2627587 - RNA, 19 nt, Artificial Sequence
  Description of Artificial Sequence: Synthetic oligonucleotide
caugugcuucucuggugcc

SEQ ID NO: 2627588 - RNA, 19 nt, Artificial Sequence
  Description of Artificial Sequence: Synthetic oligonucleotide
ucugugcuaacagcaggac

SEQ ID NO: 2627589 - RNA, 19 nt, Artificial Sequence
  Description of Artificial Sequence: Synthetic oligonucleotide
cugauagagcugacaauga

SEQ ID NO: 2627590 - RNA, 19 nt, Artificial Sequence
  Description of Artificial Sequence: Synthetic oligonucleotide
ccccagguaauucacagug

SEQ ID NO: 2627591 - RNA, 19 nt, Artificial Sequence
  Description of Artificial Sequence: Synthetic oligonucleotide
ugaaggagaugugcugaga

SEQ ID NO: 2627592 - RNA, 19 nt, Artificial Sequence
  Description of Artificial Sequence: Synthetic oligonucleotide
aucugugcuaacagcagga

SEQ ID NO: 2627593 - RNA, 19 nt, Artificial Sequence
  Description of Artificial Sequence: Synthetic oligonucleotide
uuggaguauucgauucuuu

SEQ ID NO: 2627594 - RNA, 19 nt, Artificial Sequence
  Description of Artificial Sequence: Synthetic oligonucleotide
gaccaggaagaugacguca

SEQ ID NO: 2627595 - RNA, 19 nt, Artificial Sequence
  Description of Artificial Sequence: Synthetic oligonucleotide
ccaugugcuucucuggugc

SEQ ID NO: 2627596 - RNA, 19 nt, Artificial Sequence
  Description of Artificial Sequence: Synthetic oligonucleotide
acaguaugcuggagagggc

SEQ ID NO: 2627597 - RNA, 19 nt, Artificial Sequence
  Description of Artificial Sequence: Synthetic oligonucleotide
uccucugauagagcugaca

SEQ ID NO: 2627598 - RNA, 19 nt, Artificial Sequence
  Description of Artificial Sequence: Synthetic oligonucleotide
auucuuuccuuaguagcau

SEQ ID NO: 2627599 - RNA, 19 nt, Artificial Sequence
  Description of Artificial Sequence: Synthetic oligonucleotide
gugguagaaguugaauuga

SEQ ID NO: 2627600 - RNA, 19 nt, Artificial Sequence
  Description of Artificial Sequence: Synthetic oligonucleotide
ugccucuggugacaggguc

SEQ ID NO: 2627601 - RNA, 19 nt, Artificial Sequence
  Description of Artificial Sequence: Synthetic oligonucleotide
gaugaugguacgguauucu

SEQ ID NO: 2627602 - RNA, 19 nt, Artificial Sequence
  Description of Artificial Sequence: Synthetic oligonucleotide
agacgaaguacaugcccau

SEQ ID NO: 2627603 - RNA, 19 nt, Artificial Sequence
  Description of Artificial Sequence: Synthetic oligonucleotide
ggaucagcagcacggaaga

SEQ ID NO: 2627604 - RNA, 19 nt, Artificial Sequence
  Description of Artificial Sequence: Synthetic oligonucleotide
uggaggacuuacugcugga

SEQ ID NO: 2627605 - RNA, 19 nt, Artificial Sequence
  Description of Artificial Sequence: Synthetic oligonucleotide
uuauuccaaccagaaugaa

SEQ ID NO: 2627606 - RNA, 19 nt, Artificial Sequence
  Description of Artificial Sequence: Synthetic oligonucleotide
uuucacuuccuggggcuga

SEQ ID NO: 2627607 - RNA, 19 nt, Artificial Sequence
  Description of Artificial Sequence: Synthetic oligonucleotide
augcccauuaucugugcua

SEQ ID NO: 2627608 - RNA, 19 nt, Artificial Sequence
  Description of Artificial Sequence: Synthetic oligonucleotide
uggggcugacgcaguuacg

SEQ ID NO: 2627609 - RNA, 19 nt, Artificial Sequence
  Description of Artificial Sequence: Synthetic oligonucleotide
gcuaacagcaggacaauga

SEQ ID NO: 2627610 - RNA, 19 nt, Artificial Sequence
  Description of Artificial Sequence: Synthetic oligonucleotide
agcaguccucugauagagc

SEQ ID NO: 2627611 - RNA, 19 nt, Artificial Sequence
  Description of Artificial Sequence: Synthetic oligonucleotide
acuuacugcuggagauggc

SEQ ID NO: 2627612 - RNA, 19 nt, Artificial Sequence
  Description of Artificial Sequence: Synthetic oligonucleotide
uggagagggcacugaccag

SEQ ID NO: 2627613 - RNA, 19 nt, Artificial Sequence
  Description of Artificial Sequence: Synthetic oligonucleotide
gauagagcugacaaugauu

SEQ ID NO: 2627614 - RNA, 19 nt, Artificial Sequence
  Description of Artificial Sequence: Synthetic oligonucleotide
acgcaguuacgcucuucag

SEQ ID NO: 2627615 - RNA, 19 nt, Artificial Sequence
  Description of Artificial Sequence: Synthetic oligonucleotide
aaagagcugccugcuuagu

SEQ ID NO: 2627616 - RNA, 19 nt, Artificial Sequence
  Description of Artificial Sequence: Synthetic oligonucleotide
uacugcuggagauggcaua

SEQ ID NO: 2627617 - RNA, 19 nt, Artificial Sequence
  Description of Artificial Sequence: Synthetic oligonucleotide
uccccagguaauucacagu

SEQ ID NO: 2627618 - RNA, 19 nt, Artificial Sequence
  Description of Artificial Sequence: Synthetic oligonucleotide
ggaagagacgaaguacaug

SEQ ID NO: 2627619 - RNA, 19 nt, Artificial Sequence
  Description of Artificial Sequence: Synthetic oligonucleotide
aguaacccaggaaauugaa

SEQ ID NO: 2627620 - RNA, 19 nt, Artificial Sequence
  Description of Artificial Sequence: Synthetic oligonucleotide
ccuguugaauaagagucag

SEQ ID NO: 2627621 - RNA, 19 nt, Artificial Sequence
  Description of Artificial Sequence: Synthetic oligonucleotide
agcacggaagagacgaagu

SEQ ID NO: 2627622 - RNA, 19 nt, Artificial Sequence
  Description of Artificial Sequence: Synthetic oligonucleotide
gagagugaucagcaguccu

SEQ ID NO: 2627623 - RNA, 19 nt, Artificial Sequence
  Description of Artificial Sequence: Synthetic oligonucleotide
gccugcuuaguucuuccag

SEQ ID NO: 2627624 - RNA, 19 nt, Artificial Sequence
  Description of Artificial Sequence: Synthetic oligonucleotide
agaugacgucaaaccagcg

SEQ ID NO: 2627625 - RNA, 19 nt, Artificial Sequence
  Description of Artificial Sequence: Synthetic oligonucleotide
cgaucaagaacaauauuga

SEQ ID NO: 2627626 - RNA, 19 nt, Artificial Sequence
  Description of Artificial Sequence: Synthetic oligonucleotide
cagagcaucuacuuccugu

SEQ ID NO: 2627627 - RNA, 19 nt, Artificial Sequence
  Description of Artificial Sequence: Synthetic oligonucleotide
ucuggugacaggguccguu

SEQ ID NO: 2627628 - RNA, 19 nt, Artificial Sequence
  Description of Artificial Sequence: Synthetic oligonucleotide
caguaugcuggagagggca

SEQ ID NO: 2627629 - RNA, 19 nt, Artificial Sequence
  Description of Artificial Sequence: Synthetic oligonucleotide
augcucauucggaucagca

SEQ ID NO: 2627630 - RNA, 19 nt, Artificial Sequence
  Description of Artificial Sequence: Synthetic oligonucleotide
acgucaaaccagcgguggu

SEQ ID NO: 2627631 - RNA, 19 nt, Artificial Sequence
  Description of Artificial Sequence: Synthetic oligonucleotide
cugugcuaacagcaggaca

SEQ ID NO: 2627632 - RNA, 19 nt, Artificial Sequence
  Description of Artificial Sequence: Synthetic oligonucleotide
cagcacggaagagacgaag

SEQ ID NO: 2627633 - RNA, 19 nt, Artificial Sequence
  Description of Artificial Sequence: Synthetic oligonucleotide
auuggaggacuuacugcug

SEQ ID NO: 2627634 - RNA, 19 nt, Artificial Sequence
  Description of Artificial Sequence: Synthetic oligonucleotide
gguaauucacagugaucuc

SEQ ID NO: 2627635 - RNA, 19 nt, Artificial Sequence
  Description of Artificial Sequence: Synthetic oligonucleotide
ggggcugacgcaguuacgc

SEQ ID NO: 2627636 - RNA, 19 nt, Artificial Sequence
  Description of Artificial Sequence: Synthetic oligonucleotide
uacuuccccuugaauguuu

SEQ ID NO: 2627637 - RNA, 19 nt, Artificial Sequence
  Description of Artificial Sequence: Synthetic oligonucleotide
uccgaggacuugugugaug

SEQ ID NO: 2627638 - RNA, 19 nt, Artificial Sequence
  Description of Artificial Sequence: Synthetic oligonucleotide
caguccucugauagagcug

SEQ ID NO: 2627639 - RNA, 19 nt, Artificial Sequence
  Description of Artificial Sequence: Synthetic oligonucleotide
ggugagagugaucagcagu

SEQ ID NO: 2627640 - RNA, 19 nt, Artificial Sequence
  Description of Artificial Sequence: Synthetic oligonucleotide
caugcucauucggaucagc

SEQ ID NO: 2627641 - RNA, 19 nt, Artificial Sequence
  Description of Artificial Sequence: Synthetic oligonucleotide
gcugagaccagaacuuuac

SEQ ID NO: 2627642 - RNA, 19 nt, Artificial Sequence
  Description of Artificial Sequence: Synthetic oligonucleotide
cuuccccuugaauguuuug

SEQ ID NO: 2627643 - RNA, 19 nt, Artificial Sequence
  Description of Artificial Sequence: Synthetic oligonucleotide
cuguugaauaagagucaga

SEQ ID NO: 2627644 - RNA, 19 nt, Artificial Sequence
  Description of Artificial Sequence: Synthetic oligonucleotide
cuuuccuuaguagcauaca

SEQ ID NO: 2627645 - RNA, 19 nt, Artificial Sequence
  Description of Artificial Sequence: Synthetic oligonucleotide
gaggaacaguaugcuggag

SEQ ID NO: 2627646 - RNA, 19 nt, Artificial Sequence
  Description of Artificial Sequence: Synthetic oligonucleotide
acaucgaacuggaucccca

SEQ ID NO: 2627647 - RNA, 19 nt, Artificial Sequence
  Description of Artificial Sequence: Synthetic oligonucleotide
guaacccaggaaauugaaa

SEQ ID NO: 2627648 - RNA, 19 nt, Artificial Sequence
  Description of Artificial Sequence: Synthetic oligonucleotide
cugagaccagaacuuuaca

SEQ ID NO: 2627649 - RNA, 19 nt, Artificial Sequence
  Description of Artificial Sequence: Synthetic oligonucleotide
gugagccagguagaggaac

SEQ ID NO: 2627650 - RNA, 19 nt, Artificial Sequence
  Description of Artificial Sequence: Synthetic oligonucleotide
gugccugcuugugagccag

SEQ ID NO: 2627651 - RNA, 19 nt, Artificial Sequence
  Description of Artificial Sequence: Synthetic oligonucleotide
gguaugaggucagggugcc

SEQ ID NO: 2627652 - RNA, 19 nt, Artificial Sequence
  Description of Artificial Sequence: Synthetic oligonucleotide
caauauugaugguugccau

SEQ ID NO: 2627653 - RNA, 19 nt, Artificial Sequence
  Description of Artificial Sequence: Synthetic oligonucleotide
gaccagaacuuuacaucga

SEQ ID NO: 2627654 - RNA, 19 nt, Artificial Sequence
  Description of Artificial Sequence: Synthetic oligonucleotide
gacuugugugaugauggua

SEQ ID NO: 2627655 - RNA, 19 nt, Artificial Sequence
  Description of Artificial Sequence: Synthetic oligonucleotide
aguucuccgaggacuugug

SEQ ID NO: 2627656 - RNA, 19 nt, Artificial Sequence
  Description of Artificial Sequence: Synthetic oligonucleotide
gagcugccugcuuaguucu

SEQ ID NO: 2627657 - RNA, 19 nt, Artificial Sequence
  Description of Artificial Sequence: Synthetic oligonucleotide
caaaccagcggugguagaa

SEQ ID NO: 2627658 - RNA, 19 nt, Artificial Sequence
  Description of Artificial Sequence: Synthetic oligonucleotide
gauccccagguaauucaca

SEQ ID NO: 2627659 - RNA, 19 nt, Artificial Sequence
  Description of Artificial Sequence: Synthetic oligonucleotide
ucauucggaucagcagcac

SEQ ID NO: 2627660 - RNA, 19 nt, Artificial Sequence
  Description of Artificial Sequence: Synthetic oligonucleotide
guuuucccaacucgaucaa

SEQ ID NO: 2627661 - RNA, 19 nt, Artificial Sequence
  Description of Artificial Sequence: Synthetic oligonucleotide
gaucagcuguuuccagaaa

SEQ ID NO: 2627662 - RNA, 19 nt, Artificial Sequence
  Description of Artificial Sequence: Synthetic oligonucleotide
guccguuuucccaacucga

SEQ ID NO: 2627663 - RNA, 19 nt, Artificial Sequence
  Description of Artificial Sequence: Synthetic oligonucleotide
ccucugauagagcugacaa

SEQ ID NO: 2627664 - RNA, 19 nt, Artificial Sequence
  Description of Artificial Sequence: Synthetic oligonucleotide
cuggauccccagguaauuc

SEQ ID NO: 2627665 - RNA, 19 nt, Artificial Sequence
  Description of Artificial Sequence: Synthetic oligonucleotide
gagugaucagcaguccucu

SEQ ID NO: 2627666 - RNA, 19 nt, Artificial Sequence
  Description of Artificial Sequence: Synthetic oligonucleotide
ucacuuccuggggcugacg

SEQ ID NO: 2627667 - RNA, 19 nt, Artificial Sequence
  Description of Artificial Sequence: Synthetic oligonucleotide
ggaggacuuacugcuggag

SEQ ID NO: 2627668 - RNA, 19 nt, Artificial Sequence
  Description of Artificial Sequence: Synthetic oligonucleotide
gcaguccucugauagagcu

SEQ ID NO: 2627669 - RNA, 19 nt, Artificial Sequence
  Description of Artificial Sequence: Synthetic oligonucleotide
ccugcuuaguucuuccaga

SEQ ID NO: 2627670 - RNA, 19 nt, Artificial Sequence
  Description of Artificial Sequence: Synthetic oligonucleotide
ggcugacgcaguuacgcuc

SEQ ID NO: 2627671 - RNA, 19 nt, Artificial Sequence
  Description of Artificial Sequence: Synthetic oligonucleotide
ggacuuacugcuggagaug

SEQ ID NO: 2627672 - RNA, 19 nt, Artificial Sequence
  Description of Artificial Sequence: Synthetic oligonucleotide
ccuuaguagcauacagauc

SEQ ID NO: 2627673 - RNA, 19 nt, Artificial Sequence
  Description of Artificial Sequence: Synthetic oligonucleotide
cucaaugccucuggugaca

SEQ ID NO: 2627674 - RNA, 19 nt, Artificial Sequence
  Description of Artificial Sequence: Synthetic oligonucleotide
acuggauccccagguaauu

SEQ ID NO: 2627675 - RNA, 19 nt, Artificial Sequence
  Description of Artificial Sequence: Synthetic oligonucleotide
cuuaguucuuccagagcau

SEQ ID NO: 2627676 - RNA, 19 nt, Artificial Sequence
  Description of Artificial Sequence: Synthetic oligonucleotide
ccagcggugguagaaguug

SEQ ID NO: 2627677 - RNA, 19 nt, Artificial Sequence
  Description of Artificial Sequence: Synthetic oligonucleotide
gugaugaugguacgguauu

SEQ ID NO: 2627678 - RNA, 19 nt, Artificial Sequence
  Description of Artificial Sequence: Synthetic oligonucleotide
ggagaugugcugagaccag

SEQ ID NO: 2627679 - RNA, 19 nt, Artificial Sequence
  Description of Artificial Sequence: Synthetic oligonucleotide
gagagggcacugaccagga

SEQ ID NO: 2627680 - RNA, 19 nt, Artificial Sequence
  Description of Artificial Sequence: Synthetic oligonucleotide
cacugaccaggaagaugac

SEQ ID NO: 2627681 - RNA, 19 nt, Artificial Sequence
  Description of Artificial Sequence: Synthetic oligonucleotide
gaucagcaguccucugaua

SEQ ID NO: 2627682 - RNA, 19 nt, Artificial Sequence
  Description of Artificial Sequence: Synthetic oligonucleotide
auacuuccccuugaauguu

SEQ ID NO: 2627683 - RNA, 19 nt, Artificial Sequence
  Description of Artificial Sequence: Synthetic oligonucleotide
gccaugugcuucucuggug

SEQ ID NO: 2627684 - RNA, 19 nt, Artificial Sequence
  Description of Artificial Sequence: Synthetic oligonucleotide
cagcggugguagaaguuga

SEQ ID NO: 2627685 - RNA, 19 nt, Artificial Sequence
  Description of Artificial Sequence: Synthetic oligonucleotide
aggguccguuuucccaacu

SEQ ID NO: 2627686 - RNA, 19 nt, Artificial Sequence
  Description of Artificial Sequence: Synthetic oligonucleotide
caggguccguuuucccaac

SEQ ID NO: 2627687 - RNA, 19 nt, Artificial Sequence
  Description of Artificial Sequence: Synthetic oligonucleotide
caaccagaaugaaggagau

SEQ ID NO: 2627688 - RNA, 19 nt, Artificial Sequence
  Description of Artificial Sequence: Synthetic oligonucleotide
gcaucuacuuccuguugaa

SEQ ID NO: 2627689 - RNA, 19 nt, Artificial Sequence
  Description of Artificial Sequence: Synthetic oligonucleotide
ggauccccagguaauucac

SEQ ID NO: 2627690 - RNA, 19 nt, Artificial Sequence
  Description of Artificial Sequence: Synthetic oligonucleotide
caguggguaugaggucagg

SEQ ID NO: 2627691 - RNA, 19 nt, Artificial Sequence
  Description of Artificial Sequence: Synthetic oligonucleotide
ccguuuucccaacucgauc

SEQ ID NO: 2627692 - RNA, 19 nt, Artificial Sequence
  Description of Artificial Sequence: Synthetic oligonucleotide
caagaacaauauugauggu

SEQ ID NO: 2627693 - RNA, 19 nt, Artificial Sequence
  Description of Artificial Sequence: Synthetic oligonucleotide
agcauacagaucagcuguu

SEQ ID NO: 2627694 - RNA, 19 nt, Artificial Sequence
  Description of Artificial Sequence: Synthetic oligonucleotide
ugacgcaguuacgcucuuc

SEQ ID NO: 2627695 - RNA, 19 nt, Artificial Sequence
  Description of Artificial Sequence: Synthetic oligonucleotide
ggguccguuuucccaacuc

SEQ ID NO: 2627696 - RNA, 19 nt, Artificial Sequence
  Description of Artificial Sequence: Synthetic oligonucleotide
cccuugaauguuuuggagu

SEQ ID NO: 2627697 - RNA, 19 nt, Artificial Sequence
  Description of Artificial Sequence: Synthetic oligonucleotide
caugcccauuaucugugcu

SEQ ID NO: 2627698 - RNA, 19 nt, Artificial Sequence
  Description of Artificial Sequence: Synthetic oligonucleotide
gcaggacaaugacauugga

SEQ ID NO: 2627699 - RNA, 19 nt, Artificial Sequence
  Description of Artificial Sequence: Synthetic oligonucleotide
agagggcacugaccaggaa

SEQ ID NO: 2627700 - RNA, 19 nt, Artificial Sequence
  Description of Artificial Sequence: Synthetic oligonucleotide
gcacggaagagacgaagua

SEQ ID NO: 2627701 - RNA, 19 nt, Artificial Sequence
  Description of Artificial Sequence: Synthetic oligonucleotide
guucuccgaggacuugugu

SEQ ID NO: 2627702 - RNA, 19 nt, Artificial Sequence
  Description of Artificial Sequence: Synthetic oligonucleotide
cucgaucaagaacaauauu

SEQ ID NO: 2627703 - RNA, 19 nt, Artificial Sequence
  Description of Artificial Sequence: Synthetic oligonucleotide
ccgaggacuugugugauga

SEQ ID NO: 2627704 - RNA, 19 nt, Artificial Sequence
  Description of Artificial Sequence: Synthetic oligonucleotide
acuuuacaucgaacuggau

SEQ ID NO: 2627705 - RNA, 19 nt, Artificial Sequence
  Description of Artificial Sequence: Synthetic oligonucleotide
cagggugccaugugcuucu

SEQ ID NO: 2627706 - RNA, 19 nt, Artificial Sequence
  Description of Artificial Sequence: Synthetic oligonucleotide
guaugcuggagagggcacu

SEQ ID NO: 2627707 - RNA, 19 nt, Artificial Sequence
  Description of Artificial Sequence: Synthetic oligonucleotide
agcggugguagaaguugaa

SEQ ID NO: 2627708 - RNA, 19 nt, Artificial Sequence
  Description of Artificial Sequence: Synthetic oligonucleotide
ggugccugcuugugagcca

SEQ ID NO: 2627709 - RNA, 19 nt, Artificial Sequence
  Description of Artificial Sequence: Synthetic oligonucleotide
accagcggugguagaaguu

SEQ ID NO: 2627710 - RNA, 19 nt, Artificial Sequence
  Description of Artificial Sequence: Synthetic oligonucleotide
ggacuugugugaugauggu

SEQ ID NO: 2627711 - RNA, 19 nt, Artificial Sequence
  Description of Artificial Sequence: Synthetic oligonucleotide
cuugaauguuuuggaguau

SEQ ID NO: 2627712 - RNA, 19 nt, Artificial Sequence
  Description of Artificial Sequence: Synthetic oligonucleotide
gcaugcucauucggaucag

SEQ ID NO: 2627713 - RNA, 19 nt, Artificial Sequence
  Description of Artificial Sequence: Synthetic oligonucleotide
gcugacgcaguuacgcucu

SEQ ID NO: 2627714 - RNA, 19 nt, Artificial Sequence
  Description of Artificial Sequence: Synthetic oligonucleotide
cagugaucucaaugccucu

SEQ ID NO: 2627715 - RNA, 19 nt, Artificial Sequence
  Description of Artificial Sequence: Synthetic oligonucleotide
ccaacucgaucaagaacaa

SEQ ID NO: 2627716 - RNA, 19 nt, Artificial Sequence
  Description of Artificial Sequence: Synthetic oligonucleotide
gacgaaguacaugcccauu

SEQ ID NO: 2627717 - RNA, 19 nt, Artificial Sequence
  Description of Artificial Sequence: Synthetic oligonucleotide
cccaggaaauugaaauacu

SEQ ID NO: 2627718 - RNA, 19 nt, Artificial Sequence
  Description of Artificial Sequence: Synthetic oligonucleotide
ggucagggugccaugugcu

SEQ ID NO: 2627719 - RNA, 19 nt, Artificial Sequence
  Description of Artificial Sequence: Synthetic oligonucleotide
gcccauuaucugugcuaac

SEQ ID NO: 2627720 - RNA, 19 nt, Artificial Sequence
  Description of Artificial Sequence: Synthetic oligonucleotide
cuggugacaggguccguuu

SEQ ID NO: 2627721 - RNA, 19 nt, Artificial Sequence
  Description of Artificial Sequence: Synthetic oligonucleotide
guaugaggucagggugcca

SEQ ID NO: 2627722 - RNA, 19 nt, Artificial Sequence
  Description of Artificial Sequence: Synthetic oligonucleotide
gucagggugccaugugcuu

SEQ ID NO: 2627723 - RNA, 19 nt, Artificial Sequence
  Description of Artificial Sequence: Synthetic oligonucleotide
guccucugauagagcugac

SEQ ID NO: 2627724 - RNA, 19 nt, Artificial Sequence
  Description of Artificial Sequence: Synthetic oligonucleotide
ccagguagaggaacaguau

SEQ ID NO: 2627725 - RNA, 19 nt, Artificial Sequence
  Description of Artificial Sequence: Synthetic oligonucleotide
caaugacauuggaggacuu

SEQ ID NO: 2627726 - RNA, 19 nt, Artificial Sequence
  Description of Artificial Sequence: Synthetic oligonucleotide
gggcugacgcaguuacgcu

SEQ ID NO: 2627727 - RNA, 19 nt, Artificial Sequence
  Description of Artificial Sequence: Synthetic oligonucleotide
gugcugagaccagaacuuu

SEQ ID NO: 2627728 - RNA, 19 nt, Artificial Sequence
  Description of Artificial Sequence: Synthetic oligonucleotide
gugcuaacagcaggacaau

SEQ ID NO: 2627729 - RNA, 19 nt, Artificial Sequence
  Description of Artificial Sequence: Synthetic oligonucleotide
cggugguagaaguugaauu

SEQ ID NO: 2627730 - RNA, 19 nt, Artificial Sequence
  Description of Artificial Sequence: Synthetic oligonucleotide
caacucgaucaagaacaau

SEQ ID NO: 2627731 - RNA, 19 nt, Artificial Sequence
  Description of Artificial Sequence: Synthetic oligonucleotide
ccagaaagagcugccugcu

SEQ ID NO: 2627732 - RNA, 19 nt, Artificial Sequence
  Description of Artificial Sequence: Synthetic oligonucleotide
cuccgaggacuugugugau

SEQ ID NO: 2627733 - RNA, 19 nt, Artificial Sequence
  Description of Artificial Sequence: Synthetic oligonucleotide
ccugcuugugagccaggua

SEQ ID NO: 2627734 - RNA, 19 nt, Artificial Sequence
  Description of Artificial Sequence: Synthetic oligonucleotide
gcggugguagaaguugaau

SEQ ID NO: 2627735 - RNA, 19 nt, Artificial Sequence
  Description of Artificial Sequence: Synthetic oligonucleotide
gcauacagaucagcuguuu

SEQ ID NO: 2627736 - RNA, 19 nt, Artificial Sequence
  Description of Artificial Sequence: Synthetic oligonucleotide
cgucaaaccagcgguggua

SEQ ID NO: 2627737 - RNA, 19 nt, Artificial Sequence
  Description of Artificial Sequence: Synthetic oligonucleotide
gggugccaugugcuucucu

SEQ ID NO: 2627738 - RNA, 19 nt, Artificial Sequence
  Description of Artificial Sequence: Synthetic oligonucleotide
gcagcacggaagagacgaa

SEQ ID NO: 2627739 - RNA, 19 nt, Artificial Sequence
  Description of Artificial Sequence: Synthetic oligonucleotide
cggaagagacgaaguacau

SEQ ID NO: 2627740 - RNA, 19 nt, Artificial Sequence
  Description of Artificial Sequence: Synthetic oligonucleotide
cugacgcaguuacgcucuu

SEQ ID NO: 2627741 - RNA, 19 nt, Artificial Sequence
  Description of Artificial Sequence: Synthetic oligonucleotide
cgaggacuugugugaugau

SEQ ID NO: 2627742 - RNA, 19 nt, Artificial Sequence
  Description of Artificial Sequence: Synthetic oligonucleotide
aaacauaucauauaugaag

SEQ ID NO: 2627743 - RNA, 19 nt, Artificial Sequence
  Description of Artificial Sequence: Synthetic oligonucleotide
aaaccuagcauuuaaacug

SEQ ID NO: 2627744 - RNA, 19 nt, Artificial Sequence
  Description of Artificial Sequence: Synthetic oligonucleotide
aagauuuuaacuuuccaag

SEQ ID NO: 2627745 - RNA, 19 nt, Artificial Sequence
  Description of Artificial Sequence: Synthetic oligonucleotide
aacacagcaaaucuggaac

SEQ ID NO: 2627746 - RNA, 19 nt, Artificial Sequence
  Description of Artificial Sequence: Synthetic oligonucleotide
aacauaucauauaugaagc

SEQ ID NO: 2627747 - RNA, 19 nt, Artificial Sequence
  Description of Artificial Sequence: Synthetic oligonucleotide
uguaaaacaauuuuaggac

SEQ ID NO: 2627748 - RNA, 19 nt, Artificial Sequence
  Description of Artificial Sequence: Synthetic oligonucleotide
uguaauauaaacauaucau

SEQ ID NO: 2627749 - RNA, 19 nt, Artificial Sequence
  Description of Artificial Sequence: Synthetic oligonucleotide
uuguaauauaaacauauca

SEQ ID NO: 2627750 - RNA, 19 nt, Artificial Sequence
  Description of Artificial Sequence: Synthetic oligonucleotide
ucuucagaggaccugaggg

SEQ ID NO: 2627751 - RNA, 19 nt, Artificial Sequence
  Description of Artificial Sequence: Synthetic oligonucleotide
uuugagaggaaccugaagu

SEQ ID NO: 2627752 - RNA, 19 nt, Artificial Sequence
  Description of Artificial Sequence: Synthetic oligonucleotide
acaauuuuaggacaggaag

SEQ ID NO: 2627753 - RNA, 19 nt, Artificial Sequence
  Description of Artificial Sequence: Synthetic oligonucleotide
caaaucuggaacaaguucg

SEQ ID NO: 2627754 - RNA, 19 nt, Artificial Sequence
  Description of Artificial Sequence: Synthetic oligonucleotide
aaauauucagguauguuuc

SEQ ID NO: 2627755 - RNA, 19 nt, Artificial Sequence
  Description of Artificial Sequence: Synthetic oligonucleotide
ugugaaacugaugagaaag

SEQ ID NO: 2627756 - RNA, 19 nt, Artificial Sequence
  Description of Artificial Sequence: Synthetic oligonucleotide
aucagaauaaucuacauua

SEQ ID NO: 2627757 - RNA, 19 nt, Artificial Sequence
  Description of Artificial Sequence: Synthetic oligonucleotide
ugcaugugaacucacaugc

SEQ ID NO: 2627758 - RNA, 19 nt, Artificial Sequence
  Description of Artificial Sequence: Synthetic oligonucleotide
agaaaccuagcauuuaaac

SEQ ID NO: 2627759 - RNA, 19 nt, Artificial Sequence
  Description of Artificial Sequence: Synthetic oligonucleotide
aagucuuuucucuggauuc

SEQ ID NO: 2627760 - RNA, 19 nt, Artificial Sequence
  Description of Artificial Sequence: Synthetic oligonucleotide
uugagaaauauucagguau

SEQ ID NO: 2627761 - RNA, 19 nt, Artificial Sequence
  Description of Artificial Sequence: Synthetic oligonucleotide
uuauaaguucaacugaacu

SEQ ID NO: 2627762 - RNA, 19 nt, Artificial Sequence
  Description of Artificial Sequence: Synthetic oligonucleotide
auauaaacauaucauauau

SEQ ID NO: 2627763 - RNA, 19 nt, Artificial Sequence
  Description of Artificial Sequence: Synthetic oligonucleotide
agcgaaaucuuuuggaaac

SEQ ID NO: 2627764 - RNA, 19 nt, Artificial Sequence
  Description of Artificial Sequence: Synthetic oligonucleotide
ucuggaacaaguucguggg

SEQ ID NO: 2627765 - RNA, 19 nt, Artificial Sequence
  Description of Artificial Sequence: Synthetic oligonucleotide
uccaagucaguccagauga

SEQ ID NO: 2627766 - RNA, 19 nt, Artificial Sequence
  Description of Artificial Sequence: Synthetic oligonucleotide
uguucuaagcaaaagugca

SEQ ID NO: 2627767 - RNA, 19 nt, Artificial Sequence
  Description of Artificial Sequence: Synthetic oligonucleotide
aucuacauuaacuugagaa

SEQ ID NO: 2627768 - RNA, 19 nt, Artificial Sequence
  Description of Artificial Sequence: Synthetic oligonucleotide
uaacuugagaaauauucag

SEQ ID NO: 2627769 - RNA, 19 nt, Artificial Sequence
  Description of Artificial Sequence: Synthetic oligonucleotide
agggauauucuccuugucc

SEQ ID NO: 2627770 - RNA, 19 nt, Artificial Sequence
  Description of Artificial Sequence: Synthetic oligonucleotide
guagccaagaaugagaaag

SEQ ID NO: 2627771 - RNA, 19 nt, Artificial Sequence
  Description of Artificial Sequence: Synthetic oligonucleotide
cuuuuggaaaccaugcugc

SEQ ID NO: 2627772 - RNA, 19 nt, Artificial Sequence
  Description of Artificial Sequence: Synthetic oligonucleotide
aacacaaucucacaccaga

SEQ ID NO: 2627773 - RNA, 19 nt, Artificial Sequence
  Description of Artificial Sequence: Synthetic oligonucleotide
uuuacuagaaggcucugga

SEQ ID NO: 2627774 - RNA, 19 nt, Artificial Sequence
  Description of Artificial Sequence: Synthetic oligonucleotide
aaacaagcuuccaaagucc

SEQ ID NO: 2627775 - RNA, 19 nt, Artificial Sequence
  Description of Artificial Sequence: Synthetic oligonucleotide
aauuuuaggacaggaagug

SEQ ID NO: 2627776 - RNA, 19 nt, Artificial Sequence
  Description of Artificial Sequence: Synthetic oligonucleotide
ugaacuugaauucuuuagu

SEQ ID NO: 2627777 - RNA, 19 nt, Artificial Sequence
  Description of Artificial Sequence: Synthetic oligonucleotide
uauaaacauaucauauaug

SEQ ID NO: 2627778 - RNA, 19 nt, Artificial Sequence
  Description of Artificial Sequence: Synthetic oligonucleotide
aguuucuucagggugaaac

SEQ ID NO: 2627779 - RNA, 19 nt, Artificial Sequence
  Description of Artificial Sequence: Synthetic oligonucleotide
ucaaagcgaaaucuuuugg

SEQ ID NO: 2627780 - RNA, 19 nt, Artificial Sequence
  Description of Artificial Sequence: Synthetic oligonucleotide
aaggcuaacacagcaaauc

SEQ ID NO: 2627781 - RNA, 19 nt, Artificial Sequence
  Description of Artificial Sequence: Synthetic oligonucleotide
aacuugaauucuuuaguug

SEQ ID NO: 2627782 - RNA, 19 nt, Artificial Sequence
  Description of Artificial Sequence: Synthetic oligonucleotide
gaaacaagcuuccaaaguc

SEQ ID NO: 2627783 - RNA, 19 nt, Artificial Sequence
  Description of Artificial Sequence: Synthetic oligonucleotide
auuuuauaaguucaacuga

SEQ ID NO: 2627784 - RNA, 19 nt, Artificial Sequence
  Description of Artificial Sequence: Synthetic oligonucleotide
uacuagaaggcucuggaug

SEQ ID NO: 2627785 - RNA, 19 nt, Artificial Sequence
  Description of Artificial Sequence: Synthetic oligonucleotide
caugcugcuauccucaggg

SEQ ID NO: 2627786 - RNA, 19 nt, Artificial Sequence
  Description of Artificial Sequence: Synthetic oligonucleotide
aacuugagaaauauucagg

SEQ ID NO: 2627787 - RNA, 19 nt, Artificial Sequence
  Description of Artificial Sequence: Synthetic oligonucleotide
aaaaggcuaacacagcaaa

SEQ ID NO: 2627788 - RNA, 19 nt, Artificial Sequence
  Description of Artificial Sequence: Synthetic oligonucleotide
auaaguucaacugaacuug

SEQ ID NO: 2627789 - RNA, 19 nt, Artificial Sequence
  Description of Artificial Sequence: Synthetic oligonucleotide
acaugcacaauuuacauuu

SEQ ID NO: 2627790 - RNA, 19 nt, Artificial Sequence
  Description of Artificial Sequence: Synthetic oligonucleotide
augauccuggauuugagag

SEQ ID NO: 2627791 - RNA, 19 nt, Artificial Sequence
  Description of Artificial Sequence: Synthetic oligonucleotide
aucuggaacaaguucgugg

SEQ ID NO: 2627792 - RNA, 19 nt, Artificial Sequence
  Description of Artificial Sequence: Synthetic oligonucleotide
ucuacauuaacuugagaaa

SEQ ID NO: 2627793 - RNA, 19 nt, Artificial Sequence
  Description of Artificial Sequence: Synthetic oligonucleotide
guccagaugagucacagag

SEQ ID NO: 2627794 - RNA, 19 nt, Artificial Sequence
  Description of Artificial Sequence: Synthetic oligonucleotide
uauaaguucaacugaacuu

SEQ ID NO: 2627795 - RNA, 19 nt, Artificial Sequence
  Description of Artificial Sequence: Synthetic oligonucleotide
uaagcaaaagugcauuugu

SEQ ID NO: 2627796 - RNA, 19 nt, Artificial Sequence
  Description of Artificial Sequence: Synthetic oligonucleotide
aaagcgaaaucuuuuggaa

SEQ ID NO: 2627797 - RNA, 19 nt, Artificial Sequence
  Description of Artificial Sequence: Synthetic oligonucleotide
auuacaggaggacuugggg

SEQ ID NO: 2627798 - RNA, 19 nt, Artificial Sequence
  Description of Artificial Sequence: Synthetic oligonucleotide
aaagaaaccuagcauuuaa

SEQ ID NO: 2627799 - RNA, 19 nt, Artificial Sequence
  Description of Artificial Sequence: Synthetic oligonucleotide
agaauaaucuacauuaacu

SEQ ID NO: 2627800 - RNA, 19 nt, Artificial Sequence
  Description of Artificial Sequence: Synthetic oligonucleotide
aguuguucuaagcaaaagu

SEQ ID NO: 2627801 - RNA, 19 nt, Artificial Sequence
  Description of Artificial Sequence: Synthetic oligonucleotide
aacuuuccaagucagucca

SEQ ID NO: 2627802 - RNA, 19 nt, Artificial Sequence
  Description of Artificial Sequence: Synthetic oligonucleotide
ugaaguuucuucaggguga

SEQ ID NO: 2627803 - RNA, 19 nt, Artificial Sequence
  Description of Artificial Sequence: Synthetic oligonucleotide
aaaccaugcugcuauccuc

SEQ ID NO: 2627804 - RNA, 19 nt, Artificial Sequence
  Description of Artificial Sequence: Synthetic oligonucleotide
gaugagaaaguuucaucag

SEQ ID NO: 2627805 - RNA, 19 nt, Artificial Sequence
  Description of Artificial Sequence: Synthetic oligonucleotide
gauuuuaacuuuccaaguc

SEQ ID NO: 2627806 - RNA, 19 nt, Artificial Sequence
  Description of Artificial Sequence: Synthetic oligonucleotide
uaaucuacauuaacuugag

SEQ ID NO: 2627807 - RNA, 19 nt, Artificial Sequence
  Description of Artificial Sequence: Synthetic oligonucleotide
aaaucuuuuggaaaccaug

SEQ ID NO: 2627808 - RNA, 19 nt, Artificial Sequence
  Description of Artificial Sequence: Synthetic oligonucleotide
agaaaguuucaucagaaua

SEQ ID NO: 2627809 - RNA, 19 nt, Artificial Sequence
  Description of Artificial Sequence: Synthetic oligonucleotide
guuguucuaagcaaaagug

SEQ ID NO: 2627810 - RNA, 19 nt, Artificial Sequence
  Description of Artificial Sequence: Synthetic oligonucleotide
cugaacuugaauucuuuag

SEQ ID NO: 2627811 - RNA, 19 nt, Artificial Sequence
  Description of Artificial Sequence: Synthetic oligonucleotide
aaaggcaggauuccgcugu

SEQ ID NO: 2627812 - RNA, 19 nt, Artificial Sequence
  Description of Artificial Sequence: Synthetic oligonucleotide
aaucucacaccagagaaga

SEQ ID NO: 2627813 - RNA, 19 nt, Artificial Sequence
  Description of Artificial Sequence: Synthetic oligonucleotide
uuuuaggacaggaagugau

SEQ ID NO: 2627814 - RNA, 19 nt, Artificial Sequence
  Description of Artificial Sequence: Synthetic oligonucleotide
ugagaaaguuucaucagaa

SEQ ID NO: 2627815 - RNA, 19 nt, Artificial Sequence
  Description of Artificial Sequence: Synthetic oligonucleotide
uucaacugaacuugaauuc

SEQ ID NO: 2627816 - RNA, 19 nt, Artificial Sequence
  Description of Artificial Sequence: Synthetic oligonucleotide
aaccugaaguuucuucagg

SEQ ID NO: 2627817 - RNA, 19 nt, Artificial Sequence
  Description of Artificial Sequence: Synthetic oligonucleotide
uucucuguaaaacaauuuu

SEQ ID NO: 2627818 - RNA, 19 nt, Artificial Sequence
  Description of Artificial Sequence: Synthetic oligonucleotide
uaacuuuccaagucagucc

SEQ ID NO: 2627819 - RNA, 19 nt, Artificial Sequence
  Description of Artificial Sequence: Synthetic oligonucleotide
aagucaguccagaugaguc

SEQ ID NO: 2627820 - RNA, 19 nt, Artificial Sequence
  Description of Artificial Sequence: Synthetic oligonucleotide
auuuaaacuguucccuaag

SEQ ID NO: 2627821 - RNA, 19 nt, Artificial Sequence
  Description of Artificial Sequence: Synthetic oligonucleotide
gaaaguuucaucagaauaa

SEQ ID NO: 2627822 - RNA, 19 nt, Artificial Sequence
  Description of Artificial Sequence: Synthetic oligonucleotide
uuuauaaguucaacugaac

SEQ ID NO: 2627823 - RNA, 19 nt, Artificial Sequence
  Description of Artificial Sequence: Synthetic oligonucleotide
uuuaguugcaugugaacuc

SEQ ID NO: 2627824 - RNA, 19 nt, Artificial Sequence
  Description of Artificial Sequence: Synthetic oligonucleotide
ucagggugaaacaagcuuc

SEQ ID NO: 2627825 - RNA, 19 nt, Artificial Sequence
  Description of Artificial Sequence: Synthetic oligonucleotide
guaauauaaacauaucaua

SEQ ID NO: 2627826 - RNA, 19 nt, Artificial Sequence
  Description of Artificial Sequence: Synthetic oligonucleotide
uuuaaacuguucccuaagu

SEQ ID NO: 2627827 - RNA, 19 nt, Artificial Sequence
  Description of Artificial Sequence: Synthetic oligonucleotide
aaagucccacugcuguagc

SEQ ID NO: 2627828 - RNA, 19 nt, Artificial Sequence
  Description of Artificial Sequence: Synthetic oligonucleotide
uccgcuguaagucuuuucu

SEQ ID NO: 2627829 - RNA, 19 nt, Artificial Sequence
  Description of Artificial Sequence: Synthetic oligonucleotide
uagccaagaaugagaaagg

SEQ ID NO: 2627830 - RNA, 19 nt, Artificial Sequence
  Description of Artificial Sequence: Synthetic oligonucleotide
acaaucucacaccagagaa

SEQ ID NO: 2627831 - RNA, 19 nt, Artificial Sequence
  Description of Artificial Sequence: Synthetic oligonucleotide
ugauccuggauuugagagg

SEQ ID NO: 2627832 - RNA, 19 nt, Artificial Sequence
  Description of Artificial Sequence: Synthetic oligonucleotide
uaaacauaucauauaugaa

SEQ ID NO: 2627833 - RNA, 19 nt, Artificial Sequence
  Description of Artificial Sequence: Synthetic oligonucleotide
uauucagguauguuucuug

SEQ ID NO: 2627834 - RNA, 19 nt, Artificial Sequence
  Description of Artificial Sequence: Synthetic oligonucleotide
agaugagucacagagaaaa

SEQ ID NO: 2627835 - RNA, 19 nt, Artificial Sequence
  Description of Artificial Sequence: Synthetic oligonucleotide
agauuuuaacuuuccaagu

SEQ ID NO: 2627836 - RNA, 19 nt, Artificial Sequence
  Description of Artificial Sequence: Synthetic oligonucleotide
aucaaagcgaaaucuuuug

SEQ ID NO: 2627837 - RNA, 19 nt, Artificial Sequence
  Description of Artificial Sequence: Synthetic oligonucleotide
uccaaagucccacugcugu

SEQ ID NO: 2627838 - RNA, 19 nt, Artificial Sequence
  Description of Artificial Sequence: Synthetic oligonucleotide
acuagaaggcucuggauga

SEQ ID NO: 2627839 - RNA, 19 nt, Artificial Sequence
  Description of Artificial Sequence: Synthetic oligonucleotide
aaacaauuuuaggacagga

SEQ ID NO: 2627840 - RNA, 19 nt, Artificial Sequence
  Description of Artificial Sequence: Synthetic oligonucleotide
ugaacucacaugcacaauu

SEQ ID NO: 2627841 - RNA, 19 nt, Artificial Sequence
  Description of Artificial Sequence: Synthetic oligonucleotide
gaaauauucagguauguuu

SEQ ID NO: 2627842 - RNA, 19 nt, Artificial Sequence
  Description of Artificial Sequence: Synthetic oligonucleotide
uguaagucuuuucucugga

SEQ ID NO: 2627843 - RNA, 19 nt, Artificial Sequence
  Description of Artificial Sequence: Synthetic oligonucleotide
uuaaacuguucccuaaguu

SEQ ID NO: 2627844 - RNA, 19 nt, Artificial Sequence
  Description of Artificial Sequence: Synthetic oligonucleotide
cucuggaugaagucugugg

SEQ ID NO: 2627845 - RNA, 19 nt, Artificial Sequence
  Description of Artificial Sequence: Synthetic oligonucleotide
acucacaugcacaauuuac

SEQ ID NO: 2627846 - RNA, 19 nt, Artificial Sequence
  Description of Artificial Sequence: Synthetic oligonucleotide
ugaauucuuuaguugcaug

SEQ ID NO: 2627847 - RNA, 19 nt, Artificial Sequence
  Description of Artificial Sequence: Synthetic oligonucleotide
augagaaaguuucaucaga

SEQ ID NO: 2627848 - RNA, 19 nt, Artificial Sequence
  Description of Artificial Sequence: Synthetic oligonucleotide
ugugaacucacaugcacaa

SEQ ID NO: 2627849 - RNA, 19 nt, Artificial Sequence
  Description of Artificial Sequence: Synthetic oligonucleotide
agcaaaagugcauuuguaa

SEQ ID NO: 2627850 - RNA, 19 nt, Artificial Sequence
  Description of Artificial Sequence: Synthetic oligonucleotide
aguugugaaacugaugaga

SEQ ID NO: 2627851 - RNA, 19 nt, Artificial Sequence
  Description of Artificial Sequence: Synthetic oligonucleotide
gaaaccuagcauuuaaacu

SEQ ID NO: 2627852 - RNA, 19 nt, Artificial Sequence
  Description of Artificial Sequence: Synthetic oligonucleotide
gaagugauaugccagcaaa

SEQ ID NO: 2627853 - RNA, 19 nt, Artificial Sequence
  Description of Artificial Sequence: Synthetic oligonucleotide
auauucuccuuguccuccc

SEQ ID NO: 2627854 - RNA, 19 nt, Artificial Sequence
  Description of Artificial Sequence: Synthetic oligonucleotide
caaggagucaucaaagcga

SEQ ID NO: 2627855 - RNA, 19 nt, Artificial Sequence
  Description of Artificial Sequence: Synthetic oligonucleotide
uuccaagucaguccagaug

SEQ ID NO: 2627856 - RNA, 19 nt, Artificial Sequence
  Description of Artificial Sequence: Synthetic oligonucleotide
uaagucuuuucucuggauu

SEQ ID NO: 2627857 - RNA, 19 nt, Artificial Sequence
  Description of Artificial Sequence: Synthetic oligonucleotide
gcuaacacagcaaaucugg

SEQ ID NO: 2627858 - RNA, 19 nt, Artificial Sequence
  Description of Artificial Sequence: Synthetic oligonucleotide
aagcgaaaucuuuuggaaa

SEQ ID NO: 2627859 - RNA, 19 nt, Artificial Sequence
  Description of Artificial Sequence: Synthetic oligonucleotide
acauaucauauaugaagcu

SEQ ID NO: 2627860 - RNA, 19 nt, Artificial Sequence
  Description of Artificial Sequence: Synthetic oligonucleotide
uucuuuaguugcaugugaa

SEQ ID NO: 2627861 - RNA, 19 nt, Artificial Sequence
  Description of Artificial Sequence: Synthetic oligonucleotide
uucagggugaaacaagcuu

SEQ ID NO: 2627862 - RNA, 19 nt, Artificial Sequence
  Description of Artificial Sequence: Synthetic oligonucleotide
ucaucaaagcgaaaucuuu

SEQ ID NO: 2627863 - RNA, 19 nt, Artificial Sequence
  Description of Artificial Sequence: Synthetic oligonucleotide
cauuacaggaggacuuggg

SEQ ID NO: 2627864 - RNA, 19 nt, Artificial Sequence
  Description of Artificial Sequence: Synthetic oligonucleotide
ugagaaaggcaggauuccg

SEQ ID NO: 2627865 - RNA, 19 nt, Artificial Sequence
  Description of Artificial Sequence: Synthetic oligonucleotide
uugcaugugaacucacaug

SEQ ID NO: 2627866 - RNA, 19 nt, Artificial Sequence
  Description of Artificial Sequence: Synthetic oligonucleotide
aaguuguucuaagcaaaag

SEQ ID NO: 2627867 - RNA, 19 nt, Artificial Sequence
  Description of Artificial Sequence: Synthetic oligonucleotide
augagaaaggcaggauucc

SEQ ID NO: 2627868 - RNA, 19 nt, Artificial Sequence
  Description of Artificial Sequence: Synthetic oligonucleotide
uuaucuucagaggaccuga

SEQ ID NO: 2627869 - RNA, 19 nt, Artificial Sequence
  Description of Artificial Sequence: Synthetic oligonucleotide
auuugagaggaaccugaag

SEQ ID NO: 2627870 - RNA, 19 nt, Artificial Sequence
  Description of Artificial Sequence: Synthetic oligonucleotide
agccaagaaugagaaaggc

SEQ ID NO: 2627871 - RNA, 19 nt, Artificial Sequence
  Description of Artificial Sequence: Synthetic oligonucleotide
uaugauccuggauuugaga

SEQ ID NO: 2627872 - RNA, 19 nt, Artificial Sequence
  Description of Artificial Sequence: Synthetic oligonucleotide
uuaguugcaugugaacuca

SEQ ID NO: 2627873 - RNA, 19 nt, Artificial Sequence
  Description of Artificial Sequence: Synthetic oligonucleotide
agagaagauuuuaacuuuc

SEQ ID NO: 2627874 - RNA, 19 nt, Artificial Sequence
  Description of Artificial Sequence: Synthetic oligonucleotide
ugggcaaggagucaucaaa

SEQ ID NO: 2627875 - RNA, 19 nt, Artificial Sequence
  Description of Artificial Sequence: Synthetic oligonucleotide
agucaucaaagcgaaaucu

SEQ ID NO: 2627876 - RNA, 19 nt, Artificial Sequence
  Description of Artificial Sequence: Synthetic oligonucleotide
aguucaacugaacuugaau

SEQ ID NO: 2627877 - RNA, 19 nt, Artificial Sequence
  Description of Artificial Sequence: Synthetic oligonucleotide
gcaaggagucaucaaagcg

SEQ ID NO: 2627878 - RNA, 19 nt, Artificial Sequence
  Description of Artificial Sequence: Synthetic oligonucleotide
agcauuuaaacuguucccu

SEQ ID NO: 2627879 - RNA, 19 nt, Artificial Sequence
  Description of Artificial Sequence: Synthetic oligonucleotide
uaaguucaacugaacuuga

SEQ ID NO: 2627880 - RNA, 19 nt, Artificial Sequence
  Description of Artificial Sequence: Synthetic oligonucleotide
uacauuaacuugagaaaua

SEQ ID NO: 2627881 - RNA, 19 nt, Artificial Sequence
  Description of Artificial Sequence: Synthetic oligonucleotide
ucuuuaguugcaugugaac

SEQ ID NO: 2627882 - RNA, 19 nt, Artificial Sequence
  Description of Artificial Sequence: Synthetic oligonucleotide
uucccuaaguuguucuaag

SEQ ID NO: 2627883 - RNA, 19 nt, Artificial Sequence
  Description of Artificial Sequence: Synthetic oligonucleotide
uaucauauaugaagcuaaa

SEQ ID NO: 2627884 - RNA, 19 nt, Artificial Sequence
  Description of Artificial Sequence: Synthetic oligonucleotide
auaucauauaugaagcuaa

SEQ ID NO: 2627885 - RNA, 19 nt, Artificial Sequence
  Description of Artificial Sequence: Synthetic oligonucleotide
agaaaggcaggauuccgcu

SEQ ID NO: 2627886 - RNA, 19 nt, Artificial Sequence
  Description of Artificial Sequence: Synthetic oligonucleotide
aggaccugaggguaugauc

SEQ ID NO: 2627887 - RNA, 19 nt, Artificial Sequence
  Description of Artificial Sequence: Synthetic oligonucleotide
aggcuaacacagcaaaucu

SEQ ID NO: 2627888 - RNA, 19 nt, Artificial Sequence
  Description of Artificial Sequence: Synthetic oligonucleotide
auccucagggauauucucc

SEQ ID NO: 2627889 - RNA, 19 nt, Artificial Sequence
  Description of Artificial Sequence: Synthetic oligonucleotide
cucacaugcacaauuuaca

SEQ ID NO: 2627890 - RNA, 19 nt, Artificial Sequence
  Description of Artificial Sequence: Synthetic oligonucleotide
cugaugagaaaguuucauc

SEQ ID NO: 2627891 - RNA, 19 nt, Artificial Sequence
  Description of Artificial Sequence: Synthetic oligonucleotide
gagaagauuuuaacuuucc

SEQ ID NO: 2627892 - RNA, 19 nt, Artificial Sequence
  Description of Artificial Sequence: Synthetic oligonucleotide
acagcuuccauuacaggag

SEQ ID NO: 2627893 - RNA, 19 nt, Artificial Sequence
  Description of Artificial Sequence: Synthetic oligonucleotide
ucuuaucuucagaggaccu

SEQ ID NO: 2627894 - RNA, 19 nt, Artificial Sequence
  Description of Artificial Sequence: Synthetic oligonucleotide
caaagcgaaaucuuuugga

SEQ ID NO: 2627895 - RNA, 19 nt, Artificial Sequence
  Description of Artificial Sequence: Synthetic oligonucleotide
aaucuacauuaacuugaga

SEQ ID NO: 2627896 - RNA, 19 nt, Artificial Sequence
  Description of Artificial Sequence: Synthetic oligonucleotide
gauccuggauuugagagga

SEQ ID NO: 2627897 - RNA, 19 nt, Artificial Sequence
  Description of Artificial Sequence: Synthetic oligonucleotide
caaucucacaccagagaag

SEQ ID NO: 2627898 - RNA, 19 nt, Artificial Sequence
  Description of Artificial Sequence: Synthetic oligonucleotide
uuuaggacaggaagugaua

SEQ ID NO: 2627899 - RNA, 19 nt, Artificial Sequence
  Description of Artificial Sequence: Synthetic oligonucleotide
uuccauuacaggaggacuu

SEQ ID NO: 2627900 - RNA, 19 nt, Artificial Sequence
  Description of Artificial Sequence: Synthetic oligonucleotide
cuaaguuguucuaagcaaa

SEQ ID NO: 2627901 - RNA, 19 nt, Artificial Sequence
  Description of Artificial Sequence: Synthetic oligonucleotide
caggaagugauaugccagc

SEQ ID NO: 2627902 - RNA, 19 nt, Artificial Sequence
  Description of Artificial Sequence: Synthetic oligonucleotide
aaaucuggaacaaguucgu

SEQ ID NO: 2627903 - RNA, 19 nt, Artificial Sequence
  Description of Artificial Sequence: Synthetic oligonucleotide
aucuuuuggaaaccaugcu

SEQ ID NO: 2627904 - RNA, 19 nt, Artificial Sequence
  Description of Artificial Sequence: Synthetic oligonucleotide
cuuuacuagaaggcucugg

SEQ ID NO: 2627905 - RNA, 19 nt, Artificial Sequence
  Description of Artificial Sequence: Synthetic oligonucleotide
uuaggacaggaagugauau

SEQ ID NO: 2627906 - RNA, 19 nt, Artificial Sequence
  Description of Artificial Sequence: Synthetic oligonucleotide
uuuuggaaaccaugcugcu

SEQ ID NO: 2627907 - RNA, 19 nt, Artificial Sequence
  Description of Artificial Sequence: Synthetic oligonucleotide
acacagcaaaucuggaaca

SEQ ID NO: 2627908 - RNA, 19 nt, Artificial Sequence
  Description of Artificial Sequence: Synthetic oligonucleotide
uauucuccuuguccucccg

SEQ ID NO: 2627909 - RNA, 19 nt, Artificial Sequence
  Description of Artificial Sequence: Synthetic oligonucleotide
uugagaggaaccugaaguu

SEQ ID NO: 2627910 - RNA, 19 nt, Artificial Sequence
  Description of Artificial Sequence: Synthetic oligonucleotide
caccagagaagauuuuaac

SEQ ID NO: 2627911 - RNA, 19 nt, Artificial Sequence
  Description of Artificial Sequence: Synthetic oligonucleotide
gagucaucaaagcgaaauc

SEQ ID NO: 2627912 - RNA, 19 nt, Artificial Sequence
  Description of Artificial Sequence: Synthetic oligonucleotide
ucuaagcaaaagugcauuu

SEQ ID NO: 2627913 - RNA, 19 nt, Artificial Sequence
  Description of Artificial Sequence: Synthetic oligonucleotide
gaugagucacagagaaaag

SEQ ID NO: 2627914 - RNA, 19 nt, Artificial Sequence
  Description of Artificial Sequence: Synthetic oligonucleotide
ucccuaaguuguucuaagc

SEQ ID NO: 2627915 - RNA, 19 nt, Artificial Sequence
  Description of Artificial Sequence: Synthetic oligonucleotide
ggauucuuuacuagaaggc

SEQ ID NO: 2627916 - RNA, 19 nt, Artificial Sequence
  Description of Artificial Sequence: Synthetic oligonucleotide
gagaaaggcaggauuccgc

SEQ ID NO: 2627917 - RNA, 19 nt, Artificial Sequence
  Description of Artificial Sequence: Synthetic oligonucleotide
caaaagugcauuuguaaua

SEQ ID NO: 2627918 - RNA, 19 nt, Artificial Sequence
  Description of Artificial Sequence: Synthetic oligonucleotide
ugaaacugaugagaaaguu

SEQ ID NO: 2627919 - RNA, 19 nt, Artificial Sequence
  Description of Artificial Sequence: Synthetic oligonucleotide
gaggguaugauccuggauu

SEQ ID NO: 2627920 - RNA, 19 nt, Artificial Sequence
  Description of Artificial Sequence: Synthetic oligonucleotide
gucuuaucuucagaggacc

SEQ ID NO: 2627921 - RNA, 19 nt, Artificial Sequence
  Description of Artificial Sequence: Synthetic oligonucleotide
gcauuuguaauauaaacau

SEQ ID NO: 2627922 - RNA, 19 nt, Artificial Sequence
  Description of Artificial Sequence: Synthetic oligonucleotide
aaaagaaaccuagcauuua

SEQ ID NO: 2627923 - RNA, 19 nt, Artificial Sequence
  Description of Artificial Sequence: Synthetic oligonucleotide
aacucacaugcacaauuua

SEQ ID NO: 2627924 - RNA, 19 nt, Artificial Sequence
  Description of Artificial Sequence: Synthetic oligonucleotide
caggauuccgcuguaaguc

SEQ ID NO: 2627925 - RNA, 19 nt, Artificial Sequence
  Description of Artificial Sequence: Synthetic oligonucleotide
uucuaagcaaaagugcauu

SEQ ID NO: 2627926 - RNA, 19 nt, Artificial Sequence
  Description of Artificial Sequence: Synthetic oligonucleotide
aaggagucaucaaagcgaa

SEQ ID NO: 2627927 - RNA, 19 nt, Artificial Sequence
  Description of Artificial Sequence: Synthetic oligonucleotide
aaccuagcauuuaaacugu

SEQ ID NO: 2627928 - RNA, 19 nt, Artificial Sequence
  Description of Artificial Sequence: Synthetic oligonucleotide
guucaacugaacuugaauu

SEQ ID NO: 2627929 - RNA, 19 nt, Artificial Sequence
  Description of Artificial Sequence: Synthetic oligonucleotide
uggccaguugugaaacuga

SEQ ID NO: 2627930 - RNA, 19 nt, Artificial Sequence
  Description of Artificial Sequence: Synthetic oligonucleotide
uggauuugagaggaaccug

SEQ ID NO: 2627931 - RNA, 19 nt, Artificial Sequence
  Description of Artificial Sequence: Synthetic oligonucleotide
guugugaaacugaugagaa

SEQ ID NO: 2627932 - RNA, 19 nt, Artificial Sequence
  Description of Artificial Sequence: Synthetic oligonucleotide
caauuuuaggacaggaagu

SEQ ID NO: 2627933 - RNA, 19 nt, Artificial Sequence
  Description of Artificial Sequence: Synthetic oligonucleotide
aaacacaaucucacaccag

SEQ ID NO: 2627934 - RNA, 19 nt, Artificial Sequence
  Description of Artificial Sequence: Synthetic oligonucleotide
uauccucagggauauucuc

SEQ ID NO: 2627935 - RNA, 19 nt, Artificial Sequence
  Description of Artificial Sequence: Synthetic oligonucleotide
acugaugagaaaguuucau

SEQ ID NO: 2627936 - RNA, 19 nt, Artificial Sequence
  Description of Artificial Sequence: Synthetic oligonucleotide
ugcugcuauccucagggau

SEQ ID NO: 2627937 - RNA, 19 nt, Artificial Sequence
  Description of Artificial Sequence: Synthetic oligonucleotide
ucucacaccagagaagauu

SEQ ID NO: 2627938 - RNA, 19 nt, Artificial Sequence
  Description of Artificial Sequence: Synthetic oligonucleotide
cuuaucuucagaggaccug

SEQ ID NO: 2627939 - RNA, 19 nt, Artificial Sequence
  Description of Artificial Sequence: Synthetic oligonucleotide
ugaagucuguggccaguug

SEQ ID NO: 2627940 - RNA, 19 nt, Artificial Sequence
  Description of Artificial Sequence: Synthetic oligonucleotide
gagaggaaccugaaguuuc

SEQ ID NO: 2627941 - RNA, 19 nt, Artificial Sequence
  Description of Artificial Sequence: Synthetic oligonucleotide
uccauuacaggaggacuug

SEQ ID NO: 2627942 - RNA, 19 nt, Artificial Sequence
  Description of Artificial Sequence: Synthetic oligonucleotide
caaagucccacugcuguag

SEQ ID NO: 2627943 - RNA, 19 nt, Artificial Sequence
  Description of Artificial Sequence: Synthetic oligonucleotide
acugaacuugaauucuuua

SEQ ID NO: 2627944 - RNA, 19 nt, Artificial Sequence
  Description of Artificial Sequence: Synthetic oligonucleotide
uuacuagaaggcucuggau

SEQ ID NO: 2627945 - RNA, 19 nt, Artificial Sequence
  Description of Artificial Sequence: Synthetic oligonucleotide
aagucuguggccaguugug

SEQ ID NO: 2627946 - RNA, 19 nt, Artificial Sequence
  Description of Artificial Sequence: Synthetic oligonucleotide
caguugugaaacugaugag

SEQ ID NO: 2627947 - RNA, 19 nt, Artificial Sequence
  Description of Artificial Sequence: Synthetic oligonucleotide
aagaaaccuagcauuuaaa

SEQ ID NO: 2627948 - RNA, 19 nt, Artificial Sequence
  Description of Artificial Sequence: Synthetic oligonucleotide
uccuggauuugagaggaac

SEQ ID NO: 2627949 - RNA, 19 nt, Artificial Sequence
  Description of Artificial Sequence: Synthetic oligonucleotide
gggucuuaucuucagagga

SEQ ID NO: 2627950 - RNA, 19 nt, Artificial Sequence
  Description of Artificial Sequence: Synthetic oligonucleotide
acuguucccuaaguuguuc

SEQ ID NO: 2627951 - RNA, 19 nt, Artificial Sequence
  Description of Artificial Sequence: Synthetic oligonucleotide
aggauuccgcuguaagucu

SEQ ID NO: 2627952 - RNA, 19 nt, Artificial Sequence
  Description of Artificial Sequence: Synthetic oligonucleotide
gaaugagaaaggcaggauu

SEQ ID NO: 2627953 - RNA, 19 nt, Artificial Sequence
  Description of Artificial Sequence: Synthetic oligonucleotide
gaacuugaauucuuuaguu

SEQ ID NO: 2627954 - RNA, 19 nt, Artificial Sequence
  Description of Artificial Sequence: Synthetic oligonucleotide
acagcaaaucuggaacaag

SEQ ID NO: 2627955 - RNA, 19 nt, Artificial Sequence
  Description of Artificial Sequence: Synthetic oligonucleotide
cauaucauauaugaagcua

SEQ ID NO: 2627956 - RNA, 19 nt, Artificial Sequence
  Description of Artificial Sequence: Synthetic oligonucleotide
cauuuaaacuguucccuaa

SEQ ID NO: 2627957 - RNA, 19 nt, Artificial Sequence
  Description of Artificial Sequence: Synthetic oligonucleotide
gaaaccaugcugcuauccu

SEQ ID NO: 2627958 - RNA, 19 nt, Artificial Sequence
  Description of Artificial Sequence: Synthetic oligonucleotide
gaagucuguggccaguugu

SEQ ID NO: 2627959 - RNA, 19 nt, Artificial Sequence
  Description of Artificial Sequence: Synthetic oligonucleotide
auuuuaggacaggaaguga

SEQ ID NO: 2627960 - RNA, 19 nt, Artificial Sequence
  Description of Artificial Sequence: Synthetic oligonucleotide
uguccucccggucuccaca

SEQ ID NO: 2627961 - RNA, 19 nt, Artificial Sequence
  Description of Artificial Sequence: Synthetic oligonucleotide
cuguagccaagaaugagaa

SEQ ID NO: 2627962 - RNA, 19 nt, Artificial Sequence
  Description of Artificial Sequence: Synthetic oligonucleotide
aggguaugauccuggauuu

SEQ ID NO: 2627963 - RNA, 19 nt, Artificial Sequence
  Description of Artificial Sequence: Synthetic oligonucleotide
cuuuaguugcaugugaacu

SEQ ID NO: 2627964 - RNA, 19 nt, Artificial Sequence
  Description of Artificial Sequence: Synthetic oligonucleotide
aaaggcuaacacagcaaau

SEQ ID NO: 2627965 - RNA, 19 nt, Artificial Sequence
  Description of Artificial Sequence: Synthetic oligonucleotide
guaugauccuggauuugag

SEQ ID NO: 2627966 - RNA, 19 nt, Artificial Sequence
  Description of Artificial Sequence: Synthetic oligonucleotide
aagugauaugccagcaaaa

SEQ ID NO: 2627967 - RNA, 19 nt, Artificial Sequence
  Description of Artificial Sequence: Synthetic oligonucleotide
aacugaugagaaaguuuca

SEQ ID NO: 2627968 - RNA, 19 nt, Artificial Sequence
  Description of Artificial Sequence: Synthetic oligonucleotide
ggggucuuaucuucagagg

SEQ ID NO: 2627969 - RNA, 19 nt, Artificial Sequence
  Description of Artificial Sequence: Synthetic oligonucleotide
uucagaggaccugagggua

SEQ ID NO: 2627970 - RNA, 19 nt, Artificial Sequence
  Description of Artificial Sequence: Synthetic oligonucleotide
ugaggguaugauccuggau

SEQ ID NO: 2627971 - RNA, 19 nt, Artificial Sequence
  Description of Artificial Sequence: Synthetic oligonucleotide
cagguauguuucuugauua

SEQ ID NO: 2627972 - RNA, 19 nt, Artificial Sequence
  Description of Artificial Sequence: Synthetic oligonucleotide
ugagaggaaccugaaguuu

SEQ ID NO: 2627973 - RNA, 19 nt, Artificial Sequence
  Description of Artificial Sequence: Synthetic oligonucleotide
agucacagagaaaaggcua

SEQ ID NO: 2627974 - RNA, 19 nt, Artificial Sequence
  Description of Artificial Sequence: Synthetic oligonucleotide
acacaaucucacaccagag

SEQ ID NO: 2627975 - RNA, 19 nt, Artificial Sequence
  Description of Artificial Sequence: Synthetic oligonucleotide
agguauguuucuugauuau

SEQ ID NO: 2627976 - RNA, 19 nt, Artificial Sequence
  Description of Artificial Sequence: Synthetic oligonucleotide
ggcaaggagucaucaaagc

SEQ ID NO: 2627977 - RNA, 19 nt, Artificial Sequence
  Description of Artificial Sequence: Synthetic oligonucleotide
cacaaucucacaccagaga

SEQ ID NO: 2627978 - RNA, 19 nt, Artificial Sequence
  Description of Artificial Sequence: Synthetic oligonucleotide
cuggaacaaguucgugggg

SEQ ID NO: 2627979 - RNA, 19 nt, Artificial Sequence
  Description of Artificial Sequence: Synthetic oligonucleotide
uuuggaaaccaugcugcua

SEQ ID NO: 2627980 - RNA, 19 nt, Artificial Sequence
  Description of Artificial Sequence: Synthetic oligonucleotide
aagcaaaagugcauuugua

SEQ ID NO: 2627981 - RNA, 19 nt, Artificial Sequence
  Description of Artificial Sequence: Synthetic oligonucleotide
uguucccuaaguuguucua

SEQ ID NO: 2627982 - RNA, 19 nt, Artificial Sequence
  Description of Artificial Sequence: Synthetic oligonucleotide
uguagccaagaaugagaaa

SEQ ID NO: 2627983 - RNA, 19 nt, Artificial Sequence
  Description of Artificial Sequence: Synthetic oligonucleotide
ucagaggaccugaggguau

SEQ ID NO: 2627984 - RNA, 19 nt, Artificial Sequence
  Description of Artificial Sequence: Synthetic oligonucleotide
ggcaggauuccgcuguaag

SEQ ID NO: 2627985 - RNA, 19 nt, Artificial Sequence
  Description of Artificial Sequence: Synthetic oligonucleotide
cuacauuaacuugagaaau

SEQ ID NO: 2627986 - RNA, 19 nt, Artificial Sequence
  Description of Artificial Sequence: Synthetic oligonucleotide
agaaugagaaaggcaggau

SEQ ID NO: 2627987 - RNA, 19 nt, Artificial Sequence
  Description of Artificial Sequence: Synthetic oligonucleotide
gucaguccagaugagucac

SEQ ID NO: 2627988 - RNA, 19 nt, Artificial Sequence
  Description of Artificial Sequence: Synthetic oligonucleotide
uaguugcaugugaacucac

SEQ ID NO: 2627989 - RNA, 19 nt, Artificial Sequence
  Description of Artificial Sequence: Synthetic oligonucleotide
ggauuugagaggaaccuga

SEQ ID NO: 2627990 - RNA, 19 nt, Artificial Sequence
  Description of Artificial Sequence: Synthetic oligonucleotide
guggccaguugugaaacug

SEQ ID NO: 2627991 - RNA, 19 nt, Artificial Sequence
  Description of Artificial Sequence: Synthetic oligonucleotide
gcuuccaaagucccacugc

SEQ ID NO: 2627992 - RNA, 19 nt, Artificial Sequence
  Description of Artificial Sequence: Synthetic oligonucleotide
agucccacugcuguagcca

SEQ ID NO: 2627993 - RNA, 19 nt, Artificial Sequence
  Description of Artificial Sequence: Synthetic oligonucleotide
ccugaggguaugauccugg

SEQ ID NO: 2627994 - RNA, 19 nt, Artificial Sequence
  Description of Artificial Sequence: Synthetic oligonucleotide
gggauauucuccuuguccu

SEQ ID NO: 2627995 - RNA, 19 nt, Artificial Sequence
  Description of Artificial Sequence: Synthetic oligonucleotide
gguaugauccuggauuuga

SEQ ID NO: 2627996 - RNA, 19 nt, Artificial Sequence
  Description of Artificial Sequence: Synthetic oligonucleotide
aggaagugauaugccagca

SEQ ID NO: 2627997 - RNA, 19 nt, Artificial Sequence
  Description of Artificial Sequence: Synthetic oligonucleotide
ucccggucuccacagcuuc

SEQ ID NO: 2627998 - RNA, 19 nt, Artificial Sequence
  Description of Artificial Sequence: Synthetic oligonucleotide
aaguucaacugaacuugaa

SEQ ID NO: 2627999 - RNA, 19 nt, Artificial Sequence
  Description of Artificial Sequence: Synthetic oligonucleotide
ccuaaguuguucuaagcaa

SEQ ID NO: 2628000 - RNA, 19 nt, Artificial Sequence
  Description of Artificial Sequence: Synthetic oligonucleotide
ccagaugagucacagagaa

SEQ ID NO: 2628001 - RNA, 19 nt, Artificial Sequence
  Description of Artificial Sequence: Synthetic oligonucleotide
ucuccacagcuuccauuac

SEQ ID NO: 2628002 - RNA, 19 nt, Artificial Sequence
  Description of Artificial Sequence: Synthetic oligonucleotide
gcuauccucagggauauuc

SEQ ID NO: 2628003 - RNA, 19 nt, Artificial Sequence
  Description of Artificial Sequence: Synthetic oligonucleotide
cuguggccaguugugaaac

SEQ ID NO: 2628004 - RNA, 19 nt, Artificial Sequence
  Description of Artificial Sequence: Synthetic oligonucleotide
gauuugagaggaaccugaa

SEQ ID NO: 2628005 - RNA, 19 nt, Artificial Sequence
  Description of Artificial Sequence: Synthetic oligonucleotide
gguauguuucuugauuauc

SEQ ID NO: 2628006 - RNA, 19 nt, Artificial Sequence
  Description of Artificial Sequence: Synthetic oligonucleotide
cuuccaaagucccacugcu

SEQ ID NO: 2628007 - RNA, 19 nt, Artificial Sequence
  Description of Artificial Sequence: Synthetic oligonucleotide
gagaaaguuucaucagaau

SEQ ID NO: 2628008 - RNA, 19 nt, Artificial Sequence
  Description of Artificial Sequence: Synthetic oligonucleotide
ggaaaccaugcugcuaucc

SEQ ID NO: 2628009 - RNA, 19 nt, Artificial Sequence
  Description of Artificial Sequence: Synthetic oligonucleotide
aguugcaugugaacucaca

SEQ ID NO: 2628010 - RNA, 19 nt, Artificial Sequence
  Description of Artificial Sequence: Synthetic oligonucleotide
accaugcugcuauccucag

SEQ ID NO: 2628011 - RNA, 19 nt, Artificial Sequence
  Description of Artificial Sequence: Synthetic oligonucleotide
auauucagguauguuucuu

SEQ ID NO: 2628012 - RNA, 19 nt, Artificial Sequence
  Description of Artificial Sequence: Synthetic oligonucleotide
aguccagaugagucacaga

SEQ ID NO: 2628013 - RNA, 19 nt, Artificial Sequence
  Description of Artificial Sequence: Synthetic oligonucleotide
agcaaaucuggaacaaguu

SEQ ID NO: 2628014 - RNA, 19 nt, Artificial Sequence
  Description of Artificial Sequence: Synthetic oligonucleotide
aggcucuggaugaagucug

SEQ ID NO: 2628015 - RNA, 19 nt, Artificial Sequence
  Description of Artificial Sequence: Synthetic oligonucleotide
cuuuccaagucaguccaga

SEQ ID NO: 2628016 - RNA, 19 nt, Artificial Sequence
  Description of Artificial Sequence: Synthetic oligonucleotide
uguggccaguugugaaacu

SEQ ID NO: 2628017 - RNA, 19 nt, Artificial Sequence
  Description of Artificial Sequence: Synthetic oligonucleotide
agaggaaccugaaguuucu

SEQ ID NO: 2628018 - RNA, 19 nt, Artificial Sequence
  Description of Artificial Sequence: Synthetic oligonucleotide
gcaaaagugcauuuguaau

SEQ ID NO: 2628019 - RNA, 19 nt, Artificial Sequence
  Description of Artificial Sequence: Synthetic oligonucleotide
ggcuaacacagcaaaucug

SEQ ID NO: 2628020 - RNA, 19 nt, Artificial Sequence
  Description of Artificial Sequence: Synthetic oligonucleotide
ggucuuaucuucagaggac

SEQ ID NO: 2628021 - RNA, 19 nt, Artificial Sequence
  Description of Artificial Sequence: Synthetic oligonucleotide
gaaguuucuucagggugaa

SEQ ID NO: 2628022 - RNA, 19 nt, Artificial Sequence
  Description of Artificial Sequence: Synthetic oligonucleotide
cucacaccagagaagauuu

SEQ ID NO: 2628023 - RNA, 19 nt, Artificial Sequence
  Description of Artificial Sequence: Synthetic oligonucleotide
cccuaaguuguucuaagca

SEQ ID NO: 2628024 - RNA, 19 nt, Artificial Sequence
  Description of Artificial Sequence: Synthetic oligonucleotide
caucaaagcgaaaucuuuu

SEQ ID NO: 2628025 - RNA, 19 nt, Artificial Sequence
  Description of Artificial Sequence: Synthetic oligonucleotide
cuucagaggaccugagggu

SEQ ID NO: 2628026 - RNA, 19 nt, Artificial Sequence
  Description of Artificial Sequence: Synthetic oligonucleotide
uuccgcuguaagucuuuuc

SEQ ID NO: 2628027 - RNA, 19 nt, Artificial Sequence
  Description of Artificial Sequence: Synthetic oligonucleotide
ggagucaucaaagcgaaau

SEQ ID NO: 2628028 - RNA, 19 nt, Artificial Sequence
  Description of Artificial Sequence: Synthetic oligonucleotide
cagagaagauuuuaacuuu

SEQ ID NO: 2628029 - RNA, 19 nt, Artificial Sequence
  Description of Artificial Sequence: Synthetic oligonucleotide
agucuguggccaguuguga

SEQ ID NO: 2628030 - RNA, 19 nt, Artificial Sequence
  Description of Artificial Sequence: Synthetic oligonucleotide
guucccuaaguuguucuaa

SEQ ID NO: 2628031 - RNA, 19 nt, Artificial Sequence
  Description of Artificial Sequence: Synthetic oligonucleotide
ggauauucuccuuguccuc

SEQ ID NO: 2628032 - RNA, 19 nt, Artificial Sequence
  Description of Artificial Sequence: Synthetic oligonucleotide
acaagcuuccaaaguccca

SEQ ID NO: 2628033 - RNA, 19 nt, Artificial Sequence
  Description of Artificial Sequence: Synthetic oligonucleotide
guccucccggucuccacag

SEQ ID NO: 2628034 - RNA, 19 nt, Artificial Sequence
  Description of Artificial Sequence: Synthetic oligonucleotide
caucagaauaaucuacauu

SEQ ID NO: 2628035 - RNA, 19 nt, Artificial Sequence
  Description of Artificial Sequence: Synthetic oligonucleotide
aaggcaggauuccgcugua

SEQ ID NO: 2628036 - RNA, 19 nt, Artificial Sequence
  Description of Artificial Sequence: Synthetic oligonucleotide
gggugaaacaagcuuccaa

SEQ ID NO: 2628037 - RNA, 19 nt, Artificial Sequence
  Description of Artificial Sequence: Synthetic oligonucleotide
uggaaaccaugcugcuauc

SEQ ID NO: 2628038 - RNA, 19 nt, Artificial Sequence
  Description of Artificial Sequence: Synthetic oligonucleotide
gcuuccauuacaggaggac

SEQ ID NO: 2628039 - RNA, 19 nt, Artificial Sequence
  Description of Artificial Sequence: Synthetic oligonucleotide
cuuccauuacaggaggacu

SEQ ID NO: 2628040 - RNA, 19 nt, Artificial Sequence
  Description of Artificial Sequence: Synthetic oligonucleotide
aacuguucccuaaguuguu

SEQ ID NO: 2628041 - RNA, 19 nt, Artificial Sequence
  Description of Artificial Sequence: Synthetic oligonucleotide
ggaagugauaugccagcaa

SEQ ID NO: 2628042 - RNA, 19 nt, Artificial Sequence
  Description of Artificial Sequence: Synthetic oligonucleotide
acuuuccaagucaguccag

SEQ ID NO: 2628043 - RNA, 19 nt, Artificial Sequence
  Description of Artificial Sequence: Synthetic oligonucleotide
augcugcuauccucaggga

SEQ ID NO: 2628044 - RNA, 19 nt, Artificial Sequence
  Description of Artificial Sequence: Synthetic oligonucleotide
cugaggguaugauccugga

SEQ ID NO: 2628045 - RNA, 19 nt, Artificial Sequence
  Description of Artificial Sequence: Synthetic oligonucleotide
gaacucacaugcacaauuu

SEQ ID NO: 2628046 - RNA, 19 nt, Artificial Sequence
  Description of Artificial Sequence: Synthetic oligonucleotide
cuucagggugaaacaagcu

SEQ ID NO: 2628047 - RNA, 19 nt, Artificial Sequence
  Description of Artificial Sequence: Synthetic oligonucleotide
guucuaagcaaaagugcau

SEQ ID NO: 2628048 - RNA, 19 nt, Artificial Sequence
  Description of Artificial Sequence: Synthetic oligonucleotide
ccauuacaggaggacuugg

SEQ ID NO: 2628049 - RNA, 19 nt, Artificial Sequence
  Description of Artificial Sequence: Synthetic oligonucleotide
guaagucuuuucucuggau

SEQ ID NO: 2628050 - RNA, 19 nt, Artificial Sequence
  Description of Artificial Sequence: Synthetic oligonucleotide
cacagcaaaucuggaacaa

SEQ ID NO: 2628051 - RNA, 19 nt, Artificial Sequence
  Description of Artificial Sequence: Synthetic oligonucleotide
gaugaagucuguggccagu

SEQ ID NO: 2628052 - RNA, 19 nt, Artificial Sequence
  Description of Artificial Sequence: Synthetic oligonucleotide
cagaggaccugaggguaug

SEQ ID NO: 2628053 - RNA, 19 nt, Artificial Sequence
  Description of Artificial Sequence: Synthetic oligonucleotide
cuguucccuaaguuguucu

SEQ ID NO: 2628054 - RNA, 19 nt, Artificial Sequence
  Description of Artificial Sequence: Synthetic oligonucleotide
gucaucaaagcgaaaucuu

SEQ ID NO: 2628055 - RNA, 19 nt, Artificial Sequence
  Description of Artificial Sequence: Synthetic oligonucleotide
uccucccggucuccacagc

SEQ ID NO: 2628056 - RNA, 19 nt, Artificial Sequence
  Description of Artificial Sequence: Synthetic oligonucleotide
cagaugagucacagagaaa

SEQ ID NO: 2628057 - RNA, 19 nt, Artificial Sequence
  Description of Artificial Sequence: Synthetic oligonucleotide
agaggaccugaggguauga

SEQ ID NO: 2628058 - RNA, 19 nt, Artificial Sequence
  Description of Artificial Sequence: Synthetic oligonucleotide
agcuuccauuacaggagga

SEQ ID NO: 2628059 - RNA, 19 nt, Artificial Sequence
  Description of Artificial Sequence: Synthetic oligonucleotide
ccaagucaguccagaugag

SEQ ID NO: 2628060 - RNA, 19 nt, Artificial Sequence
  Description of Artificial Sequence: Synthetic oligonucleotide
gcugcuauccucagggaua

SEQ ID NO: 2628061 - RNA, 19 nt, Artificial Sequence
  Description of Artificial Sequence: Synthetic oligonucleotide
gcaggauuccgcuguaagu

SEQ ID NO: 2628062 - RNA, 19 nt, Artificial Sequence
  Description of Artificial Sequence: Synthetic oligonucleotide
gccaguugugaaacugaug

SEQ ID NO: 2628063 - RNA, 19 nt, Artificial Sequence
  Description of Artificial Sequence: Synthetic oligonucleotide
cugggcaaggagucaucaa

SEQ ID NO: 2628064 - RNA, 19 nt, Artificial Sequence
  Description of Artificial Sequence: Synthetic oligonucleotide
caagucaguccagaugagu

SEQ ID NO: 2628065 - RNA, 19 nt, Artificial Sequence
  Description of Artificial Sequence: Synthetic oligonucleotide
auuccgcuguaagucuuuu

SEQ ID NO: 2628066 - RNA, 19 nt, Artificial Sequence
  Description of Artificial Sequence: Synthetic oligonucleotide
ccgcuguaagucuuuucuc

SEQ ID NO: 2628067 - RNA, 19 nt, Artificial Sequence
  Description of Artificial Sequence: Synthetic oligonucleotide
cuagaaggcucuggaugaa

SEQ ID NO: 2628068 - RNA, 19 nt, Artificial Sequence
  Description of Artificial Sequence: Synthetic oligonucleotide
gcugggcaaggagucauca

SEQ ID NO: 2628069 - RNA, 19 nt, Artificial Sequence
  Description of Artificial Sequence: Synthetic oligonucleotide
aucucacaccagagaagau

SEQ ID NO: 2628070 - RNA, 19 nt, Artificial Sequence
  Description of Artificial Sequence: Synthetic oligonucleotide
cuuguccucccggucucca

SEQ ID NO: 2628071 - RNA, 19 nt, Artificial Sequence
  Description of Artificial Sequence: Synthetic oligonucleotide
cgaaaucuuuuggaaacca

SEQ ID NO: 2628072 - RNA, 19 nt, Artificial Sequence
  Description of Artificial Sequence: Synthetic oligonucleotide
gcaugugaacucacaugca

SEQ ID NO: 2628073 - RNA, 19 nt, Artificial Sequence
  Description of Artificial Sequence: Synthetic oligonucleotide
caugcacaauuuacauuuu

SEQ ID NO: 2628074 - RNA, 19 nt, Artificial Sequence
  Description of Artificial Sequence: Synthetic oligonucleotide
gauuccgcuguaagucuuu

SEQ ID NO: 2628075 - RNA, 19 nt, Artificial Sequence
  Description of Artificial Sequence: Synthetic oligonucleotide
cccggucuccacagcuucc

SEQ ID NO: 2628076 - RNA, 19 nt, Artificial Sequence
  Description of Artificial Sequence: Synthetic oligonucleotide
gaggaccugaggguaugau

SEQ ID NO: 2628077 - RNA, 19 nt, Artificial Sequence
  Description of Artificial Sequence: Synthetic oligonucleotide
cugcuauccucagggauau

SEQ ID NO: 2628078 - RNA, 19 nt, Artificial Sequence
  Description of Artificial Sequence: Synthetic oligonucleotide
aggcaggauuccgcuguaa

SEQ ID NO: 2628079 - RNA, 19 nt, Artificial Sequence
  Description of Artificial Sequence: Synthetic oligonucleotide
auccuggauuugagaggaa

SEQ ID NO: 2628080 - RNA, 19 nt, Artificial Sequence
  Description of Artificial Sequence: Synthetic oligonucleotide
ggccaguugugaaacugau

SEQ ID NO: 2628081 - RNA, 19 nt, Artificial Sequence
  Description of Artificial Sequence: Synthetic oligonucleotide
ugcuauccucagggauauu

SEQ ID NO: 2628082 - RNA, 19 nt, Artificial Sequence
  Description of Artificial Sequence: Synthetic oligonucleotide
ccuuguccucccggucucc

SEQ ID NO: 2628083 - RNA, 19 nt, Artificial Sequence
  Description of Artificial Sequence: Synthetic oligonucleotide
ggcugggcaaggagucauc

SEQ ID NO: 2628084 - RNA, 19 nt, Artificial Sequence
  Description of Artificial Sequence: Synthetic oligonucleotide
ggauuccgcuguaagucuu

SEQ ID NO: 2628085 - RNA, 19 nt, Artificial Sequence
  Description of Artificial Sequence: Synthetic oligonucleotide
ccucccggucuccacagcu

SEQ ID NO: 2628086 - RNA, 19 nt, Artificial Sequence
  Description of Artificial Sequence: Synthetic oligonucleotide
gggcugggcaaggagucau

SEQ ID NO: 2628087 - RNA, 19 nt, Artificial Sequence
  Description of Artificial Sequence: Synthetic oligonucleotide
ccacugcuguagccaagaa

SEQ ID NO: 2628088 - RNA, 19 nt, Artificial Sequence
  Description of Artificial Sequence: Synthetic oligonucleotide
uuuauuuaaauccacaucc

SEQ ID NO: 2628089 - RNA, 19 nt, Artificial Sequence
  Description of Artificial Sequence: Synthetic oligonucleotide
uuaaguuuauuuaaaucca

SEQ ID NO: 2628090 - RNA, 19 nt, Artificial Sequence
  Description of Artificial Sequence: Synthetic oligonucleotide
uaaauccacauccugcugg

SEQ ID NO: 2628091 - RNA, 19 nt, Artificial Sequence
  Description of Artificial Sequence: Synthetic oligonucleotide
ugcaucauggcaaacuccg

SEQ ID NO: 2628092 - RNA, 19 nt, Artificial Sequence
  Description of Artificial Sequence: Synthetic oligonucleotide
auuuaaauccacauccugc

SEQ ID NO: 2628093 - RNA, 19 nt, Artificial Sequence
  Description of Artificial Sequence: Synthetic oligonucleotide
aaggcuggcuacuugguac

SEQ ID NO: 2628094 - RNA, 19 nt, Artificial Sequence
  Description of Artificial Sequence: Synthetic oligonucleotide
aaauccacauccugcuggc

SEQ ID NO: 2628095 - RNA, 19 nt, Artificial Sequence
  Description of Artificial Sequence: Synthetic oligonucleotide
uuuaaauccacauccugcu

SEQ ID NO: 2628096 - RNA, 19 nt, Artificial Sequence
  Description of Artificial Sequence: Synthetic oligonucleotide
uauuaaguuuauuuaaauc

SEQ ID NO: 2628097 - RNA, 19 nt, Artificial Sequence
  Description of Artificial Sequence: Synthetic oligonucleotide
ggaacagacagucaguugg

SEQ ID NO: 2628098 - RNA, 19 nt, Artificial Sequence
  Description of Artificial Sequence: Synthetic oligonucleotide
augucugugugcuugguac

SEQ ID NO: 2628099 - RNA, 19 nt, Artificial Sequence
  Description of Artificial Sequence: Synthetic oligonucleotide
ucuccauauauauauuuug

SEQ ID NO: 2628100 - RNA, 19 nt, Artificial Sequence
  Description of Artificial Sequence: Synthetic oligonucleotide
agugaagugaggaaggacg

SEQ ID NO: 2628101 - RNA, 19 nt, Artificial Sequence
  Description of Artificial Sequence: Synthetic oligonucleotide
cuugguaccuaccagggcc

SEQ ID NO: 2628102 - RNA, 19 nt, Artificial Sequence
  Description of Artificial Sequence: Synthetic oligonucleotide
uggaaugcagugaagugag

SEQ ID NO: 2628103 - RNA, 19 nt, Artificial Sequence
  Description of Artificial Sequence: Synthetic oligonucleotide
agcaucuccauauauauau

SEQ ID NO: 2628104 - RNA, 19 nt, Artificial Sequence
  Description of Artificial Sequence: Synthetic oligonucleotide
uacuacauuauauuaaguu

SEQ ID NO: 2628105 - RNA, 19 nt, Artificial Sequence
  Description of Artificial Sequence: Synthetic oligonucleotide
gucuacaaguuuuaucugg

SEQ ID NO: 2628106 - RNA, 19 nt, Artificial Sequence
  Description of Artificial Sequence: Synthetic oligonucleotide
gagucuacaaguuuuaucu

SEQ ID NO: 2628107 - RNA, 19 nt, Artificial Sequence
  Description of Artificial Sequence: Synthetic oligonucleotide
acuacauuauauuaaguuu

SEQ ID NO: 2628108 - RNA, 19 nt, Artificial Sequence
  Description of Artificial Sequence: Synthetic oligonucleotide
auacucaguacacgggacc

SEQ ID NO: 2628109 - RNA, 19 nt, Artificial Sequence
  Description of Artificial Sequence: Synthetic oligonucleotide
ugcagugaagugaggaagg

SEQ ID NO: 2628110 - RNA, 19 nt, Artificial Sequence
  Description of Artificial Sequence: Synthetic oligonucleotide
uuuuaucuggaaugcagug

SEQ ID NO: 2628111 - RNA, 19 nt, Artificial Sequence
  Description of Artificial Sequence: Synthetic oligonucleotide
aagccuauuccaucacugg

SEQ ID NO: 2628112 - RNA, 19 nt, Artificial Sequence
  Description of Artificial Sequence: Synthetic oligonucleotide
uuauuuaaauccacauccu

SEQ ID NO: 2628113 - RNA, 19 nt, Artificial Sequence
  Description of Artificial Sequence: Synthetic oligonucleotide
ucuacaaguuuuaucugga

SEQ ID NO: 2628114 - RNA, 19 nt, Artificial Sequence
  Description of Artificial Sequence: Synthetic oligonucleotide
uacuugguaccuaccaggg

SEQ ID NO: 2628115 - RNA, 19 nt, Artificial Sequence
  Description of Artificial Sequence: Synthetic oligonucleotide
cuacuugguaccuaccagg

SEQ ID NO: 2628116 - RNA, 19 nt, Artificial Sequence
  Description of Artificial Sequence: Synthetic oligonucleotide
ugcaguggaagccuauucc

SEQ ID NO: 2628117 - RNA, 19 nt, Artificial Sequence
  Description of Artificial Sequence: Synthetic oligonucleotide
agaggcuuggaaugcaggg

SEQ ID NO: 2628118 - RNA, 19 nt, Artificial Sequence
  Description of Artificial Sequence: Synthetic oligonucleotide
uauuccaucacuggugcag

SEQ ID NO: 2628119 - RNA, 19 nt, Artificial Sequence
  Description of Artificial Sequence: Synthetic oligonucleotide
acuccaaccgggcucacac

SEQ ID NO: 2628120 - RNA, 19 nt, Artificial Sequence
  Description of Artificial Sequence: Synthetic oligonucleotide
gaagugaggaaggacgggg

SEQ ID NO: 2628121 - RNA, 19 nt, Artificial Sequence
  Description of Artificial Sequence: Synthetic oligonucleotide
aaugcagugaagugaggaa

SEQ ID NO: 2628122 - RNA, 19 nt, Artificial Sequence
  Description of Artificial Sequence: Synthetic oligonucleotide
aguuuuaucuggaaugcag

SEQ ID NO: 2628123 - RNA, 19 nt, Artificial Sequence
  Description of Artificial Sequence: Synthetic oligonucleotide
agcggaacccgccggaugc

SEQ ID NO: 2628124 - RNA, 19 nt, Artificial Sequence
  Description of Artificial Sequence: Synthetic oligonucleotide
ugaggaaggacggggaggg

SEQ ID NO: 2628125 - RNA, 19 nt, Artificial Sequence
  Description of Artificial Sequence: Synthetic oligonucleotide
gugugcuugguacacagag

SEQ ID NO: 2628126 - RNA, 19 nt, Artificial Sequence
  Description of Artificial Sequence: Synthetic oligonucleotide
aguggaagccuauuccauc

SEQ ID NO: 2628127 - RNA, 19 nt, Artificial Sequence
  Description of Artificial Sequence: Synthetic oligonucleotide
cuacauuauauuaaguuua

SEQ ID NO: 2628128 - RNA, 19 nt, Artificial Sequence
  Description of Artificial Sequence: Synthetic oligonucleotide
caaguuuuaucuggaaugc

SEQ ID NO: 2628129 - RNA, 19 nt, Artificial Sequence
  Description of Artificial Sequence: Synthetic oligonucleotide
gaugcaucauggcaaacuc

SEQ ID NO: 2628130 - RNA, 19 nt, Artificial Sequence
  Description of Artificial Sequence: Synthetic oligonucleotide
uuuaucuggaaugcaguga

SEQ ID NO: 2628131 - RNA, 19 nt, Artificial Sequence
  Description of Artificial Sequence: Synthetic oligonucleotide
aucgugauccuugccagcc

SEQ ID NO: 2628132 - RNA, 19 nt, Artificial Sequence
  Description of Artificial Sequence: Synthetic oligonucleotide
ugagucuacaaguuuuauc

SEQ ID NO: 2628133 - RNA, 19 nt, Artificial Sequence
  Description of Artificial Sequence: Synthetic oligonucleotide
uuaaauccacauccugcug

SEQ ID NO: 2628134 - RNA, 19 nt, Artificial Sequence
  Description of Artificial Sequence: Synthetic oligonucleotide
uugguaccuaccagggccg

SEQ ID NO: 2628135 - RNA, 19 nt, Artificial Sequence
  Description of Artificial Sequence: Synthetic oligonucleotide
cagacagucaguuggccag

SEQ ID NO: 2628136 - RNA, 19 nt, Artificial Sequence
  Description of Artificial Sequence: Synthetic oligonucleotide
cucacaguggccuccgugc

SEQ ID NO: 2628137 - RNA, 19 nt, Artificial Sequence
  Description of Artificial Sequence: Synthetic oligonucleotide
uccggauuggccgaauggg

SEQ ID NO: 2628138 - RNA, 19 nt, Artificial Sequence
  Description of Artificial Sequence: Synthetic oligonucleotide
auggcaaacuccgugacug

SEQ ID NO: 2628139 - RNA, 19 nt, Artificial Sequence
  Description of Artificial Sequence: Synthetic oligonucleotide
gaagccuauuccaucacug

SEQ ID NO: 2628140 - RNA, 19 nt, Artificial Sequence
  Description of Artificial Sequence: Synthetic oligonucleotide
guacacagaguccggauug

SEQ ID NO: 2628141 - RNA, 19 nt, Artificial Sequence
  Description of Artificial Sequence: Synthetic oligonucleotide
aaacuccgugacugcaggg

SEQ ID NO: 2628142 - RNA, 19 nt, Artificial Sequence
  Description of Artificial Sequence: Synthetic oligonucleotide
accgggcucacacacacag

SEQ ID NO: 2628143 - RNA, 19 nt, Artificial Sequence
  Description of Artificial Sequence: Synthetic oligonucleotide
gccaggaucagacucacag

SEQ ID NO: 2628144 - RNA, 19 nt, Artificial Sequence
  Description of Artificial Sequence: Synthetic oligonucleotide
ggugccaccagccuggcag

SEQ ID NO: 2628145 - RNA, 19 nt, Artificial Sequence
  Description of Artificial Sequence: Synthetic oligonucleotide
aggagggauuugcaggugg

SEQ ID NO: 2628146 - RNA, 19 nt, Artificial Sequence
  Description of Artificial Sequence: Synthetic oligonucleotide
gugcuugguacacagaguc

SEQ ID NO: 2628147 - RNA, 19 nt, Artificial Sequence
  Description of Artificial Sequence: Synthetic oligonucleotide
aggcuggcuacuugguacc

SEQ ID NO: 2628148 - RNA, 19 nt, Artificial Sequence
  Description of Artificial Sequence: Synthetic oligonucleotide
gacagcaccucacacugac

SEQ ID NO: 2628149 - RNA, 19 nt, Artificial Sequence
  Description of Artificial Sequence: Synthetic oligonucleotide
gaaugcagugaagugagga

SEQ ID NO: 2628150 - RNA, 19 nt, Artificial Sequence
  Description of Artificial Sequence: Synthetic oligonucleotide
caaacuccgugacugcagg

SEQ ID NO: 2628151 - RNA, 19 nt, Artificial Sequence
  Description of Artificial Sequence: Synthetic oligonucleotide
acagacucagccccacggg

SEQ ID NO: 2628152 - RNA, 19 nt, Artificial Sequence
  Description of Artificial Sequence: Synthetic oligonucleotide
uccaaccgggcucacacac

SEQ ID NO: 2628153 - RNA, 19 nt, Artificial Sequence
  Description of Artificial Sequence: Synthetic oligonucleotide
accccuuucccagugaguc

SEQ ID NO: 2628154 - RNA, 19 nt, Artificial Sequence
  Description of Artificial Sequence: Synthetic oligonucleotide
augcagugaagugaggaag

SEQ ID NO: 2628155 - RNA, 19 nt, Artificial Sequence
  Description of Artificial Sequence: Synthetic oligonucleotide
gugaagugaggaaggacgg

SEQ ID NO: 2628156 - RNA, 19 nt, Artificial Sequence
  Description of Artificial Sequence: Synthetic oligonucleotide
agcaccucacacugacggc

SEQ ID NO: 2628157 - RNA, 19 nt, Artificial Sequence
  Description of Artificial Sequence: Synthetic oligonucleotide
gagggugugcccaaggcug

SEQ ID NO: 2628158 - RNA, 19 nt, Artificial Sequence
  Description of Artificial Sequence: Synthetic oligonucleotide
ugaagugaggaaggacggg

SEQ ID NO: 2628159 - RNA, 19 nt, Artificial Sequence
  Description of Artificial Sequence: Synthetic oligonucleotide
aucuggaaugcagugaagu

SEQ ID NO: 2628160 - RNA, 19 nt, Artificial Sequence
  Description of Artificial Sequence: Synthetic oligonucleotide
cauacucaguacacgggac

SEQ ID NO: 2628161 - RNA, 19 nt, Artificial Sequence
  Description of Artificial Sequence: Synthetic oligonucleotide
cuugguacacagaguccgg

SEQ ID NO: 2628162 - RNA, 19 nt, Artificial Sequence
  Description of Artificial Sequence: Synthetic oligonucleotide
acugacggcccuggaaucc

SEQ ID NO: 2628163 - RNA, 19 nt, Artificial Sequence
  Description of Artificial Sequence: Synthetic oligonucleotide
acagacagucaguuggcca

SEQ ID NO: 2628164 - RNA, 19 nt, Artificial Sequence
  Description of Artificial Sequence: Synthetic oligonucleotide
uacucaguacacgggaccc

SEQ ID NO: 2628165 - RNA, 19 nt, Artificial Sequence
  Description of Artificial Sequence: Synthetic oligonucleotide
gcuugguacacagaguccg

SEQ ID NO: 2628166 - RNA, 19 nt, Artificial Sequence
  Description of Artificial Sequence: Synthetic oligonucleotide
agucaguuggccaggauca

SEQ ID NO: 2628167 - RNA, 19 nt, Artificial Sequence
  Description of Artificial Sequence: Synthetic oligonucleotide
guacacgggacccugguca

SEQ ID NO: 2628168 - RNA, 19 nt, Artificial Sequence
  Description of Artificial Sequence: Synthetic oligonucleotide
cacagaguccggauuggcc

SEQ ID NO: 2628169 - RNA, 19 nt, Artificial Sequence
  Description of Artificial Sequence: Synthetic oligonucleotide
ucauggcaaacuccgugac

SEQ ID NO: 2628170 - RNA, 19 nt, Artificial Sequence
  Description of Artificial Sequence: Synthetic oligonucleotide
ugcuugguacacagagucc

SEQ ID NO: 2628171 - RNA, 19 nt, Artificial Sequence
  Description of Artificial Sequence: Synthetic oligonucleotide
aaggaggcucccaaauguc

SEQ ID NO: 2628172 - RNA, 19 nt, Artificial Sequence
  Description of Artificial Sequence: Synthetic oligonucleotide
aucagacucacaguggccu

SEQ ID NO: 2628173 - RNA, 19 nt, Artificial Sequence
  Description of Artificial Sequence: Synthetic oligonucleotide
aggaggcucccaaaugucc

SEQ ID NO: 2628174 - RNA, 19 nt, Artificial Sequence
  Description of Artificial Sequence: Synthetic oligonucleotide
gaaggaggcucccaaaugu

SEQ ID NO: 2628175 - RNA, 19 nt, Artificial Sequence
  Description of Artificial Sequence: Synthetic oligonucleotide
uaucuggaaugcagugaag

SEQ ID NO: 2628176 - RNA, 19 nt, Artificial Sequence
  Description of Artificial Sequence: Synthetic oligonucleotide
agggcuugugggcacgagg

SEQ ID NO: 2628177 - RNA, 19 nt, Artificial Sequence
  Description of Artificial Sequence: Synthetic oligonucleotide
ucaguacacgggacccugg

SEQ ID NO: 2628178 - RNA, 19 nt, Artificial Sequence
  Description of Artificial Sequence: Synthetic oligonucleotide
augcaucauggcaaacucc

SEQ ID NO: 2628179 - RNA, 19 nt, Artificial Sequence
  Description of Artificial Sequence: Synthetic oligonucleotide
aaguuuuaucuggaaugca

SEQ ID NO: 2628180 - RNA, 19 nt, Artificial Sequence
  Description of Artificial Sequence: Synthetic oligonucleotide
agccuauuccaucacuggu

SEQ ID NO: 2628181 - RNA, 19 nt, Artificial Sequence
  Description of Artificial Sequence: Synthetic oligonucleotide
acacugacggcccuggaau

SEQ ID NO: 2628182 - RNA, 19 nt, Artificial Sequence
  Description of Artificial Sequence: Synthetic oligonucleotide
cuggcuacuugguaccuac

SEQ ID NO: 2628183 - RNA, 19 nt, Artificial Sequence
  Description of Artificial Sequence: Synthetic oligonucleotide
aguacacgggacccugguc

SEQ ID NO: 2628184 - RNA, 19 nt, Artificial Sequence
  Description of Artificial Sequence: Synthetic oligonucleotide
guccggauuggccgaaugg

SEQ ID NO: 2628185 - RNA, 19 nt, Artificial Sequence
  Description of Artificial Sequence: Synthetic oligonucleotide
cagucaguuggccaggauc

SEQ ID NO: 2628186 - RNA, 19 nt, Artificial Sequence
  Description of Artificial Sequence: Synthetic oligonucleotide
gacaggugcaguggaagcc

SEQ ID NO: 2628187 - RNA, 19 nt, Artificial Sequence
  Description of Artificial Sequence: Synthetic oligonucleotide
uacacagaguccggauugg

SEQ ID NO: 2628188 - RNA, 19 nt, Artificial Sequence
  Description of Artificial Sequence: Synthetic oligonucleotide
cagaggcuuggaaugcagg

SEQ ID NO: 2628189 - RNA, 19 nt, Artificial Sequence
  Description of Artificial Sequence: Synthetic oligonucleotide
guggaagccuauuccauca

SEQ ID NO: 2628190 - RNA, 19 nt, Artificial Sequence
  Description of Artificial Sequence: Synthetic oligonucleotide
aggaacagacagucaguug

SEQ ID NO: 2628191 - RNA, 19 nt, Artificial Sequence
  Description of Artificial Sequence: Synthetic oligonucleotide
ugucugugugcuugguaca

SEQ ID NO: 2628192 - RNA, 19 nt, Artificial Sequence
  Description of Artificial Sequence: Synthetic oligonucleotide
agggccgcauacucaguac

SEQ ID NO: 2628193 - RNA, 19 nt, Artificial Sequence
  Description of Artificial Sequence: Synthetic oligonucleotide
ugauccuugccagccuggg

SEQ ID NO: 2628194 - RNA, 19 nt, Artificial Sequence
  Description of Artificial Sequence: Synthetic oligonucleotide
guggccuccgugcucacag

SEQ ID NO: 2628195 - RNA, 19 nt, Artificial Sequence
  Description of Artificial Sequence: Synthetic oligonucleotide
acggcccuggaauccaggg

SEQ ID NO: 2628196 - RNA, 19 nt, Artificial Sequence
  Description of Artificial Sequence: Synthetic oligonucleotide
uggugcaggugccaccagc

SEQ ID NO: 2628197 - RNA, 19 nt, Artificial Sequence
  Description of Artificial Sequence: Synthetic oligonucleotide
accuaccagggccgcauac

SEQ ID NO: 2628198 - RNA, 19 nt, Artificial Sequence
  Description of Artificial Sequence: Synthetic oligonucleotide
gcuacuugguaccuaccag

SEQ ID NO: 2628199 - RNA, 19 nt, Artificial Sequence
  Description of Artificial Sequence: Synthetic oligonucleotide
gaggcucccaaaugucccc

SEQ ID NO: 2628200 - RNA, 19 nt, Artificial Sequence
  Description of Artificial Sequence: Synthetic oligonucleotide
gagggauuugcaggugggg

SEQ ID NO: 2628201 - RNA, 19 nt, Artificial Sequence
  Description of Artificial Sequence: Synthetic oligonucleotide
ccuauuccaucacuggugc

SEQ ID NO: 2628202 - RNA, 19 nt, Artificial Sequence
  Description of Artificial Sequence: Synthetic oligonucleotide
aggaucagacucacagugg

SEQ ID NO: 2628203 - RNA, 19 nt, Artificial Sequence
  Description of Artificial Sequence: Synthetic oligonucleotide
gaacccgccggaugcauca

SEQ ID NO: 2628204 - RNA, 19 nt, Artificial Sequence
  Description of Artificial Sequence: Synthetic oligonucleotide
caaccgggcucacacacac

SEQ ID NO: 2628205 - RNA, 19 nt, Artificial Sequence
  Description of Artificial Sequence: Synthetic oligonucleotide
cuggcaucgugauccuugc

SEQ ID NO: 2628206 - RNA, 19 nt, Artificial Sequence
  Description of Artificial Sequence: Synthetic oligonucleotide
ugugugcuugguacacaga

SEQ ID NO: 2628207 - RNA, 19 nt, Artificial Sequence
  Description of Artificial Sequence: Synthetic oligonucleotide
gaucagacucacaguggcc

SEQ ID NO: 2628208 - RNA, 19 nt, Artificial Sequence
  Description of Artificial Sequence: Synthetic oligonucleotide
acauccugcuggcaucgug

SEQ ID NO: 2628209 - RNA, 19 nt, Artificial Sequence
  Description of Artificial Sequence: Synthetic oligonucleotide
auacuacauuauauuaagu

SEQ ID NO: 2628210 - RNA, 19 nt, Artificial Sequence
  Description of Artificial Sequence: Synthetic oligonucleotide
acuccgugacugcagggcu

SEQ ID NO: 2628211 - RNA, 19 nt, Artificial Sequence
  Description of Artificial Sequence: Synthetic oligonucleotide
ggcaucuggagccaggcuc

SEQ ID NO: 2628212 - RNA, 19 nt, Artificial Sequence
  Description of Artificial Sequence: Synthetic oligonucleotide
uggccgaaugggcccacag

SEQ ID NO: 2628213 - RNA, 19 nt, Artificial Sequence
  Description of Artificial Sequence: Synthetic oligonucleotide
aagugaggaaggacgggga

SEQ ID NO: 2628214 - RNA, 19 nt, Artificial Sequence
  Description of Artificial Sequence: Synthetic oligonucleotide
acacagcggaacccgccgg

SEQ ID NO: 2628215 - RNA, 19 nt, Artificial Sequence
  Description of Artificial Sequence: Synthetic oligonucleotide
uggaagccuauuccaucac

SEQ ID NO: 2628216 - RNA, 19 nt, Artificial Sequence
  Description of Artificial Sequence: Synthetic oligonucleotide
agccuggcagggcugcgac

SEQ ID NO: 2628217 - RNA, 19 nt, Artificial Sequence
  Description of Artificial Sequence: Synthetic oligonucleotide
gcgacucacaggcaucugg

SEQ ID NO: 2628218 - RNA, 19 nt, Artificial Sequence
  Description of Artificial Sequence: Synthetic oligonucleotide
ccgcauacucaguacacgg

SEQ ID NO: 2628219 - RNA, 19 nt, Artificial Sequence
  Description of Artificial Sequence: Synthetic oligonucleotide
gccgaaugggcccacagac

SEQ ID NO: 2628220 - RNA, 19 nt, Artificial Sequence
  Description of Artificial Sequence: Synthetic oligonucleotide
aucuccauauauauauuuu

SEQ ID NO: 2628221 - RNA, 19 nt, Artificial Sequence
  Description of Artificial Sequence: Synthetic oligonucleotide
cauccugcuggcaucguga

SEQ ID NO: 2628222 - RNA, 19 nt, Artificial Sequence
  Description of Artificial Sequence: Synthetic oligonucleotide
uugguacacagaguccgga

SEQ ID NO: 2628223 - RNA, 19 nt, Artificial Sequence
  Description of Artificial Sequence: Synthetic oligonucleotide
cuaccagggccgcauacuc

SEQ ID NO: 2628224 - RNA, 19 nt, Artificial Sequence
  Description of Artificial Sequence: Synthetic oligonucleotide
ugugcccaaggcuggcuac

SEQ ID NO: 2628225 - RNA, 19 nt, Artificial Sequence
  Description of Artificial Sequence: Synthetic oligonucleotide
ugguacacagaguccggau

SEQ ID NO: 2628226 - RNA, 19 nt, Artificial Sequence
  Description of Artificial Sequence: Synthetic oligonucleotide
ucaguuggccaggaucaga

SEQ ID NO: 2628227 - RNA, 19 nt, Artificial Sequence
  Description of Artificial Sequence: Synthetic oligonucleotide
aagaccccuuucccaguga

SEQ ID NO: 2628228 - RNA, 19 nt, Artificial Sequence
  Description of Artificial Sequence: Synthetic oligonucleotide
ggauuggccgaaugggccc

SEQ ID NO: 2628229 - RNA, 19 nt, Artificial Sequence
  Description of Artificial Sequence: Synthetic oligonucleotide
acccuggucaugucugugu

SEQ ID NO: 2628230 - RNA, 19 nt, Artificial Sequence
  Description of Artificial Sequence: Synthetic oligonucleotide
caucgugauccuugccagc

SEQ ID NO: 2628231 - RNA, 19 nt, Artificial Sequence
  Description of Artificial Sequence: Synthetic oligonucleotide
cacgaggggugauucgcag

SEQ ID NO: 2628232 - RNA, 19 nt, Artificial Sequence
  Description of Artificial Sequence: Synthetic oligonucleotide
cccaaggcuggcuacuugg

SEQ ID NO: 2628233 - RNA, 19 nt, Artificial Sequence
  Description of Artificial Sequence: Synthetic oligonucleotide
acaggugcaguggaagccu

SEQ ID NO: 2628234 - RNA, 19 nt, Artificial Sequence
  Description of Artificial Sequence: Synthetic oligonucleotide
gcauacucaguacacggga

SEQ ID NO: 2628235 - RNA, 19 nt, Artificial Sequence
  Description of Artificial Sequence: Synthetic oligonucleotide
ccuccgugcucacagaggc

SEQ ID NO: 2628236 - RNA, 19 nt, Artificial Sequence
  Description of Artificial Sequence: Synthetic oligonucleotide
aguccggauuggccgaaug

SEQ ID NO: 2628237 - RNA, 19 nt, Artificial Sequence
  Description of Artificial Sequence: Synthetic oligonucleotide
cucacacugacggcccugg

SEQ ID NO: 2628238 - RNA, 19 nt, Artificial Sequence
  Description of Artificial Sequence: Synthetic oligonucleotide
guuuuaucuggaaugcagu

SEQ ID NO: 2628239 - RNA, 19 nt, Artificial Sequence
  Description of Artificial Sequence: Synthetic oligonucleotide
ucagacucacaguggccuc

SEQ ID NO: 2628240 - RNA, 19 nt, Artificial Sequence
  Description of Artificial Sequence: Synthetic oligonucleotide
acaguggccuccgugcuca

SEQ ID NO: 2628241 - RNA, 19 nt, Artificial Sequence
  Description of Artificial Sequence: Synthetic oligonucleotide
agacagucaguuggccagg

SEQ ID NO: 2628242 - RNA, 19 nt, Artificial Sequence
  Description of Artificial Sequence: Synthetic oligonucleotide
cagggcugcgacucacagg

SEQ ID NO: 2628243 - RNA, 19 nt, Artificial Sequence
  Description of Artificial Sequence: Synthetic oligonucleotide
uggcuacuugguaccuacc

SEQ ID NO: 2628244 - RNA, 19 nt, Artificial Sequence
  Description of Artificial Sequence: Synthetic oligonucleotide
caccucacacugacggccc

SEQ ID NO: 2628245 - RNA, 19 nt, Artificial Sequence
  Description of Artificial Sequence: Synthetic oligonucleotide
cacacacagcggaacccgc

SEQ ID NO: 2628246 - RNA, 19 nt, Artificial Sequence
  Description of Artificial Sequence: Synthetic oligonucleotide
cucaguacacgggacccug

SEQ ID NO: 2628247 - RNA, 19 nt, Artificial Sequence
  Description of Artificial Sequence: Synthetic oligonucleotide
uccgugcucacagaggcuu

SEQ ID NO: 2628248 - RNA, 19 nt, Artificial Sequence
  Description of Artificial Sequence: Synthetic oligonucleotide
ggagcaucuccauauauau

SEQ ID NO: 2628249 - RNA, 19 nt, Artificial Sequence
  Description of Artificial Sequence: Synthetic oligonucleotide
ggcccacagacucagcccc

SEQ ID NO: 2628250 - RNA, 19 nt, Artificial Sequence
  Description of Artificial Sequence: Synthetic oligonucleotide
acagaggcuuggaaugcag

SEQ ID NO: 2628251 - RNA, 19 nt, Artificial Sequence
  Description of Artificial Sequence: Synthetic oligonucleotide
uccgugacugcagggcuug

SEQ ID NO: 2628252 - RNA, 19 nt, Artificial Sequence
  Description of Artificial Sequence: Synthetic oligonucleotide
gugcaguggaagccuauuc

SEQ ID NO: 2628253 - RNA, 19 nt, Artificial Sequence
  Description of Artificial Sequence: Synthetic oligonucleotide
agacucacaguggccuccg

SEQ ID NO: 2628254 - RNA, 19 nt, Artificial Sequence
  Description of Artificial Sequence: Synthetic oligonucleotide
cuacaaguuuuaucuggaa

SEQ ID NO: 2628255 - RNA, 19 nt, Artificial Sequence
  Description of Artificial Sequence: Synthetic oligonucleotide
ucgugauccuugccagccu

SEQ ID NO: 2628256 - RNA, 19 nt, Artificial Sequence
  Description of Artificial Sequence: Synthetic oligonucleotide
ugacggcccuggaauccag

SEQ ID NO: 2628257 - RNA, 19 nt, Artificial Sequence
  Description of Artificial Sequence: Synthetic oligonucleotide
ggagggauuugcagguggg

SEQ ID NO: 2628258 - RNA, 19 nt, Artificial Sequence
  Description of Artificial Sequence: Synthetic oligonucleotide
uggcaucgugauccuugcc

SEQ ID NO: 2628259 - RNA, 19 nt, Artificial Sequence
  Description of Artificial Sequence: Synthetic oligonucleotide
agugagucuacaaguuuua

SEQ ID NO: 2628260 - RNA, 19 nt, Artificial Sequence
  Description of Artificial Sequence: Synthetic oligonucleotide
caucuccauauauauauuu

SEQ ID NO: 2628261 - RNA, 19 nt, Artificial Sequence
  Description of Artificial Sequence: Synthetic oligonucleotide
cacuggugcaggugccacc

SEQ ID NO: 2628262 - RNA, 19 nt, Artificial Sequence
  Description of Artificial Sequence: Synthetic oligonucleotide
gugauccuugccagccugg

SEQ ID NO: 2628263 - RNA, 19 nt, Artificial Sequence
  Description of Artificial Sequence: Synthetic oligonucleotide
gcuggcaucgugauccuug

SEQ ID NO: 2628264 - RNA, 19 nt, Artificial Sequence
  Description of Artificial Sequence: Synthetic oligonucleotide
aauccacauccugcuggca

SEQ ID NO: 2628265 - RNA, 19 nt, Artificial Sequence
  Description of Artificial Sequence: Synthetic oligonucleotide
acaggcaucuggagccagg

SEQ ID NO: 2628266 - RNA, 19 nt, Artificial Sequence
  Description of Artificial Sequence: Synthetic oligonucleotide
uacacgggacccuggucau

SEQ ID NO: 2628267 - RNA, 19 nt, Artificial Sequence
  Description of Artificial Sequence: Synthetic oligonucleotide
gucugugugcuugguacac

SEQ ID NO: 2628268 - RNA, 19 nt, Artificial Sequence
  Description of Artificial Sequence: Synthetic oligonucleotide
gcaccucacacugacggcc

SEQ ID NO: 2628269 - RNA, 19 nt, Artificial Sequence
  Description of Artificial Sequence: Synthetic oligonucleotide
gggugauucgcagguaggc

SEQ ID NO: 2628270 - RNA, 19 nt, Artificial Sequence
  Description of Artificial Sequence: Synthetic oligonucleotide
cccgccggaugcaucaugg

SEQ ID NO: 2628271 - RNA, 19 nt, Artificial Sequence
  Description of Artificial Sequence: Synthetic oligonucleotide
ugggcacgaggggugauuc

SEQ ID NO: 2628272 - RNA, 19 nt, Artificial Sequence
  Description of Artificial Sequence: Synthetic oligonucleotide
agggugugcccaaggcugg

SEQ ID NO: 2628273 - RNA, 19 nt, Artificial Sequence
  Description of Artificial Sequence: Synthetic oligonucleotide
gacggcccuggaauccagg

SEQ ID NO: 2628274 - RNA, 19 nt, Artificial Sequence
  Description of Artificial Sequence: Synthetic oligonucleotide
ggcacgaggggugauucgc

SEQ ID NO: 2628275 - RNA, 19 nt, Artificial Sequence
  Description of Artificial Sequence: Synthetic oligonucleotide
ccggauuggccgaaugggc

SEQ ID NO: 2628276 - RNA, 19 nt, Artificial Sequence
  Description of Artificial Sequence: Synthetic oligonucleotide
cagugagucuacaaguuuu

SEQ ID NO: 2628277 - RNA, 19 nt, Artificial Sequence
  Description of Artificial Sequence: Synthetic oligonucleotide
gcaaacuccgugacugcag

SEQ ID NO: 2628278 - RNA, 19 nt, Artificial Sequence
  Description of Artificial Sequence: Synthetic oligonucleotide
gccgcauacucaguacacg

SEQ ID NO: 2628279 - RNA, 19 nt, Artificial Sequence
  Description of Artificial Sequence: Synthetic oligonucleotide
cgcauacucaguacacggg

SEQ ID NO: 2628280 - RNA, 19 nt, Artificial Sequence
  Description of Artificial Sequence: Synthetic oligonucleotide
ucacacugacggcccugga

SEQ ID NO: 2628281 - RNA, 19 nt, Artificial Sequence
  Description of Artificial Sequence: Synthetic oligonucleotide
cgaaugggcccacagacuc

SEQ ID NO: 2628282 - RNA, 19 nt, Artificial Sequence
  Description of Artificial Sequence: Synthetic oligonucleotide
gauuggccgaaugggccca

SEQ ID NO: 2628283 - RNA, 19 nt, Artificial Sequence
  Description of Artificial Sequence: Synthetic oligonucleotide
cacugacggcccuggaauc

SEQ ID NO: 2628284 - RNA, 19 nt, Artificial Sequence
  Description of Artificial Sequence: Synthetic oligonucleotide
ggcuugugggcacgagggg

SEQ ID NO: 2628285 - RNA, 19 nt, Artificial Sequence
  Description of Artificial Sequence: Synthetic oligonucleotide
ugaccccaggggagggugu

SEQ ID NO: 2628286 - RNA, 19 nt, Artificial Sequence
  Description of Artificial Sequence: Synthetic oligonucleotide
cggauuggccgaaugggcc

SEQ ID NO: 2628287 - RNA, 19 nt, Artificial Sequence
  Description of Artificial Sequence: Synthetic oligonucleotide
gacccuggucaugucugug

SEQ ID NO: 2628288 - RNA, 19 nt, Artificial Sequence
  Description of Artificial Sequence: Synthetic oligonucleotide
acucaguacacgggacccu

SEQ ID NO: 2628289 - RNA, 19 nt, Artificial Sequence
  Description of Artificial Sequence: Synthetic oligonucleotide
ggggugauucgcagguagg

SEQ ID NO: 2628290 - RNA, 19 nt, Artificial Sequence
  Description of Artificial Sequence: Synthetic oligonucleotide
cuauuccaucacuggugca

SEQ ID NO: 2628291 - RNA, 19 nt, Artificial Sequence
  Description of Artificial Sequence: Synthetic oligonucleotide
cacacugacggcccuggaa

SEQ ID NO: 2628292 - RNA, 19 nt, Artificial Sequence
  Description of Artificial Sequence: Synthetic oligonucleotide
ggccuccgugcucacagag

SEQ ID NO: 2628293 - RNA, 19 nt, Artificial Sequence
  Description of Artificial Sequence: Synthetic oligonucleotide
gggcccacagacucagccc

SEQ ID NO: 2628294 - RNA, 19 nt, Artificial Sequence
  Description of Artificial Sequence: Synthetic oligonucleotide
uggccaggaucagacucac

SEQ ID NO: 2628295 - RNA, 19 nt, Artificial Sequence
  Description of Artificial Sequence: Synthetic oligonucleotide
acagucaguuggccaggau

SEQ ID NO: 2628296 - RNA, 19 nt, Artificial Sequence
  Description of Artificial Sequence: Synthetic oligonucleotide
ggugauucgcagguaggca

SEQ ID NO: 2628297 - RNA, 19 nt, Artificial Sequence
  Description of Artificial Sequence: Synthetic oligonucleotide
gcgcaggagggauuugcag

SEQ ID NO: 2628298 - RNA, 19 nt, Artificial Sequence
  Description of Artificial Sequence: Synthetic oligonucleotide
auuggccgaaugggcccac

SEQ ID NO: 2628299 - RNA, 19 nt, Artificial Sequence
  Description of Artificial Sequence: Synthetic oligonucleotide
cagaguccggauuggccga

SEQ ID NO: 2628300 - RNA, 19 nt, Artificial Sequence
  Description of Artificial Sequence: Synthetic oligonucleotide
gggacccuggucaugucug

SEQ ID NO: 2628301 - RNA, 19 nt, Artificial Sequence
  Description of Artificial Sequence: Synthetic oligonucleotide
uugugggcacgagggguga

SEQ ID NO: 2628302 - RNA, 19 nt, Artificial Sequence
  Description of Artificial Sequence: Synthetic oligonucleotide
ggaaugcagugaagugagg

SEQ ID NO: 2628303 - RNA, 19 nt, Artificial Sequence
  Description of Artificial Sequence: Synthetic oligonucleotide
ggggagggugugcccaagg

SEQ ID NO: 2628304 - RNA, 19 nt, Artificial Sequence
  Description of Artificial Sequence: Synthetic oligonucleotide
accccaggggagggugugc

SEQ ID NO: 2628305 - RNA, 19 nt, Artificial Sequence
  Description of Artificial Sequence: Synthetic oligonucleotide
gacagucaguuggccagga

SEQ ID NO: 2628306 - RNA, 19 nt, Artificial Sequence
  Description of Artificial Sequence: Synthetic oligonucleotide
cacaguggccuccgugcuc

SEQ ID NO: 2628307 - RNA, 19 nt, Artificial Sequence
  Description of Artificial Sequence: Synthetic oligonucleotide
ugguaccuaccagggccgc

SEQ ID NO: 2628308 - RNA, 19 nt, Artificial Sequence
  Description of Artificial Sequence: Synthetic oligonucleotide
acccgccggaugcaucaug

SEQ ID NO: 2628309 - RNA, 19 nt, Artificial Sequence
  Description of Artificial Sequence: Synthetic oligonucleotide
gcaggagggauuugcaggu

SEQ ID NO: 2628310 - RNA, 19 nt, Artificial Sequence
  Description of Artificial Sequence: Synthetic oligonucleotide
acgggacccuggucauguc

SEQ ID NO: 2628311 - RNA, 19 nt, Artificial Sequence
  Description of Artificial Sequence: Synthetic oligonucleotide
cagcggaacccgccggaug

SEQ ID NO: 2628312 - RNA, 19 nt, Artificial Sequence
  Description of Artificial Sequence: Synthetic oligonucleotide
gggccgcauacucaguaca

SEQ ID NO: 2628313 - RNA, 19 nt, Artificial Sequence
  Description of Artificial Sequence: Synthetic oligonucleotide
gcucacagaggcuuggaau

SEQ ID NO: 2628314 - RNA, 19 nt, Artificial Sequence
  Description of Artificial Sequence: Synthetic oligonucleotide
ggccacuccaaccgggcuc

SEQ ID NO: 2628315 - RNA, 19 nt, Artificial Sequence
  Description of Artificial Sequence: Synthetic oligonucleotide
gccggaugcaucauggcaa

SEQ ID NO: 2628316 - RNA, 19 nt, Artificial Sequence
  Description of Artificial Sequence: Synthetic oligonucleotide
cugcagggcuugugggcac

SEQ ID NO: 2628317 - RNA, 19 nt, Artificial Sequence
  Description of Artificial Sequence: Synthetic oligonucleotide
gggcacgaggggugauucg

SEQ ID NO: 2628318 - RNA, 19 nt, Artificial Sequence
  Description of Artificial Sequence: Synthetic oligonucleotide
caaggcuggcuacuuggua

SEQ ID NO: 2628319 - RNA, 19 nt, Artificial Sequence
  Description of Artificial Sequence: Synthetic oligonucleotide
ggaagccuauuccaucacu

SEQ ID NO: 2628320 - RNA, 19 nt, Artificial Sequence
  Description of Artificial Sequence: Synthetic oligonucleotide
cacaggcaucuggagccag

SEQ ID NO: 2628321 - RNA, 19 nt, Artificial Sequence
  Description of Artificial Sequence: Synthetic oligonucleotide
ggcaaacuccgugacugca

SEQ ID NO: 2628322 - RNA, 19 nt, Artificial Sequence
  Description of Artificial Sequence: Synthetic oligonucleotide
gggcucacacacacagcgg

SEQ ID NO: 2628323 - RNA, 19 nt, Artificial Sequence
  Description of Artificial Sequence: Synthetic oligonucleotide
gggagcaucuccauauaua

SEQ ID NO: 2628324 - RNA, 19 nt, Artificial Sequence
  Description of Artificial Sequence: Synthetic oligonucleotide
cauggcaaacuccgugacu

SEQ ID NO: 2628325 - RNA, 19 nt, Artificial Sequence
  Description of Artificial Sequence: Synthetic oligonucleotide
cacagaggcuuggaaugca

SEQ ID NO: 2628326 - RNA, 19 nt, Artificial Sequence
  Description of Artificial Sequence: Synthetic oligonucleotide
uaccuaccagggccgcaua

SEQ ID NO: 2628327 - RNA, 19 nt, Artificial Sequence
  Description of Artificial Sequence: Synthetic oligonucleotide
ggagggugugcccaaggcu

SEQ ID NO: 2628328 - RNA, 19 nt, Artificial Sequence
  Description of Artificial Sequence: Synthetic oligonucleotide
uggucaugucugugugcuu

SEQ ID NO: 2628329 - RNA, 19 nt, Artificial Sequence
  Description of Artificial Sequence: Synthetic oligonucleotide
gguacacagaguccggauu

SEQ ID NO: 2628330 - RNA, 19 nt, Artificial Sequence
  Description of Artificial Sequence: Synthetic oligonucleotide
caggagggauuugcaggug

SEQ ID NO: 2628331 - RNA, 19 nt, Artificial Sequence
  Description of Artificial Sequence: Synthetic oligonucleotide
cagggccgcauacucagua

SEQ ID NO: 2628332 - RNA, 19 nt, Artificial Sequence
  Description of Artificial Sequence: Synthetic oligonucleotide
gggcgcaggagggauuugc

SEQ ID NO: 2628333 - RNA, 19 nt, Artificial Sequence
  Description of Artificial Sequence: Synthetic oligonucleotide
ggccgcauacucaguacac

SEQ ID NO: 2628334 - RNA, 19 nt, Artificial Sequence
  Description of Artificial Sequence: Synthetic oligonucleotide
aaccgggcucacacacaca

SEQ ID NO: 2628335 - RNA, 19 nt, Artificial Sequence
  Description of Artificial Sequence: Synthetic oligonucleotide
gugugcccaaggcuggcua

SEQ ID NO: 2628336 - RNA, 19 nt, Artificial Sequence
  Description of Artificial Sequence: Synthetic oligonucleotide
augggcccacagacucagc

SEQ ID NO: 2628337 - RNA, 19 nt, Artificial Sequence
  Description of Artificial Sequence: Synthetic oligonucleotide
caccagccuggcagggcug

SEQ ID NO: 2628338 - RNA, 19 nt, Artificial Sequence
  Description of Artificial Sequence: Synthetic oligonucleotide
cgugauccuugccagccug

SEQ ID NO: 2628339 - RNA, 19 nt, Artificial Sequence
  Description of Artificial Sequence: Synthetic oligonucleotide
ggccgaaugggcccacaga

SEQ ID NO: 2628340 - RNA, 19 nt, Artificial Sequence
  Description of Artificial Sequence: Synthetic oligonucleotide
uuggccgaaugggcccaca

SEQ ID NO: 2628341 - RNA, 19 nt, Artificial Sequence
  Description of Artificial Sequence: Synthetic oligonucleotide
gggaaggaggcucccaaau

SEQ ID NO: 2628342 - RNA, 19 nt, Artificial Sequence
  Description of Artificial Sequence: Synthetic oligonucleotide
cuccaaccgggcucacaca

SEQ ID NO: 2628343 - RNA, 19 nt, Artificial Sequence
  Description of Artificial Sequence: Synthetic oligonucleotide
cugacggcccuggaaucca

SEQ ID NO: 2628344 - RNA, 19 nt, Artificial Sequence
  Description of Artificial Sequence: Synthetic oligonucleotide
acagcggaacccgccggau

SEQ ID NO: 2628345 - RNA, 19 nt, Artificial Sequence
  Description of Artificial Sequence: Synthetic oligonucleotide
aggggagggugugcccaag

SEQ ID NO: 2628346 - RNA, 19 nt, Artificial Sequence
  Description of Artificial Sequence: Synthetic oligonucleotide
caggaacagacagucaguu

SEQ ID NO: 2628347 - RNA, 19 nt, Artificial Sequence
  Description of Artificial Sequence: Synthetic oligonucleotide
aguggccuccgugcucaca

SEQ ID NO: 2628348 - RNA, 19 nt, Artificial Sequence
  Description of Artificial Sequence: Synthetic oligonucleotide
caucuggagccaggcucug

SEQ ID NO: 2628349 - RNA, 19 nt, Artificial Sequence
  Description of Artificial Sequence: Synthetic oligonucleotide
agaguccggauuggccgaa

SEQ ID NO: 2628350 - RNA, 19 nt, Artificial Sequence
  Description of Artificial Sequence: Synthetic oligonucleotide
acacgggacccuggucaug

SEQ ID NO: 2628351 - RNA, 19 nt, Artificial Sequence
  Description of Artificial Sequence: Synthetic oligonucleotide
gugagucuacaaguuuuau

SEQ ID NO: 2628352 - RNA, 19 nt, Artificial Sequence
  Description of Artificial Sequence: Synthetic oligonucleotide
cagggcuugugggcacgag

SEQ ID NO: 2628353 - RNA, 19 nt, Artificial Sequence
  Description of Artificial Sequence: Synthetic oligonucleotide
guaccuaccagggccgcau

SEQ ID NO: 2628354 - RNA, 19 nt, Artificial Sequence
  Description of Artificial Sequence: Synthetic oligonucleotide
caguacacgggacccuggu

SEQ ID NO: 2628355 - RNA, 19 nt, Artificial Sequence
  Description of Artificial Sequence: Synthetic oligonucleotide
gccacuccaaccgggcuca

SEQ ID NO: 2628356 - RNA, 19 nt, Artificial Sequence
  Description of Artificial Sequence: Synthetic oligonucleotide
aacccgccggaugcaucau

SEQ ID NO: 2628357 - RNA, 19 nt, Artificial Sequence
  Description of Artificial Sequence: Synthetic oligonucleotide
cacgggacccuggucaugu

SEQ ID NO: 2628358 - RNA, 19 nt, Artificial Sequence
  Description of Artificial Sequence: Synthetic oligonucleotide
ggcugcgacucacaggcau

SEQ ID NO: 2628359 - RNA, 19 nt, Artificial Sequence
  Description of Artificial Sequence: Synthetic oligonucleotide
ccuuucccagugagucuac

SEQ ID NO: 2628360 - RNA, 19 nt, Artificial Sequence
  Description of Artificial Sequence: Synthetic oligonucleotide
caggugcaguggaagccua

SEQ ID NO: 2628361 - RNA, 19 nt, Artificial Sequence
  Description of Artificial Sequence: Synthetic oligonucleotide
ccgggcucacacacacagc

SEQ ID NO: 2628362 - RNA, 19 nt, Artificial Sequence
  Description of Artificial Sequence: Synthetic oligonucleotide
cugcgacucacaggcaucu

SEQ ID NO: 2628363 - RNA, 19 nt, Artificial Sequence
  Description of Artificial Sequence: Synthetic oligonucleotide
ggcgcaggagggauuugca

SEQ ID NO: 2628364 - RNA, 19 nt, Artificial Sequence
  Description of Artificial Sequence: Synthetic oligonucleotide
gaccccuuucccagugagu

SEQ ID NO: 2628365 - RNA, 19 nt, Artificial Sequence
  Description of Artificial Sequence: Synthetic oligonucleotide
ugcuggcaucgugauccuu

SEQ ID NO: 2628366 - RNA, 19 nt, Artificial Sequence
  Description of Artificial Sequence: Synthetic oligonucleotide
gaggggugauucgcaggua

SEQ ID NO: 2628367 - RNA, 19 nt, Artificial Sequence
  Description of Artificial Sequence: Synthetic oligonucleotide
ccgccggaugcaucauggc

SEQ ID NO: 2628368 - RNA, 19 nt, Artificial Sequence
  Description of Artificial Sequence: Synthetic oligonucleotide
cccaggggagggugugccc

SEQ ID NO: 2628369 - RNA, 19 nt, Artificial Sequence
  Description of Artificial Sequence: Synthetic oligonucleotide
gguaccuaccagggccgca

SEQ ID NO: 2628370 - RNA, 19 nt, Artificial Sequence
  Description of Artificial Sequence: Synthetic oligonucleotide
ccgugcucacagaggcuug

SEQ ID NO: 2628371 - RNA, 19 nt, Artificial Sequence
  Description of Artificial Sequence: Synthetic oligonucleotide
ggaacccgccggaugcauc

SEQ ID NO: 2628372 - RNA, 19 nt, Artificial Sequence
  Description of Artificial Sequence: Synthetic oligonucleotide
ccccaggggagggugugcc

SEQ ID NO: 2628373 - RNA, 19 nt, Artificial Sequence
  Description of Artificial Sequence: Synthetic oligonucleotide
cacuccaaccgggcucaca

SEQ ID NO: 2628374 - RNA, 19 nt, Artificial Sequence
  Description of Artificial Sequence: Synthetic oligonucleotide
ccggaugcaucauggcaaa

SEQ ID NO: 2628375 - RNA, 19 nt, Artificial Sequence
  Description of Artificial Sequence: Synthetic oligonucleotide
cgccggaugcaucauggca

SEQ ID NO: 2628376 - RNA, 19 nt, Artificial Sequence
  Description of Artificial Sequence: Synthetic oligonucleotide
ccaaccgggcucacacaca

SEQ ID NO: 2628377 - RNA, 19 nt, Artificial Sequence
  Description of Artificial Sequence: Synthetic oligonucleotide
gcacgaggggugauucgca

SEQ ID NO: 2628378 - RNA, 19 nt, Artificial Sequence
  Description of Artificial Sequence: Synthetic oligonucleotide
gggugugcccaaggcuggc

SEQ ID NO: 2628379 - RNA, 19 nt, Artificial Sequence
  Description of Artificial Sequence: Synthetic oligonucleotide
gacucacaguggccuccgu

SEQ ID NO: 2628380 - RNA, 19 nt, Artificial Sequence
  Description of Artificial Sequence: Synthetic oligonucleotide
cuccgugcucacagaggcu

SEQ ID NO: 2628381 - RNA, 19 nt, Artificial Sequence
  Description of Artificial Sequence: Synthetic oligonucleotide
cccuuucccagugagucua

SEQ ID NO: 2628382 - RNA, 19 nt, Artificial Sequence
  Description of Artificial Sequence: Synthetic oligonucleotide
caguggccuccgugcucac

SEQ ID NO: 2628383 - RNA, 19 nt, Artificial Sequence
  Description of Artificial Sequence: Synthetic oligonucleotide
cagccuggcagggcugcga

SEQ ID NO: 2628384 - RNA, 19 nt, Artificial Sequence
  Description of Artificial Sequence: Synthetic oligonucleotide
ccucacacugacggcccug

SEQ ID NO: 2628385 - RNA, 19 nt, Artificial Sequence
  Description of Artificial Sequence: Synthetic oligonucleotide
gugcccaaggcuggcuacu

SEQ ID NO: 2628386 - RNA, 19 nt, Artificial Sequence
  Description of Artificial Sequence: Synthetic oligonucleotide
cuccgugacugcagggcuu

SEQ ID NO: 2628387 - RNA, 19 nt, Artificial Sequence
  Description of Artificial Sequence: Synthetic oligonucleotide
cccugaccccaggggaggg

SEQ ID NO: 2628388 - RNA, 19 nt, Artificial Sequence
  Description of Artificial Sequence: Synthetic oligonucleotide
ggugcaguggaagccuauu

SEQ ID NO: 2628389 - RNA, 19 nt, Artificial Sequence
  Description of Artificial Sequence: Synthetic oligonucleotide
ccaaggcuggcuacuuggu

SEQ ID NO: 2628390 - RNA, 19 nt, Artificial Sequence
  Description of Artificial Sequence: Synthetic oligonucleotide
ccgaaugggcccacagacu

SEQ ID NO: 2628391 - RNA, 19 nt, Artificial Sequence
  Description of Artificial Sequence: Synthetic oligonucleotide
gcaucuccauauauauauu

SEQ ID NO: 2628392 - RNA, 19 nt, Artificial Sequence
  Description of Artificial Sequence: Synthetic oligonucleotide
ggugugcccaaggcuggcu

SEQ ID NO: 2628393 - RNA, 19 nt, Artificial Sequence
  Description of Artificial Sequence: Synthetic oligonucleotide
gugggcacgaggggugauu

SEQ ID NO: 2628394 - RNA, 19 nt, Artificial Sequence
  Description of Artificial Sequence: Synthetic oligonucleotide
gaguccggauuggccgaau

SEQ ID NO: 2628395 - RNA, 19 nt, Artificial Sequence
  Description of Artificial Sequence: Synthetic oligonucleotide
ggggcgcaggagggauuug

SEQ ID NO: 2628396 - RNA, 19 nt, Artificial Sequence
  Description of Artificial Sequence: Synthetic oligonucleotide
ggccaggaucagacucaca

SEQ ID NO: 2628397 - RNA, 19 nt, Artificial Sequence
  Description of Artificial Sequence: Synthetic oligonucleotide
gcggaacccgccggaugca

SEQ ID NO: 2628398 - RNA, 19 nt, Artificial Sequence
  Description of Artificial Sequence: Synthetic oligonucleotide
ggcuggcuacuugguaccu

SEQ ID NO: 2628399 - RNA, 19 nt, Artificial Sequence
  Description of Artificial Sequence: Synthetic oligonucleotide
cacauccugcuggcaucgu

SEQ ID NO: 2628400 - RNA, 19 nt, Artificial Sequence
  Description of Artificial Sequence: Synthetic oligonucleotide
gggcugcgacucacaggca

SEQ ID NO: 2628401 - RNA, 19 nt, Artificial Sequence
  Description of Artificial Sequence: Synthetic oligonucleotide
ccagggccgcauacucagu

SEQ ID NO: 2628402 - RNA, 19 nt, Artificial Sequence
  Description of Artificial Sequence: Synthetic oligonucleotide
ccacuccaaccgggcucac

SEQ ID NO: 2628403 - RNA, 19 nt, Artificial Sequence
  Description of Artificial Sequence: Synthetic oligonucleotide
cggaacccgccggaugcau

SEQ ID NO: 2628404 - RNA, 19 nt, Artificial Sequence
  Description of Artificial Sequence: Synthetic oligonucleotide
ccgugacugcagggcuugu

SEQ ID NO: 2628405 - RNA, 19 nt, Artificial Sequence
  Description of Artificial Sequence: Synthetic oligonucleotide
uuugaauucagacugaagg

SEQ ID NO: 2628406 - RNA, 19 nt, Artificial Sequence
  Description of Artificial Sequence: Synthetic oligonucleotide
uauuucauugcauacauag

SEQ ID NO: 2628407 - RNA, 19 nt, Artificial Sequence
  Description of Artificial Sequence: Synthetic oligonucleotide
augaccucaaacuaaaggc

SEQ ID NO: 2628408 - RNA, 19 nt, Artificial Sequence
  Description of Artificial Sequence: Synthetic oligonucleotide
aagaacuuugacugaaugc

SEQ ID NO: 2628409 - RNA, 19 nt, Artificial Sequence
  Description of Artificial Sequence: Synthetic oligonucleotide
ugaauaaugagguaugacc

SEQ ID NO: 2628410 - RNA, 19 nt, Artificial Sequence
  Description of Artificial Sequence: Synthetic oligonucleotide
acucaucacacuuacaagc

SEQ ID NO: 2628411 - RNA, 19 nt, Artificial Sequence
  Description of Artificial Sequence: Synthetic oligonucleotide
uuagaauuaagcaucuuug

SEQ ID NO: 2628412 - RNA, 19 nt, Artificial Sequence
  Description of Artificial Sequence: Synthetic oligonucleotide
ugucuaauaagcuuggagc

SEQ ID NO: 2628413 - RNA, 19 nt, Artificial Sequence
  Description of Artificial Sequence: Synthetic oligonucleotide
uagguaagaacuuugacug

SEQ ID NO: 2628414 - RNA, 19 nt, Artificial Sequence
  Description of Artificial Sequence: Synthetic oligonucleotide
uaugaccucaaacuaaagg

SEQ ID NO: 2628415 - RNA, 19 nt, Artificial Sequence
  Description of Artificial Sequence: Synthetic oligonucleotide
aauuaagcaucuuugagau

SEQ ID NO: 2628416 - RNA, 19 nt, Artificial Sequence
  Description of Artificial Sequence: Synthetic oligonucleotide
ugauguauaauuagguaag

SEQ ID NO: 2628417 - RNA, 19 nt, Artificial Sequence
  Description of Artificial Sequence: Synthetic oligonucleotide
uuugcuaaggauuugugug

SEQ ID NO: 2628418 - RNA, 19 nt, Artificial Sequence
  Description of Artificial Sequence: Synthetic oligonucleotide
aagaucacuugacuaaaac

SEQ ID NO: 2628419 - RNA, 19 nt, Artificial Sequence
  Description of Artificial Sequence: Synthetic oligonucleotide
gagguuugaauucagacug

SEQ ID NO: 2628420 - RNA, 19 nt, Artificial Sequence
  Description of Artificial Sequence: Synthetic oligonucleotide
uuagguaagaacuuugacu

SEQ ID NO: 2628421 - RNA, 19 nt, Artificial Sequence
  Description of Artificial Sequence: Synthetic oligonucleotide
uuuguacuuagaauuaagc

SEQ ID NO: 2628422 - RNA, 19 nt, Artificial Sequence
  Description of Artificial Sequence: Synthetic oligonucleotide
uguacuuagaauuaagcau

SEQ ID NO: 2628423 - RNA, 19 nt, Artificial Sequence
  Description of Artificial Sequence: Synthetic oligonucleotide
aauaaugagguaugaccuc

SEQ ID NO: 2628424 - RNA, 19 nt, Artificial Sequence
  Description of Artificial Sequence: Synthetic oligonucleotide
uguaaggucucucuucugg

SEQ ID NO: 2628425 - RNA, 19 nt, Artificial Sequence
  Description of Artificial Sequence: Synthetic oligonucleotide
ugagguaugaccucaaacu

SEQ ID NO: 2628426 - RNA, 19 nt, Artificial Sequence
  Description of Artificial Sequence: Synthetic oligonucleotide
uuucugacauguuacagag

SEQ ID NO: 2628427 - RNA, 19 nt, Artificial Sequence
  Description of Artificial Sequence: Synthetic oligonucleotide
uaaagcuaugcccacauac

SEQ ID NO: 2628428 - RNA, 19 nt, Artificial Sequence
  Description of Artificial Sequence: Synthetic oligonucleotide
acuguguauccucugaucg

SEQ ID NO: 2628429 - RNA, 19 nt, Artificial Sequence
  Description of Artificial Sequence: Synthetic oligonucleotide
uucugaugaauaaugaggu

SEQ ID NO: 2628430 - RNA, 19 nt, Artificial Sequence
  Description of Artificial Sequence: Synthetic oligonucleotide
uuaagcaucuuugagauuc

SEQ ID NO: 2628431 - RNA, 19 nt, Artificial Sequence
  Description of Artificial Sequence: Synthetic oligonucleotide
aaacuuucugacauguuac

SEQ ID NO: 2628432 - RNA, 19 nt, Artificial Sequence
  Description of Artificial Sequence: Synthetic oligonucleotide
agaguuuguacuuagaauu

SEQ ID NO: 2628433 - RNA, 19 nt, Artificial Sequence
  Description of Artificial Sequence: Synthetic oligonucleotide
uuguacuuagaauuaagca

SEQ ID NO: 2628434 - RNA, 19 nt, Artificial Sequence
  Description of Artificial Sequence: Synthetic oligonucleotide
auuagguaagaacuuugac

SEQ ID NO: 2628435 - RNA, 19 nt, Artificial Sequence
  Description of Artificial Sequence: Synthetic oligonucleotide
gaauuaagcaucuuugaga

SEQ ID NO: 2628436 - RNA, 19 nt, Artificial Sequence
  Description of Artificial Sequence: Synthetic oligonucleotide
auacauagggucucucucc

SEQ ID NO: 2628437 - RNA, 19 nt, Artificial Sequence
  Description of Artificial Sequence: Synthetic oligonucleotide
uucauaagccuuuucacca

SEQ ID NO: 2628438 - RNA, 19 nt, Artificial Sequence
  Description of Artificial Sequence: Synthetic oligonucleotide
uugacuaaaacuaccccug

SEQ ID NO: 2628439 - RNA, 19 nt, Artificial Sequence
  Description of Artificial Sequence: Synthetic oligonucleotide
uuucccaccuauuucauug

SEQ ID NO: 2628440 - RNA, 19 nt, Artificial Sequence
  Description of Artificial Sequence: Synthetic oligonucleotide
ucuuugagauucaucauga

SEQ ID NO: 2628441 - RNA, 19 nt, Artificial Sequence
  Description of Artificial Sequence: Synthetic oligonucleotide
aauuuuccgaugucuagug

SEQ ID NO: 2628442 - RNA, 19 nt, Artificial Sequence
  Description of Artificial Sequence: Synthetic oligonucleotide
ucugauugaaggcuuuucc

SEQ ID NO: 2628443 - RNA, 19 nt, Artificial Sequence
  Description of Artificial Sequence: Synthetic oligonucleotide
uuuuccgaugucuagugag

SEQ ID NO: 2628444 - RNA, 19 nt, Artificial Sequence
  Description of Artificial Sequence: Synthetic oligonucleotide
gaucggguuaucuagcucc

SEQ ID NO: 2628445 - RNA, 19 nt, Artificial Sequence
  Description of Artificial Sequence: Synthetic oligonucleotide
acuugacuaaaacuacccc

SEQ ID NO: 2628446 - RNA, 19 nt, Artificial Sequence
  Description of Artificial Sequence: Synthetic oligonucleotide
uugaauucagacugaaggc

SEQ ID NO: 2628447 - RNA, 19 nt, Artificial Sequence
  Description of Artificial Sequence: Synthetic oligonucleotide
auaagcuuggagcucuggc

SEQ ID NO: 2628448 - RNA, 19 nt, Artificial Sequence
  Description of Artificial Sequence: Synthetic oligonucleotide
ucugcuugaaagcuuuucc

SEQ ID NO: 2628449 - RNA, 19 nt, Artificial Sequence
  Description of Artificial Sequence: Synthetic oligonucleotide
ugaugaauaaugagguaug

SEQ ID NO: 2628450 - RNA, 19 nt, Artificial Sequence
  Description of Artificial Sequence: Synthetic oligonucleotide
uaauuagguaagaacuuug

SEQ ID NO: 2628451 - RNA, 19 nt, Artificial Sequence
  Description of Artificial Sequence: Synthetic oligonucleotide
uaagaacuuugacugaaug

SEQ ID NO: 2628452 - RNA, 19 nt, Artificial Sequence
  Description of Artificial Sequence: Synthetic oligonucleotide
ugaccucaaacuaaaggcc

SEQ ID NO: 2628453 - RNA, 19 nt, Artificial Sequence
  Description of Artificial Sequence: Synthetic oligonucleotide
acuuacaagcuuucucacc

SEQ ID NO: 2628454 - RNA, 19 nt, Artificial Sequence
  Description of Artificial Sequence: Synthetic oligonucleotide
accacuauggauuuucuga

SEQ ID NO: 2628455 - RNA, 19 nt, Artificial Sequence
  Description of Artificial Sequence: Synthetic oligonucleotide
augagguaugaccucaaac

SEQ ID NO: 2628456 - RNA, 19 nt, Artificial Sequence
  Description of Artificial Sequence: Synthetic oligonucleotide
aaggauuugugugugaaga

SEQ ID NO: 2628457 - RNA, 19 nt, Artificial Sequence
  Description of Artificial Sequence: Synthetic oligonucleotide
aaugcuuugccacacucau

SEQ ID NO: 2628458 - RNA, 19 nt, Artificial Sequence
  Description of Artificial Sequence: Synthetic oligonucleotide
gagagcugagcucugauug

SEQ ID NO: 2628459 - RNA, 19 nt, Artificial Sequence
  Description of Artificial Sequence: Synthetic oligonucleotide
ugacauguuacagaguuug

SEQ ID NO: 2628460 - RNA, 19 nt, Artificial Sequence
  Description of Artificial Sequence: Synthetic oligonucleotide
ugcuguuuaaagcuaugcc

SEQ ID NO: 2628461 - RNA, 19 nt, Artificial Sequence
  Description of Artificial Sequence: Synthetic oligonucleotide
uauaauuagguaagaacuu

SEQ ID NO: 2628462 - RNA, 19 nt, Artificial Sequence
  Description of Artificial Sequence: Synthetic oligonucleotide
uggagaaacuuucugacau

SEQ ID NO: 2628463 - RNA, 19 nt, Artificial Sequence
  Description of Artificial Sequence: Synthetic oligonucleotide
acacuuacaagcuuucuca

SEQ ID NO: 2628464 - RNA, 19 nt, Artificial Sequence
  Description of Artificial Sequence: Synthetic oligonucleotide
acuauggauuuucugauga

SEQ ID NO: 2628465 - RNA, 19 nt, Artificial Sequence
  Description of Artificial Sequence: Synthetic oligonucleotide
ugaauuuuccgaugucuag

SEQ ID NO: 2628466 - RNA, 19 nt, Artificial Sequence
  Description of Artificial Sequence: Synthetic oligonucleotide
ucuuaugagguuugaauuc

SEQ ID NO: 2628467 - RNA, 19 nt, Artificial Sequence
  Description of Artificial Sequence: Synthetic oligonucleotide
agaucacuugacuaaaacu

SEQ ID NO: 2628468 - RNA, 19 nt, Artificial Sequence
  Description of Artificial Sequence: Synthetic oligonucleotide
uagaauuaagcaucuuuga

SEQ ID NO: 2628469 - RNA, 19 nt, Artificial Sequence
  Description of Artificial Sequence: Synthetic oligonucleotide
ugucuuaugagguuugaau

SEQ ID NO: 2628470 - RNA, 19 nt, Artificial Sequence
  Description of Artificial Sequence: Synthetic oligonucleotide
acacucaucacacuuacaa

SEQ ID NO: 2628471 - RNA, 19 nt, Artificial Sequence
  Description of Artificial Sequence: Synthetic oligonucleotide
ugauugaaggcuuuuccac

SEQ ID NO: 2628472 - RNA, 19 nt, Artificial Sequence
  Description of Artificial Sequence: Synthetic oligonucleotide
uguguauccucugaucggg

SEQ ID NO: 2628473 - RNA, 19 nt, Artificial Sequence
  Description of Artificial Sequence: Synthetic oligonucleotide
uuuaaagcuaugcccacau

SEQ ID NO: 2628474 - RNA, 19 nt, Artificial Sequence
  Description of Artificial Sequence: Synthetic oligonucleotide
ucugauguuguguuagaga

SEQ ID NO: 2628475 - RNA, 19 nt, Artificial Sequence
  Description of Artificial Sequence: Synthetic oligonucleotide
agauucaucaugauggucu

SEQ ID NO: 2628476 - RNA, 19 nt, Artificial Sequence
  Description of Artificial Sequence: Synthetic oligonucleotide
uuaucuagcuccgagcucu

SEQ ID NO: 2628477 - RNA, 19 nt, Artificial Sequence
  Description of Artificial Sequence: Synthetic oligonucleotide
ucacuugacuaaaacuacc

SEQ ID NO: 2628478 - RNA, 19 nt, Artificial Sequence
  Description of Artificial Sequence: Synthetic oligonucleotide
gcuguuuaaagcuaugccc

SEQ ID NO: 2628479 - RNA, 19 nt, Artificial Sequence
  Description of Artificial Sequence: Synthetic oligonucleotide
ugugugaagaucacuugac

SEQ ID NO: 2628480 - RNA, 19 nt, Artificial Sequence
  Description of Artificial Sequence: Synthetic oligonucleotide
guauaauuagguaagaacu

SEQ ID NO: 2628481 - RNA, 19 nt, Artificial Sequence
  Description of Artificial Sequence: Synthetic oligonucleotide
gaaacuuucugacauguua

SEQ ID NO: 2628482 - RNA, 19 nt, Artificial Sequence
  Description of Artificial Sequence: Synthetic oligonucleotide
agccuuuucaccacuaugg

SEQ ID NO: 2628483 - RNA, 19 nt, Artificial Sequence
  Description of Artificial Sequence: Synthetic oligonucleotide
cuggugucuaauaagcuug

SEQ ID NO: 2628484 - RNA, 19 nt, Artificial Sequence
  Description of Artificial Sequence: Synthetic oligonucleotide
ugugaagaucacuugacua

SEQ ID NO: 2628485 - RNA, 19 nt, Artificial Sequence
  Description of Artificial Sequence: Synthetic oligonucleotide
cacuugacuaaaacuaccc

SEQ ID NO: 2628486 - RNA, 19 nt, Artificial Sequence
  Description of Artificial Sequence: Synthetic oligonucleotide
ucaaacuaaaggccuuccc

SEQ ID NO: 2628487 - RNA, 19 nt, Artificial Sequence
  Description of Artificial Sequence: Synthetic oligonucleotide
ugaauucagacugaaggcu

SEQ ID NO: 2628488 - RNA, 19 nt, Artificial Sequence
  Description of Artificial Sequence: Synthetic oligonucleotide
gaucacuugacuaaaacua

SEQ ID NO: 2628489 - RNA, 19 nt, Artificial Sequence
  Description of Artificial Sequence: Synthetic oligonucleotide
gcaucuuugagauucauca

SEQ ID NO: 2628490 - RNA, 19 nt, Artificial Sequence
  Description of Artificial Sequence: Synthetic oligonucleotide
gugucuaauaagcuuggag

SEQ ID NO: 2628491 - RNA, 19 nt, Artificial Sequence
  Description of Artificial Sequence: Synthetic oligonucleotide
aauuagguaagaacuuuga

SEQ ID NO: 2628492 - RNA, 19 nt, Artificial Sequence
  Description of Artificial Sequence: Synthetic oligonucleotide
cugauguauaauuagguaa

SEQ ID NO: 2628493 - RNA, 19 nt, Artificial Sequence
  Description of Artificial Sequence: Synthetic oligonucleotide
gauguuguguuagagaaaa

SEQ ID NO: 2628494 - RNA, 19 nt, Artificial Sequence
  Description of Artificial Sequence: Synthetic oligonucleotide
ucuggcauaggguuucuca

SEQ ID NO: 2628495 - RNA, 19 nt, Artificial Sequence
  Description of Artificial Sequence: Synthetic oligonucleotide
augaauaaugagguaugac

SEQ ID NO: 2628496 - RNA, 19 nt, Artificial Sequence
  Description of Artificial Sequence: Synthetic oligonucleotide
ugcuugaaagcuuuuccca

SEQ ID NO: 2628497 - RNA, 19 nt, Artificial Sequence
  Description of Artificial Sequence: Synthetic oligonucleotide
uaugcccacauacaucaca

SEQ ID NO: 2628498 - RNA, 19 nt, Artificial Sequence
  Description of Artificial Sequence: Synthetic oligonucleotide
gauuugugugugaagauca

SEQ ID NO: 2628499 - RNA, 19 nt, Artificial Sequence
  Description of Artificial Sequence: Synthetic oligonucleotide
cuugaaagcuuuucccacc

SEQ ID NO: 2628500 - RNA, 19 nt, Artificial Sequence
  Description of Artificial Sequence: Synthetic oligonucleotide
aagccuuuucaccacuaug

SEQ ID NO: 2628501 - RNA, 19 nt, Artificial Sequence
  Description of Artificial Sequence: Synthetic oligonucleotide
guacuuagaauuaagcauc

SEQ ID NO: 2628502 - RNA, 19 nt, Artificial Sequence
  Description of Artificial Sequence: Synthetic oligonucleotide
uuacagaguuuguacuuag

SEQ ID NO: 2628503 - RNA, 19 nt, Artificial Sequence
  Description of Artificial Sequence: Synthetic oligonucleotide
aacuuucugacauguuaca

SEQ ID NO: 2628504 - RNA, 19 nt, Artificial Sequence
  Description of Artificial Sequence: Synthetic oligonucleotide
uugugugugaagaucacuu

SEQ ID NO: 2628505 - RNA, 19 nt, Artificial Sequence
  Description of Artificial Sequence: Synthetic oligonucleotide
ugacugaaugcuuugccac

SEQ ID NO: 2628506 - RNA, 19 nt, Artificial Sequence
  Description of Artificial Sequence: Synthetic oligonucleotide
ucaugauggucucucuuug

SEQ ID NO: 2628507 - RNA, 19 nt, Artificial Sequence
  Description of Artificial Sequence: Synthetic oligonucleotide
uggauuuucugaugaauaa

SEQ ID NO: 2628508 - RNA, 19 nt, Artificial Sequence
  Description of Artificial Sequence: Synthetic oligonucleotide
ucucucuuugcuaaggauu

SEQ ID NO: 2628509 - RNA, 19 nt, Artificial Sequence
  Description of Artificial Sequence: Synthetic oligonucleotide
uuggagcucuggcauaggg

SEQ ID NO: 2628510 - RNA, 19 nt, Artificial Sequence
  Description of Artificial Sequence: Synthetic oligonucleotide
ucauugcauacauaggguc

SEQ ID NO: 2628511 - RNA, 19 nt, Artificial Sequence
  Description of Artificial Sequence: Synthetic oligonucleotide
cucugaucggguuaucuag

SEQ ID NO: 2628512 - RNA, 19 nt, Artificial Sequence
  Description of Artificial Sequence: Synthetic oligonucleotide
aucacuugacuaaaacuac

SEQ ID NO: 2628513 - RNA, 19 nt, Artificial Sequence
  Description of Artificial Sequence: Synthetic oligonucleotide
cuguuuaaagcuaugccca

SEQ ID NO: 2628514 - RNA, 19 nt, Artificial Sequence
  Description of Artificial Sequence: Synthetic oligonucleotide
acagaguuuguacuuagaa

SEQ ID NO: 2628515 - RNA, 19 nt, Artificial Sequence
  Description of Artificial Sequence: Synthetic oligonucleotide
agcuuuucccaccuauuuc

SEQ ID NO: 2628516 - RNA, 19 nt, Artificial Sequence
  Description of Artificial Sequence: Synthetic oligonucleotide
uaugaauuccucugguguc

SEQ ID NO: 2628517 - RNA, 19 nt, Artificial Sequence
  Description of Artificial Sequence: Synthetic oligonucleotide
uacaucacaucuguaaggu

SEQ ID NO: 2628518 - RNA, 19 nt, Artificial Sequence
  Description of Artificial Sequence: Synthetic oligonucleotide
aagcuuucucaccuguaug

SEQ ID NO: 2628519 - RNA, 19 nt, Artificial Sequence
  Description of Artificial Sequence: Synthetic oligonucleotide
uggugucuaauaagcuugg

SEQ ID NO: 2628520 - RNA, 19 nt, Artificial Sequence
  Description of Artificial Sequence: Synthetic oligonucleotide
cugauguuguguuagagaa

SEQ ID NO: 2628521 - RNA, 19 nt, Artificial Sequence
  Description of Artificial Sequence: Synthetic oligonucleotide
uaugagguuugaauucaga

SEQ ID NO: 2628522 - RNA, 19 nt, Artificial Sequence
  Description of Artificial Sequence: Synthetic oligonucleotide
ucugaucggguuaucuagc

SEQ ID NO: 2628523 - RNA, 19 nt, Artificial Sequence
  Description of Artificial Sequence: Synthetic oligonucleotide
ucuuugcuaaggauuugug

SEQ ID NO: 2628524 - RNA, 19 nt, Artificial Sequence
  Description of Artificial Sequence: Synthetic oligonucleotide
uuaugagguuugaauucag

SEQ ID NO: 2628525 - RNA, 19 nt, Artificial Sequence
  Description of Artificial Sequence: Synthetic oligonucleotide
uaaggauuugugugugaag

SEQ ID NO: 2628526 - RNA, 19 nt, Artificial Sequence
  Description of Artificial Sequence: Synthetic oligonucleotide
cugcuugaaagcuuuuccc

SEQ ID NO: 2628527 - RNA, 19 nt, Artificial Sequence
  Description of Artificial Sequence: Synthetic oligonucleotide
ugugugugaagaucacuug

SEQ ID NO: 2628528 - RNA, 19 nt, Artificial Sequence
  Description of Artificial Sequence: Synthetic oligonucleotide
gaauaaugagguaugaccu

SEQ ID NO: 2628529 - RNA, 19 nt, Artificial Sequence
  Description of Artificial Sequence: Synthetic oligonucleotide
uucucuuccacuguguauc

SEQ ID NO: 2628530 - RNA, 19 nt, Artificial Sequence
  Description of Artificial Sequence: Synthetic oligonucleotide
gauugaaggcuuuuccaca

SEQ ID NO: 2628531 - RNA, 19 nt, Artificial Sequence
  Description of Artificial Sequence: Synthetic oligonucleotide
aaagcuaugcccacauaca

SEQ ID NO: 2628532 - RNA, 19 nt, Artificial Sequence
  Description of Artificial Sequence: Synthetic oligonucleotide
aagcuaugcccacauacau

SEQ ID NO: 2628533 - RNA, 19 nt, Artificial Sequence
  Description of Artificial Sequence: Synthetic oligonucleotide
uaaggucucucuucuggag

SEQ ID NO: 2628534 - RNA, 19 nt, Artificial Sequence
  Description of Artificial Sequence: Synthetic oligonucleotide
aauaagcuuggagcucugg

SEQ ID NO: 2628535 - RNA, 19 nt, Artificial Sequence
  Description of Artificial Sequence: Synthetic oligonucleotide
auuucauugcauacauagg

SEQ ID NO: 2628536 - RNA, 19 nt, Artificial Sequence
  Description of Artificial Sequence: Synthetic oligonucleotide
uuuccgaugucuagugaga

SEQ ID NO: 2628537 - RNA, 19 nt, Artificial Sequence
  Description of Artificial Sequence: Synthetic oligonucleotide
ucuggugucuaauaagcuu

SEQ ID NO: 2628538 - RNA, 19 nt, Artificial Sequence
  Description of Artificial Sequence: Synthetic oligonucleotide
ugaaugcuuugccacacuc

SEQ ID NO: 2628539 - RNA, 19 nt, Artificial Sequence
  Description of Artificial Sequence: Synthetic oligonucleotide
ucuagugagagcugagcuc

SEQ ID NO: 2628540 - RNA, 19 nt, Artificial Sequence
  Description of Artificial Sequence: Synthetic oligonucleotide
cauacauagggucucucuc

SEQ ID NO: 2628541 - RNA, 19 nt, Artificial Sequence
  Description of Artificial Sequence: Synthetic oligonucleotide
caaacuaaaggccuuccca

SEQ ID NO: 2628542 - RNA, 19 nt, Artificial Sequence
  Description of Artificial Sequence: Synthetic oligonucleotide
uguuacagaguuuguacuu

SEQ ID NO: 2628543 - RNA, 19 nt, Artificial Sequence
  Description of Artificial Sequence: Synthetic oligonucleotide
uugcuaaggauuugugugu

SEQ ID NO: 2628544 - RNA, 19 nt, Artificial Sequence
  Description of Artificial Sequence: Synthetic oligonucleotide
aagcuuuucccaccuauuu

SEQ ID NO: 2628545 - RNA, 19 nt, Artificial Sequence
  Description of Artificial Sequence: Synthetic oligonucleotide
aagcuuggagcucuggcau

SEQ ID NO: 2628546 - RNA, 19 nt, Artificial Sequence
  Description of Artificial Sequence: Synthetic oligonucleotide
gauggucucucuuugcuaa

SEQ ID NO: 2628547 - RNA, 19 nt, Artificial Sequence
  Description of Artificial Sequence: Synthetic oligonucleotide
cuuucugacauguuacaga

SEQ ID NO: 2628548 - RNA, 19 nt, Artificial Sequence
  Description of Artificial Sequence: Synthetic oligonucleotide
ucauuacauucauaagccu

SEQ ID NO: 2628549 - RNA, 19 nt, Artificial Sequence
  Description of Artificial Sequence: Synthetic oligonucleotide
guuuguacuuagaauuaag

SEQ ID NO: 2628550 - RNA, 19 nt, Artificial Sequence
  Description of Artificial Sequence: Synthetic oligonucleotide
acugaaugcuuugccacac

SEQ ID NO: 2628551 - RNA, 19 nt, Artificial Sequence
  Description of Artificial Sequence: Synthetic oligonucleotide
auaaugagguaugaccuca

SEQ ID NO: 2628552 - RNA, 19 nt, Artificial Sequence
  Description of Artificial Sequence: Synthetic oligonucleotide
cuguguauccucugaucgg

SEQ ID NO: 2628553 - RNA, 19 nt, Artificial Sequence
  Description of Artificial Sequence: Synthetic oligonucleotide
uauggauuuucugaugaau

SEQ ID NO: 2628554 - RNA, 19 nt, Artificial Sequence
  Description of Artificial Sequence: Synthetic oligonucleotide
ucuagcuccgagcucugcu

SEQ ID NO: 2628555 - RNA, 19 nt, Artificial Sequence
  Description of Artificial Sequence: Synthetic oligonucleotide
gugaagaucacuugacuaa

SEQ ID NO: 2628556 - RNA, 19 nt, Artificial Sequence
  Description of Artificial Sequence: Synthetic oligonucleotide
ugagauucaucaugauggu

SEQ ID NO: 2628557 - RNA, 19 nt, Artificial Sequence
  Description of Artificial Sequence: Synthetic oligonucleotide
uacaagcuuucucaccugu

SEQ ID NO: 2628558 - RNA, 19 nt, Artificial Sequence
  Description of Artificial Sequence: Synthetic oligonucleotide
augauggucucucuuugcu

SEQ ID NO: 2628559 - RNA, 19 nt, Artificial Sequence
  Description of Artificial Sequence: Synthetic oligonucleotide
uguuuaaagcuaugcccac

SEQ ID NO: 2628560 - RNA, 19 nt, Artificial Sequence
  Description of Artificial Sequence: Synthetic oligonucleotide
gcugagcucugauugaagg

SEQ ID NO: 2628561 - RNA, 19 nt, Artificial Sequence
  Description of Artificial Sequence: Synthetic oligonucleotide
acuuucugacauguuacag

SEQ ID NO: 2628562 - RNA, 19 nt, Artificial Sequence
  Description of Artificial Sequence: Synthetic oligonucleotide
cacacuuacaagcuuucuc

SEQ ID NO: 2628563 - RNA, 19 nt, Artificial Sequence
  Description of Artificial Sequence: Synthetic oligonucleotide
acuuugacugaaugcuuug

SEQ ID NO: 2628564 - RNA, 19 nt, Artificial Sequence
  Description of Artificial Sequence: Synthetic oligonucleotide
uucaucaugauggucucuc

SEQ ID NO: 2628565 - RNA, 19 nt, Artificial Sequence
  Description of Artificial Sequence: Synthetic oligonucleotide
cuugacuaaaacuaccccu

SEQ ID NO: 2628566 - RNA, 19 nt, Artificial Sequence
  Description of Artificial Sequence: Synthetic oligonucleotide
gcuaugcccacauacauca

SEQ ID NO: 2628567 - RNA, 19 nt, Artificial Sequence
  Description of Artificial Sequence: Synthetic oligonucleotide
aaugagguaugaccucaaa

SEQ ID NO: 2628568 - RNA, 19 nt, Artificial Sequence
  Description of Artificial Sequence: Synthetic oligonucleotide
uucaccacuauggauuuuc

SEQ ID NO: 2628569 - RNA, 19 nt, Artificial Sequence
  Description of Artificial Sequence: Synthetic oligonucleotide
auaauuagguaagaacuuu

SEQ ID NO: 2628570 - RNA, 19 nt, Artificial Sequence
  Description of Artificial Sequence: Synthetic oligonucleotide
gauucaucaugauggucuc

SEQ ID NO: 2628571 - RNA, 19 nt, Artificial Sequence
  Description of Artificial Sequence: Synthetic oligonucleotide
ugacuaaaacuaccccugu

SEQ ID NO: 2628572 - RNA, 19 nt, Artificial Sequence
  Description of Artificial Sequence: Synthetic oligonucleotide
ucauaagccuuuucaccac

SEQ ID NO: 2628573 - RNA, 19 nt, Artificial Sequence
  Description of Artificial Sequence: Synthetic oligonucleotide
cuuacaagcuuucucaccu

SEQ ID NO: 2628574 - RNA, 19 nt, Artificial Sequence
  Description of Artificial Sequence: Synthetic oligonucleotide
gaugaauaaugagguauga

SEQ ID NO: 2628575 - RNA, 19 nt, Artificial Sequence
  Description of Artificial Sequence: Synthetic oligonucleotide
caccuguaugaauuuuccg

SEQ ID NO: 2628576 - RNA, 19 nt, Artificial Sequence
  Description of Artificial Sequence: Synthetic oligonucleotide
aaaugcuguuuaaagcuau

SEQ ID NO: 2628577 - RNA, 19 nt, Artificial Sequence
  Description of Artificial Sequence: Synthetic oligonucleotide
cuggcauaggguuucucac

SEQ ID NO: 2628578 - RNA, 19 nt, Artificial Sequence
  Description of Artificial Sequence: Synthetic oligonucleotide
ugaagaucacuugacuaaa

SEQ ID NO: 2628579 - RNA, 19 nt, Artificial Sequence
  Description of Artificial Sequence: Synthetic oligonucleotide
ucuaauaagcuuggagcuc

SEQ ID NO: 2628580 - RNA, 19 nt, Artificial Sequence
  Description of Artificial Sequence: Synthetic oligonucleotide
caugauggucucucuuugc

SEQ ID NO: 2628581 - RNA, 19 nt, Artificial Sequence
  Description of Artificial Sequence: Synthetic oligonucleotide
aucaugauggucucucuuu

SEQ ID NO: 2628582 - RNA, 19 nt, Artificial Sequence
  Description of Artificial Sequence: Synthetic oligonucleotide
aaugcuguuuaaagcuaug

SEQ ID NO: 2628583 - RNA, 19 nt, Artificial Sequence
  Description of Artificial Sequence: Synthetic oligonucleotide
gucuaauaagcuuggagcu

SEQ ID NO: 2628584 - RNA, 19 nt, Artificial Sequence
  Description of Artificial Sequence: Synthetic oligonucleotide
uacagaguuuguacuuaga

SEQ ID NO: 2628585 - RNA, 19 nt, Artificial Sequence
  Description of Artificial Sequence: Synthetic oligonucleotide
uuccucuggugucuaauaa

SEQ ID NO: 2628586 - RNA, 19 nt, Artificial Sequence
  Description of Artificial Sequence: Synthetic oligonucleotide
aaaaugcuguuuaaagcua

SEQ ID NO: 2628587 - RNA, 19 nt, Artificial Sequence
  Description of Artificial Sequence: Synthetic oligonucleotide
ugucuagugagagcugagc

SEQ ID NO: 2628588 - RNA, 19 nt, Artificial Sequence
  Description of Artificial Sequence: Synthetic oligonucleotide
cugauugaaggcuuuucca

SEQ ID NO: 2628589 - RNA, 19 nt, Artificial Sequence
  Description of Artificial Sequence: Synthetic oligonucleotide
cauaggguuucucuuccac

SEQ ID NO: 2628590 - RNA, 19 nt, Artificial Sequence
  Description of Artificial Sequence: Synthetic oligonucleotide
gaugucuagugagagcuga

SEQ ID NO: 2628591 - RNA, 19 nt, Artificial Sequence
  Description of Artificial Sequence: Synthetic oligonucleotide
uuuucaccacuauggauuu

SEQ ID NO: 2628592 - RNA, 19 nt, Artificial Sequence
  Description of Artificial Sequence: Synthetic oligonucleotide
uuugugugugaagaucacu

SEQ ID NO: 2628593 - RNA, 19 nt, Artificial Sequence
  Description of Artificial Sequence: Synthetic oligonucleotide
uaagcaucuuugagauuca

SEQ ID NO: 2628594 - RNA, 19 nt, Artificial Sequence
  Description of Artificial Sequence: Synthetic oligonucleotide
ugauguuguguuagagaaa

SEQ ID NO: 2628595 - RNA, 19 nt, Artificial Sequence
  Description of Artificial Sequence: Synthetic oligonucleotide
caccuauuucauugcauac

SEQ ID NO: 2628596 - RNA, 19 nt, Artificial Sequence
  Description of Artificial Sequence: Synthetic oligonucleotide
gagguaugaccucaaacua

SEQ ID NO: 2628597 - RNA, 19 nt, Artificial Sequence
  Description of Artificial Sequence: Synthetic oligonucleotide
uuccgaugucuagugagag

SEQ ID NO: 2628598 - RNA, 19 nt, Artificial Sequence
  Description of Artificial Sequence: Synthetic oligonucleotide
cuuugacugaaugcuuugc

SEQ ID NO: 2628599 - RNA, 19 nt, Artificial Sequence
  Description of Artificial Sequence: Synthetic oligonucleotide
gauguauaauuagguaaga

SEQ ID NO: 2628600 - RNA, 19 nt, Artificial Sequence
  Description of Artificial Sequence: Synthetic oligonucleotide
ucucucuucuggagaaacu

SEQ ID NO: 2628601 - RNA, 19 nt, Artificial Sequence
  Description of Artificial Sequence: Synthetic oligonucleotide
accuauuucauugcauaca

SEQ ID NO: 2628602 - RNA, 19 nt, Artificial Sequence
  Description of Artificial Sequence: Synthetic oligonucleotide
gugugugaagaucacuuga

SEQ ID NO: 2628603 - RNA, 19 nt, Artificial Sequence
  Description of Artificial Sequence: Synthetic oligonucleotide
ucugaugaauaaugaggua

SEQ ID NO: 2628604 - RNA, 19 nt, Artificial Sequence
  Description of Artificial Sequence: Synthetic oligonucleotide
uggucucucuuugcuaagg

SEQ ID NO: 2628605 - RNA, 19 nt, Artificial Sequence
  Description of Artificial Sequence: Synthetic oligonucleotide
uggagcucuggcauagggu

SEQ ID NO: 2628606 - RNA, 19 nt, Artificial Sequence
  Description of Artificial Sequence: Synthetic oligonucleotide
cuuaugagguuugaauuca

SEQ ID NO: 2628607 - RNA, 19 nt, Artificial Sequence
  Description of Artificial Sequence: Synthetic oligonucleotide
auuugugugugaagaucac

SEQ ID NO: 2628608 - RNA, 19 nt, Artificial Sequence
  Description of Artificial Sequence: Synthetic oligonucleotide
aacuuugacugaaugcuuu

SEQ ID NO: 2628609 - RNA, 19 nt, Artificial Sequence
  Description of Artificial Sequence: Synthetic oligonucleotide
uggugucuuaugagguuug

SEQ ID NO: 2628610 - RNA, 19 nt, Artificial Sequence
  Description of Artificial Sequence: Synthetic oligonucleotide
uccgaugucuagugagagc

SEQ ID NO: 2628611 - RNA, 19 nt, Artificial Sequence
  Description of Artificial Sequence: Synthetic oligonucleotide
uuacaagcuuucucaccug

SEQ ID NO: 2628612 - RNA, 19 nt, Artificial Sequence
  Description of Artificial Sequence: Synthetic oligonucleotide
ugcuaaggauuugugugug

SEQ ID NO: 2628613 - RNA, 19 nt, Artificial Sequence
  Description of Artificial Sequence: Synthetic oligonucleotide
guuugaauucagacugaag

SEQ ID NO: 2628614 - RNA, 19 nt, Artificial Sequence
  Description of Artificial Sequence: Synthetic oligonucleotide
aauuccucuggugucuaau

SEQ ID NO: 2628615 - RNA, 19 nt, Artificial Sequence
  Description of Artificial Sequence: Synthetic oligonucleotide
ucucuuccacuguguaucc

SEQ ID NO: 2628616 - RNA, 19 nt, Artificial Sequence
  Description of Artificial Sequence: Synthetic oligonucleotide
cacuuacaagcuuucucac

SEQ ID NO: 2628617 - RNA, 19 nt, Artificial Sequence
  Description of Artificial Sequence: Synthetic oligonucleotide
gcuuuucccaccuauuuca

SEQ ID NO: 2628618 - RNA, 19 nt, Artificial Sequence
  Description of Artificial Sequence: Synthetic oligonucleotide
agcaucuuugagauucauc

SEQ ID NO: 2628619 - RNA, 19 nt, Artificial Sequence
  Description of Artificial Sequence: Synthetic oligonucleotide
cuuagaauuaagcaucuuu

SEQ ID NO: 2628620 - RNA, 19 nt, Artificial Sequence
  Description of Artificial Sequence: Synthetic oligonucleotide
uaagccuuuucaccacuau

SEQ ID NO: 2628621 - RNA, 19 nt, Artificial Sequence
  Description of Artificial Sequence: Synthetic oligonucleotide
ucucuucuggagaaacuuu

SEQ ID NO: 2628622 - RNA, 19 nt, Artificial Sequence
  Description of Artificial Sequence: Synthetic oligonucleotide
gacugaaugcuuugccaca

SEQ ID NO: 2628623 - RNA, 19 nt, Artificial Sequence
  Description of Artificial Sequence: Synthetic oligonucleotide
aucacaucuguaaggucuc

SEQ ID NO: 2628624 - RNA, 19 nt, Artificial Sequence
  Description of Artificial Sequence: Synthetic oligonucleotide
auuuuccgaugucuaguga

SEQ ID NO: 2628625 - RNA, 19 nt, Artificial Sequence
  Description of Artificial Sequence: Synthetic oligonucleotide
uucccaccuauuucauugc

SEQ ID NO: 2628626 - RNA, 19 nt, Artificial Sequence
  Description of Artificial Sequence: Synthetic oligonucleotide
aucacacuuacaagcuuuc

SEQ ID NO: 2628627 - RNA, 19 nt, Artificial Sequence
  Description of Artificial Sequence: Synthetic oligonucleotide
cacuauggauuuucugaug

SEQ ID NO: 2628628 - RNA, 19 nt, Artificial Sequence
  Description of Artificial Sequence: Synthetic oligonucleotide
ucaucacacuuacaagcuu

SEQ ID NO: 2628629 - RNA, 19 nt, Artificial Sequence
  Description of Artificial Sequence: Synthetic oligonucleotide
gaaagcuuuucccaccuau

SEQ ID NO: 2628630 - RNA, 19 nt, Artificial Sequence
  Description of Artificial Sequence: Synthetic oligonucleotide
agagcugagcucugauuga

SEQ ID NO: 2628631 - RNA, 19 nt, Artificial Sequence
  Description of Artificial Sequence: Synthetic oligonucleotide
uaaugagguaugaccucaa

SEQ ID NO: 2628632 - RNA, 19 nt, Artificial Sequence
  Description of Artificial Sequence: Synthetic oligonucleotide
ucccaccuauuucauugca

SEQ ID NO: 2628633 - RNA, 19 nt, Artificial Sequence
  Description of Artificial Sequence: Synthetic oligonucleotide
cucaaacuaaaggccuucc

SEQ ID NO: 2628634 - RNA, 19 nt, Artificial Sequence
  Description of Artificial Sequence: Synthetic oligonucleotide
agcuaugcccacauacauc

SEQ ID NO: 2628635 - RNA, 19 nt, Artificial Sequence
  Description of Artificial Sequence: Synthetic oligonucleotide
ucaucaugauggucucucu

SEQ ID NO: 2628636 - RNA, 19 nt, Artificial Sequence
  Description of Artificial Sequence: Synthetic oligonucleotide
ucucugauguuguguuaga

SEQ ID NO: 2628637 - RNA, 19 nt, Artificial Sequence
  Description of Artificial Sequence: Synthetic oligonucleotide
auggauuuucugaugaaua

SEQ ID NO: 2628638 - RNA, 19 nt, Artificial Sequence
  Description of Artificial Sequence: Synthetic oligonucleotide
ugaucggguuaucuagcuc

SEQ ID NO: 2628639 - RNA, 19 nt, Artificial Sequence
  Description of Artificial Sequence: Synthetic oligonucleotide
ucaccacuauggauuuucu

SEQ ID NO: 2628640 - RNA, 19 nt, Artificial Sequence
  Description of Artificial Sequence: Synthetic oligonucleotide
agcucuggcauaggguuuc

SEQ ID NO: 2628641 - RNA, 19 nt, Artificial Sequence
  Description of Artificial Sequence: Synthetic oligonucleotide
aggauuugugugugaagau

SEQ ID NO: 2628642 - RNA, 19 nt, Artificial Sequence
  Description of Artificial Sequence: Synthetic oligonucleotide
augaauuccucuggugucu

SEQ ID NO: 2628643 - RNA, 19 nt, Artificial Sequence
  Description of Artificial Sequence: Synthetic oligonucleotide
aguuuguacuuagaauuaa

SEQ ID NO: 2628644 - RNA, 19 nt, Artificial Sequence
  Description of Artificial Sequence: Synthetic oligonucleotide
cucugauguuguguuagag

SEQ ID NO: 2628645 - RNA, 19 nt, Artificial Sequence
  Description of Artificial Sequence: Synthetic oligonucleotide
guaaggucucucuucugga

SEQ ID NO: 2628646 - RNA, 19 nt, Artificial Sequence
  Description of Artificial Sequence: Synthetic oligonucleotide
gaauuuuccgaugucuagu

SEQ ID NO: 2628647 - RNA, 19 nt, Artificial Sequence
  Description of Artificial Sequence: Synthetic oligonucleotide
gaaugcuuugccacacuca

SEQ ID NO: 2628648 - RNA, 19 nt, Artificial Sequence
  Description of Artificial Sequence: Synthetic oligonucleotide
uagcuccgagcucugcuug

SEQ ID NO: 2628649 - RNA, 19 nt, Artificial Sequence
  Description of Artificial Sequence: Synthetic oligonucleotide
gucuuaugagguuugaauu

SEQ ID NO: 2628650 - RNA, 19 nt, Artificial Sequence
  Description of Artificial Sequence: Synthetic oligonucleotide
agggucucucuccuguaug

SEQ ID NO: 2628651 - RNA, 19 nt, Artificial Sequence
  Description of Artificial Sequence: Synthetic oligonucleotide
agguaagaacuuugacuga

SEQ ID NO: 2628652 - RNA, 19 nt, Artificial Sequence
  Description of Artificial Sequence: Synthetic oligonucleotide
acauguuacagaguuugua

SEQ ID NO: 2628653 - RNA, 19 nt, Artificial Sequence
  Description of Artificial Sequence: Synthetic oligonucleotide
ugauggucucucuuugcua

SEQ ID NO: 2628654 - RNA, 19 nt, Artificial Sequence
  Description of Artificial Sequence: Synthetic oligonucleotide
cacuguguauccucugauc

SEQ ID NO: 2628655 - RNA, 19 nt, Artificial Sequence
  Description of Artificial Sequence: Synthetic oligonucleotide
gcuugaaagcuuuucccac

SEQ ID NO: 2628656 - RNA, 19 nt, Artificial Sequence
  Description of Artificial Sequence: Synthetic oligonucleotide
aaagcuuuucccaccuauu

SEQ ID NO: 2628657 - RNA, 19 nt, Artificial Sequence
  Description of Artificial Sequence: Synthetic oligonucleotide
aauucagacugaaggcuuu

SEQ ID NO: 2628658 - RNA, 19 nt, Artificial Sequence
  Description of Artificial Sequence: Synthetic oligonucleotide
uguauccucugaucggguu

SEQ ID NO: 2628659 - RNA, 19 nt, Artificial Sequence
  Description of Artificial Sequence: Synthetic oligonucleotide
uuaaagcuaugcccacaua

SEQ ID NO: 2628660 - RNA, 19 nt, Artificial Sequence
  Description of Artificial Sequence: Synthetic oligonucleotide
aggucucucuucuggagaa

SEQ ID NO: 2628661 - RNA, 19 nt, Artificial Sequence
  Description of Artificial Sequence: Synthetic oligonucleotide
ugagagcugagcucugauu

SEQ ID NO: 2628662 - RNA, 19 nt, Artificial Sequence
  Description of Artificial Sequence: Synthetic oligonucleotide
uucugacauguuacagagu

SEQ ID NO: 2628663 - RNA, 19 nt, Artificial Sequence
  Description of Artificial Sequence: Synthetic oligonucleotide
cugaugaauaaugagguau

SEQ ID NO: 2628664 - RNA, 19 nt, Artificial Sequence
  Description of Artificial Sequence: Synthetic oligonucleotide
caccacuauggauuuucug

SEQ ID NO: 2628665 - RNA, 19 nt, Artificial Sequence
  Description of Artificial Sequence: Synthetic oligonucleotide
cauugcauacauagggucu

SEQ ID NO: 2628666 - RNA, 19 nt, Artificial Sequence
  Description of Artificial Sequence: Synthetic oligonucleotide
gaguuuguacuuagaauua

SEQ ID NO: 2628667 - RNA, 19 nt, Artificial Sequence
  Description of Artificial Sequence: Synthetic oligonucleotide
auuccucuggugucuaaua

SEQ ID NO: 2628668 - RNA, 19 nt, Artificial Sequence
  Description of Artificial Sequence: Synthetic oligonucleotide
guuaucuagcuccgagcuc

SEQ ID NO: 2628669 - RNA, 19 nt, Artificial Sequence
  Description of Artificial Sequence: Synthetic oligonucleotide
uccucugaucggguuaucu

SEQ ID NO: 2628670 - RNA, 19 nt, Artificial Sequence
  Description of Artificial Sequence: Synthetic oligonucleotide
uauccucugaucggguuau

SEQ ID NO: 2628671 - RNA, 19 nt, Artificial Sequence
  Description of Artificial Sequence: Synthetic oligonucleotide
cuggagaaacuuucugaca

SEQ ID NO: 2628672 - RNA, 19 nt, Artificial Sequence
  Description of Artificial Sequence: Synthetic oligonucleotide
ggguuaucuagcuccgagc

SEQ ID NO: 2628673 - RNA, 19 nt, Artificial Sequence
  Description of Artificial Sequence: Synthetic oligonucleotide
auggucucucuuugcuaag

SEQ ID NO: 2628674 - RNA, 19 nt, Artificial Sequence
  Description of Artificial Sequence: Synthetic oligonucleotide
cuaaggauuugugugugaa

SEQ ID NO: 2628675 - RNA, 19 nt, Artificial Sequence
  Description of Artificial Sequence: Synthetic oligonucleotide
gucuagugagagcugagcu

SEQ ID NO: 2628676 - RNA, 19 nt, Artificial Sequence
  Description of Artificial Sequence: Synthetic oligonucleotide
gguuaucuagcuccgagcu

SEQ ID NO: 2628677 - RNA, 19 nt, Artificial Sequence
  Description of Artificial Sequence: Synthetic oligonucleotide
gagauucaucaugaugguc

SEQ ID NO: 2628678 - RNA, 19 nt, Artificial Sequence
  Description of Artificial Sequence: Synthetic oligonucleotide
uuuucccaccuauuucauu

SEQ ID NO: 2628679 - RNA, 19 nt, Artificial Sequence
  Description of Artificial Sequence: Synthetic oligonucleotide
aucggguuaucuagcuccg

SEQ ID NO: 2628680 - RNA, 19 nt, Artificial Sequence
  Description of Artificial Sequence: Synthetic oligonucleotide
ucacacuuacaagcuuucu

SEQ ID NO: 2628681 - RNA, 19 nt, Artificial Sequence
  Description of Artificial Sequence: Synthetic oligonucleotide
ucucuuugcuaaggauuug

SEQ ID NO: 2628682 - RNA, 19 nt, Artificial Sequence
  Description of Artificial Sequence: Synthetic oligonucleotide
agguaugaccucaaacuaa

SEQ ID NO: 2628683 - RNA, 19 nt, Artificial Sequence
  Description of Artificial Sequence: Synthetic oligonucleotide
uagggucucucuccuguau

SEQ ID NO: 2628684 - RNA, 19 nt, Artificial Sequence
  Description of Artificial Sequence: Synthetic oligonucleotide
gucucucuucuggagaaac

SEQ ID NO: 2628685 - RNA, 19 nt, Artificial Sequence
  Description of Artificial Sequence: Synthetic oligonucleotide
aggguuucucuuccacugu

SEQ ID NO: 2628686 - RNA, 19 nt, Artificial Sequence
  Description of Artificial Sequence: Synthetic oligonucleotide
guuuaaagcuaugcccaca

SEQ ID NO: 2628687 - RNA, 19 nt, Artificial Sequence
  Description of Artificial Sequence: Synthetic oligonucleotide
cuagugagagcugagcucu

SEQ ID NO: 2628688 - RNA, 19 nt, Artificial Sequence
  Description of Artificial Sequence: Synthetic oligonucleotide
uaucuagcuccgagcucug

SEQ ID NO: 2628689 - RNA, 19 nt, Artificial Sequence
  Description of Artificial Sequence: Synthetic oligonucleotide
guaugaccucaaacuaaag

SEQ ID NO: 2628690 - RNA, 19 nt, Artificial Sequence
  Description of Artificial Sequence: Synthetic oligonucleotide
ggauuugugugugaagauc

SEQ ID NO: 2628691 - RNA, 19 nt, Artificial Sequence
  Description of Artificial Sequence: Synthetic oligonucleotide
gguaagaacuuugacugaa

SEQ ID NO: 2628692 - RNA, 19 nt, Artificial Sequence
  Description of Artificial Sequence: Synthetic oligonucleotide
guuacagaguuuguacuua

SEQ ID NO: 2628693 - RNA, 19 nt, Artificial Sequence
  Description of Artificial Sequence: Synthetic oligonucleotide
cucugauugaaggcuuuuc

SEQ ID NO: 2628694 - RNA, 19 nt, Artificial Sequence
  Description of Artificial Sequence: Synthetic oligonucleotide
gaccucaaacuaaaggccu

SEQ ID NO: 2628695 - RNA, 19 nt, Artificial Sequence
  Description of Artificial Sequence: Synthetic oligonucleotide
gguaugaccucaaacuaaa

SEQ ID NO: 2628696 - RNA, 19 nt, Artificial Sequence
  Description of Artificial Sequence: Synthetic oligonucleotide
auuaagcaucuuugagauu

SEQ ID NO: 2628697 - RNA, 19 nt, Artificial Sequence
  Description of Artificial Sequence: Synthetic oligonucleotide
cagaguuuguacuuagaau

SEQ ID NO: 2628698 - RNA, 19 nt, Artificial Sequence
  Description of Artificial Sequence: Synthetic oligonucleotide
gaagaucacuugacuaaaa

SEQ ID NO: 2628699 - RNA, 19 nt, Artificial Sequence
  Description of Artificial Sequence: Synthetic oligonucleotide
aucuagcuccgagcucugc

SEQ ID NO: 2628700 - RNA, 19 nt, Artificial Sequence
  Description of Artificial Sequence: Synthetic oligonucleotide
auucucugauguuguguua

SEQ ID NO: 2628701 - RNA, 19 nt, Artificial Sequence
  Description of Artificial Sequence: Synthetic oligonucleotide
guauccucugaucggguua

SEQ ID NO: 2628702 - RNA, 19 nt, Artificial Sequence
  Description of Artificial Sequence: Synthetic oligonucleotide
ggguuucucuuccacugug

SEQ ID NO: 2628703 - RNA, 19 nt, Artificial Sequence
  Description of Artificial Sequence: Synthetic oligonucleotide
augcccacauacaucacau

SEQ ID NO: 2628704 - RNA, 19 nt, Artificial Sequence
  Description of Artificial Sequence: Synthetic oligonucleotide
uagugagagcugagcucug

SEQ ID NO: 2628705 - RNA, 19 nt, Artificial Sequence
  Description of Artificial Sequence: Synthetic oligonucleotide
aagcaucuuugagauucau

SEQ ID NO: 2628706 - RNA, 19 nt, Artificial Sequence
  Description of Artificial Sequence: Synthetic oligonucleotide
gugugaagaucacuugacu

SEQ ID NO: 2628707 - RNA, 19 nt, Artificial Sequence
  Description of Artificial Sequence: Synthetic oligonucleotide
uugcauacauagggucucu

SEQ ID NO: 2628708 - RNA, 19 nt, Artificial Sequence
  Description of Artificial Sequence: Synthetic oligonucleotide
cucucuuugcuaaggauuu

SEQ ID NO: 2628709 - RNA, 19 nt, Artificial Sequence
  Description of Artificial Sequence: Synthetic oligonucleotide
caucacacuuacaagcuuu

SEQ ID NO: 2628710 - RNA, 19 nt, Artificial Sequence
  Description of Artificial Sequence: Synthetic oligonucleotide
gaauucagacugaaggcuu

SEQ ID NO: 2628711 - RNA, 19 nt, Artificial Sequence
  Description of Artificial Sequence: Synthetic oligonucleotide
agugagagcugagcucuga

SEQ ID NO: 2628712 - RNA, 19 nt, Artificial Sequence
  Description of Artificial Sequence: Synthetic oligonucleotide
gcccacauacaucacaucu

SEQ ID NO: 2628713 - RNA, 19 nt, Artificial Sequence
  Description of Artificial Sequence: Synthetic oligonucleotide
cuaugcccacauacaucac

SEQ ID NO: 2628714 - RNA, 19 nt, Artificial Sequence
  Description of Artificial Sequence: Synthetic oligonucleotide
ccgagcucugcuugaaagc

SEQ ID NO: 2628715 - RNA, 19 nt, Artificial Sequence
  Description of Artificial Sequence: Synthetic oligonucleotide
ugaauuccucuggugucua

SEQ ID NO: 2628716 - RNA, 19 nt, Artificial Sequence
  Description of Artificial Sequence: Synthetic oligonucleotide
auucaucaugauggucucu

SEQ ID NO: 2628717 - RNA, 19 nt, Artificial Sequence
  Description of Artificial Sequence: Synthetic oligonucleotide
augcuuugccacacucauc

SEQ ID NO: 2628718 - RNA, 19 nt, Artificial Sequence
  Description of Artificial Sequence: Synthetic oligonucleotide
ugcccacauacaucacauc

SEQ ID NO: 2628719 - RNA, 19 nt, Artificial Sequence
  Description of Artificial Sequence: Synthetic oligonucleotide
agcugagcucugauugaag

SEQ ID NO: 2628720 - RNA, 19 nt, Artificial Sequence
  Description of Artificial Sequence: Synthetic oligonucleotide
cuauuucauugcauacaua

SEQ ID NO: 2628721 - RNA, 19 nt, Artificial Sequence
  Description of Artificial Sequence: Synthetic oligonucleotide
gcuuggagcucuggcauag

SEQ ID NO: 2628722 - RNA, 19 nt, Artificial Sequence
  Description of Artificial Sequence: Synthetic oligonucleotide
agcuccgagcucugcuuga

SEQ ID NO: 2628723 - RNA, 19 nt, Artificial Sequence
  Description of Artificial Sequence: Synthetic oligonucleotide
caagcuuucucaccuguau

SEQ ID NO: 2628724 - RNA, 19 nt, Artificial Sequence
  Description of Artificial Sequence: Synthetic oligonucleotide
agguuugaauucagacuga

SEQ ID NO: 2628725 - RNA, 19 nt, Artificial Sequence
  Description of Artificial Sequence: Synthetic oligonucleotide
ggucucucuuugcuaagga

SEQ ID NO: 2628726 - RNA, 19 nt, Artificial Sequence
  Description of Artificial Sequence: Synthetic oligonucleotide
cuuggagcucuggcauagg

SEQ ID NO: 2628727 - RNA, 19 nt, Artificial Sequence
  Description of Artificial Sequence: Synthetic oligonucleotide
cuguaugaauuccucuggu

SEQ ID NO: 2628728 - RNA, 19 nt, Artificial Sequence
  Description of Artificial Sequence: Synthetic oligonucleotide
gaauuccucuggugucuaa

SEQ ID NO: 2628729 - RNA, 19 nt, Artificial Sequence
  Description of Artificial Sequence: Synthetic oligonucleotide
gagcugagcucugauugaa

SEQ ID NO: 2628730 - RNA, 19 nt, Artificial Sequence
  Description of Artificial Sequence: Synthetic oligonucleotide
ggagcucuggcauaggguu

SEQ ID NO: 2628731 - RNA, 19 nt, Artificial Sequence
  Description of Artificial Sequence: Synthetic oligonucleotide
gccuuuucaccacuaugga

SEQ ID NO: 2628732 - RNA, 19 nt, Artificial Sequence
  Description of Artificial Sequence: Synthetic oligonucleotide
cucuggugucuaauaagcu

SEQ ID NO: 2628733 - RNA, 19 nt, Artificial Sequence
  Description of Artificial Sequence: Synthetic oligonucleotide
gguuugaauucagacugaa

SEQ ID NO: 2628734 - RNA, 19 nt, Artificial Sequence
  Description of Artificial Sequence: Synthetic oligonucleotide
auaagccuuuucaccacua

SEQ ID NO: 2628735 - RNA, 19 nt, Artificial Sequence
  Description of Artificial Sequence: Synthetic oligonucleotide
cuuccacuguguauccucu

SEQ ID NO: 2628736 - RNA, 19 nt, Artificial Sequence
  Description of Artificial Sequence: Synthetic oligonucleotide
agaaacuuucugacauguu

SEQ ID NO: 2628737 - RNA, 19 nt, Artificial Sequence
  Description of Artificial Sequence: Synthetic oligonucleotide
cucuuugcuaaggauuugu

SEQ ID NO: 2628738 - RNA, 19 nt, Artificial Sequence
  Description of Artificial Sequence: Synthetic oligonucleotide
cauaagccuuuucaccacu

SEQ ID NO: 2628739 - RNA, 19 nt, Artificial Sequence
  Description of Artificial Sequence: Synthetic oligonucleotide
cugaucggguuaucuagcu

SEQ ID NO: 2628740 - RNA, 19 nt, Artificial Sequence
  Description of Artificial Sequence: Synthetic oligonucleotide
auucagacugaaggcuuuu

SEQ ID NO: 2628741 - RNA, 19 nt, Artificial Sequence
  Description of Artificial Sequence: Synthetic oligonucleotide
ccaccuauuucauugcaua

SEQ ID NO: 2628742 - RNA, 19 nt, Artificial Sequence
  Description of Artificial Sequence: Synthetic oligonucleotide
agcuuggagcucuggcaua

SEQ ID NO: 2628743 - RNA, 19 nt, Artificial Sequence
  Description of Artificial Sequence: Synthetic oligonucleotide
caucuuugagauucaucau

SEQ ID NO: 2628744 - RNA, 19 nt, Artificial Sequence
  Description of Artificial Sequence: Synthetic oligonucleotide
ucggguuaucuagcuccga

SEQ ID NO: 2628745 - RNA, 19 nt, Artificial Sequence
  Description of Artificial Sequence: Synthetic oligonucleotide
cacacucaucacacuuaca

SEQ ID NO: 2628746 - RNA, 19 nt, Artificial Sequence
  Description of Artificial Sequence: Synthetic oligonucleotide
gugucuuaugagguuugaa

SEQ ID NO: 2628747 - RNA, 19 nt, Artificial Sequence
  Description of Artificial Sequence: Synthetic oligonucleotide
ccuauuucauugcauacau

SEQ ID NO: 2628748 - RNA, 19 nt, Artificial Sequence
  Description of Artificial Sequence: Synthetic oligonucleotide
accucaaacuaaaggccuu

SEQ ID NO: 2628749 - RNA, 19 nt, Artificial Sequence
  Description of Artificial Sequence: Synthetic oligonucleotide
gacauguuacagaguuugu

SEQ ID NO: 2628750 - RNA, 19 nt, Artificial Sequence
  Description of Artificial Sequence: Synthetic oligonucleotide
gaacuuugacugaaugcuu

SEQ ID NO: 2628751 - RNA, 19 nt, Artificial Sequence
  Description of Artificial Sequence: Synthetic oligonucleotide
gcuaaggauuuguguguga

SEQ ID NO: 2628752 - RNA, 19 nt, Artificial Sequence
  Description of Artificial Sequence: Synthetic oligonucleotide
cggguuaucuagcuccgag

SEQ ID NO: 2628753 - RNA, 19 nt, Artificial Sequence
  Description of Artificial Sequence: Synthetic oligonucleotide
acaagcuuucucaccugua

SEQ ID NO: 2628754 - RNA, 19 nt, Artificial Sequence
  Description of Artificial Sequence: Synthetic oligonucleotide
ggauuuucugaugaauaau

SEQ ID NO: 2628755 - RNA, 19 nt, Artificial Sequence
  Description of Artificial Sequence: Synthetic oligonucleotide
cuuugagauucaucaugau

SEQ ID NO: 2628756 - RNA, 19 nt, Artificial Sequence
  Description of Artificial Sequence: Synthetic oligonucleotide
guaagaacuuugacugaau

SEQ ID NO: 2628757 - RNA, 19 nt, Artificial Sequence
  Description of Artificial Sequence: Synthetic oligonucleotide
cuuuucccaccuauuucau

SEQ ID NO: 2628758 - RNA, 19 nt, Artificial Sequence
  Description of Artificial Sequence: Synthetic oligonucleotide
ccgaugucuagugagagcu

SEQ ID NO: 2628759 - RNA, 19 nt, Artificial Sequence
  Description of Artificial Sequence: Synthetic oligonucleotide
ccucaaacuaaaggccuuc

SEQ ID NO: 2628760 - RNA, 19 nt, Artificial Sequence
  Description of Artificial Sequence: Synthetic oligonucleotide
caucaugauggucucucuu

SEQ ID NO: 2628761 - RNA, 19 nt, Artificial Sequence
  Description of Artificial Sequence: Synthetic oligonucleotide
uuucaccacuauggauuuu

SEQ ID NO: 2628762 - RNA, 19 nt, Artificial Sequence
  Description of Artificial Sequence: Synthetic oligonucleotide
ggugucuuaugagguuuga

SEQ ID NO: 2628763 - RNA, 19 nt, Artificial Sequence
  Description of Artificial Sequence: Synthetic oligonucleotide
auccucugaucggguuauc

SEQ ID NO: 2628764 - RNA, 19 nt, Artificial Sequence
  Description of Artificial Sequence: Synthetic oligonucleotide
ggugucuaauaagcuugga

SEQ ID NO: 2628765 - RNA, 19 nt, Artificial Sequence
  Description of Artificial Sequence: Synthetic oligonucleotide
cuagcuccgagcucugcuu

SEQ ID NO: 2628766 - RNA, 19 nt, Artificial Sequence
  Description of Artificial Sequence: Synthetic oligonucleotide
gugagagcugagcucugau

SEQ ID NO: 2628767 - RNA, 19 nt, Artificial Sequence
  Description of Artificial Sequence: Synthetic oligonucleotide
gcuuucucaccuguaugaa

SEQ ID NO: 2628768 - RNA, 19 nt, Artificial Sequence
  Description of Artificial Sequence: Synthetic oligonucleotide
cucuggcauaggguuucuc

SEQ ID NO: 2628769 - RNA, 19 nt, Artificial Sequence
  Description of Artificial Sequence: Synthetic oligonucleotide
ccacuauggauuuucugau

SEQ ID NO: 2628770 - RNA, 19 nt, Artificial Sequence
  Description of Artificial Sequence: Synthetic oligonucleotide
cugacauguuacagaguuu

SEQ ID NO: 2628771 - RNA, 19 nt, Artificial Sequence
  Description of Artificial Sequence: Synthetic oligonucleotide
cuggugucuuaugagguuu

SEQ ID NO: 2628772 - RNA, 19 nt, Artificial Sequence
  Description of Artificial Sequence: Synthetic oligonucleotide
ccucugaucggguuaucua

SEQ ID NO: 2628773 - RNA, 19 nt, Artificial Sequence
  Description of Artificial Sequence: Synthetic oligonucleotide
cugaaugcuuugccacacu

SEQ ID NO: 2628774 - RNA, 19 nt, Artificial Sequence
  Description of Artificial Sequence: Synthetic oligonucleotide
gguuucucuuccacugugu

SEQ ID NO: 2628775 - RNA, 19 nt, Artificial Sequence
  Description of Artificial Sequence: Synthetic oligonucleotide
cgaugucuagugagagcug

SEQ ID NO: 2628776 - RNA, 19 nt, Artificial Sequence
  Description of Artificial Sequence: Synthetic oligonucleotide
cuccgagcucugcuugaaa

SEQ ID NO: 2628777 - RNA, 19 nt, Artificial Sequence
  Description of Artificial Sequence: Synthetic oligonucleotide
guguauccucugaucgggu

SEQ ID NO: 2628778 - RNA, 19 nt, Artificial Sequence
  Description of Artificial Sequence: Synthetic oligonucleotide
gagcucuggcauaggguuu

SEQ ID NO: 2628779 - RNA, 19 nt, Artificial Sequence
  Description of Artificial Sequence: Synthetic oligonucleotide
ggucucucuucuggagaaa

SEQ ID NO: 2628780 - RNA, 19 nt, Artificial Sequence
  Description of Artificial Sequence: Synthetic oligonucleotide
cccaccuauuucauugcau

SEQ ID NO: 2628781 - RNA, 19 nt, Artificial Sequence
  Description of Artificial Sequence: Synthetic oligonucleotide
cucuuccacuguguauccu

SEQ ID NO: 2628782 - RNA, 19 nt, Artificial Sequence
  Description of Artificial Sequence: Synthetic oligonucleotide
cgagcucugcuugaaagcu

SEQ ID NO: 2628783 - RNA, 19 nt, Artificial Sequence
  Description of Artificial Sequence: Synthetic oligonucleotide
gcuccgagcucugcuugaa

SEQ ID NO: 2628784 - RNA, 19 nt, Artificial Sequence
  Description of Artificial Sequence: Synthetic oligonucleotide
gcucugauugaaggcuuuu

SEQ ID NO: 2628785 - RNA, 19 nt, Artificial Sequence
  Description of Artificial Sequence: Synthetic oligonucleotide
gcucuggcauaggguuucu

SEQ ID NO: 2628786 - RNA, 19 nt, Artificial Sequence
  Description of Artificial Sequence: Synthetic oligonucleotide
aaaacuguccagcagaggg

SEQ ID NO: 2628787 - RNA, 19 nt, Artificial Sequence
  Description of Artificial Sequence: Synthetic oligonucleotide
uacuaaaagauucugcucg

SEQ ID NO: 2628788 - RNA, 19 nt, Artificial Sequence
  Description of Artificial Sequence: Synthetic oligonucleotide
aaauaguaggcguaggugg

SEQ ID NO: 2628789 - RNA, 19 nt, Artificial Sequence
  Description of Artificial Sequence: Synthetic oligonucleotide
aaaacagucaccguaauca

SEQ ID NO: 2628790 - RNA, 19 nt, Artificial Sequence
  Description of Artificial Sequence: Synthetic oligonucleotide
aaucaguacuaaaagauuc

SEQ ID NO: 2628791 - RNA, 19 nt, Artificial Sequence
  Description of Artificial Sequence: Synthetic oligonucleotide
ucacuguagaucaucaggg

SEQ ID NO: 2628792 - RNA, 19 nt, Artificial Sequence
  Description of Artificial Sequence: Synthetic oligonucleotide
auugcaguagagcacaagg

SEQ ID NO: 2628793 - RNA, 19 nt, Artificial Sequence
  Description of Artificial Sequence: Synthetic oligonucleotide
aagucaucacuguagauca

SEQ ID NO: 2628794 - RNA, 19 nt, Artificial Sequence
  Description of Artificial Sequence: Synthetic oligonucleotide
aucacuguagaucaucagg

SEQ ID NO: 2628795 - RNA, 19 nt, Artificial Sequence
  Description of Artificial Sequence: Synthetic oligonucleotide
aaugagcuugccauggugc

SEQ ID NO: 2628796 - RNA, 19 nt, Artificial Sequence
  Description of Artificial Sequence: Synthetic oligonucleotide
aucuucaagggcuggaagc

SEQ ID NO: 2628797 - RNA, 19 nt, Artificial Sequence
  Description of Artificial Sequence: Synthetic oligonucleotide
aauguucaguaacacgguc

SEQ ID NO: 2628798 - RNA, 19 nt, Artificial Sequence
  Description of Artificial Sequence: Synthetic oligonucleotide
ucugaaaacagucaccgua

SEQ ID NO: 2628799 - RNA, 19 nt, Artificial Sequence
  Description of Artificial Sequence: Synthetic oligonucleotide
ccaauguucaguaacacgg

SEQ ID NO: 2628800 - RNA, 19 nt, Artificial Sequence
  Description of Artificial Sequence: Synthetic oligonucleotide
uccuaagucaucacuguag

SEQ ID NO: 2628801 - RNA, 19 nt, Artificial Sequence
  Description of Artificial Sequence: Synthetic oligonucleotide
uucacuucaccccaugagc

SEQ ID NO: 2628802 - RNA, 19 nt, Artificial Sequence
  Description of Artificial Sequence: Synthetic oligonucleotide
ugaucagccuuccugacug

SEQ ID NO: 2628803 - RNA, 19 nt, Artificial Sequence
  Description of Artificial Sequence: Synthetic oligonucleotide
uagaucaucagggaauggg

SEQ ID NO: 2628804 - RNA, 19 nt, Artificial Sequence
  Description of Artificial Sequence: Synthetic oligonucleotide
ucugccaauguucaguaac

SEQ ID NO: 2628805 - RNA, 19 nt, Artificial Sequence
  Description of Artificial Sequence: Synthetic oligonucleotide
cacuauacugccuuggcag

SEQ ID NO: 2628806 - RNA, 19 nt, Artificial Sequence
  Description of Artificial Sequence: Synthetic oligonucleotide
accaauugggucuugugag

SEQ ID NO: 2628807 - RNA, 19 nt, Artificial Sequence
  Description of Artificial Sequence: Synthetic oligonucleotide
uguucaguaacacggucug

SEQ ID NO: 2628808 - RNA, 19 nt, Artificial Sequence
  Description of Artificial Sequence: Synthetic oligonucleotide
agcuuuaccaauugggucu

SEQ ID NO: 2628809 - RNA, 19 nt, Artificial Sequence
  Description of Artificial Sequence: Synthetic oligonucleotide
uugguuucugaaaacaguc

SEQ ID NO: 2628810 - RNA, 19 nt, Artificial Sequence
  Description of Artificial Sequence: Synthetic oligonucleotide
acaagguuaccagacgucc

SEQ ID NO: 2628811 - RNA, 19 nt, Artificial Sequence
  Description of Artificial Sequence: Synthetic oligonucleotide
agugggagcagcuuuacca

SEQ ID NO: 2628812 - RNA, 19 nt, Artificial Sequence
  Description of Artificial Sequence: Synthetic oligonucleotide
ugugagaauggcaucuuca

SEQ ID NO: 2628813 - RNA, 19 nt, Artificial Sequence
  Description of Artificial Sequence: Synthetic oligonucleotide
ucugcucggaaucuguuug

SEQ ID NO: 2628814 - RNA, 19 nt, Artificial Sequence
  Description of Artificial Sequence: Synthetic oligonucleotide
aaacagucaccguaaucag

SEQ ID NO: 2628815 - RNA, 19 nt, Artificial Sequence
  Description of Artificial Sequence: Synthetic oligonucleotide
cugcgugagaaauaguagg

SEQ ID NO: 2628816 - RNA, 19 nt, Artificial Sequence
  Description of Artificial Sequence: Synthetic oligonucleotide
aauaguaggcguagguggg

SEQ ID NO: 2628817 - RNA, 19 nt, Artificial Sequence
  Description of Artificial Sequence: Synthetic oligonucleotide
acuaaaagauucugcucgg

SEQ ID NO: 2628818 - RNA, 19 nt, Artificial Sequence
  Description of Artificial Sequence: Synthetic oligonucleotide
acuauacugccuuggcagc

SEQ ID NO: 2628819 - RNA, 19 nt, Artificial Sequence
  Description of Artificial Sequence: Synthetic oligonucleotide
aauggggcuugacugaaca

SEQ ID NO: 2628820 - RNA, 19 nt, Artificial Sequence
  Description of Artificial Sequence: Synthetic oligonucleotide
ugcgugagaaauaguaggc

SEQ ID NO: 2628821 - RNA, 19 nt, Artificial Sequence
  Description of Artificial Sequence: Synthetic oligonucleotide
uaagucaucacuguagauc

SEQ ID NO: 2628822 - RNA, 19 nt, Artificial Sequence
  Description of Artificial Sequence: Synthetic oligonucleotide
agucacuucugccacuugg

SEQ ID NO: 2628823 - RNA, 19 nt, Artificial Sequence
  Description of Artificial Sequence: Synthetic oligonucleotide
ugagaauggcaucuucaag

SEQ ID NO: 2628824 - RNA, 19 nt, Artificial Sequence
  Description of Artificial Sequence: Synthetic oligonucleotide
uaccaauugggucuuguga

SEQ ID NO: 2628825 - RNA, 19 nt, Artificial Sequence
  Description of Artificial Sequence: Synthetic oligonucleotide
aucuguuugguguccgggc

SEQ ID NO: 2628826 - RNA, 19 nt, Artificial Sequence
  Description of Artificial Sequence: Synthetic oligonucleotide
agaaauaguaggcguaggu

SEQ ID NO: 2628827 - RNA, 19 nt, Artificial Sequence
  Description of Artificial Sequence: Synthetic oligonucleotide
uagagcacaagguuaccag

SEQ ID NO: 2628828 - RNA, 19 nt, Artificial Sequence
  Description of Artificial Sequence: Synthetic oligonucleotide
gaaauaguaggcguaggug

SEQ ID NO: 2628829 - RNA, 19 nt, Artificial Sequence
  Description of Artificial Sequence: Synthetic oligonucleotide
agggaauggggcuugacug

SEQ ID NO: 2628830 - RNA, 19 nt, Artificial Sequence
  Description of Artificial Sequence: Synthetic oligonucleotide
augagcuugccauggugcc

SEQ ID NO: 2628831 - RNA, 19 nt, Artificial Sequence
  Description of Artificial Sequence: Synthetic oligonucleotide
aaauguggcccagugcuuc

SEQ ID NO: 2628832 - RNA, 19 nt, Artificial Sequence
  Description of Artificial Sequence: Synthetic oligonucleotide
ugccaugugacuccuaagu

SEQ ID NO: 2628833 - RNA, 19 nt, Artificial Sequence
  Description of Artificial Sequence: Synthetic oligonucleotide
cauagcggggcucacagag

SEQ ID NO: 2628834 - RNA, 19 nt, Artificial Sequence
  Description of Artificial Sequence: Synthetic oligonucleotide
agcaaauguggcccagugc

SEQ ID NO: 2628835 - RNA, 19 nt, Artificial Sequence
  Description of Artificial Sequence: Synthetic oligonucleotide
ucuugccugaccuaaucug

SEQ ID NO: 2628836 - RNA, 19 nt, Artificial Sequence
  Description of Artificial Sequence: Synthetic oligonucleotide
cagaguuguguguucaggg

SEQ ID NO: 2628837 - RNA, 19 nt, Artificial Sequence
  Description of Artificial Sequence: Synthetic oligonucleotide
ucacuucaccccaugagca

SEQ ID NO: 2628838 - RNA, 19 nt, Artificial Sequence
  Description of Artificial Sequence: Synthetic oligonucleotide
gaaugaucagccuuccuga

SEQ ID NO: 2628839 - RNA, 19 nt, Artificial Sequence
  Description of Artificial Sequence: Synthetic oligonucleotide
ucuggcacacagaugaaaa

SEQ ID NO: 2628840 - RNA, 19 nt, Artificial Sequence
  Description of Artificial Sequence: Synthetic oligonucleotide
agcagcuuuaccaauuggg

SEQ ID NO: 2628841 - RNA, 19 nt, Artificial Sequence
  Description of Artificial Sequence: Synthetic oligonucleotide
agacgggcagcauucuugc

SEQ ID NO: 2628842 - RNA, 19 nt, Artificial Sequence
  Description of Artificial Sequence: Synthetic oligonucleotide
gagccaaugaccuccucag

SEQ ID NO: 2628843 - RNA, 19 nt, Artificial Sequence
  Description of Artificial Sequence: Synthetic oligonucleotide
aagguuaccagacguccca

SEQ ID NO: 2628844 - RNA, 19 nt, Artificial Sequence
  Description of Artificial Sequence: Synthetic oligonucleotide
uggggcuugacugaacacg

SEQ ID NO: 2628845 - RNA, 19 nt, Artificial Sequence
  Description of Artificial Sequence: Synthetic oligonucleotide
aguaacacggucuggcaca

SEQ ID NO: 2628846 - RNA, 19 nt, Artificial Sequence
  Description of Artificial Sequence: Synthetic oligonucleotide
auccugacugcacaggaag

SEQ ID NO: 2628847 - RNA, 19 nt, Artificial Sequence
  Description of Artificial Sequence: Synthetic oligonucleotide
ugugacuccuaagucauca

SEQ ID NO: 2628848 - RNA, 19 nt, Artificial Sequence
  Description of Artificial Sequence: Synthetic oligonucleotide
uguagaucaucagggaaug

SEQ ID NO: 2628849 - RNA, 19 nt, Artificial Sequence
  Description of Artificial Sequence: Synthetic oligonucleotide
ucagucaaguccuucacuu

SEQ ID NO: 2628850 - RNA, 19 nt, Artificial Sequence
  Description of Artificial Sequence: Synthetic oligonucleotide
gaaccugcgugagaaauag

SEQ ID NO: 2628851 - RNA, 19 nt, Artificial Sequence
  Description of Artificial Sequence: Synthetic oligonucleotide
ucuugugagaauggcaucu

SEQ ID NO: 2628852 - RNA, 19 nt, Artificial Sequence
  Description of Artificial Sequence: Synthetic oligonucleotide
ugguuucugaaaacaguca

SEQ ID NO: 2628853 - RNA, 19 nt, Artificial Sequence
  Description of Artificial Sequence: Synthetic oligonucleotide
ucacuauacugccuuggca

SEQ ID NO: 2628854 - RNA, 19 nt, Artificial Sequence
  Description of Artificial Sequence: Synthetic oligonucleotide
ugcaguagagcacaagguu

SEQ ID NO: 2628855 - RNA, 19 nt, Artificial Sequence
  Description of Artificial Sequence: Synthetic oligonucleotide
agaucaucagggaaugggg

SEQ ID NO: 2628856 - RNA, 19 nt, Artificial Sequence
  Description of Artificial Sequence: Synthetic oligonucleotide
gacuccuaagucaucacug

SEQ ID NO: 2628857 - RNA, 19 nt, Artificial Sequence
  Description of Artificial Sequence: Synthetic oligonucleotide
accuaaucugccaauguuc

SEQ ID NO: 2628858 - RNA, 19 nt, Artificial Sequence
  Description of Artificial Sequence: Synthetic oligonucleotide
cuucacuucaccccaugag

SEQ ID NO: 2628859 - RNA, 19 nt, Artificial Sequence
  Description of Artificial Sequence: Synthetic oligonucleotide
uugcaguagagcacaaggu

SEQ ID NO: 2628860 - RNA, 19 nt, Artificial Sequence
  Description of Artificial Sequence: Synthetic oligonucleotide
agcacaagguuaccagacg

SEQ ID NO: 2628861 - RNA, 19 nt, Artificial Sequence
  Description of Artificial Sequence: Synthetic oligonucleotide
uugggucuugugagaaugg

SEQ ID NO: 2628862 - RNA, 19 nt, Artificial Sequence
  Description of Artificial Sequence: Synthetic oligonucleotide
aaucugccaauguucagua

SEQ ID NO: 2628863 - RNA, 19 nt, Artificial Sequence
  Description of Artificial Sequence: Synthetic oligonucleotide
ugagcacccagcauccuga

SEQ ID NO: 2628864 - RNA, 19 nt, Artificial Sequence
  Description of Artificial Sequence: Synthetic oligonucleotide
ugacuccuaagucaucacu

SEQ ID NO: 2628865 - RNA, 19 nt, Artificial Sequence
  Description of Artificial Sequence: Synthetic oligonucleotide
uuaccagacgucccaguca

SEQ ID NO: 2628866 - RNA, 19 nt, Artificial Sequence
  Description of Artificial Sequence: Synthetic oligonucleotide
acuguagaucaucagggaa

SEQ ID NO: 2628867 - RNA, 19 nt, Artificial Sequence
  Description of Artificial Sequence: Synthetic oligonucleotide
uaccagacgucccagucac

SEQ ID NO: 2628868 - RNA, 19 nt, Artificial Sequence
  Description of Artificial Sequence: Synthetic oligonucleotide
acuucaccccaugagcacc

SEQ ID NO: 2628869 - RNA, 19 nt, Artificial Sequence
  Description of Artificial Sequence: Synthetic oligonucleotide
uuaccaauugggucuugug

SEQ ID NO: 2628870 - RNA, 19 nt, Artificial Sequence
  Description of Artificial Sequence: Synthetic oligonucleotide
ucuucugaguagugggagc

SEQ ID NO: 2628871 - RNA, 19 nt, Artificial Sequence
  Description of Artificial Sequence: Synthetic oligonucleotide
gguuucugaaaacagucac

SEQ ID NO: 2628872 - RNA, 19 nt, Artificial Sequence
  Description of Artificial Sequence: Synthetic oligonucleotide
aagcucacuauacugccuu

SEQ ID NO: 2628873 - RNA, 19 nt, Artificial Sequence
  Description of Artificial Sequence: Synthetic oligonucleotide
ucaaguccuucacuucacc

SEQ ID NO: 2628874 - RNA, 19 nt, Artificial Sequence
  Description of Artificial Sequence: Synthetic oligonucleotide
caguagagcacaagguuac

SEQ ID NO: 2628875 - RNA, 19 nt, Artificial Sequence
  Description of Artificial Sequence: Synthetic oligonucleotide
gaaucuguuugguguccgg

SEQ ID NO: 2628876 - RNA, 19 nt, Artificial Sequence
  Description of Artificial Sequence: Synthetic oligonucleotide
uccaacuccuuccucccgc

SEQ ID NO: 2628877 - RNA, 19 nt, Artificial Sequence
  Description of Artificial Sequence: Synthetic oligonucleotide
gaucaucagggaauggggc

SEQ ID NO: 2628878 - RNA, 19 nt, Artificial Sequence
  Description of Artificial Sequence: Synthetic oligonucleotide
uucuugccugaccuaaucu

SEQ ID NO: 2628879 - RNA, 19 nt, Artificial Sequence
  Description of Artificial Sequence: Synthetic oligonucleotide
cauggugccaugugacucc

SEQ ID NO: 2628880 - RNA, 19 nt, Artificial Sequence
  Description of Artificial Sequence: Synthetic oligonucleotide
ugaccuaaucugccaaugu

SEQ ID NO: 2628881 - RNA, 19 nt, Artificial Sequence
  Description of Artificial Sequence: Synthetic oligonucleotide
guuucugaaaacagucacc

SEQ ID NO: 2628882 - RNA, 19 nt, Artificial Sequence
  Description of Artificial Sequence: Synthetic oligonucleotide
ucuucaagggcuggaagcu

SEQ ID NO: 2628883 - RNA, 19 nt, Artificial Sequence
  Description of Artificial Sequence: Synthetic oligonucleotide
aggguugguuucugaaaac

SEQ ID NO: 2628884 - RNA, 19 nt, Artificial Sequence
  Description of Artificial Sequence: Synthetic oligonucleotide
agaguuguguguucagggu

SEQ ID NO: 2628885 - RNA, 19 nt, Artificial Sequence
  Description of Artificial Sequence: Synthetic oligonucleotide
guaggugggaaugaucagc

SEQ ID NO: 2628886 - RNA, 19 nt, Artificial Sequence
  Description of Artificial Sequence: Synthetic oligonucleotide
acagaguuguguguucagg

SEQ ID NO: 2628887 - RNA, 19 nt, Artificial Sequence
  Description of Artificial Sequence: Synthetic oligonucleotide
uugccugaccuaaucugcc

SEQ ID NO: 2628888 - RNA, 19 nt, Artificial Sequence
  Description of Artificial Sequence: Synthetic oligonucleotide
gagaaauaguaggcguagg

SEQ ID NO: 2628889 - RNA, 19 nt, Artificial Sequence
  Description of Artificial Sequence: Synthetic oligonucleotide
cucacuauacugccuuggc

SEQ ID NO: 2628890 - RNA, 19 nt, Artificial Sequence
  Description of Artificial Sequence: Synthetic oligonucleotide
ucaguaacacggucuggca

SEQ ID NO: 2628891 - RNA, 19 nt, Artificial Sequence
  Description of Artificial Sequence: Synthetic oligonucleotide
agagcacaagguuaccaga

SEQ ID NO: 2628892 - RNA, 19 nt, Artificial Sequence
  Description of Artificial Sequence: Synthetic oligonucleotide
accguaaucaguacuaaaa

SEQ ID NO: 2628893 - RNA, 19 nt, Artificial Sequence
  Description of Artificial Sequence: Synthetic oligonucleotide
caccucugagccaaugacc

SEQ ID NO: 2628894 - RNA, 19 nt, Artificial Sequence
  Description of Artificial Sequence: Synthetic oligonucleotide
auguuccugauggucuucc

SEQ ID NO: 2628895 - RNA, 19 nt, Artificial Sequence
  Description of Artificial Sequence: Synthetic oligonucleotide
acuccuaagucaucacugu

SEQ ID NO: 2628896 - RNA, 19 nt, Artificial Sequence
  Description of Artificial Sequence: Synthetic oligonucleotide
acacgggaagcagaggaac

SEQ ID NO: 2628897 - RNA, 19 nt, Artificial Sequence
  Description of Artificial Sequence: Synthetic oligonucleotide
caagguuaccagacguccc

SEQ ID NO: 2628898 - RNA, 19 nt, Artificial Sequence
  Description of Artificial Sequence: Synthetic oligonucleotide
ucaggguugguuucugaaa

SEQ ID NO: 2628899 - RNA, 19 nt, Artificial Sequence
  Description of Artificial Sequence: Synthetic oligonucleotide
agucaccguaaucaguacu

SEQ ID NO: 2628900 - RNA, 19 nt, Artificial Sequence
  Description of Artificial Sequence: Synthetic oligonucleotide
ucccgcuccagaaaacugu

SEQ ID NO: 2628901 - RNA, 19 nt, Artificial Sequence
  Description of Artificial Sequence: Synthetic oligonucleotide
cuuccaacuccuuccuccc

SEQ ID NO: 2628902 - RNA, 19 nt, Artificial Sequence
  Description of Artificial Sequence: Synthetic oligonucleotide
agaaaacuguccagcagag

SEQ ID NO: 2628903 - RNA, 19 nt, Artificial Sequence
  Description of Artificial Sequence: Synthetic oligonucleotide
ugccauggugccaugugac

SEQ ID NO: 2628904 - RNA, 19 nt, Artificial Sequence
  Description of Artificial Sequence: Synthetic oligonucleotide
gagcagcuuuaccaauugg

SEQ ID NO: 2628905 - RNA, 19 nt, Artificial Sequence
  Description of Artificial Sequence: Synthetic oligonucleotide
ucugaguagugggagcagc

SEQ ID NO: 2628906 - RNA, 19 nt, Artificial Sequence
  Description of Artificial Sequence: Synthetic oligonucleotide
aagauucugcucggaaucu

SEQ ID NO: 2628907 - RNA, 19 nt, Artificial Sequence
  Description of Artificial Sequence: Synthetic oligonucleotide
uccugacugcacaggaagc

SEQ ID NO: 2628908 - RNA, 19 nt, Artificial Sequence
  Description of Artificial Sequence: Synthetic oligonucleotide
gccaauguucaguaacacg

SEQ ID NO: 2628909 - RNA, 19 nt, Artificial Sequence
  Description of Artificial Sequence: Synthetic oligonucleotide
agaggaaccugcgugagaa

SEQ ID NO: 2628910 - RNA, 19 nt, Artificial Sequence
  Description of Artificial Sequence: Synthetic oligonucleotide
aguagagcacaagguuacc

SEQ ID NO: 2628911 - RNA, 19 nt, Artificial Sequence
  Description of Artificial Sequence: Synthetic oligonucleotide
ggaagcucacuauacugcc

SEQ ID NO: 2628912 - RNA, 19 nt, Artificial Sequence
  Description of Artificial Sequence: Synthetic oligonucleotide
uuuaccaauugggucuugu

SEQ ID NO: 2628913 - RNA, 19 nt, Artificial Sequence
  Description of Artificial Sequence: Synthetic oligonucleotide
ugggcccacagcaaaugug

SEQ ID NO: 2628914 - RNA, 19 nt, Artificial Sequence
  Description of Artificial Sequence: Synthetic oligonucleotide
ugacugaacacgggaagca

SEQ ID NO: 2628915 - RNA, 19 nt, Artificial Sequence
  Description of Artificial Sequence: Synthetic oligonucleotide
cagcuuuaccaauuggguc

SEQ ID NO: 2628916 - RNA, 19 nt, Artificial Sequence
  Description of Artificial Sequence: Synthetic oligonucleotide
aucaguacuaaaagauucu

SEQ ID NO: 2628917 - RNA, 19 nt, Artificial Sequence
  Description of Artificial Sequence: Synthetic oligonucleotide
acgggcagcauucuugccu

SEQ ID NO: 2628918 - RNA, 19 nt, Artificial Sequence
  Description of Artificial Sequence: Synthetic oligonucleotide
cuaaucugccaauguucag

SEQ ID NO: 2628919 - RNA, 19 nt, Artificial Sequence
  Description of Artificial Sequence: Synthetic oligonucleotide
cuuggcacuccccugucac

SEQ ID NO: 2628920 - RNA, 19 nt, Artificial Sequence
  Description of Artificial Sequence: Synthetic oligonucleotide
gagacgggcagcauucuug

SEQ ID NO: 2628921 - RNA, 19 nt, Artificial Sequence
  Description of Artificial Sequence: Synthetic oligonucleotide
aauugggucuugugagaau

SEQ ID NO: 2628922 - RNA, 19 nt, Artificial Sequence
  Description of Artificial Sequence: Synthetic oligonucleotide
guuaccagacgucccaguc

SEQ ID NO: 2628923 - RNA, 19 nt, Artificial Sequence
  Description of Artificial Sequence: Synthetic oligonucleotide
ugaaaacagucaccguaau

SEQ ID NO: 2628924 - RNA, 19 nt, Artificial Sequence
  Description of Artificial Sequence: Synthetic oligonucleotide
uguguucaggguugguuuc

SEQ ID NO: 2628925 - RNA, 19 nt, Artificial Sequence
  Description of Artificial Sequence: Synthetic oligonucleotide
auggggcuugacugaacac

SEQ ID NO: 2628926 - RNA, 19 nt, Artificial Sequence
  Description of Artificial Sequence: Synthetic oligonucleotide
uuccaacuccuuccucccg

SEQ ID NO: 2628927 - RNA, 19 nt, Artificial Sequence
  Description of Artificial Sequence: Synthetic oligonucleotide
aguuguguguucaggguug

SEQ ID NO: 2628928 - RNA, 19 nt, Artificial Sequence
  Description of Artificial Sequence: Synthetic oligonucleotide
augagcacccagcauccug

SEQ ID NO: 2628929 - RNA, 19 nt, Artificial Sequence
  Description of Artificial Sequence: Synthetic oligonucleotide
cacuucugccacuuggcac

SEQ ID NO: 2628930 - RNA, 19 nt, Artificial Sequence
  Description of Artificial Sequence: Synthetic oligonucleotide
ugccacuuggcacuccccu

SEQ ID NO: 2628931 - RNA, 19 nt, Artificial Sequence
  Description of Artificial Sequence: Synthetic oligonucleotide
agccauguuccugaugguc

SEQ ID NO: 2628932 - RNA, 19 nt, Artificial Sequence
  Description of Artificial Sequence: Synthetic oligonucleotide
gagcacaagguuaccagac

SEQ ID NO: 2628933 - RNA, 19 nt, Artificial Sequence
  Description of Artificial Sequence: Synthetic oligonucleotide
uugugagaauggcaucuuc

SEQ ID NO: 2628934 - RNA, 19 nt, Artificial Sequence
  Description of Artificial Sequence: Synthetic oligonucleotide
ucacagaguuguguguuca

SEQ ID NO: 2628935 - RNA, 19 nt, Artificial Sequence
  Description of Artificial Sequence: Synthetic oligonucleotide
cacgggaagcagaggaacc

SEQ ID NO: 2628936 - RNA, 19 nt, Artificial Sequence
  Description of Artificial Sequence: Synthetic oligonucleotide
acgucccagucacuucugc

SEQ ID NO: 2628937 - RNA, 19 nt, Artificial Sequence
  Description of Artificial Sequence: Synthetic oligonucleotide
auguucaguaacacggucu

SEQ ID NO: 2628938 - RNA, 19 nt, Artificial Sequence
  Description of Artificial Sequence: Synthetic oligonucleotide
aagagccauguuccugaug

SEQ ID NO: 2628939 - RNA, 19 nt, Artificial Sequence
  Description of Artificial Sequence: Synthetic oligonucleotide
accucugagccaaugaccu

SEQ ID NO: 2628940 - RNA, 19 nt, Artificial Sequence
  Description of Artificial Sequence: Synthetic oligonucleotide
aacagucaccguaaucagu

SEQ ID NO: 2628941 - RNA, 19 nt, Artificial Sequence
  Description of Artificial Sequence: Synthetic oligonucleotide
cucggaaucuguuuggugu

SEQ ID NO: 2628942 - RNA, 19 nt, Artificial Sequence
  Description of Artificial Sequence: Synthetic oligonucleotide
cacaagguuaccagacguc

SEQ ID NO: 2628943 - RNA, 19 nt, Artificial Sequence
  Description of Artificial Sequence: Synthetic oligonucleotide
ucggaaucuguuugguguc

SEQ ID NO: 2628944 - RNA, 19 nt, Artificial Sequence
  Description of Artificial Sequence: Synthetic oligonucleotide
augaucagccuuccugacu

SEQ ID NO: 2628945 - RNA, 19 nt, Artificial Sequence
  Description of Artificial Sequence: Synthetic oligonucleotide
cucuucugaguagugggag

SEQ ID NO: 2628946 - RNA, 19 nt, Artificial Sequence
  Description of Artificial Sequence: Synthetic oligonucleotide
acagucaccguaaucagua

SEQ ID NO: 2628947 - RNA, 19 nt, Artificial Sequence
  Description of Artificial Sequence: Synthetic oligonucleotide
ccguaaucaguacuaaaag

SEQ ID NO: 2628948 - RNA, 19 nt, Artificial Sequence
  Description of Artificial Sequence: Synthetic oligonucleotide
ucccagucacuucugccac

SEQ ID NO: 2628949 - RNA, 19 nt, Artificial Sequence
  Description of Artificial Sequence: Synthetic oligonucleotide
caguaacacggucuggcac

SEQ ID NO: 2628950 - RNA, 19 nt, Artificial Sequence
  Description of Artificial Sequence: Synthetic oligonucleotide
ugaacacgggaagcagagg

SEQ ID NO: 2628951 - RNA, 19 nt, Artificial Sequence
  Description of Artificial Sequence: Synthetic oligonucleotide
gguugguuucugaaaacag

SEQ ID NO: 2628952 - RNA, 19 nt, Artificial Sequence
  Description of Artificial Sequence: Synthetic oligonucleotide
cuauacugccuuggcagcc

SEQ ID NO: 2628953 - RNA, 19 nt, Artificial Sequence
  Description of Artificial Sequence: Synthetic oligonucleotide
uccugacugcagcuggaug

SEQ ID NO: 2628954 - RNA, 19 nt, Artificial Sequence
  Description of Artificial Sequence: Synthetic oligonucleotide
uucugaaaacagucaccgu

SEQ ID NO: 2628955 - RNA, 19 nt, Artificial Sequence
  Description of Artificial Sequence: Synthetic oligonucleotide
gugagaauggcaucuucaa

SEQ ID NO: 2628956 - RNA, 19 nt, Artificial Sequence
  Description of Artificial Sequence: Synthetic oligonucleotide
cugcucggaaucuguuugg

SEQ ID NO: 2628957 - RNA, 19 nt, Artificial Sequence
  Description of Artificial Sequence: Synthetic oligonucleotide
ugggucuugugagaauggc

SEQ ID NO: 2628958 - RNA, 19 nt, Artificial Sequence
  Description of Artificial Sequence: Synthetic oligonucleotide
gcaaauguggcccagugcu

SEQ ID NO: 2628959 - RNA, 19 nt, Artificial Sequence
  Description of Artificial Sequence: Synthetic oligonucleotide
uguccgggcauugcaguag

SEQ ID NO: 2628960 - RNA, 19 nt, Artificial Sequence
  Description of Artificial Sequence: Synthetic oligonucleotide
guaggcguaggugggaaug

SEQ ID NO: 2628961 - RNA, 19 nt, Artificial Sequence
  Description of Artificial Sequence: Synthetic oligonucleotide
uagugggagcagcuuuacc

SEQ ID NO: 2628962 - RNA, 19 nt, Artificial Sequence
  Description of Artificial Sequence: Synthetic oligonucleotide
cagccuuccugacugcagc

SEQ ID NO: 2628963 - RNA, 19 nt, Artificial Sequence
  Description of Artificial Sequence: Synthetic oligonucleotide
ugucaccuggggcccaaug

SEQ ID NO: 2628964 - RNA, 19 nt, Artificial Sequence
  Description of Artificial Sequence: Synthetic oligonucleotide
uguggcccagugcuucacc

SEQ ID NO: 2628965 - RNA, 19 nt, Artificial Sequence
  Description of Artificial Sequence: Synthetic oligonucleotide
uuugguguccgggcauugc

SEQ ID NO: 2628966 - RNA, 19 nt, Artificial Sequence
  Description of Artificial Sequence: Synthetic oligonucleotide
cacagaguuguguguucag

SEQ ID NO: 2628967 - RNA, 19 nt, Artificial Sequence
  Description of Artificial Sequence: Synthetic oligonucleotide
ccugcgugagaaauaguag

SEQ ID NO: 2628968 - RNA, 19 nt, Artificial Sequence
  Description of Artificial Sequence: Synthetic oligonucleotide
ugccaauguucaguaacac

SEQ ID NO: 2628969 - RNA, 19 nt, Artificial Sequence
  Description of Artificial Sequence: Synthetic oligonucleotide
accugcgugagaaauagua

SEQ ID NO: 2628970 - RNA, 19 nt, Artificial Sequence
  Description of Artificial Sequence: Synthetic oligonucleotide
gggcccacagcaaaugugg

SEQ ID NO: 2628971 - RNA, 19 nt, Artificial Sequence
  Description of Artificial Sequence: Synthetic oligonucleotide
cugaccuaaucugccaaug

SEQ ID NO: 2628972 - RNA, 19 nt, Artificial Sequence
  Description of Artificial Sequence: Synthetic oligonucleotide
ugccugaccuaaucugcca

SEQ ID NO: 2628973 - RNA, 19 nt, Artificial Sequence
  Description of Artificial Sequence: Synthetic oligonucleotide
guuguguguucaggguugg

SEQ ID NO: 2628974 - RNA, 19 nt, Artificial Sequence
  Description of Artificial Sequence: Synthetic oligonucleotide
guagaucaucagggaaugg

SEQ ID NO: 2628975 - RNA, 19 nt, Artificial Sequence
  Description of Artificial Sequence: Synthetic oligonucleotide
agcagagacgggcagcauu

SEQ ID NO: 2628976 - RNA, 19 nt, Artificial Sequence
  Description of Artificial Sequence: Synthetic oligonucleotide
uagcggggcucacagaguu

SEQ ID NO: 2628977 - RNA, 19 nt, Artificial Sequence
  Description of Artificial Sequence: Synthetic oligonucleotide
caggguugguuucugaaaa

SEQ ID NO: 2628978 - RNA, 19 nt, Artificial Sequence
  Description of Artificial Sequence: Synthetic oligonucleotide
guagagcacaagguuacca

SEQ ID NO: 2628979 - RNA, 19 nt, Artificial Sequence
  Description of Artificial Sequence: Synthetic oligonucleotide
gucaucacuguagaucauc

SEQ ID NO: 2628980 - RNA, 19 nt, Artificial Sequence
  Description of Artificial Sequence: Synthetic oligonucleotide
aggaaccugcgugagaaau

SEQ ID NO: 2628981 - RNA, 19 nt, Artificial Sequence
  Description of Artificial Sequence: Synthetic oligonucleotide
gugggaaugaucagccuuc

SEQ ID NO: 2628982 - RNA, 19 nt, Artificial Sequence
  Description of Artificial Sequence: Synthetic oligonucleotide
uucugaguagugggagcag

SEQ ID NO: 2628983 - RNA, 19 nt, Artificial Sequence
  Description of Artificial Sequence: Synthetic oligonucleotide
ggggcuugacugaacacgg

SEQ ID NO: 2628984 - RNA, 19 nt, Artificial Sequence
  Description of Artificial Sequence: Synthetic oligonucleotide
cccacagcaaauguggccc

SEQ ID NO: 2628985 - RNA, 19 nt, Artificial Sequence
  Description of Artificial Sequence: Synthetic oligonucleotide
uucugcucggaaucuguuu

SEQ ID NO: 2628986 - RNA, 19 nt, Artificial Sequence
  Description of Artificial Sequence: Synthetic oligonucleotide
cccaugagcacccagcauc

SEQ ID NO: 2628987 - RNA, 19 nt, Artificial Sequence
  Description of Artificial Sequence: Synthetic oligonucleotide
agggcuggaagcucacuau

SEQ ID NO: 2628988 - RNA, 19 nt, Artificial Sequence
  Description of Artificial Sequence: Synthetic oligonucleotide
gcgugagaaauaguaggcg

SEQ ID NO: 2628989 - RNA, 19 nt, Artificial Sequence
  Description of Artificial Sequence: Synthetic oligonucleotide
uuggcacuccccugucacc

SEQ ID NO: 2628990 - RNA, 19 nt, Artificial Sequence
  Description of Artificial Sequence: Synthetic oligonucleotide
cauugcaguagagcacaag

SEQ ID NO: 2628991 - RNA, 19 nt, Artificial Sequence
  Description of Artificial Sequence: Synthetic oligonucleotide
ccuaaucugccaauguuca

SEQ ID NO: 2628992 - RNA, 19 nt, Artificial Sequence
  Description of Artificial Sequence: Synthetic oligonucleotide
cucacagaguuguguguuc

SEQ ID NO: 2628993 - RNA, 19 nt, Artificial Sequence
  Description of Artificial Sequence: Synthetic oligonucleotide
ugggaaugaucagccuucc

SEQ ID NO: 2628994 - RNA, 19 nt, Artificial Sequence
  Description of Artificial Sequence: Synthetic oligonucleotide
acugaacacgggaagcaga

SEQ ID NO: 2628995 - RNA, 19 nt, Artificial Sequence
  Description of Artificial Sequence: Synthetic oligonucleotide
cuguagaucaucagggaau

SEQ ID NO: 2628996 - RNA, 19 nt, Artificial Sequence
  Description of Artificial Sequence: Synthetic oligonucleotide
cagucaaguccuucacuuc

SEQ ID NO: 2628997 - RNA, 19 nt, Artificial Sequence
  Description of Artificial Sequence: Synthetic oligonucleotide
caccuggggcccaaugagc

SEQ ID NO: 2628998 - RNA, 19 nt, Artificial Sequence
  Description of Artificial Sequence: Synthetic oligonucleotide
gccauagcggggcucacag

SEQ ID NO: 2628999 - RNA, 19 nt, Artificial Sequence
  Description of Artificial Sequence: Synthetic oligonucleotide
agcucacuauacugccuug

SEQ ID NO: 2629000 - RNA, 19 nt, Artificial Sequence
  Description of Artificial Sequence: Synthetic oligonucleotide
agauucugcucggaaucug

SEQ ID NO: 2629001 - RNA, 19 nt, Artificial Sequence
  Description of Artificial Sequence: Synthetic oligonucleotide
ugagcuugccauggugcca

SEQ ID NO: 2629002 - RNA, 19 nt, Artificial Sequence
  Description of Artificial Sequence: Synthetic oligonucleotide
uggcacuccccugucaccu

SEQ ID NO: 2629003 - RNA, 19 nt, Artificial Sequence
  Description of Artificial Sequence: Synthetic oligonucleotide
caugugacuccuaagucau

SEQ ID NO: 2629004 - RNA, 19 nt, Artificial Sequence
  Description of Artificial Sequence: Synthetic oligonucleotide
ggaaucuguuugguguccg

SEQ ID NO: 2629005 - RNA, 19 nt, Artificial Sequence
  Description of Artificial Sequence: Synthetic oligonucleotide
ucaccguaaucaguacuaa

SEQ ID NO: 2629006 - RNA, 19 nt, Artificial Sequence
  Description of Artificial Sequence: Synthetic oligonucleotide
cacuguagaucaucaggga

SEQ ID NO: 2629007 - RNA, 19 nt, Artificial Sequence
  Description of Artificial Sequence: Synthetic oligonucleotide
cagcauccugacugcacag

SEQ ID NO: 2629008 - RNA, 19 nt, Artificial Sequence
  Description of Artificial Sequence: Synthetic oligonucleotide
ccaugugacuccuaaguca

SEQ ID NO: 2629009 - RNA, 19 nt, Artificial Sequence
  Description of Artificial Sequence: Synthetic oligonucleotide
gaucagccuuccugacugc

SEQ ID NO: 2629010 - RNA, 19 nt, Artificial Sequence
  Description of Artificial Sequence: Synthetic oligonucleotide
uaggcguaggugggaauga

SEQ ID NO: 2629011 - RNA, 19 nt, Artificial Sequence
  Description of Artificial Sequence: Synthetic oligonucleotide
gucaccguaaucaguacua

SEQ ID NO: 2629012 - RNA, 19 nt, Artificial Sequence
  Description of Artificial Sequence: Synthetic oligonucleotide
cuggggcccaaugagcuug

SEQ ID NO: 2629013 - RNA, 19 nt, Artificial Sequence
  Description of Artificial Sequence: Synthetic oligonucleotide
acgggaagcagaggaaccu

SEQ ID NO: 2629014 - RNA, 19 nt, Artificial Sequence
  Description of Artificial Sequence: Synthetic oligonucleotide
gaagcagaggaaccugcgu

SEQ ID NO: 2629015 - RNA, 19 nt, Artificial Sequence
  Description of Artificial Sequence: Synthetic oligonucleotide
gucuugugagaauggcauc

SEQ ID NO: 2629016 - RNA, 19 nt, Artificial Sequence
  Description of Artificial Sequence: Synthetic oligonucleotide
gugccaugugacuccuaag

SEQ ID NO: 2629017 - RNA, 19 nt, Artificial Sequence
  Description of Artificial Sequence: Synthetic oligonucleotide
ggcauugcaguagagcaca

SEQ ID NO: 2629018 - RNA, 19 nt, Artificial Sequence
  Description of Artificial Sequence: Synthetic oligonucleotide
gcguaggugggaaugauca

SEQ ID NO: 2629019 - RNA, 19 nt, Artificial Sequence
  Description of Artificial Sequence: Synthetic oligonucleotide
gugacuccuaagucaucac

SEQ ID NO: 2629020 - RNA, 19 nt, Artificial Sequence
  Description of Artificial Sequence: Synthetic oligonucleotide
gcucacuauacugccuugg

SEQ ID NO: 2629021 - RNA, 19 nt, Artificial Sequence
  Description of Artificial Sequence: Synthetic oligonucleotide
ugcucggaaucuguuuggu

SEQ ID NO: 2629022 - RNA, 19 nt, Artificial Sequence
  Description of Artificial Sequence: Synthetic oligonucleotide
uccgggcauugcaguagag

SEQ ID NO: 2629023 - RNA, 19 nt, Artificial Sequence
  Description of Artificial Sequence: Synthetic oligonucleotide
gaccuaaucugccaauguu

SEQ ID NO: 2629024 - RNA, 19 nt, Artificial Sequence
  Description of Artificial Sequence: Synthetic oligonucleotide
gugagaaauaguaggcgua

SEQ ID NO: 2629025 - RNA, 19 nt, Artificial Sequence
  Description of Artificial Sequence: Synthetic oligonucleotide
cacccagcauccugacugc

SEQ ID NO: 2629026 - RNA, 19 nt, Artificial Sequence
  Description of Artificial Sequence: Synthetic oligonucleotide
ggcuugacugaacacggga

SEQ ID NO: 2629027 - RNA, 19 nt, Artificial Sequence
  Description of Artificial Sequence: Synthetic oligonucleotide
gaguuguguguucaggguu

SEQ ID NO: 2629028 - RNA, 19 nt, Artificial Sequence
  Description of Artificial Sequence: Synthetic oligonucleotide
caggaagcagagacgggca

SEQ ID NO: 2629029 - RNA, 19 nt, Artificial Sequence
  Description of Artificial Sequence: Synthetic oligonucleotide
auaguaggcguagguggga

SEQ ID NO: 2629030 - RNA, 19 nt, Artificial Sequence
  Description of Artificial Sequence: Synthetic oligonucleotide
gcagcauucuugccugacc

SEQ ID NO: 2629031 - RNA, 19 nt, Artificial Sequence
  Description of Artificial Sequence: Synthetic oligonucleotide
acuuggcacuccccuguca

SEQ ID NO: 2629032 - RNA, 19 nt, Artificial Sequence
  Description of Artificial Sequence: Synthetic oligonucleotide
cuaaaagauucugcucgga

SEQ ID NO: 2629033 - RNA, 19 nt, Artificial Sequence
  Description of Artificial Sequence: Synthetic oligonucleotide
uggcaucuucaagggcugg

SEQ ID NO: 2629034 - RNA, 19 nt, Artificial Sequence
  Description of Artificial Sequence: Synthetic oligonucleotide
ggugccaugugacuccuaa

SEQ ID NO: 2629035 - RNA, 19 nt, Artificial Sequence
  Description of Artificial Sequence: Synthetic oligonucleotide
ugaguagugggagcagcuu

SEQ ID NO: 2629036 - RNA, 19 nt, Artificial Sequence
  Description of Artificial Sequence: Synthetic oligonucleotide
uaguaggcguaggugggaa

SEQ ID NO: 2629037 - RNA, 19 nt, Artificial Sequence
  Description of Artificial Sequence: Synthetic oligonucleotide
ccuuggcagccauagcggg

SEQ ID NO: 2629038 - RNA, 19 nt, Artificial Sequence
  Description of Artificial Sequence: Synthetic oligonucleotide
accuggggcccaaugagcu

SEQ ID NO: 2629039 - RNA, 19 nt, Artificial Sequence
  Description of Artificial Sequence: Synthetic oligonucleotide
ccuaagucaucacuguaga

SEQ ID NO: 2629040 - RNA, 19 nt, Artificial Sequence
  Description of Artificial Sequence: Synthetic oligonucleotide
aguagugggagcagcuuua

SEQ ID NO: 2629041 - RNA, 19 nt, Artificial Sequence
  Description of Artificial Sequence: Synthetic oligonucleotide
gauucugcucggaaucugu

SEQ ID NO: 2629042 - RNA, 19 nt, Artificial Sequence
  Description of Artificial Sequence: Synthetic oligonucleotide
gacgggcagcauucuugcc

SEQ ID NO: 2629043 - RNA, 19 nt, Artificial Sequence
  Description of Artificial Sequence: Synthetic oligonucleotide
agguuaccagacgucccag

SEQ ID NO: 2629044 - RNA, 19 nt, Artificial Sequence
  Description of Artificial Sequence: Synthetic oligonucleotide
ggaugccauggccugggcc

SEQ ID NO: 2629045 - RNA, 19 nt, Artificial Sequence
  Description of Artificial Sequence: Synthetic oligonucleotide
agccaaugaccuccucagu

SEQ ID NO: 2629046 - RNA, 19 nt, Artificial Sequence
  Description of Artificial Sequence: Synthetic oligonucleotide
aguaggcguaggugggaau

SEQ ID NO: 2629047 - RNA, 19 nt, Artificial Sequence
  Description of Artificial Sequence: Synthetic oligonucleotide
caauguucaguaacacggu

SEQ ID NO: 2629048 - RNA, 19 nt, Artificial Sequence
  Description of Artificial Sequence: Synthetic oligonucleotide
gccaugugacuccuaaguc

SEQ ID NO: 2629049 - RNA, 19 nt, Artificial Sequence
  Description of Artificial Sequence: Synthetic oligonucleotide
uggggcccaaugagcuugc

SEQ ID NO: 2629050 - RNA, 19 nt, Artificial Sequence
  Description of Artificial Sequence: Synthetic oligonucleotide
agcauucuugccugaccua

SEQ ID NO: 2629051 - RNA, 19 nt, Artificial Sequence
  Description of Artificial Sequence: Synthetic oligonucleotide
caauugggucuugugagaa

SEQ ID NO: 2629052 - RNA, 19 nt, Artificial Sequence
  Description of Artificial Sequence: Synthetic oligonucleotide
aggugggaaugaucagccu

SEQ ID NO: 2629053 - RNA, 19 nt, Artificial Sequence
  Description of Artificial Sequence: Synthetic oligonucleotide
ccaaugaccuccucaguca

SEQ ID NO: 2629054 - RNA, 19 nt, Artificial Sequence
  Description of Artificial Sequence: Synthetic oligonucleotide
agagacgggcagcauucuu

SEQ ID NO: 2629055 - RNA, 19 nt, Artificial Sequence
  Description of Artificial Sequence: Synthetic oligonucleotide
ggguugguuucugaaaaca

SEQ ID NO: 2629056 - RNA, 19 nt, Artificial Sequence
  Description of Artificial Sequence: Synthetic oligonucleotide
gccuuggcagccauagcgg

SEQ ID NO: 2629057 - RNA, 19 nt, Artificial Sequence
  Description of Artificial Sequence: Synthetic oligonucleotide
guguguucaggguugguuu

SEQ ID NO: 2629058 - RNA, 19 nt, Artificial Sequence
  Description of Artificial Sequence: Synthetic oligonucleotide
cagacgucccagucacuuc

SEQ ID NO: 2629059 - RNA, 19 nt, Artificial Sequence
  Description of Artificial Sequence: Synthetic oligonucleotide
gggcucuucugaguagugg

SEQ ID NO: 2629060 - RNA, 19 nt, Artificial Sequence
  Description of Artificial Sequence: Synthetic oligonucleotide
gggaauggggcuugacuga

SEQ ID NO: 2629061 - RNA, 19 nt, Artificial Sequence
  Description of Artificial Sequence: Synthetic oligonucleotide
guaacacggucuggcacac

SEQ ID NO: 2629062 - RNA, 19 nt, Artificial Sequence
  Description of Artificial Sequence: Synthetic oligonucleotide
cagagggcucuucugagua

SEQ ID NO: 2629063 - RNA, 19 nt, Artificial Sequence
  Description of Artificial Sequence: Synthetic oligonucleotide
uguuugguguccgggcauu

SEQ ID NO: 2629064 - RNA, 19 nt, Artificial Sequence
  Description of Artificial Sequence: Synthetic oligonucleotide
guucaggguugguuucuga

SEQ ID NO: 2629065 - RNA, 19 nt, Artificial Sequence
  Description of Artificial Sequence: Synthetic oligonucleotide
cuucaagggcuggaagcuc

SEQ ID NO: 2629066 - RNA, 19 nt, Artificial Sequence
  Description of Artificial Sequence: Synthetic oligonucleotide
caucagggaauggggcuug

SEQ ID NO: 2629067 - RNA, 19 nt, Artificial Sequence
  Description of Artificial Sequence: Synthetic oligonucleotide
uggaugccauggccugggc

SEQ ID NO: 2629068 - RNA, 19 nt, Artificial Sequence
  Description of Artificial Sequence: Synthetic oligonucleotide
guagugggagcagcuuuac

SEQ ID NO: 2629069 - RNA, 19 nt, Artificial Sequence
  Description of Artificial Sequence: Synthetic oligonucleotide
ggcccaaugagcuugccau

SEQ ID NO: 2629070 - RNA, 19 nt, Artificial Sequence
  Description of Artificial Sequence: Synthetic oligonucleotide
cacuccccugucaccuggg

SEQ ID NO: 2629071 - RNA, 19 nt, Artificial Sequence
  Description of Artificial Sequence: Synthetic oligonucleotide
caccguaaucaguacuaaa

SEQ ID NO: 2629072 - RNA, 19 nt, Artificial Sequence
  Description of Artificial Sequence: Synthetic oligonucleotide
cacagcaaauguggcccag

SEQ ID NO: 2629073 - RNA, 19 nt, Artificial Sequence
  Description of Artificial Sequence: Synthetic oligonucleotide
ucagggaauggggcuugac

SEQ ID NO: 2629074 - RNA, 19 nt, Artificial Sequence
  Description of Artificial Sequence: Synthetic oligonucleotide
ggucuugugagaauggcau

SEQ ID NO: 2629075 - RNA, 19 nt, Artificial Sequence
  Description of Artificial Sequence: Synthetic oligonucleotide
cuuccugacugcagcugga

SEQ ID NO: 2629076 - RNA, 19 nt, Artificial Sequence
  Description of Artificial Sequence: Synthetic oligonucleotide
cugccacuuggcacucccc

SEQ ID NO: 2629077 - RNA, 19 nt, Artificial Sequence
  Description of Artificial Sequence: Synthetic oligonucleotide
aucugccaauguucaguaa

SEQ ID NO: 2629078 - RNA, 19 nt, Artificial Sequence
  Description of Artificial Sequence: Synthetic oligonucleotide
gcucggaaucuguuuggug

SEQ ID NO: 2629079 - RNA, 19 nt, Artificial Sequence
  Description of Artificial Sequence: Synthetic oligonucleotide
gaauggggcuugacugaac

SEQ ID NO: 2629080 - RNA, 19 nt, Artificial Sequence
  Description of Artificial Sequence: Synthetic oligonucleotide
ggcuggaagcucacuauac

SEQ ID NO: 2629081 - RNA, 19 nt, Artificial Sequence
  Description of Artificial Sequence: Synthetic oligonucleotide
gcaguagagcacaagguua

SEQ ID NO: 2629082 - RNA, 19 nt, Artificial Sequence
  Description of Artificial Sequence: Synthetic oligonucleotide
gagcacccagcauccugac

SEQ ID NO: 2629083 - RNA, 19 nt, Artificial Sequence
  Description of Artificial Sequence: Synthetic oligonucleotide
gcagagacgggcagcauuc

SEQ ID NO: 2629084 - RNA, 19 nt, Artificial Sequence
  Description of Artificial Sequence: Synthetic oligonucleotide
guuugguguccgggcauug

SEQ ID NO: 2629085 - RNA, 19 nt, Artificial Sequence
  Description of Artificial Sequence: Synthetic oligonucleotide
cgggcauugcaguagagca

SEQ ID NO: 2629086 - RNA, 19 nt, Artificial Sequence
  Description of Artificial Sequence: Synthetic oligonucleotide
cugaguagugggagcagcu

SEQ ID NO: 2629087 - RNA, 19 nt, Artificial Sequence
  Description of Artificial Sequence: Synthetic oligonucleotide
cagggaauggggcuugacu

SEQ ID NO: 2629088 - RNA, 19 nt, Artificial Sequence
  Description of Artificial Sequence: Synthetic oligonucleotide
gcacaagguuaccagacgu

SEQ ID NO: 2629089 - RNA, 19 nt, Artificial Sequence
  Description of Artificial Sequence: Synthetic oligonucleotide
cuccuaagucaucacugua

SEQ ID NO: 2629090 - RNA, 19 nt, Artificial Sequence
  Description of Artificial Sequence: Synthetic oligonucleotide
gaagcucacuauacugccu

SEQ ID NO: 2629091 - RNA, 19 nt, Artificial Sequence
  Description of Artificial Sequence: Synthetic oligonucleotide
gacgucccagucacuucug

SEQ ID NO: 2629092 - RNA, 19 nt, Artificial Sequence
  Description of Artificial Sequence: Synthetic oligonucleotide
cacggucuggcacacagau

SEQ ID NO: 2629093 - RNA, 19 nt, Artificial Sequence
  Description of Artificial Sequence: Synthetic oligonucleotide
aaccugcgugagaaauagu

SEQ ID NO: 2629094 - RNA, 19 nt, Artificial Sequence
  Description of Artificial Sequence: Synthetic oligonucleotide
cucagucaaguccuucacu

SEQ ID NO: 2629095 - RNA, 19 nt, Artificial Sequence
  Description of Artificial Sequence: Synthetic oligonucleotide
cugccuuggcagccauagc

SEQ ID NO: 2629096 - RNA, 19 nt, Artificial Sequence
  Description of Artificial Sequence: Synthetic oligonucleotide
gucuggcacacagaugaaa

SEQ ID NO: 2629097 - RNA, 19 nt, Artificial Sequence
  Description of Artificial Sequence: Synthetic oligonucleotide
gggucuugugagaauggca

SEQ ID NO: 2629098 - RNA, 19 nt, Artificial Sequence
  Description of Artificial Sequence: Synthetic oligonucleotide
guccgggcauugcaguaga

SEQ ID NO: 2629099 - RNA, 19 nt, Artificial Sequence
  Description of Artificial Sequence: Synthetic oligonucleotide
gcagcuuuaccaauugggu

SEQ ID NO: 2629100 - RNA, 19 nt, Artificial Sequence
  Description of Artificial Sequence: Synthetic oligonucleotide
gcauucuugccugaccuaa

SEQ ID NO: 2629101 - RNA, 19 nt, Artificial Sequence
  Description of Artificial Sequence: Synthetic oligonucleotide
uuguguguucaggguuggu

SEQ ID NO: 2629102 - RNA, 19 nt, Artificial Sequence
  Description of Artificial Sequence: Synthetic oligonucleotide
auagcggggcucacagagu

SEQ ID NO: 2629103 - RNA, 19 nt, Artificial Sequence
  Description of Artificial Sequence: Synthetic oligonucleotide
gcagaggaaccugcgugag

SEQ ID NO: 2629104 - RNA, 19 nt, Artificial Sequence
  Description of Artificial Sequence: Synthetic oligonucleotide
gccacuuggcacuccccug

SEQ ID NO: 2629105 - RNA, 19 nt, Artificial Sequence
  Description of Artificial Sequence: Synthetic oligonucleotide
ccauggugccaugugacuc

SEQ ID NO: 2629106 - RNA, 19 nt, Artificial Sequence
  Description of Artificial Sequence: Synthetic oligonucleotide
ccaauugggucuugugaga

SEQ ID NO: 2629107 - RNA, 19 nt, Artificial Sequence
  Description of Artificial Sequence: Synthetic oligonucleotide
auggugccaugugacuccu

SEQ ID NO: 2629108 - RNA, 19 nt, Artificial Sequence
  Description of Artificial Sequence: Synthetic oligonucleotide
gaggaaccugcgugagaaa

SEQ ID NO: 2629109 - RNA, 19 nt, Artificial Sequence
  Description of Artificial Sequence: Synthetic oligonucleotide
cuuuaccaauugggucuug

SEQ ID NO: 2629110 - RNA, 19 nt, Artificial Sequence
  Description of Artificial Sequence: Synthetic oligonucleotide
cuuccucccgcuccagaaa

SEQ ID NO: 2629111 - RNA, 19 nt, Artificial Sequence
  Description of Artificial Sequence: Synthetic oligonucleotide
ccgggcauugcaguagagc

SEQ ID NO: 2629112 - RNA, 19 nt, Artificial Sequence
  Description of Artificial Sequence: Synthetic oligonucleotide
cacuuggcacuccccuguc

SEQ ID NO: 2629113 - RNA, 19 nt, Artificial Sequence
  Description of Artificial Sequence: Synthetic oligonucleotide
uacugccuuggcagccaua

SEQ ID NO: 2629114 - RNA, 19 nt, Artificial Sequence
  Description of Artificial Sequence: Synthetic oligonucleotide
uucaccccaugagcaccca

SEQ ID NO: 2629115 - RNA, 19 nt, Artificial Sequence
  Description of Artificial Sequence: Synthetic oligonucleotide
cguaggugggaaugaucag

SEQ ID NO: 2629116 - RNA, 19 nt, Artificial Sequence
  Description of Artificial Sequence: Synthetic oligonucleotide
cagaggaaccugcgugaga

SEQ ID NO: 2629117 - RNA, 19 nt, Artificial Sequence
  Description of Artificial Sequence: Synthetic oligonucleotide
gagcuugccauggugccau

SEQ ID NO: 2629118 - RNA, 19 nt, Artificial Sequence
  Description of Artificial Sequence: Synthetic oligonucleotide
agccauagcggggcucaca

SEQ ID NO: 2629119 - RNA, 19 nt, Artificial Sequence
  Description of Artificial Sequence: Synthetic oligonucleotide
guggcccagugcuucaccu

SEQ ID NO: 2629120 - RNA, 19 nt, Artificial Sequence
  Description of Artificial Sequence: Synthetic oligonucleotide
caacuccuuccucccgcuc

SEQ ID NO: 2629121 - RNA, 19 nt, Artificial Sequence
  Description of Artificial Sequence: Synthetic oligonucleotide
acggucuggcacacagaug

SEQ ID NO: 2629122 - RNA, 19 nt, Artificial Sequence
  Description of Artificial Sequence: Synthetic oligonucleotide
cccgcuccagaaaacuguc

SEQ ID NO: 2629123 - RNA, 19 nt, Artificial Sequence
  Description of Artificial Sequence: Synthetic oligonucleotide
uucugccacuuggcacucc

SEQ ID NO: 2629124 - RNA, 19 nt, Artificial Sequence
  Description of Artificial Sequence: Synthetic oligonucleotide
gggcuugacugaacacggg

SEQ ID NO: 2629125 - RNA, 19 nt, Artificial Sequence
  Description of Artificial Sequence: Synthetic oligonucleotide
guguccgggcauugcagua

SEQ ID NO: 2629126 - RNA, 19 nt, Artificial Sequence
  Description of Artificial Sequence: Synthetic oligonucleotide
ccugacugcacaggaagca

SEQ ID NO: 2629127 - RNA, 19 nt, Artificial Sequence
  Description of Artificial Sequence: Synthetic oligonucleotide
aagcagagacgggcagcau

SEQ ID NO: 2629128 - RNA, 19 nt, Artificial Sequence
  Description of Artificial Sequence: Synthetic oligonucleotide
gugcuucaccucugagcca

SEQ ID NO: 2629129 - RNA, 19 nt, Artificial Sequence
  Description of Artificial Sequence: Synthetic oligonucleotide
ccgcuccagaaaacugucc

SEQ ID NO: 2629130 - RNA, 19 nt, Artificial Sequence
  Description of Artificial Sequence: Synthetic oligonucleotide
uaacacggucuggcacaca

SEQ ID NO: 2629131 - RNA, 19 nt, Artificial Sequence
  Description of Artificial Sequence: Synthetic oligonucleotide
ggaauggggcuugacugaa

SEQ ID NO: 2629132 - RNA, 19 nt, Artificial Sequence
  Description of Artificial Sequence: Synthetic oligonucleotide
ggcaucuucaagggcugga

SEQ ID NO: 2629133 - RNA, 19 nt, Artificial Sequence
  Description of Artificial Sequence: Synthetic oligonucleotide
cgggcagcauucuugccug

SEQ ID NO: 2629134 - RNA, 19 nt, Artificial Sequence
  Description of Artificial Sequence: Synthetic oligonucleotide
gcagccauagcggggcuca

SEQ ID NO: 2629135 - RNA, 19 nt, Artificial Sequence
  Description of Artificial Sequence: Synthetic oligonucleotide
aggcguaggugggaaugau

SEQ ID NO: 2629136 - RNA, 19 nt, Artificial Sequence
  Description of Artificial Sequence: Synthetic oligonucleotide
gccauguuccugauggucu

SEQ ID NO: 2629137 - RNA, 19 nt, Artificial Sequence
  Description of Artificial Sequence: Synthetic oligonucleotide
gccugaccuaaucugccaa

SEQ ID NO: 2629138 - RNA, 19 nt, Artificial Sequence
  Description of Artificial Sequence: Synthetic oligonucleotide
agcuugccauggugccaug

SEQ ID NO: 2629139 - RNA, 19 nt, Artificial Sequence
  Description of Artificial Sequence: Synthetic oligonucleotide
ggcagcauucuugccugac

SEQ ID NO: 2629140 - RNA, 19 nt, Artificial Sequence
  Description of Artificial Sequence: Synthetic oligonucleotide
agucaucacuguagaucau

SEQ ID NO: 2629141 - RNA, 19 nt, Artificial Sequence
  Description of Artificial Sequence: Synthetic oligonucleotide
aucagggaauggggcuuga

SEQ ID NO: 2629142 - RNA, 19 nt, Artificial Sequence
  Description of Artificial Sequence: Synthetic oligonucleotide
ggaaccugcgugagaaaua

SEQ ID NO: 2629143 - RNA, 19 nt, Artificial Sequence
  Description of Artificial Sequence: Synthetic oligonucleotide
ggcguaggugggaaugauc

SEQ ID NO: 2629144 - RNA, 19 nt, Artificial Sequence
  Description of Artificial Sequence: Synthetic oligonucleotide
cauucuugccugaccuaau

SEQ ID NO: 2629145 - RNA, 19 nt, Artificial Sequence
  Description of Artificial Sequence: Synthetic oligonucleotide
gggcuggaagcucacuaua

SEQ ID NO: 2629146 - RNA, 19 nt, Artificial Sequence
  Description of Artificial Sequence: Synthetic oligonucleotide
agcggggcucacagaguug

SEQ ID NO: 2629147 - RNA, 19 nt, Artificial Sequence
  Description of Artificial Sequence: Synthetic oligonucleotide
caaauguggcccagugcuu

SEQ ID NO: 2629148 - RNA, 19 nt, Artificial Sequence
  Description of Artificial Sequence: Synthetic oligonucleotide
gccuuccugacugcagcug

SEQ ID NO: 2629149 - RNA, 19 nt, Artificial Sequence
  Description of Artificial Sequence: Synthetic oligonucleotide
gguuaccagacgucccagu

SEQ ID NO: 2629150 - RNA, 19 nt, Artificial Sequence
  Description of Artificial Sequence: Synthetic oligonucleotide
uggugccaugugacuccua

SEQ ID NO: 2629151 - RNA, 19 nt, Artificial Sequence
  Description of Artificial Sequence: Synthetic oligonucleotide
cugggcccacagcaaaugu

SEQ ID NO: 2629152 - RNA, 19 nt, Artificial Sequence
  Description of Artificial Sequence: Synthetic oligonucleotide
cggaaucuguuuggugucc

SEQ ID NO: 2629153 - RNA, 19 nt, Artificial Sequence
  Description of Artificial Sequence: Synthetic oligonucleotide
ccucugagccaaugaccuc

SEQ ID NO: 2629154 - RNA, 19 nt, Artificial Sequence
  Description of Artificial Sequence: Synthetic oligonucleotide
cuugugagaauggcaucuu

SEQ ID NO: 2629155 - RNA, 19 nt, Artificial Sequence
  Description of Artificial Sequence: Synthetic oligonucleotide
ggccugggcccacagcaaa

SEQ ID NO: 2629156 - RNA, 19 nt, Artificial Sequence
  Description of Artificial Sequence: Synthetic oligonucleotide
ggggcucacagaguugugu

SEQ ID NO: 2629157 - RNA, 19 nt, Artificial Sequence
  Description of Artificial Sequence: Synthetic oligonucleotide
caagagccauguuccugau

SEQ ID NO: 2629158 - RNA, 19 nt, Artificial Sequence
  Description of Artificial Sequence: Synthetic oligonucleotide
gggaaugaucagccuuccu

SEQ ID NO: 2629159 - RNA, 19 nt, Artificial Sequence
  Description of Artificial Sequence: Synthetic oligonucleotide
gcucacagaguuguguguu

SEQ ID NO: 2629160 - RNA, 19 nt, Artificial Sequence
  Description of Artificial Sequence: Synthetic oligonucleotide
accagacgucccagucacu

SEQ ID NO: 2629161 - RNA, 19 nt, Artificial Sequence
  Description of Artificial Sequence: Synthetic oligonucleotide
ccacagcaaauguggccca

SEQ ID NO: 2629162 - RNA, 19 nt, Artificial Sequence
  Description of Artificial Sequence: Synthetic oligonucleotide
gcggggcucacagaguugu

SEQ ID NO: 2629163 - RNA, 19 nt, Artificial Sequence
  Description of Artificial Sequence: Synthetic oligonucleotide
cagccauagcggggcucac

SEQ ID NO: 2629164 - RNA, 19 nt, Artificial Sequence
  Description of Artificial Sequence: Synthetic oligonucleotide
ccacuuggcacuccccugu

SEQ ID NO: 2629165 - RNA, 19 nt, Artificial Sequence
  Description of Artificial Sequence: Synthetic oligonucleotide
ggcagccauagcggggcuc

SEQ ID NO: 2629166 - RNA, 19 nt, Artificial Sequence
  Description of Artificial Sequence: Synthetic oligonucleotide
ccugaccuaaucugccaau

SEQ ID NO: 2629167 - RNA, 19 nt, Artificial Sequence
  Description of Artificial Sequence: Synthetic oligonucleotide
gggcagcauucuugccuga

SEQ ID NO: 2629168 - RNA, 19 nt, Artificial Sequence
  Description of Artificial Sequence: Synthetic oligonucleotide
ccauagcggggcucacaga

SEQ ID NO: 2629169 - RNA, 19 nt, Artificial Sequence
  Description of Artificial Sequence: Synthetic oligonucleotide
caagggcuggaagcucacu

SEQ ID NO: 2629170 - RNA, 19 nt, Artificial Sequence
  Description of Artificial Sequence: Synthetic oligonucleotide
caugagcacccagcauccu

SEQ ID NO: 2629171 - RNA, 19 nt, Artificial Sequence
  Description of Artificial Sequence: Synthetic oligonucleotide
gcauugcaguagagcacaa

SEQ ID NO: 2629172 - RNA, 19 nt, Artificial Sequence
  Description of Artificial Sequence: Synthetic oligonucleotide
cagagacgggcagcauucu

SEQ ID NO: 2629173 - RNA, 19 nt, Artificial Sequence
  Description of Artificial Sequence: Synthetic oligonucleotide
ggggcccaaugagcuugcc

SEQ ID NO: 2629174 - RNA, 19 nt, Artificial Sequence
  Description of Artificial Sequence: Synthetic oligonucleotide
ccaacuccuuccucccgcu

SEQ ID NO: 2629175 - RNA, 19 nt, Artificial Sequence
  Description of Artificial Sequence: Synthetic oligonucleotide
ccagacgucccagucacuu

SEQ ID NO: 2629176 - RNA, 19 nt, Artificial Sequence
  Description of Artificial Sequence: Synthetic oligonucleotide
gcuugccauggugccaugu

SEQ ID NO: 2629177 - RNA, 19 nt, Artificial Sequence
  Description of Artificial Sequence: Synthetic oligonucleotide
ccucccgcuccagaaaacu

SEQ ID NO: 2629178 - RNA, 19 nt, Artificial Sequence
  Description of Artificial Sequence: Synthetic oligonucleotide
cggggcucacagaguugug

SEQ ID NO: 2629179 - RNA, 19 nt, Artificial Sequence
  Description of Artificial Sequence: Synthetic oligonucleotide
cccagucacuucugccacu

SEQ ID NO: 2629180 - RNA, 19 nt, Artificial Sequence
  Description of Artificial Sequence: Synthetic oligonucleotide
cugucaccuggggcccaau

SEQ ID NO: 2629181 - RNA, 19 nt, Artificial Sequence
  Description of Artificial Sequence: Synthetic oligonucleotide
cccugucaccuggggccca

SEQ ID NO: 2629182 - RNA, 19 nt, Artificial Sequence
  Description of Artificial Sequence: Synthetic oligonucleotide
aaauaauuggcuuaaacac

SEQ ID NO: 2629183 - RNA, 19 nt, Artificial Sequence
  Description of Artificial Sequence: Synthetic oligonucleotide
uguuuuaucauccaaauag

SEQ ID NO: 2629184 - RNA, 19 nt, Artificial Sequence
  Description of Artificial Sequence: Synthetic oligonucleotide
aaaauaauuggcuuaaaca

SEQ ID NO: 2629185 - RNA, 19 nt, Artificial Sequence
  Description of Artificial Sequence: Synthetic oligonucleotide
uuuaacaccacuuuaaaca

SEQ ID NO: 2629186 - RNA, 19 nt, Artificial Sequence
  Description of Artificial Sequence: Synthetic oligonucleotide
aaaaugaacagaauuaggg

SEQ ID NO: 2629187 - RNA, 19 nt, Artificial Sequence
  Description of Artificial Sequence: Synthetic oligonucleotide
aaugugagcaccuucuucg

SEQ ID NO: 2629188 - RNA, 19 nt, Artificial Sequence
  Description of Artificial Sequence: Synthetic oligonucleotide
uaaguugaaaacaagaccu

SEQ ID NO: 2629189 - RNA, 19 nt, Artificial Sequence
  Description of Artificial Sequence: Synthetic oligonucleotide
auaaguuacaauuauaagu

SEQ ID NO: 2629190 - RNA, 19 nt, Artificial Sequence
  Description of Artificial Sequence: Synthetic oligonucleotide
uuaucauccaaauaggugc

SEQ ID NO: 2629191 - RNA, 19 nt, Artificial Sequence
  Description of Artificial Sequence: Synthetic oligonucleotide
uuuuaaacuacuuaguuuc

SEQ ID NO: 2629192 - RNA, 19 nt, Artificial Sequence
  Description of Artificial Sequence: Synthetic oligonucleotide
auuagguguagucacaagc

SEQ ID NO: 2629193 - RNA, 19 nt, Artificial Sequence
  Description of Artificial Sequence: Synthetic oligonucleotide
aaagauauaguguggucac

SEQ ID NO: 2629194 - RNA, 19 nt, Artificial Sequence
  Description of Artificial Sequence: Synthetic oligonucleotide
uccuuuagaaaauaauugg

SEQ ID NO: 2629195 - RNA, 19 nt, Artificial Sequence
  Description of Artificial Sequence: Synthetic oligonucleotide
uaaguuacaauuauaagua

SEQ ID NO: 2629196 - RNA, 19 nt, Artificial Sequence
  Description of Artificial Sequence: Synthetic oligonucleotide
uauuuaaacaggcuacagg

SEQ ID NO: 2629197 - RNA, 19 nt, Artificial Sequence
  Description of Artificial Sequence: Synthetic oligonucleotide
uuauaaguugaaaacaaga

SEQ ID NO: 2629198 - RNA, 19 nt, Artificial Sequence
  Description of Artificial Sequence: Synthetic oligonucleotide
cuuaguuucauuuugccac

SEQ ID NO: 2629199 - RNA, 19 nt, Artificial Sequence
  Description of Artificial Sequence: Synthetic oligonucleotide
uauaaguugaaaacaagac

SEQ ID NO: 2629200 - RNA, 19 nt, Artificial Sequence
  Description of Artificial Sequence: Synthetic oligonucleotide
aaugaaucaacccucuuga

SEQ ID NO: 2629201 - RNA, 19 nt, Artificial Sequence
  Description of Artificial Sequence: Synthetic oligonucleotide
ugaauuuagacucaaucac

SEQ ID NO: 2629202 - RNA, 19 nt, Artificial Sequence
  Description of Artificial Sequence: Synthetic oligonucleotide
uuauaaguauauuuaaaca

SEQ ID NO: 2629203 - RNA, 19 nt, Artificial Sequence
  Description of Artificial Sequence: Synthetic oligonucleotide
auuuaaacaggcuacagga

SEQ ID NO: 2629204 - RNA, 19 nt, Artificial Sequence
  Description of Artificial Sequence: Synthetic oligonucleotide
agaaacauaaguuacaauu

SEQ ID NO: 2629205 - RNA, 19 nt, Artificial Sequence
  Description of Artificial Sequence: Synthetic oligonucleotide
uccaaauaggugcugaagg

SEQ ID NO: 2629206 - RNA, 19 nt, Artificial Sequence
  Description of Artificial Sequence: Synthetic oligonucleotide
aaauuaugguguuuuauca

SEQ ID NO: 2629207 - RNA, 19 nt, Artificial Sequence
  Description of Artificial Sequence: Synthetic oligonucleotide
uauucaaugugguaaauga

SEQ ID NO: 2629208 - RNA, 19 nt, Artificial Sequence
  Description of Artificial Sequence: Synthetic oligonucleotide
aacauuacauuuuaaacua

SEQ ID NO: 2629209 - RNA, 19 nt, Artificial Sequence
  Description of Artificial Sequence: Synthetic oligonucleotide
aaugaacagaauuagggaa

SEQ ID NO: 2629210 - RNA, 19 nt, Artificial Sequence
  Description of Artificial Sequence: Synthetic oligonucleotide
uuaaaaugaacagaauuag

SEQ ID NO: 2629211 - RNA, 19 nt, Artificial Sequence
  Description of Artificial Sequence: Synthetic oligonucleotide
uuccuuuagaaaauaauug

SEQ ID NO: 2629212 - RNA, 19 nt, Artificial Sequence
  Description of Artificial Sequence: Synthetic oligonucleotide
uaaguauauuuaaacaggc

SEQ ID NO: 2629213 - RNA, 19 nt, Artificial Sequence
  Description of Artificial Sequence: Synthetic oligonucleotide
aagaccuuuuaccaaacag

SEQ ID NO: 2629214 - RNA, 19 nt, Artificial Sequence
  Description of Artificial Sequence: Synthetic oligonucleotide
aacagaauuagggaagugg

SEQ ID NO: 2629215 - RNA, 19 nt, Artificial Sequence
  Description of Artificial Sequence: Synthetic oligonucleotide
aaaugaacagaauuaggga

SEQ ID NO: 2629216 - RNA, 19 nt, Artificial Sequence
  Description of Artificial Sequence: Synthetic oligonucleotide
uuaaacauuacauuuuaaa

SEQ ID NO: 2629217 - RNA, 19 nt, Artificial Sequence
  Description of Artificial Sequence: Synthetic oligonucleotide
ugugguaaaugaaucaacc

SEQ ID NO: 2629218 - RNA, 19 nt, Artificial Sequence
  Description of Artificial Sequence: Synthetic oligonucleotide
uuaccaaacagguuauugg

SEQ ID NO: 2629219 - RNA, 19 nt, Artificial Sequence
  Description of Artificial Sequence: Synthetic oligonucleotide
ucuucguugauaaagcugu

SEQ ID NO: 2629220 - RNA, 19 nt, Artificial Sequence
  Description of Artificial Sequence: Synthetic oligonucleotide
uuuauaaguugaaaacaag

SEQ ID NO: 2629221 - RNA, 19 nt, Artificial Sequence
  Description of Artificial Sequence: Synthetic oligonucleotide
acucuauuccaguugaugg

SEQ ID NO: 2629222 - RNA, 19 nt, Artificial Sequence
  Description of Artificial Sequence: Synthetic oligonucleotide
auaaguauauuuaaacagg

SEQ ID NO: 2629223 - RNA, 19 nt, Artificial Sequence
  Description of Artificial Sequence: Synthetic oligonucleotide
auuuaacaccacuuuaaac

SEQ ID NO: 2629224 - RNA, 19 nt, Artificial Sequence
  Description of Artificial Sequence: Synthetic oligonucleotide
uuguauuccagacuggucu

SEQ ID NO: 2629225 - RNA, 19 nt, Artificial Sequence
  Description of Artificial Sequence: Synthetic oligonucleotide
auuaugguguuuuaucauc

SEQ ID NO: 2629226 - RNA, 19 nt, Artificial Sequence
  Description of Artificial Sequence: Synthetic oligonucleotide
uacaauuauaaguauauuu

SEQ ID NO: 2629227 - RNA, 19 nt, Artificial Sequence
  Description of Artificial Sequence: Synthetic oligonucleotide
caagcuuuaaaaugaacag

SEQ ID NO: 2629228 - RNA, 19 nt, Artificial Sequence
  Description of Artificial Sequence: Synthetic oligonucleotide
uuaguauuucccuacugag

SEQ ID NO: 2629229 - RNA, 19 nt, Artificial Sequence
  Description of Artificial Sequence: Synthetic oligonucleotide
cuaaauuagguguagucac

SEQ ID NO: 2629230 - RNA, 19 nt, Artificial Sequence
  Description of Artificial Sequence: Synthetic oligonucleotide
ugaagguuuaguauuuccc

SEQ ID NO: 2629231 - RNA, 19 nt, Artificial Sequence
  Description of Artificial Sequence: Synthetic oligonucleotide
uacaggaaauuuaacacca

SEQ ID NO: 2629232 - RNA, 19 nt, Artificial Sequence
  Description of Artificial Sequence: Synthetic oligonucleotide
ucaaucaccaucaagucua

SEQ ID NO: 2629233 - RNA, 19 nt, Artificial Sequence
  Description of Artificial Sequence: Synthetic oligonucleotide
uacugagaagaacauagag

SEQ ID NO: 2629234 - RNA, 19 nt, Artificial Sequence
  Description of Artificial Sequence: Synthetic oligonucleotide
aguauauuuaaacaggcua

SEQ ID NO: 2629235 - RNA, 19 nt, Artificial Sequence
  Description of Artificial Sequence: Synthetic oligonucleotide
acugagaagaacauagagc

SEQ ID NO: 2629236 - RNA, 19 nt, Artificial Sequence
  Description of Artificial Sequence: Synthetic oligonucleotide
gaaaauaauuggcuuaaac

SEQ ID NO: 2629237 - RNA, 19 nt, Artificial Sequence
  Description of Artificial Sequence: Synthetic oligonucleotide
uuuccuuuagaaaauaauu

SEQ ID NO: 2629238 - RNA, 19 nt, Artificial Sequence
  Description of Artificial Sequence: Synthetic oligonucleotide
uauaguguggucacauuag

SEQ ID NO: 2629239 - RNA, 19 nt, Artificial Sequence
  Description of Artificial Sequence: Synthetic oligonucleotide
uaaauuaugguguuuuauc

SEQ ID NO: 2629240 - RNA, 19 nt, Artificial Sequence
  Description of Artificial Sequence: Synthetic oligonucleotide
guuaacaguuuucagaaac

SEQ ID NO: 2629241 - RNA, 19 nt, Artificial Sequence
  Description of Artificial Sequence: Synthetic oligonucleotide
uuuugccacuaaauuaugg

SEQ ID NO: 2629242 - RNA, 19 nt, Artificial Sequence
  Description of Artificial Sequence: Synthetic oligonucleotide
uugaugguaggccaaagca

SEQ ID NO: 2629243 - RNA, 19 nt, Artificial Sequence
  Description of Artificial Sequence: Synthetic oligonucleotide
uucuccugaauuuagacuc

SEQ ID NO: 2629244 - RNA, 19 nt, Artificial Sequence
  Description of Artificial Sequence: Synthetic oligonucleotide
aaacauaaguuacaauuau

SEQ ID NO: 2629245 - RNA, 19 nt, Artificial Sequence
  Description of Artificial Sequence: Synthetic oligonucleotide
ucuaaauuagguguaguca

SEQ ID NO: 2629246 - RNA, 19 nt, Artificial Sequence
  Description of Artificial Sequence: Synthetic oligonucleotide
aacauagagcucucuuucg

SEQ ID NO: 2629247 - RNA, 19 nt, Artificial Sequence
  Description of Artificial Sequence: Synthetic oligonucleotide
acuacuuaguuucauuuug

SEQ ID NO: 2629248 - RNA, 19 nt, Artificial Sequence
  Description of Artificial Sequence: Synthetic oligonucleotide
ugaaucaacccucuugaug

SEQ ID NO: 2629249 - RNA, 19 nt, Artificial Sequence
  Description of Artificial Sequence: Synthetic oligonucleotide
agucacaagcuuuaaaaug

SEQ ID NO: 2629250 - RNA, 19 nt, Artificial Sequence
  Description of Artificial Sequence: Synthetic oligonucleotide
uuaugguguuuuaucaucc

SEQ ID NO: 2629251 - RNA, 19 nt, Artificial Sequence
  Description of Artificial Sequence: Synthetic oligonucleotide
aguuuucagaaacauaagu

SEQ ID NO: 2629252 - RNA, 19 nt, Artificial Sequence
  Description of Artificial Sequence: Synthetic oligonucleotide
uaggccaaagcauugagcu

SEQ ID NO: 2629253 - RNA, 19 nt, Artificial Sequence
  Description of Artificial Sequence: Synthetic oligonucleotide
uucaaugugguaaaugaau

SEQ ID NO: 2629254 - RNA, 19 nt, Artificial Sequence
  Description of Artificial Sequence: Synthetic oligonucleotide
uuaaacaggcuacaggaaa

SEQ ID NO: 2629255 - RNA, 19 nt, Artificial Sequence
  Description of Artificial Sequence: Synthetic oligonucleotide
uuuagacucaaucaccauc

SEQ ID NO: 2629256 - RNA, 19 nt, Artificial Sequence
  Description of Artificial Sequence: Synthetic oligonucleotide
aacacucuauuccaguuga

SEQ ID NO: 2629257 - RNA, 19 nt, Artificial Sequence
  Description of Artificial Sequence: Synthetic oligonucleotide
ugagauauuguuauucaau

SEQ ID NO: 2629258 - RNA, 19 nt, Artificial Sequence
  Description of Artificial Sequence: Synthetic oligonucleotide
ucgucuacuguucacagcu

SEQ ID NO: 2629259 - RNA, 19 nt, Artificial Sequence
  Description of Artificial Sequence: Synthetic oligonucleotide
uuagguguagucacaagcu

SEQ ID NO: 2629260 - RNA, 19 nt, Artificial Sequence
  Description of Artificial Sequence: Synthetic oligonucleotide
aauuuaacaccacuuuaaa

SEQ ID NO: 2629261 - RNA, 19 nt, Artificial Sequence
  Description of Artificial Sequence: Synthetic oligonucleotide
auauuguuauucaaugugg

SEQ ID NO: 2629262 - RNA, 19 nt, Artificial Sequence
  Description of Artificial Sequence: Synthetic oligonucleotide
aaacuacuuaguuucauuu

SEQ ID NO: 2629263 - RNA, 19 nt, Artificial Sequence
  Description of Artificial Sequence: Synthetic oligonucleotide
aauaauuggcuuaaacacu

SEQ ID NO: 2629264 - RNA, 19 nt, Artificial Sequence
  Description of Artificial Sequence: Synthetic oligonucleotide
uuaacaguuuucagaaaca

SEQ ID NO: 2629265 - RNA, 19 nt, Artificial Sequence
  Description of Artificial Sequence: Synthetic oligonucleotide
auugagcugcccuggagcc

SEQ ID NO: 2629266 - RNA, 19 nt, Artificial Sequence
  Description of Artificial Sequence: Synthetic oligonucleotide
auaguguggucacauuagc

SEQ ID NO: 2629267 - RNA, 19 nt, Artificial Sequence
  Description of Artificial Sequence: Synthetic oligonucleotide
ucguugauaaagcugugug

SEQ ID NO: 2629268 - RNA, 19 nt, Artificial Sequence
  Description of Artificial Sequence: Synthetic oligonucleotide
auaauuggcuuaaacacuc

SEQ ID NO: 2629269 - RNA, 19 nt, Artificial Sequence
  Description of Artificial Sequence: Synthetic oligonucleotide
ucaaugugguaaaugaauc

SEQ ID NO: 2629270 - RNA, 19 nt, Artificial Sequence
  Description of Artificial Sequence: Synthetic oligonucleotide
uauuguuauucaauguggu

SEQ ID NO: 2629271 - RNA, 19 nt, Artificial Sequence
  Description of Artificial Sequence: Synthetic oligonucleotide
aauuuagacucaaucacca

SEQ ID NO: 2629272 - RNA, 19 nt, Artificial Sequence
  Description of Artificial Sequence: Synthetic oligonucleotide
aucaagucuaaauuaggug

SEQ ID NO: 2629273 - RNA, 19 nt, Artificial Sequence
  Description of Artificial Sequence: Synthetic oligonucleotide
ucucaaagauauagugugg

SEQ ID NO: 2629274 - RNA, 19 nt, Artificial Sequence
  Description of Artificial Sequence: Synthetic oligonucleotide
ugguuaacaguuuucagaa

SEQ ID NO: 2629275 - RNA, 19 nt, Artificial Sequence
  Description of Artificial Sequence: Synthetic oligonucleotide
aauuaugguguuuuaucau

SEQ ID NO: 2629276 - RNA, 19 nt, Artificial Sequence
  Description of Artificial Sequence: Synthetic oligonucleotide
ucauuuugccacuaaauua

SEQ ID NO: 2629277 - RNA, 19 nt, Artificial Sequence
  Description of Artificial Sequence: Synthetic oligonucleotide
aaacacucuauuccaguug

SEQ ID NO: 2629278 - RNA, 19 nt, Artificial Sequence
  Description of Artificial Sequence: Synthetic oligonucleotide
aaauuuaacaccacuuuaa

SEQ ID NO: 2629279 - RNA, 19 nt, Artificial Sequence
  Description of Artificial Sequence: Synthetic oligonucleotide
uuguuauucaaugugguaa

SEQ ID NO: 2629280 - RNA, 19 nt, Artificial Sequence
  Description of Artificial Sequence: Synthetic oligonucleotide
uuuaccaaacagguuauug

SEQ ID NO: 2629281 - RNA, 19 nt, Artificial Sequence
  Description of Artificial Sequence: Synthetic oligonucleotide
acaagcuuuaaaaugaaca

SEQ ID NO: 2629282 - RNA, 19 nt, Artificial Sequence
  Description of Artificial Sequence: Synthetic oligonucleotide
agaaccaccuuuguauucc

SEQ ID NO: 2629283 - RNA, 19 nt, Artificial Sequence
  Description of Artificial Sequence: Synthetic oligonucleotide
ugccacuaaauuauggugu

SEQ ID NO: 2629284 - RNA, 19 nt, Artificial Sequence
  Description of Artificial Sequence: Synthetic oligonucleotide
uuucauuuugccacuaaau

SEQ ID NO: 2629285 - RNA, 19 nt, Artificial Sequence
  Description of Artificial Sequence: Synthetic oligonucleotide
gaauuuagacucaaucacc

SEQ ID NO: 2629286 - RNA, 19 nt, Artificial Sequence
  Description of Artificial Sequence: Synthetic oligonucleotide
aacagguuauuggugacag

SEQ ID NO: 2629287 - RNA, 19 nt, Artificial Sequence
  Description of Artificial Sequence: Synthetic oligonucleotide
cagauucucaaagauauag

SEQ ID NO: 2629288 - RNA, 19 nt, Artificial Sequence
  Description of Artificial Sequence: Synthetic oligonucleotide
agaccuuuuaccaaacagg

SEQ ID NO: 2629289 - RNA, 19 nt, Artificial Sequence
  Description of Artificial Sequence: Synthetic oligonucleotide
aaugugguaaaugaaucaa

SEQ ID NO: 2629290 - RNA, 19 nt, Artificial Sequence
  Description of Artificial Sequence: Synthetic oligonucleotide
ccuacugagaagaacauag

SEQ ID NO: 2629291 - RNA, 19 nt, Artificial Sequence
  Description of Artificial Sequence: Synthetic oligonucleotide
uauuucccuacugagaaga

SEQ ID NO: 2629292 - RNA, 19 nt, Artificial Sequence
  Description of Artificial Sequence: Synthetic oligonucleotide
guagucacaagcuuuaaaa

SEQ ID NO: 2629293 - RNA, 19 nt, Artificial Sequence
  Description of Artificial Sequence: Synthetic oligonucleotide
aauuagguguagucacaag

SEQ ID NO: 2629294 - RNA, 19 nt, Artificial Sequence
  Description of Artificial Sequence: Synthetic oligonucleotide
uuaacaccacuuuaaacau

SEQ ID NO: 2629295 - RNA, 19 nt, Artificial Sequence
  Description of Artificial Sequence: Synthetic oligonucleotide
acaauuauaaguauauuua

SEQ ID NO: 2629296 - RNA, 19 nt, Artificial Sequence
  Description of Artificial Sequence: Synthetic oligonucleotide
uuugcagcuccaauuggcc

SEQ ID NO: 2629297 - RNA, 19 nt, Artificial Sequence
  Description of Artificial Sequence: Synthetic oligonucleotide
uggacuuugagauauuguu

SEQ ID NO: 2629298 - RNA, 19 nt, Artificial Sequence
  Description of Artificial Sequence: Synthetic oligonucleotide
uuaaacacucuauuccagu

SEQ ID NO: 2629299 - RNA, 19 nt, Artificial Sequence
  Description of Artificial Sequence: Synthetic oligonucleotide
cugagaagaacauagagcu

SEQ ID NO: 2629300 - RNA, 19 nt, Artificial Sequence
  Description of Artificial Sequence: Synthetic oligonucleotide
uugccacuaaauuauggug

SEQ ID NO: 2629301 - RNA, 19 nt, Artificial Sequence
  Description of Artificial Sequence: Synthetic oligonucleotide
ucaacccucuugaugguag

SEQ ID NO: 2629302 - RNA, 19 nt, Artificial Sequence
  Description of Artificial Sequence: Synthetic oligonucleotide
uuuaaacuacuuaguuuca

SEQ ID NO: 2629303 - RNA, 19 nt, Artificial Sequence
  Description of Artificial Sequence: Synthetic oligonucleotide
uaaauuagguguagucaca

SEQ ID NO: 2629304 - RNA, 19 nt, Artificial Sequence
  Description of Artificial Sequence: Synthetic oligonucleotide
gaacauagagcucucuuuc

SEQ ID NO: 2629305 - RNA, 19 nt, Artificial Sequence
  Description of Artificial Sequence: Synthetic oligonucleotide
uacuguucacagcucacag

SEQ ID NO: 2629306 - RNA, 19 nt, Artificial Sequence
  Description of Artificial Sequence: Synthetic oligonucleotide
ucaccaucaagucuaaauu

SEQ ID NO: 2629307 - RNA, 19 nt, Artificial Sequence
  Description of Artificial Sequence: Synthetic oligonucleotide
aucaccaucaagucuaaau

SEQ ID NO: 2629308 - RNA, 19 nt, Artificial Sequence
  Description of Artificial Sequence: Synthetic oligonucleotide
uacuuaguuucauuuugcc

SEQ ID NO: 2629309 - RNA, 19 nt, Artificial Sequence
  Description of Artificial Sequence: Synthetic oligonucleotide
uguuauucaaugugguaaa

SEQ ID NO: 2629310 - RNA, 19 nt, Artificial Sequence
  Description of Artificial Sequence: Synthetic oligonucleotide
uugaaaacaagaccuuuua

SEQ ID NO: 2629311 - RNA, 19 nt, Artificial Sequence
  Description of Artificial Sequence: Synthetic oligonucleotide
guucacagcucacagauuc

SEQ ID NO: 2629312 - RNA, 19 nt, Artificial Sequence
  Description of Artificial Sequence: Synthetic oligonucleotide
cuuugcagcuccaauuggc

SEQ ID NO: 2629313 - RNA, 19 nt, Artificial Sequence
  Description of Artificial Sequence: Synthetic oligonucleotide
ggcuuaaacacucuauucc

SEQ ID NO: 2629314 - RNA, 19 nt, Artificial Sequence
  Description of Artificial Sequence: Synthetic oligonucleotide
aucaaauuuccuuuagaaa

SEQ ID NO: 2629315 - RNA, 19 nt, Artificial Sequence
  Description of Artificial Sequence: Synthetic oligonucleotide
cuacuuaguuucauuuugc

SEQ ID NO: 2629316 - RNA, 19 nt, Artificial Sequence
  Description of Artificial Sequence: Synthetic oligonucleotide
aauuagggaagugguuaac

SEQ ID NO: 2629317 - RNA, 19 nt, Artificial Sequence
  Description of Artificial Sequence: Synthetic oligonucleotide
uaguauuucccuacugaga

SEQ ID NO: 2629318 - RNA, 19 nt, Artificial Sequence
  Description of Artificial Sequence: Synthetic oligonucleotide
ucuucucauggaaucaacu

SEQ ID NO: 2629319 - RNA, 19 nt, Artificial Sequence
  Description of Artificial Sequence: Synthetic oligonucleotide
accacuuuaaacauuacau

SEQ ID NO: 2629320 - RNA, 19 nt, Artificial Sequence
  Description of Artificial Sequence: Synthetic oligonucleotide
acuuaguuucauuuugcca

SEQ ID NO: 2629321 - RNA, 19 nt, Artificial Sequence
  Description of Artificial Sequence: Synthetic oligonucleotide
gcuacaggaaauuuaacac

SEQ ID NO: 2629322 - RNA, 19 nt, Artificial Sequence
  Description of Artificial Sequence: Synthetic oligonucleotide
gugguaaaugaaucaaccc

SEQ ID NO: 2629323 - RNA, 19 nt, Artificial Sequence
  Description of Artificial Sequence: Synthetic oligonucleotide
aagugguuaacaguuuuca

SEQ ID NO: 2629324 - RNA, 19 nt, Artificial Sequence
  Description of Artificial Sequence: Synthetic oligonucleotide
uucucauggaaucaacuuu

SEQ ID NO: 2629325 - RNA, 19 nt, Artificial Sequence
  Description of Artificial Sequence: Synthetic oligonucleotide
uuucgucuacuguucacag

SEQ ID NO: 2629326 - RNA, 19 nt, Artificial Sequence
  Description of Artificial Sequence: Synthetic oligonucleotide
accuucuucguugauaaag

SEQ ID NO: 2629327 - RNA, 19 nt, Artificial Sequence
  Description of Artificial Sequence: Synthetic oligonucleotide
aaacaagaccuuuuaccaa

SEQ ID NO: 2629328 - RNA, 19 nt, Artificial Sequence
  Description of Artificial Sequence: Synthetic oligonucleotide
uaaacaggcuacaggaaau

SEQ ID NO: 2629329 - RNA, 19 nt, Artificial Sequence
  Description of Artificial Sequence: Synthetic oligonucleotide
gacucaaucaccaucaagu

SEQ ID NO: 2629330 - RNA, 19 nt, Artificial Sequence
  Description of Artificial Sequence: Synthetic oligonucleotide
uuuaaacaggcuacaggaa

SEQ ID NO: 2629331 - RNA, 19 nt, Artificial Sequence
  Description of Artificial Sequence: Synthetic oligonucleotide
uagaaaauaauuggcuuaa

SEQ ID NO: 2629332 - RNA, 19 nt, Artificial Sequence
  Description of Artificial Sequence: Synthetic oligonucleotide
auauaguguggucacauua

SEQ ID NO: 2629333 - RNA, 19 nt, Artificial Sequence
  Description of Artificial Sequence: Synthetic oligonucleotide
agugguuaacaguuuucag

SEQ ID NO: 2629334 - RNA, 19 nt, Artificial Sequence
  Description of Artificial Sequence: Synthetic oligonucleotide
cuggucucaaaauucugag

SEQ ID NO: 2629335 - RNA, 19 nt, Artificial Sequence
  Description of Artificial Sequence: Synthetic oligonucleotide
aacuacuuaguuucauuuu

SEQ ID NO: 2629336 - RNA, 19 nt, Artificial Sequence
  Description of Artificial Sequence: Synthetic oligonucleotide
caucaaauuuccuuuagaa

SEQ ID NO: 2629337 - RNA, 19 nt, Artificial Sequence
  Description of Artificial Sequence: Synthetic oligonucleotide
uugauggacuuugagauau

SEQ ID NO: 2629338 - RNA, 19 nt, Artificial Sequence
  Description of Artificial Sequence: Synthetic oligonucleotide
gucacaagcuuuaaaauga

SEQ ID NO: 2629339 - RNA, 19 nt, Artificial Sequence
  Description of Artificial Sequence: Synthetic oligonucleotide
uuggcuuaaacacucuauu

SEQ ID NO: 2629340 - RNA, 19 nt, Artificial Sequence
  Description of Artificial Sequence: Synthetic oligonucleotide
augaacagaauuagggaag

SEQ ID NO: 2629341 - RNA, 19 nt, Artificial Sequence
  Description of Artificial Sequence: Synthetic oligonucleotide
ugaugguaggccaaagcau

SEQ ID NO: 2629342 - RNA, 19 nt, Artificial Sequence
  Description of Artificial Sequence: Synthetic oligonucleotide
cuugaugguaggccaaagc

SEQ ID NO: 2629343 - RNA, 19 nt, Artificial Sequence
  Description of Artificial Sequence: Synthetic oligonucleotide
aagucuaaauuagguguag

SEQ ID NO: 2629344 - RNA, 19 nt, Artificial Sequence
  Description of Artificial Sequence: Synthetic oligonucleotide
auagagcucucuuucgucu

SEQ ID NO: 2629345 - RNA, 19 nt, Artificial Sequence
  Description of Artificial Sequence: Synthetic oligonucleotide
auauuuaaacaggcuacag

SEQ ID NO: 2629346 - RNA, 19 nt, Artificial Sequence
  Description of Artificial Sequence: Synthetic oligonucleotide
aagguuuaguauuucccua

SEQ ID NO: 2629347 - RNA, 19 nt, Artificial Sequence
  Description of Artificial Sequence: Synthetic oligonucleotide
aacaccacuuuaaacauua

SEQ ID NO: 2629348 - RNA, 19 nt, Artificial Sequence
  Description of Artificial Sequence: Synthetic oligonucleotide
agcaucaaauuuccuuuag

SEQ ID NO: 2629349 - RNA, 19 nt, Artificial Sequence
  Description of Artificial Sequence: Synthetic oligonucleotide
gucuaaauuagguguaguc

SEQ ID NO: 2629350 - RNA, 19 nt, Artificial Sequence
  Description of Artificial Sequence: Synthetic oligonucleotide
aaguauauuuaaacaggcu

SEQ ID NO: 2629351 - RNA, 19 nt, Artificial Sequence
  Description of Artificial Sequence: Synthetic oligonucleotide
uguagucacaagcuuuaaa

SEQ ID NO: 2629352 - RNA, 19 nt, Artificial Sequence
  Description of Artificial Sequence: Synthetic oligonucleotide
uuaguuucauuuugccacu

SEQ ID NO: 2629353 - RNA, 19 nt, Artificial Sequence
  Description of Artificial Sequence: Synthetic oligonucleotide
aauuggcuuaaacacucua

SEQ ID NO: 2629354 - RNA, 19 nt, Artificial Sequence
  Description of Artificial Sequence: Synthetic oligonucleotide
auuggugacagcaucaaau

SEQ ID NO: 2629355 - RNA, 19 nt, Artificial Sequence
  Description of Artificial Sequence: Synthetic oligonucleotide
accaucaagucuaaauuag

SEQ ID NO: 2629356 - RNA, 19 nt, Artificial Sequence
  Description of Artificial Sequence: Synthetic oligonucleotide
caaagauauagugugguca

SEQ ID NO: 2629357 - RNA, 19 nt, Artificial Sequence
  Description of Artificial Sequence: Synthetic oligonucleotide
uugagauauuguuauucaa

SEQ ID NO: 2629358 - RNA, 19 nt, Artificial Sequence
  Description of Artificial Sequence: Synthetic oligonucleotide
aaauuagguguagucacaa

SEQ ID NO: 2629359 - RNA, 19 nt, Artificial Sequence
  Description of Artificial Sequence: Synthetic oligonucleotide
agaacauagagcucucuuu

SEQ ID NO: 2629360 - RNA, 19 nt, Artificial Sequence
  Description of Artificial Sequence: Synthetic oligonucleotide
gaagguuuaguauuucccu

SEQ ID NO: 2629361 - RNA, 19 nt, Artificial Sequence
  Description of Artificial Sequence: Synthetic oligonucleotide
ucaaagauauagugugguc

SEQ ID NO: 2629362 - RNA, 19 nt, Artificial Sequence
  Description of Artificial Sequence: Synthetic oligonucleotide
uggccuagaaccaccuuug

SEQ ID NO: 2629363 - RNA, 19 nt, Artificial Sequence
  Description of Artificial Sequence: Synthetic oligonucleotide
agacucaaucaccaucaag

SEQ ID NO: 2629364 - RNA, 19 nt, Artificial Sequence
  Description of Artificial Sequence: Synthetic oligonucleotide
agaauuagggaagugguua

SEQ ID NO: 2629365 - RNA, 19 nt, Artificial Sequence
  Description of Artificial Sequence: Synthetic oligonucleotide
acacaggaaugugagcacc

SEQ ID NO: 2629366 - RNA, 19 nt, Artificial Sequence
  Description of Artificial Sequence: Synthetic oligonucleotide
aacccucuugaugguaggc

SEQ ID NO: 2629367 - RNA, 19 nt, Artificial Sequence
  Description of Artificial Sequence: Synthetic oligonucleotide
ugauaaagcugugugcuuc

SEQ ID NO: 2629368 - RNA, 19 nt, Artificial Sequence
  Description of Artificial Sequence: Synthetic oligonucleotide
gauggacuuugagauauug

SEQ ID NO: 2629369 - RNA, 19 nt, Artificial Sequence
  Description of Artificial Sequence: Synthetic oligonucleotide
augugguaaaugaaucaac

SEQ ID NO: 2629370 - RNA, 19 nt, Artificial Sequence
  Description of Artificial Sequence: Synthetic oligonucleotide
uaugguguuuuaucaucca

SEQ ID NO: 2629371 - RNA, 19 nt, Artificial Sequence
  Description of Artificial Sequence: Synthetic oligonucleotide
acagaauuagggaaguggu

SEQ ID NO: 2629372 - RNA, 19 nt, Artificial Sequence
  Description of Artificial Sequence: Synthetic oligonucleotide
uaaacacucuauuccaguu

SEQ ID NO: 2629373 - RNA, 19 nt, Artificial Sequence
  Description of Artificial Sequence: Synthetic oligonucleotide
guuuaguauuucccuacug

SEQ ID NO: 2629374 - RNA, 19 nt, Artificial Sequence
  Description of Artificial Sequence: Synthetic oligonucleotide
gacuuugagauauuguuau

SEQ ID NO: 2629375 - RNA, 19 nt, Artificial Sequence
  Description of Artificial Sequence: Synthetic oligonucleotide
aaauaggugcugaagguuu

SEQ ID NO: 2629376 - RNA, 19 nt, Artificial Sequence
  Description of Artificial Sequence: Synthetic oligonucleotide
uagggaagugguuaacagu

SEQ ID NO: 2629377 - RNA, 19 nt, Artificial Sequence
  Description of Artificial Sequence: Synthetic oligonucleotide
uggcuuaaacacucuauuc

SEQ ID NO: 2629378 - RNA, 19 nt, Artificial Sequence
  Description of Artificial Sequence: Synthetic oligonucleotide
uuggccuagaaccaccuuu

SEQ ID NO: 2629379 - RNA, 19 nt, Artificial Sequence
  Description of Artificial Sequence: Synthetic oligonucleotide
ugaacagaauuagggaagu

SEQ ID NO: 2629380 - RNA, 19 nt, Artificial Sequence
  Description of Artificial Sequence: Synthetic oligonucleotide
acauuuuaaacuacuuagu

SEQ ID NO: 2629381 - RNA, 19 nt, Artificial Sequence
  Description of Artificial Sequence: Synthetic oligonucleotide
acauagagcucucuuucgu

SEQ ID NO: 2629382 - RNA, 19 nt, Artificial Sequence
  Description of Artificial Sequence: Synthetic oligonucleotide
gaaugugagcaccuucuuc

SEQ ID NO: 2629383 - RNA, 19 nt, Artificial Sequence
  Description of Artificial Sequence: Synthetic oligonucleotide
auuguuauucaauguggua

SEQ ID NO: 2629384 - RNA, 19 nt, Artificial Sequence
  Description of Artificial Sequence: Synthetic oligonucleotide
ucucuuucgucuacuguuc

SEQ ID NO: 2629385 - RNA, 19 nt, Artificial Sequence
  Description of Artificial Sequence: Synthetic oligonucleotide
aagcauugagcugcccugg

SEQ ID NO: 2629386 - RNA, 19 nt, Artificial Sequence
  Description of Artificial Sequence: Synthetic oligonucleotide
cacagauucucaaagauau

SEQ ID NO: 2629387 - RNA, 19 nt, Artificial Sequence
  Description of Artificial Sequence: Synthetic oligonucleotide
acauuacauuuuaaacuac

SEQ ID NO: 2629388 - RNA, 19 nt, Artificial Sequence
  Description of Artificial Sequence: Synthetic oligonucleotide
guuacaauuauaaguauau

SEQ ID NO: 2629389 - RNA, 19 nt, Artificial Sequence
  Description of Artificial Sequence: Synthetic oligonucleotide
caguuuucagaaacauaag

SEQ ID NO: 2629390 - RNA, 19 nt, Artificial Sequence
  Description of Artificial Sequence: Synthetic oligonucleotide
acagguuauuggugacagc

SEQ ID NO: 2629391 - RNA, 19 nt, Artificial Sequence
  Description of Artificial Sequence: Synthetic oligonucleotide
auuagggaagugguuaaca

SEQ ID NO: 2629392 - RNA, 19 nt, Artificial Sequence
  Description of Artificial Sequence: Synthetic oligonucleotide
ccugaauuuagacucaauc

SEQ ID NO: 2629393 - RNA, 19 nt, Artificial Sequence
  Description of Artificial Sequence: Synthetic oligonucleotide
caauuggccuagaaccacc

SEQ ID NO: 2629394 - RNA, 19 nt, Artificial Sequence
  Description of Artificial Sequence: Synthetic oligonucleotide
cauuuugccacuaaauuau

SEQ ID NO: 2629395 - RNA, 19 nt, Artificial Sequence
  Description of Artificial Sequence: Synthetic oligonucleotide
acccucuugaugguaggcc

SEQ ID NO: 2629396 - RNA, 19 nt, Artificial Sequence
  Description of Artificial Sequence: Synthetic oligonucleotide
aacauaaguuacaauuaua

SEQ ID NO: 2629397 - RNA, 19 nt, Artificial Sequence
  Description of Artificial Sequence: Synthetic oligonucleotide
ucuccugaauuuagacuca

SEQ ID NO: 2629398 - RNA, 19 nt, Artificial Sequence
  Description of Artificial Sequence: Synthetic oligonucleotide
uuggugacagcaucaaauu

SEQ ID NO: 2629399 - RNA, 19 nt, Artificial Sequence
  Description of Artificial Sequence: Synthetic oligonucleotide
aaauuuccuuuagaaaaua

SEQ ID NO: 2629400 - RNA, 19 nt, Artificial Sequence
  Description of Artificial Sequence: Synthetic oligonucleotide
cagguuauuggugacagca

SEQ ID NO: 2629401 - RNA, 19 nt, Artificial Sequence
  Description of Artificial Sequence: Synthetic oligonucleotide
uuaaacuacuuaguuucau

SEQ ID NO: 2629402 - RNA, 19 nt, Artificial Sequence
  Description of Artificial Sequence: Synthetic oligonucleotide
caguugauggacuuugaga

SEQ ID NO: 2629403 - RNA, 19 nt, Artificial Sequence
  Description of Artificial Sequence: Synthetic oligonucleotide
gaauuagggaagugguuaa

SEQ ID NO: 2629404 - RNA, 19 nt, Artificial Sequence
  Description of Artificial Sequence: Synthetic oligonucleotide
ugugugcuucuccugaauu

SEQ ID NO: 2629405 - RNA, 19 nt, Artificial Sequence
  Description of Artificial Sequence: Synthetic oligonucleotide
aaucaacccucuugauggu

SEQ ID NO: 2629406 - RNA, 19 nt, Artificial Sequence
  Description of Artificial Sequence: Synthetic oligonucleotide
cauagagcucucuuucguc

SEQ ID NO: 2629407 - RNA, 19 nt, Artificial Sequence
  Description of Artificial Sequence: Synthetic oligonucleotide
uaauuggcuuaaacacucu

SEQ ID NO: 2629408 - RNA, 19 nt, Artificial Sequence
  Description of Artificial Sequence: Synthetic oligonucleotide
auccaaauaggugcugaag

SEQ ID NO: 2629409 - RNA, 19 nt, Artificial Sequence
  Description of Artificial Sequence: Synthetic oligonucleotide
guuauuggugacagcauca

SEQ ID NO: 2629410 - RNA, 19 nt, Artificial Sequence
  Description of Artificial Sequence: Synthetic oligonucleotide
ccuucuucguugauaaagc

SEQ ID NO: 2629411 - RNA, 19 nt, Artificial Sequence
  Description of Artificial Sequence: Synthetic oligonucleotide
gcuuaaacacucuauucca

SEQ ID NO: 2629412 - RNA, 19 nt, Artificial Sequence
  Description of Artificial Sequence: Synthetic oligonucleotide
guuucauuuugccacuaaa

SEQ ID NO: 2629413 - RNA, 19 nt, Artificial Sequence
  Description of Artificial Sequence: Synthetic oligonucleotide
agauauaguguggucacau

SEQ ID NO: 2629414 - RNA, 19 nt, Artificial Sequence
  Description of Artificial Sequence: Synthetic oligonucleotide
uucgucuacuguucacagc

SEQ ID NO: 2629415 - RNA, 19 nt, Artificial Sequence
  Description of Artificial Sequence: Synthetic oligonucleotide
acuaaauuaugguguuuua

SEQ ID NO: 2629416 - RNA, 19 nt, Artificial Sequence
  Description of Artificial Sequence: Synthetic oligonucleotide
aggaaauuuaacaccacuu

SEQ ID NO: 2629417 - RNA, 19 nt, Artificial Sequence
  Description of Artificial Sequence: Synthetic oligonucleotide
ucuuucgucuacuguucac

SEQ ID NO: 2629418 - RNA, 19 nt, Artificial Sequence
  Description of Artificial Sequence: Synthetic oligonucleotide
ggugacagcaucaaauuuc

SEQ ID NO: 2629419 - RNA, 19 nt, Artificial Sequence
  Description of Artificial Sequence: Synthetic oligonucleotide
acuguucacagcucacaga

SEQ ID NO: 2629420 - RNA, 19 nt, Artificial Sequence
  Description of Artificial Sequence: Synthetic oligonucleotide
uucguugauaaagcugugu

SEQ ID NO: 2629421 - RNA, 19 nt, Artificial Sequence
  Description of Artificial Sequence: Synthetic oligonucleotide
aggaaugugagcaccuucu

SEQ ID NO: 2629422 - RNA, 19 nt, Artificial Sequence
  Description of Artificial Sequence: Synthetic oligonucleotide
agcugugugcuucuccuga

SEQ ID NO: 2629423 - RNA, 19 nt, Artificial Sequence
  Description of Artificial Sequence: Synthetic oligonucleotide
agggaagugguuaacaguu

SEQ ID NO: 2629424 - RNA, 19 nt, Artificial Sequence
  Description of Artificial Sequence: Synthetic oligonucleotide
ugcugaagguuuaguauuu

SEQ ID NO: 2629425 - RNA, 19 nt, Artificial Sequence
  Description of Artificial Sequence: Synthetic oligonucleotide
ccuuuuaccaaacagguua

SEQ ID NO: 2629426 - RNA, 19 nt, Artificial Sequence
  Description of Artificial Sequence: Synthetic oligonucleotide
uuauuggugacagcaucaa

SEQ ID NO: 2629427 - RNA, 19 nt, Artificial Sequence
  Description of Artificial Sequence: Synthetic oligonucleotide
ggccaaagcauugagcugc

SEQ ID NO: 2629428 - RNA, 19 nt, Artificial Sequence
  Description of Artificial Sequence: Synthetic oligonucleotide
gaagugguuaacaguuuuc

SEQ ID NO: 2629429 - RNA, 19 nt, Artificial Sequence
  Description of Artificial Sequence: Synthetic oligonucleotide
caggcuacaggaaauuuaa

SEQ ID NO: 2629430 - RNA, 19 nt, Artificial Sequence
  Description of Artificial Sequence: Synthetic oligonucleotide
uucacagcucacagauucu

SEQ ID NO: 2629431 - RNA, 19 nt, Artificial Sequence
  Description of Artificial Sequence: Synthetic oligonucleotide
ccaucaagucuaaauuagg

SEQ ID NO: 2629432 - RNA, 19 nt, Artificial Sequence
  Description of Artificial Sequence: Synthetic oligonucleotide
ugugcuucuccugaauuua

SEQ ID NO: 2629433 - RNA, 19 nt, Artificial Sequence
  Description of Artificial Sequence: Synthetic oligonucleotide
uccagacuggucucaaaau

SEQ ID NO: 2629434 - RNA, 19 nt, Artificial Sequence
  Description of Artificial Sequence: Synthetic oligonucleotide
caucaagucuaaauuaggu

SEQ ID NO: 2629435 - RNA, 19 nt, Artificial Sequence
  Description of Artificial Sequence: Synthetic oligonucleotide
uuucccuacugagaagaac

SEQ ID NO: 2629436 - RNA, 19 nt, Artificial Sequence
  Description of Artificial Sequence: Synthetic oligonucleotide
auuuagacucaaucaccau

SEQ ID NO: 2629437 - RNA, 19 nt, Artificial Sequence
  Description of Artificial Sequence: Synthetic oligonucleotide
gaccuuuuaccaaacaggu

SEQ ID NO: 2629438 - RNA, 19 nt, Artificial Sequence
  Description of Artificial Sequence: Synthetic oligonucleotide
acaagaccuuuuaccaaac

SEQ ID NO: 2629439 - RNA, 19 nt, Artificial Sequence
  Description of Artificial Sequence: Synthetic oligonucleotide
augguguuuuaucauccaa

SEQ ID NO: 2629440 - RNA, 19 nt, Artificial Sequence
  Description of Artificial Sequence: Synthetic oligonucleotide
uagguguagucacaagcuu

SEQ ID NO: 2629441 - RNA, 19 nt, Artificial Sequence
  Description of Artificial Sequence: Synthetic oligonucleotide
aauuggccuagaaccaccu

SEQ ID NO: 2629442 - RNA, 19 nt, Artificial Sequence
  Description of Artificial Sequence: Synthetic oligonucleotide
ucuugaugguaggccaaag

SEQ ID NO: 2629443 - RNA, 19 nt, Artificial Sequence
  Description of Artificial Sequence: Synthetic oligonucleotide
uagaaccaccuuuguauuc

SEQ ID NO: 2629444 - RNA, 19 nt, Artificial Sequence
  Description of Artificial Sequence: Synthetic oligonucleotide
gguuauuggugacagcauc

SEQ ID NO: 2629445 - RNA, 19 nt, Artificial Sequence
  Description of Artificial Sequence: Synthetic oligonucleotide
auuggcuuaaacacucuau

SEQ ID NO: 2629446 - RNA, 19 nt, Artificial Sequence
  Description of Artificial Sequence: Synthetic oligonucleotide
uguggucacauuagcccuc

SEQ ID NO: 2629447 - RNA, 19 nt, Artificial Sequence
  Description of Artificial Sequence: Synthetic oligonucleotide
aagcugugugcuucuccug

SEQ ID NO: 2629448 - RNA, 19 nt, Artificial Sequence
  Description of Artificial Sequence: Synthetic oligonucleotide
aagauauaguguggucaca

SEQ ID NO: 2629449 - RNA, 19 nt, Artificial Sequence
  Description of Artificial Sequence: Synthetic oligonucleotide
caccacuuuaaacauuaca

SEQ ID NO: 2629450 - RNA, 19 nt, Artificial Sequence
  Description of Artificial Sequence: Synthetic oligonucleotide
gucuacuguucacagcuca

SEQ ID NO: 2629451 - RNA, 19 nt, Artificial Sequence
  Description of Artificial Sequence: Synthetic oligonucleotide
cucuucucauggaaucaac

SEQ ID NO: 2629452 - RNA, 19 nt, Artificial Sequence
  Description of Artificial Sequence: Synthetic oligonucleotide
aguugaaaacaagaccuuu

SEQ ID NO: 2629453 - RNA, 19 nt, Artificial Sequence
  Description of Artificial Sequence: Synthetic oligonucleotide
cauuuuaaacuacuuaguu

SEQ ID NO: 2629454 - RNA, 19 nt, Artificial Sequence
  Description of Artificial Sequence: Synthetic oligonucleotide
aggugcugaagguuuagua

SEQ ID NO: 2629455 - RNA, 19 nt, Artificial Sequence
  Description of Artificial Sequence: Synthetic oligonucleotide
guaggccaaagcauugagc

SEQ ID NO: 2629456 - RNA, 19 nt, Artificial Sequence
  Description of Artificial Sequence: Synthetic oligonucleotide
cacacaggaaugugagcac

SEQ ID NO: 2629457 - RNA, 19 nt, Artificial Sequence
  Description of Artificial Sequence: Synthetic oligonucleotide
agaagaacauagagcucuc

SEQ ID NO: 2629458 - RNA, 19 nt, Artificial Sequence
  Description of Artificial Sequence: Synthetic oligonucleotide
uuagcccucuucucaugga

SEQ ID NO: 2629459 - RNA, 19 nt, Artificial Sequence
  Description of Artificial Sequence: Synthetic oligonucleotide
gguaggccaaagcauugag

SEQ ID NO: 2629460 - RNA, 19 nt, Artificial Sequence
  Description of Artificial Sequence: Synthetic oligonucleotide
caagucuaaauuaggugua

SEQ ID NO: 2629461 - RNA, 19 nt, Artificial Sequence
  Description of Artificial Sequence: Synthetic oligonucleotide
aaguugaaaacaagaccuu

SEQ ID NO: 2629462 - RNA, 19 nt, Artificial Sequence
  Description of Artificial Sequence: Synthetic oligonucleotide
agacuggucucaaaauucu

SEQ ID NO: 2629463 - RNA, 19 nt, Artificial Sequence
  Description of Artificial Sequence: Synthetic oligonucleotide
uagcccucuucucauggaa

SEQ ID NO: 2629464 - RNA, 19 nt, Artificial Sequence
  Description of Artificial Sequence: Synthetic oligonucleotide
aaacaggcuacaggaaauu

SEQ ID NO: 2629465 - RNA, 19 nt, Artificial Sequence
  Description of Artificial Sequence: Synthetic oligonucleotide
gcuucuccugaauuuagac

SEQ ID NO: 2629466 - RNA, 19 nt, Artificial Sequence
  Description of Artificial Sequence: Synthetic oligonucleotide
cuuucgucuacuguucaca

SEQ ID NO: 2629467 - RNA, 19 nt, Artificial Sequence
  Description of Artificial Sequence: Synthetic oligonucleotide
agucuaaauuagguguagu

SEQ ID NO: 2629468 - RNA, 19 nt, Artificial Sequence
  Description of Artificial Sequence: Synthetic oligonucleotide
uugauaaagcugugugcuu

SEQ ID NO: 2629469 - RNA, 19 nt, Artificial Sequence
  Description of Artificial Sequence: Synthetic oligonucleotide
gauaaagcugugugcuucu

SEQ ID NO: 2629470 - RNA, 19 nt, Artificial Sequence
  Description of Artificial Sequence: Synthetic oligonucleotide
caacccucuugaugguagg

SEQ ID NO: 2629471 - RNA, 19 nt, Artificial Sequence
  Description of Artificial Sequence: Synthetic oligonucleotide
uaacaccacuuuaaacauu

SEQ ID NO: 2629472 - RNA, 19 nt, Artificial Sequence
  Description of Artificial Sequence: Synthetic oligonucleotide
ucacagcucacagauucuc

SEQ ID NO: 2629473 - RNA, 19 nt, Artificial Sequence
  Description of Artificial Sequence: Synthetic oligonucleotide
aacaggcuacaggaaauuu

SEQ ID NO: 2629474 - RNA, 19 nt, Artificial Sequence
  Description of Artificial Sequence: Synthetic oligonucleotide
ucccuacugagaagaacau

SEQ ID NO: 2629475 - RNA, 19 nt, Artificial Sequence
  Description of Artificial Sequence: Synthetic oligonucleotide
caccaucaagucuaaauua

SEQ ID NO: 2629476 - RNA, 19 nt, Artificial Sequence
  Description of Artificial Sequence: Synthetic oligonucleotide
gaacagaauuagggaagug

SEQ ID NO: 2629477 - RNA, 19 nt, Artificial Sequence
  Description of Artificial Sequence: Synthetic oligonucleotide
gacuggucucaaaauucug

SEQ ID NO: 2629478 - RNA, 19 nt, Artificial Sequence
  Description of Artificial Sequence: Synthetic oligonucleotide
auaaagcugugugcuucuc

SEQ ID NO: 2629479 - RNA, 19 nt, Artificial Sequence
  Description of Artificial Sequence: Synthetic oligonucleotide
auaggugcugaagguuuag

SEQ ID NO: 2629480 - RNA, 19 nt, Artificial Sequence
  Description of Artificial Sequence: Synthetic oligonucleotide
cuucguugauaaagcugug

SEQ ID NO: 2629481 - RNA, 19 nt, Artificial Sequence
  Description of Artificial Sequence: Synthetic oligonucleotide
cguugauaaagcugugugc

SEQ ID NO: 2629482 - RNA, 19 nt, Artificial Sequence
  Description of Artificial Sequence: Synthetic oligonucleotide
ccaccuuuguauuccagac

SEQ ID NO: 2629483 - RNA, 19 nt, Artificial Sequence
  Description of Artificial Sequence: Synthetic oligonucleotide
caggaaugugagcaccuuc

SEQ ID NO: 2629484 - RNA, 19 nt, Artificial Sequence
  Description of Artificial Sequence: Synthetic oligonucleotide
acuuugagauauuguuauu

SEQ ID NO: 2629485 - RNA, 19 nt, Artificial Sequence
  Description of Artificial Sequence: Synthetic oligonucleotide
uccugaauuuagacucaau

SEQ ID NO: 2629486 - RNA, 19 nt, Artificial Sequence
  Description of Artificial Sequence: Synthetic oligonucleotide
augaaucaacccucuugau

SEQ ID NO: 2629487 - RNA, 19 nt, Artificial Sequence
  Description of Artificial Sequence: Synthetic oligonucleotide
ugguaggccaaagcauuga

SEQ ID NO: 2629488 - RNA, 19 nt, Artificial Sequence
  Description of Artificial Sequence: Synthetic oligonucleotide
uagacucaaucaccaucaa

SEQ ID NO: 2629489 - RNA, 19 nt, Artificial Sequence
  Description of Artificial Sequence: Synthetic oligonucleotide
cauuagcccucuucucaug

SEQ ID NO: 2629490 - RNA, 19 nt, Artificial Sequence
  Description of Artificial Sequence: Synthetic oligonucleotide
augugagcaccuucuucgu

SEQ ID NO: 2629491 - RNA, 19 nt, Artificial Sequence
  Description of Artificial Sequence: Synthetic oligonucleotide
aaccaccuuuguauuccag

SEQ ID NO: 2629492 - RNA, 19 nt, Artificial Sequence
  Description of Artificial Sequence: Synthetic oligonucleotide
ggucacauuagcccucuuc

SEQ ID NO: 2629493 - RNA, 19 nt, Artificial Sequence
  Description of Artificial Sequence: Synthetic oligonucleotide
ugugagcaccuucuucguu

SEQ ID NO: 2629494 - RNA, 19 nt, Artificial Sequence
  Description of Artificial Sequence: Synthetic oligonucleotide
cucacagauucucaaagau

SEQ ID NO: 2629495 - RNA, 19 nt, Artificial Sequence
  Description of Artificial Sequence: Synthetic oligonucleotide
gaugguaggccaaagcauu

SEQ ID NO: 2629496 - RNA, 19 nt, Artificial Sequence
  Description of Artificial Sequence: Synthetic oligonucleotide
uauuccagacuggucucaa

SEQ ID NO: 2629497 - RNA, 19 nt, Artificial Sequence
  Description of Artificial Sequence: Synthetic oligonucleotide
gguguuuuaucauccaaau

SEQ ID NO: 2629498 - RNA, 19 nt, Artificial Sequence
  Description of Artificial Sequence: Synthetic oligonucleotide
acaggcuacaggaaauuua

SEQ ID NO: 2629499 - RNA, 19 nt, Artificial Sequence
  Description of Artificial Sequence: Synthetic oligonucleotide
guguuuuaucauccaaaua

SEQ ID NO: 2629500 - RNA, 19 nt, Artificial Sequence
  Description of Artificial Sequence: Synthetic oligonucleotide
gaaccaccuuuguauucca

SEQ ID NO: 2629501 - RNA, 19 nt, Artificial Sequence
  Description of Artificial Sequence: Synthetic oligonucleotide
ccuagaaccaccuuuguau

SEQ ID NO: 2629502 - RNA, 19 nt, Artificial Sequence
  Description of Artificial Sequence: Synthetic oligonucleotide
guaaaugaaucaacccucu

SEQ ID NO: 2629503 - RNA, 19 nt, Artificial Sequence
  Description of Artificial Sequence: Synthetic oligonucleotide
cuaaauuaugguguuuuau

SEQ ID NO: 2629504 - RNA, 19 nt, Artificial Sequence
  Description of Artificial Sequence: Synthetic oligonucleotide
caggaaauuuaacaccacu

SEQ ID NO: 2629505 - RNA, 19 nt, Artificial Sequence
  Description of Artificial Sequence: Synthetic oligonucleotide
agaaaauaauuggcuuaaa

SEQ ID NO: 2629506 - RNA, 19 nt, Artificial Sequence
  Description of Artificial Sequence: Synthetic oligonucleotide
gcaccuucuucguugauaa

SEQ ID NO: 2629507 - RNA, 19 nt, Artificial Sequence
  Description of Artificial Sequence: Synthetic oligonucleotide
uguucacagcucacagauu

SEQ ID NO: 2629508 - RNA, 19 nt, Artificial Sequence
  Description of Artificial Sequence: Synthetic oligonucleotide
gugcuucuccugaauuuag

SEQ ID NO: 2629509 - RNA, 19 nt, Artificial Sequence
  Description of Artificial Sequence: Synthetic oligonucleotide
cuucucauggaaucaacuu

SEQ ID NO: 2629510 - RNA, 19 nt, Artificial Sequence
  Description of Artificial Sequence: Synthetic oligonucleotide
acaccacuuuaaacauuac

SEQ ID NO: 2629511 - RNA, 19 nt, Artificial Sequence
  Description of Artificial Sequence: Synthetic oligonucleotide
agguguagucacaagcuuu

SEQ ID NO: 2629512 - RNA, 19 nt, Artificial Sequence
  Description of Artificial Sequence: Synthetic oligonucleotide
cacagcucacagauucuca

SEQ ID NO: 2629513 - RNA, 19 nt, Artificial Sequence
  Description of Artificial Sequence: Synthetic oligonucleotide
ggugcugaagguuuaguau

SEQ ID NO: 2629514 - RNA, 19 nt, Artificial Sequence
  Description of Artificial Sequence: Synthetic oligonucleotide
guguggucacauuagcccu

SEQ ID NO: 2629515 - RNA, 19 nt, Artificial Sequence
  Description of Artificial Sequence: Synthetic oligonucleotide
uuuuaccaaacagguuauu

SEQ ID NO: 2629516 - RNA, 19 nt, Artificial Sequence
  Description of Artificial Sequence: Synthetic oligonucleotide
agcuccaauuggccuagaa

SEQ ID NO: 2629517 - RNA, 19 nt, Artificial Sequence
  Description of Artificial Sequence: Synthetic oligonucleotide
caagaccuuuuaccaaaca

SEQ ID NO: 2629518 - RNA, 19 nt, Artificial Sequence
  Description of Artificial Sequence: Synthetic oligonucleotide
cuacuguucacagcucaca

SEQ ID NO: 2629519 - RNA, 19 nt, Artificial Sequence
  Description of Artificial Sequence: Synthetic oligonucleotide
cuuuuaccaaacagguuau

SEQ ID NO: 2629520 - RNA, 19 nt, Artificial Sequence
  Description of Artificial Sequence: Synthetic oligonucleotide
guugaaaacaagaccuuuu

SEQ ID NO: 2629521 - RNA, 19 nt, Artificial Sequence
  Description of Artificial Sequence: Synthetic oligonucleotide
ucucacuuugcagcuccaa

SEQ ID NO: 2629522 - RNA, 19 nt, Artificial Sequence
  Description of Artificial Sequence: Synthetic oligonucleotide
agcaccuucuucguugaua

SEQ ID NO: 2629523 - RNA, 19 nt, Artificial Sequence
  Description of Artificial Sequence: Synthetic oligonucleotide
cuucuucguugauaaagcu

SEQ ID NO: 2629524 - RNA, 19 nt, Artificial Sequence
  Description of Artificial Sequence: Synthetic oligonucleotide
gagccuccacacaggaaug

SEQ ID NO: 2629525 - RNA, 19 nt, Artificial Sequence
  Description of Artificial Sequence: Synthetic oligonucleotide
gauauaguguggucacauu

SEQ ID NO: 2629526 - RNA, 19 nt, Artificial Sequence
  Description of Artificial Sequence: Synthetic oligonucleotide
gcucacagauucucaaaga

SEQ ID NO: 2629527 - RNA, 19 nt, Artificial Sequence
  Description of Artificial Sequence: Synthetic oligonucleotide
ugauggacuuugagauauu

SEQ ID NO: 2629528 - RNA, 19 nt, Artificial Sequence
  Description of Artificial Sequence: Synthetic oligonucleotide
cucuuucgucuacuguuca

SEQ ID NO: 2629529 - RNA, 19 nt, Artificial Sequence
  Description of Artificial Sequence: Synthetic oligonucleotide
cacuaaauuaugguguuuu

SEQ ID NO: 2629530 - RNA, 19 nt, Artificial Sequence
  Description of Artificial Sequence: Synthetic oligonucleotide
ggacuuugagauauuguua

SEQ ID NO: 2629531 - RNA, 19 nt, Artificial Sequence
  Description of Artificial Sequence: Synthetic oligonucleotide
auuggccuagaaccaccuu

SEQ ID NO: 2629532 - RNA, 19 nt, Artificial Sequence
  Description of Artificial Sequence: Synthetic oligonucleotide
guauuccagacuggucuca

SEQ ID NO: 2629533 - RNA, 19 nt, Artificial Sequence
  Description of Artificial Sequence: Synthetic oligonucleotide
agguuauuggugacagcau

SEQ ID NO: 2629534 - RNA, 19 nt, Artificial Sequence
  Description of Artificial Sequence: Synthetic oligonucleotide
cuggagccuccacacagga

SEQ ID NO: 2629535 - RNA, 19 nt, Artificial Sequence
  Description of Artificial Sequence: Synthetic oligonucleotide
gaagaacauagagcucucu

SEQ ID NO: 2629536 - RNA, 19 nt, Artificial Sequence
  Description of Artificial Sequence: Synthetic oligonucleotide
gguuaacaguuuucagaaa

SEQ ID NO: 2629537 - RNA, 19 nt, Artificial Sequence
  Description of Artificial Sequence: Synthetic oligonucleotide
gguuuaguauuucccuacu

SEQ ID NO: 2629538 - RNA, 19 nt, Artificial Sequence
  Description of Artificial Sequence: Synthetic oligonucleotide
agccuccacacaggaaugu

SEQ ID NO: 2629539 - RNA, 19 nt, Artificial Sequence
  Description of Artificial Sequence: Synthetic oligonucleotide
auuucccuacugagaagaa

SEQ ID NO: 2629540 - RNA, 19 nt, Artificial Sequence
  Description of Artificial Sequence: Synthetic oligonucleotide
ccaauuggccuagaaccac

SEQ ID NO: 2629541 - RNA, 19 nt, Artificial Sequence
  Description of Artificial Sequence: Synthetic oligonucleotide
accuuuuaccaaacagguu

SEQ ID NO: 2629542 - RNA, 19 nt, Artificial Sequence
  Description of Artificial Sequence: Synthetic oligonucleotide
cacaggaaugugagcaccu

SEQ ID NO: 2629543 - RNA, 19 nt, Artificial Sequence
  Description of Artificial Sequence: Synthetic oligonucleotide
gugugcuucuccugaauuu

SEQ ID NO: 2629544 - RNA, 19 nt, Artificial Sequence
  Description of Artificial Sequence: Synthetic oligonucleotide
cagaaacauaaguuacaau

SEQ ID NO: 2629545 - RNA, 19 nt, Artificial Sequence
  Description of Artificial Sequence: Synthetic oligonucleotide
ggaagugguuaacaguuuu

SEQ ID NO: 2629546 - RNA, 19 nt, Artificial Sequence
  Description of Artificial Sequence: Synthetic oligonucleotide
acagauucucaaagauaua

SEQ ID NO: 2629547 - RNA, 19 nt, Artificial Sequence
  Description of Artificial Sequence: Synthetic oligonucleotide
caaucaccaucaagucuaa

SEQ ID NO: 2629548 - RNA, 19 nt, Artificial Sequence
  Description of Artificial Sequence: Synthetic oligonucleotide
aucaacccucuugauggua

SEQ ID NO: 2629549 - RNA, 19 nt, Artificial Sequence
  Description of Artificial Sequence: Synthetic oligonucleotide
cagaauuagggaagugguu

SEQ ID NO: 2629550 - RNA, 19 nt, Artificial Sequence
  Description of Artificial Sequence: Synthetic oligonucleotide
gcagcuccaauuggccuag

SEQ ID NO: 2629551 - RNA, 19 nt, Artificial Sequence
  Description of Artificial Sequence: Synthetic oligonucleotide
guuauucaaugugguaaau

SEQ ID NO: 2629552 - RNA, 19 nt, Artificial Sequence
  Description of Artificial Sequence: Synthetic oligonucleotide
caccuuuguauuccagacu

SEQ ID NO: 2629553 - RNA, 19 nt, Artificial Sequence
  Description of Artificial Sequence: Synthetic oligonucleotide
cccucuugaugguaggcca

SEQ ID NO: 2629554 - RNA, 19 nt, Artificial Sequence
  Description of Artificial Sequence: Synthetic oligonucleotide
gcugaagguuuaguauuuc

SEQ ID NO: 2629555 - RNA, 19 nt, Artificial Sequence
  Description of Artificial Sequence: Synthetic oligonucleotide
gccuagaaccaccuuugua

SEQ ID NO: 2629556 - RNA, 19 nt, Artificial Sequence
  Description of Artificial Sequence: Synthetic oligonucleotide
cuccugaauuuagacucaa

SEQ ID NO: 2629557 - RNA, 19 nt, Artificial Sequence
  Description of Artificial Sequence: Synthetic oligonucleotide
guguagucacaagcuuuaa

SEQ ID NO: 2629558 - RNA, 19 nt, Artificial Sequence
  Description of Artificial Sequence: Synthetic oligonucleotide
acacucuauuccaguugau

SEQ ID NO: 2629559 - RNA, 19 nt, Artificial Sequence
  Description of Artificial Sequence: Synthetic oligonucleotide
gccacuaaauuaugguguu

SEQ ID NO: 2629560 - RNA, 19 nt, Artificial Sequence
  Description of Artificial Sequence: Synthetic oligonucleotide
gcucucuuucgucuacugu

SEQ ID NO: 2629561 - RNA, 19 nt, Artificial Sequence
  Description of Artificial Sequence: Synthetic oligonucleotide
uggucacauuagcccucuu

SEQ ID NO: 2629562 - RNA, 19 nt, Artificial Sequence
  Description of Artificial Sequence: Synthetic oligonucleotide
ccagacuggucucaaaauu

SEQ ID NO: 2629563 - RNA, 19 nt, Artificial Sequence
  Description of Artificial Sequence: Synthetic oligonucleotide
guggucacauuagcccucu

SEQ ID NO: 2629564 - RNA, 19 nt, Artificial Sequence
  Description of Artificial Sequence: Synthetic oligonucleotide
ggaaugugagcaccuucuu

SEQ ID NO: 2629565 - RNA, 19 nt, Artificial Sequence
  Description of Artificial Sequence: Synthetic oligonucleotide
caccuucuucguugauaaa

SEQ ID NO: 2629566 - RNA, 19 nt, Artificial Sequence
  Description of Artificial Sequence: Synthetic oligonucleotide
cugugugcuucuccugaau

SEQ ID NO: 2629567 - RNA, 19 nt, Artificial Sequence
  Description of Artificial Sequence: Synthetic oligonucleotide
ccucuucucauggaaucaa

SEQ ID NO: 2629568 - RNA, 19 nt, Artificial Sequence
  Description of Artificial Sequence: Synthetic oligonucleotide
cgucuacuguucacagcuc

SEQ ID NO: 2629569 - RNA, 19 nt, Artificial Sequence
  Description of Artificial Sequence: Synthetic oligonucleotide
ggccuagaaccaccuuugu

SEQ ID NO: 2629570 - RNA, 19 nt, Artificial Sequence
  Description of Artificial Sequence: Synthetic oligonucleotide
gggucucacuuugcagcuc

SEQ ID NO: 2629571 - RNA, 19 nt, Artificial Sequence
  Description of Artificial Sequence: Synthetic oligonucleotide
cccuacugagaagaacaua

SEQ ID NO: 2629572 - RNA, 19 nt, Artificial Sequence
  Description of Artificial Sequence: Synthetic oligonucleotide
gcccuggagccuccacaca

SEQ ID NO: 2629573 - RNA, 19 nt, Artificial Sequence
  Description of Artificial Sequence: Synthetic oligonucleotide
gggaagugguuaacaguuu

SEQ ID NO: 2629574 - RNA, 19 nt, Artificial Sequence
  Description of Artificial Sequence: Synthetic oligonucleotide
cagcuccaauuggccuaga

SEQ ID NO: 2629575 - RNA, 19 nt, Artificial Sequence
  Description of Artificial Sequence: Synthetic oligonucleotide
ccacuaaauuaugguguuu

SEQ ID NO: 2629576 - RNA, 19 nt, Artificial Sequence
  Description of Artificial Sequence: Synthetic oligonucleotide
uuaauuuugaauuaaauag

SEQ ID NO: 2629577 - RNA, 19 nt, Artificial Sequence
  Description of Artificial Sequence: Synthetic oligonucleotide
ucuucuuuaaauuaaaugg

SEQ ID NO: 2629578 - RNA, 19 nt, Artificial Sequence
  Description of Artificial Sequence: Synthetic oligonucleotide
aacaaugccaguuuggucc

SEQ ID NO: 2629579 - RNA, 19 nt, Artificial Sequence
  Description of Artificial Sequence: Synthetic oligonucleotide
aaaguuuagaagcauaagg

SEQ ID NO: 2629580 - RNA, 19 nt, Artificial Sequence
  Description of Artificial Sequence: Synthetic oligonucleotide
aaaugucuguacuugaucc

SEQ ID NO: 2629581 - RNA, 19 nt, Artificial Sequence
  Description of Artificial Sequence: Synthetic oligonucleotide
ucugauauuagcaccaugg

SEQ ID NO: 2629582 - RNA, 19 nt, Artificial Sequence
  Description of Artificial Sequence: Synthetic oligonucleotide
uauacuguagaacauacag

SEQ ID NO: 2629583 - RNA, 19 nt, Artificial Sequence
  Description of Artificial Sequence: Synthetic oligonucleotide
uguacaacacucaaaaggg

SEQ ID NO: 2629584 - RNA, 19 nt, Artificial Sequence
  Description of Artificial Sequence: Synthetic oligonucleotide
uaauuuugaauuaaauagg

SEQ ID NO: 2629585 - RNA, 19 nt, Artificial Sequence
  Description of Artificial Sequence: Synthetic oligonucleotide
uaaauaagaacaaugccag

SEQ ID NO: 2629586 - RNA, 19 nt, Artificial Sequence
  Description of Artificial Sequence: Synthetic oligonucleotide
uagauaauuauuuaaaacu

SEQ ID NO: 2629587 - RNA, 19 nt, Artificial Sequence
  Description of Artificial Sequence: Synthetic oligonucleotide
uauuugaggacaauuaucc

SEQ ID NO: 2629588 - RNA, 19 nt, Artificial Sequence
  Description of Artificial Sequence: Synthetic oligonucleotide
aaucauauaacaugcaaca

SEQ ID NO: 2629589 - RNA, 19 nt, Artificial Sequence
  Description of Artificial Sequence: Synthetic oligonucleotide
gauauuagcaccaugguag

SEQ ID NO: 2629590 - RNA, 19 nt, Artificial Sequence
  Description of Artificial Sequence: Synthetic oligonucleotide
auguacaacacucaaaagg

SEQ ID NO: 2629591 - RNA, 19 nt, Artificial Sequence
  Description of Artificial Sequence: Synthetic oligonucleotide
aaaauggguacauagauaa

SEQ ID NO: 2629592 - RNA, 19 nt, Artificial Sequence
  Description of Artificial Sequence: Synthetic oligonucleotide
uuuaaauaagaacaaugcc

SEQ ID NO: 2629593 - RNA, 19 nt, Artificial Sequence
  Description of Artificial Sequence: Synthetic oligonucleotide
aauuaaauagggaucauag

SEQ ID NO: 2629594 - RNA, 19 nt, Artificial Sequence
  Description of Artificial Sequence: Synthetic oligonucleotide
aauuuugaauuaaauaggg

SEQ ID NO: 2629595 - RNA, 19 nt, Artificial Sequence
  Description of Artificial Sequence: Synthetic oligonucleotide
uucuguaaaauauuugagg

SEQ ID NO: 2629596 - RNA, 19 nt, Artificial Sequence
  Description of Artificial Sequence: Synthetic oligonucleotide
uggaguaucauuuagcucu

SEQ ID NO: 2629597 - RNA, 19 nt, Artificial Sequence
  Description of Artificial Sequence: Synthetic oligonucleotide
ucuguaaaauauuugagga

SEQ ID NO: 2629598 - RNA, 19 nt, Artificial Sequence
  Description of Artificial Sequence: Synthetic oligonucleotide
uuaaauagggaucauagua

SEQ ID NO: 2629599 - RNA, 19 nt, Artificial Sequence
  Description of Artificial Sequence: Synthetic oligonucleotide
uuuugaauuaaauagggau

SEQ ID NO: 2629600 - RNA, 19 nt, Artificial Sequence
  Description of Artificial Sequence: Synthetic oligonucleotide
uaucauuuagcucugauau

SEQ ID NO: 2629601 - RNA, 19 nt, Artificial Sequence
  Description of Artificial Sequence: Synthetic oligonucleotide
aaguuuagaagcauaaggg

SEQ ID NO: 2629602 - RNA, 19 nt, Artificial Sequence
  Description of Artificial Sequence: Synthetic oligonucleotide
aaaucauauaacaugcaac

SEQ ID NO: 2629603 - RNA, 19 nt, Artificial Sequence
  Description of Artificial Sequence: Synthetic oligonucleotide
ugaucuuucagacugacaa

SEQ ID NO: 2629604 - RNA, 19 nt, Artificial Sequence
  Description of Artificial Sequence: Synthetic oligonucleotide
ugucauacuacuuuaaaac

SEQ ID NO: 2629605 - RNA, 19 nt, Artificial Sequence
  Description of Artificial Sequence: Synthetic oligonucleotide
uuagcuaugaucuuucaga

SEQ ID NO: 2629606 - RNA, 19 nt, Artificial Sequence
  Description of Artificial Sequence: Synthetic oligonucleotide
acuuucauuagcuaugauc

SEQ ID NO: 2629607 - RNA, 19 nt, Artificial Sequence
  Description of Artificial Sequence: Synthetic oligonucleotide
ucauauaacaugcaacagc

SEQ ID NO: 2629608 - RNA, 19 nt, Artificial Sequence
  Description of Artificial Sequence: Synthetic oligonucleotide
acugauuugaauaagcggg

SEQ ID NO: 2629609 - RNA, 19 nt, Artificial Sequence
  Description of Artificial Sequence: Synthetic oligonucleotide
acugacaauauucugacug

SEQ ID NO: 2629610 - RNA, 19 nt, Artificial Sequence
  Description of Artificial Sequence: Synthetic oligonucleotide
augaaaucauauaacaugc

SEQ ID NO: 2629611 - RNA, 19 nt, Artificial Sequence
  Description of Artificial Sequence: Synthetic oligonucleotide
uguaaaauauuugaggaca

SEQ ID NO: 2629612 - RNA, 19 nt, Artificial Sequence
  Description of Artificial Sequence: Synthetic oligonucleotide
uagaauauacaguauccgg

SEQ ID NO: 2629613 - RNA, 19 nt, Artificial Sequence
  Description of Artificial Sequence: Synthetic oligonucleotide
aaaaguuaaaauagagggg

SEQ ID NO: 2629614 - RNA, 19 nt, Artificial Sequence
  Description of Artificial Sequence: Synthetic oligonucleotide
aacaugauguacaacacuc

SEQ ID NO: 2629615 - RNA, 19 nt, Artificial Sequence
  Description of Artificial Sequence: Synthetic oligonucleotide
ugauguacaacacucaaaa

SEQ ID NO: 2629616 - RNA, 19 nt, Artificial Sequence
  Description of Artificial Sequence: Synthetic oligonucleotide
uuuagaagcauaagggaug

SEQ ID NO: 2629617 - RNA, 19 nt, Artificial Sequence
  Description of Artificial Sequence: Synthetic oligonucleotide
uuugaauuaaauagggauc

SEQ ID NO: 2629618 - RNA, 19 nt, Artificial Sequence
  Description of Artificial Sequence: Synthetic oligonucleotide
uuauuuaaaacucuucuuu

SEQ ID NO: 2629619 - RNA, 19 nt, Artificial Sequence
  Description of Artificial Sequence: Synthetic oligonucleotide
guuuaaauaagaacaaugc

SEQ ID NO: 2629620 - RNA, 19 nt, Artificial Sequence
  Description of Artificial Sequence: Synthetic oligonucleotide
uaaauagggaucauaguac

SEQ ID NO: 2629621 - RNA, 19 nt, Artificial Sequence
  Description of Artificial Sequence: Synthetic oligonucleotide
uuucuguaaaauauuugag

SEQ ID NO: 2629622 - RNA, 19 nt, Artificial Sequence
  Description of Artificial Sequence: Synthetic oligonucleotide
ugacugauuugaauaagcg

SEQ ID NO: 2629623 - RNA, 19 nt, Artificial Sequence
  Description of Artificial Sequence: Synthetic oligonucleotide
aaccucucaaggcauauuc

SEQ ID NO: 2629624 - RNA, 19 nt, Artificial Sequence
  Description of Artificial Sequence: Synthetic oligonucleotide
cuaauaugaguccaguggg

SEQ ID NO: 2629625 - RNA, 19 nt, Artificial Sequence
  Description of Artificial Sequence: Synthetic oligonucleotide
aauacaguauguaacuguc

SEQ ID NO: 2629626 - RNA, 19 nt, Artificial Sequence
  Description of Artificial Sequence: Synthetic oligonucleotide
uuuaaagggagcacaagga

SEQ ID NO: 2629627 - RNA, 19 nt, Artificial Sequence
  Description of Artificial Sequence: Synthetic oligonucleotide
aaauggaguaucauuuagc

SEQ ID NO: 2629628 - RNA, 19 nt, Artificial Sequence
  Description of Artificial Sequence: Synthetic oligonucleotide
aauauucugacugauuuga

SEQ ID NO: 2629629 - RNA, 19 nt, Artificial Sequence
  Description of Artificial Sequence: Synthetic oligonucleotide
agauaauuauuuaaaacuc

SEQ ID NO: 2629630 - RNA, 19 nt, Artificial Sequence
  Description of Artificial Sequence: Synthetic oligonucleotide
accacuaaccucucaaggc

SEQ ID NO: 2629631 - RNA, 19 nt, Artificial Sequence
  Description of Artificial Sequence: Synthetic oligonucleotide
uaaauuaaauggaguauca

SEQ ID NO: 2629632 - RNA, 19 nt, Artificial Sequence
  Description of Artificial Sequence: Synthetic oligonucleotide
aacucaagcaaguuaccag

SEQ ID NO: 2629633 - RNA, 19 nt, Artificial Sequence
  Description of Artificial Sequence: Synthetic oligonucleotide
agaaauacaguauguaacu

SEQ ID NO: 2629634 - RNA, 19 nt, Artificial Sequence
  Description of Artificial Sequence: Synthetic oligonucleotide
gacugauuugaauaagcgg

SEQ ID NO: 2629635 - RNA, 19 nt, Artificial Sequence
  Description of Artificial Sequence: Synthetic oligonucleotide
uaaaaguuuagaagcauaa

SEQ ID NO: 2629636 - RNA, 19 nt, Artificial Sequence
  Description of Artificial Sequence: Synthetic oligonucleotide
accaugguagaauauacag

SEQ ID NO: 2629637 - RNA, 19 nt, Artificial Sequence
  Description of Artificial Sequence: Synthetic oligonucleotide
augagcaacuuucauuagc

SEQ ID NO: 2629638 - RNA, 19 nt, Artificial Sequence
  Description of Artificial Sequence: Synthetic oligonucleotide
aguuguuucaucugucuuc

SEQ ID NO: 2629639 - RNA, 19 nt, Artificial Sequence
  Description of Artificial Sequence: Synthetic oligonucleotide
uugaauuaaauagggauca

SEQ ID NO: 2629640 - RNA, 19 nt, Artificial Sequence
  Description of Artificial Sequence: Synthetic oligonucleotide
agacugacaauauucugac

SEQ ID NO: 2629641 - RNA, 19 nt, Artificial Sequence
  Description of Artificial Sequence: Synthetic oligonucleotide
aaaagcucuaguuaauuuu

SEQ ID NO: 2629642 - RNA, 19 nt, Artificial Sequence
  Description of Artificial Sequence: Synthetic oligonucleotide
aaauagggaucauaguacu

SEQ ID NO: 2629643 - RNA, 19 nt, Artificial Sequence
  Description of Artificial Sequence: Synthetic oligonucleotide
uagcguguuaacaugaugu

SEQ ID NO: 2629644 - RNA, 19 nt, Artificial Sequence
  Description of Artificial Sequence: Synthetic oligonucleotide
auaugcaagaaauacagua

SEQ ID NO: 2629645 - RNA, 19 nt, Artificial Sequence
  Description of Artificial Sequence: Synthetic oligonucleotide
uaagggaugaggaaggaaa

SEQ ID NO: 2629646 - RNA, 19 nt, Artificial Sequence
  Description of Artificial Sequence: Synthetic oligonucleotide
gcuaauaugaguccagugg

SEQ ID NO: 2629647 - RNA, 19 nt, Artificial Sequence
  Description of Artificial Sequence: Synthetic oligonucleotide
aaacucuguguuuaaauaa

SEQ ID NO: 2629648 - RNA, 19 nt, Artificial Sequence
  Description of Artificial Sequence: Synthetic oligonucleotide
guaacugucaccacuaacc

SEQ ID NO: 2629649 - RNA, 19 nt, Artificial Sequence
  Description of Artificial Sequence: Synthetic oligonucleotide
uugaggacaauuauccucu

SEQ ID NO: 2629650 - RNA, 19 nt, Artificial Sequence
  Description of Artificial Sequence: Synthetic oligonucleotide
uacaguauguaacugucac

SEQ ID NO: 2629651 - RNA, 19 nt, Artificial Sequence
  Description of Artificial Sequence: Synthetic oligonucleotide
aaaacucuguguuuaaaua

SEQ ID NO: 2629652 - RNA, 19 nt, Artificial Sequence
  Description of Artificial Sequence: Synthetic oligonucleotide
ugagcaacuuucauuagcu

SEQ ID NO: 2629653 - RNA, 19 nt, Artificial Sequence
  Description of Artificial Sequence: Synthetic oligonucleotide
uacuguagaacauacaguu

SEQ ID NO: 2629654 - RNA, 19 nt, Artificial Sequence
  Description of Artificial Sequence: Synthetic oligonucleotide
uagauuuugcuccuccucc

SEQ ID NO: 2629655 - RNA, 19 nt, Artificial Sequence
  Description of Artificial Sequence: Synthetic oligonucleotide
agcacaaggaaugagcaac

SEQ ID NO: 2629656 - RNA, 19 nt, Artificial Sequence
  Description of Artificial Sequence: Synthetic oligonucleotide
ucugucuucacacuagcgu

SEQ ID NO: 2629657 - RNA, 19 nt, Artificial Sequence
  Description of Artificial Sequence: Synthetic oligonucleotide
aauuauccucuacagacau

SEQ ID NO: 2629658 - RNA, 19 nt, Artificial Sequence
  Description of Artificial Sequence: Synthetic oligonucleotide
acaauauucugacugauuu

SEQ ID NO: 2629659 - RNA, 19 nt, Artificial Sequence
  Description of Artificial Sequence: Synthetic oligonucleotide
acaugcaacagcuaauaug

SEQ ID NO: 2629660 - RNA, 19 nt, Artificial Sequence
  Description of Artificial Sequence: Synthetic oligonucleotide
agaagcauaagggaugagg

SEQ ID NO: 2629661 - RNA, 19 nt, Artificial Sequence
  Description of Artificial Sequence: Synthetic oligonucleotide
gaaugagcaacuuucauua

SEQ ID NO: 2629662 - RNA, 19 nt, Artificial Sequence
  Description of Artificial Sequence: Synthetic oligonucleotide
uaugcaagaaauacaguau

SEQ ID NO: 2629663 - RNA, 19 nt, Artificial Sequence
  Description of Artificial Sequence: Synthetic oligonucleotide
cuuucauuagcuaugaucu

SEQ ID NO: 2629664 - RNA, 19 nt, Artificial Sequence
  Description of Artificial Sequence: Synthetic oligonucleotide
aguuuagaagcauaaggga

SEQ ID NO: 2629665 - RNA, 19 nt, Artificial Sequence
  Description of Artificial Sequence: Synthetic oligonucleotide
gcuaugaucuuucagacug

SEQ ID NO: 2629666 - RNA, 19 nt, Artificial Sequence
  Description of Artificial Sequence: Synthetic oligonucleotide
acaguauguaacugucacc

SEQ ID NO: 2629667 - RNA, 19 nt, Artificial Sequence
  Description of Artificial Sequence: Synthetic oligonucleotide
uuagcucugauauuagcac

SEQ ID NO: 2629668 - RNA, 19 nt, Artificial Sequence
  Description of Artificial Sequence: Synthetic oligonucleotide
auagauuuugcuccuccuc

SEQ ID NO: 2629669 - RNA, 19 nt, Artificial Sequence
  Description of Artificial Sequence: Synthetic oligonucleotide
uuaacaugauguacaacac

SEQ ID NO: 2629670 - RNA, 19 nt, Artificial Sequence
  Description of Artificial Sequence: Synthetic oligonucleotide
aaagcucuaguuaauuuug

SEQ ID NO: 2629671 - RNA, 19 nt, Artificial Sequence
  Description of Artificial Sequence: Synthetic oligonucleotide
auuagcuaugaucuuucag

SEQ ID NO: 2629672 - RNA, 19 nt, Artificial Sequence
  Description of Artificial Sequence: Synthetic oligonucleotide
ugguagaauauacaguauc

SEQ ID NO: 2629673 - RNA, 19 nt, Artificial Sequence
  Description of Artificial Sequence: Synthetic oligonucleotide
aggacaauuauccucuaca

SEQ ID NO: 2629674 - RNA, 19 nt, Artificial Sequence
  Description of Artificial Sequence: Synthetic oligonucleotide
agaacauacaguuguuuca

SEQ ID NO: 2629675 - RNA, 19 nt, Artificial Sequence
  Description of Artificial Sequence: Synthetic oligonucleotide
aaauauuugaggacaauua

SEQ ID NO: 2629676 - RNA, 19 nt, Artificial Sequence
  Description of Artificial Sequence: Synthetic oligonucleotide
uauacaguauccggcauag

SEQ ID NO: 2629677 - RNA, 19 nt, Artificial Sequence
  Description of Artificial Sequence: Synthetic oligonucleotide
cauaguacugucccuauac

SEQ ID NO: 2629678 - RNA, 19 nt, Artificial Sequence
  Description of Artificial Sequence: Synthetic oligonucleotide
uucagacugacaauauucu

SEQ ID NO: 2629679 - RNA, 19 nt, Artificial Sequence
  Description of Artificial Sequence: Synthetic oligonucleotide
gaauauacaguauccggca

SEQ ID NO: 2629680 - RNA, 19 nt, Artificial Sequence
  Description of Artificial Sequence: Synthetic oligonucleotide
guagaauauacaguauccg

SEQ ID NO: 2629681 - RNA, 19 nt, Artificial Sequence
  Description of Artificial Sequence: Synthetic oligonucleotide
uacaacacucaaaagggaa

SEQ ID NO: 2629682 - RNA, 19 nt, Artificial Sequence
  Description of Artificial Sequence: Synthetic oligonucleotide
cuucuuuaaauuaaaugga

SEQ ID NO: 2629683 - RNA, 19 nt, Artificial Sequence
  Description of Artificial Sequence: Synthetic oligonucleotide
aauggguacauagauaauu

SEQ ID NO: 2629684 - RNA, 19 nt, Artificial Sequence
  Description of Artificial Sequence: Synthetic oligonucleotide
uuauccucuacagacauuc

SEQ ID NO: 2629685 - RNA, 19 nt, Artificial Sequence
  Description of Artificial Sequence: Synthetic oligonucleotide
augcaagaaauacaguaug

SEQ ID NO: 2629686 - RNA, 19 nt, Artificial Sequence
  Description of Artificial Sequence: Synthetic oligonucleotide
acaacacaaaugucuguac

SEQ ID NO: 2629687 - RNA, 19 nt, Artificial Sequence
  Description of Artificial Sequence: Synthetic oligonucleotide
acauacaguuguuucaucu

SEQ ID NO: 2629688 - RNA, 19 nt, Artificial Sequence
  Description of Artificial Sequence: Synthetic oligonucleotide
aacucuguguuuaaauaag

SEQ ID NO: 2629689 - RNA, 19 nt, Artificial Sequence
  Description of Artificial Sequence: Synthetic oligonucleotide
cugacugauuugaauaagc

SEQ ID NO: 2629690 - RNA, 19 nt, Artificial Sequence
  Description of Artificial Sequence: Synthetic oligonucleotide
auaugaguccaguggguac

SEQ ID NO: 2629691 - RNA, 19 nt, Artificial Sequence
  Description of Artificial Sequence: Synthetic oligonucleotide
uagaacauacaguuguuuc

SEQ ID NO: 2629692 - RNA, 19 nt, Artificial Sequence
  Description of Artificial Sequence: Synthetic oligonucleotide
ugcaagaaauacaguaugu

SEQ ID NO: 2629693 - RNA, 19 nt, Artificial Sequence
  Description of Artificial Sequence: Synthetic oligonucleotide
aaugucuguacuugaucca

SEQ ID NO: 2629694 - RNA, 19 nt, Artificial Sequence
  Description of Artificial Sequence: Synthetic oligonucleotide
caugguagaauauacagua

SEQ ID NO: 2629695 - RNA, 19 nt, Artificial Sequence
  Description of Artificial Sequence: Synthetic oligonucleotide
ucuaguuaauuuugaauua

SEQ ID NO: 2629696 - RNA, 19 nt, Artificial Sequence
  Description of Artificial Sequence: Synthetic oligonucleotide
auuaaauagggaucauagu

SEQ ID NO: 2629697 - RNA, 19 nt, Artificial Sequence
  Description of Artificial Sequence: Synthetic oligonucleotide
auucugacugauuugaaua

SEQ ID NO: 2629698 - RNA, 19 nt, Artificial Sequence
  Description of Artificial Sequence: Synthetic oligonucleotide
auggaaaagcucuaguuaa

SEQ ID NO: 2629699 - RNA, 19 nt, Artificial Sequence
  Description of Artificial Sequence: Synthetic oligonucleotide
ugauauuagcaccauggua

SEQ ID NO: 2629700 - RNA, 19 nt, Artificial Sequence
  Description of Artificial Sequence: Synthetic oligonucleotide
guuaccagucuuuucauca

SEQ ID NO: 2629701 - RNA, 19 nt, Artificial Sequence
  Description of Artificial Sequence: Synthetic oligonucleotide
ucauuuagcucugauauua

SEQ ID NO: 2629702 - RNA, 19 nt, Artificial Sequence
  Description of Artificial Sequence: Synthetic oligonucleotide
ugaaaucauauaacaugca

SEQ ID NO: 2629703 - RNA, 19 nt, Artificial Sequence
  Description of Artificial Sequence: Synthetic oligonucleotide
uauguaacugucaccacua

SEQ ID NO: 2629704 - RNA, 19 nt, Artificial Sequence
  Description of Artificial Sequence: Synthetic oligonucleotide
uugaauaagcggguuauga

SEQ ID NO: 2629705 - RNA, 19 nt, Artificial Sequence
  Description of Artificial Sequence: Synthetic oligonucleotide
caaguuaccagucuuuuca

SEQ ID NO: 2629706 - RNA, 19 nt, Artificial Sequence
  Description of Artificial Sequence: Synthetic oligonucleotide
aaugagcaacuuucauuag

SEQ ID NO: 2629707 - RNA, 19 nt, Artificial Sequence
  Description of Artificial Sequence: Synthetic oligonucleotide
acucaagcaaguuaccagu

SEQ ID NO: 2629708 - RNA, 19 nt, Artificial Sequence
  Description of Artificial Sequence: Synthetic oligonucleotide
cuguaaaauauuugaggac

SEQ ID NO: 2629709 - RNA, 19 nt, Artificial Sequence
  Description of Artificial Sequence: Synthetic oligonucleotide
gaauaagcggguuaugaaa

SEQ ID NO: 2629710 - RNA, 19 nt, Artificial Sequence
  Description of Artificial Sequence: Synthetic oligonucleotide
uaguacugucccuauacug

SEQ ID NO: 2629711 - RNA, 19 nt, Artificial Sequence
  Description of Artificial Sequence: Synthetic oligonucleotide
uaaagggagcacaaggaau

SEQ ID NO: 2629712 - RNA, 19 nt, Artificial Sequence
  Description of Artificial Sequence: Synthetic oligonucleotide
ugcaacagcuaauaugagu

SEQ ID NO: 2629713 - RNA, 19 nt, Artificial Sequence
  Description of Artificial Sequence: Synthetic oligonucleotide
aauaagcggguuaugaaau

SEQ ID NO: 2629714 - RNA, 19 nt, Artificial Sequence
  Description of Artificial Sequence: Synthetic oligonucleotide
uacuacuuuaaaacucugu

SEQ ID NO: 2629715 - RNA, 19 nt, Artificial Sequence
  Description of Artificial Sequence: Synthetic oligonucleotide
agcaacuuucauuagcuau

SEQ ID NO: 2629716 - RNA, 19 nt, Artificial Sequence
  Description of Artificial Sequence: Synthetic oligonucleotide
aaauaagaacaaugccagu

SEQ ID NO: 2629717 - RNA, 19 nt, Artificial Sequence
  Description of Artificial Sequence: Synthetic oligonucleotide
gucccuauacuguagaaca

SEQ ID NO: 2629718 - RNA, 19 nt, Artificial Sequence
  Description of Artificial Sequence: Synthetic oligonucleotide
ugaauaagcggguuaugaa

SEQ ID NO: 2629719 - RNA, 19 nt, Artificial Sequence
  Description of Artificial Sequence: Synthetic oligonucleotide
uaacugucaccacuaaccu

SEQ ID NO: 2629720 - RNA, 19 nt, Artificial Sequence
  Description of Artificial Sequence: Synthetic oligonucleotide
cauauaacaugcaacagcu

SEQ ID NO: 2629721 - RNA, 19 nt, Artificial Sequence
  Description of Artificial Sequence: Synthetic oligonucleotide
gaagcauaagggaugagga

SEQ ID NO: 2629722 - RNA, 19 nt, Artificial Sequence
  Description of Artificial Sequence: Synthetic oligonucleotide
aguuugguccauuucacau

SEQ ID NO: 2629723 - RNA, 19 nt, Artificial Sequence
  Description of Artificial Sequence: Synthetic oligonucleotide
auacaguuguuucaucugu

SEQ ID NO: 2629724 - RNA, 19 nt, Artificial Sequence
  Description of Artificial Sequence: Synthetic oligonucleotide
ucauuagcuaugaucuuuc

SEQ ID NO: 2629725 - RNA, 19 nt, Artificial Sequence
  Description of Artificial Sequence: Synthetic oligonucleotide
uguaacugucaccacuaac

SEQ ID NO: 2629726 - RNA, 19 nt, Artificial Sequence
  Description of Artificial Sequence: Synthetic oligonucleotide
auuuaaaaguuuagaagca

SEQ ID NO: 2629727 - RNA, 19 nt, Artificial Sequence
  Description of Artificial Sequence: Synthetic oligonucleotide
augucauacuacuuuaaaa

SEQ ID NO: 2629728 - RNA, 19 nt, Artificial Sequence
  Description of Artificial Sequence: Synthetic oligonucleotide
uuuaaaaguuuagaagcau

SEQ ID NO: 2629729 - RNA, 19 nt, Artificial Sequence
  Description of Artificial Sequence: Synthetic oligonucleotide
gaaauacaguauguaacug

SEQ ID NO: 2629730 - RNA, 19 nt, Artificial Sequence
  Description of Artificial Sequence: Synthetic oligonucleotide
aacagcuaauaugagucca

SEQ ID NO: 2629731 - RNA, 19 nt, Artificial Sequence
  Description of Artificial Sequence: Synthetic oligonucleotide
auggaguaucauuuagcuc

SEQ ID NO: 2629732 - RNA, 19 nt, Artificial Sequence
  Description of Artificial Sequence: Synthetic oligonucleotide
uauucugacugauuugaau

SEQ ID NO: 2629733 - RNA, 19 nt, Artificial Sequence
  Description of Artificial Sequence: Synthetic oligonucleotide
uagcuaugaucuuucagac

SEQ ID NO: 2629734 - RNA, 19 nt, Artificial Sequence
  Description of Artificial Sequence: Synthetic oligonucleotide
uuaaauggaguaucauuua

SEQ ID NO: 2629735 - RNA, 19 nt, Artificial Sequence
  Description of Artificial Sequence: Synthetic oligonucleotide
uccuccauuuaaaaguuua

SEQ ID NO: 2629736 - RNA, 19 nt, Artificial Sequence
  Description of Artificial Sequence: Synthetic oligonucleotide
auaagcggguuaugaaauc

SEQ ID NO: 2629737 - RNA, 19 nt, Artificial Sequence
  Description of Artificial Sequence: Synthetic oligonucleotide
guggguacaacacaaaugu

SEQ ID NO: 2629738 - RNA, 19 nt, Artificial Sequence
  Description of Artificial Sequence: Synthetic oligonucleotide
cugucuucacacuagcgug

SEQ ID NO: 2629739 - RNA, 19 nt, Artificial Sequence
  Description of Artificial Sequence: Synthetic oligonucleotide
aguauguaacugucaccac

SEQ ID NO: 2629740 - RNA, 19 nt, Artificial Sequence
  Description of Artificial Sequence: Synthetic oligonucleotide
uaauaugaguccagugggu

SEQ ID NO: 2629741 - RNA, 19 nt, Artificial Sequence
  Description of Artificial Sequence: Synthetic oligonucleotide
acauagauaauuauuuaaa

SEQ ID NO: 2629742 - RNA, 19 nt, Artificial Sequence
  Description of Artificial Sequence: Synthetic oligonucleotide
aaauuaaauggaguaucau

SEQ ID NO: 2629743 - RNA, 19 nt, Artificial Sequence
  Description of Artificial Sequence: Synthetic oligonucleotide
gguagaauauacaguaucc

SEQ ID NO: 2629744 - RNA, 19 nt, Artificial Sequence
  Description of Artificial Sequence: Synthetic oligonucleotide
auagggaucauaguacugu

SEQ ID NO: 2629745 - RNA, 19 nt, Artificial Sequence
  Description of Artificial Sequence: Synthetic oligonucleotide
auaagaacaaugccaguuu

SEQ ID NO: 2629746 - RNA, 19 nt, Artificial Sequence
  Description of Artificial Sequence: Synthetic oligonucleotide
uucugacugauuugaauaa

SEQ ID NO: 2629747 - RNA, 19 nt, Artificial Sequence
  Description of Artificial Sequence: Synthetic oligonucleotide
cagacugacaauauucuga

SEQ ID NO: 2629748 - RNA, 19 nt, Artificial Sequence
  Description of Artificial Sequence: Synthetic oligonucleotide
aguuaccagucuuuucauc

SEQ ID NO: 2629749 - RNA, 19 nt, Artificial Sequence
  Description of Artificial Sequence: Synthetic oligonucleotide
uagcucugauauuagcacc

SEQ ID NO: 2629750 - RNA, 19 nt, Artificial Sequence
  Description of Artificial Sequence: Synthetic oligonucleotide
caauauucugacugauuug

SEQ ID NO: 2629751 - RNA, 19 nt, Artificial Sequence
  Description of Artificial Sequence: Synthetic oligonucleotide
acauggaaaagcucuaguu

SEQ ID NO: 2629752 - RNA, 19 nt, Artificial Sequence
  Description of Artificial Sequence: Synthetic oligonucleotide
aaacucuucuuuaaauuaa

SEQ ID NO: 2629753 - RNA, 19 nt, Artificial Sequence
  Description of Artificial Sequence: Synthetic oligonucleotide
uccucuacagacauucuuu

SEQ ID NO: 2629754 - RNA, 19 nt, Artificial Sequence
  Description of Artificial Sequence: Synthetic oligonucleotide
ucugacugauuugaauaag

SEQ ID NO: 2629755 - RNA, 19 nt, Artificial Sequence
  Description of Artificial Sequence: Synthetic oligonucleotide
uccggcauagauuuugcuc

SEQ ID NO: 2629756 - RNA, 19 nt, Artificial Sequence
  Description of Artificial Sequence: Synthetic oligonucleotide
aucauauaacaugcaacag

SEQ ID NO: 2629757 - RNA, 19 nt, Artificial Sequence
  Description of Artificial Sequence: Synthetic oligonucleotide
caccacuaaccucucaagg

SEQ ID NO: 2629758 - RNA, 19 nt, Artificial Sequence
  Description of Artificial Sequence: Synthetic oligonucleotide
gaugucauacuacuuuaaa

SEQ ID NO: 2629759 - RNA, 19 nt, Artificial Sequence
  Description of Artificial Sequence: Synthetic oligonucleotide
guuugguccauuucacaug

SEQ ID NO: 2629760 - RNA, 19 nt, Artificial Sequence
  Description of Artificial Sequence: Synthetic oligonucleotide
ggacaauuauccucuacag

SEQ ID NO: 2629761 - RNA, 19 nt, Artificial Sequence
  Description of Artificial Sequence: Synthetic oligonucleotide
agcuaauaugaguccagug

SEQ ID NO: 2629762 - RNA, 19 nt, Artificial Sequence
  Description of Artificial Sequence: Synthetic oligonucleotide
uccauuucacauggaaaag

SEQ ID NO: 2629763 - RNA, 19 nt, Artificial Sequence
  Description of Artificial Sequence: Synthetic oligonucleotide
ucaccacuaaccucucaag

SEQ ID NO: 2629764 - RNA, 19 nt, Artificial Sequence
  Description of Artificial Sequence: Synthetic oligonucleotide
uacaacacaaaugucugua

SEQ ID NO: 2629765 - RNA, 19 nt, Artificial Sequence
  Description of Artificial Sequence: Synthetic oligonucleotide
uaagcggguuaugaaauca

SEQ ID NO: 2629766 - RNA, 19 nt, Artificial Sequence
  Description of Artificial Sequence: Synthetic oligonucleotide
ugguccauuucacauggaa

SEQ ID NO: 2629767 - RNA, 19 nt, Artificial Sequence
  Description of Artificial Sequence: Synthetic oligonucleotide
aguuaauuuugaauuaaau

SEQ ID NO: 2629768 - RNA, 19 nt, Artificial Sequence
  Description of Artificial Sequence: Synthetic oligonucleotide
caguauguaacugucacca

SEQ ID NO: 2629769 - RNA, 19 nt, Artificial Sequence
  Description of Artificial Sequence: Synthetic oligonucleotide
uuagcaccaugguagaaua

SEQ ID NO: 2629770 - RNA, 19 nt, Artificial Sequence
  Description of Artificial Sequence: Synthetic oligonucleotide
aauaugcaagaaauacagu

SEQ ID NO: 2629771 - RNA, 19 nt, Artificial Sequence
  Description of Artificial Sequence: Synthetic oligonucleotide
aagcauaagggaugaggaa

SEQ ID NO: 2629772 - RNA, 19 nt, Artificial Sequence
  Description of Artificial Sequence: Synthetic oligonucleotide
aauaugaguccagugggua

SEQ ID NO: 2629773 - RNA, 19 nt, Artificial Sequence
  Description of Artificial Sequence: Synthetic oligonucleotide
aauagggaucauaguacug

SEQ ID NO: 2629774 - RNA, 19 nt, Artificial Sequence
  Description of Artificial Sequence: Synthetic oligonucleotide
uaugaguccaguggguaca

SEQ ID NO: 2629775 - RNA, 19 nt, Artificial Sequence
  Description of Artificial Sequence: Synthetic oligonucleotide
cucuaguuaauuuugaauu

SEQ ID NO: 2629776 - RNA, 19 nt, Artificial Sequence
  Description of Artificial Sequence: Synthetic oligonucleotide
caacagcuaauaugagucc

SEQ ID NO: 2629777 - RNA, 19 nt, Artificial Sequence
  Description of Artificial Sequence: Synthetic oligonucleotide
aguggguacaacacaaaug

SEQ ID NO: 2629778 - RNA, 19 nt, Artificial Sequence
  Description of Artificial Sequence: Synthetic oligonucleotide
aguaucauuuagcucugau

SEQ ID NO: 2629779 - RNA, 19 nt, Artificial Sequence
  Description of Artificial Sequence: Synthetic oligonucleotide
uauccggcauagauuuugc

SEQ ID NO: 2629780 - RNA, 19 nt, Artificial Sequence
  Description of Artificial Sequence: Synthetic oligonucleotide
gguuaugaaaucauauaac

SEQ ID NO: 2629781 - RNA, 19 nt, Artificial Sequence
  Description of Artificial Sequence: Synthetic oligonucleotide
uucauuagcuaugaucuuu

SEQ ID NO: 2629782 - RNA, 19 nt, Artificial Sequence
  Description of Artificial Sequence: Synthetic oligonucleotide
auauuagcaccaugguaga

SEQ ID NO: 2629783 - RNA, 19 nt, Artificial Sequence
  Description of Artificial Sequence: Synthetic oligonucleotide
cauacuacuuuaaaacucu

SEQ ID NO: 2629784 - RNA, 19 nt, Artificial Sequence
  Description of Artificial Sequence: Synthetic oligonucleotide
auaguacugucccuauacu

SEQ ID NO: 2629785 - RNA, 19 nt, Artificial Sequence
  Description of Artificial Sequence: Synthetic oligonucleotide
ggguuaugaaaucauauaa

SEQ ID NO: 2629786 - RNA, 19 nt, Artificial Sequence
  Description of Artificial Sequence: Synthetic oligonucleotide
acacuagcguguuaacaug

SEQ ID NO: 2629787 - RNA, 19 nt, Artificial Sequence
  Description of Artificial Sequence: Synthetic oligonucleotide
aaguuaccagucuuuucau

SEQ ID NO: 2629788 - RNA, 19 nt, Artificial Sequence
  Description of Artificial Sequence: Synthetic oligonucleotide
ccggcauagauuuugcucc

SEQ ID NO: 2629789 - RNA, 19 nt, Artificial Sequence
  Description of Artificial Sequence: Synthetic oligonucleotide
gcaacagcuaauaugaguc

SEQ ID NO: 2629790 - RNA, 19 nt, Artificial Sequence
  Description of Artificial Sequence: Synthetic oligonucleotide
gauuugaauaagcggguua

SEQ ID NO: 2629791 - RNA, 19 nt, Artificial Sequence
  Description of Artificial Sequence: Synthetic oligonucleotide
auuuugaauuaaauaggga

SEQ ID NO: 2629792 - RNA, 19 nt, Artificial Sequence
  Description of Artificial Sequence: Synthetic oligonucleotide
auuucacauggaaaagcuc

SEQ ID NO: 2629793 - RNA, 19 nt, Artificial Sequence
  Description of Artificial Sequence: Synthetic oligonucleotide
agggaucauaguacugucc

SEQ ID NO: 2629794 - RNA, 19 nt, Artificial Sequence
  Description of Artificial Sequence: Synthetic oligonucleotide
ucacauggaaaagcucuag

SEQ ID NO: 2629795 - RNA, 19 nt, Artificial Sequence
  Description of Artificial Sequence: Synthetic oligonucleotide
uguagaacauacaguuguu

SEQ ID NO: 2629796 - RNA, 19 nt, Artificial Sequence
  Description of Artificial Sequence: Synthetic oligonucleotide
uaacaugcaacagcuaaua

SEQ ID NO: 2629797 - RNA, 19 nt, Artificial Sequence
  Description of Artificial Sequence: Synthetic oligonucleotide
ugucccuauacuguagaac

SEQ ID NO: 2629798 - RNA, 19 nt, Artificial Sequence
  Description of Artificial Sequence: Synthetic oligonucleotide
uaugaucuuucagacugac

SEQ ID NO: 2629799 - RNA, 19 nt, Artificial Sequence
  Description of Artificial Sequence: Synthetic oligonucleotide
uacugucccuauacuguag

SEQ ID NO: 2629800 - RNA, 19 nt, Artificial Sequence
  Description of Artificial Sequence: Synthetic oligonucleotide
ucacacuagcguguuaaca

SEQ ID NO: 2629801 - RNA, 19 nt, Artificial Sequence
  Description of Artificial Sequence: Synthetic oligonucleotide
cuguagaacauacaguugu

SEQ ID NO: 2629802 - RNA, 19 nt, Artificial Sequence
  Description of Artificial Sequence: Synthetic oligonucleotide
cauggaaaagcucuaguua

SEQ ID NO: 2629803 - RNA, 19 nt, Artificial Sequence
  Description of Artificial Sequence: Synthetic oligonucleotide
gucauacuacuuuaaaacu

SEQ ID NO: 2629804 - RNA, 19 nt, Artificial Sequence
  Description of Artificial Sequence: Synthetic oligonucleotide
guauccggcauagauuuug

SEQ ID NO: 2629805 - RNA, 19 nt, Artificial Sequence
  Description of Artificial Sequence: Synthetic oligonucleotide
uuugaauaagcggguuaug

SEQ ID NO: 2629806 - RNA, 19 nt, Artificial Sequence
  Description of Artificial Sequence: Synthetic oligonucleotide
gaacaaugccaguuugguc

SEQ ID NO: 2629807 - RNA, 19 nt, Artificial Sequence
  Description of Artificial Sequence: Synthetic oligonucleotide
aaggaaugagcaacuuuca

SEQ ID NO: 2629808 - RNA, 19 nt, Artificial Sequence
  Description of Artificial Sequence: Synthetic oligonucleotide
acaaggaaugagcaacuuu

SEQ ID NO: 2629809 - RNA, 19 nt, Artificial Sequence
  Description of Artificial Sequence: Synthetic oligonucleotide
aacucuucuuuaaauuaaa

SEQ ID NO: 2629810 - RNA, 19 nt, Artificial Sequence
  Description of Artificial Sequence: Synthetic oligonucleotide
uggaaaagcucuaguuaau

SEQ ID NO: 2629811 - RNA, 19 nt, Artificial Sequence
  Description of Artificial Sequence: Synthetic oligonucleotide
acugucccuauacuguaga

SEQ ID NO: 2629812 - RNA, 19 nt, Artificial Sequence
  Description of Artificial Sequence: Synthetic oligonucleotide
guaucauuuagcucugaua

SEQ ID NO: 2629813 - RNA, 19 nt, Artificial Sequence
  Description of Artificial Sequence: Synthetic oligonucleotide
gaauuaaauagggaucaua

SEQ ID NO: 2629814 - RNA, 19 nt, Artificial Sequence
  Description of Artificial Sequence: Synthetic oligonucleotide
ccuauacuguagaacauac

SEQ ID NO: 2629815 - RNA, 19 nt, Artificial Sequence
  Description of Artificial Sequence: Synthetic oligonucleotide
auacuguagaacauacagu

SEQ ID NO: 2629816 - RNA, 19 nt, Artificial Sequence
  Description of Artificial Sequence: Synthetic oligonucleotide
cuagcguguuaacaugaug

SEQ ID NO: 2629817 - RNA, 19 nt, Artificial Sequence
  Description of Artificial Sequence: Synthetic oligonucleotide
guacauagauaauuauuua

SEQ ID NO: 2629818 - RNA, 19 nt, Artificial Sequence
  Description of Artificial Sequence: Synthetic oligonucleotide
aucuuucagacugacaaua

SEQ ID NO: 2629819 - RNA, 19 nt, Artificial Sequence
  Description of Artificial Sequence: Synthetic oligonucleotide
cugacaauauucugacuga

SEQ ID NO: 2629820 - RNA, 19 nt, Artificial Sequence
  Description of Artificial Sequence: Synthetic oligonucleotide
caauuauccucuacagaca

SEQ ID NO: 2629821 - RNA, 19 nt, Artificial Sequence
  Description of Artificial Sequence: Synthetic oligonucleotide
guauguaacugucaccacu

SEQ ID NO: 2629822 - RNA, 19 nt, Artificial Sequence
  Description of Artificial Sequence: Synthetic oligonucleotide
agcucuaguuaauuuugaa

SEQ ID NO: 2629823 - RNA, 19 nt, Artificial Sequence
  Description of Artificial Sequence: Synthetic oligonucleotide
caugauguacaacacucaa

SEQ ID NO: 2629824 - RNA, 19 nt, Artificial Sequence
  Description of Artificial Sequence: Synthetic oligonucleotide
cucuguguuuaaauaagaa

SEQ ID NO: 2629825 - RNA, 19 nt, Artificial Sequence
  Description of Artificial Sequence: Synthetic oligonucleotide
uagggaucauaguacuguc

SEQ ID NO: 2629826 - RNA, 19 nt, Artificial Sequence
  Description of Artificial Sequence: Synthetic oligonucleotide
acagcuaauaugaguccag

SEQ ID NO: 2629827 - RNA, 19 nt, Artificial Sequence
  Description of Artificial Sequence: Synthetic oligonucleotide
uguuaacaugauguacaac

SEQ ID NO: 2629828 - RNA, 19 nt, Artificial Sequence
  Description of Artificial Sequence: Synthetic oligonucleotide
aggaaugagcaacuuucau

SEQ ID NO: 2629829 - RNA, 19 nt, Artificial Sequence
  Description of Artificial Sequence: Synthetic oligonucleotide
gcaacuuucauuagcuaug

SEQ ID NO: 2629830 - RNA, 19 nt, Artificial Sequence
  Description of Artificial Sequence: Synthetic oligonucleotide
cuaguuaauuuugaauuaa

SEQ ID NO: 2629831 - RNA, 19 nt, Artificial Sequence
  Description of Artificial Sequence: Synthetic oligonucleotide
gucaccacuaaccucucaa

SEQ ID NO: 2629832 - RNA, 19 nt, Artificial Sequence
  Description of Artificial Sequence: Synthetic oligonucleotide
gaaaagcucuaguuaauuu

SEQ ID NO: 2629833 - RNA, 19 nt, Artificial Sequence
  Description of Artificial Sequence: Synthetic oligonucleotide
ugacaauauucugacugau

SEQ ID NO: 2629834 - RNA, 19 nt, Artificial Sequence
  Description of Artificial Sequence: Synthetic oligonucleotide
cuccauuuaaaaguuuaga

SEQ ID NO: 2629835 - RNA, 19 nt, Artificial Sequence
  Description of Artificial Sequence: Synthetic oligonucleotide
acuguagaacauacaguug

SEQ ID NO: 2629836 - RNA, 19 nt, Artificial Sequence
  Description of Artificial Sequence: Synthetic oligonucleotide
agcucugauauuagcacca

SEQ ID NO: 2629837 - RNA, 19 nt, Artificial Sequence
  Description of Artificial Sequence: Synthetic oligonucleotide
auaacaugcaacagcuaau

SEQ ID NO: 2629838 - RNA, 19 nt, Artificial Sequence
  Description of Artificial Sequence: Synthetic oligonucleotide
uuuucccugugggauguca

SEQ ID NO: 2629839 - RNA, 19 nt, Artificial Sequence
  Description of Artificial Sequence: Synthetic oligonucleotide
aucugucuucacacuagcg

SEQ ID NO: 2629840 - RNA, 19 nt, Artificial Sequence
  Description of Artificial Sequence: Synthetic oligonucleotide
aagcucuaguuaauuuuga

SEQ ID NO: 2629841 - RNA, 19 nt, Artificial Sequence
  Description of Artificial Sequence: Synthetic oligonucleotide
uucacacuagcguguuaac

SEQ ID NO: 2629842 - RNA, 19 nt, Artificial Sequence
  Description of Artificial Sequence: Synthetic oligonucleotide
uuucauuagcuaugaucuu

SEQ ID NO: 2629843 - RNA, 19 nt, Artificial Sequence
  Description of Artificial Sequence: Synthetic oligonucleotide
uauccucuacagacauucu

SEQ ID NO: 2629844 - RNA, 19 nt, Artificial Sequence
  Description of Artificial Sequence: Synthetic oligonucleotide
gcauagauuuugcuccucc

SEQ ID NO: 2629845 - RNA, 19 nt, Artificial Sequence
  Description of Artificial Sequence: Synthetic oligonucleotide
aacuuucauuagcuaugau

SEQ ID NO: 2629846 - RNA, 19 nt, Artificial Sequence
  Description of Artificial Sequence: Synthetic oligonucleotide
accagucuuuucaucaucu

SEQ ID NO: 2629847 - RNA, 19 nt, Artificial Sequence
  Description of Artificial Sequence: Synthetic oligonucleotide
ucauaguacugucccuaua

SEQ ID NO: 2629848 - RNA, 19 nt, Artificial Sequence
  Description of Artificial Sequence: Synthetic oligonucleotide
gguacauagauaauuauuu

SEQ ID NO: 2629849 - RNA, 19 nt, Artificial Sequence
  Description of Artificial Sequence: Synthetic oligonucleotide
ucccuauacuguagaacau

SEQ ID NO: 2629850 - RNA, 19 nt, Artificial Sequence
  Description of Artificial Sequence: Synthetic oligonucleotide
agcguguuaacaugaugua

SEQ ID NO: 2629851 - RNA, 19 nt, Artificial Sequence
  Description of Artificial Sequence: Synthetic oligonucleotide
cacaaaugucuguacuuga

SEQ ID NO: 2629852 - RNA, 19 nt, Artificial Sequence
  Description of Artificial Sequence: Synthetic oligonucleotide
gggaaaauaugcaagaaau

SEQ ID NO: 2629853 - RNA, 19 nt, Artificial Sequence
  Description of Artificial Sequence: Synthetic oligonucleotide
acaacacucaaaagggaaa

SEQ ID NO: 2629854 - RNA, 19 nt, Artificial Sequence
  Description of Artificial Sequence: Synthetic oligonucleotide
aucauuuagcucugauauu

SEQ ID NO: 2629855 - RNA, 19 nt, Artificial Sequence
  Description of Artificial Sequence: Synthetic oligonucleotide
ucccugugggaugucauac

SEQ ID NO: 2629856 - RNA, 19 nt, Artificial Sequence
  Description of Artificial Sequence: Synthetic oligonucleotide
guguuaacaugauguacaa

SEQ ID NO: 2629857 - RNA, 19 nt, Artificial Sequence
  Description of Artificial Sequence: Synthetic oligonucleotide
acucuguguuuaaauaaga

SEQ ID NO: 2629858 - RNA, 19 nt, Artificial Sequence
  Description of Artificial Sequence: Synthetic oligonucleotide
ugaauuaaauagggaucau

SEQ ID NO: 2629859 - RNA, 19 nt, Artificial Sequence
  Description of Artificial Sequence: Synthetic oligonucleotide
aagggagcacaaggaauga

SEQ ID NO: 2629860 - RNA, 19 nt, Artificial Sequence
  Description of Artificial Sequence: Synthetic oligonucleotide
auggguacauagauaauua

SEQ ID NO: 2629861 - RNA, 19 nt, Artificial Sequence
  Description of Artificial Sequence: Synthetic oligonucleotide
cucugauauuagcaccaug

SEQ ID NO: 2629862 - RNA, 19 nt, Artificial Sequence
  Description of Artificial Sequence: Synthetic oligonucleotide
gggagcacaaggaaugagc

SEQ ID NO: 2629863 - RNA, 19 nt, Artificial Sequence
  Description of Artificial Sequence: Synthetic oligonucleotide
cacuagcguguuaacauga

SEQ ID NO: 2629864 - RNA, 19 nt, Artificial Sequence
  Description of Artificial Sequence: Synthetic oligonucleotide
agcaccaugguagaauaua

SEQ ID NO: 2629865 - RNA, 19 nt, Artificial Sequence
  Description of Artificial Sequence: Synthetic oligonucleotide
cuucacacuagcguguuaa

SEQ ID NO: 2629866 - RNA, 19 nt, Artificial Sequence
  Description of Artificial Sequence: Synthetic oligonucleotide
ugucuguacuugauccaua

SEQ ID NO: 2629867 - RNA, 19 nt, Artificial Sequence
  Description of Artificial Sequence: Synthetic oligonucleotide
ugauuugaauaagcggguu

SEQ ID NO: 2629868 - RNA, 19 nt, Artificial Sequence
  Description of Artificial Sequence: Synthetic oligonucleotide
cacacuagcguguuaacau

SEQ ID NO: 2629869 - RNA, 19 nt, Artificial Sequence
  Description of Artificial Sequence: Synthetic oligonucleotide
auacaguauguaacuguca

SEQ ID NO: 2629870 - RNA, 19 nt, Artificial Sequence
  Description of Artificial Sequence: Synthetic oligonucleotide
aagcaaguuaccagucuuu

SEQ ID NO: 2629871 - RNA, 19 nt, Artificial Sequence
  Description of Artificial Sequence: Synthetic oligonucleotide
caccaugguagaauauaca

SEQ ID NO: 2629872 - RNA, 19 nt, Artificial Sequence
  Description of Artificial Sequence: Synthetic oligonucleotide
augauguacaacacucaaa

SEQ ID NO: 2629873 - RNA, 19 nt, Artificial Sequence
  Description of Artificial Sequence: Synthetic oligonucleotide
gaacauacaguuguuucau

SEQ ID NO: 2629874 - RNA, 19 nt, Artificial Sequence
  Description of Artificial Sequence: Synthetic oligonucleotide
auaagggaugaggaaggaa

SEQ ID NO: 2629875 - RNA, 19 nt, Artificial Sequence
  Description of Artificial Sequence: Synthetic oligonucleotide
cucucaaggcauauucaaa

SEQ ID NO: 2629876 - RNA, 19 nt, Artificial Sequence
  Description of Artificial Sequence: Synthetic oligonucleotide
aagcggguuaugaaaucau

SEQ ID NO: 2629877 - RNA, 19 nt, Artificial Sequence
  Description of Artificial Sequence: Synthetic oligonucleotide
uauuagcaccaugguagaa

SEQ ID NO: 2629878 - RNA, 19 nt, Artificial Sequence
  Description of Artificial Sequence: Synthetic oligonucleotide
ggagcacaaggaaugagca

SEQ ID NO: 2629879 - RNA, 19 nt, Artificial Sequence
  Description of Artificial Sequence: Synthetic oligonucleotide
cuaugaucuuucagacuga

SEQ ID NO: 2629880 - RNA, 19 nt, Artificial Sequence
  Description of Artificial Sequence: Synthetic oligonucleotide
cugauuugaauaagcgggu

SEQ ID NO: 2629881 - RNA, 19 nt, Artificial Sequence
  Description of Artificial Sequence: Synthetic oligonucleotide
caacuuucauuagcuauga

SEQ ID NO: 2629882 - RNA, 19 nt, Artificial Sequence
  Description of Artificial Sequence: Synthetic oligonucleotide
guacaacacucaaaaggga

SEQ ID NO: 2629883 - RNA, 19 nt, Artificial Sequence
  Description of Artificial Sequence: Synthetic oligonucleotide
cauuagcuaugaucuuuca

SEQ ID NO: 2629884 - RNA, 19 nt, Artificial Sequence
  Description of Artificial Sequence: Synthetic oligonucleotide
agcaaguuaccagucuuuu

SEQ ID NO: 2629885 - RNA, 19 nt, Artificial Sequence
  Description of Artificial Sequence: Synthetic oligonucleotide
gagcacaaggaaugagcaa

SEQ ID NO: 2629886 - RNA, 19 nt, Artificial Sequence
  Description of Artificial Sequence: Synthetic oligonucleotide
agggagcacaaggaaugag

SEQ ID NO: 2629887 - RNA, 19 nt, Artificial Sequence
  Description of Artificial Sequence: Synthetic oligonucleotide
caacacucaaaagggaaaa

SEQ ID NO: 2629888 - RNA, 19 nt, Artificial Sequence
  Description of Artificial Sequence: Synthetic oligonucleotide
caacacaaaugucuguacu

SEQ ID NO: 2629889 - RNA, 19 nt, Artificial Sequence
  Description of Artificial Sequence: Synthetic oligonucleotide
gaucuuucagacugacaau

SEQ ID NO: 2629890 - RNA, 19 nt, Artificial Sequence
  Description of Artificial Sequence: Synthetic oligonucleotide
auccggcauagauuuugcu

SEQ ID NO: 2629891 - RNA, 19 nt, Artificial Sequence
  Description of Artificial Sequence: Synthetic oligonucleotide
ggaaugagcaacuuucauu

SEQ ID NO: 2629892 - RNA, 19 nt, Artificial Sequence
  Description of Artificial Sequence: Synthetic oligonucleotide
guacugucccuauacugua

SEQ ID NO: 2629893 - RNA, 19 nt, Artificial Sequence
  Description of Artificial Sequence: Synthetic oligonucleotide
ggaaaauaugcaagaaaua

SEQ ID NO: 2629894 - RNA, 19 nt, Artificial Sequence
  Description of Artificial Sequence: Synthetic oligonucleotide
uagaagcauaagggaugag

SEQ ID NO: 2629895 - RNA, 19 nt, Artificial Sequence
  Description of Artificial Sequence: Synthetic oligonucleotide
uagcaccaugguagaauau

SEQ ID NO: 2629896 - RNA, 19 nt, Artificial Sequence
  Description of Artificial Sequence: Synthetic oligonucleotide
caguuugguccauuucaca

SEQ ID NO: 2629897 - RNA, 19 nt, Artificial Sequence
  Description of Artificial Sequence: Synthetic oligonucleotide
cugauauuagcaccauggu

SEQ ID NO: 2629898 - RNA, 19 nt, Artificial Sequence
  Description of Artificial Sequence: Synthetic oligonucleotide
cauagauuuugcuccuccu

SEQ ID NO: 2629899 - RNA, 19 nt, Artificial Sequence
  Description of Artificial Sequence: Synthetic oligonucleotide
ucuucacacuagcguguua

SEQ ID NO: 2629900 - RNA, 19 nt, Artificial Sequence
  Description of Artificial Sequence: Synthetic oligonucleotide
augguagaauauacaguau

SEQ ID NO: 2629901 - RNA, 19 nt, Artificial Sequence
  Description of Artificial Sequence: Synthetic oligonucleotide
gcaccaugguagaauauac

SEQ ID NO: 2629902 - RNA, 19 nt, Artificial Sequence
  Description of Artificial Sequence: Synthetic oligonucleotide
gggaugucauacuacuuua

SEQ ID NO: 2629903 - RNA, 19 nt, Artificial Sequence
  Description of Artificial Sequence: Synthetic oligonucleotide
auauucugacugauuugaa

SEQ ID NO: 2629904 - RNA, 19 nt, Artificial Sequence
  Description of Artificial Sequence: Synthetic oligonucleotide
gcaagaaauacaguaugua

SEQ ID NO: 2629905 - RNA, 19 nt, Artificial Sequence
  Description of Artificial Sequence: Synthetic oligonucleotide
gcucuaguuaauuuugaau

SEQ ID NO: 2629906 - RNA, 19 nt, Artificial Sequence
  Description of Artificial Sequence: Synthetic oligonucleotide
gcaaguuaccagucuuuuc

SEQ ID NO: 2629907 - RNA, 19 nt, Artificial Sequence
  Description of Artificial Sequence: Synthetic oligonucleotide
ugaggacaauuauccucua

SEQ ID NO: 2629908 - RNA, 19 nt, Artificial Sequence
  Description of Artificial Sequence: Synthetic oligonucleotide
augcaacagcuaauaugag

SEQ ID NO: 2629909 - RNA, 19 nt, Artificial Sequence
  Description of Artificial Sequence: Synthetic oligonucleotide
guacaacacaaaugucugu

SEQ ID NO: 2629910 - RNA, 19 nt, Artificial Sequence
  Description of Artificial Sequence: Synthetic oligonucleotide
ccacuaaccucucaaggca

SEQ ID NO: 2629911 - RNA, 19 nt, Artificial Sequence
  Description of Artificial Sequence: Synthetic oligonucleotide
gcguguuaacaugauguac

SEQ ID NO: 2629912 - RNA, 19 nt, Artificial Sequence
  Description of Artificial Sequence: Synthetic oligonucleotide
gguccauuucacauggaaa

SEQ ID NO: 2629913 - RNA, 19 nt, Artificial Sequence
  Description of Artificial Sequence: Synthetic oligonucleotide
ggaguaucauuuagcucug

SEQ ID NO: 2629914 - RNA, 19 nt, Artificial Sequence
  Description of Artificial Sequence: Synthetic oligonucleotide
guguuuaaauaagaacaau

SEQ ID NO: 2629915 - RNA, 19 nt, Artificial Sequence
  Description of Artificial Sequence: Synthetic oligonucleotide
cauaagggaugaggaagga

SEQ ID NO: 2629916 - RNA, 19 nt, Artificial Sequence
  Description of Artificial Sequence: Synthetic oligonucleotide
acuagcguguuaacaugau

SEQ ID NO: 2629917 - RNA, 19 nt, Artificial Sequence
  Description of Artificial Sequence: Synthetic oligonucleotide
gacugacaauauucugacu

SEQ ID NO: 2629918 - RNA, 19 nt, Artificial Sequence
  Description of Artificial Sequence: Synthetic oligonucleotide
gacaauauucugacugauu

SEQ ID NO: 2629919 - RNA, 19 nt, Artificial Sequence
  Description of Artificial Sequence: Synthetic oligonucleotide
auauaacaugcaacagcua

SEQ ID NO: 2629920 - RNA, 19 nt, Artificial Sequence
  Description of Artificial Sequence: Synthetic oligonucleotide
uaaccucucaaggcauauu

SEQ ID NO: 2629921 - RNA, 19 nt, Artificial Sequence
  Description of Artificial Sequence: Synthetic oligonucleotide
agcggguuaugaaaucaua

SEQ ID NO: 2629922 - RNA, 19 nt, Artificial Sequence
  Description of Artificial Sequence: Synthetic oligonucleotide
guagaacauacaguuguuu

SEQ ID NO: 2629923 - RNA, 19 nt, Artificial Sequence
  Description of Artificial Sequence: Synthetic oligonucleotide
cugucccuauacuguagaa

SEQ ID NO: 2629924 - RNA, 19 nt, Artificial Sequence
  Description of Artificial Sequence: Synthetic oligonucleotide
acuaaccucucaaggcaua

SEQ ID NO: 2629925 - RNA, 19 nt, Artificial Sequence
  Description of Artificial Sequence: Synthetic oligonucleotide
caguggguacaacacaaau

SEQ ID NO: 2629926 - RNA, 19 nt, Artificial Sequence
  Description of Artificial Sequence: Synthetic oligonucleotide
auuauccucuacagacauu

SEQ ID NO: 2629927 - RNA, 19 nt, Artificial Sequence
  Description of Artificial Sequence: Synthetic oligonucleotide
ugaguccaguggguacaac

SEQ ID NO: 2629928 - RNA, 19 nt, Artificial Sequence
  Description of Artificial Sequence: Synthetic oligonucleotide
gaguaucauuuagcucuga

SEQ ID NO: 2629929 - RNA, 19 nt, Artificial Sequence
  Description of Artificial Sequence: Synthetic oligonucleotide
cugucaccacuaaccucuc

SEQ ID NO: 2629930 - RNA, 19 nt, Artificial Sequence
  Description of Artificial Sequence: Synthetic oligonucleotide
ggguacauagauaauuauu

SEQ ID NO: 2629931 - RNA, 19 nt, Artificial Sequence
  Description of Artificial Sequence: Synthetic oligonucleotide
ccaugguagaauauacagu

SEQ ID NO: 2629932 - RNA, 19 nt, Artificial Sequence
  Description of Artificial Sequence: Synthetic oligonucleotide
auacaguauccggcauaga

SEQ ID NO: 2629933 - RNA, 19 nt, Artificial Sequence
  Description of Artificial Sequence: Synthetic oligonucleotide
ggaugucauacuacuuuaa

SEQ ID NO: 2629934 - RNA, 19 nt, Artificial Sequence
  Description of Artificial Sequence: Synthetic oligonucleotide
cacuaaccucucaaggcau

SEQ ID NO: 2629935 - RNA, 19 nt, Artificial Sequence
  Description of Artificial Sequence: Synthetic oligonucleotide
ggaaaagcucuaguuaauu

SEQ ID NO: 2629936 - RNA, 19 nt, Artificial Sequence
  Description of Artificial Sequence: Synthetic oligonucleotide
cggguuaugaaaucauaua

SEQ ID NO: 2629937 - RNA, 19 nt, Artificial Sequence
  Description of Artificial Sequence: Synthetic oligonucleotide
ccugugggaugucauacua

SEQ ID NO: 2629938 - RNA, 19 nt, Artificial Sequence
  Description of Artificial Sequence: Synthetic oligonucleotide
gcggguuaugaaaucauau

SEQ ID NO: 2629939 - RNA, 19 nt, Artificial Sequence
  Description of Artificial Sequence: Synthetic oligonucleotide
ggcauagauuuugcuccuc

SEQ ID NO: 2629940 - RNA, 19 nt, Artificial Sequence
  Description of Artificial Sequence: Synthetic oligonucleotide
cccuauacuguagaacaua

SEQ ID NO: 2629941 - RNA, 19 nt, Artificial Sequence
  Description of Artificial Sequence: Synthetic oligonucleotide
gcacaaggaaugagcaacu

SEQ ID NO: 2629942 - RNA, 19 nt, Artificial Sequence
  Description of Artificial Sequence: Synthetic oligonucleotide
ccuccuccauuuaaaaguu

SEQ ID NO: 2629943 - RNA, 19 nt, Artificial Sequence
  Description of Artificial Sequence: Synthetic oligonucleotide
cuccuccauuuaaaaguuu

SEQ ID NO: 2629944 - RNA, 19 nt, Artificial Sequence
  Description of Artificial Sequence: Synthetic oligonucleotide
cacaaggaaugagcaacuu

SEQ ID NO: 2629945 - RNA, 19 nt, Artificial Sequence
  Description of Artificial Sequence: Synthetic oligonucleotide
cggcauagauuuugcuccu

SEQ ID NO: 2629946 - RNA, 19 nt, Artificial Sequence
  Description of Artificial Sequence: Synthetic oligonucleotide
caaugccaguuugguccau

SEQ ID NO: 2629947 - RNA, 19 nt, Artificial Sequence
  Description of Artificial Sequence: Synthetic oligonucleotide
aauacuauacuguagauac

SEQ ID NO: 2629948 - RNA, 19 nt, Artificial Sequence
  Description of Artificial Sequence: Synthetic oligonucleotide
auuuauguuauauagacag

SEQ ID NO: 2629949 - RNA, 19 nt, Artificial Sequence
  Description of Artificial Sequence: Synthetic oligonucleotide
aauauauauaucuauauau

SEQ ID NO: 2629950 - RNA, 19 nt, Artificial Sequence
  Description of Artificial Sequence: Synthetic oligonucleotide
uccaaaauuacuaaaauac

SEQ ID NO: 2629951 - RNA, 19 nt, Artificial Sequence
  Description of Artificial Sequence: Synthetic oligonucleotide
uuuaguacagauuauuagg

SEQ ID NO: 2629952 - RNA, 19 nt, Artificial Sequence
  Description of Artificial Sequence: Synthetic oligonucleotide
uucaauuuauguuauauag

SEQ ID NO: 2629953 - RNA, 19 nt, Artificial Sequence
  Description of Artificial Sequence: Synthetic oligonucleotide
aauaagaugucacuaauga

SEQ ID NO: 2629954 - RNA, 19 nt, Artificial Sequence
  Description of Artificial Sequence: Synthetic oligonucleotide
gauuauuagggauuuaagg

SEQ ID NO: 2629955 - RNA, 19 nt, Artificial Sequence
  Description of Artificial Sequence: Synthetic oligonucleotide
aaaacuauacauuauguaa

SEQ ID NO: 2629956 - RNA, 19 nt, Artificial Sequence
  Description of Artificial Sequence: Synthetic oligonucleotide
aauaagacaguauuguucu

SEQ ID NO: 2629957 - RNA, 19 nt, Artificial Sequence
  Description of Artificial Sequence: Synthetic oligonucleotide
aacaauauguuuucaacag

SEQ ID NO: 2629958 - RNA, 19 nt, Artificial Sequence
  Description of Artificial Sequence: Synthetic oligonucleotide
uuuuauuauaugcagauuc

SEQ ID NO: 2629959 - RNA, 19 nt, Artificial Sequence
  Description of Artificial Sequence: Synthetic oligonucleotide
acaacaaugagugaaaugg

SEQ ID NO: 2629960 - RNA, 19 nt, Artificial Sequence
  Description of Artificial Sequence: Synthetic oligonucleotide
aaaacuggcucauuuaguc

SEQ ID NO: 2629961 - RNA, 19 nt, Artificial Sequence
  Description of Artificial Sequence: Synthetic oligonucleotide
uagucuaaauucaagaugc

SEQ ID NO: 2629962 - RNA, 19 nt, Artificial Sequence
  Description of Artificial Sequence: Synthetic oligonucleotide
aauuuaagaagaaacauca

SEQ ID NO: 2629963 - RNA, 19 nt, Artificial Sequence
  Description of Artificial Sequence: Synthetic oligonucleotide
uguacauauauuuaguaca

SEQ ID NO: 2629964 - RNA, 19 nt, Artificial Sequence
  Description of Artificial Sequence: Synthetic oligonucleotide
aacaaaacauaaauaagac

SEQ ID NO: 2629965 - RNA, 19 nt, Artificial Sequence
  Description of Artificial Sequence: Synthetic oligonucleotide
aauuuuacaccauggacug

SEQ ID NO: 2629966 - RNA, 19 nt, Artificial Sequence
  Description of Artificial Sequence: Synthetic oligonucleotide
auuauuagggauuuaagga

SEQ ID NO: 2629967 - RNA, 19 nt, Artificial Sequence
  Description of Artificial Sequence: Synthetic oligonucleotide
ugaaaagcagggaagacag

SEQ ID NO: 2629968 - RNA, 19 nt, Artificial Sequence
  Description of Artificial Sequence: Synthetic oligonucleotide
uugacuagcagauacaaca

SEQ ID NO: 2629969 - RNA, 19 nt, Artificial Sequence
  Description of Artificial Sequence: Synthetic oligonucleotide
uguagauacaccacaacag

SEQ ID NO: 2629970 - RNA, 19 nt, Artificial Sequence
  Description of Artificial Sequence: Synthetic oligonucleotide
aaauuuaagaagaaacauc

SEQ ID NO: 2629971 - RNA, 19 nt, Artificial Sequence
  Description of Artificial Sequence: Synthetic oligonucleotide
uauauaucuauauauauuu

SEQ ID NO: 2629972 - RNA, 19 nt, Artificial Sequence
  Description of Artificial Sequence: Synthetic oligonucleotide
caauuuauguuauauagac

SEQ ID NO: 2629973 - RNA, 19 nt, Artificial Sequence
  Description of Artificial Sequence: Synthetic oligonucleotide
aaauaagacaguauuguuc

SEQ ID NO: 2629974 - RNA, 19 nt, Artificial Sequence
  Description of Artificial Sequence: Synthetic oligonucleotide
ucacuaaugacacagaaua

SEQ ID NO: 2629975 - RNA, 19 nt, Artificial Sequence
  Description of Artificial Sequence: Synthetic oligonucleotide
aaggcuagcuuacuuaaac

SEQ ID NO: 2629976 - RNA, 19 nt, Artificial Sequence
  Description of Artificial Sequence: Synthetic oligonucleotide
ucuuuguacauauauuuag

SEQ ID NO: 2629977 - RNA, 19 nt, Artificial Sequence
  Description of Artificial Sequence: Synthetic oligonucleotide
uuagucuaaauucaagaug

SEQ ID NO: 2629978 - RNA, 19 nt, Artificial Sequence
  Description of Artificial Sequence: Synthetic oligonucleotide
uauguuuucaacaguauaa

SEQ ID NO: 2629979 - RNA, 19 nt, Artificial Sequence
  Description of Artificial Sequence: Synthetic oligonucleotide
uucaacaguauaauaaaca

SEQ ID NO: 2629980 - RNA, 19 nt, Artificial Sequence
  Description of Artificial Sequence: Synthetic oligonucleotide
aaacaaaauaagaugucac

SEQ ID NO: 2629981 - RNA, 19 nt, Artificial Sequence
  Description of Artificial Sequence: Synthetic oligonucleotide
aacaaaauaagaugucacu

SEQ ID NO: 2629982 - RNA, 19 nt, Artificial Sequence
  Description of Artificial Sequence: Synthetic oligonucleotide
uuucuuaaugcauaaauau

SEQ ID NO: 2629983 - RNA, 19 nt, Artificial Sequence
  Description of Artificial Sequence: Synthetic oligonucleotide
agucaaacgacuuuguuca

SEQ ID NO: 2629984 - RNA, 19 nt, Artificial Sequence
  Description of Artificial Sequence: Synthetic oligonucleotide
gauucuucugcauuguugc

SEQ ID NO: 2629985 - RNA, 19 nt, Artificial Sequence
  Description of Artificial Sequence: Synthetic oligonucleotide
uauauauaucuauauauau

SEQ ID NO: 2629986 - RNA, 19 nt, Artificial Sequence
  Description of Artificial Sequence: Synthetic oligonucleotide
auggagacaaugaagauac

SEQ ID NO: 2629987 - RNA, 19 nt, Artificial Sequence
  Description of Artificial Sequence: Synthetic oligonucleotide
gauuuugacuagcagauac

SEQ ID NO: 2629988 - RNA, 19 nt, Artificial Sequence
  Description of Artificial Sequence: Synthetic oligonucleotide
guugcuaacaguucacugg

SEQ ID NO: 2629989 - RNA, 19 nt, Artificial Sequence
  Description of Artificial Sequence: Synthetic oligonucleotide
aaauauauauaucuauaua

SEQ ID NO: 2629990 - RNA, 19 nt, Artificial Sequence
  Description of Artificial Sequence: Synthetic oligonucleotide
uguacaauuuuacaccaug

SEQ ID NO: 2629991 - RNA, 19 nt, Artificial Sequence
  Description of Artificial Sequence: Synthetic oligonucleotide
auuuagucuaaauucaaga

SEQ ID NO: 2629992 - RNA, 19 nt, Artificial Sequence
  Description of Artificial Sequence: Synthetic oligonucleotide
uuacagaaacaaaauaaga

SEQ ID NO: 2629993 - RNA, 19 nt, Artificial Sequence
  Description of Artificial Sequence: Synthetic oligonucleotide
caauauaauuaugaaaagg

SEQ ID NO: 2629994 - RNA, 19 nt, Artificial Sequence
  Description of Artificial Sequence: Synthetic oligonucleotide
ucuuggaaaacaaucuuca

SEQ ID NO: 2629995 - RNA, 19 nt, Artificial Sequence
  Description of Artificial Sequence: Synthetic oligonucleotide
auuauaugcagauucuucu

SEQ ID NO: 2629996 - RNA, 19 nt, Artificial Sequence
  Description of Artificial Sequence: Synthetic oligonucleotide
uuuauguuauauagacagg

SEQ ID NO: 2629997 - RNA, 19 nt, Artificial Sequence
  Description of Artificial Sequence: Synthetic oligonucleotide
aaauuuugaugacauauuu

SEQ ID NO: 2629998 - RNA, 19 nt, Artificial Sequence
  Description of Artificial Sequence: Synthetic oligonucleotide
aagaugucacuaaugacac

SEQ ID NO: 2629999 - RNA, 19 nt, Artificial Sequence
  Description of Artificial Sequence: Synthetic oligonucleotide
aaaacaaugccccauuauu

SEQ ID NO: 2630000 - RNA, 19 nt, Artificial Sequence
  Description of Artificial Sequence: Synthetic oligonucleotide
ugauugaaaagcagggaag

SEQ ID NO: 2630001 - RNA, 19 nt, Artificial Sequence
  Description of Artificial Sequence: Synthetic oligonucleotide
uuuauuauaugcagauucu

SEQ ID NO: 2630002 - RNA, 19 nt, Artificial Sequence
  Description of Artificial Sequence: Synthetic oligonucleotide
uuaaacuagucaaacgacu

SEQ ID NO: 2630003 - RNA, 19 nt, Artificial Sequence
  Description of Artificial Sequence: Synthetic oligonucleotide
ucaauauaauuaugaaaag

SEQ ID NO: 2630004 - RNA, 19 nt, Artificial Sequence
  Description of Artificial Sequence: Synthetic oligonucleotide
ucaauuuauguuauauaga

SEQ ID NO: 2630005 - RNA, 19 nt, Artificial Sequence
  Description of Artificial Sequence: Synthetic oligonucleotide
cagaugauugaaaagcagg

SEQ ID NO: 2630006 - RNA, 19 nt, Artificial Sequence
  Description of Artificial Sequence: Synthetic oligonucleotide
ucaagaugcagcuuuguca

SEQ ID NO: 2630007 - RNA, 19 nt, Artificial Sequence
  Description of Artificial Sequence: Synthetic oligonucleotide
aaaauaagaugucacuaau

SEQ ID NO: 2630008 - RNA, 19 nt, Artificial Sequence
  Description of Artificial Sequence: Synthetic oligonucleotide
ugaugacauauuuugaaca

SEQ ID NO: 2630009 - RNA, 19 nt, Artificial Sequence
  Description of Artificial Sequence: Synthetic oligonucleotide
agaagaaacaucaauauaa

SEQ ID NO: 2630010 - RNA, 19 nt, Artificial Sequence
  Description of Artificial Sequence: Synthetic oligonucleotide
uuugaugacauauuuugaa

SEQ ID NO: 2630011 - RNA, 19 nt, Artificial Sequence
  Description of Artificial Sequence: Synthetic oligonucleotide
auaaauaagacaguauugu

SEQ ID NO: 2630012 - RNA, 19 nt, Artificial Sequence
  Description of Artificial Sequence: Synthetic oligonucleotide
gacacagaauacuauacug

SEQ ID NO: 2630013 - RNA, 19 nt, Artificial Sequence
  Description of Artificial Sequence: Synthetic oligonucleotide
ugaacaauauguuuucaac

SEQ ID NO: 2630014 - RNA, 19 nt, Artificial Sequence
  Description of Artificial Sequence: Synthetic oligonucleotide
agugaaauggguaugaaca

SEQ ID NO: 2630015 - RNA, 19 nt, Artificial Sequence
  Description of Artificial Sequence: Synthetic oligonucleotide
ucugcauuguugcuaacag

SEQ ID NO: 2630016 - RNA, 19 nt, Artificial Sequence
  Description of Artificial Sequence: Synthetic oligonucleotide
ugggaguuaaaacaaugcc

SEQ ID NO: 2630017 - RNA, 19 nt, Artificial Sequence
  Description of Artificial Sequence: Synthetic oligonucleotide
uuaaugcauaaauauauau

SEQ ID NO: 2630018 - RNA, 19 nt, Artificial Sequence
  Description of Artificial Sequence: Synthetic oligonucleotide
uuaugaaaaggcuagcuua

SEQ ID NO: 2630019 - RNA, 19 nt, Artificial Sequence
  Description of Artificial Sequence: Synthetic oligonucleotide
uuauuagggauuuaaggaa

SEQ ID NO: 2630020 - RNA, 19 nt, Artificial Sequence
  Description of Artificial Sequence: Synthetic oligonucleotide
uuauguuauauagacaggu

SEQ ID NO: 2630021 - RNA, 19 nt, Artificial Sequence
  Description of Artificial Sequence: Synthetic oligonucleotide
uuaaggaauauguacaauu

SEQ ID NO: 2630022 - RNA, 19 nt, Artificial Sequence
  Description of Artificial Sequence: Synthetic oligonucleotide
uacuuaaacuagucaaacg

SEQ ID NO: 2630023 - RNA, 19 nt, Artificial Sequence
  Description of Artificial Sequence: Synthetic oligonucleotide
aaugacacagaauacuaua

SEQ ID NO: 2630024 - RNA, 19 nt, Artificial Sequence
  Description of Artificial Sequence: Synthetic oligonucleotide
uauaugcagauucuucugc

SEQ ID NO: 2630025 - RNA, 19 nt, Artificial Sequence
  Description of Artificial Sequence: Synthetic oligonucleotide
uguuauauagacagguaaa

SEQ ID NO: 2630026 - RNA, 19 nt, Artificial Sequence
  Description of Artificial Sequence: Synthetic oligonucleotide
ugucagguuucucugaacc

SEQ ID NO: 2630027 - RNA, 19 nt, Artificial Sequence
  Description of Artificial Sequence: Synthetic oligonucleotide
uaaugcauaaauauauaua

SEQ ID NO: 2630028 - RNA, 19 nt, Artificial Sequence
  Description of Artificial Sequence: Synthetic oligonucleotide
uauuauaugcagauucuuc

SEQ ID NO: 2630029 - RNA, 19 nt, Artificial Sequence
  Description of Artificial Sequence: Synthetic oligonucleotide
auggguaugaacaauaugu

SEQ ID NO: 2630030 - RNA, 19 nt, Artificial Sequence
  Description of Artificial Sequence: Synthetic oligonucleotide
aaaauuacuaaaauacuua

SEQ ID NO: 2630031 - RNA, 19 nt, Artificial Sequence
  Description of Artificial Sequence: Synthetic oligonucleotide
uauguacaauuuuacacca

SEQ ID NO: 2630032 - RNA, 19 nt, Artificial Sequence
  Description of Artificial Sequence: Synthetic oligonucleotide
agauacaccacaacagucc

SEQ ID NO: 2630033 - RNA, 19 nt, Artificial Sequence
  Description of Artificial Sequence: Synthetic oligonucleotide
uuguacauauauuuaguac

SEQ ID NO: 2630034 - RNA, 19 nt, Artificial Sequence
  Description of Artificial Sequence: Synthetic oligonucleotide
ucucugaaccagaugauug

SEQ ID NO: 2630035 - RNA, 19 nt, Artificial Sequence
  Description of Artificial Sequence: Synthetic oligonucleotide
uacaauuuuacaccaugga

SEQ ID NO: 2630036 - RNA, 19 nt, Artificial Sequence
  Description of Artificial Sequence: Synthetic oligonucleotide
aauggguaugaacaauaug

SEQ ID NO: 2630037 - RNA, 19 nt, Artificial Sequence
  Description of Artificial Sequence: Synthetic oligonucleotide
caagaugcagcuuugucag

SEQ ID NO: 2630038 - RNA, 19 nt, Artificial Sequence
  Description of Artificial Sequence: Synthetic oligonucleotide
uauagacagguaaauuuug

SEQ ID NO: 2630039 - RNA, 19 nt, Artificial Sequence
  Description of Artificial Sequence: Synthetic oligonucleotide
ugacauauuuugaacaaaa

SEQ ID NO: 2630040 - RNA, 19 nt, Artificial Sequence
  Description of Artificial Sequence: Synthetic oligonucleotide
aauuaugaaaaggcuagcu

SEQ ID NO: 2630041 - RNA, 19 nt, Artificial Sequence
  Description of Artificial Sequence: Synthetic oligonucleotide
uaugaaaaggcuagcuuac

SEQ ID NO: 2630042 - RNA, 19 nt, Artificial Sequence
  Description of Artificial Sequence: Synthetic oligonucleotide
uauacuguagauacaccac

SEQ ID NO: 2630043 - RNA, 19 nt, Artificial Sequence
  Description of Artificial Sequence: Synthetic oligonucleotide
aaaaggcuagcuuacuuaa

SEQ ID NO: 2630044 - RNA, 19 nt, Artificial Sequence
  Description of Artificial Sequence: Synthetic oligonucleotide
ugcauuguugcuaacaguu

SEQ ID NO: 2630045 - RNA, 19 nt, Artificial Sequence
  Description of Artificial Sequence: Synthetic oligonucleotide
caacuugaggaagagaugg

SEQ ID NO: 2630046 - RNA, 19 nt, Artificial Sequence
  Description of Artificial Sequence: Synthetic oligonucleotide
cuuaaacuagucaaacgac

SEQ ID NO: 2630047 - RNA, 19 nt, Artificial Sequence
  Description of Artificial Sequence: Synthetic oligonucleotide
aucuucacaacaaugagug

SEQ ID NO: 2630048 - RNA, 19 nt, Artificial Sequence
  Description of Artificial Sequence: Synthetic oligonucleotide
agacagguaaauuuugaug

SEQ ID NO: 2630049 - RNA, 19 nt, Artificial Sequence
  Description of Artificial Sequence: Synthetic oligonucleotide
uauuuaguacagauuauua

SEQ ID NO: 2630050 - RNA, 19 nt, Artificial Sequence
  Description of Artificial Sequence: Synthetic oligonucleotide
gauacaacaacuugaggaa

SEQ ID NO: 2630051 - RNA, 19 nt, Artificial Sequence
  Description of Artificial Sequence: Synthetic oligonucleotide
aacuagucaaacgacuuug

SEQ ID NO: 2630052 - RNA, 19 nt, Artificial Sequence
  Description of Artificial Sequence: Synthetic oligonucleotide
agaugauugaaaagcaggg

SEQ ID NO: 2630053 - RNA, 19 nt, Artificial Sequence
  Description of Artificial Sequence: Synthetic oligonucleotide
acaguccaaauuuaagaag

SEQ ID NO: 2630054 - RNA, 19 nt, Artificial Sequence
  Description of Artificial Sequence: Synthetic oligonucleotide
gaauauguacaauuuuaca

SEQ ID NO: 2630055 - RNA, 19 nt, Artificial Sequence
  Description of Artificial Sequence: Synthetic oligonucleotide
aguacagauuauuagggau

SEQ ID NO: 2630056 - RNA, 19 nt, Artificial Sequence
  Description of Artificial Sequence: Synthetic oligonucleotide
uuauaugcagauucuucug

SEQ ID NO: 2630057 - RNA, 19 nt, Artificial Sequence
  Description of Artificial Sequence: Synthetic oligonucleotide
augauugaaaagcagggaa

SEQ ID NO: 2630058 - RNA, 19 nt, Artificial Sequence
  Description of Artificial Sequence: Synthetic oligonucleotide
uauuguucuuuguacauau

SEQ ID NO: 2630059 - RNA, 19 nt, Artificial Sequence
  Description of Artificial Sequence: Synthetic oligonucleotide
aacaaucuucacaacaaug

SEQ ID NO: 2630060 - RNA, 19 nt, Artificial Sequence
  Description of Artificial Sequence: Synthetic oligonucleotide
uacuauacuguagauacac

SEQ ID NO: 2630061 - RNA, 19 nt, Artificial Sequence
  Description of Artificial Sequence: Synthetic oligonucleotide
aaauaagaugucacuaaug

SEQ ID NO: 2630062 - RNA, 19 nt, Artificial Sequence
  Description of Artificial Sequence: Synthetic oligonucleotide
uugaugacauauuuugaac

SEQ ID NO: 2630063 - RNA, 19 nt, Artificial Sequence
  Description of Artificial Sequence: Synthetic oligonucleotide
augggaguuaaaacaaugc

SEQ ID NO: 2630064 - RNA, 19 nt, Artificial Sequence
  Description of Artificial Sequence: Synthetic oligonucleotide
uaaggaauauguacaauuu

SEQ ID NO: 2630065 - RNA, 19 nt, Artificial Sequence
  Description of Artificial Sequence: Synthetic oligonucleotide
acugcauuuucuuaaugca

SEQ ID NO: 2630066 - RNA, 19 nt, Artificial Sequence
  Description of Artificial Sequence: Synthetic oligonucleotide
acuaaugacacagaauacu

SEQ ID NO: 2630067 - RNA, 19 nt, Artificial Sequence
  Description of Artificial Sequence: Synthetic oligonucleotide
acagguaaauuuugaugac

SEQ ID NO: 2630068 - RNA, 19 nt, Artificial Sequence
  Description of Artificial Sequence: Synthetic oligonucleotide
uuuuacaccauggacugca

SEQ ID NO: 2630069 - RNA, 19 nt, Artificial Sequence
  Description of Artificial Sequence: Synthetic oligonucleotide
cauuuagucuaaauucaag

SEQ ID NO: 2630070 - RNA, 19 nt, Artificial Sequence
  Description of Artificial Sequence: Synthetic oligonucleotide
aaucuuggaaaacaaucuu

SEQ ID NO: 2630071 - RNA, 19 nt, Artificial Sequence
  Description of Artificial Sequence: Synthetic oligonucleotide
aagaagaaacaucaauaua

SEQ ID NO: 2630072 - RNA, 19 nt, Artificial Sequence
  Description of Artificial Sequence: Synthetic oligonucleotide
accacaacaguccaaauuu

SEQ ID NO: 2630073 - RNA, 19 nt, Artificial Sequence
  Description of Artificial Sequence: Synthetic oligonucleotide
uacaacaacuugaggaaga

SEQ ID NO: 2630074 - RNA, 19 nt, Artificial Sequence
  Description of Artificial Sequence: Synthetic oligonucleotide
uaaauuuugaugacauauu

SEQ ID NO: 2630075 - RNA, 19 nt, Artificial Sequence
  Description of Artificial Sequence: Synthetic oligonucleotide
aaaacauaaauaagacagu

SEQ ID NO: 2630076 - RNA, 19 nt, Artificial Sequence
  Description of Artificial Sequence: Synthetic oligonucleotide
cuauacuguagauacacca

SEQ ID NO: 2630077 - RNA, 19 nt, Artificial Sequence
  Description of Artificial Sequence: Synthetic oligonucleotide
ugguccaaaauuacuaaaa

SEQ ID NO: 2630078 - RNA, 19 nt, Artificial Sequence
  Description of Artificial Sequence: Synthetic oligonucleotide
uaaacuagucaaacgacuu

SEQ ID NO: 2630079 - RNA, 19 nt, Artificial Sequence
  Description of Artificial Sequence: Synthetic oligonucleotide
acuguagauacaccacaac

SEQ ID NO: 2630080 - RNA, 19 nt, Artificial Sequence
  Description of Artificial Sequence: Synthetic oligonucleotide
ugcauuuucuuaaugcaua

SEQ ID NO: 2630081 - RNA, 19 nt, Artificial Sequence
  Description of Artificial Sequence: Synthetic oligonucleotide
uuuguucaauuuauguuau

SEQ ID NO: 2630082 - RNA, 19 nt, Artificial Sequence
  Description of Artificial Sequence: Synthetic oligonucleotide
uuacuuaaacuagucaaac

SEQ ID NO: 2630083 - RNA, 19 nt, Artificial Sequence
  Description of Artificial Sequence: Synthetic oligonucleotide
uugaaaagcagggaagaca

SEQ ID NO: 2630084 - RNA, 19 nt, Artificial Sequence
  Description of Artificial Sequence: Synthetic oligonucleotide
aacaaugccccauuauuua

SEQ ID NO: 2630085 - RNA, 19 nt, Artificial Sequence
  Description of Artificial Sequence: Synthetic oligonucleotide
acagaggcaggauuuugac

SEQ ID NO: 2630086 - RNA, 19 nt, Artificial Sequence
  Description of Artificial Sequence: Synthetic oligonucleotide
aacgacuuuguucaauuua

SEQ ID NO: 2630087 - RNA, 19 nt, Artificial Sequence
  Description of Artificial Sequence: Synthetic oligonucleotide
uagcagauacaacaacuug

SEQ ID NO: 2630088 - RNA, 19 nt, Artificial Sequence
  Description of Artificial Sequence: Synthetic oligonucleotide
aaucuucacaacaaugagu

SEQ ID NO: 2630089 - RNA, 19 nt, Artificial Sequence
  Description of Artificial Sequence: Synthetic oligonucleotide
agaaacaaaauaagauguc

SEQ ID NO: 2630090 - RNA, 19 nt, Artificial Sequence
  Description of Artificial Sequence: Synthetic oligonucleotide
gaugacauauuuugaacaa

SEQ ID NO: 2630091 - RNA, 19 nt, Artificial Sequence
  Description of Artificial Sequence: Synthetic oligonucleotide
aaggaauauguacaauuuu

SEQ ID NO: 2630092 - RNA, 19 nt, Artificial Sequence
  Description of Artificial Sequence: Synthetic oligonucleotide
auauaauuaugaaaaggcu

SEQ ID NO: 2630093 - RNA, 19 nt, Artificial Sequence
  Description of Artificial Sequence: Synthetic oligonucleotide
acaucaauauaauuaugaa

SEQ ID NO: 2630094 - RNA, 19 nt, Artificial Sequence
  Description of Artificial Sequence: Synthetic oligonucleotide
auuaugaaaaggcuagcuu

SEQ ID NO: 2630095 - RNA, 19 nt, Artificial Sequence
  Description of Artificial Sequence: Synthetic oligonucleotide
uauauuuaguacagauuau

SEQ ID NO: 2630096 - RNA, 19 nt, Artificial Sequence
  Description of Artificial Sequence: Synthetic oligonucleotide
aaugagugaaauggguaug

SEQ ID NO: 2630097 - RNA, 19 nt, Artificial Sequence
  Description of Artificial Sequence: Synthetic oligonucleotide
caacaaugagugaaauggg

SEQ ID NO: 2630098 - RNA, 19 nt, Artificial Sequence
  Description of Artificial Sequence: Synthetic oligonucleotide
aauuuauguuauauagaca

SEQ ID NO: 2630099 - RNA, 19 nt, Artificial Sequence
  Description of Artificial Sequence: Synthetic oligonucleotide
ucagguuucucugaaccag

SEQ ID NO: 2630100 - RNA, 19 nt, Artificial Sequence
  Description of Artificial Sequence: Synthetic oligonucleotide
uguugcuaacaguucacug

SEQ ID NO: 2630101 - RNA, 19 nt, Artificial Sequence
  Description of Artificial Sequence: Synthetic oligonucleotide
uugcuaacaguucacuggu

SEQ ID NO: 2630102 - RNA, 19 nt, Artificial Sequence
  Description of Artificial Sequence: Synthetic oligonucleotide
guacaauuuuacaccaugg

SEQ ID NO: 2630103 - RNA, 19 nt, Artificial Sequence
  Description of Artificial Sequence: Synthetic oligonucleotide
aacaaugagugaaaugggu

SEQ ID NO: 2630104 - RNA, 19 nt, Artificial Sequence
  Description of Artificial Sequence: Synthetic oligonucleotide
aaacaaucuucacaacaau

SEQ ID NO: 2630105 - RNA, 19 nt, Artificial Sequence
  Description of Artificial Sequence: Synthetic oligonucleotide
auacuguagauacaccaca

SEQ ID NO: 2630106 - RNA, 19 nt, Artificial Sequence
  Description of Artificial Sequence: Synthetic oligonucleotide
aaacuggcucauuuagucu

SEQ ID NO: 2630107 - RNA, 19 nt, Artificial Sequence
  Description of Artificial Sequence: Synthetic oligonucleotide
cucauuuagucuaaauuca

SEQ ID NO: 2630108 - RNA, 19 nt, Artificial Sequence
  Description of Artificial Sequence: Synthetic oligonucleotide
caauuuuacaccauggacu

SEQ ID NO: 2630109 - RNA, 19 nt, Artificial Sequence
  Description of Artificial Sequence: Synthetic oligonucleotide
uguucuuuguacauauauu

SEQ ID NO: 2630110 - RNA, 19 nt, Artificial Sequence
  Description of Artificial Sequence: Synthetic oligonucleotide
aacuggcucauuuagucua

SEQ ID NO: 2630111 - RNA, 19 nt, Artificial Sequence
  Description of Artificial Sequence: Synthetic oligonucleotide
gacaaugaagauaccuuag

SEQ ID NO: 2630112 - RNA, 19 nt, Artificial Sequence
  Description of Artificial Sequence: Synthetic oligonucleotide
uaaauaagacaguauuguu

SEQ ID NO: 2630113 - RNA, 19 nt, Artificial Sequence
  Description of Artificial Sequence: Synthetic oligonucleotide
cagaauacuauacuguaga

SEQ ID NO: 2630114 - RNA, 19 nt, Artificial Sequence
  Description of Artificial Sequence: Synthetic oligonucleotide
uauguuauauagacaggua

SEQ ID NO: 2630115 - RNA, 19 nt, Artificial Sequence
  Description of Artificial Sequence: Synthetic oligonucleotide
caacaguccaaauuuaaga

SEQ ID NO: 2630116 - RNA, 19 nt, Artificial Sequence
  Description of Artificial Sequence: Synthetic oligonucleotide
uucacugguccaaaauuac

SEQ ID NO: 2630117 - RNA, 19 nt, Artificial Sequence
  Description of Artificial Sequence: Synthetic oligonucleotide
caguccaaauuuaagaaga

SEQ ID NO: 2630118 - RNA, 19 nt, Artificial Sequence
  Description of Artificial Sequence: Synthetic oligonucleotide
uucuuuguacauauauuua

SEQ ID NO: 2630119 - RNA, 19 nt, Artificial Sequence
  Description of Artificial Sequence: Synthetic oligonucleotide
uagauacaccacaacaguc

SEQ ID NO: 2630120 - RNA, 19 nt, Artificial Sequence
  Description of Artificial Sequence: Synthetic oligonucleotide
aguauuguucuuuguacau

SEQ ID NO: 2630121 - RNA, 19 nt, Artificial Sequence
  Description of Artificial Sequence: Synthetic oligonucleotide
caucaauauaauuaugaaa

SEQ ID NO: 2630122 - RNA, 19 nt, Artificial Sequence
  Description of Artificial Sequence: Synthetic oligonucleotide
uaguacagauuauuaggga

SEQ ID NO: 2630123 - RNA, 19 nt, Artificial Sequence
  Description of Artificial Sequence: Synthetic oligonucleotide
uuuugacuagcagauacaa

SEQ ID NO: 2630124 - RNA, 19 nt, Artificial Sequence
  Description of Artificial Sequence: Synthetic oligonucleotide
acaauauguuuucaacagu

SEQ ID NO: 2630125 - RNA, 19 nt, Artificial Sequence
  Description of Artificial Sequence: Synthetic oligonucleotide
guaugaacaauauguuuuc

SEQ ID NO: 2630126 - RNA, 19 nt, Artificial Sequence
  Description of Artificial Sequence: Synthetic oligonucleotide
aaacuagucaaacgacuuu

SEQ ID NO: 2630127 - RNA, 19 nt, Artificial Sequence
  Description of Artificial Sequence: Synthetic oligonucleotide
uuugucagguuucucugaa

SEQ ID NO: 2630128 - RNA, 19 nt, Artificial Sequence
  Description of Artificial Sequence: Synthetic oligonucleotide
uacaccauggacugcauuu

SEQ ID NO: 2630129 - RNA, 19 nt, Artificial Sequence
  Description of Artificial Sequence: Synthetic oligonucleotide
uuugacuagcagauacaac

SEQ ID NO: 2630130 - RNA, 19 nt, Artificial Sequence
  Description of Artificial Sequence: Synthetic oligonucleotide
caaaauaagaugucacuaa

SEQ ID NO: 2630131 - RNA, 19 nt, Artificial Sequence
  Description of Artificial Sequence: Synthetic oligonucleotide
auuauguaaacaaaacaua

SEQ ID NO: 2630132 - RNA, 19 nt, Artificial Sequence
  Description of Artificial Sequence: Synthetic oligonucleotide
cuaaauucaagaugcagcu

SEQ ID NO: 2630133 - RNA, 19 nt, Artificial Sequence
  Description of Artificial Sequence: Synthetic oligonucleotide
aguauaauaaacaguuaaa

SEQ ID NO: 2630134 - RNA, 19 nt, Artificial Sequence
  Description of Artificial Sequence: Synthetic oligonucleotide
acuagcagauacaacaacu

SEQ ID NO: 2630135 - RNA, 19 nt, Artificial Sequence
  Description of Artificial Sequence: Synthetic oligonucleotide
agcagauacaacaacuuga

SEQ ID NO: 2630136 - RNA, 19 nt, Artificial Sequence
  Description of Artificial Sequence: Synthetic oligonucleotide
agacaaugaagauaccuua

SEQ ID NO: 2630137 - RNA, 19 nt, Artificial Sequence
  Description of Artificial Sequence: Synthetic oligonucleotide
cuguagauacaccacaaca

SEQ ID NO: 2630138 - RNA, 19 nt, Artificial Sequence
  Description of Artificial Sequence: Synthetic oligonucleotide
uuaaaacaaugccccauua

SEQ ID NO: 2630139 - RNA, 19 nt, Artificial Sequence
  Description of Artificial Sequence: Synthetic oligonucleotide
auauauauaucuauauaua

SEQ ID NO: 2630140 - RNA, 19 nt, Artificial Sequence
  Description of Artificial Sequence: Synthetic oligonucleotide
gaaaaggcuagcuuacuua

SEQ ID NO: 2630141 - RNA, 19 nt, Artificial Sequence
  Description of Artificial Sequence: Synthetic oligonucleotide
agcaacucaguuuuauuau

SEQ ID NO: 2630142 - RNA, 19 nt, Artificial Sequence
  Description of Artificial Sequence: Synthetic oligonucleotide
auacauuauguaaacaaaa

SEQ ID NO: 2630143 - RNA, 19 nt, Artificial Sequence
  Description of Artificial Sequence: Synthetic oligonucleotide
auaugcagauucuucugca

SEQ ID NO: 2630144 - RNA, 19 nt, Artificial Sequence
  Description of Artificial Sequence: Synthetic oligonucleotide
aguucacugguccaaaauu

SEQ ID NO: 2630145 - RNA, 19 nt, Artificial Sequence
  Description of Artificial Sequence: Synthetic oligonucleotide
acuauacuguagauacacc

SEQ ID NO: 2630146 - RNA, 19 nt, Artificial Sequence
  Description of Artificial Sequence: Synthetic oligonucleotide
ugaaaaggcuagcuuacuu

SEQ ID NO: 2630147 - RNA, 19 nt, Artificial Sequence
  Description of Artificial Sequence: Synthetic oligonucleotide
gauacaccacaacagucca

SEQ ID NO: 2630148 - RNA, 19 nt, Artificial Sequence
  Description of Artificial Sequence: Synthetic oligonucleotide
auuguugcuaacaguucac

SEQ ID NO: 2630149 - RNA, 19 nt, Artificial Sequence
  Description of Artificial Sequence: Synthetic oligonucleotide
agauuauuagggauuuaag

SEQ ID NO: 2630150 - RNA, 19 nt, Artificial Sequence
  Description of Artificial Sequence: Synthetic oligonucleotide
agcuuacuuaaacuaguca

SEQ ID NO: 2630151 - RNA, 19 nt, Artificial Sequence
  Description of Artificial Sequence: Synthetic oligonucleotide
ugacuagcagauacaacaa

SEQ ID NO: 2630152 - RNA, 19 nt, Artificial Sequence
  Description of Artificial Sequence: Synthetic oligonucleotide
auauauaucuauauauauu

SEQ ID NO: 2630153 - RNA, 19 nt, Artificial Sequence
  Description of Artificial Sequence: Synthetic oligonucleotide
aaacaaugccccauuauuu

SEQ ID NO: 2630154 - RNA, 19 nt, Artificial Sequence
  Description of Artificial Sequence: Synthetic oligonucleotide
gacaguauuguucuuugua

SEQ ID NO: 2630155 - RNA, 19 nt, Artificial Sequence
  Description of Artificial Sequence: Synthetic oligonucleotide
uacuguagauacaccacaa

SEQ ID NO: 2630156 - RNA, 19 nt, Artificial Sequence
  Description of Artificial Sequence: Synthetic oligonucleotide
gggaguuaaaacaaugccc

SEQ ID NO: 2630157 - RNA, 19 nt, Artificial Sequence
  Description of Artificial Sequence: Synthetic oligonucleotide
auggacugcauuuucuuaa

SEQ ID NO: 2630158 - RNA, 19 nt, Artificial Sequence
  Description of Artificial Sequence: Synthetic oligonucleotide
acuugaggaagagauggag

SEQ ID NO: 2630159 - RNA, 19 nt, Artificial Sequence
  Description of Artificial Sequence: Synthetic oligonucleotide
uaauuaugaaaaggcuagc

SEQ ID NO: 2630160 - RNA, 19 nt, Artificial Sequence
  Description of Artificial Sequence: Synthetic oligonucleotide
uagacagguaaauuuugau

SEQ ID NO: 2630161 - RNA, 19 nt, Artificial Sequence
  Description of Artificial Sequence: Synthetic oligonucleotide
gcuuacuuaaacuagucaa

SEQ ID NO: 2630162 - RNA, 19 nt, Artificial Sequence
  Description of Artificial Sequence: Synthetic oligonucleotide
ucacugguccaaaauuacu

SEQ ID NO: 2630163 - RNA, 19 nt, Artificial Sequence
  Description of Artificial Sequence: Synthetic oligonucleotide
acaacaguccaaauuuaag

SEQ ID NO: 2630164 - RNA, 19 nt, Artificial Sequence
  Description of Artificial Sequence: Synthetic oligonucleotide
aauucaagaugcagcuuug

SEQ ID NO: 2630165 - RNA, 19 nt, Artificial Sequence
  Description of Artificial Sequence: Synthetic oligonucleotide
uuauauagacagguaaauu

SEQ ID NO: 2630166 - RNA, 19 nt, Artificial Sequence
  Description of Artificial Sequence: Synthetic oligonucleotide
aggauuuugacuagcagau

SEQ ID NO: 2630167 - RNA, 19 nt, Artificial Sequence
  Description of Artificial Sequence: Synthetic oligonucleotide
cacaacaaugagugaaaug

SEQ ID NO: 2630168 - RNA, 19 nt, Artificial Sequence
  Description of Artificial Sequence: Synthetic oligonucleotide
cauuguugcuaacaguuca

SEQ ID NO: 2630169 - RNA, 19 nt, Artificial Sequence
  Description of Artificial Sequence: Synthetic oligonucleotide
gaaucuuggaaaacaaucu

SEQ ID NO: 2630170 - RNA, 19 nt, Artificial Sequence
  Description of Artificial Sequence: Synthetic oligonucleotide
agaauacuauacuguagau

SEQ ID NO: 2630171 - RNA, 19 nt, Artificial Sequence
  Description of Artificial Sequence: Synthetic oligonucleotide
aagaugcagcuuugucagg

SEQ ID NO: 2630172 - RNA, 19 nt, Artificial Sequence
  Description of Artificial Sequence: Synthetic oligonucleotide
caaaauuacuaaaauacuu

SEQ ID NO: 2630173 - RNA, 19 nt, Artificial Sequence
  Description of Artificial Sequence: Synthetic oligonucleotide
guucuuuguacauauauuu

SEQ ID NO: 2630174 - RNA, 19 nt, Artificial Sequence
  Description of Artificial Sequence: Synthetic oligonucleotide
acagaauacuauacuguag

SEQ ID NO: 2630175 - RNA, 19 nt, Artificial Sequence
  Description of Artificial Sequence: Synthetic oligonucleotide
gaugauugaaaagcaggga

SEQ ID NO: 2630176 - RNA, 19 nt, Artificial Sequence
  Description of Artificial Sequence: Synthetic oligonucleotide
acugguccaaaauuacuaa

SEQ ID NO: 2630177 - RNA, 19 nt, Artificial Sequence
  Description of Artificial Sequence: Synthetic oligonucleotide
aggaauauguacaauuuua

SEQ ID NO: 2630178 - RNA, 19 nt, Artificial Sequence
  Description of Artificial Sequence: Synthetic oligonucleotide
uagcuuacuuaaacuaguc

SEQ ID NO: 2630179 - RNA, 19 nt, Artificial Sequence
  Description of Artificial Sequence: Synthetic oligonucleotide
ccaaauuuaagaagaaaca

SEQ ID NO: 2630180 - RNA, 19 nt, Artificial Sequence
  Description of Artificial Sequence: Synthetic oligonucleotide
cacuaaugacacagaauac

SEQ ID NO: 2630181 - RNA, 19 nt, Artificial Sequence
  Description of Artificial Sequence: Synthetic oligonucleotide
gacuagcagauacaacaac

SEQ ID NO: 2630182 - RNA, 19 nt, Artificial Sequence
  Description of Artificial Sequence: Synthetic oligonucleotide
acacagaauacuauacugu

SEQ ID NO: 2630183 - RNA, 19 nt, Artificial Sequence
  Description of Artificial Sequence: Synthetic oligonucleotide
auacaacaacuugaggaag

SEQ ID NO: 2630184 - RNA, 19 nt, Artificial Sequence
  Description of Artificial Sequence: Synthetic oligonucleotide
ggaauauguacaauuuuac

SEQ ID NO: 2630185 - RNA, 19 nt, Artificial Sequence
  Description of Artificial Sequence: Synthetic oligonucleotide
uuuaaggaauauguacaau

SEQ ID NO: 2630186 - RNA, 19 nt, Artificial Sequence
  Description of Artificial Sequence: Synthetic oligonucleotide
acaacaacuugaggaagag

SEQ ID NO: 2630187 - RNA, 19 nt, Artificial Sequence
  Description of Artificial Sequence: Synthetic oligonucleotide
gauggagacaaugaagaua

SEQ ID NO: 2630188 - RNA, 19 nt, Artificial Sequence
  Description of Artificial Sequence: Synthetic oligonucleotide
cuugaggaagagauggaga

SEQ ID NO: 2630189 - RNA, 19 nt, Artificial Sequence
  Description of Artificial Sequence: Synthetic oligonucleotide
cuucacaacaaugagugaa

SEQ ID NO: 2630190 - RNA, 19 nt, Artificial Sequence
  Description of Artificial Sequence: Synthetic oligonucleotide
aaauggguaugaacaauau

SEQ ID NO: 2630191 - RNA, 19 nt, Artificial Sequence
  Description of Artificial Sequence: Synthetic oligonucleotide
cagauacaacaacuugagg

SEQ ID NO: 2630192 - RNA, 19 nt, Artificial Sequence
  Description of Artificial Sequence: Synthetic oligonucleotide
cuuaaugcauaaauauaua

SEQ ID NO: 2630193 - RNA, 19 nt, Artificial Sequence
  Description of Artificial Sequence: Synthetic oligonucleotide
acuauacauuauguaaaca

SEQ ID NO: 2630194 - RNA, 19 nt, Artificial Sequence
  Description of Artificial Sequence: Synthetic oligonucleotide
gaauacuauacuguagaua

SEQ ID NO: 2630195 - RNA, 19 nt, Artificial Sequence
  Description of Artificial Sequence: Synthetic oligonucleotide
agguaaauuuugaugacau

SEQ ID NO: 2630196 - RNA, 19 nt, Artificial Sequence
  Description of Artificial Sequence: Synthetic oligonucleotide
aaacgacuuuguucaauuu

SEQ ID NO: 2630197 - RNA, 19 nt, Artificial Sequence
  Description of Artificial Sequence: Synthetic oligonucleotide
ugcagcuuugucagguuuc

SEQ ID NO: 2630198 - RNA, 19 nt, Artificial Sequence
  Description of Artificial Sequence: Synthetic oligonucleotide
uuucucugaaccagaugau

SEQ ID NO: 2630199 - RNA, 19 nt, Artificial Sequence
  Description of Artificial Sequence: Synthetic oligonucleotide
uacagauuauuagggauuu

SEQ ID NO: 2630200 - RNA, 19 nt, Artificial Sequence
  Description of Artificial Sequence: Synthetic oligonucleotide
aggcuagcuuacuuaaacu

SEQ ID NO: 2630201 - RNA, 19 nt, Artificial Sequence
  Description of Artificial Sequence: Synthetic oligonucleotide
guagauacaccacaacagu

SEQ ID NO: 2630202 - RNA, 19 nt, Artificial Sequence
  Description of Artificial Sequence: Synthetic oligonucleotide
uaugcagauucuucugcau

SEQ ID NO: 2630203 - RNA, 19 nt, Artificial Sequence
  Description of Artificial Sequence: Synthetic oligonucleotide
gcuagcuuacuuaaacuag

SEQ ID NO: 2630204 - RNA, 19 nt, Artificial Sequence
  Description of Artificial Sequence: Synthetic oligonucleotide
auagacagguaaauuuuga

SEQ ID NO: 2630205 - RNA, 19 nt, Artificial Sequence
  Description of Artificial Sequence: Synthetic oligonucleotide
caguauuguucuuuguaca

SEQ ID NO: 2630206 - RNA, 19 nt, Artificial Sequence
  Description of Artificial Sequence: Synthetic oligonucleotide
acaaugccccauuauuuaa

SEQ ID NO: 2630207 - RNA, 19 nt, Artificial Sequence
  Description of Artificial Sequence: Synthetic oligonucleotide
agaugcagcuuugucaggu

SEQ ID NO: 2630208 - RNA, 19 nt, Artificial Sequence
  Description of Artificial Sequence: Synthetic oligonucleotide
cacagaauacuauacugua

SEQ ID NO: 2630209 - RNA, 19 nt, Artificial Sequence
  Description of Artificial Sequence: Synthetic oligonucleotide
acgacuuuguucaauuuau

SEQ ID NO: 2630210 - RNA, 19 nt, Artificial Sequence
  Description of Artificial Sequence: Synthetic oligonucleotide
ucuucacaacaaugaguga

SEQ ID NO: 2630211 - RNA, 19 nt, Artificial Sequence
  Description of Artificial Sequence: Synthetic oligonucleotide
gaguuaaaacaaugcccca

SEQ ID NO: 2630212 - RNA, 19 nt, Artificial Sequence
  Description of Artificial Sequence: Synthetic oligonucleotide
auuuugacuagcagauaca

SEQ ID NO: 2630213 - RNA, 19 nt, Artificial Sequence
  Description of Artificial Sequence: Synthetic oligonucleotide
gugaaauggguaugaacaa

SEQ ID NO: 2630214 - RNA, 19 nt, Artificial Sequence
  Description of Artificial Sequence: Synthetic oligonucleotide
acaaugagugaaaugggua

SEQ ID NO: 2630215 - RNA, 19 nt, Artificial Sequence
  Description of Artificial Sequence: Synthetic oligonucleotide
uuguugcuaacaguucacu

SEQ ID NO: 2630216 - RNA, 19 nt, Artificial Sequence
  Description of Artificial Sequence: Synthetic oligonucleotide
ucaaacgacuuuguucaau

SEQ ID NO: 2630217 - RNA, 19 nt, Artificial Sequence
  Description of Artificial Sequence: Synthetic oligonucleotide
cagcaacucaguuuuauua

SEQ ID NO: 2630218 - RNA, 19 nt, Artificial Sequence
  Description of Artificial Sequence: Synthetic oligonucleotide
cuagcuuacuuaaacuagu

SEQ ID NO: 2630219 - RNA, 19 nt, Artificial Sequence
  Description of Artificial Sequence: Synthetic oligonucleotide
cacugguccaaaauuacua

SEQ ID NO: 2630220 - RNA, 19 nt, Artificial Sequence
  Description of Artificial Sequence: Synthetic oligonucleotide
gacagaggcaggauuuuga

SEQ ID NO: 2630221 - RNA, 19 nt, Artificial Sequence
  Description of Artificial Sequence: Synthetic oligonucleotide
acaacuugaggaagagaug

SEQ ID NO: 2630222 - RNA, 19 nt, Artificial Sequence
  Description of Artificial Sequence: Synthetic oligonucleotide
uggacugcauuuucuuaau

SEQ ID NO: 2630223 - RNA, 19 nt, Artificial Sequence
  Description of Artificial Sequence: Synthetic oligonucleotide
cauauauuuaguacagauu

SEQ ID NO: 2630224 - RNA, 19 nt, Artificial Sequence
  Description of Artificial Sequence: Synthetic oligonucleotide
agacaguauuguucuuugu

SEQ ID NO: 2630225 - RNA, 19 nt, Artificial Sequence
  Description of Artificial Sequence: Synthetic oligonucleotide
guuauauagacagguaaau

SEQ ID NO: 2630226 - RNA, 19 nt, Artificial Sequence
  Description of Artificial Sequence: Synthetic oligonucleotide
ucacaacaaugagugaaau

SEQ ID NO: 2630227 - RNA, 19 nt, Artificial Sequence
  Description of Artificial Sequence: Synthetic oligonucleotide
augcagauucuucugcauu

SEQ ID NO: 2630228 - RNA, 19 nt, Artificial Sequence
  Description of Artificial Sequence: Synthetic oligonucleotide
gcaggauuuugacuagcag

SEQ ID NO: 2630229 - RNA, 19 nt, Artificial Sequence
  Description of Artificial Sequence: Synthetic oligonucleotide
augacauauuuugaacaaa

SEQ ID NO: 2630230 - RNA, 19 nt, Artificial Sequence
  Description of Artificial Sequence: Synthetic oligonucleotide
caaugagugaaauggguau

SEQ ID NO: 2630231 - RNA, 19 nt, Artificial Sequence
  Description of Artificial Sequence: Synthetic oligonucleotide
uucucugaaccagaugauu

SEQ ID NO: 2630232 - RNA, 19 nt, Artificial Sequence
  Description of Artificial Sequence: Synthetic oligonucleotide
uugucagguuucucugaac

SEQ ID NO: 2630233 - RNA, 19 nt, Artificial Sequence
  Description of Artificial Sequence: Synthetic oligonucleotide
guucacugguccaaaauua

SEQ ID NO: 2630234 - RNA, 19 nt, Artificial Sequence
  Description of Artificial Sequence: Synthetic oligonucleotide
uuuacaccauggacugcau

SEQ ID NO: 2630235 - RNA, 19 nt, Artificial Sequence
  Description of Artificial Sequence: Synthetic oligonucleotide
cuuugucagguuucucuga

SEQ ID NO: 2630236 - RNA, 19 nt, Artificial Sequence
  Description of Artificial Sequence: Synthetic oligonucleotide
uggagacaaugaagauacc

SEQ ID NO: 2630237 - RNA, 19 nt, Artificial Sequence
  Description of Artificial Sequence: Synthetic oligonucleotide
ugagugaaauggguaugaa

SEQ ID NO: 2630238 - RNA, 19 nt, Artificial Sequence
  Description of Artificial Sequence: Synthetic oligonucleotide
gagacaaugaagauaccuu

SEQ ID NO: 2630239 - RNA, 19 nt, Artificial Sequence
  Description of Artificial Sequence: Synthetic oligonucleotide
uggcucauuuagucuaaau

SEQ ID NO: 2630240 - RNA, 19 nt, Artificial Sequence
  Description of Artificial Sequence: Synthetic oligonucleotide
acuagucaaacgacuuugu

SEQ ID NO: 2630241 - RNA, 19 nt, Artificial Sequence
  Description of Artificial Sequence: Synthetic oligonucleotide
ggcuagcuuacuuaaacua

SEQ ID NO: 2630242 - RNA, 19 nt, Artificial Sequence
  Description of Artificial Sequence: Synthetic oligonucleotide
aaaggcuagcuuacuuaaa

SEQ ID NO: 2630243 - RNA, 19 nt, Artificial Sequence
  Description of Artificial Sequence: Synthetic oligonucleotide
uuacaccauggacugcauu

SEQ ID NO: 2630244 - RNA, 19 nt, Artificial Sequence
  Description of Artificial Sequence: Synthetic oligonucleotide
uuguucaauuuauguuaua

SEQ ID NO: 2630245 - RNA, 19 nt, Artificial Sequence
  Description of Artificial Sequence: Synthetic oligonucleotide
agacagaggcaggauuuug

SEQ ID NO: 2630246 - RNA, 19 nt, Artificial Sequence
  Description of Artificial Sequence: Synthetic oligonucleotide
augaaaaggcuagcuuacu

SEQ ID NO: 2630247 - RNA, 19 nt, Artificial Sequence
  Description of Artificial Sequence: Synthetic oligonucleotide
ugcuaacaguucacugguc

SEQ ID NO: 2630248 - RNA, 19 nt, Artificial Sequence
  Description of Artificial Sequence: Synthetic oligonucleotide
aagacagaggcaggauuuu

SEQ ID NO: 2630249 - RNA, 19 nt, Artificial Sequence
  Description of Artificial Sequence: Synthetic oligonucleotide
acaguucacugguccaaaa

SEQ ID NO: 2630250 - RNA, 19 nt, Artificial Sequence
  Description of Artificial Sequence: Synthetic oligonucleotide
aguccaaauuuaagaagaa

SEQ ID NO: 2630251 - RNA, 19 nt, Artificial Sequence
  Description of Artificial Sequence: Synthetic oligonucleotide
gguuucucugaaccagaug

SEQ ID NO: 2630252 - RNA, 19 nt, Artificial Sequence
  Description of Artificial Sequence: Synthetic oligonucleotide
guccaaauuuaagaagaaa

SEQ ID NO: 2630253 - RNA, 19 nt, Artificial Sequence
  Description of Artificial Sequence: Synthetic oligonucleotide
auaagacaguauuguucuu

SEQ ID NO: 2630254 - RNA, 19 nt, Artificial Sequence
  Description of Artificial Sequence: Synthetic oligonucleotide
agucuaaauucaagaugca

SEQ ID NO: 2630255 - RNA, 19 nt, Artificial Sequence
  Description of Artificial Sequence: Synthetic oligonucleotide
cuagcagauacaacaacuu

SEQ ID NO: 2630256 - RNA, 19 nt, Artificial Sequence
  Description of Artificial Sequence: Synthetic oligonucleotide
auacuauacuguagauaca

SEQ ID NO: 2630257 - RNA, 19 nt, Artificial Sequence
  Description of Artificial Sequence: Synthetic oligonucleotide
ccaaaauuacuaaaauacu

SEQ ID NO: 2630258 - RNA, 19 nt, Artificial Sequence
  Description of Artificial Sequence: Synthetic oligonucleotide
ggagacaaugaagauaccu

SEQ ID NO: 2630259 - RNA, 19 nt, Artificial Sequence
  Description of Artificial Sequence: Synthetic oligonucleotide
augcagcuuugucagguuu

SEQ ID NO: 2630260 - RNA, 19 nt, Artificial Sequence
  Description of Artificial Sequence: Synthetic oligonucleotide
gguccaaaauuacuaaaau

SEQ ID NO: 2630261 - RNA, 19 nt, Artificial Sequence
  Description of Artificial Sequence: Synthetic oligonucleotide
caaacgacuuuguucaauu

SEQ ID NO: 2630262 - RNA, 19 nt, Artificial Sequence
  Description of Artificial Sequence: Synthetic oligonucleotide
cagguuucucugaaccaga

SEQ ID NO: 2630263 - RNA, 19 nt, Artificial Sequence
  Description of Artificial Sequence: Synthetic oligonucleotide
caccauggacugcauuuuc

SEQ ID NO: 2630264 - RNA, 19 nt, Artificial Sequence
  Description of Artificial Sequence: Synthetic oligonucleotide
cugcauuuucuuaaugcau

SEQ ID NO: 2630265 - RNA, 19 nt, Artificial Sequence
  Description of Artificial Sequence: Synthetic oligonucleotide
gguaaauuuugaugacaua

SEQ ID NO: 2630266 - RNA, 19 nt, Artificial Sequence
  Description of Artificial Sequence: Synthetic oligonucleotide
gaaaagcagggaagacaga

SEQ ID NO: 2630267 - RNA, 19 nt, Artificial Sequence
  Description of Artificial Sequence: Synthetic oligonucleotide
guacagauuauuagggauu

SEQ ID NO: 2630268 - RNA, 19 nt, Artificial Sequence
  Description of Artificial Sequence: Synthetic oligonucleotide
gcaacucaguuuuauuaua

SEQ ID NO: 2630269 - RNA, 19 nt, Artificial Sequence
  Description of Artificial Sequence: Synthetic oligonucleotide
acaccauggacugcauuuu

SEQ ID NO: 2630270 - RNA, 19 nt, Artificial Sequence
  Description of Artificial Sequence: Synthetic oligonucleotide
auguacaauuuuacaccau

SEQ ID NO: 2630271 - RNA, 19 nt, Artificial Sequence
  Description of Artificial Sequence: Synthetic oligonucleotide
gucacuaaugacacagaau

SEQ ID NO: 2630272 - RNA, 19 nt, Artificial Sequence
  Description of Artificial Sequence: Synthetic oligonucleotide
gggauuuaaggaauaugua

SEQ ID NO: 2630273 - RNA, 19 nt, Artificial Sequence
  Description of Artificial Sequence: Synthetic oligonucleotide
caacaacuugaggaagaga

SEQ ID NO: 2630274 - RNA, 19 nt, Artificial Sequence
  Description of Artificial Sequence: Synthetic oligonucleotide
ggguaugaacaauauguuu

SEQ ID NO: 2630275 - RNA, 19 nt, Artificial Sequence
  Description of Artificial Sequence: Synthetic oligonucleotide
ggcaggauuuugacuagca

SEQ ID NO: 2630276 - RNA, 19 nt, Artificial Sequence
  Description of Artificial Sequence: Synthetic oligonucleotide
acuggcucauuuagucuaa

SEQ ID NO: 2630277 - RNA, 19 nt, Artificial Sequence
  Description of Artificial Sequence: Synthetic oligonucleotide
caccacaacaguccaaauu

SEQ ID NO: 2630278 - RNA, 19 nt, Artificial Sequence
  Description of Artificial Sequence: Synthetic oligonucleotide
cuagucaaacgacuuuguu

SEQ ID NO: 2630279 - RNA, 19 nt, Artificial Sequence
  Description of Artificial Sequence: Synthetic oligonucleotide
acagauuauuagggauuua

SEQ ID NO: 2630280 - RNA, 19 nt, Artificial Sequence
  Description of Artificial Sequence: Synthetic oligonucleotide
cagaggcaggauuuugacu

SEQ ID NO: 2630281 - RNA, 19 nt, Artificial Sequence
  Description of Artificial Sequence: Synthetic oligonucleotide
gcauuguugcuaacaguuc

SEQ ID NO: 2630282 - RNA, 19 nt, Artificial Sequence
  Description of Artificial Sequence: Synthetic oligonucleotide
gucaaacgacuuuguucaa

SEQ ID NO: 2630283 - RNA, 19 nt, Artificial Sequence
  Description of Artificial Sequence: Synthetic oligonucleotide
cgacuuuguucaauuuaug

SEQ ID NO: 2630284 - RNA, 19 nt, Artificial Sequence
  Description of Artificial Sequence: Synthetic oligonucleotide
ggaagacagaggcaggauu

SEQ ID NO: 2630285 - RNA, 19 nt, Artificial Sequence
  Description of Artificial Sequence: Synthetic oligonucleotide
auacaccacaacaguccaa

SEQ ID NO: 2630286 - RNA, 19 nt, Artificial Sequence
  Description of Artificial Sequence: Synthetic oligonucleotide
caguucacugguccaaaau

SEQ ID NO: 2630287 - RNA, 19 nt, Artificial Sequence
  Description of Artificial Sequence: Synthetic oligonucleotide
ggauuuugacuagcagaua

SEQ ID NO: 2630288 - RNA, 19 nt, Artificial Sequence
  Description of Artificial Sequence: Synthetic oligonucleotide
ccauggacugcauuuucuu

SEQ ID NO: 2630289 - RNA, 19 nt, Artificial Sequence
  Description of Artificial Sequence: Synthetic oligonucleotide
gggaagacagaggcaggau

SEQ ID NO: 2630290 - RNA, 19 nt, Artificial Sequence
  Description of Artificial Sequence: Synthetic oligonucleotide
ucuaagaacacacauacaa

SEQ ID NO: 2630291 - RNA, 19 nt, Artificial Sequence
  Description of Artificial Sequence: Synthetic oligonucleotide
uuuacuucuaagaacacac

SEQ ID NO: 2630292 - RNA, 19 nt, Artificial Sequence
  Description of Artificial Sequence: Synthetic oligonucleotide
auagggaagagguuaaugg

SEQ ID NO: 2630293 - RNA, 19 nt, Artificial Sequence
  Description of Artificial Sequence: Synthetic oligonucleotide
aauggaaucuggucuggcc

SEQ ID NO: 2630294 - RNA, 19 nt, Artificial Sequence
  Description of Artificial Sequence: Synthetic oligonucleotide
gacuagacaggauaggugg

SEQ ID NO: 2630295 - RNA, 19 nt, Artificial Sequence
  Description of Artificial Sequence: Synthetic oligonucleotide
aauggcuuuacuucuaaga

SEQ ID NO: 2630296 - RNA, 19 nt, Artificial Sequence
  Description of Artificial Sequence: Synthetic oligonucleotide
aacccuacuuccuucuucc

SEQ ID NO: 2630297 - RNA, 19 nt, Artificial Sequence
  Description of Artificial Sequence: Synthetic oligonucleotide
aacaaagcuggacucuccc

SEQ ID NO: 2630298 - RNA, 19 nt, Artificial Sequence
  Description of Artificial Sequence: Synthetic oligonucleotide
agaacugcaacaaagcugg

SEQ ID NO: 2630299 - RNA, 19 nt, Artificial Sequence
  Description of Artificial Sequence: Synthetic oligonucleotide
aagcaauuugagaagaaac

SEQ ID NO: 2630300 - RNA, 19 nt, Artificial Sequence
  Description of Artificial Sequence: Synthetic oligonucleotide
auaucuggggcagagaggc

SEQ ID NO: 2630301 - RNA, 19 nt, Artificial Sequence
  Description of Artificial Sequence: Synthetic oligonucleotide
ucauaucuggggcagagag

SEQ ID NO: 2630302 - RNA, 19 nt, Artificial Sequence
  Description of Artificial Sequence: Synthetic oligonucleotide
agcaauuugagaagaaacc

SEQ ID NO: 2630303 - RNA, 19 nt, Artificial Sequence
  Description of Artificial Sequence: Synthetic oligonucleotide
acaaacucacuguaugggc

SEQ ID NO: 2630304 - RNA, 19 nt, Artificial Sequence
  Description of Artificial Sequence: Synthetic oligonucleotide
uuugggaaggcuagguugg

SEQ ID NO: 2630305 - RNA, 19 nt, Artificial Sequence
  Description of Artificial Sequence: Synthetic oligonucleotide
gagaagaaacccuacuucc

SEQ ID NO: 2630306 - RNA, 19 nt, Artificial Sequence
  Description of Artificial Sequence: Synthetic oligonucleotide
aacuagacugaacaauuug

SEQ ID NO: 2630307 - RNA, 19 nt, Artificial Sequence
  Description of Artificial Sequence: Synthetic oligonucleotide
aguuuggcuccucugaugg

SEQ ID NO: 2630308 - RNA, 19 nt, Artificial Sequence
  Description of Artificial Sequence: Synthetic oligonucleotide
aggacuguagcucaugguc

SEQ ID NO: 2630309 - RNA, 19 nt, Artificial Sequence
  Description of Artificial Sequence: Synthetic oligonucleotide
agcaaguccugucauaggg

SEQ ID NO: 2630310 - RNA, 19 nt, Artificial Sequence
  Description of Artificial Sequence: Synthetic oligonucleotide
ugaacugcugcucacgggc

SEQ ID NO: 2630311 - RNA, 19 nt, Artificial Sequence
  Description of Artificial Sequence: Synthetic oligonucleotide
gacugaacaauuugggaag

SEQ ID NO: 2630312 - RNA, 19 nt, Artificial Sequence
  Description of Artificial Sequence: Synthetic oligonucleotide
acaggugggauucaaguuc

SEQ ID NO: 2630313 - RNA, 19 nt, Artificial Sequence
  Description of Artificial Sequence: Synthetic oligonucleotide
aggaguacugaacaugcac

SEQ ID NO: 2630314 - RNA, 19 nt, Artificial Sequence
  Description of Artificial Sequence: Synthetic oligonucleotide
agcaggugagacuagacag

SEQ ID NO: 2630315 - RNA, 19 nt, Artificial Sequence
  Description of Artificial Sequence: Synthetic oligonucleotide
auacaaacucacuguaugg

SEQ ID NO: 2630316 - RNA, 19 nt, Artificial Sequence
  Description of Artificial Sequence: Synthetic oligonucleotide
guucucuauagauaagggg

SEQ ID NO: 2630317 - RNA, 19 nt, Artificial Sequence
  Description of Artificial Sequence: Synthetic oligonucleotide
cuaggaguacugaacaugc

SEQ ID NO: 2630318 - RNA, 19 nt, Artificial Sequence
  Description of Artificial Sequence: Synthetic oligonucleotide
acugcaacaaagcuggacu

SEQ ID NO: 2630319 - RNA, 19 nt, Artificial Sequence
  Description of Artificial Sequence: Synthetic oligonucleotide
uacaaacucacuguauggg

SEQ ID NO: 2630320 - RNA, 19 nt, Artificial Sequence
  Description of Artificial Sequence: Synthetic oligonucleotide
aaacccuacuuccuucuuc

SEQ ID NO: 2630321 - RNA, 19 nt, Artificial Sequence
  Description of Artificial Sequence: Synthetic oligonucleotide
aacaauuugggaaggcuag

SEQ ID NO: 2630322 - RNA, 19 nt, Artificial Sequence
  Description of Artificial Sequence: Synthetic oligonucleotide
uuugagaagaaacccuacu

SEQ ID NO: 2630323 - RNA, 19 nt, Artificial Sequence
  Description of Artificial Sequence: Synthetic oligonucleotide
acuagacugaacaauuugg

SEQ ID NO: 2630324 - RNA, 19 nt, Artificial Sequence
  Description of Artificial Sequence: Synthetic oligonucleotide
ucauggucuacacucaagu

SEQ ID NO: 2630325 - RNA, 19 nt, Artificial Sequence
  Description of Artificial Sequence: Synthetic oligonucleotide
agacugaacaauuugggaa

SEQ ID NO: 2630326 - RNA, 19 nt, Artificial Sequence
  Description of Artificial Sequence: Synthetic oligonucleotide
guuaauggaaucuggucug

SEQ ID NO: 2630327 - RNA, 19 nt, Artificial Sequence
  Description of Artificial Sequence: Synthetic oligonucleotide
auggucuacacucaagucu

SEQ ID NO: 2630328 - RNA, 19 nt, Artificial Sequence
  Description of Artificial Sequence: Synthetic oligonucleotide
ucacuguaugggcagacag

SEQ ID NO: 2630329 - RNA, 19 nt, Artificial Sequence
  Description of Artificial Sequence: Synthetic oligonucleotide
aacccuugguccucacucc

SEQ ID NO: 2630330 - RNA, 19 nt, Artificial Sequence
  Description of Artificial Sequence: Synthetic oligonucleotide
agguuaauggaaucugguc

SEQ ID NO: 2630331 - RNA, 19 nt, Artificial Sequence
  Description of Artificial Sequence: Synthetic oligonucleotide
cuucuaacuagacugaaca

SEQ ID NO: 2630332 - RNA, 19 nt, Artificial Sequence
  Description of Artificial Sequence: Synthetic oligonucleotide
auucaaguucucuauagau

SEQ ID NO: 2630333 - RNA, 19 nt, Artificial Sequence
  Description of Artificial Sequence: Synthetic oligonucleotide
ugaacaugcacaccuucca

SEQ ID NO: 2630334 - RNA, 19 nt, Artificial Sequence
  Description of Artificial Sequence: Synthetic oligonucleotide
augcacaccuuccaccugc

SEQ ID NO: 2630335 - RNA, 19 nt, Artificial Sequence
  Description of Artificial Sequence: Synthetic oligonucleotide
aacugcaacaaagcuggac

SEQ ID NO: 2630336 - RNA, 19 nt, Artificial Sequence
  Description of Artificial Sequence: Synthetic oligonucleotide
uacuucuaagaacacacau

SEQ ID NO: 2630337 - RNA, 19 nt, Artificial Sequence
  Description of Artificial Sequence: Synthetic oligonucleotide
ugcagcugcaagcagguga

SEQ ID NO: 2630338 - RNA, 19 nt, Artificial Sequence
  Description of Artificial Sequence: Synthetic oligonucleotide
uagcucauggucuacacuc

SEQ ID NO: 2630339 - RNA, 19 nt, Artificial Sequence
  Description of Artificial Sequence: Synthetic oligonucleotide
cagaacugcaacaaagcug

SEQ ID NO: 2630340 - RNA, 19 nt, Artificial Sequence
  Description of Artificial Sequence: Synthetic oligonucleotide
uucaaguucucuauagaua

SEQ ID NO: 2630341 - RNA, 19 nt, Artificial Sequence
  Description of Artificial Sequence: Synthetic oligonucleotide
ucuaacuagacugaacaau

SEQ ID NO: 2630342 - RNA, 19 nt, Artificial Sequence
  Description of Artificial Sequence: Synthetic oligonucleotide
uucgccacaccacacacac

SEQ ID NO: 2630343 - RNA, 19 nt, Artificial Sequence
  Description of Artificial Sequence: Synthetic oligonucleotide
aagagguuaauggaaucug

SEQ ID NO: 2630344 - RNA, 19 nt, Artificial Sequence
  Description of Artificial Sequence: Synthetic oligonucleotide
uagacugaacaauuuggga

SEQ ID NO: 2630345 - RNA, 19 nt, Artificial Sequence
  Description of Artificial Sequence: Synthetic oligonucleotide
acuguaugggcagacagag

SEQ ID NO: 2630346 - RNA, 19 nt, Artificial Sequence
  Description of Artificial Sequence: Synthetic oligonucleotide
cagucaauggcuuuacuuc

SEQ ID NO: 2630347 - RNA, 19 nt, Artificial Sequence
  Description of Artificial Sequence: Synthetic oligonucleotide
uggucuacacucaagucuc

SEQ ID NO: 2630348 - RNA, 19 nt, Artificial Sequence
  Description of Artificial Sequence: Synthetic oligonucleotide
ucuacacucaagucuccag

SEQ ID NO: 2630349 - RNA, 19 nt, Artificial Sequence
  Description of Artificial Sequence: Synthetic oligonucleotide
acugaacaugcacaccuuc

SEQ ID NO: 2630350 - RNA, 19 nt, Artificial Sequence
  Description of Artificial Sequence: Synthetic oligonucleotide
agcagugccacauccagga

SEQ ID NO: 2630351 - RNA, 19 nt, Artificial Sequence
  Description of Artificial Sequence: Synthetic oligonucleotide
aagccacuuggcuucuaac

SEQ ID NO: 2630352 - RNA, 19 nt, Artificial Sequence
  Description of Artificial Sequence: Synthetic oligonucleotide
agaggcaccucacuacagg

SEQ ID NO: 2630353 - RNA, 19 nt, Artificial Sequence
  Description of Artificial Sequence: Synthetic oligonucleotide
cuuccaccugcccagaacc

SEQ ID NO: 2630354 - RNA, 19 nt, Artificial Sequence
  Description of Artificial Sequence: Synthetic oligonucleotide
acaggauaggugguggccc

SEQ ID NO: 2630355 - RNA, 19 nt, Artificial Sequence
  Description of Artificial Sequence: Synthetic oligonucleotide
aauuugagaagaaacccua

SEQ ID NO: 2630356 - RNA, 19 nt, Artificial Sequence
  Description of Artificial Sequence: Synthetic oligonucleotide
cugaacaugcacaccuucc

SEQ ID NO: 2630357 - RNA, 19 nt, Artificial Sequence
  Description of Artificial Sequence: Synthetic oligonucleotide
agucaauggcuuuacuucu

SEQ ID NO: 2630358 - RNA, 19 nt, Artificial Sequence
  Description of Artificial Sequence: Synthetic oligonucleotide
aguucucuauagauaaggg

SEQ ID NO: 2630359 - RNA, 19 nt, Artificial Sequence
  Description of Artificial Sequence: Synthetic oligonucleotide
gaguacugaacaugcacac

SEQ ID NO: 2630360 - RNA, 19 nt, Artificial Sequence
  Description of Artificial Sequence: Synthetic oligonucleotide
uuacuucuaagaacacaca

SEQ ID NO: 2630361 - RNA, 19 nt, Artificial Sequence
  Description of Artificial Sequence: Synthetic oligonucleotide
auaggugguggccccaagg

SEQ ID NO: 2630362 - RNA, 19 nt, Artificial Sequence
  Description of Artificial Sequence: Synthetic oligonucleotide
ggauucaaguucucuauag

SEQ ID NO: 2630363 - RNA, 19 nt, Artificial Sequence
  Description of Artificial Sequence: Synthetic oligonucleotide
aagcaaguccugucauagg

SEQ ID NO: 2630364 - RNA, 19 nt, Artificial Sequence
  Description of Artificial Sequence: Synthetic oligonucleotide
ugucauagggaagagguua

SEQ ID NO: 2630365 - RNA, 19 nt, Artificial Sequence
  Description of Artificial Sequence: Synthetic oligonucleotide
guuggcaucccucauaucu

SEQ ID NO: 2630366 - RNA, 19 nt, Artificial Sequence
  Description of Artificial Sequence: Synthetic oligonucleotide
ugagacuagacaggauagg

SEQ ID NO: 2630367 - RNA, 19 nt, Artificial Sequence
  Description of Artificial Sequence: Synthetic oligonucleotide
aauuugggaaggcuagguu

SEQ ID NO: 2630368 - RNA, 19 nt, Artificial Sequence
  Description of Artificial Sequence: Synthetic oligonucleotide
ugcccagaacccuuggucc

SEQ ID NO: 2630369 - RNA, 19 nt, Artificial Sequence
  Description of Artificial Sequence: Synthetic oligonucleotide
acacucaagucuccagaac

SEQ ID NO: 2630370 - RNA, 19 nt, Artificial Sequence
  Description of Artificial Sequence: Synthetic oligonucleotide
uagacaggauagguggugg

SEQ ID NO: 2630371 - RNA, 19 nt, Artificial Sequence
  Description of Artificial Sequence: Synthetic oligonucleotide
cauaucuggggcagagagg

SEQ ID NO: 2630372 - RNA, 19 nt, Artificial Sequence
  Description of Artificial Sequence: Synthetic oligonucleotide
agagguuaauggaaucugg

SEQ ID NO: 2630373 - RNA, 19 nt, Artificial Sequence
  Description of Artificial Sequence: Synthetic oligonucleotide
ucuggucuggccacagcag

SEQ ID NO: 2630374 - RNA, 19 nt, Artificial Sequence
  Description of Artificial Sequence: Synthetic oligonucleotide
auuugagaagaaacccuac

SEQ ID NO: 2630375 - RNA, 19 nt, Artificial Sequence
  Description of Artificial Sequence: Synthetic oligonucleotide
gcaauuugagaagaaaccc

SEQ ID NO: 2630376 - RNA, 19 nt, Artificial Sequence
  Description of Artificial Sequence: Synthetic oligonucleotide
uggcaucccucauaucugg

SEQ ID NO: 2630377 - RNA, 19 nt, Artificial Sequence
  Description of Artificial Sequence: Synthetic oligonucleotide
ggcaccucacuacaggugg

SEQ ID NO: 2630378 - RNA, 19 nt, Artificial Sequence
  Description of Artificial Sequence: Synthetic oligonucleotide
agcaguuuggcuccucuga

SEQ ID NO: 2630379 - RNA, 19 nt, Artificial Sequence
  Description of Artificial Sequence: Synthetic oligonucleotide
cucacuacaggugggauuc

SEQ ID NO: 2630380 - RNA, 19 nt, Artificial Sequence
  Description of Artificial Sequence: Synthetic oligonucleotide
agccacuuggcuucuaacu

SEQ ID NO: 2630381 - RNA, 19 nt, Artificial Sequence
  Description of Artificial Sequence: Synthetic oligonucleotide
uacacucaagucuccagaa

SEQ ID NO: 2630382 - RNA, 19 nt, Artificial Sequence
  Description of Artificial Sequence: Synthetic oligonucleotide
aguccugucauagggaaga

SEQ ID NO: 2630383 - RNA, 19 nt, Artificial Sequence
  Description of Artificial Sequence: Synthetic oligonucleotide
uaugggcagacagaggacu

SEQ ID NO: 2630384 - RNA, 19 nt, Artificial Sequence
  Description of Artificial Sequence: Synthetic oligonucleotide
uguagcucauggucuacac

SEQ ID NO: 2630385 - RNA, 19 nt, Artificial Sequence
  Description of Artificial Sequence: Synthetic oligonucleotide
gaaggcuagguuggcaucc

SEQ ID NO: 2630386 - RNA, 19 nt, Artificial Sequence
  Description of Artificial Sequence: Synthetic oligonucleotide
acugaacaauuugggaagg

SEQ ID NO: 2630387 - RNA, 19 nt, Artificial Sequence
  Description of Artificial Sequence: Synthetic oligonucleotide
aagcguucgccacaccaca

SEQ ID NO: 2630388 - RNA, 19 nt, Artificial Sequence
  Description of Artificial Sequence: Synthetic oligonucleotide
cuggugcuuguugagaugc

SEQ ID NO: 2630389 - RNA, 19 nt, Artificial Sequence
  Description of Artificial Sequence: Synthetic oligonucleotide
agggcaggcaggcugccac

SEQ ID NO: 2630390 - RNA, 19 nt, Artificial Sequence
  Description of Artificial Sequence: Synthetic oligonucleotide
aaggcuagguuggcauccc

SEQ ID NO: 2630391 - RNA, 19 nt, Artificial Sequence
  Description of Artificial Sequence: Synthetic oligonucleotide
gacagaggacuguagcuca

SEQ ID NO: 2630392 - RNA, 19 nt, Artificial Sequence
  Description of Artificial Sequence: Synthetic oligonucleotide
agagaggcaccucacuaca

SEQ ID NO: 2630393 - RNA, 19 nt, Artificial Sequence
  Description of Artificial Sequence: Synthetic oligonucleotide
gugagacuagacaggauag

SEQ ID NO: 2630394 - RNA, 19 nt, Artificial Sequence
  Description of Artificial Sequence: Synthetic oligonucleotide
caggcugccaccugguaag

SEQ ID NO: 2630395 - RNA, 19 nt, Artificial Sequence
  Description of Artificial Sequence: Synthetic oligonucleotide
caaacucacuguaugggca

SEQ ID NO: 2630396 - RNA, 19 nt, Artificial Sequence
  Description of Artificial Sequence: Synthetic oligonucleotide
gguuaauggaaucuggucu

SEQ ID NO: 2630397 - RNA, 19 nt, Artificial Sequence
  Description of Artificial Sequence: Synthetic oligonucleotide
guacugaacaugcacaccu

SEQ ID NO: 2630398 - RNA, 19 nt, Artificial Sequence
  Description of Artificial Sequence: Synthetic oligonucleotide
uaacuagacugaacaauuu

SEQ ID NO: 2630399 - RNA, 19 nt, Artificial Sequence
  Description of Artificial Sequence: Synthetic oligonucleotide
ggcuuuacuucuaagaaca

SEQ ID NO: 2630400 - RNA, 19 nt, Artificial Sequence
  Description of Artificial Sequence: Synthetic oligonucleotide
agaaagcaaguccugucau

SEQ ID NO: 2630401 - RNA, 19 nt, Artificial Sequence
  Description of Artificial Sequence: Synthetic oligonucleotide
agcugcagcgcugugcugg

SEQ ID NO: 2630402 - RNA, 19 nt, Artificial Sequence
  Description of Artificial Sequence: Synthetic oligonucleotide
acaauuugggaaggcuagg

SEQ ID NO: 2630403 - RNA, 19 nt, Artificial Sequence
  Description of Artificial Sequence: Synthetic oligonucleotide
cagugccacauccaggaag

SEQ ID NO: 2630404 - RNA, 19 nt, Artificial Sequence
  Description of Artificial Sequence: Synthetic oligonucleotide
aaaagcaauuugagaagaa

SEQ ID NO: 2630405 - RNA, 19 nt, Artificial Sequence
  Description of Artificial Sequence: Synthetic oligonucleotide
uggcuucuaacuagacuga

SEQ ID NO: 2630406 - RNA, 19 nt, Artificial Sequence
  Description of Artificial Sequence: Synthetic oligonucleotide
uggaaucuggucuggccac

SEQ ID NO: 2630407 - RNA, 19 nt, Artificial Sequence
  Description of Artificial Sequence: Synthetic oligonucleotide
gcucucagaaagcaagucc

SEQ ID NO: 2630408 - RNA, 19 nt, Artificial Sequence
  Description of Artificial Sequence: Synthetic oligonucleotide
cauggucuacacucaaguc

SEQ ID NO: 2630409 - RNA, 19 nt, Artificial Sequence
  Description of Artificial Sequence: Synthetic oligonucleotide
cucauggucuacacucaag

SEQ ID NO: 2630410 - RNA, 19 nt, Artificial Sequence
  Description of Artificial Sequence: Synthetic oligonucleotide
cucacgggcaugcaccgcc

SEQ ID NO: 2630411 - RNA, 19 nt, Artificial Sequence
  Description of Artificial Sequence: Synthetic oligonucleotide
ugagugcagcugcaagcag

SEQ ID NO: 2630412 - RNA, 19 nt, Artificial Sequence
  Description of Artificial Sequence: Synthetic oligonucleotide
uugguccucacuccugagu

SEQ ID NO: 2630413 - RNA, 19 nt, Artificial Sequence
  Description of Artificial Sequence: Synthetic oligonucleotide
gacaggauaggugguggcc

SEQ ID NO: 2630414 - RNA, 19 nt, Artificial Sequence
  Description of Artificial Sequence: Synthetic oligonucleotide
gcaugcaccgcccuggugc

SEQ ID NO: 2630415 - RNA, 19 nt, Artificial Sequence
  Description of Artificial Sequence: Synthetic oligonucleotide
uccugucauagggaagagg

SEQ ID NO: 2630416 - RNA, 19 nt, Artificial Sequence
  Description of Artificial Sequence: Synthetic oligonucleotide
gugcuaggaguacugaaca

SEQ ID NO: 2630417 - RNA, 19 nt, Artificial Sequence
  Description of Artificial Sequence: Synthetic oligonucleotide
caacaaagcuggacucucc

SEQ ID NO: 2630418 - RNA, 19 nt, Artificial Sequence
  Description of Artificial Sequence: Synthetic oligonucleotide
ugcaacaaagcuggacucu

SEQ ID NO: 2630419 - RNA, 19 nt, Artificial Sequence
  Description of Artificial Sequence: Synthetic oligonucleotide
cucaagucuccagaacugc

SEQ ID NO: 2630420 - RNA, 19 nt, Artificial Sequence
  Description of Artificial Sequence: Synthetic oligonucleotide
caauuugagaagaaacccu

SEQ ID NO: 2630421 - RNA, 19 nt, Artificial Sequence
  Description of Artificial Sequence: Synthetic oligonucleotide
cagaaagcaaguccuguca

SEQ ID NO: 2630422 - RNA, 19 nt, Artificial Sequence
  Description of Artificial Sequence: Synthetic oligonucleotide
uaggaguacugaacaugca

SEQ ID NO: 2630423 - RNA, 19 nt, Artificial Sequence
  Description of Artificial Sequence: Synthetic oligonucleotide
gaacaauuugggaaggcua

SEQ ID NO: 2630424 - RNA, 19 nt, Artificial Sequence
  Description of Artificial Sequence: Synthetic oligonucleotide
cuuuacuucuaagaacaca

SEQ ID NO: 2630425 - RNA, 19 nt, Artificial Sequence
  Description of Artificial Sequence: Synthetic oligonucleotide
agguuggcaucccucauau

SEQ ID NO: 2630426 - RNA, 19 nt, Artificial Sequence
  Description of Artificial Sequence: Synthetic oligonucleotide
ggugagacuagacaggaua

SEQ ID NO: 2630427 - RNA, 19 nt, Artificial Sequence
  Description of Artificial Sequence: Synthetic oligonucleotide
agacuagacaggauaggug

SEQ ID NO: 2630428 - RNA, 19 nt, Artificial Sequence
  Description of Artificial Sequence: Synthetic oligonucleotide
agaagaaacccuacuuccu

SEQ ID NO: 2630429 - RNA, 19 nt, Artificial Sequence
  Description of Artificial Sequence: Synthetic oligonucleotide
uccucugauggccgggcug

SEQ ID NO: 2630430 - RNA, 19 nt, Artificial Sequence
  Description of Artificial Sequence: Synthetic oligonucleotide
uucccaagccacuuggcuu

SEQ ID NO: 2630431 - RNA, 19 nt, Artificial Sequence
  Description of Artificial Sequence: Synthetic oligonucleotide
ucuccagaacugcaacaaa

SEQ ID NO: 2630432 - RNA, 19 nt, Artificial Sequence
  Description of Artificial Sequence: Synthetic oligonucleotide
cuacacucaagucuccaga

SEQ ID NO: 2630433 - RNA, 19 nt, Artificial Sequence
  Description of Artificial Sequence: Synthetic oligonucleotide
cuaacuagacugaacaauu

SEQ ID NO: 2630434 - RNA, 19 nt, Artificial Sequence
  Description of Artificial Sequence: Synthetic oligonucleotide
acuucuaagaacacacaua

SEQ ID NO: 2630435 - RNA, 19 nt, Artificial Sequence
  Description of Artificial Sequence: Synthetic oligonucleotide
gaagcguucgccacaccac

SEQ ID NO: 2630436 - RNA, 19 nt, Artificial Sequence
  Description of Artificial Sequence: Synthetic oligonucleotide
acagcaguuuggcuccucu

SEQ ID NO: 2630437 - RNA, 19 nt, Artificial Sequence
  Description of Artificial Sequence: Synthetic oligonucleotide
cuagacaggauagguggug

SEQ ID NO: 2630438 - RNA, 19 nt, Artificial Sequence
  Description of Artificial Sequence: Synthetic oligonucleotide
acucaagucuccagaacug

SEQ ID NO: 2630439 - RNA, 19 nt, Artificial Sequence
  Description of Artificial Sequence: Synthetic oligonucleotide
acucacuguaugggcagac

SEQ ID NO: 2630440 - RNA, 19 nt, Artificial Sequence
  Description of Artificial Sequence: Synthetic oligonucleotide
uggugcuaggaguacugaa

SEQ ID NO: 2630441 - RNA, 19 nt, Artificial Sequence
  Description of Artificial Sequence: Synthetic oligonucleotide
cugggcacugugcuccugg

SEQ ID NO: 2630442 - RNA, 19 nt, Artificial Sequence
  Description of Artificial Sequence: Synthetic oligonucleotide
uuccaccugcccagaaccc

SEQ ID NO: 2630443 - RNA, 19 nt, Artificial Sequence
  Description of Artificial Sequence: Synthetic oligonucleotide
uagguuggcaucccucaua

SEQ ID NO: 2630444 - RNA, 19 nt, Artificial Sequence
  Description of Artificial Sequence: Synthetic oligonucleotide
ucccucauaucuggggcag

SEQ ID NO: 2630445 - RNA, 19 nt, Artificial Sequence
  Description of Artificial Sequence: Synthetic oligonucleotide
gaaagcaaguccugucaua

SEQ ID NO: 2630446 - RNA, 19 nt, Artificial Sequence
  Description of Artificial Sequence: Synthetic oligonucleotide
ccugagugcagcugcaagc

SEQ ID NO: 2630447 - RNA, 19 nt, Artificial Sequence
  Description of Artificial Sequence: Synthetic oligonucleotide
aaguccugucauagggaag

SEQ ID NO: 2630448 - RNA, 19 nt, Artificial Sequence
  Description of Artificial Sequence: Synthetic oligonucleotide
caaguccugucauagggaa

SEQ ID NO: 2630449 - RNA, 19 nt, Artificial Sequence
  Description of Artificial Sequence: Synthetic oligonucleotide
aucccucauaucuggggca

SEQ ID NO: 2630450 - RNA, 19 nt, Artificial Sequence
  Description of Artificial Sequence: Synthetic oligonucleotide
cugaacaauuugggaaggc

SEQ ID NO: 2630451 - RNA, 19 nt, Artificial Sequence
  Description of Artificial Sequence: Synthetic oligonucleotide
gcuaggaguacugaacaug

SEQ ID NO: 2630452 - RNA, 19 nt, Artificial Sequence
  Description of Artificial Sequence: Synthetic oligonucleotide
ugcaagcaggugagacuag

SEQ ID NO: 2630453 - RNA, 19 nt, Artificial Sequence
  Description of Artificial Sequence: Synthetic oligonucleotide
gagacuagacaggauaggu

SEQ ID NO: 2630454 - RNA, 19 nt, Artificial Sequence
  Description of Artificial Sequence: Synthetic oligonucleotide
gauaggugguggccccaag

SEQ ID NO: 2630455 - RNA, 19 nt, Artificial Sequence
  Description of Artificial Sequence: Synthetic oligonucleotide
acuacaggugggauucaag

SEQ ID NO: 2630456 - RNA, 19 nt, Artificial Sequence
  Description of Artificial Sequence: Synthetic oligonucleotide
agggaagagguuaauggaa

SEQ ID NO: 2630457 - RNA, 19 nt, Artificial Sequence
  Description of Artificial Sequence: Synthetic oligonucleotide
ugcuaggaguacugaacau

SEQ ID NO: 2630458 - RNA, 19 nt, Artificial Sequence
  Description of Artificial Sequence: Synthetic oligonucleotide
ggugcuaggaguacugaac

SEQ ID NO: 2630459 - RNA, 19 nt, Artificial Sequence
  Description of Artificial Sequence: Synthetic oligonucleotide
cuacaggugggauucaagu

SEQ ID NO: 2630460 - RNA, 19 nt, Artificial Sequence
  Description of Artificial Sequence: Synthetic oligonucleotide
acuguagcucauggucuac

SEQ ID NO: 2630461 - RNA, 19 nt, Artificial Sequence
  Description of Artificial Sequence: Synthetic oligonucleotide
gagcagugccacauccagg

SEQ ID NO: 2630462 - RNA, 19 nt, Artificial Sequence
  Description of Artificial Sequence: Synthetic oligonucleotide
ggaagcguucgccacacca

SEQ ID NO: 2630463 - RNA, 19 nt, Artificial Sequence
  Description of Artificial Sequence: Synthetic oligonucleotide
ggaguacugaacaugcaca

SEQ ID NO: 2630464 - RNA, 19 nt, Artificial Sequence
  Description of Artificial Sequence: Synthetic oligonucleotide
cacucaagucuccagaacu

SEQ ID NO: 2630465 - RNA, 19 nt, Artificial Sequence
  Description of Artificial Sequence: Synthetic oligonucleotide
caguuuggcuccucugaug

SEQ ID NO: 2630466 - RNA, 19 nt, Artificial Sequence
  Description of Artificial Sequence: Synthetic oligonucleotide
cacauacaaacucacugua

SEQ ID NO: 2630467 - RNA, 19 nt, Artificial Sequence
  Description of Artificial Sequence: Synthetic oligonucleotide
ggaagagguuaauggaauc

SEQ ID NO: 2630468 - RNA, 19 nt, Artificial Sequence
  Description of Artificial Sequence: Synthetic oligonucleotide
acauacaaacucacuguau

SEQ ID NO: 2630469 - RNA, 19 nt, Artificial Sequence
  Description of Artificial Sequence: Synthetic oligonucleotide
gccacagcaguuuggcucc

SEQ ID NO: 2630470 - RNA, 19 nt, Artificial Sequence
  Description of Artificial Sequence: Synthetic oligonucleotide
agaacccuugguccucacu

SEQ ID NO: 2630471 - RNA, 19 nt, Artificial Sequence
  Description of Artificial Sequence: Synthetic oligonucleotide
cacuguaugggcagacaga

SEQ ID NO: 2630472 - RNA, 19 nt, Artificial Sequence
  Description of Artificial Sequence: Synthetic oligonucleotide
cuugguccucacuccugag

SEQ ID NO: 2630473 - RNA, 19 nt, Artificial Sequence
  Description of Artificial Sequence: Synthetic oligonucleotide
gacuguagcucauggucua

SEQ ID NO: 2630474 - RNA, 19 nt, Artificial Sequence
  Description of Artificial Sequence: Synthetic oligonucleotide
gagaggcaccucacuacag

SEQ ID NO: 2630475 - RNA, 19 nt, Artificial Sequence
  Description of Artificial Sequence: Synthetic oligonucleotide
aacucacuguaugggcaga

SEQ ID NO: 2630476 - RNA, 19 nt, Artificial Sequence
  Description of Artificial Sequence: Synthetic oligonucleotide
ccugucauagggaagaggu

SEQ ID NO: 2630477 - RNA, 19 nt, Artificial Sequence
  Description of Artificial Sequence: Synthetic oligonucleotide
ucacgggcaugcaccgccc

SEQ ID NO: 2630478 - RNA, 19 nt, Artificial Sequence
  Description of Artificial Sequence: Synthetic oligonucleotide
ugugcuccuggagcagugc

SEQ ID NO: 2630479 - RNA, 19 nt, Artificial Sequence
  Description of Artificial Sequence: Synthetic oligonucleotide
uccaccugcccagaacccu

SEQ ID NO: 2630480 - RNA, 19 nt, Artificial Sequence
  Description of Artificial Sequence: Synthetic oligonucleotide
gcuagguuggcaucccuca

SEQ ID NO: 2630481 - RNA, 19 nt, Artificial Sequence
  Description of Artificial Sequence: Synthetic oligonucleotide
cuuggcuucuaacuagacu

SEQ ID NO: 2630482 - RNA, 19 nt, Artificial Sequence
  Description of Artificial Sequence: Synthetic oligonucleotide
ugcaccgcccuggugcuug

SEQ ID NO: 2630483 - RNA, 19 nt, Artificial Sequence
  Description of Artificial Sequence: Synthetic oligonucleotide
guuuggcuccucugauggc

SEQ ID NO: 2630484 - RNA, 19 nt, Artificial Sequence
  Description of Artificial Sequence: Synthetic oligonucleotide
ugcaccagucaauggcuuu

SEQ ID NO: 2630485 - RNA, 19 nt, Artificial Sequence
  Description of Artificial Sequence: Synthetic oligonucleotide
accgcccuggugcuuguug

SEQ ID NO: 2630486 - RNA, 19 nt, Artificial Sequence
  Description of Artificial Sequence: Synthetic oligonucleotide
acuagacaggauagguggu

SEQ ID NO: 2630487 - RNA, 19 nt, Artificial Sequence
  Description of Artificial Sequence: Synthetic oligonucleotide
accagucaauggcuuuacu

SEQ ID NO: 2630488 - RNA, 19 nt, Artificial Sequence
  Description of Artificial Sequence: Synthetic oligonucleotide
uugcaccagucaauggcuu

SEQ ID NO: 2630489 - RNA, 19 nt, Artificial Sequence
  Description of Artificial Sequence: Synthetic oligonucleotide
aggaagcguucgccacacc

SEQ ID NO: 2630490 - RNA, 19 nt, Artificial Sequence
  Description of Artificial Sequence: Synthetic oligonucleotide
agcguucgccacaccacac

SEQ ID NO: 2630491 - RNA, 19 nt, Artificial Sequence
  Description of Artificial Sequence: Synthetic oligonucleotide
cagcaguuuggcuccucug

SEQ ID NO: 2630492 - RNA, 19 nt, Artificial Sequence
  Description of Artificial Sequence: Synthetic oligonucleotide
ucauagggaagagguuaau

SEQ ID NO: 2630493 - RNA, 19 nt, Artificial Sequence
  Description of Artificial Sequence: Synthetic oligonucleotide
uugggaaggcuagguuggc

SEQ ID NO: 2630494 - RNA, 19 nt, Artificial Sequence
  Description of Artificial Sequence: Synthetic oligonucleotide
cugugcuccuggagcagug

SEQ ID NO: 2630495 - RNA, 19 nt, Artificial Sequence
  Description of Artificial Sequence: Synthetic oligonucleotide
ucugauggccgggcuggug

SEQ ID NO: 2630496 - RNA, 19 nt, Artificial Sequence
  Description of Artificial Sequence: Synthetic oligonucleotide
cugcaagcaggugagacua

SEQ ID NO: 2630497 - RNA, 19 nt, Artificial Sequence
  Description of Artificial Sequence: Synthetic oligonucleotide
gccccaaggccuuagggca

SEQ ID NO: 2630498 - RNA, 19 nt, Artificial Sequence
  Description of Artificial Sequence: Synthetic oligonucleotide
caugcacaccuuccaccug

SEQ ID NO: 2630499 - RNA, 19 nt, Artificial Sequence
  Description of Artificial Sequence: Synthetic oligonucleotide
gucauagggaagagguuaa

SEQ ID NO: 2630500 - RNA, 19 nt, Artificial Sequence
  Description of Artificial Sequence: Synthetic oligonucleotide
guaugggcagacagaggac

SEQ ID NO: 2630501 - RNA, 19 nt, Artificial Sequence
  Description of Artificial Sequence: Synthetic oligonucleotide
gaggacuguagcucauggu

SEQ ID NO: 2630502 - RNA, 19 nt, Artificial Sequence
  Description of Artificial Sequence: Synthetic oligonucleotide
caggaagcguucgccacac

SEQ ID NO: 2630503 - RNA, 19 nt, Artificial Sequence
  Description of Artificial Sequence: Synthetic oligonucleotide
augggcagacagaggacug

SEQ ID NO: 2630504 - RNA, 19 nt, Artificial Sequence
  Description of Artificial Sequence: Synthetic oligonucleotide
ccacacacacuugaacugc

SEQ ID NO: 2630505 - RNA, 19 nt, Artificial Sequence
  Description of Artificial Sequence: Synthetic oligonucleotide
gcuucuaacuagacugaac

SEQ ID NO: 2630506 - RNA, 19 nt, Artificial Sequence
  Description of Artificial Sequence: Synthetic oligonucleotide
acgggcaugcaccgcccug

SEQ ID NO: 2630507 - RNA, 19 nt, Artificial Sequence
  Description of Artificial Sequence: Synthetic oligonucleotide
cuucccaagccacuuggcu

SEQ ID NO: 2630508 - RNA, 19 nt, Artificial Sequence
  Description of Artificial Sequence: Synthetic oligonucleotide
uggccacagcaguuuggcu

SEQ ID NO: 2630509 - RNA, 19 nt, Artificial Sequence
  Description of Artificial Sequence: Synthetic oligonucleotide
gucuacacucaagucucca

SEQ ID NO: 2630510 - RNA, 19 nt, Artificial Sequence
  Description of Artificial Sequence: Synthetic oligonucleotide
guggccccaaggccuuagg

SEQ ID NO: 2630511 - RNA, 19 nt, Artificial Sequence
  Description of Artificial Sequence: Synthetic oligonucleotide
caggugggauucaaguucu

SEQ ID NO: 2630512 - RNA, 19 nt, Artificial Sequence
  Description of Artificial Sequence: Synthetic oligonucleotide
cugcugcucacgggcaugc

SEQ ID NO: 2630513 - RNA, 19 nt, Artificial Sequence
  Description of Artificial Sequence: Synthetic oligonucleotide
gaacugcugcucacgggca

SEQ ID NO: 2630514 - RNA, 19 nt, Artificial Sequence
  Description of Artificial Sequence: Synthetic oligonucleotide
ggaaggcuagguuggcauc

SEQ ID NO: 2630515 - RNA, 19 nt, Artificial Sequence
  Description of Artificial Sequence: Synthetic oligonucleotide
gccacuuggcuucuaacua

SEQ ID NO: 2630516 - RNA, 19 nt, Artificial Sequence
  Description of Artificial Sequence: Synthetic oligonucleotide
aggcugccaccugguaagc

SEQ ID NO: 2630517 - RNA, 19 nt, Artificial Sequence
  Description of Artificial Sequence: Synthetic oligonucleotide
ccucugauggccgggcugg

SEQ ID NO: 2630518 - RNA, 19 nt, Artificial Sequence
  Description of Artificial Sequence: Synthetic oligonucleotide
gcaacaaagcuggacucuc

SEQ ID NO: 2630519 - RNA, 19 nt, Artificial Sequence
  Description of Artificial Sequence: Synthetic oligonucleotide
caccagucaauggcuuuac

SEQ ID NO: 2630520 - RNA, 19 nt, Artificial Sequence
  Description of Artificial Sequence: Synthetic oligonucleotide
aggcucucagaaagcaagu

SEQ ID NO: 2630521 - RNA, 19 nt, Artificial Sequence
  Description of Artificial Sequence: Synthetic oligonucleotide
agcgcugugcugggcacug

SEQ ID NO: 2630522 - RNA, 19 nt, Artificial Sequence
  Description of Artificial Sequence: Synthetic oligonucleotide
gcagagaggcaccucacua

SEQ ID NO: 2630523 - RNA, 19 nt, Artificial Sequence
  Description of Artificial Sequence: Synthetic oligonucleotide
gcuggugcuaggaguacug

SEQ ID NO: 2630524 - RNA, 19 nt, Artificial Sequence
  Description of Artificial Sequence: Synthetic oligonucleotide
auggccgggcuggugcuag

SEQ ID NO: 2630525 - RNA, 19 nt, Artificial Sequence
  Description of Artificial Sequence: Synthetic oligonucleotide
gcugcucacgggcaugcac

SEQ ID NO: 2630526 - RNA, 19 nt, Artificial Sequence
  Description of Artificial Sequence: Synthetic oligonucleotide
ccucauaucuggggcagag

SEQ ID NO: 2630527 - RNA, 19 nt, Artificial Sequence
  Description of Artificial Sequence: Synthetic oligonucleotide
caauuugggaaggcuaggu

SEQ ID NO: 2630528 - RNA, 19 nt, Artificial Sequence
  Description of Artificial Sequence: Synthetic oligonucleotide
ggugcuuguugagaugcuc

SEQ ID NO: 2630529 - RNA, 19 nt, Artificial Sequence
  Description of Artificial Sequence: Synthetic oligonucleotide
aggcuagguuggcaucccu

SEQ ID NO: 2630530 - RNA, 19 nt, Artificial Sequence
  Description of Artificial Sequence: Synthetic oligonucleotide
guccugucauagggaagag

SEQ ID NO: 2630531 - RNA, 19 nt, Artificial Sequence
  Description of Artificial Sequence: Synthetic oligonucleotide
ggcagacagaggacuguag

SEQ ID NO: 2630532 - RNA, 19 nt, Artificial Sequence
  Description of Artificial Sequence: Synthetic oligonucleotide
gcugcagcgcugugcuggg

SEQ ID NO: 2630533 - RNA, 19 nt, Artificial Sequence
  Description of Artificial Sequence: Synthetic oligonucleotide
ggcaucccucauaucuggg

SEQ ID NO: 2630534 - RNA, 19 nt, Artificial Sequence
  Description of Artificial Sequence: Synthetic oligonucleotide
ucgccacaccacacacacu

SEQ ID NO: 2630535 - RNA, 19 nt, Artificial Sequence
  Description of Artificial Sequence: Synthetic oligonucleotide
cuguagcucauggucuaca

SEQ ID NO: 2630536 - RNA, 19 nt, Artificial Sequence
  Description of Artificial Sequence: Synthetic oligonucleotide
ucacuacaggugggauuca

SEQ ID NO: 2630537 - RNA, 19 nt, Artificial Sequence
  Description of Artificial Sequence: Synthetic oligonucleotide
cucacuguaugggcagaca

SEQ ID NO: 2630538 - RNA, 19 nt, Artificial Sequence
  Description of Artificial Sequence: Synthetic oligonucleotide
gggauucaaguucucuaua

SEQ ID NO: 2630539 - RNA, 19 nt, Artificial Sequence
  Description of Artificial Sequence: Synthetic oligonucleotide
gugccacauccaggaagcg

SEQ ID NO: 2630540 - RNA, 19 nt, Artificial Sequence
  Description of Artificial Sequence: Synthetic oligonucleotide
gucaauggcuuuacuucua

SEQ ID NO: 2630541 - RNA, 19 nt, Artificial Sequence
  Description of Artificial Sequence: Synthetic oligonucleotide
accucacuacaggugggau

SEQ ID NO: 2630542 - RNA, 19 nt, Artificial Sequence
  Description of Artificial Sequence: Synthetic oligonucleotide
ggcucucagaaagcaaguc

SEQ ID NO: 2630543 - RNA, 19 nt, Artificial Sequence
  Description of Artificial Sequence: Synthetic oligonucleotide
ccuuccaccugcccagaac

SEQ ID NO: 2630544 - RNA, 19 nt, Artificial Sequence
  Description of Artificial Sequence: Synthetic oligonucleotide
gcaaguccugucauaggga

SEQ ID NO: 2630545 - RNA, 19 nt, Artificial Sequence
  Description of Artificial Sequence: Synthetic oligonucleotide
guucgccacaccacacaca

SEQ ID NO: 2630546 - RNA, 19 nt, Artificial Sequence
  Description of Artificial Sequence: Synthetic oligonucleotide
aggugggauucaaguucuc

SEQ ID NO: 2630547 - RNA, 19 nt, Artificial Sequence
  Description of Artificial Sequence: Synthetic oligonucleotide
gcugcaagcaggugagacu

SEQ ID NO: 2630548 - RNA, 19 nt, Artificial Sequence
  Description of Artificial Sequence: Synthetic oligonucleotide
ccucacuccugagugcagc

SEQ ID NO: 2630549 - RNA, 19 nt, Artificial Sequence
  Description of Artificial Sequence: Synthetic oligonucleotide
gaaacccuacuuccuucuu

SEQ ID NO: 2630550 - RNA, 19 nt, Artificial Sequence
  Description of Artificial Sequence: Synthetic oligonucleotide
cuggucuggccacagcagu

SEQ ID NO: 2630551 - RNA, 19 nt, Artificial Sequence
  Description of Artificial Sequence: Synthetic oligonucleotide
ggacuguagcucauggucu

SEQ ID NO: 2630552 - RNA, 19 nt, Artificial Sequence
  Description of Artificial Sequence: Synthetic oligonucleotide
ccagaacugcaacaaagcu

SEQ ID NO: 2630553 - RNA, 19 nt, Artificial Sequence
  Description of Artificial Sequence: Synthetic oligonucleotide
aggauaggugguggcccca

SEQ ID NO: 2630554 - RNA, 19 nt, Artificial Sequence
  Description of Artificial Sequence: Synthetic oligonucleotide
gcaccucacuacagguggg

SEQ ID NO: 2630555 - RNA, 19 nt, Artificial Sequence
  Description of Artificial Sequence: Synthetic oligonucleotide
acagaggacuguagcucau

SEQ ID NO: 2630556 - RNA, 19 nt, Artificial Sequence
  Description of Artificial Sequence: Synthetic oligonucleotide
ggucuacacucaagucucc

SEQ ID NO: 2630557 - RNA, 19 nt, Artificial Sequence
  Description of Artificial Sequence: Synthetic oligonucleotide
cuggugcuaggaguacuga

SEQ ID NO: 2630558 - RNA, 19 nt, Artificial Sequence
  Description of Artificial Sequence: Synthetic oligonucleotide
cguucgccacaccacacac

SEQ ID NO: 2630559 - RNA, 19 nt, Artificial Sequence
  Description of Artificial Sequence: Synthetic oligonucleotide
ggcuagguuggcaucccuc

SEQ ID NO: 2630560 - RNA, 19 nt, Artificial Sequence
  Description of Artificial Sequence: Synthetic oligonucleotide
caccucacuacagguggga

SEQ ID NO: 2630561 - RNA, 19 nt, Artificial Sequence
  Description of Artificial Sequence: Synthetic oligonucleotide
gcucauggucuacacucaa

SEQ ID NO: 2630562 - RNA, 19 nt, Artificial Sequence
  Description of Artificial Sequence: Synthetic oligonucleotide
gggaagagguuaauggaau

SEQ ID NO: 2630563 - RNA, 19 nt, Artificial Sequence
  Description of Artificial Sequence: Synthetic oligonucleotide
ggugggauucaaguucucu

SEQ ID NO: 2630564 - RNA, 19 nt, Artificial Sequence
  Description of Artificial Sequence: Synthetic oligonucleotide
ccagucaauggcuuuacuu

SEQ ID NO: 2630565 - RNA, 19 nt, Artificial Sequence
  Description of Artificial Sequence: Synthetic oligonucleotide
gaacugcaacaaagcugga

SEQ ID NO: 2630566 - RNA, 19 nt, Artificial Sequence
  Description of Artificial Sequence: Synthetic oligonucleotide
ccuugguccucacuccuga

SEQ ID NO: 2630567 - RNA, 19 nt, Artificial Sequence
  Description of Artificial Sequence: Synthetic oligonucleotide
ugcugcucacgggcaugca

SEQ ID NO: 2630568 - RNA, 19 nt, Artificial Sequence
  Description of Artificial Sequence: Synthetic oligonucleotide
gcguucgccacaccacaca

SEQ ID NO: 2630569 - RNA, 19 nt, Artificial Sequence
  Description of Artificial Sequence: Synthetic oligonucleotide
cacuacaggugggauucaa

SEQ ID NO: 2630570 - RNA, 19 nt, Artificial Sequence
  Description of Artificial Sequence: Synthetic oligonucleotide
gccgggcuggugcuaggag

SEQ ID NO: 2630571 - RNA, 19 nt, Artificial Sequence
  Description of Artificial Sequence: Synthetic oligonucleotide
aggugagacuagacaggau

SEQ ID NO: 2630572 - RNA, 19 nt, Artificial Sequence
  Description of Artificial Sequence: Synthetic oligonucleotide
ggcuucuaacuagacugaa

SEQ ID NO: 2630573 - RNA, 19 nt, Artificial Sequence
  Description of Artificial Sequence: Synthetic oligonucleotide
caugcaccgcccuggugcu

SEQ ID NO: 2630574 - RNA, 19 nt, Artificial Sequence
  Description of Artificial Sequence: Synthetic oligonucleotide
gcagcgcugugcugggcac

SEQ ID NO: 2630575 - RNA, 19 nt, Artificial Sequence
  Description of Artificial Sequence: Synthetic oligonucleotide
gguggccccaaggccuuag

SEQ ID NO: 2630576 - RNA, 19 nt, Artificial Sequence
  Description of Artificial Sequence: Synthetic oligonucleotide
ggcaugcaccgcccuggug

SEQ ID NO: 2630577 - RNA, 19 nt, Artificial Sequence
  Description of Artificial Sequence: Synthetic oligonucleotide
cccuugguccucacuccug

SEQ ID NO: 2630578 - RNA, 19 nt, Artificial Sequence
  Description of Artificial Sequence: Synthetic oligonucleotide
cuagguuggcaucccucau

SEQ ID NO: 2630579 - RNA, 19 nt, Artificial Sequence
  Description of Artificial Sequence: Synthetic oligonucleotide
ggcugccaccugguaagcc

SEQ ID NO: 2630580 - RNA, 19 nt, Artificial Sequence
  Description of Artificial Sequence: Synthetic oligonucleotide
gguuggcaucccucauauc

SEQ ID NO: 2630581 - RNA, 19 nt, Artificial Sequence
  Description of Artificial Sequence: Synthetic oligonucleotide
caaggccuuagggcaggca

SEQ ID NO: 2630582 - RNA, 19 nt, Artificial Sequence
  Description of Artificial Sequence: Synthetic oligonucleotide
aggcaggcugccaccuggu

SEQ ID NO: 2630583 - RNA, 19 nt, Artificial Sequence
  Description of Artificial Sequence: Synthetic oligonucleotide
gcaccagucaauggcuuua

SEQ ID NO: 2630584 - RNA, 19 nt, Artificial Sequence
  Description of Artificial Sequence: Synthetic oligonucleotide
cgggcaugcaccgcccugg

SEQ ID NO: 2630585 - RNA, 19 nt, Artificial Sequence
  Description of Artificial Sequence: Synthetic oligonucleotide
gcaggcucucagaaagcaa

SEQ ID NO: 2630586 - RNA, 19 nt, Artificial Sequence
  Description of Artificial Sequence: Synthetic oligonucleotide
gcccagaacccuugguccu

SEQ ID NO: 2630587 - RNA, 19 nt, Artificial Sequence
  Description of Artificial Sequence: Synthetic oligonucleotide
gauggccgggcuggugcua

SEQ ID NO: 2630588 - RNA, 19 nt, Artificial Sequence
  Description of Artificial Sequence: Synthetic oligonucleotide
cgcugugcugggcacugug

SEQ ID NO: 2630589 - RNA, 19 nt, Artificial Sequence
  Description of Artificial Sequence: Synthetic oligonucleotide
ccgcccuggugcuuguuga

SEQ ID NO: 2630590 - RNA, 19 nt, Artificial Sequence
  Description of Artificial Sequence: Synthetic oligonucleotide
gggcagacagaggacugua

SEQ ID NO: 2630591 - RNA, 19 nt, Artificial Sequence
  Description of Artificial Sequence: Synthetic oligonucleotide
gcccuggugcuuguugaga

SEQ ID NO: 2630592 - RNA, 19 nt, Artificial Sequence
  Description of Artificial Sequence: Synthetic oligonucleotide
cgccacaccacacacacuu

SEQ ID NO: 2630593 - RNA, 19 nt, Artificial Sequence
  Description of Artificial Sequence: Synthetic oligonucleotide
gcucacgggcaugcaccgc

SEQ ID NO: 2630594 - RNA, 19 nt, Artificial Sequence
  Description of Artificial Sequence: Synthetic oligonucleotide
gggcuggugcuaggaguac

SEQ ID NO: 2630595 - RNA, 19 nt, Artificial Sequence
  Description of Artificial Sequence: Synthetic oligonucleotide
cuccucugauggccgggcu

SEQ ID NO: 2630596 - RNA, 19 nt, Artificial Sequence
  Description of Artificial Sequence: Synthetic oligonucleotide
ggcuggugcuaggaguacu

SEQ ID NO: 2630597 - RNA, 19 nt, Artificial Sequence
  Description of Artificial Sequence: Synthetic oligonucleotide
ccaaggccuuagggcaggc

SEQ ID NO: 2630598 - RNA, 19 nt, Artificial Sequence
  Description of Artificial Sequence: Synthetic oligonucleotide
ccgggcuggugcuaggagu

SEQ ID NO: 2630599 - RNA, 19 nt, Artificial Sequence
  Description of Artificial Sequence: Synthetic oligonucleotide
cgggcuggugcuaggagua

SEQ ID NO: 2630600 - RNA, 19 nt, Artificial Sequence
  Description of Artificial Sequence: Synthetic oligonucleotide
ccucacuacaggugggauu

SEQ ID NO: 2630601 - RNA, 19 nt, Artificial Sequence
  Description of Artificial Sequence: Synthetic oligonucleotide
ggucuggccacagcaguuu

SEQ ID NO: 2630602 - RNA, 19 nt, Artificial Sequence
  Description of Artificial Sequence: Synthetic oligonucleotide
ccagaacccuugguccuca

SEQ ID NO: 2630603 - RNA, 19 nt, Artificial Sequence
  Description of Artificial Sequence: Synthetic oligonucleotide
ggcaggcugccaccuggua

SEQ ID NO: 2630604 - RNA, 19 nt, Artificial Sequence
  Description of Artificial Sequence: Synthetic oligonucleotide
ugguggccccaaggccuua

SEQ ID NO: 2630605 - RNA, 19 nt, Artificial Sequence
  Description of Artificial Sequence: Synthetic oligonucleotide
ggccgggcuggugcuagga

SEQ ID NO: 2630606 - RNA, 19 nt, Artificial Sequence
  Description of Artificial Sequence: Synthetic oligonucleotide
cacgggcaugcaccgcccu

SEQ ID NO: 2630607 - RNA, 19 nt, Artificial Sequence
  Description of Artificial Sequence: Synthetic oligonucleotide
augcaccgcccuggugcuu

SEQ ID NO: 2630608 - RNA, 19 nt, Artificial Sequence
  Description of Artificial Sequence: Synthetic oligonucleotide
gggcaugcaccgcccuggu

SEQ ID NO: 2630609 - RNA, 19 nt, Artificial Sequence
  Description of Artificial Sequence: Synthetic oligonucleotide
cagcgcugugcugggcacu

SEQ ID NO: 2630610 - RNA, 19 nt, Artificial Sequence
  Description of Artificial Sequence: Synthetic oligonucleotide
cucugauggccgggcuggu

SEQ ID NO: 2630611 - RNA, 19 nt, Artificial Sequence
  Description of Artificial Sequence: Synthetic oligonucleotide
cccucauaucuggggcaga

SEQ ID NO: 2630612 - RNA, 19 nt, Artificial Sequence
  Description of Artificial Sequence: Synthetic oligonucleotide
gccuuagggcaggcaggcu

SEQ ID NO: 2630613 - RNA, 19 nt, Artificial Sequence
  Description of Artificial Sequence: Synthetic oligonucleotide
gcaccgcccuggugcuugu

SEQ ID NO: 2630614 - RNA, 19 nt, Artificial Sequence
  Description of Artificial Sequence: Synthetic oligonucleotide
cccaagccacuuggcuucu

SEQ ID NO: 2630615 - RNA, 19 nt, Artificial Sequence
  Description of Artificial Sequence: Synthetic oligonucleotide
ccaagccacuuggcuucua

SEQ ID NO: 2630616 - RNA, 19 nt, Artificial Sequence
  Description of Artificial Sequence: Synthetic oligonucleotide
gcgcugugcugggcacugu

SEQ ID NO: 2630617 - RNA, 19 nt, Artificial Sequence
  Description of Artificial Sequence: Synthetic oligonucleotide
ccacagcaguuuggcuccu

SEQ ID NO: 2630618 - RNA, 19 nt, Artificial Sequence
  Description of Artificial Sequence: Synthetic oligonucleotide
caccgcccuggugcuuguu

SEQ ID NO: 2630619 - RNA, 19 nt, Artificial Sequence
  Description of Artificial Sequence: Synthetic oligonucleotide
uuuuaauuaaacaagagaa

SEQ ID NO: 2630620 - RNA, 19 nt, Artificial Sequence
  Description of Artificial Sequence: Synthetic oligonucleotide
aaaauuuggggauuuuggc

SEQ ID NO: 2630621 - RNA, 19 nt, Artificial Sequence
  Description of Artificial Sequence: Synthetic oligonucleotide
aaaauaaaucuucauaugu

SEQ ID NO: 2630622 - RNA, 19 nt, Artificial Sequence
  Description of Artificial Sequence: Synthetic oligonucleotide
aaucugauuauauaucuuc

SEQ ID NO: 2630623 - RNA, 19 nt, Artificial Sequence
  Description of Artificial Sequence: Synthetic oligonucleotide
uucaucaucaucaucauca

SEQ ID NO: 2630624 - RNA, 19 nt, Artificial Sequence
  Description of Artificial Sequence: Synthetic oligonucleotide
aauccugucacuucacccc

SEQ ID NO: 2630625 - RNA, 19 nt, Artificial Sequence
  Description of Artificial Sequence: Synthetic oligonucleotide
aaauuuggggauuuuggcg

SEQ ID NO: 2630626 - RNA, 19 nt, Artificial Sequence
  Description of Artificial Sequence: Synthetic oligonucleotide
ucaaaauaaaucuucauau

SEQ ID NO: 2630627 - RNA, 19 nt, Artificial Sequence
  Description of Artificial Sequence: Synthetic oligonucleotide
aauucuuuggaagagaacu

SEQ ID NO: 2630628 - RNA, 19 nt, Artificial Sequence
  Description of Artificial Sequence: Synthetic oligonucleotide
uaaaccagguuaaagaagc

SEQ ID NO: 2630629 - RNA, 19 nt, Artificial Sequence
  Description of Artificial Sequence: Synthetic oligonucleotide
aaauccugucacuucaccc

SEQ ID NO: 2630630 - RNA, 19 nt, Artificial Sequence
  Description of Artificial Sequence: Synthetic oligonucleotide
uucucaucaaaauaaaucu

SEQ ID NO: 2630631 - RNA, 19 nt, Artificial Sequence
  Description of Artificial Sequence: Synthetic oligonucleotide
uuauauaucuucaaauccu

SEQ ID NO: 2630632 - RNA, 19 nt, Artificial Sequence
  Description of Artificial Sequence: Synthetic oligonucleotide
aauaaaucuucauauguaa

SEQ ID NO: 2630633 - RNA, 19 nt, Artificial Sequence
  Description of Artificial Sequence: Synthetic oligonucleotide
uacauguugguaaaucugg

SEQ ID NO: 2630634 - RNA, 19 nt, Artificial Sequence
  Description of Artificial Sequence: Synthetic oligonucleotide
uuuguuuucaaaguaagga

SEQ ID NO: 2630635 - RNA, 19 nt, Artificial Sequence
  Description of Artificial Sequence: Synthetic oligonucleotide
gauuauauaucuucaaauc

SEQ ID NO: 2630636 - RNA, 19 nt, Artificial Sequence
  Description of Artificial Sequence: Synthetic oligonucleotide
aauuuggggauuuuggcga

SEQ ID NO: 2630637 - RNA, 19 nt, Artificial Sequence
  Description of Artificial Sequence: Synthetic oligonucleotide
ugaguguuuugucaaaucc

SEQ ID NO: 2630638 - RNA, 19 nt, Artificial Sequence
  Description of Artificial Sequence: Synthetic oligonucleotide
uucauauguaaucugauua

SEQ ID NO: 2630639 - RNA, 19 nt, Artificial Sequence
  Description of Artificial Sequence: Synthetic oligonucleotide
uaaaucuggagaaaauuga

SEQ ID NO: 2630640 - RNA, 19 nt, Artificial Sequence
  Description of Artificial Sequence: Synthetic oligonucleotide
uaauuaaacaagagaaagu

SEQ ID NO: 2630641 - RNA, 19 nt, Artificial Sequence
  Description of Artificial Sequence: Synthetic oligonucleotide
uauauaucuucaaauccug

SEQ ID NO: 2630642 - RNA, 19 nt, Artificial Sequence
  Description of Artificial Sequence: Synthetic oligonucleotide
ugauuauauaucuucaaau

SEQ ID NO: 2630643 - RNA, 19 nt, Artificial Sequence
  Description of Artificial Sequence: Synthetic oligonucleotide
uaaaucuucauauguaauc

SEQ ID NO: 2630644 - RNA, 19 nt, Artificial Sequence
  Description of Artificial Sequence: Synthetic oligonucleotide
aaaucuucauauguaaucu

SEQ ID NO: 2630645 - RNA, 19 nt, Artificial Sequence
  Description of Artificial Sequence: Synthetic oligonucleotide
uguaaucugauuauauauc

SEQ ID NO: 2630646 - RNA, 19 nt, Artificial Sequence
  Description of Artificial Sequence: Synthetic oligonucleotide
ucaucaaaauaaaucuuca

SEQ ID NO: 2630647 - RNA, 19 nt, Artificial Sequence
  Description of Artificial Sequence: Synthetic oligonucleotide
aucaucaucaucaucaucu

SEQ ID NO: 2630648 - RNA, 19 nt, Artificial Sequence
  Description of Artificial Sequence: Synthetic oligonucleotide
agaacuuuguuuucaaagu

SEQ ID NO: 2630649 - RNA, 19 nt, Artificial Sequence
  Description of Artificial Sequence: Synthetic oligonucleotide
cucaucaaaauaaaucuuc

SEQ ID NO: 2630650 - RNA, 19 nt, Artificial Sequence
  Description of Artificial Sequence: Synthetic oligonucleotide
aucaaaauaaaucuucaua

SEQ ID NO: 2630651 - RNA, 19 nt, Artificial Sequence
  Description of Artificial Sequence: Synthetic oligonucleotide
auguaaucugauuauauau

SEQ ID NO: 2630652 - RNA, 19 nt, Artificial Sequence
  Description of Artificial Sequence: Synthetic oligonucleotide
guuaaagaagcucucuggc

SEQ ID NO: 2630653 - RNA, 19 nt, Artificial Sequence
  Description of Artificial Sequence: Synthetic oligonucleotide
auaucuucaaauccuguca

SEQ ID NO: 2630654 - RNA, 19 nt, Artificial Sequence
  Description of Artificial Sequence: Synthetic oligonucleotide
cuuuguuuucaaaguaagg

SEQ ID NO: 2630655 - RNA, 19 nt, Artificial Sequence
  Description of Artificial Sequence: Synthetic oligonucleotide
caaaauaaaucuucauaug

SEQ ID NO: 2630656 - RNA, 19 nt, Artificial Sequence
  Description of Artificial Sequence: Synthetic oligonucleotide
uauaucuucaaauccuguc

SEQ ID NO: 2630657 - RNA, 19 nt, Artificial Sequence
  Description of Artificial Sequence: Synthetic oligonucleotide
aaucuucauauguaaucug

SEQ ID NO: 2630658 - RNA, 19 nt, Artificial Sequence
  Description of Artificial Sequence: Synthetic oligonucleotide
uguuuucaaaguaaggauu

SEQ ID NO: 2630659 - RNA, 19 nt, Artificial Sequence
  Description of Artificial Sequence: Synthetic oligonucleotide
guaaaucuggagaaaauug

SEQ ID NO: 2630660 - RNA, 19 nt, Artificial Sequence
  Description of Artificial Sequence: Synthetic oligonucleotide
uguugguaaaucuggagaa

SEQ ID NO: 2630661 - RNA, 19 nt, Artificial Sequence
  Description of Artificial Sequence: Synthetic oligonucleotide
aaggauucucaucaaaaua

SEQ ID NO: 2630662 - RNA, 19 nt, Artificial Sequence
  Description of Artificial Sequence: Synthetic oligonucleotide
uuguuuucaaaguaaggau

SEQ ID NO: 2630663 - RNA, 19 nt, Artificial Sequence
  Description of Artificial Sequence: Synthetic oligonucleotide
uaucuucaaauccugucac

SEQ ID NO: 2630664 - RNA, 19 nt, Artificial Sequence
  Description of Artificial Sequence: Synthetic oligonucleotide
uauguaaucugauuauaua

SEQ ID NO: 2630665 - RNA, 19 nt, Artificial Sequence
  Description of Artificial Sequence: Synthetic oligonucleotide
ucuuuggaagagaacuuug

SEQ ID NO: 2630666 - RNA, 19 nt, Artificial Sequence
  Description of Artificial Sequence: Synthetic oligonucleotide
ucaguaaaccagguuaaag

SEQ ID NO: 2630667 - RNA, 19 nt, Artificial Sequence
  Description of Artificial Sequence: Synthetic oligonucleotide
ucauauguaaucugauuau

SEQ ID NO: 2630668 - RNA, 19 nt, Artificial Sequence
  Description of Artificial Sequence: Synthetic oligonucleotide
ugucacuucaccccgugga

SEQ ID NO: 2630669 - RNA, 19 nt, Artificial Sequence
  Description of Artificial Sequence: Synthetic oligonucleotide
aaauaaaucuucauaugua

SEQ ID NO: 2630670 - RNA, 19 nt, Artificial Sequence
  Description of Artificial Sequence: Synthetic oligonucleotide
aaauucuuuggaagagaac

SEQ ID NO: 2630671 - RNA, 19 nt, Artificial Sequence
  Description of Artificial Sequence: Synthetic oligonucleotide
aaccagguuaaagaagcuc

SEQ ID NO: 2630672 - RNA, 19 nt, Artificial Sequence
  Description of Artificial Sequence: Synthetic oligonucleotide
ucugauuauauaucuucaa

SEQ ID NO: 2630673 - RNA, 19 nt, Artificial Sequence
  Description of Artificial Sequence: Synthetic oligonucleotide
uaaggauucucaucaaaau

SEQ ID NO: 2630674 - RNA, 19 nt, Artificial Sequence
  Description of Artificial Sequence: Synthetic oligonucleotide
caguaaaccagguuaaaga

SEQ ID NO: 2630675 - RNA, 19 nt, Artificial Sequence
  Description of Artificial Sequence: Synthetic oligonucleotide
cauguugguaaaucuggag

SEQ ID NO: 2630676 - RNA, 19 nt, Artificial Sequence
  Description of Artificial Sequence: Synthetic oligonucleotide
ucuucauauguaaucugau

SEQ ID NO: 2630677 - RNA, 19 nt, Artificial Sequence
  Description of Artificial Sequence: Synthetic oligonucleotide
augaaauucuuuggaagag

SEQ ID NO: 2630678 - RNA, 19 nt, Artificial Sequence
  Description of Artificial Sequence: Synthetic oligonucleotide
aggauucucaucaaaauaa

SEQ ID NO: 2630679 - RNA, 19 nt, Artificial Sequence
  Description of Artificial Sequence: Synthetic oligonucleotide
guaaucugauuauauaucu

SEQ ID NO: 2630680 - RNA, 19 nt, Artificial Sequence
  Description of Artificial Sequence: Synthetic oligonucleotide
ucucaucaaaauaaaucuu

SEQ ID NO: 2630681 - RNA, 19 nt, Artificial Sequence
  Description of Artificial Sequence: Synthetic oligonucleotide
aaaucuggagaaaauugaa

SEQ ID NO: 2630682 - RNA, 19 nt, Artificial Sequence
  Description of Artificial Sequence: Synthetic oligonucleotide
ugaaauucuuuggaagaga

SEQ ID NO: 2630683 - RNA, 19 nt, Artificial Sequence
  Description of Artificial Sequence: Synthetic oligonucleotide
guaaaccagguuaaagaag

SEQ ID NO: 2630684 - RNA, 19 nt, Artificial Sequence
  Description of Artificial Sequence: Synthetic oligonucleotide
cacuucaccccguggaugg

SEQ ID NO: 2630685 - RNA, 19 nt, Artificial Sequence
  Description of Artificial Sequence: Synthetic oligonucleotide
gaaauucuuuggaagagaa

SEQ ID NO: 2630686 - RNA, 19 nt, Artificial Sequence
  Description of Artificial Sequence: Synthetic oligonucleotide
uugguaaaucuggagaaaa

SEQ ID NO: 2630687 - RNA, 19 nt, Artificial Sequence
  Description of Artificial Sequence: Synthetic oligonucleotide
aaucuggagaaaauugaaa

SEQ ID NO: 2630688 - RNA, 19 nt, Artificial Sequence
  Description of Artificial Sequence: Synthetic oligonucleotide
auacauguugguaaaucug

SEQ ID NO: 2630689 - RNA, 19 nt, Artificial Sequence
  Description of Artificial Sequence: Synthetic oligonucleotide
accagguuaaagaagcucu

SEQ ID NO: 2630690 - RNA, 19 nt, Artificial Sequence
  Description of Artificial Sequence: Synthetic oligonucleotide
uaaucugauuauauaucuu

SEQ ID NO: 2630691 - RNA, 19 nt, Artificial Sequence
  Description of Artificial Sequence: Synthetic oligonucleotide
gaagagaacuuuguuuuca

SEQ ID NO: 2630692 - RNA, 19 nt, Artificial Sequence
  Description of Artificial Sequence: Synthetic oligonucleotide
auccugucacuucaccccg

SEQ ID NO: 2630693 - RNA, 19 nt, Artificial Sequence
  Description of Artificial Sequence: Synthetic oligonucleotide
ugguaaaucuggagaaaau

SEQ ID NO: 2630694 - RNA, 19 nt, Artificial Sequence
  Description of Artificial Sequence: Synthetic oligonucleotide
auauguaaucugauuauau

SEQ ID NO: 2630695 - RNA, 19 nt, Artificial Sequence
  Description of Artificial Sequence: Synthetic oligonucleotide
aucuucauauguaaucuga

SEQ ID NO: 2630696 - RNA, 19 nt, Artificial Sequence
  Description of Artificial Sequence: Synthetic oligonucleotide
cugauuauauaucuucaaa

SEQ ID NO: 2630697 - RNA, 19 nt, Artificial Sequence
  Description of Artificial Sequence: Synthetic oligonucleotide
caaauccugucacuucacc

SEQ ID NO: 2630698 - RNA, 19 nt, Artificial Sequence
  Description of Artificial Sequence: Synthetic oligonucleotide
uugaguguuuugucaaauc

SEQ ID NO: 2630699 - RNA, 19 nt, Artificial Sequence
  Description of Artificial Sequence: Synthetic oligonucleotide
ucaaauccugucacuucac

SEQ ID NO: 2630700 - RNA, 19 nt, Artificial Sequence
  Description of Artificial Sequence: Synthetic oligonucleotide
gacuugaguguuuugucaa

SEQ ID NO: 2630701 - RNA, 19 nt, Artificial Sequence
  Description of Artificial Sequence: Synthetic oligonucleotide
cuucaaauccugucacuuc

SEQ ID NO: 2630702 - RNA, 19 nt, Artificial Sequence
  Description of Artificial Sequence: Synthetic oligonucleotide
aucugauuauauaucuuca

SEQ ID NO: 2630703 - RNA, 19 nt, Artificial Sequence
  Description of Artificial Sequence: Synthetic oligonucleotide
auaaaucuucauauguaau

SEQ ID NO: 2630704 - RNA, 19 nt, Artificial Sequence
  Description of Artificial Sequence: Synthetic oligonucleotide
uucaccccguggaugguug

SEQ ID NO: 2630705 - RNA, 19 nt, Artificial Sequence
  Description of Artificial Sequence: Synthetic oligonucleotide
ucaucaucaucaucaucau

SEQ ID NO: 2630706 - RNA, 19 nt, Artificial Sequence
  Description of Artificial Sequence: Synthetic oligonucleotide
uucuuuggaagagaacuuu

SEQ ID NO: 2630707 - RNA, 19 nt, Artificial Sequence
  Description of Artificial Sequence: Synthetic oligonucleotide
aguguuuugucaaauccuu

SEQ ID NO: 2630708 - RNA, 19 nt, Artificial Sequence
  Description of Artificial Sequence: Synthetic oligonucleotide
uuggggauuuuggcgauca

SEQ ID NO: 2630709 - RNA, 19 nt, Artificial Sequence
  Description of Artificial Sequence: Synthetic oligonucleotide
auauaucuucaaauccugu

SEQ ID NO: 2630710 - RNA, 19 nt, Artificial Sequence
  Description of Artificial Sequence: Synthetic oligonucleotide
ucaucaucaucaucaucuu

SEQ ID NO: 2630711 - RNA, 19 nt, Artificial Sequence
  Description of Artificial Sequence: Synthetic oligonucleotide
aaaccagguuaaagaagcu

SEQ ID NO: 2630712 - RNA, 19 nt, Artificial Sequence
  Description of Artificial Sequence: Synthetic oligonucleotide
acuugaguguuuugucaaa

SEQ ID NO: 2630713 - RNA, 19 nt, Artificial Sequence
  Description of Artificial Sequence: Synthetic oligonucleotide
ucacuucaccccguggaug

SEQ ID NO: 2630714 - RNA, 19 nt, Artificial Sequence
  Description of Artificial Sequence: Synthetic oligonucleotide
cuucaucaucaucaucauc

SEQ ID NO: 2630715 - RNA, 19 nt, Artificial Sequence
  Description of Artificial Sequence: Synthetic oligonucleotide
caucaucaucaucaucauc

SEQ ID NO: 2630716 - RNA, 19 nt, Artificial Sequence
  Description of Artificial Sequence: Synthetic oligonucleotide
acauguugguaaaucugga

SEQ ID NO: 2630717 - RNA, 19 nt, Artificial Sequence
  Description of Artificial Sequence: Synthetic oligonucleotide
auuuggggauuuuggcgau

SEQ ID NO: 2630718 - RNA, 19 nt, Artificial Sequence
  Description of Artificial Sequence: Synthetic oligonucleotide
gauucucaucaaaauaaau

SEQ ID NO: 2630719 - RNA, 19 nt, Artificial Sequence
  Description of Artificial Sequence: Synthetic oligonucleotide
cauauguaaucugauuaua

SEQ ID NO: 2630720 - RNA, 19 nt, Artificial Sequence
  Description of Artificial Sequence: Synthetic oligonucleotide
auucuuuggaagagaacuu

SEQ ID NO: 2630721 - RNA, 19 nt, Artificial Sequence
  Description of Artificial Sequence: Synthetic oligonucleotide
caucaaaauaaaucuucau

SEQ ID NO: 2630722 - RNA, 19 nt, Artificial Sequence
  Description of Artificial Sequence: Synthetic oligonucleotide
ggaagagaacuuuguuuuc

SEQ ID NO: 2630723 - RNA, 19 nt, Artificial Sequence
  Description of Artificial Sequence: Synthetic oligonucleotide
guugguaaaucuggagaaa

SEQ ID NO: 2630724 - RNA, 19 nt, Artificial Sequence
  Description of Artificial Sequence: Synthetic oligonucleotide
cuucauauguaaucugauu

SEQ ID NO: 2630725 - RNA, 19 nt, Artificial Sequence
  Description of Artificial Sequence: Synthetic oligonucleotide
uccugucacuucaccccgu

SEQ ID NO: 2630726 - RNA, 19 nt, Artificial Sequence
  Description of Artificial Sequence: Synthetic oligonucleotide
gguaaaucuggagaaaauu

SEQ ID NO: 2630727 - RNA, 19 nt, Artificial Sequence
  Description of Artificial Sequence: Synthetic oligonucleotide
ccagguuaaagaagcucuc

SEQ ID NO: 2630728 - RNA, 19 nt, Artificial Sequence
  Description of Artificial Sequence: Synthetic oligonucleotide
ggauucucaucaaaauaaa

SEQ ID NO: 2630729 - RNA, 19 nt, Artificial Sequence
  Description of Artificial Sequence: Synthetic oligonucleotide
uuuggggauuuuggcgauc

SEQ ID NO: 2630730 - RNA, 19 nt, Artificial Sequence
  Description of Artificial Sequence: Synthetic oligonucleotide
ucaccccguggaugguuga

SEQ ID NO: 2630731 - RNA, 19 nt, Artificial Sequence
  Description of Artificial Sequence: Synthetic oligonucleotide
uggggauuuuggcgaucaa

SEQ ID NO: 2630732 - RNA, 19 nt, Artificial Sequence
  Description of Artificial Sequence: Synthetic oligonucleotide
cuugaguguuuugucaaau

SEQ ID NO: 2630733 - RNA, 19 nt, Artificial Sequence
  Description of Artificial Sequence: Synthetic oligonucleotide
accccguggaugguugaca

SEQ ID NO: 2630734 - RNA, 19 nt, Artificial Sequence
  Description of Artificial Sequence: Synthetic oligonucleotide
cagguuaaagaagcucucu

SEQ ID NO: 2630735 - RNA, 19 nt, Artificial Sequence
  Description of Artificial Sequence: Synthetic oligonucleotide
gucacuucaccccguggau

SEQ ID NO: 2630736 - RNA, 19 nt, Artificial Sequence
  Description of Artificial Sequence: Synthetic oligonucleotide
ccugucacuucaccccgug

SEQ ID NO: 2630737 - RNA, 19 nt, Artificial Sequence
  Description of Artificial Sequence: Synthetic oligonucleotide
caccccguggaugguugac

SEQ ID NO: 2630738 - RNA, 19 nt, Artificial Sequence
  Description of Artificial Sequence: Synthetic oligonucleotide
acuucaccccguggauggu

SEQ ID NO: 2630739 - RNA, 19 nt, Artificial Sequence
  Description of Artificial Sequence: Synthetic oligonucleotide
ccguggaugguugacaaau

SEQ ID NO: 2630740 - RNA, 19 nt, Artificial Sequence
  Description of Artificial Sequence: Synthetic oligonucleotide
ccccguggaugguugacaa

SEQ ID NO: 2630741 - RNA, 19 nt, Artificial Sequence
  Description of Artificial Sequence: Synthetic oligonucleotide
cuucaccccguggaugguu

SEQ ID NO: 2630742 - RNA, 19 nt, Artificial Sequence
  Description of Artificial Sequence: Synthetic oligonucleotide
cccguggaugguugacaaa

SEQ ID NO: 2630743 - RNA, 19 nt, Artificial Sequence
  Description of Artificial Sequence: Synthetic oligonucleotide
aagaauuugucuuuucugc

SEQ ID NO: 2630744 - RNA, 19 nt, Artificial Sequence
  Description of Artificial Sequence: Synthetic oligonucleotide
aauaacaagaauuugucuu

SEQ ID NO: 2630745 - RNA, 19 nt, Artificial Sequence
  Description of Artificial Sequence: Synthetic oligonucleotide
uuugaacugaaucugagca

SEQ ID NO: 2630746 - RNA, 19 nt, Artificial Sequence
  Description of Artificial Sequence: Synthetic oligonucleotide
uuucagaugaucuucagca

SEQ ID NO: 2630747 - RNA, 19 nt, Artificial Sequence
  Description of Artificial Sequence: Synthetic oligonucleotide
ucuucuuccaaauaacaag

SEQ ID NO: 2630748 - RNA, 19 nt, Artificial Sequence
  Description of Artificial Sequence: Synthetic oligonucleotide
uucuguuugguaaaacugg

SEQ ID NO: 2630749 - RNA, 19 nt, Artificial Sequence
  Description of Artificial Sequence: Synthetic oligonucleotide
aauuauggugaccugguug

SEQ ID NO: 2630750 - RNA, 19 nt, Artificial Sequence
  Description of Artificial Sequence: Synthetic oligonucleotide
uugaacaugaaucuuuucu

SEQ ID NO: 2630751 - RNA, 19 nt, Artificial Sequence
  Description of Artificial Sequence: Synthetic oligonucleotide
ugagaagaaguccugaaug

SEQ ID NO: 2630752 - RNA, 19 nt, Artificial Sequence
  Description of Artificial Sequence: Synthetic oligonucleotide
uugugauugaacaugaauc

SEQ ID NO: 2630753 - RNA, 19 nt, Artificial Sequence
  Description of Artificial Sequence: Synthetic oligonucleotide
auauguguuaguccagugc

SEQ ID NO: 2630754 - RNA, 19 nt, Artificial Sequence
  Description of Artificial Sequence: Synthetic oligonucleotide
uguuugguaaaacugguac

SEQ ID NO: 2630755 - RNA, 19 nt, Artificial Sequence
  Description of Artificial Sequence: Synthetic oligonucleotide
ucagcauguggaauuaugg

SEQ ID NO: 2630756 - RNA, 19 nt, Artificial Sequence
  Description of Artificial Sequence: Synthetic oligonucleotide
uugagaucuaccuugcuag

SEQ ID NO: 2630757 - RNA, 19 nt, Artificial Sequence
  Description of Artificial Sequence: Synthetic oligonucleotide
cuuuauuuguuucagauga

SEQ ID NO: 2630758 - RNA, 19 nt, Artificial Sequence
  Description of Artificial Sequence: Synthetic oligonucleotide
ucuacugagaagaaguccu

SEQ ID NO: 2630759 - RNA, 19 nt, Artificial Sequence
  Description of Artificial Sequence: Synthetic oligonucleotide
aauccuuucccacucagca

SEQ ID NO: 2630760 - RNA, 19 nt, Artificial Sequence
  Description of Artificial Sequence: Synthetic oligonucleotide
uuucuguuugguaaaacug

SEQ ID NO: 2630761 - RNA, 19 nt, Artificial Sequence
  Description of Artificial Sequence: Synthetic oligonucleotide
aaaacugguacugcuuugc

SEQ ID NO: 2630762 - RNA, 19 nt, Artificial Sequence
  Description of Artificial Sequence: Synthetic oligonucleotide
acaugaaucuuuucuuugc

SEQ ID NO: 2630763 - RNA, 19 nt, Artificial Sequence
  Description of Artificial Sequence: Synthetic oligonucleotide
uuuucauaacucuacugag

SEQ ID NO: 2630764 - RNA, 19 nt, Artificial Sequence
  Description of Artificial Sequence: Synthetic oligonucleotide
uuugcauuuucaauuggcc

SEQ ID NO: 2630765 - RNA, 19 nt, Artificial Sequence
  Description of Artificial Sequence: Synthetic oligonucleotide
aagcuuuucacucuuucug

SEQ ID NO: 2630766 - RNA, 19 nt, Artificial Sequence
  Description of Artificial Sequence: Synthetic oligonucleotide
uguucuuucugcacggagg

SEQ ID NO: 2630767 - RNA, 19 nt, Artificial Sequence
  Description of Artificial Sequence: Synthetic oligonucleotide
aaauaacaagaauuugucu

SEQ ID NO: 2630768 - RNA, 19 nt, Artificial Sequence
  Description of Artificial Sequence: Synthetic oligonucleotide
uauguguuaguccagugcu

SEQ ID NO: 2630769 - RNA, 19 nt, Artificial Sequence
  Description of Artificial Sequence: Synthetic oligonucleotide
ugugauugaacaugaaucu

SEQ ID NO: 2630770 - RNA, 19 nt, Artificial Sequence
  Description of Artificial Sequence: Synthetic oligonucleotide
uauuuguuucagaugaucu

SEQ ID NO: 2630771 - RNA, 19 nt, Artificial Sequence
  Description of Artificial Sequence: Synthetic oligonucleotide
ugucuuuucugcuucaagc

SEQ ID NO: 2630772 - RNA, 19 nt, Artificial Sequence
  Description of Artificial Sequence: Synthetic oligonucleotide
ucugauuuuacugaauucu

SEQ ID NO: 2630773 - RNA, 19 nt, Artificial Sequence
  Description of Artificial Sequence: Synthetic oligonucleotide
aagagcauaucuuucucug

SEQ ID NO: 2630774 - RNA, 19 nt, Artificial Sequence
  Description of Artificial Sequence: Synthetic oligonucleotide
ugaaugaaagcuuuucacu

SEQ ID NO: 2630775 - RNA, 19 nt, Artificial Sequence
  Description of Artificial Sequence: Synthetic oligonucleotide
uuuugucugauuuuacuga

SEQ ID NO: 2630776 - RNA, 19 nt, Artificial Sequence
  Description of Artificial Sequence: Synthetic oligonucleotide
uucugcuucaagcucuucg

SEQ ID NO: 2630777 - RNA, 19 nt, Artificial Sequence
  Description of Artificial Sequence: Synthetic oligonucleotide
caaauaacaagaauuuguc

SEQ ID NO: 2630778 - RNA, 19 nt, Artificial Sequence
  Description of Artificial Sequence: Synthetic oligonucleotide
aguuucuguucuuucauuc

SEQ ID NO: 2630779 - RNA, 19 nt, Artificial Sequence
  Description of Artificial Sequence: Synthetic oligonucleotide
aaugaaagcuuuucacucu

SEQ ID NO: 2630780 - RNA, 19 nt, Artificial Sequence
  Description of Artificial Sequence: Synthetic oligonucleotide
uucauaacucuacugagaa

SEQ ID NO: 2630781 - RNA, 19 nt, Artificial Sequence
  Description of Artificial Sequence: Synthetic oligonucleotide
ucagaugaucuucagcaag

SEQ ID NO: 2630782 - RNA, 19 nt, Artificial Sequence
  Description of Artificial Sequence: Synthetic oligonucleotide
uuugguaaaacugguacug

SEQ ID NO: 2630783 - RNA, 19 nt, Artificial Sequence
  Description of Artificial Sequence: Synthetic oligonucleotide
ugaaucuuuucuuugcugu

SEQ ID NO: 2630784 - RNA, 19 nt, Artificial Sequence
  Description of Artificial Sequence: Synthetic oligonucleotide
uucucuuuucuccaguuca

SEQ ID NO: 2630785 - RNA, 19 nt, Artificial Sequence
  Description of Artificial Sequence: Synthetic oligonucleotide
augaucuucagcaagagca

SEQ ID NO: 2630786 - RNA, 19 nt, Artificial Sequence
  Description of Artificial Sequence: Synthetic oligonucleotide
gaaugaaagcuuuucacuc

SEQ ID NO: 2630787 - RNA, 19 nt, Artificial Sequence
  Description of Artificial Sequence: Synthetic oligonucleotide
gagcauaucuuucucugcg

SEQ ID NO: 2630788 - RNA, 19 nt, Artificial Sequence
  Description of Artificial Sequence: Synthetic oligonucleotide
uguggaauuauggugaccu

SEQ ID NO: 2630789 - RNA, 19 nt, Artificial Sequence
  Description of Artificial Sequence: Synthetic oligonucleotide
uuuucacucuuucuguuug

SEQ ID NO: 2630790 - RNA, 19 nt, Artificial Sequence
  Description of Artificial Sequence: Synthetic oligonucleotide
aaccugucaaggcuauccc

SEQ ID NO: 2630791 - RNA, 19 nt, Artificial Sequence
  Description of Artificial Sequence: Synthetic oligonucleotide
auuauggugaccugguuga

SEQ ID NO: 2630792 - RNA, 19 nt, Artificial Sequence
  Description of Artificial Sequence: Synthetic oligonucleotide
aacucuacugagaagaagu

SEQ ID NO: 2630793 - RNA, 19 nt, Artificial Sequence
  Description of Artificial Sequence: Synthetic oligonucleotide
uguuauauuucuucuucca

SEQ ID NO: 2630794 - RNA, 19 nt, Artificial Sequence
  Description of Artificial Sequence: Synthetic oligonucleotide
uuuugcuuggcuuuaaguu

SEQ ID NO: 2630795 - RNA, 19 nt, Artificial Sequence
  Description of Artificial Sequence: Synthetic oligonucleotide
uuucuucuuccaaauaaca

SEQ ID NO: 2630796 - RNA, 19 nt, Artificial Sequence
  Description of Artificial Sequence: Synthetic oligonucleotide
uuucaauuggccuucuuuc

SEQ ID NO: 2630797 - RNA, 19 nt, Artificial Sequence
  Description of Artificial Sequence: Synthetic oligonucleotide
ucucuugucaaccugucaa

SEQ ID NO: 2630798 - RNA, 19 nt, Artificial Sequence
  Description of Artificial Sequence: Synthetic oligonucleotide
uguuuguuauauuucuucu

SEQ ID NO: 2630799 - RNA, 19 nt, Artificial Sequence
  Description of Artificial Sequence: Synthetic oligonucleotide
uuucauaacucuacugaga

SEQ ID NO: 2630800 - RNA, 19 nt, Artificial Sequence
  Description of Artificial Sequence: Synthetic oligonucleotide
cuuugcauuuucaauuggc

SEQ ID NO: 2630801 - RNA, 19 nt, Artificial Sequence
  Description of Artificial Sequence: Synthetic oligonucleotide
uuccaaauaacaagaauuu

SEQ ID NO: 2630802 - RNA, 19 nt, Artificial Sequence
  Description of Artificial Sequence: Synthetic oligonucleotide
uuuugaacugaaucugagc

SEQ ID NO: 2630803 - RNA, 19 nt, Artificial Sequence
  Description of Artificial Sequence: Synthetic oligonucleotide
aaucuuuucuuugcuguuc

SEQ ID NO: 2630804 - RNA, 19 nt, Artificial Sequence
  Description of Artificial Sequence: Synthetic oligonucleotide
cuuuucauaacucuacuga

SEQ ID NO: 2630805 - RNA, 19 nt, Artificial Sequence
  Description of Artificial Sequence: Synthetic oligonucleotide
agaaguccugaaugaaagc

SEQ ID NO: 2630806 - RNA, 19 nt, Artificial Sequence
  Description of Artificial Sequence: Synthetic oligonucleotide
uauauuucuucuuccaaau

SEQ ID NO: 2630807 - RNA, 19 nt, Artificial Sequence
  Description of Artificial Sequence: Synthetic oligonucleotide
acugaaucugagcaucacg

SEQ ID NO: 2630808 - RNA, 19 nt, Artificial Sequence
  Description of Artificial Sequence: Synthetic oligonucleotide
uggaauuauggugaccugg

SEQ ID NO: 2630809 - RNA, 19 nt, Artificial Sequence
  Description of Artificial Sequence: Synthetic oligonucleotide
cugaaugaaagcuuuucac

SEQ ID NO: 2630810 - RNA, 19 nt, Artificial Sequence
  Description of Artificial Sequence: Synthetic oligonucleotide
ucuuuucauaacucuacug

SEQ ID NO: 2630811 - RNA, 19 nt, Artificial Sequence
  Description of Artificial Sequence: Synthetic oligonucleotide
aguccagugcuuuaccaac

SEQ ID NO: 2630812 - RNA, 19 nt, Artificial Sequence
  Description of Artificial Sequence: Synthetic oligonucleotide
uuguuuguuauauuucuuc

SEQ ID NO: 2630813 - RNA, 19 nt, Artificial Sequence
  Description of Artificial Sequence: Synthetic oligonucleotide
uuaccaacucuugugauug

SEQ ID NO: 2630814 - RNA, 19 nt, Artificial Sequence
  Description of Artificial Sequence: Synthetic oligonucleotide
uuucauuccugcauaugug

SEQ ID NO: 2630815 - RNA, 19 nt, Artificial Sequence
  Description of Artificial Sequence: Synthetic oligonucleotide
uuucccacucagcaugugg

SEQ ID NO: 2630816 - RNA, 19 nt, Artificial Sequence
  Description of Artificial Sequence: Synthetic oligonucleotide
agagcauaucuuucucugc

SEQ ID NO: 2630817 - RNA, 19 nt, Artificial Sequence
  Description of Artificial Sequence: Synthetic oligonucleotide
ucaacgucgaguuucacuu

SEQ ID NO: 2630818 - RNA, 19 nt, Artificial Sequence
  Description of Artificial Sequence: Synthetic oligonucleotide
uuuucaauuggccuucuuu

SEQ ID NO: 2630819 - RNA, 19 nt, Artificial Sequence
  Description of Artificial Sequence: Synthetic oligonucleotide
cauaacucuacugagaaga

SEQ ID NO: 2630820 - RNA, 19 nt, Artificial Sequence
  Description of Artificial Sequence: Synthetic oligonucleotide
caagaauuugucuuuucug

SEQ ID NO: 2630821 - RNA, 19 nt, Artificial Sequence
  Description of Artificial Sequence: Synthetic oligonucleotide
ugauugaacaugaaucuuu

SEQ ID NO: 2630822 - RNA, 19 nt, Artificial Sequence
  Description of Artificial Sequence: Synthetic oligonucleotide
uuguuauauuucuucuucc

SEQ ID NO: 2630823 - RNA, 19 nt, Artificial Sequence
  Description of Artificial Sequence: Synthetic oligonucleotide
ucacguucuuuucauaacu

SEQ ID NO: 2630824 - RNA, 19 nt, Artificial Sequence
  Description of Artificial Sequence: Synthetic oligonucleotide
uccuuucccacucagcaug

SEQ ID NO: 2630825 - RNA, 19 nt, Artificial Sequence
  Description of Artificial Sequence: Synthetic oligonucleotide
auuucuucuuccaaauaac

SEQ ID NO: 2630826 - RNA, 19 nt, Artificial Sequence
  Description of Artificial Sequence: Synthetic oligonucleotide
guucuuucugcacggaggg

SEQ ID NO: 2630827 - RNA, 19 nt, Artificial Sequence
  Description of Artificial Sequence: Synthetic oligonucleotide
cugguugagaucuaccuug

SEQ ID NO: 2630828 - RNA, 19 nt, Artificial Sequence
  Description of Artificial Sequence: Synthetic oligonucleotide
aguuucacuuguuccuccc

SEQ ID NO: 2630829 - RNA, 19 nt, Artificial Sequence
  Description of Artificial Sequence: Synthetic oligonucleotide
aauuggccuucuuucuuuc

SEQ ID NO: 2630830 - RNA, 19 nt, Artificial Sequence
  Description of Artificial Sequence: Synthetic oligonucleotide
uugucaaccugucaaggcu

SEQ ID NO: 2630831 - RNA, 19 nt, Artificial Sequence
  Description of Artificial Sequence: Synthetic oligonucleotide
uucuucuuccaaauaacaa

SEQ ID NO: 2630832 - RNA, 19 nt, Artificial Sequence
  Description of Artificial Sequence: Synthetic oligonucleotide
cauaucuuucucugcgucg

SEQ ID NO: 2630833 - RNA, 19 nt, Artificial Sequence
  Description of Artificial Sequence: Synthetic oligonucleotide
aucacguucuuuucauaac

SEQ ID NO: 2630834 - RNA, 19 nt, Artificial Sequence
  Description of Artificial Sequence: Synthetic oligonucleotide
uuuucuuugcuguucuuuc

SEQ ID NO: 2630835 - RNA, 19 nt, Artificial Sequence
  Description of Artificial Sequence: Synthetic oligonucleotide
ucuguuugguaaaacuggu

SEQ ID NO: 2630836 - RNA, 19 nt, Artificial Sequence
  Description of Artificial Sequence: Synthetic oligonucleotide
ugaacaugaaucuuuucuu

SEQ ID NO: 2630837 - RNA, 19 nt, Artificial Sequence
  Description of Artificial Sequence: Synthetic oligonucleotide
ucuuccaaauaacaagaau

SEQ ID NO: 2630838 - RNA, 19 nt, Artificial Sequence
  Description of Artificial Sequence: Synthetic oligonucleotide
uuuaaguuucuguucuuuc

SEQ ID NO: 2630839 - RNA, 19 nt, Artificial Sequence
  Description of Artificial Sequence: Synthetic oligonucleotide
auaacaagaauuugucuuu

SEQ ID NO: 2630840 - RNA, 19 nt, Artificial Sequence
  Description of Artificial Sequence: Synthetic oligonucleotide
ugucugauuuuacugaauu

SEQ ID NO: 2630841 - RNA, 19 nt, Artificial Sequence
  Description of Artificial Sequence: Synthetic oligonucleotide
ucuuucugcacggagggcc

SEQ ID NO: 2630842 - RNA, 19 nt, Artificial Sequence
  Description of Artificial Sequence: Synthetic oligonucleotide
ucuuuauguuccuuuauuu

SEQ ID NO: 2630843 - RNA, 19 nt, Artificial Sequence
  Description of Artificial Sequence: Synthetic oligonucleotide
uuggcuuuaaguuucuguu

SEQ ID NO: 2630844 - RNA, 19 nt, Artificial Sequence
  Description of Artificial Sequence: Synthetic oligonucleotide
uuugcuuggcuuuaaguuu

SEQ ID NO: 2630845 - RNA, 19 nt, Artificial Sequence
  Description of Artificial Sequence: Synthetic oligonucleotide
ucgaguuucacuuguuccu

SEQ ID NO: 2630846 - RNA, 19 nt, Artificial Sequence
  Description of Artificial Sequence: Synthetic oligonucleotide
gaucuaccuugcuagguag

SEQ ID NO: 2630847 - RNA, 19 nt, Artificial Sequence
  Description of Artificial Sequence: Synthetic oligonucleotide
uucauuccugcauaugugu

SEQ ID NO: 2630848 - RNA, 19 nt, Artificial Sequence
  Description of Artificial Sequence: Synthetic oligonucleotide
uugcauuuucaauuggccu

SEQ ID NO: 2630849 - RNA, 19 nt, Artificial Sequence
  Description of Artificial Sequence: Synthetic oligonucleotide
cuucuuccaaauaacaaga

SEQ ID NO: 2630850 - RNA, 19 nt, Artificial Sequence
  Description of Artificial Sequence: Synthetic oligonucleotide
ugcauuuucaauuggccuu

SEQ ID NO: 2630851 - RNA, 19 nt, Artificial Sequence
  Description of Artificial Sequence: Synthetic oligonucleotide
ucagcaagagcauaucuuu

SEQ ID NO: 2630852 - RNA, 19 nt, Artificial Sequence
  Description of Artificial Sequence: Synthetic oligonucleotide
cuugucaaccugucaaggc

SEQ ID NO: 2630853 - RNA, 19 nt, Artificial Sequence
  Description of Artificial Sequence: Synthetic oligonucleotide
uucuuuucauaacucuacu

SEQ ID NO: 2630854 - RNA, 19 nt, Artificial Sequence
  Description of Artificial Sequence: Synthetic oligonucleotide
ucuugucaaccugucaagg

SEQ ID NO: 2630855 - RNA, 19 nt, Artificial Sequence
  Description of Artificial Sequence: Synthetic oligonucleotide
ucuguucuuucauuccugc

SEQ ID NO: 2630856 - RNA, 19 nt, Artificial Sequence
  Description of Artificial Sequence: Synthetic oligonucleotide
uuugucugauuuuacugaa

SEQ ID NO: 2630857 - RNA, 19 nt, Artificial Sequence
  Description of Artificial Sequence: Synthetic oligonucleotide
aaucugagcaucacguucu

SEQ ID NO: 2630858 - RNA, 19 nt, Artificial Sequence
  Description of Artificial Sequence: Synthetic oligonucleotide
uuuucaacgucgaguuuca

SEQ ID NO: 2630859 - RNA, 19 nt, Artificial Sequence
  Description of Artificial Sequence: Synthetic oligonucleotide
aacgucgaguuucacuugu

SEQ ID NO: 2630860 - RNA, 19 nt, Artificial Sequence
  Description of Artificial Sequence: Synthetic oligonucleotide
uccaaauaacaagaauuug

SEQ ID NO: 2630861 - RNA, 19 nt, Artificial Sequence
  Description of Artificial Sequence: Synthetic oligonucleotide
aacucuugugauugaacau

SEQ ID NO: 2630862 - RNA, 19 nt, Artificial Sequence
  Description of Artificial Sequence: Synthetic oligonucleotide
ucugcuucaagcucuucgu

SEQ ID NO: 2630863 - RNA, 19 nt, Artificial Sequence
  Description of Artificial Sequence: Synthetic oligonucleotide
gucgaguuucacuuguucc

SEQ ID NO: 2630864 - RNA, 19 nt, Artificial Sequence
  Description of Artificial Sequence: Synthetic oligonucleotide
agcaagagcauaucuuucu

SEQ ID NO: 2630865 - RNA, 19 nt, Artificial Sequence
  Description of Artificial Sequence: Synthetic oligonucleotide
auugaacaugaaucuuuuc

SEQ ID NO: 2630866 - RNA, 19 nt, Artificial Sequence
  Description of Artificial Sequence: Synthetic oligonucleotide
gaugaucuucagcaagagc

SEQ ID NO: 2630867 - RNA, 19 nt, Artificial Sequence
  Description of Artificial Sequence: Synthetic oligonucleotide
uugucuuuucugcuucaag

SEQ ID NO: 2630868 - RNA, 19 nt, Artificial Sequence
  Description of Artificial Sequence: Synthetic oligonucleotide
ugagaucuaccuugcuagg

SEQ ID NO: 2630869 - RNA, 19 nt, Artificial Sequence
  Description of Artificial Sequence: Synthetic oligonucleotide
ugaacugaaucugagcauc

SEQ ID NO: 2630870 - RNA, 19 nt, Artificial Sequence
  Description of Artificial Sequence: Synthetic oligonucleotide
ugcuucaagcucuucguca

SEQ ID NO: 2630871 - RNA, 19 nt, Artificial Sequence
  Description of Artificial Sequence: Synthetic oligonucleotide
guuucagaugaucuucagc

SEQ ID NO: 2630872 - RNA, 19 nt, Artificial Sequence
  Description of Artificial Sequence: Synthetic oligonucleotide
uucaacgucgaguuucacu

SEQ ID NO: 2630873 - RNA, 19 nt, Artificial Sequence
  Description of Artificial Sequence: Synthetic oligonucleotide
uuauguuccuuuauuuguu

SEQ ID NO: 2630874 - RNA, 19 nt, Artificial Sequence
  Description of Artificial Sequence: Synthetic oligonucleotide
uucaauuggccuucuuucu

SEQ ID NO: 2630875 - RNA, 19 nt, Artificial Sequence
  Description of Artificial Sequence: Synthetic oligonucleotide
ugauuuuacugaauucuuu

SEQ ID NO: 2630876 - RNA, 19 nt, Artificial Sequence
  Description of Artificial Sequence: Synthetic oligonucleotide
uucagcaagagcauaucuu

SEQ ID NO: 2630877 - RNA, 19 nt, Artificial Sequence
  Description of Artificial Sequence: Synthetic oligonucleotide
gaaagcuuuucacucuuuc

SEQ ID NO: 2630878 - RNA, 19 nt, Artificial Sequence
  Description of Artificial Sequence: Synthetic oligonucleotide
uuucacucuuucuguuugg

SEQ ID NO: 2630879 - RNA, 19 nt, Artificial Sequence
  Description of Artificial Sequence: Synthetic oligonucleotide
augaaucuuuucuuugcug

SEQ ID NO: 2630880 - RNA, 19 nt, Artificial Sequence
  Description of Artificial Sequence: Synthetic oligonucleotide
ucaaggcuaucccgaaucc

SEQ ID NO: 2630881 - RNA, 19 nt, Artificial Sequence
  Description of Artificial Sequence: Synthetic oligonucleotide
acucuugugauugaacaug

SEQ ID NO: 2630882 - RNA, 19 nt, Artificial Sequence
  Description of Artificial Sequence: Synthetic oligonucleotide
aacugaaucugagcaucac

SEQ ID NO: 2630883 - RNA, 19 nt, Artificial Sequence
  Description of Artificial Sequence: Synthetic oligonucleotide
acugguacugcuuugcauu

SEQ ID NO: 2630884 - RNA, 19 nt, Artificial Sequence
  Description of Artificial Sequence: Synthetic oligonucleotide
uuaguccagugcuuuacca

SEQ ID NO: 2630885 - RNA, 19 nt, Artificial Sequence
  Description of Artificial Sequence: Synthetic oligonucleotide
uuugcuguucuuucugcac

SEQ ID NO: 2630886 - RNA, 19 nt, Artificial Sequence
  Description of Artificial Sequence: Synthetic oligonucleotide
uuauuuguuucagaugauc

SEQ ID NO: 2630887 - RNA, 19 nt, Artificial Sequence
  Description of Artificial Sequence: Synthetic oligonucleotide
uaaaacugguacugcuuug

SEQ ID NO: 2630888 - RNA, 19 nt, Artificial Sequence
  Description of Artificial Sequence: Synthetic oligonucleotide
acugcuuugcauuuucaau

SEQ ID NO: 2630889 - RNA, 19 nt, Artificial Sequence
  Description of Artificial Sequence: Synthetic oligonucleotide
uucuguucuuucauuccug

SEQ ID NO: 2630890 - RNA, 19 nt, Artificial Sequence
  Description of Artificial Sequence: Synthetic oligonucleotide
uguucuuccucuuuauguu

SEQ ID NO: 2630891 - RNA, 19 nt, Artificial Sequence
  Description of Artificial Sequence: Synthetic oligonucleotide
cugcauauguguuagucca

SEQ ID NO: 2630892 - RNA, 19 nt, Artificial Sequence
  Description of Artificial Sequence: Synthetic oligonucleotide
ucauaacucuacugagaag

SEQ ID NO: 2630893 - RNA, 19 nt, Artificial Sequence
  Description of Artificial Sequence: Synthetic oligonucleotide
uaccuugcuagguagcaga

SEQ ID NO: 2630894 - RNA, 19 nt, Artificial Sequence
  Description of Artificial Sequence: Synthetic oligonucleotide
cuuccaaauaacaagaauu

SEQ ID NO: 2630895 - RNA, 19 nt, Artificial Sequence
  Description of Artificial Sequence: Synthetic oligonucleotide
caacucuugugauugaaca

SEQ ID NO: 2630896 - RNA, 19 nt, Artificial Sequence
  Description of Artificial Sequence: Synthetic oligonucleotide
uugcuuggcuuuaaguuuc

SEQ ID NO: 2630897 - RNA, 19 nt, Artificial Sequence
  Description of Artificial Sequence: Synthetic oligonucleotide
auuuguuucagaugaucuu

SEQ ID NO: 2630898 - RNA, 19 nt, Artificial Sequence
  Description of Artificial Sequence: Synthetic oligonucleotide
uuuaccaacucuugugauu

SEQ ID NO: 2630899 - RNA, 19 nt, Artificial Sequence
  Description of Artificial Sequence: Synthetic oligonucleotide
auuccugcauauguguuag

SEQ ID NO: 2630900 - RNA, 19 nt, Artificial Sequence
  Description of Artificial Sequence: Synthetic oligonucleotide
ugcauauguguuaguccag

SEQ ID NO: 2630901 - RNA, 19 nt, Artificial Sequence
  Description of Artificial Sequence: Synthetic oligonucleotide
aaacugguacugcuuugca

SEQ ID NO: 2630902 - RNA, 19 nt, Artificial Sequence
  Description of Artificial Sequence: Synthetic oligonucleotide
guucuuuucauaacucuac

SEQ ID NO: 2630903 - RNA, 19 nt, Artificial Sequence
  Description of Artificial Sequence: Synthetic oligonucleotide
accugguugagaucuaccu

SEQ ID NO: 2630904 - RNA, 19 nt, Artificial Sequence
  Description of Artificial Sequence: Synthetic oligonucleotide
caaccugucaaggcuaucc

SEQ ID NO: 2630905 - RNA, 19 nt, Artificial Sequence
  Description of Artificial Sequence: Synthetic oligonucleotide
aucccgaauccuuucccac

SEQ ID NO: 2630906 - RNA, 19 nt, Artificial Sequence
  Description of Artificial Sequence: Synthetic oligonucleotide
accugucaaggcuaucccg

SEQ ID NO: 2630907 - RNA, 19 nt, Artificial Sequence
  Description of Artificial Sequence: Synthetic oligonucleotide
uuucuuugcuguucuuucu

SEQ ID NO: 2630908 - RNA, 19 nt, Artificial Sequence
  Description of Artificial Sequence: Synthetic oligonucleotide
acguucuuuucauaacucu

SEQ ID NO: 2630909 - RNA, 19 nt, Artificial Sequence
  Description of Artificial Sequence: Synthetic oligonucleotide
uuuauuuguuucagaugau

SEQ ID NO: 2630910 - RNA, 19 nt, Artificial Sequence
  Description of Artificial Sequence: Synthetic oligonucleotide
aacugguacugcuuugcau

SEQ ID NO: 2630911 - RNA, 19 nt, Artificial Sequence
  Description of Artificial Sequence: Synthetic oligonucleotide
cucagcauguggaauuaug

SEQ ID NO: 2630912 - RNA, 19 nt, Artificial Sequence
  Description of Artificial Sequence: Synthetic oligonucleotide
ugaucuucagcaagagcau

SEQ ID NO: 2630913 - RNA, 19 nt, Artificial Sequence
  Description of Artificial Sequence: Synthetic oligonucleotide
gauuuuacugaauucuuuu

SEQ ID NO: 2630914 - RNA, 19 nt, Artificial Sequence
  Description of Artificial Sequence: Synthetic oligonucleotide
auggugaccugguugagau

SEQ ID NO: 2630915 - RNA, 19 nt, Artificial Sequence
  Description of Artificial Sequence: Synthetic oligonucleotide
uucuccuuguuuguuauau

SEQ ID NO: 2630916 - RNA, 19 nt, Artificial Sequence
  Description of Artificial Sequence: Synthetic oligonucleotide
uucaagcucuucgucacgc

SEQ ID NO: 2630917 - RNA, 19 nt, Artificial Sequence
  Description of Artificial Sequence: Synthetic oligonucleotide
cucuacugagaagaagucc

SEQ ID NO: 2630918 - RNA, 19 nt, Artificial Sequence
  Description of Artificial Sequence: Synthetic oligonucleotide
cacucuuucuguuugguaa

SEQ ID NO: 2630919 - RNA, 19 nt, Artificial Sequence
  Description of Artificial Sequence: Synthetic oligonucleotide
gucaaggcuaucccgaauc

SEQ ID NO: 2630920 - RNA, 19 nt, Artificial Sequence
  Description of Artificial Sequence: Synthetic oligonucleotide
uaucccgaauccuuuccca

SEQ ID NO: 2630921 - RNA, 19 nt, Artificial Sequence
  Description of Artificial Sequence: Synthetic oligonucleotide
uugaacugaaucugagcau

SEQ ID NO: 2630922 - RNA, 19 nt, Artificial Sequence
  Description of Artificial Sequence: Synthetic oligonucleotide
ucuaccuugcuagguagca

SEQ ID NO: 2630923 - RNA, 19 nt, Artificial Sequence
  Description of Artificial Sequence: Synthetic oligonucleotide
cucuugucaaccugucaag

SEQ ID NO: 2630924 - RNA, 19 nt, Artificial Sequence
  Description of Artificial Sequence: Synthetic oligonucleotide
ugguugagaucuaccuugc

SEQ ID NO: 2630925 - RNA, 19 nt, Artificial Sequence
  Description of Artificial Sequence: Synthetic oligonucleotide
uguuaguccagugcuuuac

SEQ ID NO: 2630926 - RNA, 19 nt, Artificial Sequence
  Description of Artificial Sequence: Synthetic oligonucleotide
cuuucugcacggagggccg

SEQ ID NO: 2630927 - RNA, 19 nt, Artificial Sequence
  Description of Artificial Sequence: Synthetic oligonucleotide
uggccuucuuucuuucucc

SEQ ID NO: 2630928 - RNA, 19 nt, Artificial Sequence
  Description of Artificial Sequence: Synthetic oligonucleotide
ucaauuggccuucuuucuu

SEQ ID NO: 2630929 - RNA, 19 nt, Artificial Sequence
  Description of Artificial Sequence: Synthetic oligonucleotide
uacugcuuugcauuuucaa

SEQ ID NO: 2630930 - RNA, 19 nt, Artificial Sequence
  Description of Artificial Sequence: Synthetic oligonucleotide
guuaguccagugcuuuacc

SEQ ID NO: 2630931 - RNA, 19 nt, Artificial Sequence
  Description of Artificial Sequence: Synthetic oligonucleotide
aaguuucuguucuuucauu

SEQ ID NO: 2630932 - RNA, 19 nt, Artificial Sequence
  Description of Artificial Sequence: Synthetic oligonucleotide
acugagaagaaguccugaa

SEQ ID NO: 2630933 - RNA, 19 nt, Artificial Sequence
  Description of Artificial Sequence: Synthetic oligonucleotide
ucuuucuccuuguuuguua

SEQ ID NO: 2630934 - RNA, 19 nt, Artificial Sequence
  Description of Artificial Sequence: Synthetic oligonucleotide
uuggccuucuuucuuucuc

SEQ ID NO: 2630935 - RNA, 19 nt, Artificial Sequence
  Description of Artificial Sequence: Synthetic oligonucleotide
cauauguguuaguccagug

SEQ ID NO: 2630936 - RNA, 19 nt, Artificial Sequence
  Description of Artificial Sequence: Synthetic oligonucleotide
auaucuuucucugcgucgu

SEQ ID NO: 2630937 - RNA, 19 nt, Artificial Sequence
  Description of Artificial Sequence: Synthetic oligonucleotide
ugucaaccugucaaggcua

SEQ ID NO: 2630938 - RNA, 19 nt, Artificial Sequence
  Description of Artificial Sequence: Synthetic oligonucleotide
gaguuucacuuguuccucc

SEQ ID NO: 2630939 - RNA, 19 nt, Artificial Sequence
  Description of Artificial Sequence: Synthetic oligonucleotide
uuuucucuuuucuccaguu

SEQ ID NO: 2630940 - RNA, 19 nt, Artificial Sequence
  Description of Artificial Sequence: Synthetic oligonucleotide
cuaucccgaauccuuuccc

SEQ ID NO: 2630941 - RNA, 19 nt, Artificial Sequence
  Description of Artificial Sequence: Synthetic oligonucleotide
cuuucauuccugcauaugu

SEQ ID NO: 2630942 - RNA, 19 nt, Artificial Sequence
  Description of Artificial Sequence: Synthetic oligonucleotide
gaaguccugaaugaaagcu

SEQ ID NO: 2630943 - RNA, 19 nt, Artificial Sequence
  Description of Artificial Sequence: Synthetic oligonucleotide
uggcuuuaaguuucuguuc

SEQ ID NO: 2630944 - RNA, 19 nt, Artificial Sequence
  Description of Artificial Sequence: Synthetic oligonucleotide
uucagaugaucuucagcaa

SEQ ID NO: 2630945 - RNA, 19 nt, Artificial Sequence
  Description of Artificial Sequence: Synthetic oligonucleotide
guugagaucuaccuugcua

SEQ ID NO: 2630946 - RNA, 19 nt, Artificial Sequence
  Description of Artificial Sequence: Synthetic oligonucleotide
agcaucacguucuuuucau

SEQ ID NO: 2630947 - RNA, 19 nt, Artificial Sequence
  Description of Artificial Sequence: Synthetic oligonucleotide
uccugcauauguguuaguc

SEQ ID NO: 2630948 - RNA, 19 nt, Artificial Sequence
  Description of Artificial Sequence: Synthetic oligonucleotide
agaucuaccuugcuaggua

SEQ ID NO: 2630949 - RNA, 19 nt, Artificial Sequence
  Description of Artificial Sequence: Synthetic oligonucleotide
cuuucuguuugguaaaacu

SEQ ID NO: 2630950 - RNA, 19 nt, Artificial Sequence
  Description of Artificial Sequence: Synthetic oligonucleotide
gucugauuuuacugaauuc

SEQ ID NO: 2630951 - RNA, 19 nt, Artificial Sequence
  Description of Artificial Sequence: Synthetic oligonucleotide
uuccuuuauuuguuucaga

SEQ ID NO: 2630952 - RNA, 19 nt, Artificial Sequence
  Description of Artificial Sequence: Synthetic oligonucleotide
ugagcaucacguucuuuuc

SEQ ID NO: 2630953 - RNA, 19 nt, Artificial Sequence
  Description of Artificial Sequence: Synthetic oligonucleotide
uaguccagugcuuuaccaa

SEQ ID NO: 2630954 - RNA, 19 nt, Artificial Sequence
  Description of Artificial Sequence: Synthetic oligonucleotide
uccugaaugaaagcuuuuc

SEQ ID NO: 2630955 - RNA, 19 nt, Artificial Sequence
  Description of Artificial Sequence: Synthetic oligonucleotide
cacguucuuuucauaacuc

SEQ ID NO: 2630956 - RNA, 19 nt, Artificial Sequence
  Description of Artificial Sequence: Synthetic oligonucleotide
gaagaaguccugaaugaaa

SEQ ID NO: 2630957 - RNA, 19 nt, Artificial Sequence
  Description of Artificial Sequence: Synthetic oligonucleotide
cugaaucugagcaucacgu

SEQ ID NO: 2630958 - RNA, 19 nt, Artificial Sequence
  Description of Artificial Sequence: Synthetic oligonucleotide
cuugcuagguagcagaggu

SEQ ID NO: 2630959 - RNA, 19 nt, Artificial Sequence
  Description of Artificial Sequence: Synthetic oligonucleotide
acucuacugagaagaaguc

SEQ ID NO: 2630960 - RNA, 19 nt, Artificial Sequence
  Description of Artificial Sequence: Synthetic oligonucleotide
agugcuuuaccaacucuug

SEQ ID NO: 2630961 - RNA, 19 nt, Artificial Sequence
  Description of Artificial Sequence: Synthetic oligonucleotide
caucacguucuuuucauaa

SEQ ID NO: 2630962 - RNA, 19 nt, Artificial Sequence
  Description of Artificial Sequence: Synthetic oligonucleotide
agaugaucuucagcaagag

SEQ ID NO: 2630963 - RNA, 19 nt, Artificial Sequence
  Description of Artificial Sequence: Synthetic oligonucleotide
cagaugaucuucagcaaga

SEQ ID NO: 2630964 - RNA, 19 nt, Artificial Sequence
  Description of Artificial Sequence: Synthetic oligonucleotide
cauguggaauuauggugac

SEQ ID NO: 2630965 - RNA, 19 nt, Artificial Sequence
  Description of Artificial Sequence: Synthetic oligonucleotide
ucauuccugcauauguguu

SEQ ID NO: 2630966 - RNA, 19 nt, Artificial Sequence
  Description of Artificial Sequence: Synthetic oligonucleotide
agcauaucuuucucugcgu

SEQ ID NO: 2630967 - RNA, 19 nt, Artificial Sequence
  Description of Artificial Sequence: Synthetic oligonucleotide
cucuugugauugaacauga

SEQ ID NO: 2630968 - RNA, 19 nt, Artificial Sequence
  Description of Artificial Sequence: Synthetic oligonucleotide
uccucuuuauguuccuuua

SEQ ID NO: 2630969 - RNA, 19 nt, Artificial Sequence
  Description of Artificial Sequence: Synthetic oligonucleotide
uacugagaagaaguccuga

SEQ ID NO: 2630970 - RNA, 19 nt, Artificial Sequence
  Description of Artificial Sequence: Synthetic oligonucleotide
uguguuaguccagugcuuu

SEQ ID NO: 2630971 - RNA, 19 nt, Artificial Sequence
  Description of Artificial Sequence: Synthetic oligonucleotide
aaggcuaucccgaauccuu

SEQ ID NO: 2630972 - RNA, 19 nt, Artificial Sequence
  Description of Artificial Sequence: Synthetic oligonucleotide
ccugcauauguguuagucc

SEQ ID NO: 2630973 - RNA, 19 nt, Artificial Sequence
  Description of Artificial Sequence: Synthetic oligonucleotide
cuacugagaagaaguccug

SEQ ID NO: 2630974 - RNA, 19 nt, Artificial Sequence
  Description of Artificial Sequence: Synthetic oligonucleotide
augaaagcuuuucacucuu

SEQ ID NO: 2630975 - RNA, 19 nt, Artificial Sequence
  Description of Artificial Sequence: Synthetic oligonucleotide
uccagugcuuuaccaacuc

SEQ ID NO: 2630976 - RNA, 19 nt, Artificial Sequence
  Description of Artificial Sequence: Synthetic oligonucleotide
auauuucuucuuccaaaua

SEQ ID NO: 2630977 - RNA, 19 nt, Artificial Sequence
  Description of Artificial Sequence: Synthetic oligonucleotide
auguggaauuauggugacc

SEQ ID NO: 2630978 - RNA, 19 nt, Artificial Sequence
  Description of Artificial Sequence: Synthetic oligonucleotide
gaauccuuucccacucagc

SEQ ID NO: 2630979 - RNA, 19 nt, Artificial Sequence
  Description of Artificial Sequence: Synthetic oligonucleotide
ucuuucuguuugguaaaac

SEQ ID NO: 2630980 - RNA, 19 nt, Artificial Sequence
  Description of Artificial Sequence: Synthetic oligonucleotide
aucuaccuugcuagguagc

SEQ ID NO: 2630981 - RNA, 19 nt, Artificial Sequence
  Description of Artificial Sequence: Synthetic oligonucleotide
ccaaauaacaagaauuugu

SEQ ID NO: 2630982 - RNA, 19 nt, Artificial Sequence
  Description of Artificial Sequence: Synthetic oligonucleotide
uugcuagguagcagaggug

SEQ ID NO: 2630983 - RNA, 19 nt, Artificial Sequence
  Description of Artificial Sequence: Synthetic oligonucleotide
uugucugauuuuacugaau

SEQ ID NO: 2630984 - RNA, 19 nt, Artificial Sequence
  Description of Artificial Sequence: Synthetic oligonucleotide
ucuugugauugaacaugaa

SEQ ID NO: 2630985 - RNA, 19 nt, Artificial Sequence
  Description of Artificial Sequence: Synthetic oligonucleotide
guuugguaaaacugguacu

SEQ ID NO: 2630986 - RNA, 19 nt, Artificial Sequence
  Description of Artificial Sequence: Synthetic oligonucleotide
agaagaaguccugaaugaa

SEQ ID NO: 2630987 - RNA, 19 nt, Artificial Sequence
  Description of Artificial Sequence: Synthetic oligonucleotide
gagcaucacguucuuuuca

SEQ ID NO: 2630988 - RNA, 19 nt, Artificial Sequence
  Description of Artificial Sequence: Synthetic oligonucleotide
aaguccugaaugaaagcuu

SEQ ID NO: 2630989 - RNA, 19 nt, Artificial Sequence
  Description of Artificial Sequence: Synthetic oligonucleotide
ccuuuauuuguuucagaug

SEQ ID NO: 2630990 - RNA, 19 nt, Artificial Sequence
  Description of Artificial Sequence: Synthetic oligonucleotide
cuucaagcucuucgucacg

SEQ ID NO: 2630991 - RNA, 19 nt, Artificial Sequence
  Description of Artificial Sequence: Synthetic oligonucleotide
uucacucuuucuguuuggu

SEQ ID NO: 2630992 - RNA, 19 nt, Artificial Sequence
  Description of Artificial Sequence: Synthetic oligonucleotide
gaacaugaaucuuuucuuu

SEQ ID NO: 2630993 - RNA, 19 nt, Artificial Sequence
  Description of Artificial Sequence: Synthetic oligonucleotide
guucuuucauuccugcaua

SEQ ID NO: 2630994 - RNA, 19 nt, Artificial Sequence
  Description of Artificial Sequence: Synthetic oligonucleotide
ucccgaauccuuucccacu

SEQ ID NO: 2630995 - RNA, 19 nt, Artificial Sequence
  Description of Artificial Sequence: Synthetic oligonucleotide
gcauguggaauuaugguga

SEQ ID NO: 2630996 - RNA, 19 nt, Artificial Sequence
  Description of Artificial Sequence: Synthetic oligonucleotide
cuugugauugaacaugaau

SEQ ID NO: 2630997 - RNA, 19 nt, Artificial Sequence
  Description of Artificial Sequence: Synthetic oligonucleotide
gcuuuaccaacucuuguga

SEQ ID NO: 2630998 - RNA, 19 nt, Artificial Sequence
  Description of Artificial Sequence: Synthetic oligonucleotide
uaacaagaauuugucuuuu

SEQ ID NO: 2630999 - RNA, 19 nt, Artificial Sequence
  Description of Artificial Sequence: Synthetic oligonucleotide
gcuuugcauuuucaauugg

SEQ ID NO: 2631000 - RNA, 19 nt, Artificial Sequence
  Description of Artificial Sequence: Synthetic oligonucleotide
cagcaagagcauaucuuuc

SEQ ID NO: 2631001 - RNA, 19 nt, Artificial Sequence
  Description of Artificial Sequence: Synthetic oligonucleotide
ucacucuuucuguuuggua

SEQ ID NO: 2631002 - RNA, 19 nt, Artificial Sequence
  Description of Artificial Sequence: Synthetic oligonucleotide
uuugucuuuucugcuucaa

SEQ ID NO: 2631003 - RNA, 19 nt, Artificial Sequence
  Description of Artificial Sequence: Synthetic oligonucleotide
ucaagcucuucgucacgcu

SEQ ID NO: 2631004 - RNA, 19 nt, Artificial Sequence
  Description of Artificial Sequence: Synthetic oligonucleotide
guaaaacugguacugcuuu

SEQ ID NO: 2631005 - RNA, 19 nt, Artificial Sequence
  Description of Artificial Sequence: Synthetic oligonucleotide
ugucaaggcuaucccgaau

SEQ ID NO: 2631006 - RNA, 19 nt, Artificial Sequence
  Description of Artificial Sequence: Synthetic oligonucleotide
auuggccuucuuucuuucu

SEQ ID NO: 2631007 - RNA, 19 nt, Artificial Sequence
  Description of Artificial Sequence: Synthetic oligonucleotide
ugaaagcuuuucacucuuu

SEQ ID NO: 2631008 - RNA, 19 nt, Artificial Sequence
  Description of Artificial Sequence: Synthetic oligonucleotide
gcuucaagcucuucgucac

SEQ ID NO: 2631009 - RNA, 19 nt, Artificial Sequence
  Description of Artificial Sequence: Synthetic oligonucleotide
uuauggugaccugguugag

SEQ ID NO: 2631010 - RNA, 19 nt, Artificial Sequence
  Description of Artificial Sequence: Synthetic oligonucleotide
gguacugcuuugcauuuuc

SEQ ID NO: 2631011 - RNA, 19 nt, Artificial Sequence
  Description of Artificial Sequence: Synthetic oligonucleotide
uuucuccaguucagcuuca

SEQ ID NO: 2631012 - RNA, 19 nt, Artificial Sequence
  Description of Artificial Sequence: Synthetic oligonucleotide
guggaauuauggugaccug

SEQ ID NO: 2631013 - RNA, 19 nt, Artificial Sequence
  Description of Artificial Sequence: Synthetic oligonucleotide
uucacuuguuccucccauu

SEQ ID NO: 2631014 - RNA, 19 nt, Artificial Sequence
  Description of Artificial Sequence: Synthetic oligonucleotide
ggcuuuaaguuucuguucu

SEQ ID NO: 2631015 - RNA, 19 nt, Artificial Sequence
  Description of Artificial Sequence: Synthetic oligonucleotide
gaacugaaucugagcauca

SEQ ID NO: 2631016 - RNA, 19 nt, Artificial Sequence
  Description of Artificial Sequence: Synthetic oligonucleotide
gcuaucccgaauccuuucc

SEQ ID NO: 2631017 - RNA, 19 nt, Artificial Sequence
  Description of Artificial Sequence: Synthetic oligonucleotide
cauuccugcauauguguua

SEQ ID NO: 2631018 - RNA, 19 nt, Artificial Sequence
  Description of Artificial Sequence: Synthetic oligonucleotide
gaccugguugagaucuacc

SEQ ID NO: 2631019 - RNA, 19 nt, Artificial Sequence
  Description of Artificial Sequence: Synthetic oligonucleotide
ugcacggagggccgccgcc

SEQ ID NO: 2631020 - RNA, 19 nt, Artificial Sequence
  Description of Artificial Sequence: Synthetic oligonucleotide
cugcuuugcauuuucaauu

SEQ ID NO: 2631021 - RNA, 19 nt, Artificial Sequence
  Description of Artificial Sequence: Synthetic oligonucleotide
cuaccuugcuagguagcag

SEQ ID NO: 2631022 - RNA, 19 nt, Artificial Sequence
  Description of Artificial Sequence: Synthetic oligonucleotide
aagcucuucgucacgcuuu

SEQ ID NO: 2631023 - RNA, 19 nt, Artificial Sequence
  Description of Artificial Sequence: Synthetic oligonucleotide
ucuccuuguuuguuauauu

SEQ ID NO: 2631024 - RNA, 19 nt, Artificial Sequence
  Description of Artificial Sequence: Synthetic oligonucleotide
ugaccugguugagaucuac

SEQ ID NO: 2631025 - RNA, 19 nt, Artificial Sequence
  Description of Artificial Sequence: Synthetic oligonucleotide
auccuuucccacucagcau

SEQ ID NO: 2631026 - RNA, 19 nt, Artificial Sequence
  Description of Artificial Sequence: Synthetic oligonucleotide
guuucacuuguuccuccca

SEQ ID NO: 2631027 - RNA, 19 nt, Artificial Sequence
  Description of Artificial Sequence: Synthetic oligonucleotide
caugaaucuuuucuuugcu

SEQ ID NO: 2631028 - RNA, 19 nt, Artificial Sequence
  Description of Artificial Sequence: Synthetic oligonucleotide
auaacucuacugagaagaa

SEQ ID NO: 2631029 - RNA, 19 nt, Artificial Sequence
  Description of Artificial Sequence: Synthetic oligonucleotide
cugagcaucacguucuuuu

SEQ ID NO: 2631030 - RNA, 19 nt, Artificial Sequence
  Description of Artificial Sequence: Synthetic oligonucleotide
gauugaacaugaaucuuuu

SEQ ID NO: 2631031 - RNA, 19 nt, Artificial Sequence
  Description of Artificial Sequence: Synthetic oligonucleotide
uucuccaguucagcuucag

SEQ ID NO: 2631032 - RNA, 19 nt, Artificial Sequence
  Description of Artificial Sequence: Synthetic oligonucleotide
caacgucgaguuucacuug

SEQ ID NO: 2631033 - RNA, 19 nt, Artificial Sequence
  Description of Artificial Sequence: Synthetic oligonucleotide
ucccacucagcauguggaa

SEQ ID NO: 2631034 - RNA, 19 nt, Artificial Sequence
  Description of Artificial Sequence: Synthetic oligonucleotide
caagagcauaucuuucucu

SEQ ID NO: 2631035 - RNA, 19 nt, Artificial Sequence
  Description of Artificial Sequence: Synthetic oligonucleotide
gcauaucuuucucugcguc

SEQ ID NO: 2631036 - RNA, 19 nt, Artificial Sequence
  Description of Artificial Sequence: Synthetic oligonucleotide
agggccgccgccucucuug

SEQ ID NO: 2631037 - RNA, 19 nt, Artificial Sequence
  Description of Artificial Sequence: Synthetic oligonucleotide
ucugcacggagggccgccg

SEQ ID NO: 2631038 - RNA, 19 nt, Artificial Sequence
  Description of Artificial Sequence: Synthetic oligonucleotide
ccugaaugaaagcuuuuca

SEQ ID NO: 2631039 - RNA, 19 nt, Artificial Sequence
  Description of Artificial Sequence: Synthetic oligonucleotide
gaaucuuuucuuugcuguu

SEQ ID NO: 2631040 - RNA, 19 nt, Artificial Sequence
  Description of Artificial Sequence: Synthetic oligonucleotide
auuuucaauuggccuucuu

SEQ ID NO: 2631041 - RNA, 19 nt, Artificial Sequence
  Description of Artificial Sequence: Synthetic oligonucleotide
cugcuucaagcucuucguc

SEQ ID NO: 2631042 - RNA, 19 nt, Artificial Sequence
  Description of Artificial Sequence: Synthetic oligonucleotide
uaccaacucuugugauuga

SEQ ID NO: 2631043 - RNA, 19 nt, Artificial Sequence
  Description of Artificial Sequence: Synthetic oligonucleotide
gcaagagcauaucuuucuc

SEQ ID NO: 2631044 - RNA, 19 nt, Artificial Sequence
  Description of Artificial Sequence: Synthetic oligonucleotide
uuucuccuuguuuguuaua

SEQ ID NO: 2631045 - RNA, 19 nt, Artificial Sequence
  Description of Artificial Sequence: Synthetic oligonucleotide
ggugaccugguugagaucu

SEQ ID NO: 2631046 - RNA, 19 nt, Artificial Sequence
  Description of Artificial Sequence: Synthetic oligonucleotide
accuugcuagguagcagag

SEQ ID NO: 2631047 - RNA, 19 nt, Artificial Sequence
  Description of Artificial Sequence: Synthetic oligonucleotide
uucuuucuccuuguuuguu

SEQ ID NO: 2631048 - RNA, 19 nt, Artificial Sequence
  Description of Artificial Sequence: Synthetic oligonucleotide
cuucagcaagagcauaucu

SEQ ID NO: 2631049 - RNA, 19 nt, Artificial Sequence
  Description of Artificial Sequence: Synthetic oligonucleotide
accaacucuugugauugaa

SEQ ID NO: 2631050 - RNA, 19 nt, Artificial Sequence
  Description of Artificial Sequence: Synthetic oligonucleotide
cugauuuuacugaauucuu

SEQ ID NO: 2631051 - RNA, 19 nt, Artificial Sequence
  Description of Artificial Sequence: Synthetic oligonucleotide
cagcauguggaauuauggu

SEQ ID NO: 2631052 - RNA, 19 nt, Artificial Sequence
  Description of Artificial Sequence: Synthetic oligonucleotide
cuguuugguaaaacuggua

SEQ ID NO: 2631053 - RNA, 19 nt, Artificial Sequence
  Description of Artificial Sequence: Synthetic oligonucleotide
ccuuguuuguuauauuucu

SEQ ID NO: 2631054 - RNA, 19 nt, Artificial Sequence
  Description of Artificial Sequence: Synthetic oligonucleotide
ccugucaaggcuaucccga

SEQ ID NO: 2631055 - RNA, 19 nt, Artificial Sequence
  Description of Artificial Sequence: Synthetic oligonucleotide
uaucuuucucugcgucguu

SEQ ID NO: 2631056 - RNA, 19 nt, Artificial Sequence
  Description of Artificial Sequence: Synthetic oligonucleotide
gagaucuaccuugcuaggu

SEQ ID NO: 2631057 - RNA, 19 nt, Artificial Sequence
  Description of Artificial Sequence: Synthetic oligonucleotide
cucuuuauguuccuuuauu

SEQ ID NO: 2631058 - RNA, 19 nt, Artificial Sequence
  Description of Artificial Sequence: Synthetic oligonucleotide
gaucuucagcaagagcaua

SEQ ID NO: 2631059 - RNA, 19 nt, Artificial Sequence
  Description of Artificial Sequence: Synthetic oligonucleotide
cuuucuccuuguuuguuau

SEQ ID NO: 2631060 - RNA, 19 nt, Artificial Sequence
  Description of Artificial Sequence: Synthetic oligonucleotide
cuuguuuguuauauuucuu

SEQ ID NO: 2631061 - RNA, 19 nt, Artificial Sequence
  Description of Artificial Sequence: Synthetic oligonucleotide
gcauuuucaauuggccuuc

SEQ ID NO: 2631062 - RNA, 19 nt, Artificial Sequence
  Description of Artificial Sequence: Synthetic oligonucleotide
agcucuucgucacgcuuuu

SEQ ID NO: 2631063 - RNA, 19 nt, Artificial Sequence
  Description of Artificial Sequence: Synthetic oligonucleotide
cucucuugucaaccuguca

SEQ ID NO: 2631064 - RNA, 19 nt, Artificial Sequence
  Description of Artificial Sequence: Synthetic oligonucleotide
uucugcacggagggccgcc

SEQ ID NO: 2631065 - RNA, 19 nt, Artificial Sequence
  Description of Artificial Sequence: Synthetic oligonucleotide
cugagaagaaguccugaau

SEQ ID NO: 2631066 - RNA, 19 nt, Artificial Sequence
  Description of Artificial Sequence: Synthetic oligonucleotide
aucuuucucugcgucguuu

SEQ ID NO: 2631067 - RNA, 19 nt, Artificial Sequence
  Description of Artificial Sequence: Synthetic oligonucleotide
gugcuuuaccaacucuugu

SEQ ID NO: 2631068 - RNA, 19 nt, Artificial Sequence
  Description of Artificial Sequence: Synthetic oligonucleotide
uuucaacgucgaguuucac

SEQ ID NO: 2631069 - RNA, 19 nt, Artificial Sequence
  Description of Artificial Sequence: Synthetic oligonucleotide
cuuuaccaacucuugugau

SEQ ID NO: 2631070 - RNA, 19 nt, Artificial Sequence
  Description of Artificial Sequence: Synthetic oligonucleotide
uuucugcacggagggccgc

SEQ ID NO: 2631071 - RNA, 19 nt, Artificial Sequence
  Description of Artificial Sequence: Synthetic oligonucleotide
cagugcuuuaccaacucuu

SEQ ID NO: 2631072 - RNA, 19 nt, Artificial Sequence
  Description of Artificial Sequence: Synthetic oligonucleotide
ggaauuauggugaccuggu

SEQ ID NO: 2631073 - RNA, 19 nt, Artificial Sequence
  Description of Artificial Sequence: Synthetic oligonucleotide
gaauuauggugaccugguu

SEQ ID NO: 2631074 - RNA, 19 nt, Artificial Sequence
  Description of Artificial Sequence: Synthetic oligonucleotide
uggugaccugguugagauc

SEQ ID NO: 2631075 - RNA, 19 nt, Artificial Sequence
  Description of Artificial Sequence: Synthetic oligonucleotide
guacugcuuugcauuuuca

SEQ ID NO: 2631076 - RNA, 19 nt, Artificial Sequence
  Description of Artificial Sequence: Synthetic oligonucleotide
cugucaaggcuaucccgaa

SEQ ID NO: 2631077 - RNA, 19 nt, Artificial Sequence
  Description of Artificial Sequence: Synthetic oligonucleotide
ucugagcaucacguucuuu

SEQ ID NO: 2631078 - RNA, 19 nt, Artificial Sequence
  Description of Artificial Sequence: Synthetic oligonucleotide
ucaaccugucaaggcuauc

SEQ ID NO: 2631079 - RNA, 19 nt, Artificial Sequence
  Description of Artificial Sequence: Synthetic oligonucleotide
caauuggccuucuuucuuu

SEQ ID NO: 2631080 - RNA, 19 nt, Artificial Sequence
  Description of Artificial Sequence: Synthetic oligonucleotide
ggcuaucccgaauccuuuc

SEQ ID NO: 2631081 - RNA, 19 nt, Artificial Sequence
  Description of Artificial Sequence: Synthetic oligonucleotide
ccuugcuagguagcagagg

SEQ ID NO: 2631082 - RNA, 19 nt, Artificial Sequence
  Description of Artificial Sequence: Synthetic oligonucleotide
cccgaauccuuucccacuc

SEQ ID NO: 2631083 - RNA, 19 nt, Artificial Sequence
  Description of Artificial Sequence: Synthetic oligonucleotide
guguuaguccagugcuuua

SEQ ID NO: 2631084 - RNA, 19 nt, Artificial Sequence
  Description of Artificial Sequence: Synthetic oligonucleotide
cuuucccacucagcaugug

SEQ ID NO: 2631085 - RNA, 19 nt, Artificial Sequence
  Description of Artificial Sequence: Synthetic oligonucleotide
cgaauccuuucccacucag

SEQ ID NO: 2631086 - RNA, 19 nt, Artificial Sequence
  Description of Artificial Sequence: Synthetic oligonucleotide
gccgccucucuugucaacc

SEQ ID NO: 2631087 - RNA, 19 nt, Artificial Sequence
  Description of Artificial Sequence: Synthetic oligonucleotide
ugguacugcuuugcauuuu

SEQ ID NO: 2631088 - RNA, 19 nt, Artificial Sequence
  Description of Artificial Sequence: Synthetic oligonucleotide
gugauugaacaugaaucuu

SEQ ID NO: 2631089 - RNA, 19 nt, Artificial Sequence
  Description of Artificial Sequence: Synthetic oligonucleotide
cguucuuuucauaacucua

SEQ ID NO: 2631090 - RNA, 19 nt, Artificial Sequence
  Description of Artificial Sequence: Synthetic oligonucleotide
acucagcauguggaauuau

SEQ ID NO: 2631091 - RNA, 19 nt, Artificial Sequence
  Description of Artificial Sequence: Synthetic oligonucleotide
cugcacggagggccgccgc

SEQ ID NO: 2631092 - RNA, 19 nt, Artificial Sequence
  Description of Artificial Sequence: Synthetic oligonucleotide
gguaaaacugguacugcuu

SEQ ID NO: 2631093 - RNA, 19 nt, Artificial Sequence
  Description of Artificial Sequence: Synthetic oligonucleotide
ccucucuugucaaccuguc

SEQ ID NO: 2631094 - RNA, 19 nt, Artificial Sequence
  Description of Artificial Sequence: Synthetic oligonucleotide
gccgccgccucucuuguca

SEQ ID NO: 2631095 - RNA, 19 nt, Artificial Sequence
  Description of Artificial Sequence: Synthetic oligonucleotide
aggcuaucccgaauccuuu

SEQ ID NO: 2631096 - RNA, 19 nt, Artificial Sequence
  Description of Artificial Sequence: Synthetic oligonucleotide
cgucgaguuucacuuguuc

SEQ ID NO: 2631097 - RNA, 19 nt, Artificial Sequence
  Description of Artificial Sequence: Synthetic oligonucleotide
agcuucagcuucagcuuuu

SEQ ID NO: 2631098 - RNA, 19 nt, Artificial Sequence
  Description of Artificial Sequence: Synthetic oligonucleotide
gcauauguguuaguccagu

SEQ ID NO: 2631099 - RNA, 19 nt, Artificial Sequence
  Description of Artificial Sequence: Synthetic oligonucleotide
acggagggccgccgccucu

SEQ ID NO: 2631100 - RNA, 19 nt, Artificial Sequence
  Description of Artificial Sequence: Synthetic oligonucleotide
guccagugcuuuaccaacu

SEQ ID NO: 2631101 - RNA, 19 nt, Artificial Sequence
  Description of Artificial Sequence: Synthetic oligonucleotide
cacucagcauguggaauua

SEQ ID NO: 2631102 - RNA, 19 nt, Artificial Sequence
  Description of Artificial Sequence: Synthetic oligonucleotide
caaggcuaucccgaauccu

SEQ ID NO: 2631103 - RNA, 19 nt, Artificial Sequence
  Description of Artificial Sequence: Synthetic oligonucleotide
cugguacugcuuugcauuu

SEQ ID NO: 2631104 - RNA, 19 nt, Artificial Sequence
  Description of Artificial Sequence: Synthetic oligonucleotide
caagcucuucgucacgcuu

SEQ ID NO: 2631105 - RNA, 19 nt, Artificial Sequence
  Description of Artificial Sequence: Synthetic oligonucleotide
cgaguuucacuuguuccuc

SEQ ID NO: 2631106 - RNA, 19 nt, Artificial Sequence
  Description of Artificial Sequence: Synthetic oligonucleotide
gguugagaucuaccuugcu

SEQ ID NO: 2631107 - RNA, 19 nt, Artificial Sequence
  Description of Artificial Sequence: Synthetic oligonucleotide
gcaucacguucuuuucaua

SEQ ID NO: 2631108 - RNA, 19 nt, Artificial Sequence
  Description of Artificial Sequence: Synthetic oligonucleotide
gucaaccugucaaggcuau

SEQ ID NO: 2631109 - RNA, 19 nt, Artificial Sequence
  Description of Artificial Sequence: Synthetic oligonucleotide
acgucgaguuucacuuguu

SEQ ID NO: 2631110 - RNA, 19 nt, Artificial Sequence
  Description of Artificial Sequence: Synthetic oligonucleotide
cacuuguuccucccauuuu

SEQ ID NO: 2631111 - RNA, 19 nt, Artificial Sequence
  Description of Artificial Sequence: Synthetic oligonucleotide
gcuguucuuucugcacgga

SEQ ID NO: 2631112 - RNA, 19 nt, Artificial Sequence
  Description of Artificial Sequence: Synthetic oligonucleotide
cauuuucaauuggccuucu

SEQ ID NO: 2631113 - RNA, 19 nt, Artificial Sequence
  Description of Artificial Sequence: Synthetic oligonucleotide
gccucucuugucaaccugu

SEQ ID NO: 2631114 - RNA, 19 nt, Artificial Sequence
  Description of Artificial Sequence: Synthetic oligonucleotide
ccacucagcauguggaauu

SEQ ID NO: 2631115 - RNA, 19 nt, Artificial Sequence
  Description of Artificial Sequence: Synthetic oligonucleotide
ccugguugagaucuaccuu

SEQ ID NO: 2631116 - RNA, 19 nt, Artificial Sequence
  Description of Artificial Sequence: Synthetic oligonucleotide
cgccucucuugucaaccug

SEQ ID NO: 2631117 - RNA, 19 nt, Artificial Sequence
  Description of Artificial Sequence: Synthetic oligonucleotide
ccagugcuuuaccaacucu

SEQ ID NO: 2631118 - RNA, 19 nt, Artificial Sequence
  Description of Artificial Sequence: Synthetic oligonucleotide
ccucuuuauguuccuuuau

SEQ ID NO: 2631119 - RNA, 19 nt, Artificial Sequence
  Description of Artificial Sequence: Synthetic oligonucleotide
gugaccugguugagaucua

SEQ ID NO: 2631120 - RNA, 19 nt, Artificial Sequence
  Description of Artificial Sequence: Synthetic oligonucleotide
ccgaauccuuucccacuca

SEQ ID NO: 2631121 - RNA, 19 nt, Artificial Sequence
  Description of Artificial Sequence: Synthetic oligonucleotide
ccuuucccacucagcaugu

SEQ ID NO: 2631122 - RNA, 19 nt, Artificial Sequence
  Description of Artificial Sequence: Synthetic oligonucleotide
gcuuucagcucugcuuguu

SEQ ID NO: 2631123 - RNA, 19 nt, Artificial Sequence
  Description of Artificial Sequence: Synthetic oligonucleotide
gagggccgccgccucucuu

SEQ ID NO: 2631124 - RNA, 19 nt, Artificial Sequence
  Description of Artificial Sequence: Synthetic oligonucleotide
cccacucagcauguggaau

SEQ ID NO: 2631125 - RNA, 19 nt, Artificial Sequence
  Description of Artificial Sequence: Synthetic oligonucleotide
ccgccucucuugucaaccu

SEQ ID NO: 2631126 - RNA, 19 nt, Artificial Sequence
  Description of Artificial Sequence: Synthetic oligonucleotide
gggccgccgccucucuugu

SEQ ID NO: 2631127 - RNA, 19 nt, Artificial Sequence
  Description of Artificial Sequence: Synthetic oligonucleotide
ggccgccgccucucuuguc

SEQ ID NO: 2631128 - RNA, 19 nt, Artificial Sequence
  Description of Artificial Sequence: Synthetic oligonucleotide
cgccgccucucuugucaac

SEQ ID NO: 2631129 - RNA, 19 nt, Artificial Sequence
  Description of Artificial Sequence: Synthetic oligonucleotide
ggagggccgccgccucucu

SEQ ID NO: 2631130 - RNA, 19 nt, Artificial Sequence
  Description of Artificial Sequence: Synthetic oligonucleotide
ccgccgccucucuugucaa

SEQ ID NO: 2631131 - RNA, 19 nt, Artificial Sequence
  Description of Artificial Sequence: Synthetic oligonucleotide
cggagggccgccgccucuc

SEQ ID NO: 2631132 - RNA, 19 nt, Artificial Sequence
  Description of Artificial Sequence: Synthetic oligonucleotide
ucuuuacuaagacagauug

SEQ ID NO: 2631133 - RNA, 19 nt, Artificial Sequence
  Description of Artificial Sequence: Synthetic oligonucleotide
agaaucuuaagacagagca

SEQ ID NO: 2631134 - RNA, 19 nt, Artificial Sequence
  Description of Artificial Sequence: Synthetic oligonucleotide
acuaguauuaaaugggaac

SEQ ID NO: 2631135 - RNA, 19 nt, Artificial Sequence
  Description of Artificial Sequence: Synthetic oligonucleotide
ucuuaaagaaucuuaagac

SEQ ID NO: 2631136 - RNA, 19 nt, Artificial Sequence
  Description of Artificial Sequence: Synthetic oligonucleotide
uucuuaaagaaucuuaaga

SEQ ID NO: 2631137 - RNA, 19 nt, Artificial Sequence
  Description of Artificial Sequence: Synthetic oligonucleotide
auuauaucucuccacacac

SEQ ID NO: 2631138 - RNA, 19 nt, Artificial Sequence
  Description of Artificial Sequence: Synthetic oligonucleotide
aaugggaacuaacuggcac

SEQ ID NO: 2631139 - RNA, 19 nt, Artificial Sequence
  Description of Artificial Sequence: Synthetic oligonucleotide
cuaagaguaaccauuacug

SEQ ID NO: 2631140 - RNA, 19 nt, Artificial Sequence
  Description of Artificial Sequence: Synthetic oligonucleotide
cagaauauaguucuuaaag

SEQ ID NO: 2631141 - RNA, 19 nt, Artificial Sequence
  Description of Artificial Sequence: Synthetic oligonucleotide
auuaaaugggaacuaacug

SEQ ID NO: 2631142 - RNA, 19 nt, Artificial Sequence
  Description of Artificial Sequence: Synthetic oligonucleotide
uuuacuaagacagauugcu

SEQ ID NO: 2631143 - RNA, 19 nt, Artificial Sequence
  Description of Artificial Sequence: Synthetic oligonucleotide
uaaaugggaacuaacuggc

SEQ ID NO: 2631144 - RNA, 19 nt, Artificial Sequence
  Description of Artificial Sequence: Synthetic oligonucleotide
aaucuuaagacagagcacu

SEQ ID NO: 2631145 - RNA, 19 nt, Artificial Sequence
  Description of Artificial Sequence: Synthetic oligonucleotide
agggcuuugacuuugauau

SEQ ID NO: 2631146 - RNA, 19 nt, Artificial Sequence
  Description of Artificial Sequence: Synthetic oligonucleotide
uugauauuucguaugacac

SEQ ID NO: 2631147 - RNA, 19 nt, Artificial Sequence
  Description of Artificial Sequence: Synthetic oligonucleotide
cuuaguuucaauucaucag

SEQ ID NO: 2631148 - RNA, 19 nt, Artificial Sequence
  Description of Artificial Sequence: Synthetic oligonucleotide
caaaccucaauuuaaugag

SEQ ID NO: 2631149 - RNA, 19 nt, Artificial Sequence
  Description of Artificial Sequence: Synthetic oligonucleotide
aaaggcuucggacuugauc

SEQ ID NO: 2631150 - RNA, 19 nt, Artificial Sequence
  Description of Artificial Sequence: Synthetic oligonucleotide
acugaaucuuuacuaagac

SEQ ID NO: 2631151 - RNA, 19 nt, Artificial Sequence
  Description of Artificial Sequence: Synthetic oligonucleotide
uacuaagacagauugcugc

SEQ ID NO: 2631152 - RNA, 19 nt, Artificial Sequence
  Description of Artificial Sequence: Synthetic oligonucleotide
ucuucaaggggaauggacc

SEQ ID NO: 2631153 - RNA, 19 nt, Artificial Sequence
  Description of Artificial Sequence: Synthetic oligonucleotide
uguuguuuguuuaccacag

SEQ ID NO: 2631154 - RNA, 19 nt, Artificial Sequence
  Description of Artificial Sequence: Synthetic oligonucleotide
agaauauaguucuuaaaga

SEQ ID NO: 2631155 - RNA, 19 nt, Artificial Sequence
  Description of Artificial Sequence: Synthetic oligonucleotide
auuacugaagcccagcaca

SEQ ID NO: 2631156 - RNA, 19 nt, Artificial Sequence
  Description of Artificial Sequence: Synthetic oligonucleotide
ucuuaguuucaauucauca

SEQ ID NO: 2631157 - RNA, 19 nt, Artificial Sequence
  Description of Artificial Sequence: Synthetic oligonucleotide
acagauugcugccagacag

SEQ ID NO: 2631158 - RNA, 19 nt, Artificial Sequence
  Description of Artificial Sequence: Synthetic oligonucleotide
gaauauaguucuuaaagaa

SEQ ID NO: 2631159 - RNA, 19 nt, Artificial Sequence
  Description of Artificial Sequence: Synthetic oligonucleotide
aacuaacuggcacaaaccu

SEQ ID NO: 2631160 - RNA, 19 nt, Artificial Sequence
  Description of Artificial Sequence: Synthetic oligonucleotide
aagaguaaccauuacugaa

SEQ ID NO: 2631161 - RNA, 19 nt, Artificial Sequence
  Description of Artificial Sequence: Synthetic oligonucleotide
cucaauuuaaugagugggg

SEQ ID NO: 2631162 - RNA, 19 nt, Artificial Sequence
  Description of Artificial Sequence: Synthetic oligonucleotide
guaaccauuacugaagccc

SEQ ID NO: 2631163 - RNA, 19 nt, Artificial Sequence
  Description of Artificial Sequence: Synthetic oligonucleotide
aaugaguggggcuaggcau

SEQ ID NO: 2631164 - RNA, 19 nt, Artificial Sequence
  Description of Artificial Sequence: Synthetic oligonucleotide
uuugacauucacuagccuc

SEQ ID NO: 2631165 - RNA, 19 nt, Artificial Sequence
  Description of Artificial Sequence: Synthetic oligonucleotide
uuaagcucauacaaaggcu

SEQ ID NO: 2631166 - RNA, 19 nt, Artificial Sequence
  Description of Artificial Sequence: Synthetic oligonucleotide
cuuuugacauucacuagcc

SEQ ID NO: 2631167 - RNA, 19 nt, Artificial Sequence
  Description of Artificial Sequence: Synthetic oligonucleotide
cuugcugacauccagccac

SEQ ID NO: 2631168 - RNA, 19 nt, Artificial Sequence
  Description of Artificial Sequence: Synthetic oligonucleotide
uugacuuugauauuucgua

SEQ ID NO: 2631169 - RNA, 19 nt, Artificial Sequence
  Description of Artificial Sequence: Synthetic oligonucleotide
gggaaaaugcaccuuaggg

SEQ ID NO: 2631170 - RNA, 19 nt, Artificial Sequence
  Description of Artificial Sequence: Synthetic oligonucleotide
cuuaaagaaucuuaagaca

SEQ ID NO: 2631171 - RNA, 19 nt, Artificial Sequence
  Description of Artificial Sequence: Synthetic oligonucleotide
ucauacaaaggcuucggac

SEQ ID NO: 2631172 - RNA, 19 nt, Artificial Sequence
  Description of Artificial Sequence: Synthetic oligonucleotide
ggaaaaugcaccuuagggc

SEQ ID NO: 2631173 - RNA, 19 nt, Artificial Sequence
  Description of Artificial Sequence: Synthetic oligonucleotide
cuaggcauuauaucucucc

SEQ ID NO: 2631174 - RNA, 19 nt, Artificial Sequence
  Description of Artificial Sequence: Synthetic oligonucleotide
aguaaccauuacugaagcc

SEQ ID NO: 2631175 - RNA, 19 nt, Artificial Sequence
  Description of Artificial Sequence: Synthetic oligonucleotide
gaaaaugcaccuuagggcu

SEQ ID NO: 2631176 - RNA, 19 nt, Artificial Sequence
  Description of Artificial Sequence: Synthetic oligonucleotide
ucggacuugaucuccuugg

SEQ ID NO: 2631177 - RNA, 19 nt, Artificial Sequence
  Description of Artificial Sequence: Synthetic oligonucleotide
uacacgguuccaaacaaga

SEQ ID NO: 2631178 - RNA, 19 nt, Artificial Sequence
  Description of Artificial Sequence: Synthetic oligonucleotide
uaaagaaucuuaagacaga

SEQ ID NO: 2631179 - RNA, 19 nt, Artificial Sequence
  Description of Artificial Sequence: Synthetic oligonucleotide
aguuuacagacgcaucagg

SEQ ID NO: 2631180 - RNA, 19 nt, Artificial Sequence
  Description of Artificial Sequence: Synthetic oligonucleotide
uaagacagauugcugccag

SEQ ID NO: 2631181 - RNA, 19 nt, Artificial Sequence
  Description of Artificial Sequence: Synthetic oligonucleotide
uaaccauuacugaagccca

SEQ ID NO: 2631182 - RNA, 19 nt, Artificial Sequence
  Description of Artificial Sequence: Synthetic oligonucleotide
acaugaauucuguuguuug

SEQ ID NO: 2631183 - RNA, 19 nt, Artificial Sequence
  Description of Artificial Sequence: Synthetic oligonucleotide
uaagaguaaccauuacuga

SEQ ID NO: 2631184 - RNA, 19 nt, Artificial Sequence
  Description of Artificial Sequence: Synthetic oligonucleotide
uguuggcuugcauacauga

SEQ ID NO: 2631185 - RNA, 19 nt, Artificial Sequence
  Description of Artificial Sequence: Synthetic oligonucleotide
cacacuaggacacagcauc

SEQ ID NO: 2631186 - RNA, 19 nt, Artificial Sequence
  Description of Artificial Sequence: Synthetic oligonucleotide
uuagguaagagcucccuuc

SEQ ID NO: 2631187 - RNA, 19 nt, Artificial Sequence
  Description of Artificial Sequence: Synthetic oligonucleotide
aguuacacgguuccaaaca

SEQ ID NO: 2631188 - RNA, 19 nt, Artificial Sequence
  Description of Artificial Sequence: Synthetic oligonucleotide
agcgagauggagcugcuuc

SEQ ID NO: 2631189 - RNA, 19 nt, Artificial Sequence
  Description of Artificial Sequence: Synthetic oligonucleotide
ugauauuucguaugacacu

SEQ ID NO: 2631190 - RNA, 19 nt, Artificial Sequence
  Description of Artificial Sequence: Synthetic oligonucleotide
uauuucguaugacacuaac

SEQ ID NO: 2631191 - RNA, 19 nt, Artificial Sequence
  Description of Artificial Sequence: Synthetic oligonucleotide
ugacugaaucuuuacuaag

SEQ ID NO: 2631192 - RNA, 19 nt, Artificial Sequence
  Description of Artificial Sequence: Synthetic oligonucleotide
uguaugcuggguguguugg

SEQ ID NO: 2631193 - RNA, 19 nt, Artificial Sequence
  Description of Artificial Sequence: Synthetic oligonucleotide
ugggaaaaugcaccuuagg

SEQ ID NO: 2631194 - RNA, 19 nt, Artificial Sequence
  Description of Artificial Sequence: Synthetic oligonucleotide
aagacagagcacuaguauu

SEQ ID NO: 2631195 - RNA, 19 nt, Artificial Sequence
  Description of Artificial Sequence: Synthetic oligonucleotide
cacgguuccaaacaagagc

SEQ ID NO: 2631196 - RNA, 19 nt, Artificial Sequence
  Description of Artificial Sequence: Synthetic oligonucleotide
acugauuccucccggguag

SEQ ID NO: 2631197 - RNA, 19 nt, Artificial Sequence
  Description of Artificial Sequence: Synthetic oligonucleotide
cuuuacuaagacagauugc

SEQ ID NO: 2631198 - RNA, 19 nt, Artificial Sequence
  Description of Artificial Sequence: Synthetic oligonucleotide
gaguaaccauuacugaagc

SEQ ID NO: 2631199 - RNA, 19 nt, Artificial Sequence
  Description of Artificial Sequence: Synthetic oligonucleotide
agaguaaccauuacugaag

SEQ ID NO: 2631200 - RNA, 19 nt, Artificial Sequence
  Description of Artificial Sequence: Synthetic oligonucleotide
accucaauuuaaugagugg

SEQ ID NO: 2631201 - RNA, 19 nt, Artificial Sequence
  Description of Artificial Sequence: Synthetic oligonucleotide
uucguaugacacuaacccc

SEQ ID NO: 2631202 - RNA, 19 nt, Artificial Sequence
  Description of Artificial Sequence: Synthetic oligonucleotide
aaccucaauuuaaugagug

SEQ ID NO: 2631203 - RNA, 19 nt, Artificial Sequence
  Description of Artificial Sequence: Synthetic oligonucleotide
uaggcauuauaucucucca

SEQ ID NO: 2631204 - RNA, 19 nt, Artificial Sequence
  Description of Artificial Sequence: Synthetic oligonucleotide
uaaugaguggggcuaggca

SEQ ID NO: 2631205 - RNA, 19 nt, Artificial Sequence
  Description of Artificial Sequence: Synthetic oligonucleotide
uuacuaagacagauugcug

SEQ ID NO: 2631206 - RNA, 19 nt, Artificial Sequence
  Description of Artificial Sequence: Synthetic oligonucleotide
guuuaccacagccacacac

SEQ ID NO: 2631207 - RNA, 19 nt, Artificial Sequence
  Description of Artificial Sequence: Synthetic oligonucleotide
uuguuuaccacagccacac

SEQ ID NO: 2631208 - RNA, 19 nt, Artificial Sequence
  Description of Artificial Sequence: Synthetic oligonucleotide
ucugggaaaaugcaccuua

SEQ ID NO: 2631209 - RNA, 19 nt, Artificial Sequence
  Description of Artificial Sequence: Synthetic oligonucleotide
uacagacgcaucaggcugg

SEQ ID NO: 2631210 - RNA, 19 nt, Artificial Sequence
  Description of Artificial Sequence: Synthetic oligonucleotide
aggcuggaggaacugauuc

SEQ ID NO: 2631211 - RNA, 19 nt, Artificial Sequence
  Description of Artificial Sequence: Synthetic oligonucleotide
guaagagcucccuucuggg

SEQ ID NO: 2631212 - RNA, 19 nt, Artificial Sequence
  Description of Artificial Sequence: Synthetic oligonucleotide
aggacaaccuuguaugcug

SEQ ID NO: 2631213 - RNA, 19 nt, Artificial Sequence
  Description of Artificial Sequence: Synthetic oligonucleotide
uuaagacagagcacuagua

SEQ ID NO: 2631214 - RNA, 19 nt, Artificial Sequence
  Description of Artificial Sequence: Synthetic oligonucleotide
ucagaauauaguucuuaaa

SEQ ID NO: 2631215 - RNA, 19 nt, Artificial Sequence
  Description of Artificial Sequence: Synthetic oligonucleotide
cauucacuagccuccacag

SEQ ID NO: 2631216 - RNA, 19 nt, Artificial Sequence
  Description of Artificial Sequence: Synthetic oligonucleotide
aaaccaccuaagaguaacc

SEQ ID NO: 2631217 - RNA, 19 nt, Artificial Sequence
  Description of Artificial Sequence: Synthetic oligonucleotide
gauauuucguaugacacua

SEQ ID NO: 2631218 - RNA, 19 nt, Artificial Sequence
  Description of Artificial Sequence: Synthetic oligonucleotide
ucuuaagacagagcacuag

SEQ ID NO: 2631219 - RNA, 19 nt, Artificial Sequence
  Description of Artificial Sequence: Synthetic oligonucleotide
gcauacaugaauucuguug

SEQ ID NO: 2631220 - RNA, 19 nt, Artificial Sequence
  Description of Artificial Sequence: Synthetic oligonucleotide
agacagauugcugccagac

SEQ ID NO: 2631221 - RNA, 19 nt, Artificial Sequence
  Description of Artificial Sequence: Synthetic oligonucleotide
aaccuuguaugcugggugu

SEQ ID NO: 2631222 - RNA, 19 nt, Artificial Sequence
  Description of Artificial Sequence: Synthetic oligonucleotide
gaacuaacuggcacaaacc

SEQ ID NO: 2631223 - RNA, 19 nt, Artificial Sequence
  Description of Artificial Sequence: Synthetic oligonucleotide
cacgugaugcgcuuggggc

SEQ ID NO: 2631224 - RNA, 19 nt, Artificial Sequence
  Description of Artificial Sequence: Synthetic oligonucleotide
uuauaucucuccacacaca

SEQ ID NO: 2631225 - RNA, 19 nt, Artificial Sequence
  Description of Artificial Sequence: Synthetic oligonucleotide
ggaacuaacuggcacaaac

SEQ ID NO: 2631226 - RNA, 19 nt, Artificial Sequence
  Description of Artificial Sequence: Synthetic oligonucleotide
guuuacagacgcaucaggc

SEQ ID NO: 2631227 - RNA, 19 nt, Artificial Sequence
  Description of Artificial Sequence: Synthetic oligonucleotide
gaggaacugauuccucccg

SEQ ID NO: 2631228 - RNA, 19 nt, Artificial Sequence
  Description of Artificial Sequence: Synthetic oligonucleotide
gaagcccaagcuucuaagc

SEQ ID NO: 2631229 - RNA, 19 nt, Artificial Sequence
  Description of Artificial Sequence: Synthetic oligonucleotide
uuacacgguuccaaacaag

SEQ ID NO: 2631230 - RNA, 19 nt, Artificial Sequence
  Description of Artificial Sequence: Synthetic oligonucleotide
agaagcccaagcuucuaag

SEQ ID NO: 2631231 - RNA, 19 nt, Artificial Sequence
  Description of Artificial Sequence: Synthetic oligonucleotide
uccucuucaaggggaaugg

SEQ ID NO: 2631232 - RNA, 19 nt, Artificial Sequence
  Description of Artificial Sequence: Synthetic oligonucleotide
caucaguuagguaagagcu

SEQ ID NO: 2631233 - RNA, 19 nt, Artificial Sequence
  Description of Artificial Sequence: Synthetic oligonucleotide
uucaacaguuacacgguuc

SEQ ID NO: 2631234 - RNA, 19 nt, Artificial Sequence
  Description of Artificial Sequence: Synthetic oligonucleotide
uaguuucaauucaucagaa

SEQ ID NO: 2631235 - RNA, 19 nt, Artificial Sequence
  Description of Artificial Sequence: Synthetic oligonucleotide
ugacuuugauauuucguau

SEQ ID NO: 2631236 - RNA, 19 nt, Artificial Sequence
  Description of Artificial Sequence: Synthetic oligonucleotide
ugcgcuuggggcaggaucu

SEQ ID NO: 2631237 - RNA, 19 nt, Artificial Sequence
  Description of Artificial Sequence: Synthetic oligonucleotide
uuacugaagcccagcacac

SEQ ID NO: 2631238 - RNA, 19 nt, Artificial Sequence
  Description of Artificial Sequence: Synthetic oligonucleotide
uuaccacagccacacacac

SEQ ID NO: 2631239 - RNA, 19 nt, Artificial Sequence
  Description of Artificial Sequence: Synthetic oligonucleotide
ccuuuugacauucacuagc

SEQ ID NO: 2631240 - RNA, 19 nt, Artificial Sequence
  Description of Artificial Sequence: Synthetic oligonucleotide
cauacaugaauucuguugu

SEQ ID NO: 2631241 - RNA, 19 nt, Artificial Sequence
  Description of Artificial Sequence: Synthetic oligonucleotide
uuccaaacaagagcagaag

SEQ ID NO: 2631242 - RNA, 19 nt, Artificial Sequence
  Description of Artificial Sequence: Synthetic oligonucleotide
aacaguuacacgguuccaa

SEQ ID NO: 2631243 - RNA, 19 nt, Artificial Sequence
  Description of Artificial Sequence: Synthetic oligonucleotide
aggaacugauuccucccgg

SEQ ID NO: 2631244 - RNA, 19 nt, Artificial Sequence
  Description of Artificial Sequence: Synthetic oligonucleotide
augggaacuaacuggcaca

SEQ ID NO: 2631245 - RNA, 19 nt, Artificial Sequence
  Description of Artificial Sequence: Synthetic oligonucleotide
aagcuucuaagcauuaaaa

SEQ ID NO: 2631246 - RNA, 19 nt, Artificial Sequence
  Description of Artificial Sequence: Synthetic oligonucleotide
aggggaauggacccggaug

SEQ ID NO: 2631247 - RNA, 19 nt, Artificial Sequence
  Description of Artificial Sequence: Synthetic oligonucleotide
accuaagaguaaccauuac

SEQ ID NO: 2631248 - RNA, 19 nt, Artificial Sequence
  Description of Artificial Sequence: Synthetic oligonucleotide
ccucaauuuaaugaguggg

SEQ ID NO: 2631249 - RNA, 19 nt, Artificial Sequence
  Description of Artificial Sequence: Synthetic oligonucleotide
gaaucuuaagacagagcac

SEQ ID NO: 2631250 - RNA, 19 nt, Artificial Sequence
  Description of Artificial Sequence: Synthetic oligonucleotide
aaacaagagcagaagccca

SEQ ID NO: 2631251 - RNA, 19 nt, Artificial Sequence
  Description of Artificial Sequence: Synthetic oligonucleotide
uuaaugaguggggcuaggc

SEQ ID NO: 2631252 - RNA, 19 nt, Artificial Sequence
  Description of Artificial Sequence: Synthetic oligonucleotide
uuuugacauucacuagccu

SEQ ID NO: 2631253 - RNA, 19 nt, Artificial Sequence
  Description of Artificial Sequence: Synthetic oligonucleotide
gacgcaucaggcuggagga

SEQ ID NO: 2631254 - RNA, 19 nt, Artificial Sequence
  Description of Artificial Sequence: Synthetic oligonucleotide
cauacaaaggcuucggacu

SEQ ID NO: 2631255 - RNA, 19 nt, Artificial Sequence
  Description of Artificial Sequence: Synthetic oligonucleotide
aguauuaaaugggaacuaa

SEQ ID NO: 2631256 - RNA, 19 nt, Artificial Sequence
  Description of Artificial Sequence: Synthetic oligonucleotide
uuuaaugaguggggcuagg

SEQ ID NO: 2631257 - RNA, 19 nt, Artificial Sequence
  Description of Artificial Sequence: Synthetic oligonucleotide
acuaacuggcacaaaccuc

SEQ ID NO: 2631258 - RNA, 19 nt, Artificial Sequence
  Description of Artificial Sequence: Synthetic oligonucleotide
aagcucauacaaaggcuuc

SEQ ID NO: 2631259 - RNA, 19 nt, Artificial Sequence
  Description of Artificial Sequence: Synthetic oligonucleotide
ugcaccuuagggcuuugac

SEQ ID NO: 2631260 - RNA, 19 nt, Artificial Sequence
  Description of Artificial Sequence: Synthetic oligonucleotide
caaccuuguaugcugggug

SEQ ID NO: 2631261 - RNA, 19 nt, Artificial Sequence
  Description of Artificial Sequence: Synthetic oligonucleotide
gacaggaguuuuaucuuag

SEQ ID NO: 2631262 - RNA, 19 nt, Artificial Sequence
  Description of Artificial Sequence: Synthetic oligonucleotide
caaggacaaccuuguaugc

SEQ ID NO: 2631263 - RNA, 19 nt, Artificial Sequence
  Description of Artificial Sequence: Synthetic oligonucleotide
aaccaccuaagaguaacca

SEQ ID NO: 2631264 - RNA, 19 nt, Artificial Sequence
  Description of Artificial Sequence: Synthetic oligonucleotide
gcaucaguuagguaagagc

SEQ ID NO: 2631265 - RNA, 19 nt, Artificial Sequence
  Description of Artificial Sequence: Synthetic oligonucleotide
aaggacaaccuuguaugcu

SEQ ID NO: 2631266 - RNA, 19 nt, Artificial Sequence
  Description of Artificial Sequence: Synthetic oligonucleotide
ugaauucuguuguuuguuu

SEQ ID NO: 2631267 - RNA, 19 nt, Artificial Sequence
  Description of Artificial Sequence: Synthetic oligonucleotide
ccuucugggaaaaugcacc

SEQ ID NO: 2631268 - RNA, 19 nt, Artificial Sequence
  Description of Artificial Sequence: Synthetic oligonucleotide
augcgcuuggggcaggauc

SEQ ID NO: 2631269 - RNA, 19 nt, Artificial Sequence
  Description of Artificial Sequence: Synthetic oligonucleotide
aaaccucaauuuaaugagu

SEQ ID NO: 2631270 - RNA, 19 nt, Artificial Sequence
  Description of Artificial Sequence: Synthetic oligonucleotide
aguuuuaucuuaguuucaa

SEQ ID NO: 2631271 - RNA, 19 nt, Artificial Sequence
  Description of Artificial Sequence: Synthetic oligonucleotide
uggcuugcauacaugaauu

SEQ ID NO: 2631272 - RNA, 19 nt, Artificial Sequence
  Description of Artificial Sequence: Synthetic oligonucleotide
aacugauuccucccgggua

SEQ ID NO: 2631273 - RNA, 19 nt, Artificial Sequence
  Description of Artificial Sequence: Synthetic oligonucleotide
gguguguuggcuugcauac

SEQ ID NO: 2631274 - RNA, 19 nt, Artificial Sequence
  Description of Artificial Sequence: Synthetic oligonucleotide
gacaaccuuguaugcuggg

SEQ ID NO: 2631275 - RNA, 19 nt, Artificial Sequence
  Description of Artificial Sequence: Synthetic oligonucleotide
agcucauacaaaggcuucg

SEQ ID NO: 2631276 - RNA, 19 nt, Artificial Sequence
  Description of Artificial Sequence: Synthetic oligonucleotide
uucaaggggaauggacccg

SEQ ID NO: 2631277 - RNA, 19 nt, Artificial Sequence
  Description of Artificial Sequence: Synthetic oligonucleotide
agauggagcugcuucucug

SEQ ID NO: 2631278 - RNA, 19 nt, Artificial Sequence
  Description of Artificial Sequence: Synthetic oligonucleotide
cauuacugaagcccagcac

SEQ ID NO: 2631279 - RNA, 19 nt, Artificial Sequence
  Description of Artificial Sequence: Synthetic oligonucleotide
auuuaaugaguggggcuag

SEQ ID NO: 2631280 - RNA, 19 nt, Artificial Sequence
  Description of Artificial Sequence: Synthetic oligonucleotide
aucuuaguuucaauucauc

SEQ ID NO: 2631281 - RNA, 19 nt, Artificial Sequence
  Description of Artificial Sequence: Synthetic oligonucleotide
ggggaauggacccggaugc

SEQ ID NO: 2631282 - RNA, 19 nt, Artificial Sequence
  Description of Artificial Sequence: Synthetic oligonucleotide
ucccuucugggaaaaugca

SEQ ID NO: 2631283 - RNA, 19 nt, Artificial Sequence
  Description of Artificial Sequence: Synthetic oligonucleotide
acccggaugcggaauaagc

SEQ ID NO: 2631284 - RNA, 19 nt, Artificial Sequence
  Description of Artificial Sequence: Synthetic oligonucleotide
ggcauuauaucucuccaca

SEQ ID NO: 2631285 - RNA, 19 nt, Artificial Sequence
  Description of Artificial Sequence: Synthetic oligonucleotide
cuguuguuuguuuaccaca

SEQ ID NO: 2631286 - RNA, 19 nt, Artificial Sequence
  Description of Artificial Sequence: Synthetic oligonucleotide
cagauugcugccagacagg

SEQ ID NO: 2631287 - RNA, 19 nt, Artificial Sequence
  Description of Artificial Sequence: Synthetic oligonucleotide
cuaguauuaaaugggaacu

SEQ ID NO: 2631288 - RNA, 19 nt, Artificial Sequence
  Description of Artificial Sequence: Synthetic oligonucleotide
auacaaaggcuucggacuu

SEQ ID NO: 2631289 - RNA, 19 nt, Artificial Sequence
  Description of Artificial Sequence: Synthetic oligonucleotide
ucucacuuuuggcuccucu

SEQ ID NO: 2631290 - RNA, 19 nt, Artificial Sequence
  Description of Artificial Sequence: Synthetic oligonucleotide
gugacugaaucuuuacuaa

SEQ ID NO: 2631291 - RNA, 19 nt, Artificial Sequence
  Description of Artificial Sequence: Synthetic oligonucleotide
aucaguuagguaagagcuc

SEQ ID NO: 2631292 - RNA, 19 nt, Artificial Sequence
  Description of Artificial Sequence: Synthetic oligonucleotide
cacagcgagauggagcugc

SEQ ID NO: 2631293 - RNA, 19 nt, Artificial Sequence
  Description of Artificial Sequence: Synthetic oligonucleotide
aagacagauugcugccaga

SEQ ID NO: 2631294 - RNA, 19 nt, Artificial Sequence
  Description of Artificial Sequence: Synthetic oligonucleotide
acaguuacacgguuccaaa

SEQ ID NO: 2631295 - RNA, 19 nt, Artificial Sequence
  Description of Artificial Sequence: Synthetic oligonucleotide
cacacacuaggacacagca

SEQ ID NO: 2631296 - RNA, 19 nt, Artificial Sequence
  Description of Artificial Sequence: Synthetic oligonucleotide
uagggcuuugacuuugaua

SEQ ID NO: 2631297 - RNA, 19 nt, Artificial Sequence
  Description of Artificial Sequence: Synthetic oligonucleotide
agcaucaguuagguaagag

SEQ ID NO: 2631298 - RNA, 19 nt, Artificial Sequence
  Description of Artificial Sequence: Synthetic oligonucleotide
uaguauuaaaugggaacua

SEQ ID NO: 2631299 - RNA, 19 nt, Artificial Sequence
  Description of Artificial Sequence: Synthetic oligonucleotide
guuacacgguuccaaacaa

SEQ ID NO: 2631300 - RNA, 19 nt, Artificial Sequence
  Description of Artificial Sequence: Synthetic oligonucleotide
accaccuaagaguaaccau

SEQ ID NO: 2631301 - RNA, 19 nt, Artificial Sequence
  Description of Artificial Sequence: Synthetic oligonucleotide
uugggugacugaaucuuua

SEQ ID NO: 2631302 - RNA, 19 nt, Artificial Sequence
  Description of Artificial Sequence: Synthetic oligonucleotide
cuuugauauuucguaugac

SEQ ID NO: 2631303 - RNA, 19 nt, Artificial Sequence
  Description of Artificial Sequence: Synthetic oligonucleotide
agacaggaguuuuaucuua

SEQ ID NO: 2631304 - RNA, 19 nt, Artificial Sequence
  Description of Artificial Sequence: Synthetic oligonucleotide
caagcuucuaagcauuaaa

SEQ ID NO: 2631305 - RNA, 19 nt, Artificial Sequence
  Description of Artificial Sequence: Synthetic oligonucleotide
cacaguuuacagacgcauc

SEQ ID NO: 2631306 - RNA, 19 nt, Artificial Sequence
  Description of Artificial Sequence: Synthetic oligonucleotide
uccuugggugacugaaucu

SEQ ID NO: 2631307 - RNA, 19 nt, Artificial Sequence
  Description of Artificial Sequence: Synthetic oligonucleotide
caguuacacgguuccaaac

SEQ ID NO: 2631308 - RNA, 19 nt, Artificial Sequence
  Description of Artificial Sequence: Synthetic oligonucleotide
aacaagagcagaagcccaa

SEQ ID NO: 2631309 - RNA, 19 nt, Artificial Sequence
  Description of Artificial Sequence: Synthetic oligonucleotide
uggggcuaggcauuauauc

SEQ ID NO: 2631310 - RNA, 19 nt, Artificial Sequence
  Description of Artificial Sequence: Synthetic oligonucleotide
cuuaagacagagcacuagu

SEQ ID NO: 2631311 - RNA, 19 nt, Artificial Sequence
  Description of Artificial Sequence: Synthetic oligonucleotide
aauggacccggaugcggaa

SEQ ID NO: 2631312 - RNA, 19 nt, Artificial Sequence
  Description of Artificial Sequence: Synthetic oligonucleotide
acaggaguuuuaucuuagu

SEQ ID NO: 2631313 - RNA, 19 nt, Artificial Sequence
  Description of Artificial Sequence: Synthetic oligonucleotide
aaaugggaacuaacuggca

SEQ ID NO: 2631314 - RNA, 19 nt, Artificial Sequence
  Description of Artificial Sequence: Synthetic oligonucleotide
acgugaugcgcuuggggca

SEQ ID NO: 2631315 - RNA, 19 nt, Artificial Sequence
  Description of Artificial Sequence: Synthetic oligonucleotide
ggaggaacugauuccuccc

SEQ ID NO: 2631316 - RNA, 19 nt, Artificial Sequence
  Description of Artificial Sequence: Synthetic oligonucleotide
cuccuugggugacugaauc

SEQ ID NO: 2631317 - RNA, 19 nt, Artificial Sequence
  Description of Artificial Sequence: Synthetic oligonucleotide
aguuagguaagagcucccu

SEQ ID NO: 2631318 - RNA, 19 nt, Artificial Sequence
  Description of Artificial Sequence: Synthetic oligonucleotide
ugcuggguguguuggcuug

SEQ ID NO: 2631319 - RNA, 19 nt, Artificial Sequence
  Description of Artificial Sequence: Synthetic oligonucleotide
agacagagcacuaguauua

SEQ ID NO: 2631320 - RNA, 19 nt, Artificial Sequence
  Description of Artificial Sequence: Synthetic oligonucleotide
aaccauuacugaagcccag

SEQ ID NO: 2631321 - RNA, 19 nt, Artificial Sequence
  Description of Artificial Sequence: Synthetic oligonucleotide
agauugcugccagacagga

SEQ ID NO: 2631322 - RNA, 19 nt, Artificial Sequence
  Description of Artificial Sequence: Synthetic oligonucleotide
aaggggaauggacccggau

SEQ ID NO: 2631323 - RNA, 19 nt, Artificial Sequence
  Description of Artificial Sequence: Synthetic oligonucleotide
gacagauugcugccagaca

SEQ ID NO: 2631324 - RNA, 19 nt, Artificial Sequence
  Description of Artificial Sequence: Synthetic oligonucleotide
caguuuacagacgcaucag

SEQ ID NO: 2631325 - RNA, 19 nt, Artificial Sequence
  Description of Artificial Sequence: Synthetic oligonucleotide
ugggaacuaacuggcacaa

SEQ ID NO: 2631326 - RNA, 19 nt, Artificial Sequence
  Description of Artificial Sequence: Synthetic oligonucleotide
ugcauacaugaauucuguu

SEQ ID NO: 2631327 - RNA, 19 nt, Artificial Sequence
  Description of Artificial Sequence: Synthetic oligonucleotide
cuagccuccacaguuuaca

SEQ ID NO: 2631328 - RNA, 19 nt, Artificial Sequence
  Description of Artificial Sequence: Synthetic oligonucleotide
acacgguuccaaacaagag

SEQ ID NO: 2631329 - RNA, 19 nt, Artificial Sequence
  Description of Artificial Sequence: Synthetic oligonucleotide
aaaugcaccuuagggcuuu

SEQ ID NO: 2631330 - RNA, 19 nt, Artificial Sequence
  Description of Artificial Sequence: Synthetic oligonucleotide
cacuaguauuaaaugggaa

SEQ ID NO: 2631331 - RNA, 19 nt, Artificial Sequence
  Description of Artificial Sequence: Synthetic oligonucleotide
caauuuaaugaguggggcu

SEQ ID NO: 2631332 - RNA, 19 nt, Artificial Sequence
  Description of Artificial Sequence: Synthetic oligonucleotide
cacacagcgagauggagcu

SEQ ID NO: 2631333 - RNA, 19 nt, Artificial Sequence
  Description of Artificial Sequence: Synthetic oligonucleotide
acaaccuuguaugcugggu

SEQ ID NO: 2631334 - RNA, 19 nt, Artificial Sequence
  Description of Artificial Sequence: Synthetic oligonucleotide
ggaucucacuuuuggcucc

SEQ ID NO: 2631335 - RNA, 19 nt, Artificial Sequence
  Description of Artificial Sequence: Synthetic oligonucleotide
gaauggacccggaugcgga

SEQ ID NO: 2631336 - RNA, 19 nt, Artificial Sequence
  Description of Artificial Sequence: Synthetic oligonucleotide
caguuagguaagagcuccc

SEQ ID NO: 2631337 - RNA, 19 nt, Artificial Sequence
  Description of Artificial Sequence: Synthetic oligonucleotide
aggcuucggacuugaucuc

SEQ ID NO: 2631338 - RNA, 19 nt, Artificial Sequence
  Description of Artificial Sequence: Synthetic oligonucleotide
acaguacaaggacaaccuu

SEQ ID NO: 2631339 - RNA, 19 nt, Artificial Sequence
  Description of Artificial Sequence: Synthetic oligonucleotide
uguuuaccacagccacaca

SEQ ID NO: 2631340 - RNA, 19 nt, Artificial Sequence
  Description of Artificial Sequence: Synthetic oligonucleotide
cccggaugcggaauaagcc

SEQ ID NO: 2631341 - RNA, 19 nt, Artificial Sequence
  Description of Artificial Sequence: Synthetic oligonucleotide
caugaauucuguuguuugu

SEQ ID NO: 2631342 - RNA, 19 nt, Artificial Sequence
  Description of Artificial Sequence: Synthetic oligonucleotide
gauugcugccagacaggag

SEQ ID NO: 2631343 - RNA, 19 nt, Artificial Sequence
  Description of Artificial Sequence: Synthetic oligonucleotide
acuagccuccacaguuuac

SEQ ID NO: 2631344 - RNA, 19 nt, Artificial Sequence
  Description of Artificial Sequence: Synthetic oligonucleotide
ggcuggaggaacugauucc

SEQ ID NO: 2631345 - RNA, 19 nt, Artificial Sequence
  Description of Artificial Sequence: Synthetic oligonucleotide
gcucauacaaaggcuucgg

SEQ ID NO: 2631346 - RNA, 19 nt, Artificial Sequence
  Description of Artificial Sequence: Synthetic oligonucleotide
ugacauucacuagccucca

SEQ ID NO: 2631347 - RNA, 19 nt, Artificial Sequence
  Description of Artificial Sequence: Synthetic oligonucleotide
aguggggcuaggcauuaua

SEQ ID NO: 2631348 - RNA, 19 nt, Artificial Sequence
  Description of Artificial Sequence: Synthetic oligonucleotide
caccuuagggcuuugacuu

SEQ ID NO: 2631349 - RNA, 19 nt, Artificial Sequence
  Description of Artificial Sequence: Synthetic oligonucleotide
cacuaggacacagcaucag

SEQ ID NO: 2631350 - RNA, 19 nt, Artificial Sequence
  Description of Artificial Sequence: Synthetic oligonucleotide
auccagccacgugaugcgc

SEQ ID NO: 2631351 - RNA, 19 nt, Artificial Sequence
  Description of Artificial Sequence: Synthetic oligonucleotide
aaaaugcaccuuagggcuu

SEQ ID NO: 2631352 - RNA, 19 nt, Artificial Sequence
  Description of Artificial Sequence: Synthetic oligonucleotide
gguuccaaacaagagcaga

SEQ ID NO: 2631353 - RNA, 19 nt, Artificial Sequence
  Description of Artificial Sequence: Synthetic oligonucleotide
caucagaauauaguucuua

SEQ ID NO: 2631354 - RNA, 19 nt, Artificial Sequence
  Description of Artificial Sequence: Synthetic oligonucleotide
uggacccggaugcggaaua

SEQ ID NO: 2631355 - RNA, 19 nt, Artificial Sequence
  Description of Artificial Sequence: Synthetic oligonucleotide
gacagagcacuaguauuaa

SEQ ID NO: 2631356 - RNA, 19 nt, Artificial Sequence
  Description of Artificial Sequence: Synthetic oligonucleotide
cuaggacacagcaucaguu

SEQ ID NO: 2631357 - RNA, 19 nt, Artificial Sequence
  Description of Artificial Sequence: Synthetic oligonucleotide
acacuaggacacagcauca

SEQ ID NO: 2631358 - RNA, 19 nt, Artificial Sequence
  Description of Artificial Sequence: Synthetic oligonucleotide
auaucucuccacacacagu

SEQ ID NO: 2631359 - RNA, 19 nt, Artificial Sequence
  Description of Artificial Sequence: Synthetic oligonucleotide
gacccggaugcggaauaag

SEQ ID NO: 2631360 - RNA, 19 nt, Artificial Sequence
  Description of Artificial Sequence: Synthetic oligonucleotide
aaugcaccuuagggcuuug

SEQ ID NO: 2631361 - RNA, 19 nt, Artificial Sequence
  Description of Artificial Sequence: Synthetic oligonucleotide
accuuguaugcugggugug

SEQ ID NO: 2631362 - RNA, 19 nt, Artificial Sequence
  Description of Artificial Sequence: Synthetic oligonucleotide
cuuagggcuuugacuuuga

SEQ ID NO: 2631363 - RNA, 19 nt, Artificial Sequence
  Description of Artificial Sequence: Synthetic oligonucleotide
gcacuaguauuaaauggga

SEQ ID NO: 2631364 - RNA, 19 nt, Artificial Sequence
  Description of Artificial Sequence: Synthetic oligonucleotide
cucccuccucccuuuugac

SEQ ID NO: 2631365 - RNA, 19 nt, Artificial Sequence
  Description of Artificial Sequence: Synthetic oligonucleotide
uccucccuuuugacauuca

SEQ ID NO: 2631366 - RNA, 19 nt, Artificial Sequence
  Description of Artificial Sequence: Synthetic oligonucleotide
ccuaagaguaaccauuacu

SEQ ID NO: 2631367 - RNA, 19 nt, Artificial Sequence
  Description of Artificial Sequence: Synthetic oligonucleotide
ggcuugcauacaugaauuc

SEQ ID NO: 2631368 - RNA, 19 nt, Artificial Sequence
  Description of Artificial Sequence: Synthetic oligonucleotide
cccuuuugacauucacuag

SEQ ID NO: 2631369 - RNA, 19 nt, Artificial Sequence
  Description of Artificial Sequence: Synthetic oligonucleotide
gcugacauccagccacgug

SEQ ID NO: 2631370 - RNA, 19 nt, Artificial Sequence
  Description of Artificial Sequence: Synthetic oligonucleotide
uucugggaaaaugcaccuu

SEQ ID NO: 2631371 - RNA, 19 nt, Artificial Sequence
  Description of Artificial Sequence: Synthetic oligonucleotide
auauuucguaugacacuaa

SEQ ID NO: 2631372 - RNA, 19 nt, Artificial Sequence
  Description of Artificial Sequence: Synthetic oligonucleotide
ccacgugaugcgcuugggg

SEQ ID NO: 2631373 - RNA, 19 nt, Artificial Sequence
  Description of Artificial Sequence: Synthetic oligonucleotide
cagaagcccaagcuucuaa

SEQ ID NO: 2631374 - RNA, 19 nt, Artificial Sequence
  Description of Artificial Sequence: Synthetic oligonucleotide
gcugcuucucugugcuugc

SEQ ID NO: 2631375 - RNA, 19 nt, Artificial Sequence
  Description of Artificial Sequence: Synthetic oligonucleotide
acacacuaggacacagcau

SEQ ID NO: 2631376 - RNA, 19 nt, Artificial Sequence
  Description of Artificial Sequence: Synthetic oligonucleotide
ggguguguuggcuugcaua

SEQ ID NO: 2631377 - RNA, 19 nt, Artificial Sequence
  Description of Artificial Sequence: Synthetic oligonucleotide
caggaguuuuaucuuaguu

SEQ ID NO: 2631378 - RNA, 19 nt, Artificial Sequence
  Description of Artificial Sequence: Synthetic oligonucleotide
guuagguaagagcucccuu

SEQ ID NO: 2631379 - RNA, 19 nt, Artificial Sequence
  Description of Artificial Sequence: Synthetic oligonucleotide
accuuagggcuuugacuuu

SEQ ID NO: 2631380 - RNA, 19 nt, Artificial Sequence
  Description of Artificial Sequence: Synthetic oligonucleotide
gcaccuuagggcuuugacu

SEQ ID NO: 2631381 - RNA, 19 nt, Artificial Sequence
  Description of Artificial Sequence: Synthetic oligonucleotide
ccuccacaguuuacagacg

SEQ ID NO: 2631382 - RNA, 19 nt, Artificial Sequence
  Description of Artificial Sequence: Synthetic oligonucleotide
ggcuucggacuugaucucc

SEQ ID NO: 2631383 - RNA, 19 nt, Artificial Sequence
  Description of Artificial Sequence: Synthetic oligonucleotide
gggaauggacccggaugcg

SEQ ID NO: 2631384 - RNA, 19 nt, Artificial Sequence
  Description of Artificial Sequence: Synthetic oligonucleotide
ggcuaggcauuauaucucu

SEQ ID NO: 2631385 - RNA, 19 nt, Artificial Sequence
  Description of Artificial Sequence: Synthetic oligonucleotide
augaguggggcuaggcauu

SEQ ID NO: 2631386 - RNA, 19 nt, Artificial Sequence
  Description of Artificial Sequence: Synthetic oligonucleotide
ccuuagggcuuugacuuug

SEQ ID NO: 2631387 - RNA, 19 nt, Artificial Sequence
  Description of Artificial Sequence: Synthetic oligonucleotide
gggcuaggcauuauaucuc

SEQ ID NO: 2631388 - RNA, 19 nt, Artificial Sequence
  Description of Artificial Sequence: Synthetic oligonucleotide
gggugacugaaucuuuacu

SEQ ID NO: 2631389 - RNA, 19 nt, Artificial Sequence
  Description of Artificial Sequence: Synthetic oligonucleotide
guacaaggacaaccuugua

SEQ ID NO: 2631390 - RNA, 19 nt, Artificial Sequence
  Description of Artificial Sequence: Synthetic oligonucleotide
ggcuuugacuuugauauuu

SEQ ID NO: 2631391 - RNA, 19 nt, Artificial Sequence
  Description of Artificial Sequence: Synthetic oligonucleotide
caacaguuacacgguucca

SEQ ID NO: 2631392 - RNA, 19 nt, Artificial Sequence
  Description of Artificial Sequence: Synthetic oligonucleotide
cacuagccuccacaguuua

SEQ ID NO: 2631393 - RNA, 19 nt, Artificial Sequence
  Description of Artificial Sequence: Synthetic oligonucleotide
auggacccggaugcggaau

SEQ ID NO: 2631394 - RNA, 19 nt, Artificial Sequence
  Description of Artificial Sequence: Synthetic oligonucleotide
guggggcuaggcauuauau

SEQ ID NO: 2631395 - RNA, 19 nt, Artificial Sequence
  Description of Artificial Sequence: Synthetic oligonucleotide
gcuugcugacauccagcca

SEQ ID NO: 2631396 - RNA, 19 nt, Artificial Sequence
  Description of Artificial Sequence: Synthetic oligonucleotide
gauuccucccggguaguuu

SEQ ID NO: 2631397 - RNA, 19 nt, Artificial Sequence
  Description of Artificial Sequence: Synthetic oligonucleotide
acacagcgagauggagcug

SEQ ID NO: 2631398 - RNA, 19 nt, Artificial Sequence
  Description of Artificial Sequence: Synthetic oligonucleotide
augcaccuuagggcuuuga

SEQ ID NO: 2631399 - RNA, 19 nt, Artificial Sequence
  Description of Artificial Sequence: Synthetic oligonucleotide
gcgagauggagcugcuucu

SEQ ID NO: 2631400 - RNA, 19 nt, Artificial Sequence
  Description of Artificial Sequence: Synthetic oligonucleotide
gcuaggcauuauaucucuc

SEQ ID NO: 2631401 - RNA, 19 nt, Artificial Sequence
  Description of Artificial Sequence: Synthetic oligonucleotide
cgugaugcgcuuggggcag

SEQ ID NO: 2631402 - RNA, 19 nt, Artificial Sequence
  Description of Artificial Sequence: Synthetic oligonucleotide
gcuggguguguuggcuugc

SEQ ID NO: 2631403 - RNA, 19 nt, Artificial Sequence
  Description of Artificial Sequence: Synthetic oligonucleotide
cuuguaugcuggguguguu

SEQ ID NO: 2631404 - RNA, 19 nt, Artificial Sequence
  Description of Artificial Sequence: Synthetic oligonucleotide
cgcaucaggcuggaggaac

SEQ ID NO: 2631405 - RNA, 19 nt, Artificial Sequence
  Description of Artificial Sequence: Synthetic oligonucleotide
cagccacgugaugcgcuug

SEQ ID NO: 2631406 - RNA, 19 nt, Artificial Sequence
  Description of Artificial Sequence: Synthetic oligonucleotide
acgcaucaggcuggaggaa

SEQ ID NO: 2631407 - RNA, 19 nt, Artificial Sequence
  Description of Artificial Sequence: Synthetic oligonucleotide
cagacgcaucaggcuggag

SEQ ID NO: 2631408 - RNA, 19 nt, Artificial Sequence
  Description of Artificial Sequence: Synthetic oligonucleotide
ggggcaggaucucacuuuu

SEQ ID NO: 2631409 - RNA, 19 nt, Artificial Sequence
  Description of Artificial Sequence: Synthetic oligonucleotide
agcucccuucugggaaaau

SEQ ID NO: 2631410 - RNA, 19 nt, Artificial Sequence
  Description of Artificial Sequence: Synthetic oligonucleotide
ccaagcuucuaagcauuaa

SEQ ID NO: 2631411 - RNA, 19 nt, Artificial Sequence
  Description of Artificial Sequence: Synthetic oligonucleotide
ccacaguuuacagacgcau

SEQ ID NO: 2631412 - RNA, 19 nt, Artificial Sequence
  Description of Artificial Sequence: Synthetic oligonucleotide
cgagauggagcugcuucuc

SEQ ID NO: 2631413 - RNA, 19 nt, Artificial Sequence
  Description of Artificial Sequence: Synthetic oligonucleotide
cuucggacuugaucuccuu

SEQ ID NO: 2631414 - RNA, 19 nt, Artificial Sequence
  Description of Artificial Sequence: Synthetic oligonucleotide
cccaagcuucuaagcauua

SEQ ID NO: 2631415 - RNA, 19 nt, Artificial Sequence
  Description of Artificial Sequence: Synthetic oligonucleotide
gcuucggacuugaucuccu

SEQ ID NO: 2631416 - RNA, 19 nt, Artificial Sequence
  Description of Artificial Sequence: Synthetic oligonucleotide
gaugcgcuuggggcaggau

SEQ ID NO: 2631417 - RNA, 19 nt, Artificial Sequence
  Description of Artificial Sequence: Synthetic oligonucleotide
gggaacuaacuggcacaaa

SEQ ID NO: 2631418 - RNA, 19 nt, Artificial Sequence
  Description of Artificial Sequence: Synthetic oligonucleotide
ggacccggaugcggaauaa

SEQ ID NO: 2631419 - RNA, 19 nt, Artificial Sequence
  Description of Artificial Sequence: Synthetic oligonucleotide
ccucuucaaggggaaugga

SEQ ID NO: 2631420 - RNA, 19 nt, Artificial Sequence
  Description of Artificial Sequence: Synthetic oligonucleotide
cugauuccucccggguagu

SEQ ID NO: 2631421 - RNA, 19 nt, Artificial Sequence
  Description of Artificial Sequence: Synthetic oligonucleotide
ccuuguaugcugggugugu

SEQ ID NO: 2631422 - RNA, 19 nt, Artificial Sequence
  Description of Artificial Sequence: Synthetic oligonucleotide
gaguggggcuaggcauuau

SEQ ID NO: 2631423 - RNA, 19 nt, Artificial Sequence
  Description of Artificial Sequence: Synthetic oligonucleotide
gcccagcacacagcgagau

SEQ ID NO: 2631424 - RNA, 19 nt, Artificial Sequence
  Description of Artificial Sequence: Synthetic oligonucleotide
gcgcuuggggcaggaucuc

SEQ ID NO: 2631425 - RNA, 19 nt, Artificial Sequence
  Description of Artificial Sequence: Synthetic oligonucleotide
cgcuuggggcaggaucuca

SEQ ID NO: 2631426 - RNA, 19 nt, Artificial Sequence
  Description of Artificial Sequence: Synthetic oligonucleotide
cccacucccuccucccuuu

SEQ ID NO: 2631427 - RNA, 19 nt, Artificial Sequence
  Description of Artificial Sequence: Synthetic oligonucleotide
cagcgagauggagcugcuu

SEQ ID NO: 2631428 - RNA, 19 nt, Artificial Sequence
  Description of Artificial Sequence: Synthetic oligonucleotide
ccuccucccuuuugacauu

SEQ ID NO: 2631429 - RNA, 19 nt, Artificial Sequence
  Description of Artificial Sequence: Synthetic oligonucleotide
ccacucccuccucccuuuu

SEQ ID NO: 2631430 - RNA, 19 nt, Artificial Sequence
  Description of Artificial Sequence: Synthetic oligonucleotide
uuaucaauaaagaucagcg

SEQ ID NO: 2631431 - RNA, 19 nt, Artificial Sequence
  Description of Artificial Sequence: Synthetic oligonucleotide
ucuagaaggaaauugaagg

SEQ ID NO: 2631432 - RNA, 19 nt, Artificial Sequence
  Description of Artificial Sequence: Synthetic oligonucleotide
cauacauaaacuauaaagg

SEQ ID NO: 2631433 - RNA, 19 nt, Artificial Sequence
  Description of Artificial Sequence: Synthetic oligonucleotide
acauacauaaacuauaaag

SEQ ID NO: 2631434 - RNA, 19 nt, Artificial Sequence
  Description of Artificial Sequence: Synthetic oligonucleotide
acucucaaaaucuagaagg

SEQ ID NO: 2631435 - RNA, 19 nt, Artificial Sequence
  Description of Artificial Sequence: Synthetic oligonucleotide
uucaucauaacaaacaggu

SEQ ID NO: 2631436 - RNA, 19 nt, Artificial Sequence
  Description of Artificial Sequence: Synthetic oligonucleotide
uaauacaacauacauaaac

SEQ ID NO: 2631437 - RNA, 19 nt, Artificial Sequence
  Description of Artificial Sequence: Synthetic oligonucleotide
uaaacuauaaaggaguaag

SEQ ID NO: 2631438 - RNA, 19 nt, Artificial Sequence
  Description of Artificial Sequence: Synthetic oligonucleotide
caucauaacaaacagguag

SEQ ID NO: 2631439 - RNA, 19 nt, Artificial Sequence
  Description of Artificial Sequence: Synthetic oligonucleotide
aauaaagaucagcguagcc

SEQ ID NO: 2631440 - RNA, 19 nt, Artificial Sequence
  Description of Artificial Sequence: Synthetic oligonucleotide
aaaaucuagaaggaaauug

SEQ ID NO: 2631441 - RNA, 19 nt, Artificial Sequence
  Description of Artificial Sequence: Synthetic oligonucleotide
ucaauaaagaucagcguag

SEQ ID NO: 2631442 - RNA, 19 nt, Artificial Sequence
  Description of Artificial Sequence: Synthetic oligonucleotide
auuacuccaagacugcgcc

SEQ ID NO: 2631443 - RNA, 19 nt, Artificial Sequence
  Description of Artificial Sequence: Synthetic oligonucleotide
aaaaggcgucuucagaggc

SEQ ID NO: 2631444 - RNA, 19 nt, Artificial Sequence
  Description of Artificial Sequence: Synthetic oligonucleotide
aagacuggagcauugaaca

SEQ ID NO: 2631445 - RNA, 19 nt, Artificial Sequence
  Description of Artificial Sequence: Synthetic oligonucleotide
ucuucaucauaacaaacag

SEQ ID NO: 2631446 - RNA, 19 nt, Artificial Sequence
  Description of Artificial Sequence: Synthetic oligonucleotide
acuauaaaggaguaagaag

SEQ ID NO: 2631447 - RNA, 19 nt, Artificial Sequence
  Description of Artificial Sequence: Synthetic oligonucleotide
aauaucuucaucauaacaa

SEQ ID NO: 2631448 - RNA, 19 nt, Artificial Sequence
  Description of Artificial Sequence: Synthetic oligonucleotide
cuuguugugucuuaggagc

SEQ ID NO: 2631449 - RNA, 19 nt, Artificial Sequence
  Description of Artificial Sequence: Synthetic oligonucleotide
auagcaagggauuggauuc

SEQ ID NO: 2631450 - RNA, 19 nt, Artificial Sequence
  Description of Artificial Sequence: Synthetic oligonucleotide
auaacaaacagguaggcaa

SEQ ID NO: 2631451 - RNA, 19 nt, Artificial Sequence
  Description of Artificial Sequence: Synthetic oligonucleotide
ucuguaacccuguugacag

SEQ ID NO: 2631452 - RNA, 19 nt, Artificial Sequence
  Description of Artificial Sequence: Synthetic oligonucleotide
auacauaaacuauaaagga

SEQ ID NO: 2631453 - RNA, 19 nt, Artificial Sequence
  Description of Artificial Sequence: Synthetic oligonucleotide
uuauccuuaucaauaaaga

SEQ ID NO: 2631454 - RNA, 19 nt, Artificial Sequence
  Description of Artificial Sequence: Synthetic oligonucleotide
caauucaacauccagguug

SEQ ID NO: 2631455 - RNA, 19 nt, Artificial Sequence
  Description of Artificial Sequence: Synthetic oligonucleotide
aacucucaaaaucuagaag

SEQ ID NO: 2631456 - RNA, 19 nt, Artificial Sequence
  Description of Artificial Sequence: Synthetic oligonucleotide
aaauugaaggggaagaacu

SEQ ID NO: 2631457 - RNA, 19 nt, Artificial Sequence
  Description of Artificial Sequence: Synthetic oligonucleotide
aagaucagcguagccaucc

SEQ ID NO: 2631458 - RNA, 19 nt, Artificial Sequence
  Description of Artificial Sequence: Synthetic oligonucleotide
gagaugugcaaucuggugc

SEQ ID NO: 2631459 - RNA, 19 nt, Artificial Sequence
  Description of Artificial Sequence: Synthetic oligonucleotide
aaaugcuuuauuaauacaa

SEQ ID NO: 2631460 - RNA, 19 nt, Artificial Sequence
  Description of Artificial Sequence: Synthetic oligonucleotide
cuggcuuuaggcaagacug

SEQ ID NO: 2631461 - RNA, 19 nt, Artificial Sequence
  Description of Artificial Sequence: Synthetic oligonucleotide
ucaaaaucuagaaggaaau

SEQ ID NO: 2631462 - RNA, 19 nt, Artificial Sequence
  Description of Artificial Sequence: Synthetic oligonucleotide
ucugcaauuucccaucuga

SEQ ID NO: 2631463 - RNA, 19 nt, Artificial Sequence
  Description of Artificial Sequence: Synthetic oligonucleotide
cuggauuacuccaagacug

SEQ ID NO: 2631464 - RNA, 19 nt, Artificial Sequence
  Description of Artificial Sequence: Synthetic oligonucleotide
ucuauugaucuucacuggc

SEQ ID NO: 2631465 - RNA, 19 nt, Artificial Sequence
  Description of Artificial Sequence: Synthetic oligonucleotide
aggcuuugacaccagacgc

SEQ ID NO: 2631466 - RNA, 19 nt, Artificial Sequence
  Description of Artificial Sequence: Synthetic oligonucleotide
aagggauuggauucccacg

SEQ ID NO: 2631467 - RNA, 19 nt, Artificial Sequence
  Description of Artificial Sequence: Synthetic oligonucleotide
ugcaauuucccaucugagg

SEQ ID NO: 2631468 - RNA, 19 nt, Artificial Sequence
  Description of Artificial Sequence: Synthetic oligonucleotide
aaaucuagaaggaaauuga

SEQ ID NO: 2631469 - RNA, 19 nt, Artificial Sequence
  Description of Artificial Sequence: Synthetic oligonucleotide
aacuuuucuauuucugggu

SEQ ID NO: 2631470 - RNA, 19 nt, Artificial Sequence
  Description of Artificial Sequence: Synthetic oligonucleotide
aucaauaaagaucagcgua

SEQ ID NO: 2631471 - RNA, 19 nt, Artificial Sequence
  Description of Artificial Sequence: Synthetic oligonucleotide
cuauaaaggaguaagaagu

SEQ ID NO: 2631472 - RNA, 19 nt, Artificial Sequence
  Description of Artificial Sequence: Synthetic oligonucleotide
gaggcuuugacaccagacg

SEQ ID NO: 2631473 - RNA, 19 nt, Artificial Sequence
  Description of Artificial Sequence: Synthetic oligonucleotide
agaaguuuaaauaucuuca

SEQ ID NO: 2631474 - RNA, 19 nt, Artificial Sequence
  Description of Artificial Sequence: Synthetic oligonucleotide
ugucuuaggagccuucuca

SEQ ID NO: 2631475 - RNA, 19 nt, Artificial Sequence
  Description of Artificial Sequence: Synthetic oligonucleotide
cuuaucaauaaagaucagc

SEQ ID NO: 2631476 - RNA, 19 nt, Artificial Sequence
  Description of Artificial Sequence: Synthetic oligonucleotide
aaacucucaaaaucuagaa

SEQ ID NO: 2631477 - RNA, 19 nt, Artificial Sequence
  Description of Artificial Sequence: Synthetic oligonucleotide
ucacagucaaaguugguug

SEQ ID NO: 2631478 - RNA, 19 nt, Artificial Sequence
  Description of Artificial Sequence: Synthetic oligonucleotide
uaaaggaguaagaaguuua

SEQ ID NO: 2631479 - RNA, 19 nt, Artificial Sequence
  Description of Artificial Sequence: Synthetic oligonucleotide
aggaguaagaaguuuaaau

SEQ ID NO: 2631480 - RNA, 19 nt, Artificial Sequence
  Description of Artificial Sequence: Synthetic oligonucleotide
auucaggaucaugagaggc

SEQ ID NO: 2631481 - RNA, 19 nt, Artificial Sequence
  Description of Artificial Sequence: Synthetic oligonucleotide
cacuuugccaacuuguggc

SEQ ID NO: 2631482 - RNA, 19 nt, Artificial Sequence
  Description of Artificial Sequence: Synthetic oligonucleotide
gguugcuucuguuugaggg

SEQ ID NO: 2631483 - RNA, 19 nt, Artificial Sequence
  Description of Artificial Sequence: Synthetic oligonucleotide
acauaaacuauaaaggagu

SEQ ID NO: 2631484 - RNA, 19 nt, Artificial Sequence
  Description of Artificial Sequence: Synthetic oligonucleotide
auaaagaucagcguagcca

SEQ ID NO: 2631485 - RNA, 19 nt, Artificial Sequence
  Description of Artificial Sequence: Synthetic oligonucleotide
cuucaucauaacaaacagg

SEQ ID NO: 2631486 - RNA, 19 nt, Artificial Sequence
  Description of Artificial Sequence: Synthetic oligonucleotide
aguaagaaguuuaaauauc

SEQ ID NO: 2631487 - RNA, 19 nt, Artificial Sequence
  Description of Artificial Sequence: Synthetic oligonucleotide
aacuauaaaggaguaagaa

SEQ ID NO: 2631488 - RNA, 19 nt, Artificial Sequence
  Description of Artificial Sequence: Synthetic oligonucleotide
agggauuggauucccacgg

SEQ ID NO: 2631489 - RNA, 19 nt, Artificial Sequence
  Description of Artificial Sequence: Synthetic oligonucleotide
gaaaaggcgucuucagagg

SEQ ID NO: 2631490 - RNA, 19 nt, Artificial Sequence
  Description of Artificial Sequence: Synthetic oligonucleotide
uggagcauugaacacuuug

SEQ ID NO: 2631491 - RNA, 19 nt, Artificial Sequence
  Description of Artificial Sequence: Synthetic oligonucleotide
aucauaacaaacagguagg

SEQ ID NO: 2631492 - RNA, 19 nt, Artificial Sequence
  Description of Artificial Sequence: Synthetic oligonucleotide
ggucuauugaucuucacug

SEQ ID NO: 2631493 - RNA, 19 nt, Artificial Sequence
  Description of Artificial Sequence: Synthetic oligonucleotide
uaggcaauucaacauccag

SEQ ID NO: 2631494 - RNA, 19 nt, Artificial Sequence
  Description of Artificial Sequence: Synthetic oligonucleotide
uaaagaucagcguagccau

SEQ ID NO: 2631495 - RNA, 19 nt, Artificial Sequence
  Description of Artificial Sequence: Synthetic oligonucleotide
auucccacgguagaaaagg

SEQ ID NO: 2631496 - RNA, 19 nt, Artificial Sequence
  Description of Artificial Sequence: Synthetic oligonucleotide
uauccuuaucaauaaagau

SEQ ID NO: 2631497 - RNA, 19 nt, Artificial Sequence
  Description of Artificial Sequence: Synthetic oligonucleotide
ugcaaucuggugcuccucg

SEQ ID NO: 2631498 - RNA, 19 nt, Artificial Sequence
  Description of Artificial Sequence: Synthetic oligonucleotide
acuuguugugucuuaggag

SEQ ID NO: 2631499 - RNA, 19 nt, Artificial Sequence
  Description of Artificial Sequence: Synthetic oligonucleotide
uguuugaggggucuauuga

SEQ ID NO: 2631500 - RNA, 19 nt, Artificial Sequence
  Description of Artificial Sequence: Synthetic oligonucleotide
aacagguaggcaauucaac

SEQ ID NO: 2631501 - RNA, 19 nt, Artificial Sequence
  Description of Artificial Sequence: Synthetic oligonucleotide
aggcacuccacucaagggg

SEQ ID NO: 2631502 - RNA, 19 nt, Artificial Sequence
  Description of Artificial Sequence: Synthetic oligonucleotide
uccuggauuacuccaagac

SEQ ID NO: 2631503 - RNA, 19 nt, Artificial Sequence
  Description of Artificial Sequence: Synthetic oligonucleotide
uaucaauaaagaucagcgu

SEQ ID NO: 2631504 - RNA, 19 nt, Artificial Sequence
  Description of Artificial Sequence: Synthetic oligonucleotide
agguaggcaauucaacauc

SEQ ID NO: 2631505 - RNA, 19 nt, Artificial Sequence
  Description of Artificial Sequence: Synthetic oligonucleotide
guucccaaagcuuuucugc

SEQ ID NO: 2631506 - RNA, 19 nt, Artificial Sequence
  Description of Artificial Sequence: Synthetic oligonucleotide
acagguaggcaauucaaca

SEQ ID NO: 2631507 - RNA, 19 nt, Artificial Sequence
  Description of Artificial Sequence: Synthetic oligonucleotide
aaggaaauugaaggggaag

SEQ ID NO: 2631508 - RNA, 19 nt, Artificial Sequence
  Description of Artificial Sequence: Synthetic oligonucleotide
gagcauugaacacuuugcc

SEQ ID NO: 2631509 - RNA, 19 nt, Artificial Sequence
  Description of Artificial Sequence: Synthetic oligonucleotide
gcaauuucccaucugaggc

SEQ ID NO: 2631510 - RNA, 19 nt, Artificial Sequence
  Description of Artificial Sequence: Synthetic oligonucleotide
aguugguugcuucuguuug

SEQ ID NO: 2631511 - RNA, 19 nt, Artificial Sequence
  Description of Artificial Sequence: Synthetic oligonucleotide
gaacgcuggaaggagauag

SEQ ID NO: 2631512 - RNA, 19 nt, Artificial Sequence
  Description of Artificial Sequence: Synthetic oligonucleotide
uggagagaacgcuggaagg

SEQ ID NO: 2631513 - RNA, 19 nt, Artificial Sequence
  Description of Artificial Sequence: Synthetic oligonucleotide
caagacugcgccaccaacg

SEQ ID NO: 2631514 - RNA, 19 nt, Artificial Sequence
  Description of Artificial Sequence: Synthetic oligonucleotide
uuuaggcaagacuggagca

SEQ ID NO: 2631515 - RNA, 19 nt, Artificial Sequence
  Description of Artificial Sequence: Synthetic oligonucleotide
cuuaggagccuucucaaug

SEQ ID NO: 2631516 - RNA, 19 nt, Artificial Sequence
  Description of Artificial Sequence: Synthetic oligonucleotide
augcuuuauuaauacaaca

SEQ ID NO: 2631517 - RNA, 19 nt, Artificial Sequence
  Description of Artificial Sequence: Synthetic oligonucleotide
auaucuucaucauaacaaa

SEQ ID NO: 2631518 - RNA, 19 nt, Artificial Sequence
  Description of Artificial Sequence: Synthetic oligonucleotide
acacuuugccaacuugugg

SEQ ID NO: 2631519 - RNA, 19 nt, Artificial Sequence
  Description of Artificial Sequence: Synthetic oligonucleotide
ugaacacuuugccaacuug

SEQ ID NO: 2631520 - RNA, 19 nt, Artificial Sequence
  Description of Artificial Sequence: Synthetic oligonucleotide
acuuguggcgcugagaucu

SEQ ID NO: 2631521 - RNA, 19 nt, Artificial Sequence
  Description of Artificial Sequence: Synthetic oligonucleotide
aacauacauaaacuauaaa

SEQ ID NO: 2631522 - RNA, 19 nt, Artificial Sequence
  Description of Artificial Sequence: Synthetic oligonucleotide
ucuucacuggcuuuucugu

SEQ ID NO: 2631523 - RNA, 19 nt, Artificial Sequence
  Description of Artificial Sequence: Synthetic oligonucleotide
caagacuggagcauugaac

SEQ ID NO: 2631524 - RNA, 19 nt, Artificial Sequence
  Description of Artificial Sequence: Synthetic oligonucleotide
cucaaaaucuagaaggaaa

SEQ ID NO: 2631525 - RNA, 19 nt, Artificial Sequence
  Description of Artificial Sequence: Synthetic oligonucleotide
gauuggauucccacgguag

SEQ ID NO: 2631526 - RNA, 19 nt, Artificial Sequence
  Description of Artificial Sequence: Synthetic oligonucleotide
cauccuuggaugccaaacg

SEQ ID NO: 2631527 - RNA, 19 nt, Artificial Sequence
  Description of Artificial Sequence: Synthetic oligonucleotide
gcuggaaggagauagcaag

SEQ ID NO: 2631528 - RNA, 19 nt, Artificial Sequence
  Description of Artificial Sequence: Synthetic oligonucleotide
gucuauugaucuucacugg

SEQ ID NO: 2631529 - RNA, 19 nt, Artificial Sequence
  Description of Artificial Sequence: Synthetic oligonucleotide
auccagguuggagagaacg

SEQ ID NO: 2631530 - RNA, 19 nt, Artificial Sequence
  Description of Artificial Sequence: Synthetic oligonucleotide
uaacccuguugacaguucc

SEQ ID NO: 2631531 - RNA, 19 nt, Artificial Sequence
  Description of Artificial Sequence: Synthetic oligonucleotide
acuuugccaacuuguggcg

SEQ ID NO: 2631532 - RNA, 19 nt, Artificial Sequence
  Description of Artificial Sequence: Synthetic oligonucleotide
cugagaucugcaauuuccc

SEQ ID NO: 2631533 - RNA, 19 nt, Artificial Sequence
  Description of Artificial Sequence: Synthetic oligonucleotide
aagacugcgccaccaacga

SEQ ID NO: 2631534 - RNA, 19 nt, Artificial Sequence
  Description of Artificial Sequence: Synthetic oligonucleotide
gaaauugaaggggaagaac

SEQ ID NO: 2631535 - RNA, 19 nt, Artificial Sequence
  Description of Artificial Sequence: Synthetic oligonucleotide
uggcuuuucuguaacccug

SEQ ID NO: 2631536 - RNA, 19 nt, Artificial Sequence
  Description of Artificial Sequence: Synthetic oligonucleotide
aaacuauaaaggaguaaga

SEQ ID NO: 2631537 - RNA, 19 nt, Artificial Sequence
  Description of Artificial Sequence: Synthetic oligonucleotide
uucaacccauccuuggaug

SEQ ID NO: 2631538 - RNA, 19 nt, Artificial Sequence
  Description of Artificial Sequence: Synthetic oligonucleotide
gacuuguugugucuuagga

SEQ ID NO: 2631539 - RNA, 19 nt, Artificial Sequence
  Description of Artificial Sequence: Synthetic oligonucleotide
ugacaguucccaaagcuuu

SEQ ID NO: 2631540 - RNA, 19 nt, Artificial Sequence
  Description of Artificial Sequence: Synthetic oligonucleotide
aggggaagaacuuuucuau

SEQ ID NO: 2631541 - RNA, 19 nt, Artificial Sequence
  Description of Artificial Sequence: Synthetic oligonucleotide
uuguugugucuuaggagcc

SEQ ID NO: 2631542 - RNA, 19 nt, Artificial Sequence
  Description of Artificial Sequence: Synthetic oligonucleotide
ucaacccauccuuggaugc

SEQ ID NO: 2631543 - RNA, 19 nt, Artificial Sequence
  Description of Artificial Sequence: Synthetic oligonucleotide
uggauuacuccaagacugc

SEQ ID NO: 2631544 - RNA, 19 nt, Artificial Sequence
  Description of Artificial Sequence: Synthetic oligonucleotide
ucauaacaaacagguaggc

SEQ ID NO: 2631545 - RNA, 19 nt, Artificial Sequence
  Description of Artificial Sequence: Synthetic oligonucleotide
uuugaggggucuauugauc

SEQ ID NO: 2631546 - RNA, 19 nt, Artificial Sequence
  Description of Artificial Sequence: Synthetic oligonucleotide
aggaucaugagaggcacuc

SEQ ID NO: 2631547 - RNA, 19 nt, Artificial Sequence
  Description of Artificial Sequence: Synthetic oligonucleotide
uaacaaacagguaggcaau

SEQ ID NO: 2631548 - RNA, 19 nt, Artificial Sequence
  Description of Artificial Sequence: Synthetic oligonucleotide
aucuagaaggaaauugaag

SEQ ID NO: 2631549 - RNA, 19 nt, Artificial Sequence
  Description of Artificial Sequence: Synthetic oligonucleotide
uggcuuuaggcaagacugg

SEQ ID NO: 2631550 - RNA, 19 nt, Artificial Sequence
  Description of Artificial Sequence: Synthetic oligonucleotide
uauugaucuucacuggcuu

SEQ ID NO: 2631551 - RNA, 19 nt, Artificial Sequence
  Description of Artificial Sequence: Synthetic oligonucleotide
ugagaucugcaauuuccca

SEQ ID NO: 2631552 - RNA, 19 nt, Artificial Sequence
  Description of Artificial Sequence: Synthetic oligonucleotide
uaagaaguuuaaauaucuu

SEQ ID NO: 2631553 - RNA, 19 nt, Artificial Sequence
  Description of Artificial Sequence: Synthetic oligonucleotide
agcuucaacccauccuugg

SEQ ID NO: 2631554 - RNA, 19 nt, Artificial Sequence
  Description of Artificial Sequence: Synthetic oligonucleotide
gauuacuccaagacugcgc

SEQ ID NO: 2631555 - RNA, 19 nt, Artificial Sequence
  Description of Artificial Sequence: Synthetic oligonucleotide
cuguugacaguucccaaag

SEQ ID NO: 2631556 - RNA, 19 nt, Artificial Sequence
  Description of Artificial Sequence: Synthetic oligonucleotide
agacuggagcauugaacac

SEQ ID NO: 2631557 - RNA, 19 nt, Artificial Sequence
  Description of Artificial Sequence: Synthetic oligonucleotide
uucuguaacccuguugaca

SEQ ID NO: 2631558 - RNA, 19 nt, Artificial Sequence
  Description of Artificial Sequence: Synthetic oligonucleotide
aacacuuugccaacuugug

SEQ ID NO: 2631559 - RNA, 19 nt, Artificial Sequence
  Description of Artificial Sequence: Synthetic oligonucleotide
ccaucugaggcuuugacac

SEQ ID NO: 2631560 - RNA, 19 nt, Artificial Sequence
  Description of Artificial Sequence: Synthetic oligonucleotide
ucaucagaagcaggaacag

SEQ ID NO: 2631561 - RNA, 19 nt, Artificial Sequence
  Description of Artificial Sequence: Synthetic oligonucleotide
ggaguaagaaguuuaaaua

SEQ ID NO: 2631562 - RNA, 19 nt, Artificial Sequence
  Description of Artificial Sequence: Synthetic oligonucleotide
gaugccaaacggcugccug

SEQ ID NO: 2631563 - RNA, 19 nt, Artificial Sequence
  Description of Artificial Sequence: Synthetic oligonucleotide
aggaaauugaaggggaaga

SEQ ID NO: 2631564 - RNA, 19 nt, Artificial Sequence
  Description of Artificial Sequence: Synthetic oligonucleotide
agacuuguugugucuuagg

SEQ ID NO: 2631565 - RNA, 19 nt, Artificial Sequence
  Description of Artificial Sequence: Synthetic oligonucleotide
uggguaggcgucaucagaa

SEQ ID NO: 2631566 - RNA, 19 nt, Artificial Sequence
  Description of Artificial Sequence: Synthetic oligonucleotide
uucccaaagcuuuucugcu

SEQ ID NO: 2631567 - RNA, 19 nt, Artificial Sequence
  Description of Artificial Sequence: Synthetic oligonucleotide
uugacaguucccaaagcuu

SEQ ID NO: 2631568 - RNA, 19 nt, Artificial Sequence
  Description of Artificial Sequence: Synthetic oligonucleotide
uguugacaguucccaaagc

SEQ ID NO: 2631569 - RNA, 19 nt, Artificial Sequence
  Description of Artificial Sequence: Synthetic oligonucleotide
aaaggcgucuucagaggcg

SEQ ID NO: 2631570 - RNA, 19 nt, Artificial Sequence
  Description of Artificial Sequence: Synthetic oligonucleotide
aacccuguugacaguuccc

SEQ ID NO: 2631571 - RNA, 19 nt, Artificial Sequence
  Description of Artificial Sequence: Synthetic oligonucleotide
ucaaaguugguugcuucug

SEQ ID NO: 2631572 - RNA, 19 nt, Artificial Sequence
  Description of Artificial Sequence: Synthetic oligonucleotide
acaacauacauaaacuaua

SEQ ID NO: 2631573 - RNA, 19 nt, Artificial Sequence
  Description of Artificial Sequence: Synthetic oligonucleotide
aacgcuggaaggagauagc

SEQ ID NO: 2631574 - RNA, 19 nt, Artificial Sequence
  Description of Artificial Sequence: Synthetic oligonucleotide
cauucaggaucaugagagg

SEQ ID NO: 2631575 - RNA, 19 nt, Artificial Sequence
  Description of Artificial Sequence: Synthetic oligonucleotide
agaaggaaauugaagggga

SEQ ID NO: 2631576 - RNA, 19 nt, Artificial Sequence
  Description of Artificial Sequence: Synthetic oligonucleotide
aacuuguggcgcugagauc

SEQ ID NO: 2631577 - RNA, 19 nt, Artificial Sequence
  Description of Artificial Sequence: Synthetic oligonucleotide
caggucaaaacucucaaaa

SEQ ID NO: 2631578 - RNA, 19 nt, Artificial Sequence
  Description of Artificial Sequence: Synthetic oligonucleotide
aaaggaguaagaaguuuaa

SEQ ID NO: 2631579 - RNA, 19 nt, Artificial Sequence
  Description of Artificial Sequence: Synthetic oligonucleotide
auuggauucccacgguaga

SEQ ID NO: 2631580 - RNA, 19 nt, Artificial Sequence
  Description of Artificial Sequence: Synthetic oligonucleotide
acuuuucuauuucugggua

SEQ ID NO: 2631581 - RNA, 19 nt, Artificial Sequence
  Description of Artificial Sequence: Synthetic oligonucleotide
cuucucaagcccacucucc

SEQ ID NO: 2631582 - RNA, 19 nt, Artificial Sequence
  Description of Artificial Sequence: Synthetic oligonucleotide
aaguugguugcuucuguuu

SEQ ID NO: 2631583 - RNA, 19 nt, Artificial Sequence
  Description of Artificial Sequence: Synthetic oligonucleotide
gauagcaagggauuggauu

SEQ ID NO: 2631584 - RNA, 19 nt, Artificial Sequence
  Description of Artificial Sequence: Synthetic oligonucleotide
guaagaaguuuaaauaucu

SEQ ID NO: 2631585 - RNA, 19 nt, Artificial Sequence
  Description of Artificial Sequence: Synthetic oligonucleotide
ccagacgccagcuucaacc

SEQ ID NO: 2631586 - RNA, 19 nt, Artificial Sequence
  Description of Artificial Sequence: Synthetic oligonucleotide
cuguuugaggggucuauug

SEQ ID NO: 2631587 - RNA, 19 nt, Artificial Sequence
  Description of Artificial Sequence: Synthetic oligonucleotide
ugaaggggaagaacuuuuc

SEQ ID NO: 2631588 - RNA, 19 nt, Artificial Sequence
  Description of Artificial Sequence: Synthetic oligonucleotide
cugcaauuucccaucugag

SEQ ID NO: 2631589 - RNA, 19 nt, Artificial Sequence
  Description of Artificial Sequence: Synthetic oligonucleotide
caauaaagaucagcguagc

SEQ ID NO: 2631590 - RNA, 19 nt, Artificial Sequence
  Description of Artificial Sequence: Synthetic oligonucleotide
gagagaacgcuggaaggag

SEQ ID NO: 2631591 - RNA, 19 nt, Artificial Sequence
  Description of Artificial Sequence: Synthetic oligonucleotide
agcaggaacagagacuugu

SEQ ID NO: 2631592 - RNA, 19 nt, Artificial Sequence
  Description of Artificial Sequence: Synthetic oligonucleotide
cauugaacacuuugccaac

SEQ ID NO: 2631593 - RNA, 19 nt, Artificial Sequence
  Description of Artificial Sequence: Synthetic oligonucleotide
ucucaaaaucuagaaggaa

SEQ ID NO: 2631594 - RNA, 19 nt, Artificial Sequence
  Description of Artificial Sequence: Synthetic oligonucleotide
cucucaaaaucuagaagga

SEQ ID NO: 2631595 - RNA, 19 nt, Artificial Sequence
  Description of Artificial Sequence: Synthetic oligonucleotide
cuuuucugcuggcuuuagg

SEQ ID NO: 2631596 - RNA, 19 nt, Artificial Sequence
  Description of Artificial Sequence: Synthetic oligonucleotide
agcguagccauccuggauu

SEQ ID NO: 2631597 - RNA, 19 nt, Artificial Sequence
  Description of Artificial Sequence: Synthetic oligonucleotide
ucaucauaacaaacaggua

SEQ ID NO: 2631598 - RNA, 19 nt, Artificial Sequence
  Description of Artificial Sequence: Synthetic oligonucleotide
caugagaggcacuccacuc

SEQ ID NO: 2631599 - RNA, 19 nt, Artificial Sequence
  Description of Artificial Sequence: Synthetic oligonucleotide
cacucaaggggagaugugc

SEQ ID NO: 2631600 - RNA, 19 nt, Artificial Sequence
  Description of Artificial Sequence: Synthetic oligonucleotide
gagacuuguugugucuuag

SEQ ID NO: 2631601 - RNA, 19 nt, Artificial Sequence
  Description of Artificial Sequence: Synthetic oligonucleotide
ucgggcaggucaaaacucu

SEQ ID NO: 2631602 - RNA, 19 nt, Artificial Sequence
  Description of Artificial Sequence: Synthetic oligonucleotide
aauugaaggggaagaacuu

SEQ ID NO: 2631603 - RNA, 19 nt, Artificial Sequence
  Description of Artificial Sequence: Synthetic oligonucleotide
ugugcaaucuggugcuccu

SEQ ID NO: 2631604 - RNA, 19 nt, Artificial Sequence
  Description of Artificial Sequence: Synthetic oligonucleotide
cuuggaugccaaacggcug

SEQ ID NO: 2631605 - RNA, 19 nt, Artificial Sequence
  Description of Artificial Sequence: Synthetic oligonucleotide
ucuggguaggcgucaucag

SEQ ID NO: 2631606 - RNA, 19 nt, Artificial Sequence
  Description of Artificial Sequence: Synthetic oligonucleotide
uacuccaagacugcgccac

SEQ ID NO: 2631607 - RNA, 19 nt, Artificial Sequence
  Description of Artificial Sequence: Synthetic oligonucleotide
auaaacuauaaaggaguaa

SEQ ID NO: 2631608 - RNA, 19 nt, Artificial Sequence
  Description of Artificial Sequence: Synthetic oligonucleotide
ggagcauugaacacuuugc

SEQ ID NO: 2631609 - RNA, 19 nt, Artificial Sequence
  Description of Artificial Sequence: Synthetic oligonucleotide
gcugagaucugcaauuucc

SEQ ID NO: 2631610 - RNA, 19 nt, Artificial Sequence
  Description of Artificial Sequence: Synthetic oligonucleotide
uugguugcuucuguuugag

SEQ ID NO: 2631611 - RNA, 19 nt, Artificial Sequence
  Description of Artificial Sequence: Synthetic oligonucleotide
gauucccacgguagaaaag

SEQ ID NO: 2631612 - RNA, 19 nt, Artificial Sequence
  Description of Artificial Sequence: Synthetic oligonucleotide
caaucuggugcuccucggg

SEQ ID NO: 2631613 - RNA, 19 nt, Artificial Sequence
  Description of Artificial Sequence: Synthetic oligonucleotide
uucccacgguagaaaaggc

SEQ ID NO: 2631614 - RNA, 19 nt, Artificial Sequence
  Description of Artificial Sequence: Synthetic oligonucleotide
ucccaaagcuuuucugcug

SEQ ID NO: 2631615 - RNA, 19 nt, Artificial Sequence
  Description of Artificial Sequence: Synthetic oligonucleotide
aaggagauagcaagggauu

SEQ ID NO: 2631616 - RNA, 19 nt, Artificial Sequence
  Description of Artificial Sequence: Synthetic oligonucleotide
uaggcgucaucagaagcag

SEQ ID NO: 2631617 - RNA, 19 nt, Artificial Sequence
  Description of Artificial Sequence: Synthetic oligonucleotide
cauaaacuauaaaggagua

SEQ ID NO: 2631618 - RNA, 19 nt, Artificial Sequence
  Description of Artificial Sequence: Synthetic oligonucleotide
cuauuucuggguaggcguc

SEQ ID NO: 2631619 - RNA, 19 nt, Artificial Sequence
  Description of Artificial Sequence: Synthetic oligonucleotide
agcaagggauuggauuccc

SEQ ID NO: 2631620 - RNA, 19 nt, Artificial Sequence
  Description of Artificial Sequence: Synthetic oligonucleotide
cagacgccagcuucaaccc

SEQ ID NO: 2631621 - RNA, 19 nt, Artificial Sequence
  Description of Artificial Sequence: Synthetic oligonucleotide
aaggaguaagaaguuuaaa

SEQ ID NO: 2631622 - RNA, 19 nt, Artificial Sequence
  Description of Artificial Sequence: Synthetic oligonucleotide
acuccaagacugcgccacc

SEQ ID NO: 2631623 - RNA, 19 nt, Artificial Sequence
  Description of Artificial Sequence: Synthetic oligonucleotide
auaaaggaguaagaaguuu

SEQ ID NO: 2631624 - RNA, 19 nt, Artificial Sequence
  Description of Artificial Sequence: Synthetic oligonucleotide
uuucuguaacccuguugac

SEQ ID NO: 2631625 - RNA, 19 nt, Artificial Sequence
  Description of Artificial Sequence: Synthetic oligonucleotide
aaggcgucuucagaggcga

SEQ ID NO: 2631626 - RNA, 19 nt, Artificial Sequence
  Description of Artificial Sequence: Synthetic oligonucleotide
uagccauccuggauuacuc

SEQ ID NO: 2631627 - RNA, 19 nt, Artificial Sequence
  Description of Artificial Sequence: Synthetic oligonucleotide
gaucagcguagccauccug

SEQ ID NO: 2631628 - RNA, 19 nt, Artificial Sequence
  Description of Artificial Sequence: Synthetic oligonucleotide
gguaggcaauucaacaucc

SEQ ID NO: 2631629 - RNA, 19 nt, Artificial Sequence
  Description of Artificial Sequence: Synthetic oligonucleotide
gagauagcaagggauugga

SEQ ID NO: 2631630 - RNA, 19 nt, Artificial Sequence
  Description of Artificial Sequence: Synthetic oligonucleotide
cucauucaggaucaugaga

SEQ ID NO: 2631631 - RNA, 19 nt, Artificial Sequence
  Description of Artificial Sequence: Synthetic oligonucleotide
ugguugcuucuguuugagg

SEQ ID NO: 2631632 - RNA, 19 nt, Artificial Sequence
  Description of Artificial Sequence: Synthetic oligonucleotide
ggggagaugugcaaucugg

SEQ ID NO: 2631633 - RNA, 19 nt, Artificial Sequence
  Description of Artificial Sequence: Synthetic oligonucleotide
uuaggcaagacuggagcau

SEQ ID NO: 2631634 - RNA, 19 nt, Artificial Sequence
  Description of Artificial Sequence: Synthetic oligonucleotide
aaggggagaugugcaaucu

SEQ ID NO: 2631635 - RNA, 19 nt, Artificial Sequence
  Description of Artificial Sequence: Synthetic oligonucleotide
aggagauagcaagggauug

SEQ ID NO: 2631636 - RNA, 19 nt, Artificial Sequence
  Description of Artificial Sequence: Synthetic oligonucleotide
guaggcgucaucagaagca

SEQ ID NO: 2631637 - RNA, 19 nt, Artificial Sequence
  Description of Artificial Sequence: Synthetic oligonucleotide
caaggggagaugugcaauc

SEQ ID NO: 2631638 - RNA, 19 nt, Artificial Sequence
  Description of Artificial Sequence: Synthetic oligonucleotide
agaagcaggaacagagacu

SEQ ID NO: 2631639 - RNA, 19 nt, Artificial Sequence
  Description of Artificial Sequence: Synthetic oligonucleotide
ggagauagcaagggauugg

SEQ ID NO: 2631640 - RNA, 19 nt, Artificial Sequence
  Description of Artificial Sequence: Synthetic oligonucleotide
ggcaauucaacauccaggu

SEQ ID NO: 2631641 - RNA, 19 nt, Artificial Sequence
  Description of Artificial Sequence: Synthetic oligonucleotide
cauccuggauuacuccaag

SEQ ID NO: 2631642 - RNA, 19 nt, Artificial Sequence
  Description of Artificial Sequence: Synthetic oligonucleotide
gguaggcgucaucagaagc

SEQ ID NO: 2631643 - RNA, 19 nt, Artificial Sequence
  Description of Artificial Sequence: Synthetic oligonucleotide
cucuccucauucaggauca

SEQ ID NO: 2631644 - RNA, 19 nt, Artificial Sequence
  Description of Artificial Sequence: Synthetic oligonucleotide
uugaucuucacuggcuuuu

SEQ ID NO: 2631645 - RNA, 19 nt, Artificial Sequence
  Description of Artificial Sequence: Synthetic oligonucleotide
uauuucuggguaggcguca

SEQ ID NO: 2631646 - RNA, 19 nt, Artificial Sequence
  Description of Artificial Sequence: Synthetic oligonucleotide
ucugaggcuuugacaccag

SEQ ID NO: 2631647 - RNA, 19 nt, Artificial Sequence
  Description of Artificial Sequence: Synthetic oligonucleotide
ggugcagcagcuucucaag

SEQ ID NO: 2631648 - RNA, 19 nt, Artificial Sequence
  Description of Artificial Sequence: Synthetic oligonucleotide
caucugaggcuuugacacc

SEQ ID NO: 2631649 - RNA, 19 nt, Artificial Sequence
  Description of Artificial Sequence: Synthetic oligonucleotide
auugaacacuuugccaacu

SEQ ID NO: 2631650 - RNA, 19 nt, Artificial Sequence
  Description of Artificial Sequence: Synthetic oligonucleotide
ucuuaggagccuucucaau

SEQ ID NO: 2631651 - RNA, 19 nt, Artificial Sequence
  Description of Artificial Sequence: Synthetic oligonucleotide
uccucgggcaggucaaaac

SEQ ID NO: 2631652 - RNA, 19 nt, Artificial Sequence
  Description of Artificial Sequence: Synthetic oligonucleotide
auugaaggggaagaacuuu

SEQ ID NO: 2631653 - RNA, 19 nt, Artificial Sequence
  Description of Artificial Sequence: Synthetic oligonucleotide
gaggggucuauugaucuuc

SEQ ID NO: 2631654 - RNA, 19 nt, Artificial Sequence
  Description of Artificial Sequence: Synthetic oligonucleotide
cucgggcaggucaaaacuc

SEQ ID NO: 2631655 - RNA, 19 nt, Artificial Sequence
  Description of Artificial Sequence: Synthetic oligonucleotide
gaaggggaagaacuuuucu

SEQ ID NO: 2631656 - RNA, 19 nt, Artificial Sequence
  Description of Artificial Sequence: Synthetic oligonucleotide
ucaaggggagaugugcaau

SEQ ID NO: 2631657 - RNA, 19 nt, Artificial Sequence
  Description of Artificial Sequence: Synthetic oligonucleotide
gguagaaaaggcgucuuca

SEQ ID NO: 2631658 - RNA, 19 nt, Artificial Sequence
  Description of Artificial Sequence: Synthetic oligonucleotide
cccaaagcuuuucugcugg

SEQ ID NO: 2631659 - RNA, 19 nt, Artificial Sequence
  Description of Artificial Sequence: Synthetic oligonucleotide
aacccauccuuggaugcca

SEQ ID NO: 2631660 - RNA, 19 nt, Artificial Sequence
  Description of Artificial Sequence: Synthetic oligonucleotide
agacugcgccaccaacgac

SEQ ID NO: 2631661 - RNA, 19 nt, Artificial Sequence
  Description of Artificial Sequence: Synthetic oligonucleotide
uuggauucccacgguagaa

SEQ ID NO: 2631662 - RNA, 19 nt, Artificial Sequence
  Description of Artificial Sequence: Synthetic oligonucleotide
cucaagcccacucuccuca

SEQ ID NO: 2631663 - RNA, 19 nt, Artificial Sequence
  Description of Artificial Sequence: Synthetic oligonucleotide
aggggagaugugcaaucug

SEQ ID NO: 2631664 - RNA, 19 nt, Artificial Sequence
  Description of Artificial Sequence: Synthetic oligonucleotide
guugguugcuucuguuuga

SEQ ID NO: 2631665 - RNA, 19 nt, Artificial Sequence
  Description of Artificial Sequence: Synthetic oligonucleotide
uagcaagggauuggauucc

SEQ ID NO: 2631666 - RNA, 19 nt, Artificial Sequence
  Description of Artificial Sequence: Synthetic oligonucleotide
aucuggugcuccucgggca

SEQ ID NO: 2631667 - RNA, 19 nt, Artificial Sequence
  Description of Artificial Sequence: Synthetic oligonucleotide
aacggcugccugguucuuc

SEQ ID NO: 2631668 - RNA, 19 nt, Artificial Sequence
  Description of Artificial Sequence: Synthetic oligonucleotide
ggauuacuccaagacugcg

SEQ ID NO: 2631669 - RNA, 19 nt, Artificial Sequence
  Description of Artificial Sequence: Synthetic oligonucleotide
cuuugccaacuuguggcgc

SEQ ID NO: 2631670 - RNA, 19 nt, Artificial Sequence
  Description of Artificial Sequence: Synthetic oligonucleotide
uuacuccaagacugcgcca

SEQ ID NO: 2631671 - RNA, 19 nt, Artificial Sequence
  Description of Artificial Sequence: Synthetic oligonucleotide
uugacaccagacgccagcu

SEQ ID NO: 2631672 - RNA, 19 nt, Artificial Sequence
  Description of Artificial Sequence: Synthetic oligonucleotide
cuauugaucuucacuggcu

SEQ ID NO: 2631673 - RNA, 19 nt, Artificial Sequence
  Description of Artificial Sequence: Synthetic oligonucleotide
uccaagacugcgccaccaa

SEQ ID NO: 2631674 - RNA, 19 nt, Artificial Sequence
  Description of Artificial Sequence: Synthetic oligonucleotide
uggauucccacgguagaaa

SEQ ID NO: 2631675 - RNA, 19 nt, Artificial Sequence
  Description of Artificial Sequence: Synthetic oligonucleotide
gaaggaaauugaaggggaa

SEQ ID NO: 2631676 - RNA, 19 nt, Artificial Sequence
  Description of Artificial Sequence: Synthetic oligonucleotide
cuuugacaccagacgccag

SEQ ID NO: 2631677 - RNA, 19 nt, Artificial Sequence
  Description of Artificial Sequence: Synthetic oligonucleotide
auccuggauuacuccaaga

SEQ ID NO: 2631678 - RNA, 19 nt, Artificial Sequence
  Description of Artificial Sequence: Synthetic oligonucleotide
cacuggcuuuucuguaacc

SEQ ID NO: 2631679 - RNA, 19 nt, Artificial Sequence
  Description of Artificial Sequence: Synthetic oligonucleotide
cuucauuauccuuaucaau

SEQ ID NO: 2631680 - RNA, 19 nt, Artificial Sequence
  Description of Artificial Sequence: Synthetic oligonucleotide
gucuuaggagccuucucaa

SEQ ID NO: 2631681 - RNA, 19 nt, Artificial Sequence
  Description of Artificial Sequence: Synthetic oligonucleotide
uggcgcugagaucugcaau

SEQ ID NO: 2631682 - RNA, 19 nt, Artificial Sequence
  Description of Artificial Sequence: Synthetic oligonucleotide
uucuguuugaggggucuau

SEQ ID NO: 2631683 - RNA, 19 nt, Artificial Sequence
  Description of Artificial Sequence: Synthetic oligonucleotide
cauuauccuuaucaauaaa

SEQ ID NO: 2631684 - RNA, 19 nt, Artificial Sequence
  Description of Artificial Sequence: Synthetic oligonucleotide
agagacuuguugugucuua

SEQ ID NO: 2631685 - RNA, 19 nt, Artificial Sequence
  Description of Artificial Sequence: Synthetic oligonucleotide
caacuuguggcgcugagau

SEQ ID NO: 2631686 - RNA, 19 nt, Artificial Sequence
  Description of Artificial Sequence: Synthetic oligonucleotide
ggaaggagauagcaaggga

SEQ ID NO: 2631687 - RNA, 19 nt, Artificial Sequence
  Description of Artificial Sequence: Synthetic oligonucleotide
acccuguugacaguuccca

SEQ ID NO: 2631688 - RNA, 19 nt, Artificial Sequence
  Description of Artificial Sequence: Synthetic oligonucleotide
guuugaggggucuauugau

SEQ ID NO: 2631689 - RNA, 19 nt, Artificial Sequence
  Description of Artificial Sequence: Synthetic oligonucleotide
aggagccuucucaaugguc

SEQ ID NO: 2631690 - RNA, 19 nt, Artificial Sequence
  Description of Artificial Sequence: Synthetic oligonucleotide
ugcuccucgggcaggucaa

SEQ ID NO: 2631691 - RNA, 19 nt, Artificial Sequence
  Description of Artificial Sequence: Synthetic oligonucleotide
agaucagcguagccauccu

SEQ ID NO: 2631692 - RNA, 19 nt, Artificial Sequence
  Description of Artificial Sequence: Synthetic oligonucleotide
acgcuggaaggagauagca

SEQ ID NO: 2631693 - RNA, 19 nt, Artificial Sequence
  Description of Artificial Sequence: Synthetic oligonucleotide
acuggagcauugaacacuu

SEQ ID NO: 2631694 - RNA, 19 nt, Artificial Sequence
  Description of Artificial Sequence: Synthetic oligonucleotide
caacccauccuuggaugcc

SEQ ID NO: 2631695 - RNA, 19 nt, Artificial Sequence
  Description of Artificial Sequence: Synthetic oligonucleotide
ucuguuugaggggucuauu

SEQ ID NO: 2631696 - RNA, 19 nt, Artificial Sequence
  Description of Artificial Sequence: Synthetic oligonucleotide
ccucauucaggaucaugag

SEQ ID NO: 2631697 - RNA, 19 nt, Artificial Sequence
  Description of Artificial Sequence: Synthetic oligonucleotide
cuggguaggcgucaucaga

SEQ ID NO: 2631698 - RNA, 19 nt, Artificial Sequence
  Description of Artificial Sequence: Synthetic oligonucleotide
gcgucuucagaggcgaagg

SEQ ID NO: 2631699 - RNA, 19 nt, Artificial Sequence
  Description of Artificial Sequence: Synthetic oligonucleotide
gaacagagacuuguugugu

SEQ ID NO: 2631700 - RNA, 19 nt, Artificial Sequence
  Description of Artificial Sequence: Synthetic oligonucleotide
uaggcaagacuggagcauu

SEQ ID NO: 2631701 - RNA, 19 nt, Artificial Sequence
  Description of Artificial Sequence: Synthetic oligonucleotide
ggcuuugacaccagacgcc

SEQ ID NO: 2631702 - RNA, 19 nt, Artificial Sequence
  Description of Artificial Sequence: Synthetic oligonucleotide
ggcgucaucagaagcagga

SEQ ID NO: 2631703 - RNA, 19 nt, Artificial Sequence
  Description of Artificial Sequence: Synthetic oligonucleotide
gcuuuaggcaagacuggag

SEQ ID NO: 2631704 - RNA, 19 nt, Artificial Sequence
  Description of Artificial Sequence: Synthetic oligonucleotide
gggucuauugaucuucacu

SEQ ID NO: 2631705 - RNA, 19 nt, Artificial Sequence
  Description of Artificial Sequence: Synthetic oligonucleotide
ggaaauugaaggggaagaa

SEQ ID NO: 2631706 - RNA, 19 nt, Artificial Sequence
  Description of Artificial Sequence: Synthetic oligonucleotide
gaucugcaauuucccaucu

SEQ ID NO: 2631707 - RNA, 19 nt, Artificial Sequence
  Description of Artificial Sequence: Synthetic oligonucleotide
uggaugccaaacggcugcc

SEQ ID NO: 2631708 - RNA, 19 nt, Artificial Sequence
  Description of Artificial Sequence: Synthetic oligonucleotide
uuucuggguaggcgucauc

SEQ ID NO: 2631709 - RNA, 19 nt, Artificial Sequence
  Description of Artificial Sequence: Synthetic oligonucleotide
gugucuuaggagccuucuc

SEQ ID NO: 2631710 - RNA, 19 nt, Artificial Sequence
  Description of Artificial Sequence: Synthetic oligonucleotide
gcuucucaagcccacucuc

SEQ ID NO: 2631711 - RNA, 19 nt, Artificial Sequence
  Description of Artificial Sequence: Synthetic oligonucleotide
agacgccagcuucaaccca

SEQ ID NO: 2631712 - RNA, 19 nt, Artificial Sequence
  Description of Artificial Sequence: Synthetic oligonucleotide
ggcaggucaaaacucucaa

SEQ ID NO: 2631713 - RNA, 19 nt, Artificial Sequence
  Description of Artificial Sequence: Synthetic oligonucleotide
cuuguggcgcugagaucug

SEQ ID NO: 2631714 - RNA, 19 nt, Artificial Sequence
  Description of Artificial Sequence: Synthetic oligonucleotide
cuccucauucaggaucaug

SEQ ID NO: 2631715 - RNA, 19 nt, Artificial Sequence
  Description of Artificial Sequence: Synthetic oligonucleotide
cagguaggcaauucaacau

SEQ ID NO: 2631716 - RNA, 19 nt, Artificial Sequence
  Description of Artificial Sequence: Synthetic oligonucleotide
ggauucccacgguagaaaa

SEQ ID NO: 2631717 - RNA, 19 nt, Artificial Sequence
  Description of Artificial Sequence: Synthetic oligonucleotide
ccaaacggcugccugguuc

SEQ ID NO: 2631718 - RNA, 19 nt, Artificial Sequence
  Description of Artificial Sequence: Synthetic oligonucleotide
guaggcaauucaacaucca

SEQ ID NO: 2631719 - RNA, 19 nt, Artificial Sequence
  Description of Artificial Sequence: Synthetic oligonucleotide
gccauccuggauuacucca

SEQ ID NO: 2631720 - RNA, 19 nt, Artificial Sequence
  Description of Artificial Sequence: Synthetic oligonucleotide
caaacggcugccugguucu

SEQ ID NO: 2631721 - RNA, 19 nt, Artificial Sequence
  Description of Artificial Sequence: Synthetic oligonucleotide
gcugccugguucuucauua

SEQ ID NO: 2631722 - RNA, 19 nt, Artificial Sequence
  Description of Artificial Sequence: Synthetic oligonucleotide
gaucuucacuggcuuuucu

SEQ ID NO: 2631723 - RNA, 19 nt, Artificial Sequence
  Description of Artificial Sequence: Synthetic oligonucleotide
ggguaggcgucaucagaag

SEQ ID NO: 2631724 - RNA, 19 nt, Artificial Sequence
  Description of Artificial Sequence: Synthetic oligonucleotide
gcuucaacccauccuugga

SEQ ID NO: 2631725 - RNA, 19 nt, Artificial Sequence
  Description of Artificial Sequence: Synthetic oligonucleotide
ccauccuuggaugccaaac

SEQ ID NO: 2631726 - RNA, 19 nt, Artificial Sequence
  Description of Artificial Sequence: Synthetic oligonucleotide
acaccagacgccagcuuca

SEQ ID NO: 2631727 - RNA, 19 nt, Artificial Sequence
  Description of Artificial Sequence: Synthetic oligonucleotide
gggaagaacuuuucuauuu

SEQ ID NO: 2631728 - RNA, 19 nt, Artificial Sequence
  Description of Artificial Sequence: Synthetic oligonucleotide
caucagaagcaggaacaga

SEQ ID NO: 2631729 - RNA, 19 nt, Artificial Sequence
  Description of Artificial Sequence: Synthetic oligonucleotide
ugacaccagacgccagcuu

SEQ ID NO: 2631730 - RNA, 19 nt, Artificial Sequence
  Description of Artificial Sequence: Synthetic oligonucleotide
gcuuugacaccagacgcca

SEQ ID NO: 2631731 - RNA, 19 nt, Artificial Sequence
  Description of Artificial Sequence: Synthetic oligonucleotide
cuucaacccauccuuggau

SEQ ID NO: 2631732 - RNA, 19 nt, Artificial Sequence
  Description of Artificial Sequence: Synthetic oligonucleotide
aggcgucaucagaagcagg

SEQ ID NO: 2631733 - RNA, 19 nt, Artificial Sequence
  Description of Artificial Sequence: Synthetic oligonucleotide
agauagcaagggauuggau

SEQ ID NO: 2631734 - RNA, 19 nt, Artificial Sequence
  Description of Artificial Sequence: Synthetic oligonucleotide
ggcgucuucagaggcgaag

SEQ ID NO: 2631735 - RNA, 19 nt, Artificial Sequence
  Description of Artificial Sequence: Synthetic oligonucleotide
auuucuggguaggcgucau

SEQ ID NO: 2631736 - RNA, 19 nt, Artificial Sequence
  Description of Artificial Sequence: Synthetic oligonucleotide
ggaucaugagaggcacucc

SEQ ID NO: 2631737 - RNA, 19 nt, Artificial Sequence
  Description of Artificial Sequence: Synthetic oligonucleotide
aggcaagacuggagcauug

SEQ ID NO: 2631738 - RNA, 19 nt, Artificial Sequence
  Description of Artificial Sequence: Synthetic oligonucleotide
guaacccuguugacaguuc

SEQ ID NO: 2631739 - RNA, 19 nt, Artificial Sequence
  Description of Artificial Sequence: Synthetic oligonucleotide
gcuggcuuuaggcaagacu

SEQ ID NO: 2631740 - RNA, 19 nt, Artificial Sequence
  Description of Artificial Sequence: Synthetic oligonucleotide
aggggucuauugaucuuca

SEQ ID NO: 2631741 - RNA, 19 nt, Artificial Sequence
  Description of Artificial Sequence: Synthetic oligonucleotide
cauccagguuggagagaac

SEQ ID NO: 2631742 - RNA, 19 nt, Artificial Sequence
  Description of Artificial Sequence: Synthetic oligonucleotide
ggauuggauucccacggua

SEQ ID NO: 2631743 - RNA, 19 nt, Artificial Sequence
  Description of Artificial Sequence: Synthetic oligonucleotide
gcaagacuggagcauugaa

SEQ ID NO: 2631744 - RNA, 19 nt, Artificial Sequence
  Description of Artificial Sequence: Synthetic oligonucleotide
ccuguugacaguucccaaa

SEQ ID NO: 2631745 - RNA, 19 nt, Artificial Sequence
  Description of Artificial Sequence: Synthetic oligonucleotide
ggcuuuaggcaagacugga

SEQ ID NO: 2631746 - RNA, 19 nt, Artificial Sequence
  Description of Artificial Sequence: Synthetic oligonucleotide
ccaagacugcgccaccaac

SEQ ID NO: 2631747 - RNA, 19 nt, Artificial Sequence
  Description of Artificial Sequence: Synthetic oligonucleotide
agcuuuucugcuggcuuua

SEQ ID NO: 2631748 - RNA, 19 nt, Artificial Sequence
  Description of Artificial Sequence: Synthetic oligonucleotide
gguuggagagaacgcugga

SEQ ID NO: 2631749 - RNA, 19 nt, Artificial Sequence
  Description of Artificial Sequence: Synthetic oligonucleotide
guggcgcugagaucugcaa

SEQ ID NO: 2631750 - RNA, 19 nt, Artificial Sequence
  Description of Artificial Sequence: Synthetic oligonucleotide
acgguagaaaaggcgucuu

SEQ ID NO: 2631751 - RNA, 19 nt, Artificial Sequence
  Description of Artificial Sequence: Synthetic oligonucleotide
ccuuggaugccaaacggcu

SEQ ID NO: 2631752 - RNA, 19 nt, Artificial Sequence
  Description of Artificial Sequence: Synthetic oligonucleotide
ccacgguagaaaaggcguc

SEQ ID NO: 2631753 - RNA, 19 nt, Artificial Sequence
  Description of Artificial Sequence: Synthetic oligonucleotide
caaaaucuagaaggaaauu

SEQ ID NO: 2631754 - RNA, 19 nt, Artificial Sequence
  Description of Artificial Sequence: Synthetic oligonucleotide
gcaggucaaaacucucaaa

SEQ ID NO: 2631755 - RNA, 19 nt, Artificial Sequence
  Description of Artificial Sequence: Synthetic oligonucleotide
uggugcuccucgggcaggu

SEQ ID NO: 2631756 - RNA, 19 nt, Artificial Sequence
  Description of Artificial Sequence: Synthetic oligonucleotide
cccacgguagaaaaggcgu

SEQ ID NO: 2631757 - RNA, 19 nt, Artificial Sequence
  Description of Artificial Sequence: Synthetic oligonucleotide
cuggugcuccucgggcagg

SEQ ID NO: 2631758 - RNA, 19 nt, Artificial Sequence
  Description of Artificial Sequence: Synthetic oligonucleotide
ccuggauuacuccaagacu

SEQ ID NO: 2631759 - RNA, 19 nt, Artificial Sequence
  Description of Artificial Sequence: Synthetic oligonucleotide
agaacgcuggaaggagaua

SEQ ID NO: 2631760 - RNA, 19 nt, Artificial Sequence
  Description of Artificial Sequence: Synthetic oligonucleotide
caaagcuuuucugcuggcu

SEQ ID NO: 2631761 - RNA, 19 nt, Artificial Sequence
  Description of Artificial Sequence: Synthetic oligonucleotide
cacgguagaaaaggcgucu

SEQ ID NO: 2631762 - RNA, 19 nt, Artificial Sequence
  Description of Artificial Sequence: Synthetic oligonucleotide
cuccaagacugcgccacca

SEQ ID NO: 2631763 - RNA, 19 nt, Artificial Sequence
  Description of Artificial Sequence: Synthetic oligonucleotide
gggcaggucaaaacucuca

SEQ ID NO: 2631764 - RNA, 19 nt, Artificial Sequence
  Description of Artificial Sequence: Synthetic oligonucleotide
ugcuggcuuuaggcaagac

SEQ ID NO: 2631765 - RNA, 19 nt, Artificial Sequence
  Description of Artificial Sequence: Synthetic oligonucleotide
ggcgcugagaucugcaauu

SEQ ID NO: 2631766 - RNA, 19 nt, Artificial Sequence
  Description of Artificial Sequence: Synthetic oligonucleotide
ggggucuauugaucuucac

SEQ ID NO: 2631767 - RNA, 19 nt, Artificial Sequence
  Description of Artificial Sequence: Synthetic oligonucleotide
acgccagcuucaacccauc

SEQ ID NO: 2631768 - RNA, 19 nt, Artificial Sequence
  Description of Artificial Sequence: Synthetic oligonucleotide
ggcaagacuggagcauuga

SEQ ID NO: 2631769 - RNA, 19 nt, Artificial Sequence
  Description of Artificial Sequence: Synthetic oligonucleotide
gcuuuucugcuggcuuuag

SEQ ID NO: 2631770 - RNA, 19 nt, Artificial Sequence
  Description of Artificial Sequence: Synthetic oligonucleotide
ccauccuggauuacuccaa

SEQ ID NO: 2631771 - RNA, 19 nt, Artificial Sequence
  Description of Artificial Sequence: Synthetic oligonucleotide
ucuccucauucaggaucau

SEQ ID NO: 2631772 - RNA, 19 nt, Artificial Sequence
  Description of Artificial Sequence: Synthetic oligonucleotide
guugugucuuaggagccuu

SEQ ID NO: 2631773 - RNA, 19 nt, Artificial Sequence
  Description of Artificial Sequence: Synthetic oligonucleotide
ggggaagaacuuuucuauu

SEQ ID NO: 2631774 - RNA, 19 nt, Artificial Sequence
  Description of Artificial Sequence: Synthetic oligonucleotide
gggagaugugcaaucuggu

SEQ ID NO: 2631775 - RNA, 19 nt, Artificial Sequence
  Description of Artificial Sequence: Synthetic oligonucleotide
cuucuguuugaggggucua

SEQ ID NO: 2631776 - RNA, 19 nt, Artificial Sequence
  Description of Artificial Sequence: Synthetic oligonucleotide
gcguagccauccuggauua

SEQ ID NO: 2631777 - RNA, 19 nt, Artificial Sequence
  Description of Artificial Sequence: Synthetic oligonucleotide
ccucgggcaggucaaaacu

SEQ ID NO: 2631778 - RNA, 19 nt, Artificial Sequence
  Description of Artificial Sequence: Synthetic oligonucleotide
caggaucaugagaggcacu

SEQ ID NO: 2631779 - RNA, 19 nt, Artificial Sequence
  Description of Artificial Sequence: Synthetic oligonucleotide
auuucccaucugaggcuuu

SEQ ID NO: 2631780 - RNA, 19 nt, Artificial Sequence
  Description of Artificial Sequence: Synthetic oligonucleotide
gcuucuguuugaggggucu

SEQ ID NO: 2631781 - RNA, 19 nt, Artificial Sequence
  Description of Artificial Sequence: Synthetic oligonucleotide
ggcuuuucuguaacccugu

SEQ ID NO: 2631782 - RNA, 19 nt, Artificial Sequence
  Description of Artificial Sequence: Synthetic oligonucleotide
gggauuggauucccacggu

SEQ ID NO: 2631783 - RNA, 19 nt, Artificial Sequence
  Description of Artificial Sequence: Synthetic oligonucleotide
ccaacuuguggcgcugaga

SEQ ID NO: 2631784 - RNA, 19 nt, Artificial Sequence
  Description of Artificial Sequence: Synthetic oligonucleotide
ccagguuggagagaacgcu

SEQ ID NO: 2631785 - RNA, 19 nt, Artificial Sequence
  Description of Artificial Sequence: Synthetic oligonucleotide
acccauccuuggaugccaa

SEQ ID NO: 2631786 - RNA, 19 nt, Artificial Sequence
  Description of Artificial Sequence: Synthetic oligonucleotide
cagagacuuguugugucuu

SEQ ID NO: 2631787 - RNA, 19 nt, Artificial Sequence
  Description of Artificial Sequence: Synthetic oligonucleotide
cagucaaaguugguugcuu

SEQ ID NO: 2631788 - RNA, 19 nt, Artificial Sequence
  Description of Artificial Sequence: Synthetic oligonucleotide
gcaauucaacauccagguu

SEQ ID NO: 2631789 - RNA, 19 nt, Artificial Sequence
  Description of Artificial Sequence: Synthetic oligonucleotide
cgcugagaucugcaauuuc

SEQ ID NO: 2631790 - RNA, 19 nt, Artificial Sequence
  Description of Artificial Sequence: Synthetic oligonucleotide
cuccucgggcaggucaaaa

SEQ ID NO: 2631791 - RNA, 19 nt, Artificial Sequence
  Description of Artificial Sequence: Synthetic oligonucleotide
gcgucaucagaagcaggaa

SEQ ID NO: 2631792 - RNA, 19 nt, Artificial Sequence
  Description of Artificial Sequence: Synthetic oligonucleotide
cgggcaggucaaaacucuc

SEQ ID NO: 2631793 - RNA, 19 nt, Artificial Sequence
  Description of Artificial Sequence: Synthetic oligonucleotide
cagcguagccauccuggau

SEQ ID NO: 2631794 - RNA, 19 nt, Artificial Sequence
  Description of Artificial Sequence: Synthetic oligonucleotide
caccagacgccagcuucaa

SEQ ID NO: 2631795 - RNA, 19 nt, Artificial Sequence
  Description of Artificial Sequence: Synthetic oligonucleotide
cccuguugacaguucccaa

SEQ ID NO: 2631796 - RNA, 19 nt, Artificial Sequence
  Description of Artificial Sequence: Synthetic oligonucleotide
aggcgucuucagaggcgaa

SEQ ID NO: 2631797 - RNA, 19 nt, Artificial Sequence
  Description of Artificial Sequence: Synthetic oligonucleotide
ggcugccugguucuucauu

SEQ ID NO: 2631798 - RNA, 19 nt, Artificial Sequence
  Description of Artificial Sequence: Synthetic oligonucleotide
ggaugccaaacggcugccu

SEQ ID NO: 2631799 - RNA, 19 nt, Artificial Sequence
  Description of Artificial Sequence: Synthetic oligonucleotide
cuggagcauugaacacuuu

SEQ ID NO: 2631800 - RNA, 19 nt, Artificial Sequence
  Description of Artificial Sequence: Synthetic oligonucleotide
ggugcuccucgggcagguc

SEQ ID NO: 2631801 - RNA, 19 nt, Artificial Sequence
  Description of Artificial Sequence: Synthetic oligonucleotide
cguagccauccuggauuac

SEQ ID NO: 2631802 - RNA, 19 nt, Artificial Sequence
  Description of Artificial Sequence: Synthetic oligonucleotide
gcgcugagaucugcaauuu

SEQ ID NO: 2631803 - RNA, 19 nt, Artificial Sequence
  Description of Artificial Sequence: Synthetic oligonucleotide
gcuccucgggcaggucaaa

SEQ ID NO: 2631804 - RNA, 19 nt, Artificial Sequence
  Description of Artificial Sequence: Synthetic oligonucleotide
gccaaacggcugccugguu

SEQ ID NO: 2631805 - RNA, 19 nt, Artificial Sequence
  Description of Artificial Sequence: Synthetic oligonucleotide
uuuucuagaacccagauag

SEQ ID NO: 2631806 - RNA, 19 nt, Artificial Sequence
  Description of Artificial Sequence: Synthetic oligonucleotide
aaaacaauuacucuguuca

SEQ ID NO: 2631807 - RNA, 19 nt, Artificial Sequence
  Description of Artificial Sequence: Synthetic oligonucleotide
uuuagugagaccaaauagc

SEQ ID NO: 2631808 - RNA, 19 nt, Artificial Sequence
  Description of Artificial Sequence: Synthetic oligonucleotide
uuuaaguucagcaucacuc

SEQ ID NO: 2631809 - RNA, 19 nt, Artificial Sequence
  Description of Artificial Sequence: Synthetic oligonucleotide
aauacuaaggaguugggaa

SEQ ID NO: 2631810 - RNA, 19 nt, Artificial Sequence
  Description of Artificial Sequence: Synthetic oligonucleotide
aggaaugcgaguaagaccc

SEQ ID NO: 2631811 - RNA, 19 nt, Artificial Sequence
  Description of Artificial Sequence: Synthetic oligonucleotide
aauuacucuguucaaaaga

SEQ ID NO: 2631812 - RNA, 19 nt, Artificial Sequence
  Description of Artificial Sequence: Synthetic oligonucleotide
ucuuuuaaauccuagacau

SEQ ID NO: 2631813 - RNA, 19 nt, Artificial Sequence
  Description of Artificial Sequence: Synthetic oligonucleotide
uuuacaaucugcuuaaguc

SEQ ID NO: 2631814 - RNA, 19 nt, Artificial Sequence
  Description of Artificial Sequence: Synthetic oligonucleotide
acuuaaugugccuuugucc

SEQ ID NO: 2631815 - RNA, 19 nt, Artificial Sequence
  Description of Artificial Sequence: Synthetic oligonucleotide
aauccuagacauuuuacug

SEQ ID NO: 2631816 - RNA, 19 nt, Artificial Sequence
  Description of Artificial Sequence: Synthetic oligonucleotide
uguggguaaaauacuaagg

SEQ ID NO: 2631817 - RNA, 19 nt, Artificial Sequence
  Description of Artificial Sequence: Synthetic oligonucleotide
aaaacucuguuuuauuucu

SEQ ID NO: 2631818 - RNA, 19 nt, Artificial Sequence
  Description of Artificial Sequence: Synthetic oligonucleotide
aaauccuagacauuuuacu

SEQ ID NO: 2631819 - RNA, 19 nt, Artificial Sequence
  Description of Artificial Sequence: Synthetic oligonucleotide
uacacuugaacuuaaugug

SEQ ID NO: 2631820 - RNA, 19 nt, Artificial Sequence
  Description of Artificial Sequence: Synthetic oligonucleotide
cacucuucagauaugaugc

SEQ ID NO: 2631821 - RNA, 19 nt, Artificial Sequence
  Description of Artificial Sequence: Synthetic oligonucleotide
aauguucuaccucaguucu

SEQ ID NO: 2631822 - RNA, 19 nt, Artificial Sequence
  Description of Artificial Sequence: Synthetic oligonucleotide
guacaagucuuuuaaaucc

SEQ ID NO: 2631823 - RNA, 19 nt, Artificial Sequence
  Description of Artificial Sequence: Synthetic oligonucleotide
uucaucaaacugcuaacgg

SEQ ID NO: 2631824 - RNA, 19 nt, Artificial Sequence
  Description of Artificial Sequence: Synthetic oligonucleotide
uacucuguucaaaagauac

SEQ ID NO: 2631825 - RNA, 19 nt, Artificial Sequence
  Description of Artificial Sequence: Synthetic oligonucleotide
ucaaaagauacacuugaac

SEQ ID NO: 2631826 - RNA, 19 nt, Artificial Sequence
  Description of Artificial Sequence: Synthetic oligonucleotide
ucuuagaaaacucuguuuu

SEQ ID NO: 2631827 - RNA, 19 nt, Artificial Sequence
  Description of Artificial Sequence: Synthetic oligonucleotide
ugagagagaacuacuguag

SEQ ID NO: 2631828 - RNA, 19 nt, Artificial Sequence
  Description of Artificial Sequence: Synthetic oligonucleotide
ugcuaacggaaucagaacc

SEQ ID NO: 2631829 - RNA, 19 nt, Artificial Sequence
  Description of Artificial Sequence: Synthetic oligonucleotide
uauuccaucuucuuaauau

SEQ ID NO: 2631830 - RNA, 19 nt, Artificial Sequence
  Description of Artificial Sequence: Synthetic oligonucleotide
uuagugagaccaaauagcu

SEQ ID NO: 2631831 - RNA, 19 nt, Artificial Sequence
  Description of Artificial Sequence: Synthetic oligonucleotide
cuuuagugagaccaaauag

SEQ ID NO: 2631832 - RNA, 19 nt, Artificial Sequence
  Description of Artificial Sequence: Synthetic oligonucleotide
augacugugucacuagccc

SEQ ID NO: 2631833 - RNA, 19 nt, Artificial Sequence
  Description of Artificial Sequence: Synthetic oligonucleotide
auacuaaggaguugggaac

SEQ ID NO: 2631834 - RNA, 19 nt, Artificial Sequence
  Description of Artificial Sequence: Synthetic oligonucleotide
cuacucuucaucaaacugc

SEQ ID NO: 2631835 - RNA, 19 nt, Artificial Sequence
  Description of Artificial Sequence: Synthetic oligonucleotide
uucaguguagcuuuuauua

SEQ ID NO: 2631836 - RNA, 19 nt, Artificial Sequence
  Description of Artificial Sequence: Synthetic oligonucleotide
uuacaaucugcuuaagucu

SEQ ID NO: 2631837 - RNA, 19 nt, Artificial Sequence
  Description of Artificial Sequence: Synthetic oligonucleotide
ucuguuccauucaugauca

SEQ ID NO: 2631838 - RNA, 19 nt, Artificial Sequence
  Description of Artificial Sequence: Synthetic oligonucleotide
aguaguacaagucuuuuaa

SEQ ID NO: 2631839 - RNA, 19 nt, Artificial Sequence
  Description of Artificial Sequence: Synthetic oligonucleotide
uggguaaaauacuaaggag

SEQ ID NO: 2631840 - RNA, 19 nt, Artificial Sequence
  Description of Artificial Sequence: Synthetic oligonucleotide
uguucaaaagauacacuug

SEQ ID NO: 2631841 - RNA, 19 nt, Artificial Sequence
  Description of Artificial Sequence: Synthetic oligonucleotide
ucacucuucagauaugaug

SEQ ID NO: 2631842 - RNA, 19 nt, Artificial Sequence
  Description of Artificial Sequence: Synthetic oligonucleotide
agugagaccaaauagcuuu

SEQ ID NO: 2631843 - RNA, 19 nt, Artificial Sequence
  Description of Artificial Sequence: Synthetic oligonucleotide
agaacuacuguaguaguac

SEQ ID NO: 2631844 - RNA, 19 nt, Artificial Sequence
  Description of Artificial Sequence: Synthetic oligonucleotide
uugggaacuggcaacaucu

SEQ ID NO: 2631845 - RNA, 19 nt, Artificial Sequence
  Description of Artificial Sequence: Synthetic oligonucleotide
aacuggcaacaucuguucc

SEQ ID NO: 2631846 - RNA, 19 nt, Artificial Sequence
  Description of Artificial Sequence: Synthetic oligonucleotide
aauguuauguugcgguacu

SEQ ID NO: 2631847 - RNA, 19 nt, Artificial Sequence
  Description of Artificial Sequence: Synthetic oligonucleotide
acuguaguaguacaagucu

SEQ ID NO: 2631848 - RNA, 19 nt, Artificial Sequence
  Description of Artificial Sequence: Synthetic oligonucleotide
ucuguuuuauuucuucuuc

SEQ ID NO: 2631849 - RNA, 19 nt, Artificial Sequence
  Description of Artificial Sequence: Synthetic oligonucleotide
uuuuacaaucugcuuaagu

SEQ ID NO: 2631850 - RNA, 19 nt, Artificial Sequence
  Description of Artificial Sequence: Synthetic oligonucleotide
ugugcuauggcuugugaca

SEQ ID NO: 2631851 - RNA, 19 nt, Artificial Sequence
  Description of Artificial Sequence: Synthetic oligonucleotide
uucaugaucaugacugugu

SEQ ID NO: 2631852 - RNA, 19 nt, Artificial Sequence
  Description of Artificial Sequence: Synthetic oligonucleotide
gagagaacuacuguaguag

SEQ ID NO: 2631853 - RNA, 19 nt, Artificial Sequence
  Description of Artificial Sequence: Synthetic oligonucleotide
gaaaacucuguuuuauuuc

SEQ ID NO: 2631854 - RNA, 19 nt, Artificial Sequence
  Description of Artificial Sequence: Synthetic oligonucleotide
augggagcaauguucuacc

SEQ ID NO: 2631855 - RNA, 19 nt, Artificial Sequence
  Description of Artificial Sequence: Synthetic oligonucleotide
aagacccacucucaaaucu

SEQ ID NO: 2631856 - RNA, 19 nt, Artificial Sequence
  Description of Artificial Sequence: Synthetic oligonucleotide
uuacgcauuucuucaagag

SEQ ID NO: 2631857 - RNA, 19 nt, Artificial Sequence
  Description of Artificial Sequence: Synthetic oligonucleotide
ucagauaugaugccuuagu

SEQ ID NO: 2631858 - RNA, 19 nt, Artificial Sequence
  Description of Artificial Sequence: Synthetic oligonucleotide
auguggguaaaauacuaag

SEQ ID NO: 2631859 - RNA, 19 nt, Artificial Sequence
  Description of Artificial Sequence: Synthetic oligonucleotide
uauguugcgguacuucuga

SEQ ID NO: 2631860 - RNA, 19 nt, Artificial Sequence
  Description of Artificial Sequence: Synthetic oligonucleotide
uuaaguucagcaucacucu

SEQ ID NO: 2631861 - RNA, 19 nt, Artificial Sequence
  Description of Artificial Sequence: Synthetic oligonucleotide
guucaaaagauacacuuga

SEQ ID NO: 2631862 - RNA, 19 nt, Artificial Sequence
  Description of Artificial Sequence: Synthetic oligonucleotide
uaaauccuagacauuuuac

SEQ ID NO: 2631863 - RNA, 19 nt, Artificial Sequence
  Description of Artificial Sequence: Synthetic oligonucleotide
uaagagcuacucuucauca

SEQ ID NO: 2631864 - RNA, 19 nt, Artificial Sequence
  Description of Artificial Sequence: Synthetic oligonucleotide
uacgcauuucuucaagagc

SEQ ID NO: 2631865 - RNA, 19 nt, Artificial Sequence
  Description of Artificial Sequence: Synthetic oligonucleotide
uuaaauccuagacauuuua

SEQ ID NO: 2631866 - RNA, 19 nt, Artificial Sequence
  Description of Artificial Sequence: Synthetic oligonucleotide
ucuaccucaguucucuugu

SEQ ID NO: 2631867 - RNA, 19 nt, Artificial Sequence
  Description of Artificial Sequence: Synthetic oligonucleotide
caaaucuuuagugagacca

SEQ ID NO: 2631868 - RNA, 19 nt, Artificial Sequence
  Description of Artificial Sequence: Synthetic oligonucleotide
uguuuuauuucuucuuccu

SEQ ID NO: 2631869 - RNA, 19 nt, Artificial Sequence
  Description of Artificial Sequence: Synthetic oligonucleotide
guuucuucuaauucuggug

SEQ ID NO: 2631870 - RNA, 19 nt, Artificial Sequence
  Description of Artificial Sequence: Synthetic oligonucleotide
ucuuuagugagaccaaaua

SEQ ID NO: 2631871 - RNA, 19 nt, Artificial Sequence
  Description of Artificial Sequence: Synthetic oligonucleotide
uuuguaagagcuacucuuc

SEQ ID NO: 2631872 - RNA, 19 nt, Artificial Sequence
  Description of Artificial Sequence: Synthetic oligonucleotide
agaaccuuuucuagaaccc

SEQ ID NO: 2631873 - RNA, 19 nt, Artificial Sequence
  Description of Artificial Sequence: Synthetic oligonucleotide
guggguaaaauacuaagga

SEQ ID NO: 2631874 - RNA, 19 nt, Artificial Sequence
  Description of Artificial Sequence: Synthetic oligonucleotide
ucugcuuaagucuucuuau

SEQ ID NO: 2631875 - RNA, 19 nt, Artificial Sequence
  Description of Artificial Sequence: Synthetic oligonucleotide
uucuuuucuuagaaaacuc

SEQ ID NO: 2631876 - RNA, 19 nt, Artificial Sequence
  Description of Artificial Sequence: Synthetic oligonucleotide
uaaaacaauuacucuguuc

SEQ ID NO: 2631877 - RNA, 19 nt, Artificial Sequence
  Description of Artificial Sequence: Synthetic oligonucleotide
aaagauacacuugaacuua

SEQ ID NO: 2631878 - RNA, 19 nt, Artificial Sequence
  Description of Artificial Sequence: Synthetic oligonucleotide
agauaugaugccuuaguau

SEQ ID NO: 2631879 - RNA, 19 nt, Artificial Sequence
  Description of Artificial Sequence: Synthetic oligonucleotide
cacucucaaaucuuuagug

SEQ ID NO: 2631880 - RNA, 19 nt, Artificial Sequence
  Description of Artificial Sequence: Synthetic oligonucleotide
cacuugaacuuaaugugcc

SEQ ID NO: 2631881 - RNA, 19 nt, Artificial Sequence
  Description of Artificial Sequence: Synthetic oligonucleotide
uggcuugugacaauguuau

SEQ ID NO: 2631882 - RNA, 19 nt, Artificial Sequence
  Description of Artificial Sequence: Synthetic oligonucleotide
uguguauuccaucuucuua

SEQ ID NO: 2631883 - RNA, 19 nt, Artificial Sequence
  Description of Artificial Sequence: Synthetic oligonucleotide
gugacaauguuauguugcg

SEQ ID NO: 2631884 - RNA, 19 nt, Artificial Sequence
  Description of Artificial Sequence: Synthetic oligonucleotide
cucuguucaaaagauacac

SEQ ID NO: 2631885 - RNA, 19 nt, Artificial Sequence
  Description of Artificial Sequence: Synthetic oligonucleotide
aaauacuaaggaguuggga

SEQ ID NO: 2631886 - RNA, 19 nt, Artificial Sequence
  Description of Artificial Sequence: Synthetic oligonucleotide
aucuuuguaagagcuacuc

SEQ ID NO: 2631887 - RNA, 19 nt, Artificial Sequence
  Description of Artificial Sequence: Synthetic oligonucleotide
ugcgguacuucugaugugg

SEQ ID NO: 2631888 - RNA, 19 nt, Artificial Sequence
  Description of Artificial Sequence: Synthetic oligonucleotide
ucuucaucaaacugcuaac

SEQ ID NO: 2631889 - RNA, 19 nt, Artificial Sequence
  Description of Artificial Sequence: Synthetic oligonucleotide
acucucaaaucuuuaguga

SEQ ID NO: 2631890 - RNA, 19 nt, Artificial Sequence
  Description of Artificial Sequence: Synthetic oligonucleotide
ucuuuguaagagcuacucu

SEQ ID NO: 2631891 - RNA, 19 nt, Artificial Sequence
  Description of Artificial Sequence: Synthetic oligonucleotide
ucuguucaaaagauacacu

SEQ ID NO: 2631892 - RNA, 19 nt, Artificial Sequence
  Description of Artificial Sequence: Synthetic oligonucleotide
acuacuguaguaguacaag

SEQ ID NO: 2631893 - RNA, 19 nt, Artificial Sequence
  Description of Artificial Sequence: Synthetic oligonucleotide
caagucuuuuaaauccuag

SEQ ID NO: 2631894 - RNA, 19 nt, Artificial Sequence
  Description of Artificial Sequence: Synthetic oligonucleotide
aaguucagcaucacucuuc

SEQ ID NO: 2631895 - RNA, 19 nt, Artificial Sequence
  Description of Artificial Sequence: Synthetic oligonucleotide
uuagaaaacucuguuuuau

SEQ ID NO: 2631896 - RNA, 19 nt, Artificial Sequence
  Description of Artificial Sequence: Synthetic oligonucleotide
gauaugaugccuuaguauu

SEQ ID NO: 2631897 - RNA, 19 nt, Artificial Sequence
  Description of Artificial Sequence: Synthetic oligonucleotide
uuauguugcgguacuucug

SEQ ID NO: 2631898 - RNA, 19 nt, Artificial Sequence
  Description of Artificial Sequence: Synthetic oligonucleotide
ugguuucuucuaauucugg

SEQ ID NO: 2631899 - RNA, 19 nt, Artificial Sequence
  Description of Artificial Sequence: Synthetic oligonucleotide
ucaaacugcuaacggaauc

SEQ ID NO: 2631900 - RNA, 19 nt, Artificial Sequence
  Description of Artificial Sequence: Synthetic oligonucleotide
uccauucaugaucaugacu

SEQ ID NO: 2631901 - RNA, 19 nt, Artificial Sequence
  Description of Artificial Sequence: Synthetic oligonucleotide
uguaguaguacaagucuuu

SEQ ID NO: 2631902 - RNA, 19 nt, Artificial Sequence
  Description of Artificial Sequence: Synthetic oligonucleotide
ucaggaaugcgaguaagac

SEQ ID NO: 2631903 - RNA, 19 nt, Artificial Sequence
  Description of Artificial Sequence: Synthetic oligonucleotide
uuguaagagcuacucuuca

SEQ ID NO: 2631904 - RNA, 19 nt, Artificial Sequence
  Description of Artificial Sequence: Synthetic oligonucleotide
caauuacucuguucaaaag

SEQ ID NO: 2631905 - RNA, 19 nt, Artificial Sequence
  Description of Artificial Sequence: Synthetic oligonucleotide
gacaauguuauguugcggu

SEQ ID NO: 2631906 - RNA, 19 nt, Artificial Sequence
  Description of Artificial Sequence: Synthetic oligonucleotide
aacaauuacucuguucaaa

SEQ ID NO: 2631907 - RNA, 19 nt, Artificial Sequence
  Description of Artificial Sequence: Synthetic oligonucleotide
caggaaugcgaguaagacc

SEQ ID NO: 2631908 - RNA, 19 nt, Artificial Sequence
  Description of Artificial Sequence: Synthetic oligonucleotide
cucaaaucuuuagugagac

SEQ ID NO: 2631909 - RNA, 19 nt, Artificial Sequence
  Description of Artificial Sequence: Synthetic oligonucleotide
uguucuaccucaguucucu

SEQ ID NO: 2631910 - RNA, 19 nt, Artificial Sequence
  Description of Artificial Sequence: Synthetic oligonucleotide
augcgaguaagacccacuc

SEQ ID NO: 2631911 - RNA, 19 nt, Artificial Sequence
  Description of Artificial Sequence: Synthetic oligonucleotide
uacaaucugcuuaagucuu

SEQ ID NO: 2631912 - RNA, 19 nt, Artificial Sequence
  Description of Artificial Sequence: Synthetic oligonucleotide
uguuccauucaugaucaug

SEQ ID NO: 2631913 - RNA, 19 nt, Artificial Sequence
  Description of Artificial Sequence: Synthetic oligonucleotide
aaacaauuacucuguucaa

SEQ ID NO: 2631914 - RNA, 19 nt, Artificial Sequence
  Description of Artificial Sequence: Synthetic oligonucleotide
uucaaaagauacacuugaa

SEQ ID NO: 2631915 - RNA, 19 nt, Artificial Sequence
  Description of Artificial Sequence: Synthetic oligonucleotide
uucuagaacccagauaguc

SEQ ID NO: 2631916 - RNA, 19 nt, Artificial Sequence
  Description of Artificial Sequence: Synthetic oligonucleotide
ucaugacugugucacuagc

SEQ ID NO: 2631917 - RNA, 19 nt, Artificial Sequence
  Description of Artificial Sequence: Synthetic oligonucleotide
guaagagcuacucuucauc

SEQ ID NO: 2631918 - RNA, 19 nt, Artificial Sequence
  Description of Artificial Sequence: Synthetic oligonucleotide
ugcuuaagucuucuuauuu

SEQ ID NO: 2631919 - RNA, 19 nt, Artificial Sequence
  Description of Artificial Sequence: Synthetic oligonucleotide
guguauuccaucuucuuaa

SEQ ID NO: 2631920 - RNA, 19 nt, Artificial Sequence
  Description of Artificial Sequence: Synthetic oligonucleotide
acgcauuucuucaagagcu

SEQ ID NO: 2631921 - RNA, 19 nt, Artificial Sequence
  Description of Artificial Sequence: Synthetic oligonucleotide
cuuaaugugccuuuguccu

SEQ ID NO: 2631922 - RNA, 19 nt, Artificial Sequence
  Description of Artificial Sequence: Synthetic oligonucleotide
uagcuuuuauuaaaacaau

SEQ ID NO: 2631923 - RNA, 19 nt, Artificial Sequence
  Description of Artificial Sequence: Synthetic oligonucleotide
aaacugcuaacggaaucag

SEQ ID NO: 2631924 - RNA, 19 nt, Artificial Sequence
  Description of Artificial Sequence: Synthetic oligonucleotide
uuuaaauccuagacauuuu

SEQ ID NO: 2631925 - RNA, 19 nt, Artificial Sequence
  Description of Artificial Sequence: Synthetic oligonucleotide
ucuaauucuggugguguca

SEQ ID NO: 2631926 - RNA, 19 nt, Artificial Sequence
  Description of Artificial Sequence: Synthetic oligonucleotide
acugcuaacggaaucagaa

SEQ ID NO: 2631927 - RNA, 19 nt, Artificial Sequence
  Description of Artificial Sequence: Synthetic oligonucleotide
cucuucaucaaacugcuaa

SEQ ID NO: 2631928 - RNA, 19 nt, Artificial Sequence
  Description of Artificial Sequence: Synthetic oligonucleotide
acucuguuuuauuucuucu

SEQ ID NO: 2631929 - RNA, 19 nt, Artificial Sequence
  Description of Artificial Sequence: Synthetic oligonucleotide
agauagucaggaaugcgag

SEQ ID NO: 2631930 - RNA, 19 nt, Artificial Sequence
  Description of Artificial Sequence: Synthetic oligonucleotide
uucuaccucaguucucuug

SEQ ID NO: 2631931 - RNA, 19 nt, Artificial Sequence
  Description of Artificial Sequence: Synthetic oligonucleotide
ugacaauguuauguugcgg

SEQ ID NO: 2631932 - RNA, 19 nt, Artificial Sequence
  Description of Artificial Sequence: Synthetic oligonucleotide
acaaacucugcaucuuugu

SEQ ID NO: 2631933 - RNA, 19 nt, Artificial Sequence
  Description of Artificial Sequence: Synthetic oligonucleotide
agagcuacucuucaucaaa

SEQ ID NO: 2631934 - RNA, 19 nt, Artificial Sequence
  Description of Artificial Sequence: Synthetic oligonucleotide
augucuucaguguagcuuu

SEQ ID NO: 2631935 - RNA, 19 nt, Artificial Sequence
  Description of Artificial Sequence: Synthetic oligonucleotide
uguugcgguacuucugaug

SEQ ID NO: 2631936 - RNA, 19 nt, Artificial Sequence
  Description of Artificial Sequence: Synthetic oligonucleotide
uaaugugccuuuguccugc

SEQ ID NO: 2631937 - RNA, 19 nt, Artificial Sequence
  Description of Artificial Sequence: Synthetic oligonucleotide
cagauagucaggaaugcga

SEQ ID NO: 2631938 - RNA, 19 nt, Artificial Sequence
  Description of Artificial Sequence: Synthetic oligonucleotide
acuggcaacaucuguucca

SEQ ID NO: 2631939 - RNA, 19 nt, Artificial Sequence
  Description of Artificial Sequence: Synthetic oligonucleotide
ucaaaucuuuagugagacc

SEQ ID NO: 2631940 - RNA, 19 nt, Artificial Sequence
  Description of Artificial Sequence: Synthetic oligonucleotide
ggagcaauguucuaccuca

SEQ ID NO: 2631941 - RNA, 19 nt, Artificial Sequence
  Description of Artificial Sequence: Synthetic oligonucleotide
uuaaaacaauuacucuguu

SEQ ID NO: 2631942 - RNA, 19 nt, Artificial Sequence
  Description of Artificial Sequence: Synthetic oligonucleotide
uugugcuauggcuugugac

SEQ ID NO: 2631943 - RNA, 19 nt, Artificial Sequence
  Description of Artificial Sequence: Synthetic oligonucleotide
aauucugguggugucacua

SEQ ID NO: 2631944 - RNA, 19 nt, Artificial Sequence
  Description of Artificial Sequence: Synthetic oligonucleotide
ucacuagcccucuuaauuu

SEQ ID NO: 2631945 - RNA, 19 nt, Artificial Sequence
  Description of Artificial Sequence: Synthetic oligonucleotide
gaacuggcaacaucuguuc

SEQ ID NO: 2631946 - RNA, 19 nt, Artificial Sequence
  Description of Artificial Sequence: Synthetic oligonucleotide
ucugguggugucacuagaa

SEQ ID NO: 2631947 - RNA, 19 nt, Artificial Sequence
  Description of Artificial Sequence: Synthetic oligonucleotide
uucagauaugaugccuuag

SEQ ID NO: 2631948 - RNA, 19 nt, Artificial Sequence
  Description of Artificial Sequence: Synthetic oligonucleotide
aucugcuuaagucuucuua

SEQ ID NO: 2631949 - RNA, 19 nt, Artificial Sequence
  Description of Artificial Sequence: Synthetic oligonucleotide
uauggcuugugacaauguu

SEQ ID NO: 2631950 - RNA, 19 nt, Artificial Sequence
  Description of Artificial Sequence: Synthetic oligonucleotide
uucugauguggguaaaaua

SEQ ID NO: 2631951 - RNA, 19 nt, Artificial Sequence
  Description of Artificial Sequence: Synthetic oligonucleotide
agagagaacuacuguagua

SEQ ID NO: 2631952 - RNA, 19 nt, Artificial Sequence
  Description of Artificial Sequence: Synthetic oligonucleotide
caugggagcaauguucuac

SEQ ID NO: 2631953 - RNA, 19 nt, Artificial Sequence
  Description of Artificial Sequence: Synthetic oligonucleotide
uguaagagcuacucuucau

SEQ ID NO: 2631954 - RNA, 19 nt, Artificial Sequence
  Description of Artificial Sequence: Synthetic oligonucleotide
aaucuuuagugagaccaaa

SEQ ID NO: 2631955 - RNA, 19 nt, Artificial Sequence
  Description of Artificial Sequence: Synthetic oligonucleotide
ugugucacuagcccucuua

SEQ ID NO: 2631956 - RNA, 19 nt, Artificial Sequence
  Description of Artificial Sequence: Synthetic oligonucleotide
uccuagacauuuuacuguu

SEQ ID NO: 2631957 - RNA, 19 nt, Artificial Sequence
  Description of Artificial Sequence: Synthetic oligonucleotide
auagucaggaaugcgagua

SEQ ID NO: 2631958 - RNA, 19 nt, Artificial Sequence
  Description of Artificial Sequence: Synthetic oligonucleotide
guugcgguacuucugaugu

SEQ ID NO: 2631959 - RNA, 19 nt, Artificial Sequence
  Description of Artificial Sequence: Synthetic oligonucleotide
uugaacuuaaugugccuuu

SEQ ID NO: 2631960 - RNA, 19 nt, Artificial Sequence
  Description of Artificial Sequence: Synthetic oligonucleotide
aagagcuacucuucaucaa

SEQ ID NO: 2631961 - RNA, 19 nt, Artificial Sequence
  Description of Artificial Sequence: Synthetic oligonucleotide
uguuauguugcgguacuuc

SEQ ID NO: 2631962 - RNA, 19 nt, Artificial Sequence
  Description of Artificial Sequence: Synthetic oligonucleotide
cacaaacucugcaucuuug

SEQ ID NO: 2631963 - RNA, 19 nt, Artificial Sequence
  Description of Artificial Sequence: Synthetic oligonucleotide
auucugguggugucacuag

SEQ ID NO: 2631964 - RNA, 19 nt, Artificial Sequence
  Description of Artificial Sequence: Synthetic oligonucleotide
guaaaauacuaaggaguug

SEQ ID NO: 2631965 - RNA, 19 nt, Artificial Sequence
  Description of Artificial Sequence: Synthetic oligonucleotide
gcuacucuucaucaaacug

SEQ ID NO: 2631966 - RNA, 19 nt, Artificial Sequence
  Description of Artificial Sequence: Synthetic oligonucleotide
aguaagacccacucucaaa

SEQ ID NO: 2631967 - RNA, 19 nt, Artificial Sequence
  Description of Artificial Sequence: Synthetic oligonucleotide
uacuaaggaguugggaacu

SEQ ID NO: 2631968 - RNA, 19 nt, Artificial Sequence
  Description of Artificial Sequence: Synthetic oligonucleotide
aacggaaucagaaccuuuu

SEQ ID NO: 2631969 - RNA, 19 nt, Artificial Sequence
  Description of Artificial Sequence: Synthetic oligonucleotide
caauguuauguugcgguac

SEQ ID NO: 2631970 - RNA, 19 nt, Artificial Sequence
  Description of Artificial Sequence: Synthetic oligonucleotide
acuugaacuuaaugugccu

SEQ ID NO: 2631971 - RNA, 19 nt, Artificial Sequence
  Description of Artificial Sequence: Synthetic oligonucleotide
ugacugugucacuagcccu

SEQ ID NO: 2631972 - RNA, 19 nt, Artificial Sequence
  Description of Artificial Sequence: Synthetic oligonucleotide
uuacucuguucaaaagaua

SEQ ID NO: 2631973 - RNA, 19 nt, Artificial Sequence
  Description of Artificial Sequence: Synthetic oligonucleotide
uucuucuaauucugguggu

SEQ ID NO: 2631974 - RNA, 19 nt, Artificial Sequence
  Description of Artificial Sequence: Synthetic oligonucleotide
agcuacucuucaucaaacu

SEQ ID NO: 2631975 - RNA, 19 nt, Artificial Sequence
  Description of Artificial Sequence: Synthetic oligonucleotide
uucuaauucuggugguguc

SEQ ID NO: 2631976 - RNA, 19 nt, Artificial Sequence
  Description of Artificial Sequence: Synthetic oligonucleotide
uuucuagaacccagauagu

SEQ ID NO: 2631977 - RNA, 19 nt, Artificial Sequence
  Description of Artificial Sequence: Synthetic oligonucleotide
ggcaacaucuguuccauuc

SEQ ID NO: 2631978 - RNA, 19 nt, Artificial Sequence
  Description of Artificial Sequence: Synthetic oligonucleotide
ugcgaguaagacccacucu

SEQ ID NO: 2631979 - RNA, 19 nt, Artificial Sequence
  Description of Artificial Sequence: Synthetic oligonucleotide
cuaauucugguggugucac

SEQ ID NO: 2631980 - RNA, 19 nt, Artificial Sequence
  Description of Artificial Sequence: Synthetic oligonucleotide
auucaugaucaugacugug

SEQ ID NO: 2631981 - RNA, 19 nt, Artificial Sequence
  Description of Artificial Sequence: Synthetic oligonucleotide
gugagagagaacuacugua

SEQ ID NO: 2631982 - RNA, 19 nt, Artificial Sequence
  Description of Artificial Sequence: Synthetic oligonucleotide
aaaucuuuagugagaccaa

SEQ ID NO: 2631983 - RNA, 19 nt, Artificial Sequence
  Description of Artificial Sequence: Synthetic oligonucleotide
uaaguucagcaucacucuu

SEQ ID NO: 2631984 - RNA, 19 nt, Artificial Sequence
  Description of Artificial Sequence: Synthetic oligonucleotide
uguauuccaucuucuuaau

SEQ ID NO: 2631985 - RNA, 19 nt, Artificial Sequence
  Description of Artificial Sequence: Synthetic oligonucleotide
uaguaguacaagucuuuua

SEQ ID NO: 2631986 - RNA, 19 nt, Artificial Sequence
  Description of Artificial Sequence: Synthetic oligonucleotide
cuuuguaagagcuacucuu

SEQ ID NO: 2631987 - RNA, 19 nt, Artificial Sequence
  Description of Artificial Sequence: Synthetic oligonucleotide
caaacugcuaacggaauca

SEQ ID NO: 2631988 - RNA, 19 nt, Artificial Sequence
  Description of Artificial Sequence: Synthetic oligonucleotide
cuaaggaguugggaacugg

SEQ ID NO: 2631989 - RNA, 19 nt, Artificial Sequence
  Description of Artificial Sequence: Synthetic oligonucleotide
aaugcgaguaagacccacu

SEQ ID NO: 2631990 - RNA, 19 nt, Artificial Sequence
  Description of Artificial Sequence: Synthetic oligonucleotide
aacuacuguaguaguacaa

SEQ ID NO: 2631991 - RNA, 19 nt, Artificial Sequence
  Description of Artificial Sequence: Synthetic oligonucleotide
cuuacgcauuucuucaaga

SEQ ID NO: 2631992 - RNA, 19 nt, Artificial Sequence
  Description of Artificial Sequence: Synthetic oligonucleotide
ucaguucucuugucuuccc

SEQ ID NO: 2631993 - RNA, 19 nt, Artificial Sequence
  Description of Artificial Sequence: Synthetic oligonucleotide
cugguugugcuauggcuug

SEQ ID NO: 2631994 - RNA, 19 nt, Artificial Sequence
  Description of Artificial Sequence: Synthetic oligonucleotide
agucaggaaugcgaguaag

SEQ ID NO: 2631995 - RNA, 19 nt, Artificial Sequence
  Description of Artificial Sequence: Synthetic oligonucleotide
cugcuaacggaaucagaac

SEQ ID NO: 2631996 - RNA, 19 nt, Artificial Sequence
  Description of Artificial Sequence: Synthetic oligonucleotide
aguguagcuuuuauuaaaa

SEQ ID NO: 2631997 - RNA, 19 nt, Artificial Sequence
  Description of Artificial Sequence: Synthetic oligonucleotide
guuauguugcgguacuucu

SEQ ID NO: 2631998 - RNA, 19 nt, Artificial Sequence
  Description of Artificial Sequence: Synthetic oligonucleotide
acccagauagucaggaaug

SEQ ID NO: 2631999 - RNA, 19 nt, Artificial Sequence
  Description of Artificial Sequence: Synthetic oligonucleotide
uucucaugggagcaauguu

SEQ ID NO: 2632000 - RNA, 19 nt, Artificial Sequence
  Description of Artificial Sequence: Synthetic oligonucleotide
acaauguuauguugcggua

SEQ ID NO: 2632001 - RNA, 19 nt, Artificial Sequence
  Description of Artificial Sequence: Synthetic oligonucleotide
guaagacccacucucaaau

SEQ ID NO: 2632002 - RNA, 19 nt, Artificial Sequence
  Description of Artificial Sequence: Synthetic oligonucleotide
uaagacccacucucaaauc

SEQ ID NO: 2632003 - RNA, 19 nt, Artificial Sequence
  Description of Artificial Sequence: Synthetic oligonucleotide
gcgaguaagacccacucuc

SEQ ID NO: 2632004 - RNA, 19 nt, Artificial Sequence
  Description of Artificial Sequence: Synthetic oligonucleotide
gauguggguaaaauacuaa

SEQ ID NO: 2632005 - RNA, 19 nt, Artificial Sequence
  Description of Artificial Sequence: Synthetic oligonucleotide
ugggaacuggcaacaucug

SEQ ID NO: 2632006 - RNA, 19 nt, Artificial Sequence
  Description of Artificial Sequence: Synthetic oligonucleotide
ugcaucuuuguaagagcua

SEQ ID NO: 2632007 - RNA, 19 nt, Artificial Sequence
  Description of Artificial Sequence: Synthetic oligonucleotide
gaaccuuuucuagaaccca

SEQ ID NO: 2632008 - RNA, 19 nt, Artificial Sequence
  Description of Artificial Sequence: Synthetic oligonucleotide
agcaauguucuaccucagu

SEQ ID NO: 2632009 - RNA, 19 nt, Artificial Sequence
  Description of Artificial Sequence: Synthetic oligonucleotide
agcuuuuauuaaaacaauu

SEQ ID NO: 2632010 - RNA, 19 nt, Artificial Sequence
  Description of Artificial Sequence: Synthetic oligonucleotide
uucccugguugugcuaugg

SEQ ID NO: 2632011 - RNA, 19 nt, Artificial Sequence
  Description of Artificial Sequence: Synthetic oligonucleotide
uucuuacgcauuucuucaa

SEQ ID NO: 2632012 - RNA, 19 nt, Artificial Sequence
  Description of Artificial Sequence: Synthetic oligonucleotide
uagucaggaaugcgaguaa

SEQ ID NO: 2632013 - RNA, 19 nt, Artificial Sequence
  Description of Artificial Sequence: Synthetic oligonucleotide
gcaucuuuguaagagcuac

SEQ ID NO: 2632014 - RNA, 19 nt, Artificial Sequence
  Description of Artificial Sequence: Synthetic oligonucleotide
uuguguauuccaucuucuu

SEQ ID NO: 2632015 - RNA, 19 nt, Artificial Sequence
  Description of Artificial Sequence: Synthetic oligonucleotide
ugucuucccugguugugcu

SEQ ID NO: 2632016 - RNA, 19 nt, Artificial Sequence
  Description of Artificial Sequence: Synthetic oligonucleotide
uaacggaaucagaaccuuu

SEQ ID NO: 2632017 - RNA, 19 nt, Artificial Sequence
  Description of Artificial Sequence: Synthetic oligonucleotide
guaguacaagucuuuuaaa

SEQ ID NO: 2632018 - RNA, 19 nt, Artificial Sequence
  Description of Artificial Sequence: Synthetic oligonucleotide
ggguaaaauacuaaggagu

SEQ ID NO: 2632019 - RNA, 19 nt, Artificial Sequence
  Description of Artificial Sequence: Synthetic oligonucleotide
gagcuacucuucaucaaac

SEQ ID NO: 2632020 - RNA, 19 nt, Artificial Sequence
  Description of Artificial Sequence: Synthetic oligonucleotide
aggugagagagaacuacug

SEQ ID NO: 2632021 - RNA, 19 nt, Artificial Sequence
  Description of Artificial Sequence: Synthetic oligonucleotide
gaucaugacugugucacua

SEQ ID NO: 2632022 - RNA, 19 nt, Artificial Sequence
  Description of Artificial Sequence: Synthetic oligonucleotide
caguguagcuuuuauuaaa

SEQ ID NO: 2632023 - RNA, 19 nt, Artificial Sequence
  Description of Artificial Sequence: Synthetic oligonucleotide
uucucuugucuucccuggu

SEQ ID NO: 2632024 - RNA, 19 nt, Artificial Sequence
  Description of Artificial Sequence: Synthetic oligonucleotide
ggaguugggaacuggcaac

SEQ ID NO: 2632025 - RNA, 19 nt, Artificial Sequence
  Description of Artificial Sequence: Synthetic oligonucleotide
guugggaacuggcaacauc

SEQ ID NO: 2632026 - RNA, 19 nt, Artificial Sequence
  Description of Artificial Sequence: Synthetic oligonucleotide
ucuucccugguugugcuau

SEQ ID NO: 2632027 - RNA, 19 nt, Artificial Sequence
  Description of Artificial Sequence: Synthetic oligonucleotide
ucccugguugugcuauggc

SEQ ID NO: 2632028 - RNA, 19 nt, Artificial Sequence
  Description of Artificial Sequence: Synthetic oligonucleotide
acaaucugcuuaagucuuc

SEQ ID NO: 2632029 - RNA, 19 nt, Artificial Sequence
  Description of Artificial Sequence: Synthetic oligonucleotide
caucacucuucagauauga

SEQ ID NO: 2632030 - RNA, 19 nt, Artificial Sequence
  Description of Artificial Sequence: Synthetic oligonucleotide
accucaguucucuugucuu

SEQ ID NO: 2632031 - RNA, 19 nt, Artificial Sequence
  Description of Artificial Sequence: Synthetic oligonucleotide
uucaucucugaugguuucu

SEQ ID NO: 2632032 - RNA, 19 nt, Artificial Sequence
  Description of Artificial Sequence: Synthetic oligonucleotide
gaaugcgaguaagacccac

SEQ ID NO: 2632033 - RNA, 19 nt, Artificial Sequence
  Description of Artificial Sequence: Synthetic oligonucleotide
gagagagaacuacuguagu

SEQ ID NO: 2632034 - RNA, 19 nt, Artificial Sequence
  Description of Artificial Sequence: Synthetic oligonucleotide
gaguaagacccacucucaa

SEQ ID NO: 2632035 - RNA, 19 nt, Artificial Sequence
  Description of Artificial Sequence: Synthetic oligonucleotide
caugaucaugacuguguca

SEQ ID NO: 2632036 - RNA, 19 nt, Artificial Sequence
  Description of Artificial Sequence: Synthetic oligonucleotide
guacuucugauguggguaa

SEQ ID NO: 2632037 - RNA, 19 nt, Artificial Sequence
  Description of Artificial Sequence: Synthetic oligonucleotide
aacugcuaacggaaucaga

SEQ ID NO: 2632038 - RNA, 19 nt, Artificial Sequence
  Description of Artificial Sequence: Synthetic oligonucleotide
cuuuucuagaacccagaua

SEQ ID NO: 2632039 - RNA, 19 nt, Artificial Sequence
  Description of Artificial Sequence: Synthetic oligonucleotide
aaugugccuuuguccugcu

SEQ ID NO: 2632040 - RNA, 19 nt, Artificial Sequence
  Description of Artificial Sequence: Synthetic oligonucleotide
gucacuagcccucuuaauu

SEQ ID NO: 2632041 - RNA, 19 nt, Artificial Sequence
  Description of Artificial Sequence: Synthetic oligonucleotide
ugucacuagcccucuuaau

SEQ ID NO: 2632042 - RNA, 19 nt, Artificial Sequence
  Description of Artificial Sequence: Synthetic oligonucleotide
ugggagcaauguucuaccu

SEQ ID NO: 2632043 - RNA, 19 nt, Artificial Sequence
  Description of Artificial Sequence: Synthetic oligonucleotide
cagauaugaugccuuagua

SEQ ID NO: 2632044 - RNA, 19 nt, Artificial Sequence
  Description of Artificial Sequence: Synthetic oligonucleotide
caucucugaugguuucuuc

SEQ ID NO: 2632045 - RNA, 19 nt, Artificial Sequence
  Description of Artificial Sequence: Synthetic oligonucleotide
uaauucugguggugucacu

SEQ ID NO: 2632046 - RNA, 19 nt, Artificial Sequence
  Description of Artificial Sequence: Synthetic oligonucleotide
gaguugggaacuggcaaca

SEQ ID NO: 2632047 - RNA, 19 nt, Artificial Sequence
  Description of Artificial Sequence: Synthetic oligonucleotide
gauagucaggaaugcgagu

SEQ ID NO: 2632048 - RNA, 19 nt, Artificial Sequence
  Description of Artificial Sequence: Synthetic oligonucleotide
cucaugggagcaauguucu

SEQ ID NO: 2632049 - RNA, 19 nt, Artificial Sequence
  Description of Artificial Sequence: Synthetic oligonucleotide
ucaucucugaugguuucuu

SEQ ID NO: 2632050 - RNA, 19 nt, Artificial Sequence
  Description of Artificial Sequence: Synthetic oligonucleotide
auaugaugccuuaguauua

SEQ ID NO: 2632051 - RNA, 19 nt, Artificial Sequence
  Description of Artificial Sequence: Synthetic oligonucleotide
aucuuuagugagaccaaau

SEQ ID NO: 2632052 - RNA, 19 nt, Artificial Sequence
  Description of Artificial Sequence: Synthetic oligonucleotide
gcuauggcuugugacaaug

SEQ ID NO: 2632053 - RNA, 19 nt, Artificial Sequence
  Description of Artificial Sequence: Synthetic oligonucleotide
gcuugugacaauguuaugu

SEQ ID NO: 2632054 - RNA, 19 nt, Artificial Sequence
  Description of Artificial Sequence: Synthetic oligonucleotide
gagaacuacuguaguagua

SEQ ID NO: 2632055 - RNA, 19 nt, Artificial Sequence
  Description of Artificial Sequence: Synthetic oligonucleotide
aaacucuguuuuauuucuu

SEQ ID NO: 2632056 - RNA, 19 nt, Artificial Sequence
  Description of Artificial Sequence: Synthetic oligonucleotide
uugcgguacuucugaugug

SEQ ID NO: 2632057 - RNA, 19 nt, Artificial Sequence
  Description of Artificial Sequence: Synthetic oligonucleotide
guauuccaucuucuuaaua

SEQ ID NO: 2632058 - RNA, 19 nt, Artificial Sequence
  Description of Artificial Sequence: Synthetic oligonucleotide
gugucacuagcccucuuaa

SEQ ID NO: 2632059 - RNA, 19 nt, Artificial Sequence
  Description of Artificial Sequence: Synthetic oligonucleotide
gguuucuucuaauucuggu

SEQ ID NO: 2632060 - RNA, 19 nt, Artificial Sequence
  Description of Artificial Sequence: Synthetic oligonucleotide
acucugcaucuuuguaaga

SEQ ID NO: 2632061 - RNA, 19 nt, Artificial Sequence
  Description of Artificial Sequence: Synthetic oligonucleotide
auguucuaccucaguucuc

SEQ ID NO: 2632062 - RNA, 19 nt, Artificial Sequence
  Description of Artificial Sequence: Synthetic oligonucleotide
cuucagauaugaugccuua

SEQ ID NO: 2632063 - RNA, 19 nt, Artificial Sequence
  Description of Artificial Sequence: Synthetic oligonucleotide
gucaggaaugcgaguaaga

SEQ ID NO: 2632064 - RNA, 19 nt, Artificial Sequence
  Description of Artificial Sequence: Synthetic oligonucleotide
ccagauagucaggaaugcg

SEQ ID NO: 2632065 - RNA, 19 nt, Artificial Sequence
  Description of Artificial Sequence: Synthetic oligonucleotide
gggagcaauguucuaccuc

SEQ ID NO: 2632066 - RNA, 19 nt, Artificial Sequence
  Description of Artificial Sequence: Synthetic oligonucleotide
ggugagagagaacuacugu

SEQ ID NO: 2632067 - RNA, 19 nt, Artificial Sequence
  Description of Artificial Sequence: Synthetic oligonucleotide
cuaccucaguucucuuguc

SEQ ID NO: 2632068 - RNA, 19 nt, Artificial Sequence
  Description of Artificial Sequence: Synthetic oligonucleotide
ugcuucucaugggagcaau

SEQ ID NO: 2632069 - RNA, 19 nt, Artificial Sequence
  Description of Artificial Sequence: Synthetic oligonucleotide
ucaugggagcaauguucua

SEQ ID NO: 2632070 - RNA, 19 nt, Artificial Sequence
  Description of Artificial Sequence: Synthetic oligonucleotide
aucuucuuacgcauuucuu

SEQ ID NO: 2632071 - RNA, 19 nt, Artificial Sequence
  Description of Artificial Sequence: Synthetic oligonucleotide
gugcuauggcuugugacaa

SEQ ID NO: 2632072 - RNA, 19 nt, Artificial Sequence
  Description of Artificial Sequence: Synthetic oligonucleotide
cuucucaugggagcaaugu

SEQ ID NO: 2632073 - RNA, 19 nt, Artificial Sequence
  Description of Artificial Sequence: Synthetic oligonucleotide
ugcuauggcuugugacaau

SEQ ID NO: 2632074 - RNA, 19 nt, Artificial Sequence
  Description of Artificial Sequence: Synthetic oligonucleotide
gcaauguucuaccucaguu

SEQ ID NO: 2632075 - RNA, 19 nt, Artificial Sequence
  Description of Artificial Sequence: Synthetic oligonucleotide
agauacacuugaacuuaau

SEQ ID NO: 2632076 - RNA, 19 nt, Artificial Sequence
  Description of Artificial Sequence: Synthetic oligonucleotide
cauucaugaucaugacugu

SEQ ID NO: 2632077 - RNA, 19 nt, Artificial Sequence
  Description of Artificial Sequence: Synthetic oligonucleotide
cuguaguaguacaagucuu

SEQ ID NO: 2632078 - RNA, 19 nt, Artificial Sequence
  Description of Artificial Sequence: Synthetic oligonucleotide
auguugcgguacuucugau

SEQ ID NO: 2632079 - RNA, 19 nt, Artificial Sequence
  Description of Artificial Sequence: Synthetic oligonucleotide
uacuucugauguggguaaa

SEQ ID NO: 2632080 - RNA, 19 nt, Artificial Sequence
  Description of Artificial Sequence: Synthetic oligonucleotide
cuucccugguugugcuaug

SEQ ID NO: 2632081 - RNA, 19 nt, Artificial Sequence
  Description of Artificial Sequence: Synthetic oligonucleotide
gcuuaagucuucuuauuuu

SEQ ID NO: 2632082 - RNA, 19 nt, Artificial Sequence
  Description of Artificial Sequence: Synthetic oligonucleotide
caggugagagagaacuacu

SEQ ID NO: 2632083 - RNA, 19 nt, Artificial Sequence
  Description of Artificial Sequence: Synthetic oligonucleotide
cuugaacuuaaugugccuu

SEQ ID NO: 2632084 - RNA, 19 nt, Artificial Sequence
  Description of Artificial Sequence: Synthetic oligonucleotide
cccagauagucaggaaugc

SEQ ID NO: 2632085 - RNA, 19 nt, Artificial Sequence
  Description of Artificial Sequence: Synthetic oligonucleotide
aucacucuucagauaugau

SEQ ID NO: 2632086 - RNA, 19 nt, Artificial Sequence
  Description of Artificial Sequence: Synthetic oligonucleotide
agacccacucucaaaucuu

SEQ ID NO: 2632087 - RNA, 19 nt, Artificial Sequence
  Description of Artificial Sequence: Synthetic oligonucleotide
ccucaguucucuugucuuc

SEQ ID NO: 2632088 - RNA, 19 nt, Artificial Sequence
  Description of Artificial Sequence: Synthetic oligonucleotide
ugguugugcuauggcuugu

SEQ ID NO: 2632089 - RNA, 19 nt, Artificial Sequence
  Description of Artificial Sequence: Synthetic oligonucleotide
cucuucagauaugaugccu

SEQ ID NO: 2632090 - RNA, 19 nt, Artificial Sequence
  Description of Artificial Sequence: Synthetic oligonucleotide
caucuuuguaagagcuacu

SEQ ID NO: 2632091 - RNA, 19 nt, Artificial Sequence
  Description of Artificial Sequence: Synthetic oligonucleotide
cuauggcuugugacaaugu

SEQ ID NO: 2632092 - RNA, 19 nt, Artificial Sequence
  Description of Artificial Sequence: Synthetic oligonucleotide
gcuaacggaaucagaaccu

SEQ ID NO: 2632093 - RNA, 19 nt, Artificial Sequence
  Description of Artificial Sequence: Synthetic oligonucleotide
aguugggaacuggcaacau

SEQ ID NO: 2632094 - RNA, 19 nt, Artificial Sequence
  Description of Artificial Sequence: Synthetic oligonucleotide
guaguaguacaagucuuuu

SEQ ID NO: 2632095 - RNA, 19 nt, Artificial Sequence
  Description of Artificial Sequence: Synthetic oligonucleotide
ggcuugugacaauguuaug

SEQ ID NO: 2632096 - RNA, 19 nt, Artificial Sequence
  Description of Artificial Sequence: Synthetic oligonucleotide
caaucugcuuaagucuucu

SEQ ID NO: 2632097 - RNA, 19 nt, Artificial Sequence
  Description of Artificial Sequence: Synthetic oligonucleotide
ggaacuggcaacaucuguu

SEQ ID NO: 2632098 - RNA, 19 nt, Artificial Sequence
  Description of Artificial Sequence: Synthetic oligonucleotide
auguuauguugcgguacuu

SEQ ID NO: 2632099 - RNA, 19 nt, Artificial Sequence
  Description of Artificial Sequence: Synthetic oligonucleotide
caacaucuguuccauucau

SEQ ID NO: 2632100 - RNA, 19 nt, Artificial Sequence
  Description of Artificial Sequence: Synthetic oligonucleotide
gcgguacuucugauguggg

SEQ ID NO: 2632101 - RNA, 19 nt, Artificial Sequence
  Description of Artificial Sequence: Synthetic oligonucleotide
caucuguuccauucaugau

SEQ ID NO: 2632102 - RNA, 19 nt, Artificial Sequence
  Description of Artificial Sequence: Synthetic oligonucleotide
uggcaacaucuguuccauu

SEQ ID NO: 2632103 - RNA, 19 nt, Artificial Sequence
  Description of Artificial Sequence: Synthetic oligonucleotide
cugcuuaagucuucuuauu

SEQ ID NO: 2632104 - RNA, 19 nt, Artificial Sequence
  Description of Artificial Sequence: Synthetic oligonucleotide
gcuucucaugggagcaaug

SEQ ID NO: 2632105 - RNA, 19 nt, Artificial Sequence
  Description of Artificial Sequence: Synthetic oligonucleotide
gcaucuucuuacgcauuuc

SEQ ID NO: 2632106 - RNA, 19 nt, Artificial Sequence
  Description of Artificial Sequence: Synthetic oligonucleotide
cuaacggaaucagaaccuu

SEQ ID NO: 2632107 - RNA, 19 nt, Artificial Sequence
  Description of Artificial Sequence: Synthetic oligonucleotide
cgaguaagacccacucuca

SEQ ID NO: 2632108 - RNA, 19 nt, Artificial Sequence
  Description of Artificial Sequence: Synthetic oligonucleotide
cacuagcccucuuaauuuu

SEQ ID NO: 2632109 - RNA, 19 nt, Artificial Sequence
  Description of Artificial Sequence: Synthetic oligonucleotide
cagcaucacucuucagaua

SEQ ID NO: 2632110 - RNA, 19 nt, Artificial Sequence
  Description of Artificial Sequence: Synthetic oligonucleotide
cuggcaacaucuguuccau

SEQ ID NO: 2632111 - RNA, 19 nt, Artificial Sequence
  Description of Artificial Sequence: Synthetic oligonucleotide
ccacucucaaaucuuuagu

SEQ ID NO: 2632112 - RNA, 19 nt, Artificial Sequence
  Description of Artificial Sequence: Synthetic oligonucleotide
gucuucccugguugugcua

SEQ ID NO: 2632113 - RNA, 19 nt, Artificial Sequence
  Description of Artificial Sequence: Synthetic oligonucleotide
gugagaccaaauagcuuuu

SEQ ID NO: 2632114 - RNA, 19 nt, Artificial Sequence
  Description of Artificial Sequence: Synthetic oligonucleotide
cccugguugugcuauggcu

SEQ ID NO: 2632115 - RNA, 19 nt, Artificial Sequence
  Description of Artificial Sequence: Synthetic oligonucleotide
ggaaugcgaguaagaccca

SEQ ID NO: 2632116 - RNA, 19 nt, Artificial Sequence
  Description of Artificial Sequence: Synthetic oligonucleotide
ccuagacauuuuacuguuu

SEQ ID NO: 2632117 - RNA, 19 nt, Artificial Sequence
  Description of Artificial Sequence: Synthetic oligonucleotide
aauguagggguccagaagg

SEQ ID NO: 2632118 - RNA, 19 nt, Artificial Sequence
  Description of Artificial Sequence: Synthetic oligonucleotide
aaggccauugaacacuacc

SEQ ID NO: 2632119 - RNA, 19 nt, Artificial Sequence
  Description of Artificial Sequence: Synthetic oligonucleotide
uuaagaaggccauugaaca

SEQ ID NO: 2632120 - RNA, 19 nt, Artificial Sequence
  Description of Artificial Sequence: Synthetic oligonucleotide
uauaggagcaucgugaaag

SEQ ID NO: 2632121 - RNA, 19 nt, Artificial Sequence
  Description of Artificial Sequence: Synthetic oligonucleotide
ucgagugacgaacucaucg

SEQ ID NO: 2632122 - RNA, 19 nt, Artificial Sequence
  Description of Artificial Sequence: Synthetic oligonucleotide
aagacagccagcucgaucu

SEQ ID NO: 2632123 - RNA, 19 nt, Artificial Sequence
  Description of Artificial Sequence: Synthetic oligonucleotide
auuccuucuuugcacaucc

SEQ ID NO: 2632124 - RNA, 19 nt, Artificial Sequence
  Description of Artificial Sequence: Synthetic oligonucleotide
aacucaucgugccaggccg

SEQ ID NO: 2632125 - RNA, 19 nt, Artificial Sequence
  Description of Artificial Sequence: Synthetic oligonucleotide
agcaucgugaaagacagcc

SEQ ID NO: 2632126 - RNA, 19 nt, Artificial Sequence
  Description of Artificial Sequence: Synthetic oligonucleotide
caacacaucaucgugaagg

SEQ ID NO: 2632127 - RNA, 19 nt, Artificial Sequence
  Description of Artificial Sequence: Synthetic oligonucleotide
cucguugucagcuucaaag

SEQ ID NO: 2632128 - RNA, 19 nt, Artificial Sequence
  Description of Artificial Sequence: Synthetic oligonucleotide
agauuuugaucuuaagaag

SEQ ID NO: 2632129 - RNA, 19 nt, Artificial Sequence
  Description of Artificial Sequence: Synthetic oligonucleotide
acagauuuugaucuuaaga

SEQ ID NO: 2632130 - RNA, 19 nt, Artificial Sequence
  Description of Artificial Sequence: Synthetic oligonucleotide
agaaggaaagucuguggcc

SEQ ID NO: 2632131 - RNA, 19 nt, Artificial Sequence
  Description of Artificial Sequence: Synthetic oligonucleotide
cuuaagaaggccauugaac

SEQ ID NO: 2632132 - RNA, 19 nt, Artificial Sequence
  Description of Artificial Sequence: Synthetic oligonucleotide
gauggacucgaacaagucg

SEQ ID NO: 2632133 - RNA, 19 nt, Artificial Sequence
  Description of Artificial Sequence: Synthetic oligonucleotide
gagucguccacguugagag

SEQ ID NO: 2632134 - RNA, 19 nt, Artificial Sequence
  Description of Artificial Sequence: Synthetic oligonucleotide
auuuugaucuuaagaaggc

SEQ ID NO: 2632135 - RNA, 19 nt, Artificial Sequence
  Description of Artificial Sequence: Synthetic oligonucleotide
uuuuaggaugcugacagcc

SEQ ID NO: 2632136 - RNA, 19 nt, Artificial Sequence
  Description of Artificial Sequence: Synthetic oligonucleotide
aaagcuuuuaggaugcuga

SEQ ID NO: 2632137 - RNA, 19 nt, Artificial Sequence
  Description of Artificial Sequence: Synthetic oligonucleotide
gaaggaaagucuguggccg

SEQ ID NO: 2632138 - RNA, 19 nt, Artificial Sequence
  Description of Artificial Sequence: Synthetic oligonucleotide
ucagaauuccuucuuugca

SEQ ID NO: 2632139 - RNA, 19 nt, Artificial Sequence
  Description of Artificial Sequence: Synthetic oligonucleotide
aagucagccagcuugcagu

SEQ ID NO: 2632140 - RNA, 19 nt, Artificial Sequence
  Description of Artificial Sequence: Synthetic oligonucleotide
uugagagcaauguaggggu

SEQ ID NO: 2632141 - RNA, 19 nt, Artificial Sequence
  Description of Artificial Sequence: Synthetic oligonucleotide
uccuucuuugcacaucccg

SEQ ID NO: 2632142 - RNA, 19 nt, Artificial Sequence
  Description of Artificial Sequence: Synthetic oligonucleotide
aagcuuuuaggaugcugac

SEQ ID NO: 2632143 - RNA, 19 nt, Artificial Sequence
  Description of Artificial Sequence: Synthetic oligonucleotide
cagauuuugaucuuaagaa

SEQ ID NO: 2632144 - RNA, 19 nt, Artificial Sequence
  Description of Artificial Sequence: Synthetic oligonucleotide
aaucccuguagaucacugg

SEQ ID NO: 2632145 - RNA, 19 nt, Artificial Sequence
  Description of Artificial Sequence: Synthetic oligonucleotide
cacaucaucgugaaggaug

SEQ ID NO: 2632146 - RNA, 19 nt, Artificial Sequence
  Description of Artificial Sequence: Synthetic oligonucleotide
guugagagcaauguagggg

SEQ ID NO: 2632147 - RNA, 19 nt, Artificial Sequence
  Description of Artificial Sequence: Synthetic oligonucleotide
gaacaagucguccucguug

SEQ ID NO: 2632148 - RNA, 19 nt, Artificial Sequence
  Description of Artificial Sequence: Synthetic oligonucleotide
uguugccaguuucaaaucc

SEQ ID NO: 2632149 - RNA, 19 nt, Artificial Sequence
  Description of Artificial Sequence: Synthetic oligonucleotide
ucguugucagcuucaaagg

SEQ ID NO: 2632150 - RNA, 19 nt, Artificial Sequence
  Description of Artificial Sequence: Synthetic oligonucleotide
  modified_base (12)..(12): a, c, u, g, unknown or other
cuugcgcccauncacacgg

SEQ ID NO: 2632151 - RNA, 19 nt, Artificial Sequence
  Description of Artificial Sequence: Synthetic oligonucleotide
cuugguggcuguuuggccg

SEQ ID NO: 2632152 - RNA, 19 nt, Artificial Sequence
  Description of Artificial Sequence: Synthetic oligonucleotide
ucuuaagaaggccauugaa

SEQ ID NO: 2632153 - RNA, 19 nt, Artificial Sequence
  Description of Artificial Sequence: Synthetic oligonucleotide
aacaagucguccucguugu

SEQ ID NO: 2632154 - RNA, 19 nt, Artificial Sequence
  Description of Artificial Sequence: Synthetic oligonucleotide
uggucaugaaagcuuuuag

SEQ ID NO: 2632155 - RNA, 19 nt, Artificial Sequence
  Description of Artificial Sequence: Synthetic oligonucleotide
uagggguccagaaggaaag

SEQ ID NO: 2632156 - RNA, 19 nt, Artificial Sequence
  Description of Artificial Sequence: Synthetic oligonucleotide
gaucuuaagaaggccauug

SEQ ID NO: 2632157 - RNA, 19 nt, Artificial Sequence
  Description of Artificial Sequence: Synthetic oligonucleotide
uccacugagggccauacuc

SEQ ID NO: 2632158 - RNA, 19 nt, Artificial Sequence
  Description of Artificial Sequence: Synthetic oligonucleotide
cagaaggaaagucuguggc

SEQ ID NO: 2632159 - RNA, 19 nt, Artificial Sequence
  Description of Artificial Sequence: Synthetic oligonucleotide
ccauugaacacuaccaugg

SEQ ID NO: 2632160 - RNA, 19 nt, Artificial Sequence
  Description of Artificial Sequence: Synthetic oligonucleotide
auucagaauuccuucuuug

SEQ ID NO: 2632161 - RNA, 19 nt, Artificial Sequence
  Description of Artificial Sequence: Synthetic oligonucleotide
aagucguccucguugucag

SEQ ID NO: 2632162 - RNA, 19 nt, Artificial Sequence
  Description of Artificial Sequence: Synthetic oligonucleotide
caucgugaaagacagccag

SEQ ID NO: 2632163 - RNA, 19 nt, Artificial Sequence
  Description of Artificial Sequence: Synthetic oligonucleotide
gugggcuucaagcucacgg

SEQ ID NO: 2632164 - RNA, 19 nt, Artificial Sequence
  Description of Artificial Sequence: Synthetic oligonucleotide
gauguugccaguuucaaau

SEQ ID NO: 2632165 - RNA, 19 nt, Artificial Sequence
  Description of Artificial Sequence: Synthetic oligonucleotide
aaagucuguggccgggguc

SEQ ID NO: 2632166 - RNA, 19 nt, Artificial Sequence
  Description of Artificial Sequence: Synthetic oligonucleotide
ugccacacagcccaggcgc

SEQ ID NO: 2632167 - RNA, 19 nt, Artificial Sequence
  Description of Artificial Sequence: Synthetic oligonucleotide
cuugcugagccagacaggg

SEQ ID NO: 2632168 - RNA, 19 nt, Artificial Sequence
  Description of Artificial Sequence: Synthetic oligonucleotide
  modified_base (4)..(4): a, c, u, g, unknown or other
cauncacacggaucgagug

SEQ ID NO: 2632169 - RNA, 19 nt, Artificial Sequence
  Description of Artificial Sequence: Synthetic oligonucleotide
gaucgggcuauguagucag

SEQ ID NO: 2632170 - RNA, 19 nt, Artificial Sequence
  Description of Artificial Sequence: Synthetic oligonucleotide
cuugcagugaccuucugca

SEQ ID NO: 2632171 - RNA, 19 nt, Artificial Sequence
  Description of Artificial Sequence: Synthetic oligonucleotide
ugaaagacagccagcucga

SEQ ID NO: 2632172 - RNA, 19 nt, Artificial Sequence
  Description of Artificial Sequence: Synthetic oligonucleotide
cagaauuccuucuuugcac

SEQ ID NO: 2632173 - RNA, 19 nt, Artificial Sequence
  Description of Artificial Sequence: Synthetic oligonucleotide
agugacgaacucaucgugc

SEQ ID NO: 2632174 - RNA, 19 nt, Artificial Sequence
  Description of Artificial Sequence: Synthetic oligonucleotide
aaggaaagucuguggccgg

SEQ ID NO: 2632175 - RNA, 19 nt, Artificial Sequence
  Description of Artificial Sequence: Synthetic oligonucleotide
uuggucacaccauucagaa

SEQ ID NO: 2632176 - RNA, 19 nt, Artificial Sequence
  Description of Artificial Sequence: Synthetic oligonucleotide
aagucgucguagccuauag

SEQ ID NO: 2632177 - RNA, 19 nt, Artificial Sequence
  Description of Artificial Sequence: Synthetic oligonucleotide
  modified_base (14)..(14): a, c, u, g, unknown or other
aucuugcgcccauncacac

SEQ ID NO: 2632178 - RNA, 19 nt, Artificial Sequence
  Description of Artificial Sequence: Synthetic oligonucleotide
uaguuggucacaccauuca

SEQ ID NO: 2632179 - RNA, 19 nt, Artificial Sequence
  Description of Artificial Sequence: Synthetic oligonucleotide
agaauuccuucuuugcaca

SEQ ID NO: 2632180 - RNA, 19 nt, Artificial Sequence
  Description of Artificial Sequence: Synthetic oligonucleotide
uuuaggaugcugacagccu

SEQ ID NO: 2632181 - RNA, 19 nt, Artificial Sequence
  Description of Artificial Sequence: Synthetic oligonucleotide
gucgucguagccuauagga

SEQ ID NO: 2632182 - RNA, 19 nt, Artificial Sequence
  Description of Artificial Sequence: Synthetic oligonucleotide
gguacaacacaucaucgug

SEQ ID NO: 2632183 - RNA, 19 nt, Artificial Sequence
  Description of Artificial Sequence: Synthetic oligonucleotide
uaagaaggccauugaacac

SEQ ID NO: 2632184 - RNA, 19 nt, Artificial Sequence
  Description of Artificial Sequence: Synthetic oligonucleotide
uuaggaugcugacagccuc

SEQ ID NO: 2632185 - RNA, 19 nt, Artificial Sequence
  Description of Artificial Sequence: Synthetic oligonucleotide
ucgucguagccuauaggag

SEQ ID NO: 2632186 - RNA, 19 nt, Artificial Sequence
  Description of Artificial Sequence: Synthetic oligonucleotide
aguuggucacaccauucag

SEQ ID NO: 2632187 - RNA, 19 nt, Artificial Sequence
  Description of Artificial Sequence: Synthetic oligonucleotide
acaucaucgugaaggaugg

SEQ ID NO: 2632188 - RNA, 19 nt, Artificial Sequence
  Description of Artificial Sequence: Synthetic oligonucleotide
caggguacaacacaucauc

SEQ ID NO: 2632189 - RNA, 19 nt, Artificial Sequence
  Description of Artificial Sequence: Synthetic oligonucleotide
agaaggugguaguugguca

SEQ ID NO: 2632190 - RNA, 19 nt, Artificial Sequence
  Description of Artificial Sequence: Synthetic oligonucleotide
  modified_base (13)..(13): a, c, u, g, unknown or other
ucuugcgcccauncacacg

SEQ ID NO: 2632191 - RNA, 19 nt, Artificial Sequence
  Description of Artificial Sequence: Synthetic oligonucleotide
uccagaaggaaagucugug

SEQ ID NO: 2632192 - RNA, 19 nt, Artificial Sequence
  Description of Artificial Sequence: Synthetic oligonucleotide
acucgaacaagucguccuc

SEQ ID NO: 2632193 - RNA, 19 nt, Artificial Sequence
  Description of Artificial Sequence: Synthetic oligonucleotide
ugcugagccagacagggua

SEQ ID NO: 2632194 - RNA, 19 nt, Artificial Sequence
  Description of Artificial Sequence: Synthetic oligonucleotide
gacgaacucaucgugccag

SEQ ID NO: 2632195 - RNA, 19 nt, Artificial Sequence
  Description of Artificial Sequence: Synthetic oligonucleotide
ucagccagcuugcagugac

SEQ ID NO: 2632196 - RNA, 19 nt, Artificial Sequence
  Description of Artificial Sequence: Synthetic oligonucleotide
gaaggauguugccaguuuc

SEQ ID NO: 2632197 - RNA, 19 nt, Artificial Sequence
  Description of Artificial Sequence: Synthetic oligonucleotide
uguagaucacuggauggug

SEQ ID NO: 2632198 - RNA, 19 nt, Artificial Sequence
  Description of Artificial Sequence: Synthetic oligonucleotide
guagccuauaggagcaucg

SEQ ID NO: 2632199 - RNA, 19 nt, Artificial Sequence
  Description of Artificial Sequence: Synthetic oligonucleotide
agccagacaggguacaaca

SEQ ID NO: 2632200 - RNA, 19 nt, Artificial Sequence
  Description of Artificial Sequence: Synthetic oligonucleotide
ucuuggucaugaaagcuuu

SEQ ID NO: 2632201 - RNA, 19 nt, Artificial Sequence
  Description of Artificial Sequence: Synthetic oligonucleotide
aucccuguagaucacugga

SEQ ID NO: 2632202 - RNA, 19 nt, Artificial Sequence
  Description of Artificial Sequence: Synthetic oligonucleotide
uguccagccaucaucucau

SEQ ID NO: 2632203 - RNA, 19 nt, Artificial Sequence
  Description of Artificial Sequence: Synthetic oligonucleotide
gaacucaucgugccaggcc

SEQ ID NO: 2632204 - RNA, 19 nt, Artificial Sequence
  Description of Artificial Sequence: Synthetic oligonucleotide
ugggcuucaagcucacggc

SEQ ID NO: 2632205 - RNA, 19 nt, Artificial Sequence
  Description of Artificial Sequence: Synthetic oligonucleotide
gaaggugguaguuggucac

SEQ ID NO: 2632206 - RNA, 19 nt, Artificial Sequence
  Description of Artificial Sequence: Synthetic oligonucleotide
cuugugaggguucuugguc

SEQ ID NO: 2632207 - RNA, 19 nt, Artificial Sequence
  Description of Artificial Sequence: Synthetic oligonucleotide
ggagcaucgugaaagacag

SEQ ID NO: 2632208 - RNA, 19 nt, Artificial Sequence
  Description of Artificial Sequence: Synthetic oligonucleotide
ugcagugaccuucugcauc

SEQ ID NO: 2632209 - RNA, 19 nt, Artificial Sequence
  Description of Artificial Sequence: Synthetic oligonucleotide
caagcucacggccucacag

SEQ ID NO: 2632210 - RNA, 19 nt, Artificial Sequence
  Description of Artificial Sequence: Synthetic oligonucleotide
gugacgaacucaucgugcc

SEQ ID NO: 2632211 - RNA, 19 nt, Artificial Sequence
  Description of Artificial Sequence: Synthetic oligonucleotide
cuguuagucuucugcuugg

SEQ ID NO: 2632212 - RNA, 19 nt, Artificial Sequence
  Description of Artificial Sequence: Synthetic oligonucleotide
gugguaguuggucacacca

SEQ ID NO: 2632213 - RNA, 19 nt, Artificial Sequence
  Description of Artificial Sequence: Synthetic oligonucleotide
caccaguccacugagggcc

SEQ ID NO: 2632214 - RNA, 19 nt, Artificial Sequence
  Description of Artificial Sequence: Synthetic oligonucleotide
ucgugaaagacagccagcu

SEQ ID NO: 2632215 - RNA, 19 nt, Artificial Sequence
  Description of Artificial Sequence: Synthetic oligonucleotide
ucacagauuuugaucuuaa

SEQ ID NO: 2632216 - RNA, 19 nt, Artificial Sequence
  Description of Artificial Sequence: Synthetic oligonucleotide
caauguagggguccagaag

SEQ ID NO: 2632217 - RNA, 19 nt, Artificial Sequence
  Description of Artificial Sequence: Synthetic oligonucleotide
  modified_base (3)..(3): a, c, u, g, unknown or other
auncacacggaucgaguga

SEQ ID NO: 2632218 - RNA, 19 nt, Artificial Sequence
  Description of Artificial Sequence: Synthetic oligonucleotide
gaaagcuuuuaggaugcug

SEQ ID NO: 2632219 - RNA, 19 nt, Artificial Sequence
  Description of Artificial Sequence: Synthetic oligonucleotide
gagugacgaacucaucgug

SEQ ID NO: 2632220 - RNA, 19 nt, Artificial Sequence
  Description of Artificial Sequence: Synthetic oligonucleotide
aaaucccuguagaucacug

SEQ ID NO: 2632221 - RNA, 19 nt, Artificial Sequence
  Description of Artificial Sequence: Synthetic oligonucleotide
auggacucgaacaagucgu

SEQ ID NO: 2632222 - RNA, 19 nt, Artificial Sequence
  Description of Artificial Sequence: Synthetic oligonucleotide
uugccaguuucaaaucccu

SEQ ID NO: 2632223 - RNA, 19 nt, Artificial Sequence
  Description of Artificial Sequence: Synthetic oligonucleotide
  modified_base (2)..(2): a, c, u, g, unknown or other
uncacacggaucgagugac

SEQ ID NO: 2632224 - RNA, 19 nt, Artificial Sequence
  Description of Artificial Sequence: Synthetic oligonucleotide
aucuuaagaaggccauuga

SEQ ID NO: 2632225 - RNA, 19 nt, Artificial Sequence
  Description of Artificial Sequence: Synthetic oligonucleotide
gcaggaucgggcuauguag

SEQ ID NO: 2632226 - RNA, 19 nt, Artificial Sequence
  Description of Artificial Sequence: Synthetic oligonucleotide
ugugucugccacacagccc

SEQ ID NO: 2632227 - RNA, 19 nt, Artificial Sequence
  Description of Artificial Sequence: Synthetic oligonucleotide
ggugcaguuggccacgaag

SEQ ID NO: 2632228 - RNA, 19 nt, Artificial Sequence
  Description of Artificial Sequence: Synthetic oligonucleotide
agucgucguagccuauagg

SEQ ID NO: 2632229 - RNA, 19 nt, Artificial Sequence
  Description of Artificial Sequence: Synthetic oligonucleotide
caucgugaaggauggacuc

SEQ ID NO: 2632230 - RNA, 19 nt, Artificial Sequence
  Description of Artificial Sequence: Synthetic oligonucleotide
aggguacaacacaucaucg

SEQ ID NO: 2632231 - RNA, 19 nt, Artificial Sequence
  Description of Artificial Sequence: Synthetic oligonucleotide
uuggccacgaagucgucgu

SEQ ID NO: 2632232 - RNA, 19 nt, Artificial Sequence
  Description of Artificial Sequence: Synthetic oligonucleotide
aucgugaaagacagccagc

SEQ ID NO: 2632233 - RNA, 19 nt, Artificial Sequence
  Description of Artificial Sequence: Synthetic oligonucleotide
gcaucuagaaggauguugc

SEQ ID NO: 2632234 - RNA, 19 nt, Artificial Sequence
  Description of Artificial Sequence: Synthetic oligonucleotide
caucuagaaggauguugcc

SEQ ID NO: 2632235 - RNA, 19 nt, Artificial Sequence
  Description of Artificial Sequence: Synthetic oligonucleotide
aaggauguugccaguuuca

SEQ ID NO: 2632236 - RNA, 19 nt, Artificial Sequence
  Description of Artificial Sequence: Synthetic oligonucleotide
aagcucacggccucacaga

SEQ ID NO: 2632237 - RNA, 19 nt, Artificial Sequence
  Description of Artificial Sequence: Synthetic oligonucleotide
gauggugcaguuggccacg

SEQ ID NO: 2632238 - RNA, 19 nt, Artificial Sequence
  Description of Artificial Sequence: Synthetic oligonucleotide
cacagauuuugaucuuaag

SEQ ID NO: 2632239 - RNA, 19 nt, Artificial Sequence
  Description of Artificial Sequence: Synthetic oligonucleotide
gguucuuggucaugaaagc

SEQ ID NO: 2632240 - RNA, 19 nt, Artificial Sequence
  Description of Artificial Sequence: Synthetic oligonucleotide
guugccaguuucaaauccc

SEQ ID NO: 2632241 - RNA, 19 nt, Artificial Sequence
  Description of Artificial Sequence: Synthetic oligonucleotide
auaggagcaucgugaaaga

SEQ ID NO: 2632242 - RNA, 19 nt, Artificial Sequence
  Description of Artificial Sequence: Synthetic oligonucleotide
cuuuuaggaugcugacagc

SEQ ID NO: 2632243 - RNA, 19 nt, Artificial Sequence
  Description of Artificial Sequence: Synthetic oligonucleotide
aggaucgggcuauguaguc

SEQ ID NO: 2632244 - RNA, 19 nt, Artificial Sequence
  Description of Artificial Sequence: Synthetic oligonucleotide
gcagcgaccaggcuguggg

SEQ ID NO: 2632245 - RNA, 19 nt, Artificial Sequence
  Description of Artificial Sequence: Synthetic oligonucleotide
gagagcaauguaggggucc

SEQ ID NO: 2632246 - RNA, 19 nt, Artificial Sequence
  Description of Artificial Sequence: Synthetic oligonucleotide
gcuguuagucuucugcuug

SEQ ID NO: 2632247 - RNA, 19 nt, Artificial Sequence
  Description of Artificial Sequence: Synthetic oligonucleotide
ccuguagaucacuggaugg

SEQ ID NO: 2632248 - RNA, 19 nt, Artificial Sequence
  Description of Artificial Sequence: Synthetic oligonucleotide
uguuuggccgaugcgcgag

SEQ ID NO: 2632249 - RNA, 19 nt, Artificial Sequence
  Description of Artificial Sequence: Synthetic oligonucleotide
cugacagccuccuugcuga

SEQ ID NO: 2632250 - RNA, 19 nt, Artificial Sequence
  Description of Artificial Sequence: Synthetic oligonucleotide
aucgugaaggauggacucg

SEQ ID NO: 2632251 - RNA, 19 nt, Artificial Sequence
  Description of Artificial Sequence: Synthetic oligonucleotide
ugccaguuucaaaucccug

SEQ ID NO: 2632252 - RNA, 19 nt, Artificial Sequence
  Description of Artificial Sequence: Synthetic oligonucleotide
  modified_base (17)..(17): a, c, u, g, unknown or other
ucgaucuugcgcccaunca

SEQ ID NO: 2632253 - RNA, 19 nt, Artificial Sequence
  Description of Artificial Sequence: Synthetic oligonucleotide
guuagucuucugcuuggug

SEQ ID NO: 2632254 - RNA, 19 nt, Artificial Sequence
  Description of Artificial Sequence: Synthetic oligonucleotide
agccuauaggagcaucgug

SEQ ID NO: 2632255 - RNA, 19 nt, Artificial Sequence
  Description of Artificial Sequence: Synthetic oligonucleotide
aggagcaucgugaaagaca

SEQ ID NO: 2632256 - RNA, 19 nt, Artificial Sequence
  Description of Artificial Sequence: Synthetic oligonucleotide
ugcuugguggcuguuuggc

SEQ ID NO: 2632257 - RNA, 19 nt, Artificial Sequence
  Description of Artificial Sequence: Synthetic oligonucleotide
ugcaggaucgggcuaugua

SEQ ID NO: 2632258 - RNA, 19 nt, Artificial Sequence
  Description of Artificial Sequence: Synthetic oligonucleotide
agucguccacguugagagc

SEQ ID NO: 2632259 - RNA, 19 nt, Artificial Sequence
  Description of Artificial Sequence: Synthetic oligonucleotide
ugccaggccgggcuguuag

SEQ ID NO: 2632260 - RNA, 19 nt, Artificial Sequence
  Description of Artificial Sequence: Synthetic oligonucleotide
uuggccgaugcgcgagucg

SEQ ID NO: 2632261 - RNA, 19 nt, Artificial Sequence
  Description of Artificial Sequence: Synthetic oligonucleotide
cugagggccauacuccaac

SEQ ID NO: 2632262 - RNA, 19 nt, Artificial Sequence
  Description of Artificial Sequence: Synthetic oligonucleotide
ugcaguuggccacgaaguc

SEQ ID NO: 2632263 - RNA, 19 nt, Artificial Sequence
  Description of Artificial Sequence: Synthetic oligonucleotide
cacggaucgagugacgaac

SEQ ID NO: 2632264 - RNA, 19 nt, Artificial Sequence
  Description of Artificial Sequence: Synthetic oligonucleotide
ugacgaacucaucgugcca

SEQ ID NO: 2632265 - RNA, 19 nt, Artificial Sequence
  Description of Artificial Sequence: Synthetic oligonucleotide
ucgugaaggauggacucga

SEQ ID NO: 2632266 - RNA, 19 nt, Artificial Sequence
  Description of Artificial Sequence: Synthetic oligonucleotide
uggcuguuuggccgaugcg

SEQ ID NO: 2632267 - RNA, 19 nt, Artificial Sequence
  Description of Artificial Sequence: Synthetic oligonucleotide
aggccauugaacacuacca

SEQ ID NO: 2632268 - RNA, 19 nt, Artificial Sequence
  Description of Artificial Sequence: Synthetic oligonucleotide
uuggucaugaaagcuuuua

SEQ ID NO: 2632269 - RNA, 19 nt, Artificial Sequence
  Description of Artificial Sequence: Synthetic oligonucleotide
ggucacaccauucagaauu

SEQ ID NO: 2632270 - RNA, 19 nt, Artificial Sequence
  Description of Artificial Sequence: Synthetic oligonucleotide
acgaacucaucgugccagg

SEQ ID NO: 2632271 - RNA, 19 nt, Artificial Sequence
  Description of Artificial Sequence: Synthetic oligonucleotide
acaacacaucaucgugaag

SEQ ID NO: 2632272 - RNA, 19 nt, Artificial Sequence
  Description of Artificial Sequence: Synthetic oligonucleotide
cucgaacaagucguccucg

SEQ ID NO: 2632273 - RNA, 19 nt, Artificial Sequence
  Description of Artificial Sequence: Synthetic oligonucleotide
gugaaggauggacucgaac

SEQ ID NO: 2632274 - RNA, 19 nt, Artificial Sequence
  Description of Artificial Sequence: Synthetic oligonucleotide
guuggccacgaagucgucg

SEQ ID NO: 2632275 - RNA, 19 nt, Artificial Sequence
  Description of Artificial Sequence: Synthetic oligonucleotide
  modified_base (15)..(15): a, c, u, g, unknown or other
gaucuugcgcccauncaca

SEQ ID NO: 2632276 - RNA, 19 nt, Artificial Sequence
  Description of Artificial Sequence: Synthetic oligonucleotide
gccauugaacacuaccaug

SEQ ID NO: 2632277 - RNA, 19 nt, Artificial Sequence
  Description of Artificial Sequence: Synthetic oligonucleotide
ucgaacaagucguccucgu

SEQ ID NO: 2632278 - RNA, 19 nt, Artificial Sequence
  Description of Artificial Sequence: Synthetic oligonucleotide
  modified_base (10)..(10): a, c, u, g, unknown or other
ugcgcccauncacacggau

SEQ ID NO: 2632279 - RNA, 19 nt, Artificial Sequence
  Description of Artificial Sequence: Synthetic oligonucleotide
agaaggauguugccaguuu

SEQ ID NO: 2632280 - RNA, 19 nt, Artificial Sequence
  Description of Artificial Sequence: Synthetic oligonucleotide
aggugguaguuggucacac

SEQ ID NO: 2632281 - RNA, 19 nt, Artificial Sequence
  Description of Artificial Sequence: Synthetic oligonucleotide
aggguucuuggucaugaaa

SEQ ID NO: 2632282 - RNA, 19 nt, Artificial Sequence
  Description of Artificial Sequence: Synthetic oligonucleotide
guuggucacaccauucaga

SEQ ID NO: 2632283 - RNA, 19 nt, Artificial Sequence
  Description of Artificial Sequence: Synthetic oligonucleotide
gacucgaacaagucguccu

SEQ ID NO: 2632284 - RNA, 19 nt, Artificial Sequence
  Description of Artificial Sequence: Synthetic oligonucleotide
ucccuguagaucacuggau

SEQ ID NO: 2632285 - RNA, 19 nt, Artificial Sequence
  Description of Artificial Sequence: Synthetic oligonucleotide
agcccaggcgcuugugagg

SEQ ID NO: 2632286 - RNA, 19 nt, Artificial Sequence
  Description of Artificial Sequence: Synthetic oligonucleotide
ucgggcuauguagucagga

SEQ ID NO: 2632287 - RNA, 19 nt, Artificial Sequence
  Description of Artificial Sequence: Synthetic oligonucleotide
aggauggacucgaacaagu

SEQ ID NO: 2632288 - RNA, 19 nt, Artificial Sequence
  Description of Artificial Sequence: Synthetic oligonucleotide
acgaagucgucguagccua

SEQ ID NO: 2632289 - RNA, 19 nt, Artificial Sequence
  Description of Artificial Sequence: Synthetic oligonucleotide
caccgcauggcgcagcgac

SEQ ID NO: 2632290 - RNA, 19 nt, Artificial Sequence
  Description of Artificial Sequence: Synthetic oligonucleotide
  modified_base (16)..(16): a, c, u, g, unknown or other
cgaucuugcgcccauncac

SEQ ID NO: 2632291 - RNA, 19 nt, Artificial Sequence
  Description of Artificial Sequence: Synthetic oligonucleotide
gaugcgcgagucguccacg

SEQ ID NO: 2632292 - RNA, 19 nt, Artificial Sequence
  Description of Artificial Sequence: Synthetic oligonucleotide
cuucuuugcacaucccgaa

SEQ ID NO: 2632293 - RNA, 19 nt, Artificial Sequence
  Description of Artificial Sequence: Synthetic oligonucleotide
ugagggccauacuccaacu

SEQ ID NO: 2632294 - RNA, 19 nt, Artificial Sequence
  Description of Artificial Sequence: Synthetic oligonucleotide
uugguggcuguuuggccga

SEQ ID NO: 2632295 - RNA, 19 nt, Artificial Sequence
  Description of Artificial Sequence: Synthetic oligonucleotide
agcaauguagggguccaga

SEQ ID NO: 2632296 - RNA, 19 nt, Artificial Sequence
  Description of Artificial Sequence: Synthetic oligonucleotide
ugagagcaauguagggguc

SEQ ID NO: 2632297 - RNA, 19 nt, Artificial Sequence
  Description of Artificial Sequence: Synthetic oligonucleotide
ucccacagaaggugguagu

SEQ ID NO: 2632298 - RNA, 19 nt, Artificial Sequence
  Description of Artificial Sequence: Synthetic oligonucleotide
uggacucgaacaagucguc

SEQ ID NO: 2632299 - RNA, 19 nt, Artificial Sequence
  Description of Artificial Sequence: Synthetic oligonucleotide
gcaguuggccacgaagucg

SEQ ID NO: 2632300 - RNA, 19 nt, Artificial Sequence
  Description of Artificial Sequence: Synthetic oligonucleotide
uuccuucuuugcacauccc

SEQ ID NO: 2632301 - RNA, 19 nt, Artificial Sequence
  Description of Artificial Sequence: Synthetic oligonucleotide
ggcuguuuggccgaugcgc

SEQ ID NO: 2632302 - RNA, 19 nt, Artificial Sequence
  Description of Artificial Sequence: Synthetic oligonucleotide
cagcccaggcgcuugugag

SEQ ID NO: 2632303 - RNA, 19 nt, Artificial Sequence
  Description of Artificial Sequence: Synthetic oligonucleotide
gcuugcagugaccuucugc

SEQ ID NO: 2632304 - RNA, 19 nt, Artificial Sequence
  Description of Artificial Sequence: Synthetic oligonucleotide
cgucguagccuauaggagc

SEQ ID NO: 2632305 - RNA, 19 nt, Artificial Sequence
  Description of Artificial Sequence: Synthetic oligonucleotide
cuguccagccaucaucuca

SEQ ID NO: 2632306 - RNA, 19 nt, Artificial Sequence
  Description of Artificial Sequence: Synthetic oligonucleotide
gucguccacguugagagca

SEQ ID NO: 2632307 - RNA, 19 nt, Artificial Sequence
  Description of Artificial Sequence: Synthetic oligonucleotide
  modified_base (8)..(8): a, c, u, g, unknown or other
cgcccauncacacggaucg

SEQ ID NO: 2632308 - RNA, 19 nt, Artificial Sequence
  Description of Artificial Sequence: Synthetic oligonucleotide
acaagucguccucguuguc

SEQ ID NO: 2632309 - RNA, 19 nt, Artificial Sequence
  Description of Artificial Sequence: Synthetic oligonucleotide
gcuguuuggccgaugcgcg

SEQ ID NO: 2632310 - RNA, 19 nt, Artificial Sequence
  Description of Artificial Sequence: Synthetic oligonucleotide
guaguuggucacaccauuc

SEQ ID NO: 2632311 - RNA, 19 nt, Artificial Sequence
  Description of Artificial Sequence: Synthetic oligonucleotide
ugugaggguucuuggucau

SEQ ID NO: 2632312 - RNA, 19 nt, Artificial Sequence
  Description of Artificial Sequence: Synthetic oligonucleotide
agcucacggccucacagau

SEQ ID NO: 2632313 - RNA, 19 nt, Artificial Sequence
  Description of Artificial Sequence: Synthetic oligonucleotide
uguuagucuucugcuuggu

SEQ ID NO: 2632314 - RNA, 19 nt, Artificial Sequence
  Description of Artificial Sequence: Synthetic oligonucleotide
agagcaauguaggggucca

SEQ ID NO: 2632315 - RNA, 19 nt, Artificial Sequence
  Description of Artificial Sequence: Synthetic oligonucleotide
agaucacuggauggugcag

SEQ ID NO: 2632316 - RNA, 19 nt, Artificial Sequence
  Description of Artificial Sequence: Synthetic oligonucleotide
uagccuauaggagcaucgu

SEQ ID NO: 2632317 - RNA, 19 nt, Artificial Sequence
  Description of Artificial Sequence: Synthetic oligonucleotide
uaggagcaucgugaaagac

SEQ ID NO: 2632318 - RNA, 19 nt, Artificial Sequence
  Description of Artificial Sequence: Synthetic oligonucleotide
uguagggguccagaaggaa

SEQ ID NO: 2632319 - RNA, 19 nt, Artificial Sequence
  Description of Artificial Sequence: Synthetic oligonucleotide
gucguagccuauaggagca

SEQ ID NO: 2632320 - RNA, 19 nt, Artificial Sequence
  Description of Artificial Sequence: Synthetic oligonucleotide
gccucacagauuuugaucu

SEQ ID NO: 2632321 - RNA, 19 nt, Artificial Sequence
  Description of Artificial Sequence: Synthetic oligonucleotide
ccacugagggccauacucc

SEQ ID NO: 2632322 - RNA, 19 nt, Artificial Sequence
  Description of Artificial Sequence: Synthetic oligonucleotide
gucccacagaaggugguag

SEQ ID NO: 2632323 - RNA, 19 nt, Artificial Sequence
  Description of Artificial Sequence: Synthetic oligonucleotide
cacggccucacagauuuug

SEQ ID NO: 2632324 - RNA, 19 nt, Artificial Sequence
  Description of Artificial Sequence: Synthetic oligonucleotide
uagaaggauguugccaguu

SEQ ID NO: 2632325 - RNA, 19 nt, Artificial Sequence
  Description of Artificial Sequence: Synthetic oligonucleotide
gccuauaggagcaucguga

SEQ ID NO: 2632326 - RNA, 19 nt, Artificial Sequence
  Description of Artificial Sequence: Synthetic oligonucleotide
acagcccaggcgcuuguga

SEQ ID NO: 2632327 - RNA, 19 nt, Artificial Sequence
  Description of Artificial Sequence: Synthetic oligonucleotide
agacaggguacaacacauc

SEQ ID NO: 2632328 - RNA, 19 nt, Artificial Sequence
  Description of Artificial Sequence: Synthetic oligonucleotide
aucacuggauggugcaguu

SEQ ID NO: 2632329 - RNA, 19 nt, Artificial Sequence
  Description of Artificial Sequence: Synthetic oligonucleotide
ugaucuuaagaaggccauu

SEQ ID NO: 2632330 - RNA, 19 nt, Artificial Sequence
  Description of Artificial Sequence: Synthetic oligonucleotide
uggccgaugcgcgagucgu

SEQ ID NO: 2632331 - RNA, 19 nt, Artificial Sequence
  Description of Artificial Sequence: Synthetic oligonucleotide
gaucgagugacgaacucau

SEQ ID NO: 2632332 - RNA, 19 nt, Artificial Sequence
  Description of Artificial Sequence: Synthetic oligonucleotide
caagucguccucguuguca

SEQ ID NO: 2632333 - RNA, 19 nt, Artificial Sequence
  Description of Artificial Sequence: Synthetic oligonucleotide
uucaagcucacggccucac

SEQ ID NO: 2632334 - RNA, 19 nt, Artificial Sequence
  Description of Artificial Sequence: Synthetic oligonucleotide
gggcuucaagcucacggcc

SEQ ID NO: 2632335 - RNA, 19 nt, Artificial Sequence
  Description of Artificial Sequence: Synthetic oligonucleotide
agccagcuugcagugaccu

SEQ ID NO: 2632336 - RNA, 19 nt, Artificial Sequence
  Description of Artificial Sequence: Synthetic oligonucleotide
cguugagagcaauguaggg

SEQ ID NO: 2632337 - RNA, 19 nt, Artificial Sequence
  Description of Artificial Sequence: Synthetic oligonucleotide
acacggaucgagugacgaa

SEQ ID NO: 2632338 - RNA, 19 nt, Artificial Sequence
  Description of Artificial Sequence: Synthetic oligonucleotide
gagccagacaggguacaac

SEQ ID NO: 2632339 - RNA, 19 nt, Artificial Sequence
  Description of Artificial Sequence: Synthetic oligonucleotide
aggauguugccaguuucaa

SEQ ID NO: 2632340 - RNA, 19 nt, Artificial Sequence
  Description of Artificial Sequence: Synthetic oligonucleotide
uugcagugaccuucugcau

SEQ ID NO: 2632341 - RNA, 19 nt, Artificial Sequence
  Description of Artificial Sequence: Synthetic oligonucleotide
agccuccuugcugagccag

SEQ ID NO: 2632342 - RNA, 19 nt, Artificial Sequence
  Description of Artificial Sequence: Synthetic oligonucleotide
acaggguacaacacaucau

SEQ ID NO: 2632343 - RNA, 19 nt, Artificial Sequence
  Description of Artificial Sequence: Synthetic oligonucleotide
cucacggccucacagauuu

SEQ ID NO: 2632344 - RNA, 19 nt, Artificial Sequence
  Description of Artificial Sequence: Synthetic oligonucleotide
cacugagggccauacucca

SEQ ID NO: 2632345 - RNA, 19 nt, Artificial Sequence
  Description of Artificial Sequence: Synthetic oligonucleotide
gccauacuccaacuccugc

SEQ ID NO: 2632346 - RNA, 19 nt, Artificial Sequence
  Description of Artificial Sequence: Synthetic oligonucleotide
uccugcaggaucgggcuau

SEQ ID NO: 2632347 - RNA, 19 nt, Artificial Sequence
  Description of Artificial Sequence: Synthetic oligonucleotide
ggugguaguuggucacacc

SEQ ID NO: 2632348 - RNA, 19 nt, Artificial Sequence
  Description of Artificial Sequence: Synthetic oligonucleotide
cagacaggguacaacacau

SEQ ID NO: 2632349 - RNA, 19 nt, Artificial Sequence
  Description of Artificial Sequence: Synthetic oligonucleotide
accgcauggcgcagcgacc

SEQ ID NO: 2632350 - RNA, 19 nt, Artificial Sequence
  Description of Artificial Sequence: Synthetic oligonucleotide
agcgaccaggcugugggcu

SEQ ID NO: 2632351 - RNA, 19 nt, Artificial Sequence
  Description of Artificial Sequence: Synthetic oligonucleotide
ucguccacguugagagcaa

SEQ ID NO: 2632352 - RNA, 19 nt, Artificial Sequence
  Description of Artificial Sequence: Synthetic oligonucleotide
gcgcgagucguccacguug

SEQ ID NO: 2632353 - RNA, 19 nt, Artificial Sequence
  Description of Artificial Sequence: Synthetic oligonucleotide
cagccagcucgaucuugcg

SEQ ID NO: 2632354 - RNA, 19 nt, Artificial Sequence
  Description of Artificial Sequence: Synthetic oligonucleotide
cgggcuguuagucuucugc

SEQ ID NO: 2632355 - RNA, 19 nt, Artificial Sequence
  Description of Artificial Sequence: Synthetic oligonucleotide
cucaucgugccaggccggg

SEQ ID NO: 2632356 - RNA, 19 nt, Artificial Sequence
  Description of Artificial Sequence: Synthetic oligonucleotide
gucacaccauucagaauuc

SEQ ID NO: 2632357 - RNA, 19 nt, Artificial Sequence
  Description of Artificial Sequence: Synthetic oligonucleotide
gaaagucuguggccggggu

SEQ ID NO: 2632358 - RNA, 19 nt, Artificial Sequence
  Description of Artificial Sequence: Synthetic oligonucleotide
gccacgaagucgucguagc

SEQ ID NO: 2632359 - RNA, 19 nt, Artificial Sequence
  Description of Artificial Sequence: Synthetic oligonucleotide
ugagccagacaggguacaa

SEQ ID NO: 2632360 - RNA, 19 nt, Artificial Sequence
  Description of Artificial Sequence: Synthetic oligonucleotide
uggucacaccauucagaau

SEQ ID NO: 2632361 - RNA, 19 nt, Artificial Sequence
  Description of Artificial Sequence: Synthetic oligonucleotide
aucgagugacgaacucauc

SEQ ID NO: 2632362 - RNA, 19 nt, Artificial Sequence
  Description of Artificial Sequence: Synthetic oligonucleotide
ggaucgagugacgaacuca

SEQ ID NO: 2632363 - RNA, 19 nt, Artificial Sequence
  Description of Artificial Sequence: Synthetic oligonucleotide
acucaucgugccaggccgg

SEQ ID NO: 2632364 - RNA, 19 nt, Artificial Sequence
  Description of Artificial Sequence: Synthetic oligonucleotide
gcuauguagucaggagucc

SEQ ID NO: 2632365 - RNA, 19 nt, Artificial Sequence
  Description of Artificial Sequence: Synthetic oligonucleotide
ucuguggccggggucccac

SEQ ID NO: 2632366 - RNA, 19 nt, Artificial Sequence
  Description of Artificial Sequence: Synthetic oligonucleotide
gcaauguagggguccagaa

SEQ ID NO: 2632367 - RNA, 19 nt, Artificial Sequence
  Description of Artificial Sequence: Synthetic oligonucleotide
aucgugccaggccgggcug

SEQ ID NO: 2632368 - RNA, 19 nt, Artificial Sequence
  Description of Artificial Sequence: Synthetic oligonucleotide
caacuccugcaggaucggg

SEQ ID NO: 2632369 - RNA, 19 nt, Artificial Sequence
  Description of Artificial Sequence: Synthetic oligonucleotide
cacacggaucgagugacga

SEQ ID NO: 2632370 - RNA, 19 nt, Artificial Sequence
  Description of Artificial Sequence: Synthetic oligonucleotide
ccauacuccaacuccugca

SEQ ID NO: 2632371 - RNA, 19 nt, Artificial Sequence
  Description of Artificial Sequence: Synthetic oligonucleotide
uuuggccgaugcgcgaguc

SEQ ID NO: 2632372 - RNA, 19 nt, Artificial Sequence
  Description of Artificial Sequence: Synthetic oligonucleotide
ccuugcugagccagacagg

SEQ ID NO: 2632373 - RNA, 19 nt, Artificial Sequence
  Description of Artificial Sequence: Synthetic oligonucleotide
acggaucgagugacgaacu

SEQ ID NO: 2632374 - RNA, 19 nt, Artificial Sequence
  Description of Artificial Sequence: Synthetic oligonucleotide
agaaggccauugaacacua

SEQ ID NO: 2632375 - RNA, 19 nt, Artificial Sequence
  Description of Artificial Sequence: Synthetic oligonucleotide
ggucccaccgcauggcgca

SEQ ID NO: 2632376 - RNA, 19 nt, Artificial Sequence
  Description of Artificial Sequence: Synthetic oligonucleotide
gagcaauguagggguccag

SEQ ID NO: 2632377 - RNA, 19 nt, Artificial Sequence
  Description of Artificial Sequence: Synthetic oligonucleotide
cuauaggagcaucgugaaa

SEQ ID NO: 2632378 - RNA, 19 nt, Artificial Sequence
  Description of Artificial Sequence: Synthetic oligonucleotide
gugcaguuggccacgaagu

SEQ ID NO: 2632379 - RNA, 19 nt, Artificial Sequence
  Description of Artificial Sequence: Synthetic oligonucleotide
augcgcgagucguccacgu

SEQ ID NO: 2632380 - RNA, 19 nt, Artificial Sequence
  Description of Artificial Sequence: Synthetic oligonucleotide
cucacagauuuugaucuua

SEQ ID NO: 2632381 - RNA, 19 nt, Artificial Sequence
  Description of Artificial Sequence: Synthetic oligonucleotide
acagaaggugguaguuggu

SEQ ID NO: 2632382 - RNA, 19 nt, Artificial Sequence
  Description of Artificial Sequence: Synthetic oligonucleotide
aggaugcugacagccuccu

SEQ ID NO: 2632383 - RNA, 19 nt, Artificial Sequence
  Description of Artificial Sequence: Synthetic oligonucleotide
ggacucgaacaagucgucc

SEQ ID NO: 2632384 - RNA, 19 nt, Artificial Sequence
  Description of Artificial Sequence: Synthetic oligonucleotide
ggguacaacacaucaucgu

SEQ ID NO: 2632385 - RNA, 19 nt, Artificial Sequence
  Description of Artificial Sequence: Synthetic oligonucleotide
gcccaggcgcuugugaggg

SEQ ID NO: 2632386 - RNA, 19 nt, Artificial Sequence
  Description of Artificial Sequence: Synthetic oligonucleotide
ucaucgugccaggccgggc

SEQ ID NO: 2632387 - RNA, 19 nt, Artificial Sequence
  Description of Artificial Sequence: Synthetic oligonucleotide
gggcuguccagccaucauc

SEQ ID NO: 2632388 - RNA, 19 nt, Artificial Sequence
  Description of Artificial Sequence: Synthetic oligonucleotide
cacaucccgaagucagcca

SEQ ID NO: 2632389 - RNA, 19 nt, Artificial Sequence
  Description of Artificial Sequence: Synthetic oligonucleotide
ccagacaggguacaacaca

SEQ ID NO: 2632390 - RNA, 19 nt, Artificial Sequence
  Description of Artificial Sequence: Synthetic oligonucleotide
gaagucgucguagccuaua

SEQ ID NO: 2632391 - RNA, 19 nt, Artificial Sequence
  Description of Artificial Sequence: Synthetic oligonucleotide
gggcuauguagucaggagu

SEQ ID NO: 2632392 - RNA, 19 nt, Artificial Sequence
  Description of Artificial Sequence: Synthetic oligonucleotide
uucugcuugguggcuguuu

SEQ ID NO: 2632393 - RNA, 19 nt, Artificial Sequence
  Description of Artificial Sequence: Synthetic oligonucleotide
cauugaacacuaccauggu

SEQ ID NO: 2632394 - RNA, 19 nt, Artificial Sequence
  Description of Artificial Sequence: Synthetic oligonucleotide
acacaucaucgugaaggau

SEQ ID NO: 2632395 - RNA, 19 nt, Artificial Sequence
  Description of Artificial Sequence: Synthetic oligonucleotide
aggccgggcuguuagucuu

SEQ ID NO: 2632396 - RNA, 19 nt, Artificial Sequence
  Description of Artificial Sequence: Synthetic oligonucleotide
uccucguugucagcuucaa

SEQ ID NO: 2632397 - RNA, 19 nt, Artificial Sequence
  Description of Artificial Sequence: Synthetic oligonucleotide
cauucagaauuccuucuuu

SEQ ID NO: 2632398 - RNA, 19 nt, Artificial Sequence
  Description of Artificial Sequence: Synthetic oligonucleotide
gcagugaccuucugcaucu

SEQ ID NO: 2632399 - RNA, 19 nt, Artificial Sequence
  Description of Artificial Sequence: Synthetic oligonucleotide
ggccacgaagucgucguag

SEQ ID NO: 2632400 - RNA, 19 nt, Artificial Sequence
  Description of Artificial Sequence: Synthetic oligonucleotide
caggaucgggcuauguagu

SEQ ID NO: 2632401 - RNA, 19 nt, Artificial Sequence
  Description of Artificial Sequence: Synthetic oligonucleotide
cuguagaucacuggauggu

SEQ ID NO: 2632402 - RNA, 19 nt, Artificial Sequence
  Description of Artificial Sequence: Synthetic oligonucleotide
ccuauaggagcaucgugaa

SEQ ID NO: 2632403 - RNA, 19 nt, Artificial Sequence
  Description of Artificial Sequence: Synthetic oligonucleotide
  modified_base (6)..(6): a, c, u, g, unknown or other
cccauncacacggaucgag

SEQ ID NO: 2632404 - RNA, 19 nt, Artificial Sequence
  Description of Artificial Sequence: Synthetic oligonucleotide
ccaccaguccacugagggc

SEQ ID NO: 2632405 - RNA, 19 nt, Artificial Sequence
  Description of Artificial Sequence: Synthetic oligonucleotide
  modified_base (11)..(11): a, c, u, g, unknown or other
uugcgcccauncacacgga

SEQ ID NO: 2632406 - RNA, 19 nt, Artificial Sequence
  Description of Artificial Sequence: Synthetic oligonucleotide
aucgggcuauguagucagg

SEQ ID NO: 2632407 - RNA, 19 nt, Artificial Sequence
  Description of Artificial Sequence: Synthetic oligonucleotide
gaaggccauugaacacuac

SEQ ID NO: 2632408 - RNA, 19 nt, Artificial Sequence
  Description of Artificial Sequence: Synthetic oligonucleotide
ccacgaagucgucguagcc

SEQ ID NO: 2632409 - RNA, 19 nt, Artificial Sequence
  Description of Artificial Sequence: Synthetic oligonucleotide
cacgaagucgucguagccu

SEQ ID NO: 2632410 - RNA, 19 nt, Artificial Sequence
  Description of Artificial Sequence: Synthetic oligonucleotide
acacagcccaggcgcuugu

SEQ ID NO: 2632411 - RNA, 19 nt, Artificial Sequence
  Description of Artificial Sequence: Synthetic oligonucleotide
ggauggacucgaacaaguc

SEQ ID NO: 2632412 - RNA, 19 nt, Artificial Sequence
  Description of Artificial Sequence: Synthetic oligonucleotide
agcuugcagugaccuucug

SEQ ID NO: 2632413 - RNA, 19 nt, Artificial Sequence
  Description of Artificial Sequence: Synthetic oligonucleotide
cagcgaccaggcugugggc

SEQ ID NO: 2632414 - RNA, 19 nt, Artificial Sequence
  Description of Artificial Sequence: Synthetic oligonucleotide
cugugggcuucaagcucac

SEQ ID NO: 2632415 - RNA, 19 nt, Artificial Sequence
  Description of Artificial Sequence: Synthetic oligonucleotide
gagcaucgugaaagacagc

SEQ ID NO: 2632416 - RNA, 19 nt, Artificial Sequence
  Description of Artificial Sequence: Synthetic oligonucleotide
cuguuuggccgaugcgcga

SEQ ID NO: 2632417 - RNA, 19 nt, Artificial Sequence
  Description of Artificial Sequence: Synthetic oligonucleotide
ccacagaaggugguaguug

SEQ ID NO: 2632418 - RNA, 19 nt, Artificial Sequence
  Description of Artificial Sequence: Synthetic oligonucleotide
gguaguuggucacaccauu

SEQ ID NO: 2632419 - RNA, 19 nt, Artificial Sequence
  Description of Artificial Sequence: Synthetic oligonucleotide
ucguccucguugucagcuu

SEQ ID NO: 2632420 - RNA, 19 nt, Artificial Sequence
  Description of Artificial Sequence: Synthetic oligonucleotide
ggaucgggcuauguaguca

SEQ ID NO: 2632421 - RNA, 19 nt, Artificial Sequence
  Description of Artificial Sequence: Synthetic oligonucleotide
gcauggcgcagcgaccagg

SEQ ID NO: 2632422 - RNA, 19 nt, Artificial Sequence
  Description of Artificial Sequence: Synthetic oligonucleotide
cgggcuauguagucaggag

SEQ ID NO: 2632423 - RNA, 19 nt, Artificial Sequence
  Description of Artificial Sequence: Synthetic oligonucleotide
agucccacagaagguggua

SEQ ID NO: 2632424 - RNA, 19 nt, Artificial Sequence
  Description of Artificial Sequence: Synthetic oligonucleotide
guggccggggucccaccgc

SEQ ID NO: 2632425 - RNA, 19 nt, Artificial Sequence
  Description of Artificial Sequence: Synthetic oligonucleotide
gcgcuugugaggguucuug

SEQ ID NO: 2632426 - RNA, 19 nt, Artificial Sequence
  Description of Artificial Sequence: Synthetic oligonucleotide
ugcgcgagucguccacguu

SEQ ID NO: 2632427 - RNA, 19 nt, Artificial Sequence
  Description of Artificial Sequence: Synthetic oligonucleotide
uggugcaguuggccacgaa

SEQ ID NO: 2632428 - RNA, 19 nt, Artificial Sequence
  Description of Artificial Sequence: Synthetic oligonucleotide
ggguccagaaggaaagucu

SEQ ID NO: 2632429 - RNA, 19 nt, Artificial Sequence
  Description of Artificial Sequence: Synthetic oligonucleotide
gggcuguuagucuucugcu

SEQ ID NO: 2632430 - RNA, 19 nt, Artificial Sequence
  Description of Artificial Sequence: Synthetic oligonucleotide
gccgaugcgcgagucgucc

SEQ ID NO: 2632431 - RNA, 19 nt, Artificial Sequence
  Description of Artificial Sequence: Synthetic oligonucleotide
caucgugccaggccgggcu

SEQ ID NO: 2632432 - RNA, 19 nt, Artificial Sequence
  Description of Artificial Sequence: Synthetic oligonucleotide
uggccacgaagucgucgua

SEQ ID NO: 2632433 - RNA, 19 nt, Artificial Sequence
  Description of Artificial Sequence: Synthetic oligonucleotide
aguuggccacgaagucguc

SEQ ID NO: 2632434 - RNA, 19 nt, Artificial Sequence
  Description of Artificial Sequence: Synthetic oligonucleotide
ccagcucgaucuugcgccc

SEQ ID NO: 2632435 - RNA, 19 nt, Artificial Sequence
  Description of Artificial Sequence: Synthetic oligonucleotide
ggccauugaacacuaccau

SEQ ID NO: 2632436 - RNA, 19 nt, Artificial Sequence
  Description of Artificial Sequence: Synthetic oligonucleotide
auggcgcagcgaccaggcu

SEQ ID NO: 2632437 - RNA, 19 nt, Artificial Sequence
  Description of Artificial Sequence: Synthetic oligonucleotide
acugagggccauacuccaa

SEQ ID NO: 2632438 - RNA, 19 nt, Artificial Sequence
  Description of Artificial Sequence: Synthetic oligonucleotide
cuguggccggggucccacc

SEQ ID NO: 2632439 - RNA, 19 nt, Artificial Sequence
  Description of Artificial Sequence: Synthetic oligonucleotide
gcugagccagacaggguac

SEQ ID NO: 2632440 - RNA, 19 nt, Artificial Sequence
  Description of Artificial Sequence: Synthetic oligonucleotide
guccucguugucagcuuca

SEQ ID NO: 2632441 - RNA, 19 nt, Artificial Sequence
  Description of Artificial Sequence: Synthetic oligonucleotide
gcaucgugaaagacagcca

SEQ ID NO: 2632442 - RNA, 19 nt, Artificial Sequence
  Description of Artificial Sequence: Synthetic oligonucleotide
ggcuguccagccaucaucu

SEQ ID NO: 2632443 - RNA, 19 nt, Artificial Sequence
  Description of Artificial Sequence: Synthetic oligonucleotide
ucccaccgcauggcgcagc

SEQ ID NO: 2632444 - RNA, 19 nt, Artificial Sequence
  Description of Artificial Sequence: Synthetic oligonucleotide
ucguagccuauaggagcau

SEQ ID NO: 2632445 - RNA, 19 nt, Artificial Sequence
  Description of Artificial Sequence: Synthetic oligonucleotide
caaaucccuguagaucacu

SEQ ID NO: 2632446 - RNA, 19 nt, Artificial Sequence
  Description of Artificial Sequence: Synthetic oligonucleotide
cccaccgcauggcgcagcg

SEQ ID NO: 2632447 - RNA, 19 nt, Artificial Sequence
  Description of Artificial Sequence: Synthetic oligonucleotide
ucgugccaggccgggcugu

SEQ ID NO: 2632448 - RNA, 19 nt, Artificial Sequence
  Description of Artificial Sequence: Synthetic oligonucleotide
accaguccacugagggcca

SEQ ID NO: 2632449 - RNA, 19 nt, Artificial Sequence
  Description of Artificial Sequence: Synthetic oligonucleotide
auggugcaguuggccacga

SEQ ID NO: 2632450 - RNA, 19 nt, Artificial Sequence
  Description of Artificial Sequence: Synthetic oligonucleotide
gggucccaccgcauggcgc

SEQ ID NO: 2632451 - RNA, 19 nt, Artificial Sequence
  Description of Artificial Sequence: Synthetic oligonucleotide
ccuccuugcugagccagac

SEQ ID NO: 2632452 - RNA, 19 nt, Artificial Sequence
  Description of Artificial Sequence: Synthetic oligonucleotide
ucacggccucacagauuuu

SEQ ID NO: 2632453 - RNA, 19 nt, Artificial Sequence
  Description of Artificial Sequence: Synthetic oligonucleotide
cagcuugcagugaccuucu

SEQ ID NO: 2632454 - RNA, 19 nt, Artificial Sequence
  Description of Artificial Sequence: Synthetic oligonucleotide
  modified_base (9)..(9): a, c, u, g, unknown or other
gcgcccauncacacggauc

SEQ ID NO: 2632455 - RNA, 19 nt, Artificial Sequence
  Description of Artificial Sequence: Synthetic oligonucleotide
  modified_base (5)..(5): a, c, u, g, unknown or other
ccauncacacggaucgagu

SEQ ID NO: 2632456 - RNA, 19 nt, Artificial Sequence
  Description of Artificial Sequence: Synthetic oligonucleotide
guuuggccgaugcgcgagu

SEQ ID NO: 2632457 - RNA, 19 nt, Artificial Sequence
  Description of Artificial Sequence: Synthetic oligonucleotide
cgaacucaucgugccaggc

SEQ ID NO: 2632458 - RNA, 19 nt, Artificial Sequence
  Description of Artificial Sequence: Synthetic oligonucleotide
caggccgggcuguuagucu

SEQ ID NO: 2632459 - RNA, 19 nt, Artificial Sequence
  Description of Artificial Sequence: Synthetic oligonucleotide
gcuguccagccaucaucuc

SEQ ID NO: 2632460 - RNA, 19 nt, Artificial Sequence
  Description of Artificial Sequence: Synthetic oligonucleotide
ggcuguuagucuucugcuu

SEQ ID NO: 2632461 - RNA, 19 nt, Artificial Sequence
  Description of Artificial Sequence: Synthetic oligonucleotide
ggcuucaagcucacggccu

SEQ ID NO: 2632462 - RNA, 19 nt, Artificial Sequence
  Description of Artificial Sequence: Synthetic oligonucleotide
gaccaggcugugggcuuca

SEQ ID NO: 2632463 - RNA, 19 nt, Artificial Sequence
  Description of Artificial Sequence: Synthetic oligonucleotide
caucaucgugaaggaugga

SEQ ID NO: 2632464 - RNA, 19 nt, Artificial Sequence
  Description of Artificial Sequence: Synthetic oligonucleotide
ggcgcagcgaccaggcugu

SEQ ID NO: 2632465 - RNA, 19 nt, Artificial Sequence
  Description of Artificial Sequence: Synthetic oligonucleotide
cgagugacgaacucaucgu

SEQ ID NO: 2632466 - RNA, 19 nt, Artificial Sequence
  Description of Artificial Sequence: Synthetic oligonucleotide
ccaggccgggcuguuaguc

SEQ ID NO: 2632467 - RNA, 19 nt, Artificial Sequence
  Description of Artificial Sequence: Synthetic oligonucleotide
cguccucguugucagcuuc

SEQ ID NO: 2632468 - RNA, 19 nt, Artificial Sequence
  Description of Artificial Sequence: Synthetic oligonucleotide
cgaugcgcgagucguccac

SEQ ID NO: 2632469 - RNA, 19 nt, Artificial Sequence
  Description of Artificial Sequence: Synthetic oligonucleotide
gucccaccgcauggcgcag

SEQ ID NO: 2632470 - RNA, 19 nt, Artificial Sequence
  Description of Artificial Sequence: Synthetic oligonucleotide
gcgagucguccacguugag

SEQ ID NO: 2632471 - RNA, 19 nt, Artificial Sequence
  Description of Artificial Sequence: Synthetic oligonucleotide
ccacguugagagcaaugua

SEQ ID NO: 2632472 - RNA, 19 nt, Artificial Sequence
  Description of Artificial Sequence: Synthetic oligonucleotide
cagccuccuugcugagcca

SEQ ID NO: 2632473 - RNA, 19 nt, Artificial Sequence
  Description of Artificial Sequence: Synthetic oligonucleotide
ugguggcuguuuggccgau

SEQ ID NO: 2632474 - RNA, 19 nt, Artificial Sequence
  Description of Artificial Sequence: Synthetic oligonucleotide
gguggcuguuuggccgaug

SEQ ID NO: 2632475 - RNA, 19 nt, Artificial Sequence
  Description of Artificial Sequence: Synthetic oligonucleotide
guccacugagggccauacu

SEQ ID NO: 2632476 - RNA, 19 nt, Artificial Sequence
  Description of Artificial Sequence: Synthetic oligonucleotide
cggaucgagugacgaacuc

SEQ ID NO: 2632477 - RNA, 19 nt, Artificial Sequence
  Description of Artificial Sequence: Synthetic oligonucleotide
cgcgagucguccacguuga

SEQ ID NO: 2632478 - RNA, 19 nt, Artificial Sequence
  Description of Artificial Sequence: Synthetic oligonucleotide
  modified_base (7)..(7): a, c, u, g, unknown or other
gcccauncacacggaucga

SEQ ID NO: 2632479 - RNA, 19 nt, Artificial Sequence
  Description of Artificial Sequence: Synthetic oligonucleotide
ccauucagaauuccuucuu

SEQ ID NO: 2632480 - RNA, 19 nt, Artificial Sequence
  Description of Artificial Sequence: Synthetic oligonucleotide
cgagucguccacguugaga

SEQ ID NO: 2632481 - RNA, 19 nt, Artificial Sequence
  Description of Artificial Sequence: Synthetic oligonucleotide
ccgcauggcgcagcgacca

SEQ ID NO: 2632482 - RNA, 19 nt, Artificial Sequence
  Description of Artificial Sequence: Synthetic oligonucleotide
accaggcugugggcuucaa

SEQ ID NO: 2632483 - RNA, 19 nt, Artificial Sequence
  Description of Artificial Sequence: Synthetic oligonucleotide
ccucguugucagcuucaaa

SEQ ID NO: 2632484 - RNA, 19 nt, Artificial Sequence
  Description of Artificial Sequence: Synthetic oligonucleotide
ccgggcuguuagucuucug

SEQ ID NO: 2632485 - RNA, 19 nt, Artificial Sequence
  Description of Artificial Sequence: Synthetic oligonucleotide
ccugcaggaucgggcuaug

SEQ ID NO: 2632486 - RNA, 19 nt, Artificial Sequence
  Description of Artificial Sequence: Synthetic oligonucleotide
cgcagcgaccaggcugugg

SEQ ID NO: 2632487 - RNA, 19 nt, Artificial Sequence
  Description of Artificial Sequence: Synthetic oligonucleotide
caguccacugagggccaua

SEQ ID NO: 2632488 - RNA, 19 nt, Artificial Sequence
  Description of Artificial Sequence: Synthetic oligonucleotide
ccgaugcgcgagucgucca

SEQ ID NO: 2632489 - RNA, 19 nt, Artificial Sequence
  Description of Artificial Sequence: Synthetic oligonucleotide
ggccgggcuguuagucuuc

SEQ ID NO: 2632490 - RNA, 19 nt, Artificial Sequence
  Description of Artificial Sequence: Synthetic oligonucleotide
cugcaggaucgggcuaugu

SEQ ID NO: 2632491 - RNA, 19 nt, Artificial Sequence
  Description of Artificial Sequence: Synthetic oligonucleotide
ggccgaugcgcgagucguc

SEQ ID NO: 2632492 - RNA, 19 nt, Artificial Sequence
  Description of Artificial Sequence: Synthetic oligonucleotide
cgugaaggauggacucgaa

SEQ ID NO: 2632493 - RNA, 19 nt, Artificial Sequence
  Description of Artificial Sequence: Synthetic oligonucleotide
cgcauggcgcagcgaccag

SEQ ID NO: 2632494 - RNA, 19 nt, Artificial Sequence
  Description of Artificial Sequence: Synthetic oligonucleotide
ccucacagauuuugaucuu

SEQ ID NO: 2632495 - RNA, 19 nt, Artificial Sequence
  Description of Artificial Sequence: Synthetic oligonucleotide
cagugaccuucugcaucua

SEQ ID NO: 2632496 - RNA, 19 nt, Artificial Sequence
  Description of Artificial Sequence: Synthetic oligonucleotide
gcgaccaggcugugggcuu

SEQ ID NO: 2632497 - RNA, 19 nt, Artificial Sequence
  Description of Artificial Sequence: Synthetic oligonucleotide
gccacacagcccaggcgcu

SEQ ID NO: 2632498 - RNA, 19 nt, Artificial Sequence
  Description of Artificial Sequence: Synthetic oligonucleotide
  modified_base (19)..(19): a, c, u, g, unknown or other
gcucgaucuugcgcccaun

SEQ ID NO: 2632499 - RNA, 19 nt, Artificial Sequence
  Description of Artificial Sequence: Synthetic oligonucleotide
cccacagaaggugguaguu

SEQ ID NO: 2632500 - RNA, 19 nt, Artificial Sequence
  Description of Artificial Sequence: Synthetic oligonucleotide
gccaggccgggcuguuagu

SEQ ID NO: 2632501 - RNA, 19 nt, Artificial Sequence
  Description of Artificial Sequence: Synthetic oligonucleotide
gccgggcuguuagucuucu

SEQ ID NO: 2632502 - RNA, 19 nt, Artificial Sequence
  Description of Artificial Sequence: Synthetic oligonucleotide
cgaacaagucguccucguu

SEQ ID NO: 2632503 - RNA, 19 nt, Artificial Sequence
  Description of Artificial Sequence: Synthetic oligonucleotide
gcucacggccucacagauu

SEQ ID NO: 2632504 - RNA, 19 nt, Artificial Sequence
  Description of Artificial Sequence: Synthetic oligonucleotide
gcgcagcgaccaggcugug

SEQ ID NO: 2632505 - RNA, 19 nt, Artificial Sequence
  Description of Artificial Sequence: Synthetic oligonucleotide
ggcgcuugugaggguucuu

SEQ ID NO: 2632506 - RNA, 19 nt, Artificial Sequence
  Description of Artificial Sequence: Synthetic oligonucleotide
ccaccgcauggcgcagcga

SEQ ID NO: 2632507 - RNA, 19 nt, Artificial Sequence
  Description of Artificial Sequence: Synthetic oligonucleotide
cgaagucgucguagccuau

SEQ ID NO: 2632508 - RNA, 19 nt, Artificial Sequence
  Description of Artificial Sequence: Synthetic oligonucleotide
cguccacguugagagcaau

SEQ ID NO: 2632509 - RNA, 19 nt, Artificial Sequence
  Description of Artificial Sequence: Synthetic oligonucleotide
  modified_base (1)..(1): a, c, u, g, unknown or other
ncacacggaucgagugacg

SEQ ID NO: 2632510 - RNA, 19 nt, Artificial Sequence
  Description of Artificial Sequence: Synthetic oligonucleotide
  modified_base (4)..(4): a, c, u, g, unknown or other
augnuaauggcucagcugc

SEQ ID NO: 2632511 - RNA, 19 nt, Artificial Sequence
  Description of Artificial Sequence: Synthetic oligonucleotide
gaaaagauagauugcaccg

SEQ ID NO: 2632512 - RNA, 19 nt, Artificial Sequence
  Description of Artificial Sequence: Synthetic oligonucleotide
aaccacauucuucaaaggc

SEQ ID NO: 2632513 - RNA, 19 nt, Artificial Sequence
  Description of Artificial Sequence: Synthetic oligonucleotide
ucagauacggaacacaggc

SEQ ID NO: 2632514 - RNA, 19 nt, Artificial Sequence
  Description of Artificial Sequence: Synthetic oligonucleotide
auagauugcaccgaugucc

SEQ ID NO: 2632515 - RNA, 19 nt, Artificial Sequence
  Description of Artificial Sequence: Synthetic oligonucleotide
aaccugagggcuuuugucc

SEQ ID NO: 2632516 - RNA, 19 nt, Artificial Sequence
  Description of Artificial Sequence: Synthetic oligonucleotide
uguaaaugggucaggagag

SEQ ID NO: 2632517 - RNA, 19 nt, Artificial Sequence
  Description of Artificial Sequence: Synthetic oligonucleotide
ugucugguuaaccuggugg

SEQ ID NO: 2632518 - RNA, 19 nt, Artificial Sequence
  Description of Artificial Sequence: Synthetic oligonucleotide
aucacuucagaacucacgg

SEQ ID NO: 2632519 - RNA, 19 nt, Artificial Sequence
  Description of Artificial Sequence: Synthetic oligonucleotide
auuuccuuccauuuccgcc

SEQ ID NO: 2632520 - RNA, 19 nt, Artificial Sequence
  Description of Artificial Sequence: Synthetic oligonucleotide
gagaccuuggaaaagauag

SEQ ID NO: 2632521 - RNA, 19 nt, Artificial Sequence
  Description of Artificial Sequence: Synthetic oligonucleotide
augaaaaccacauucuuca

SEQ ID NO: 2632522 - RNA, 19 nt, Artificial Sequence
  Description of Artificial Sequence: Synthetic oligonucleotide
uuucagauacggaacacag

SEQ ID NO: 2632523 - RNA, 19 nt, Artificial Sequence
  Description of Artificial Sequence: Synthetic oligonucleotide
gagagagagagagagaggg

SEQ ID NO: 2632524 - RNA, 19 nt, Artificial Sequence
  Description of Artificial Sequence: Synthetic oligonucleotide
uccaguaaaguccuggucu

SEQ ID NO: 2632525 - RNA, 19 nt, Artificial Sequence
  Description of Artificial Sequence: Synthetic oligonucleotide
agauacggaacacaggcuc

SEQ ID NO: 2632526 - RNA, 19 nt, Artificial Sequence
  Description of Artificial Sequence: Synthetic oligonucleotide
uucacuuuggaacacugcu

SEQ ID NO: 2632527 - RNA, 19 nt, Artificial Sequence
  Description of Artificial Sequence: Synthetic oligonucleotide
aaaguccuggucugaaggg

SEQ ID NO: 2632528 - RNA, 19 nt, Artificial Sequence
  Description of Artificial Sequence: Synthetic oligonucleotide
gagagagagagagagagag

SEQ ID NO: 2632529 - RNA, 19 nt, Artificial Sequence
  Description of Artificial Sequence: Synthetic oligonucleotide
gaucauacaguccaugcac

SEQ ID NO: 2632530 - RNA, 19 nt, Artificial Sequence
  Description of Artificial Sequence: Synthetic oligonucleotide
auucucaucauccaguaaa

SEQ ID NO: 2632531 - RNA, 19 nt, Artificial Sequence
  Description of Artificial Sequence: Synthetic oligonucleotide
agauagauugcaccgaugu

SEQ ID NO: 2632532 - RNA, 19 nt, Artificial Sequence
  Description of Artificial Sequence: Synthetic oligonucleotide
agccuuggcaaccugaggg

SEQ ID NO: 2632533 - RNA, 19 nt, Artificial Sequence
  Description of Artificial Sequence: Synthetic oligonucleotide
  modified_base (10)..(10): a, c, u, g, unknown or other
cucaggaugnuaauggcuc

SEQ ID NO: 2632534 - RNA, 19 nt, Artificial Sequence
  Description of Artificial Sequence: Synthetic oligonucleotide
aacucacgggaucauacag

SEQ ID NO: 2632535 - RNA, 19 nt, Artificial Sequence
  Description of Artificial Sequence: Synthetic oligonucleotide
  modified_base (5)..(5): a, c, u, g, unknown or other
gaugnuaauggcucagcug

SEQ ID NO: 2632536 - RNA, 19 nt, Artificial Sequence
  Description of Artificial Sequence: Synthetic oligonucleotide
ucuucuucacuuuggaaca

SEQ ID NO: 2632537 - RNA, 19 nt, Artificial Sequence
  Description of Artificial Sequence: Synthetic oligonucleotide
uugucgaggggcuucacgg

SEQ ID NO: 2632538 - RNA, 19 nt, Artificial Sequence
  Description of Artificial Sequence: Synthetic oligonucleotide
uuuccuuccauuuccgccc

SEQ ID NO: 2632539 - RNA, 19 nt, Artificial Sequence
  Description of Artificial Sequence: Synthetic oligonucleotide
ucuaugaagaaggagccca

SEQ ID NO: 2632540 - RNA, 19 nt, Artificial Sequence
  Description of Artificial Sequence: Synthetic oligonucleotide
cuuuucagcauugggaucc

SEQ ID NO: 2632541 - RNA, 19 nt, Artificial Sequence
  Description of Artificial Sequence: Synthetic oligonucleotide
ugaagggugaugucuauga

SEQ ID NO: 2632542 - RNA, 19 nt, Artificial Sequence
  Description of Artificial Sequence: Synthetic oligonucleotide
aaagauagauugcaccgau

SEQ ID NO: 2632543 - RNA, 19 nt, Artificial Sequence
  Description of Artificial Sequence: Synthetic oligonucleotide
ggaaaagauagauugcacc

SEQ ID NO: 2632544 - RNA, 19 nt, Artificial Sequence
  Description of Artificial Sequence: Synthetic oligonucleotide
auacaguccaugcaccagg

SEQ ID NO: 2632545 - RNA, 19 nt, Artificial Sequence
  Description of Artificial Sequence: Synthetic oligonucleotide
uccauuuccgcccagcaaa

SEQ ID NO: 2632546 - RNA, 19 nt, Artificial Sequence
  Description of Artificial Sequence: Synthetic oligonucleotide
uucagauacggaacacagg

SEQ ID NO: 2632547 - RNA, 19 nt, Artificial Sequence
  Description of Artificial Sequence: Synthetic oligonucleotide
uucucaucauccaguaaag

SEQ ID NO: 2632548 - RNA, 19 nt, Artificial Sequence
  Description of Artificial Sequence: Synthetic oligonucleotide
agagggagagcucaggaug

SEQ ID NO: 2632549 - RNA, 19 nt, Artificial Sequence
  Description of Artificial Sequence: Synthetic oligonucleotide
  modified_base (13)..(13): a, c, u, g, unknown or other
gagcucaggaugnuaaugg

SEQ ID NO: 2632550 - RNA, 19 nt, Artificial Sequence
  Description of Artificial Sequence: Synthetic oligonucleotide
cacuuuggaacacugcucc

SEQ ID NO: 2632551 - RNA, 19 nt, Artificial Sequence
  Description of Artificial Sequence: Synthetic oligonucleotide
aacacaggcucgaacaguc

SEQ ID NO: 2632552 - RNA, 19 nt, Artificial Sequence
  Description of Artificial Sequence: Synthetic oligonucleotide
gagagagagagagagggag

SEQ ID NO: 2632553 - RNA, 19 nt, Artificial Sequence
  Description of Artificial Sequence: Synthetic oligonucleotide
ucauccaguaaaguccugg

SEQ ID NO: 2632554 - RNA, 19 nt, Artificial Sequence
  Description of Artificial Sequence: Synthetic oligonucleotide
aagaugaaaaccacauucu

SEQ ID NO: 2632555 - RNA, 19 nt, Artificial Sequence
  Description of Artificial Sequence: Synthetic oligonucleotide
ugcaaccucaguuuccaag

SEQ ID NO: 2632556 - RNA, 19 nt, Artificial Sequence
  Description of Artificial Sequence: Synthetic oligonucleotide
uuuuguaccuucucaccug

SEQ ID NO: 2632557 - RNA, 19 nt, Artificial Sequence
  Description of Artificial Sequence: Synthetic oligonucleotide
aaaagauagauugcaccga

SEQ ID NO: 2632558 - RNA, 19 nt, Artificial Sequence
  Description of Artificial Sequence: Synthetic oligonucleotide
uuuccaagagaccuuggaa

SEQ ID NO: 2632559 - RNA, 19 nt, Artificial Sequence
  Description of Artificial Sequence: Synthetic oligonucleotide
uuuguaccuucucaccugc

SEQ ID NO: 2632560 - RNA, 19 nt, Artificial Sequence
  Description of Artificial Sequence: Synthetic oligonucleotide
ucauuuugcaagccuuggc

SEQ ID NO: 2632561 - RNA, 19 nt, Artificial Sequence
  Description of Artificial Sequence: Synthetic oligonucleotide
  modified_base (7)..(7): a, c, u, g, unknown or other
aaagccngggguuccucug

SEQ ID NO: 2632562 - RNA, 19 nt, Artificial Sequence
  Description of Artificial Sequence: Synthetic oligonucleotide
gucugguuaaccugguggg

SEQ ID NO: 2632563 - RNA, 19 nt, Artificial Sequence
  Description of Artificial Sequence: Synthetic oligonucleotide
gaugucuaugaagaaggag

SEQ ID NO: 2632564 - RNA, 19 nt, Artificial Sequence
  Description of Artificial Sequence: Synthetic oligonucleotide
cuguaaaugggucaggaga

SEQ ID NO: 2632565 - RNA, 19 nt, Artificial Sequence
  Description of Artificial Sequence: Synthetic oligonucleotide
gagagagagagagggaggg

SEQ ID NO: 2632566 - RNA, 19 nt, Artificial Sequence
  Description of Artificial Sequence: Synthetic oligonucleotide
gaugaaaaccacauucuuc

SEQ ID NO: 2632567 - RNA, 19 nt, Artificial Sequence
  Description of Artificial Sequence: Synthetic oligonucleotide
ucucauugccagauggcgc

SEQ ID NO: 2632568 - RNA, 19 nt, Artificial Sequence
  Description of Artificial Sequence: Synthetic oligonucleotide
uuuuguccuguaaaugggu

SEQ ID NO: 2632569 - RNA, 19 nt, Artificial Sequence
  Description of Artificial Sequence: Synthetic oligonucleotide
ucuucacuuuggaacacug

SEQ ID NO: 2632570 - RNA, 19 nt, Artificial Sequence
  Description of Artificial Sequence: Synthetic oligonucleotide
agaacucacgggaucauac

SEQ ID NO: 2632571 - RNA, 19 nt, Artificial Sequence
  Description of Artificial Sequence: Synthetic oligonucleotide
uggaaaagauagauugcac

SEQ ID NO: 2632572 - RNA, 19 nt, Artificial Sequence
  Description of Artificial Sequence: Synthetic oligonucleotide
cugugucugguuaaccugg

SEQ ID NO: 2632573 - RNA, 19 nt, Artificial Sequence
  Description of Artificial Sequence: Synthetic oligonucleotide
  modified_base (2)..(2): a, c, u, g, unknown or other
gnuaauggcucagcugccg

SEQ ID NO: 2632574 - RNA, 19 nt, Artificial Sequence
  Description of Artificial Sequence: Synthetic oligonucleotide
acauucuucaaaggcuccc

SEQ ID NO: 2632575 - RNA, 19 nt, Artificial Sequence
  Description of Artificial Sequence: Synthetic oligonucleotide
  modified_base (7)..(7): a, c, u, g, unknown or other
aggaugnuaauggcucagc

SEQ ID NO: 2632576 - RNA, 19 nt, Artificial Sequence
  Description of Artificial Sequence: Synthetic oligonucleotide
ucguggaucacuucagaac

SEQ ID NO: 2632577 - RNA, 19 nt, Artificial Sequence
  Description of Artificial Sequence: Synthetic oligonucleotide
caaacgaccgcacauuguc

SEQ ID NO: 2632578 - RNA, 19 nt, Artificial Sequence
  Description of Artificial Sequence: Synthetic oligonucleotide
ucacuucagaacucacggg

SEQ ID NO: 2632579 - RNA, 19 nt, Artificial Sequence
  Description of Artificial Sequence: Synthetic oligonucleotide
gauacggaacacaggcucg

SEQ ID NO: 2632580 - RNA, 19 nt, Artificial Sequence
  Description of Artificial Sequence: Synthetic oligonucleotide
aaaggcucccgcuucugca

SEQ ID NO: 2632581 - RNA, 19 nt, Artificial Sequence
  Description of Artificial Sequence: Synthetic oligonucleotide
uggaucuugcccagcauga

SEQ ID NO: 2632582 - RNA, 19 nt, Artificial Sequence
  Description of Artificial Sequence: Synthetic oligonucleotide
uagauugcaccgauguccu

SEQ ID NO: 2632583 - RNA, 19 nt, Artificial Sequence
  Description of Artificial Sequence: Synthetic oligonucleotide
aucauacaguccaugcacc

SEQ ID NO: 2632584 - RNA, 19 nt, Artificial Sequence
  Description of Artificial Sequence: Synthetic oligonucleotide
uuuguccuguaaauggguc

SEQ ID NO: 2632585 - RNA, 19 nt, Artificial Sequence
  Description of Artificial Sequence: Synthetic oligonucleotide
uguccuguaaaugggucag

SEQ ID NO: 2632586 - RNA, 19 nt, Artificial Sequence
  Description of Artificial Sequence: Synthetic oligonucleotide
aauccugugucugguuaac

SEQ ID NO: 2632587 - RNA, 19 nt, Artificial Sequence
  Description of Artificial Sequence: Synthetic oligonucleotide
uuuugcaagccuuggcaac

SEQ ID NO: 2632588 - RNA, 19 nt, Artificial Sequence
  Description of Artificial Sequence: Synthetic oligonucleotide
uuugcaagccuuggcaacc

SEQ ID NO: 2632589 - RNA, 19 nt, Artificial Sequence
  Description of Artificial Sequence: Synthetic oligonucleotide
cauuuugcaagccuuggca

SEQ ID NO: 2632590 - RNA, 19 nt, Artificial Sequence
  Description of Artificial Sequence: Synthetic oligonucleotide
cgaacagucauuuugcaag

SEQ ID NO: 2632591 - RNA, 19 nt, Artificial Sequence
  Description of Artificial Sequence: Synthetic oligonucleotide
auccaguaaaguccugguc

SEQ ID NO: 2632592 - RNA, 19 nt, Artificial Sequence
  Description of Artificial Sequence: Synthetic oligonucleotide
  modified_base (3)..(3): a, c, u, g, unknown or other
ugnuaauggcucagcugcc

SEQ ID NO: 2632593 - RNA, 19 nt, Artificial Sequence
  Description of Artificial Sequence: Synthetic oligonucleotide
acucucguggaucacuuca

SEQ ID NO: 2632594 - RNA, 19 nt, Artificial Sequence
  Description of Artificial Sequence: Synthetic oligonucleotide
  modified_base (14)..(14): a, c, u, g, unknown or other
agagcucaggaugnuaaug

SEQ ID NO: 2632595 - RNA, 19 nt, Artificial Sequence
  Description of Artificial Sequence: Synthetic oligonucleotide
cucucauugccagauggcg

SEQ ID NO: 2632596 - RNA, 19 nt, Artificial Sequence
  Description of Artificial Sequence: Synthetic oligonucleotide
gauguccuuucuucuuggg

SEQ ID NO: 2632597 - RNA, 19 nt, Artificial Sequence
  Description of Artificial Sequence: Synthetic oligonucleotide
acagucauuuugcaagccu

SEQ ID NO: 2632598 - RNA, 19 nt, Artificial Sequence
  Description of Artificial Sequence: Synthetic oligonucleotide
aacgaccgcacauugucau

SEQ ID NO: 2632599 - RNA, 19 nt, Artificial Sequence
  Description of Artificial Sequence: Synthetic oligonucleotide
uccuggguuucagauacgg

SEQ ID NO: 2632600 - RNA, 19 nt, Artificial Sequence
  Description of Artificial Sequence: Synthetic oligonucleotide
uccugugucugguuaaccu

SEQ ID NO: 2632601 - RNA, 19 nt, Artificial Sequence
  Description of Artificial Sequence: Synthetic oligonucleotide
gaaaaccacauucuucaaa

SEQ ID NO: 2632602 - RNA, 19 nt, Artificial Sequence
  Description of Artificial Sequence: Synthetic oligonucleotide
uaauggcucagcugccggg

SEQ ID NO: 2632603 - RNA, 19 nt, Artificial Sequence
  Description of Artificial Sequence: Synthetic oligonucleotide
auugcaccgauguccuuuc

SEQ ID NO: 2632604 - RNA, 19 nt, Artificial Sequence
  Description of Artificial Sequence: Synthetic oligonucleotide
gaucuugcccagcaugaug

SEQ ID NO: 2632605 - RNA, 19 nt, Artificial Sequence
  Description of Artificial Sequence: Synthetic oligonucleotide
aaccucaguuuccaagaga

SEQ ID NO: 2632606 - RNA, 19 nt, Artificial Sequence
  Description of Artificial Sequence: Synthetic oligonucleotide
ugccagauggcgcuuuuca

SEQ ID NO: 2632607 - RNA, 19 nt, Artificial Sequence
  Description of Artificial Sequence: Synthetic oligonucleotide
agcauugggaucccgggcu

SEQ ID NO: 2632608 - RNA, 19 nt, Artificial Sequence
  Description of Artificial Sequence: Synthetic oligonucleotide
auuuugcaagccuuggcaa

SEQ ID NO: 2632609 - RNA, 19 nt, Artificial Sequence
  Description of Artificial Sequence: Synthetic oligonucleotide
auuuccgcccagcaaacga

SEQ ID NO: 2632610 - RNA, 19 nt, Artificial Sequence
  Description of Artificial Sequence: Synthetic oligonucleotide
  modified_base (9)..(9): a, c, u, g, unknown or other
ucaggaugnuaauggcuca

SEQ ID NO: 2632611 - RNA, 19 nt, Artificial Sequence
  Description of Artificial Sequence: Synthetic oligonucleotide
ucacuuuggaacacugcuc

SEQ ID NO: 2632612 - RNA, 19 nt, Artificial Sequence
  Description of Artificial Sequence: Synthetic oligonucleotide
guuccucugaucuucuuca

SEQ ID NO: 2632613 - RNA, 19 nt, Artificial Sequence
  Description of Artificial Sequence: Synthetic oligonucleotide
aagccuuggcaaccugagg

SEQ ID NO: 2632614 - RNA, 19 nt, Artificial Sequence
  Description of Artificial Sequence: Synthetic oligonucleotide
cucacgggaucauacaguc

SEQ ID NO: 2632615 - RNA, 19 nt, Artificial Sequence
  Description of Artificial Sequence: Synthetic oligonucleotide
cuucacuuuggaacacugc

SEQ ID NO: 2632616 - RNA, 19 nt, Artificial Sequence
  Description of Artificial Sequence: Synthetic oligonucleotide
aaggagcccaggccuuggc

SEQ ID NO: 2632617 - RNA, 19 nt, Artificial Sequence
  Description of Artificial Sequence: Synthetic oligonucleotide
ucuucaaaggcucccgcuu

SEQ ID NO: 2632618 - RNA, 19 nt, Artificial Sequence
  Description of Artificial Sequence: Synthetic oligonucleotide
cacgggaucauacagucca

SEQ ID NO: 2632619 - RNA, 19 nt, Artificial Sequence
  Description of Artificial Sequence: Synthetic oligonucleotide
ucugcaaccucaguuucca

SEQ ID NO: 2632620 - RNA, 19 nt, Artificial Sequence
  Description of Artificial Sequence: Synthetic oligonucleotide
uuuggaacacugcucccuc

SEQ ID NO: 2632621 - RNA, 19 nt, Artificial Sequence
  Description of Artificial Sequence: Synthetic oligonucleotide
uucugccaagaugaaaacc

SEQ ID NO: 2632622 - RNA, 19 nt, Artificial Sequence
  Description of Artificial Sequence: Synthetic oligonucleotide
ggugaugucuaugaagaag

SEQ ID NO: 2632623 - RNA, 19 nt, Artificial Sequence
  Description of Artificial Sequence: Synthetic oligonucleotide
ggcucgaacagucauuuug

SEQ ID NO: 2632624 - RNA, 19 nt, Artificial Sequence
  Description of Artificial Sequence: Synthetic oligonucleotide
agcaaacgaccgcacauug

SEQ ID NO: 2632625 - RNA, 19 nt, Artificial Sequence
  Description of Artificial Sequence: Synthetic oligonucleotide
gauagauugcaccgauguc

SEQ ID NO: 2632626 - RNA, 19 nt, Artificial Sequence
  Description of Artificial Sequence: Synthetic oligonucleotide
uuuccgcccagcaaacgac

SEQ ID NO: 2632627 - RNA, 19 nt, Artificial Sequence
  Description of Artificial Sequence: Synthetic oligonucleotide
aucccgggcucuuucugcc

SEQ ID NO: 2632628 - RNA, 19 nt, Artificial Sequence
  Description of Artificial Sequence: Synthetic oligonucleotide
acggaacacaggcucgaac

SEQ ID NO: 2632629 - RNA, 19 nt, Artificial Sequence
  Description of Artificial Sequence: Synthetic oligonucleotide
guaccuucucaccugcuug

SEQ ID NO: 2632630 - RNA, 19 nt, Artificial Sequence
  Description of Artificial Sequence: Synthetic oligonucleotide
cauucuucaaaggcucccg

SEQ ID NO: 2632631 - RNA, 19 nt, Artificial Sequence
  Description of Artificial Sequence: Synthetic oligonucleotide
guaaaguccuggucugaag

SEQ ID NO: 2632632 - RNA, 19 nt, Artificial Sequence
  Description of Artificial Sequence: Synthetic oligonucleotide
caagccuuggcaaccugag

SEQ ID NO: 2632633 - RNA, 19 nt, Artificial Sequence
  Description of Artificial Sequence: Synthetic oligonucleotide
accacauucuucaaaggcu

SEQ ID NO: 2632634 - RNA, 19 nt, Artificial Sequence
  Description of Artificial Sequence: Synthetic oligonucleotide
ucgaacagucauuuugcaa

SEQ ID NO: 2632635 - RNA, 19 nt, Artificial Sequence
  Description of Artificial Sequence: Synthetic oligonucleotide
ucauucucaucauccagua

SEQ ID NO: 2632636 - RNA, 19 nt, Artificial Sequence
  Description of Artificial Sequence: Synthetic oligonucleotide
agggcuuuuguccuguaaa

SEQ ID NO: 2632637 - RNA, 19 nt, Artificial Sequence
  Description of Artificial Sequence: Synthetic oligonucleotide
uuucugccaagaugaaaac

SEQ ID NO: 2632638 - RNA, 19 nt, Artificial Sequence
  Description of Artificial Sequence: Synthetic oligonucleotide
ugucgaggggcuucacggg

SEQ ID NO: 2632639 - RNA, 19 nt, Artificial Sequence
  Description of Artificial Sequence: Synthetic oligonucleotide
cuugucgaggggcuucacg

SEQ ID NO: 2632640 - RNA, 19 nt, Artificial Sequence
  Description of Artificial Sequence: Synthetic oligonucleotide
cacuucagaacucacggga

SEQ ID NO: 2632641 - RNA, 19 nt, Artificial Sequence
  Description of Artificial Sequence: Synthetic oligonucleotide
uccgcccagcaaacgaccg

SEQ ID NO: 2632642 - RNA, 19 nt, Artificial Sequence
  Description of Artificial Sequence: Synthetic oligonucleotide
uccuguaaaugggucagga

SEQ ID NO: 2632643 - RNA, 19 nt, Artificial Sequence
  Description of Artificial Sequence: Synthetic oligonucleotide
ugguuaaccugguggguga

SEQ ID NO: 2632644 - RNA, 19 nt, Artificial Sequence
  Description of Artificial Sequence: Synthetic oligonucleotide
uguaccuucucaccugcuu

SEQ ID NO: 2632645 - RNA, 19 nt, Artificial Sequence
  Description of Artificial Sequence: Synthetic oligonucleotide
uggcccuggaucuugccca

SEQ ID NO: 2632646 - RNA, 19 nt, Artificial Sequence
  Description of Artificial Sequence: Synthetic oligonucleotide
guuuccaagagaccuugga

SEQ ID NO: 2632647 - RNA, 19 nt, Artificial Sequence
  Description of Artificial Sequence: Synthetic oligonucleotide
gggaucauacaguccaugc

SEQ ID NO: 2632648 - RNA, 19 nt, Artificial Sequence
  Description of Artificial Sequence: Synthetic oligonucleotide
ucucguggaucacuucaga

SEQ ID NO: 2632649 - RNA, 19 nt, Artificial Sequence
  Description of Artificial Sequence: Synthetic oligonucleotide
agaauccugugucugguua

SEQ ID NO: 2632650 - RNA, 19 nt, Artificial Sequence
  Description of Artificial Sequence: Synthetic oligonucleotide
ugcaccaggaggucaagua

SEQ ID NO: 2632651 - RNA, 19 nt, Artificial Sequence
  Description of Artificial Sequence: Synthetic oligonucleotide
gaucccgggcucuuucugc

SEQ ID NO: 2632652 - RNA, 19 nt, Artificial Sequence
  Description of Artificial Sequence: Synthetic oligonucleotide
agagagagagagagggagg

SEQ ID NO: 2632653 - RNA, 19 nt, Artificial Sequence
  Description of Artificial Sequence: Synthetic oligonucleotide
caaccugagggcuuuuguc

SEQ ID NO: 2632654 - RNA, 19 nt, Artificial Sequence
  Description of Artificial Sequence: Synthetic oligonucleotide
aggaggucaaguaaaacuu

SEQ ID NO: 2632655 - RNA, 19 nt, Artificial Sequence
  Description of Artificial Sequence: Synthetic oligonucleotide
ucaguuuccaagagaccuu

SEQ ID NO: 2632656 - RNA, 19 nt, Artificial Sequence
  Description of Artificial Sequence: Synthetic oligonucleotide
gauggucagggucuucaca

SEQ ID NO: 2632657 - RNA, 19 nt, Artificial Sequence
  Description of Artificial Sequence: Synthetic oligonucleotide
aaguccuggucugaagggu

SEQ ID NO: 2632658 - RNA, 19 nt, Artificial Sequence
  Description of Artificial Sequence: Synthetic oligonucleotide
ggcucuuucugccaagaug

SEQ ID NO: 2632659 - RNA, 19 nt, Artificial Sequence
  Description of Artificial Sequence: Synthetic oligonucleotide
uaccuucucaccugcuugu

SEQ ID NO: 2632660 - RNA, 19 nt, Artificial Sequence
  Description of Artificial Sequence: Synthetic oligonucleotide
gcucuuucugccaagauga

SEQ ID NO: 2632661 - RNA, 19 nt, Artificial Sequence
  Description of Artificial Sequence: Synthetic oligonucleotide
gccucucauugccagaugg

SEQ ID NO: 2632662 - RNA, 19 nt, Artificial Sequence
  Description of Artificial Sequence: Synthetic oligonucleotide
cucucguggaucacuucag

SEQ ID NO: 2632663 - RNA, 19 nt, Artificial Sequence
  Description of Artificial Sequence: Synthetic oligonucleotide
cuucucaccugcuugucga

SEQ ID NO: 2632664 - RNA, 19 nt, Artificial Sequence
  Description of Artificial Sequence: Synthetic oligonucleotide
aagauagauugcaccgaug

SEQ ID NO: 2632665 - RNA, 19 nt, Artificial Sequence
  Description of Artificial Sequence: Synthetic oligonucleotide
aggagagaauccugugucu

SEQ ID NO: 2632666 - RNA, 19 nt, Artificial Sequence
  Description of Artificial Sequence: Synthetic oligonucleotide
gaacucacgggaucauaca

SEQ ID NO: 2632667 - RNA, 19 nt, Artificial Sequence
  Description of Artificial Sequence: Synthetic oligonucleotide
caggccuuggcccuggauc

SEQ ID NO: 2632668 - RNA, 19 nt, Artificial Sequence
  Description of Artificial Sequence: Synthetic oligonucleotide
uuccgcccagcaaacgacc

SEQ ID NO: 2632669 - RNA, 19 nt, Artificial Sequence
  Description of Artificial Sequence: Synthetic oligonucleotide
cugccaagaugaaaaccac

SEQ ID NO: 2632670 - RNA, 19 nt, Artificial Sequence
  Description of Artificial Sequence: Synthetic oligonucleotide
ugggucaggagagaauccu

SEQ ID NO: 2632671 - RNA, 19 nt, Artificial Sequence
  Description of Artificial Sequence: Synthetic oligonucleotide
gugcccaggccucucauug

SEQ ID NO: 2632672 - RNA, 19 nt, Artificial Sequence
  Description of Artificial Sequence: Synthetic oligonucleotide
cuucagaacucacgggauc

SEQ ID NO: 2632673 - RNA, 19 nt, Artificial Sequence
  Description of Artificial Sequence: Synthetic oligonucleotide
guuucagauacggaacaca

SEQ ID NO: 2632674 - RNA, 19 nt, Artificial Sequence
  Description of Artificial Sequence: Synthetic oligonucleotide
uuccauuuccgcccagcaa

SEQ ID NO: 2632675 - RNA, 19 nt, Artificial Sequence
  Description of Artificial Sequence: Synthetic oligonucleotide
ucacgggaucauacagucc

SEQ ID NO: 2632676 - RNA, 19 nt, Artificial Sequence
  Description of Artificial Sequence: Synthetic oligonucleotide
augggucaggagagaaucc

SEQ ID NO: 2632677 - RNA, 19 nt, Artificial Sequence
  Description of Artificial Sequence: Synthetic oligonucleotide
agucauuuugcaagccuug

SEQ ID NO: 2632678 - RNA, 19 nt, Artificial Sequence
  Description of Artificial Sequence: Synthetic oligonucleotide
agagagagagagagagagg

SEQ ID NO: 2632679 - RNA, 19 nt, Artificial Sequence
  Description of Artificial Sequence: Synthetic oligonucleotide
ggaacacaggcucgaacag

SEQ ID NO: 2632680 - RNA, 19 nt, Artificial Sequence
  Description of Artificial Sequence: Synthetic oligonucleotide
aggccuuggcccuggaucu

SEQ ID NO: 2632681 - RNA, 19 nt, Artificial Sequence
  Description of Artificial Sequence: Synthetic oligonucleotide
ugugucugguuaaccuggu

SEQ ID NO: 2632682 - RNA, 19 nt, Artificial Sequence
  Description of Artificial Sequence: Synthetic oligonucleotide
  modified_base (6)..(6): a, c, u, g, unknown or other
aagccngggguuccucuga

SEQ ID NO: 2632683 - RNA, 19 nt, Artificial Sequence
  Description of Artificial Sequence: Synthetic oligonucleotide
ccagauggcgcuuuucagc

SEQ ID NO: 2632684 - RNA, 19 nt, Artificial Sequence
  Description of Artificial Sequence: Synthetic oligonucleotide
aaggcucccgcuucugcaa

SEQ ID NO: 2632685 - RNA, 19 nt, Artificial Sequence
  Description of Artificial Sequence: Synthetic oligonucleotide
cugguuaaccuggugggug

SEQ ID NO: 2632686 - RNA, 19 nt, Artificial Sequence
  Description of Artificial Sequence: Synthetic oligonucleotide
ggcgcuuuucagcauuggg

SEQ ID NO: 2632687 - RNA, 19 nt, Artificial Sequence
  Description of Artificial Sequence: Synthetic oligonucleotide
auccugugucugguuaacc

SEQ ID NO: 2632688 - RNA, 19 nt, Artificial Sequence
  Description of Artificial Sequence: Synthetic oligonucleotide
cuucugcaaccucaguuuc

SEQ ID NO: 2632689 - RNA, 19 nt, Artificial Sequence
  Description of Artificial Sequence: Synthetic oligonucleotide
ucgaggggcuucacgggcc

SEQ ID NO: 2632690 - RNA, 19 nt, Artificial Sequence
  Description of Artificial Sequence: Synthetic oligonucleotide
gaauccugugucugguuaa

SEQ ID NO: 2632691 - RNA, 19 nt, Artificial Sequence
  Description of Artificial Sequence: Synthetic oligonucleotide
agagaauccugugucuggu

SEQ ID NO: 2632692 - RNA, 19 nt, Artificial Sequence
  Description of Artificial Sequence: Synthetic oligonucleotide
caagagaccuuggaaaaga

SEQ ID NO: 2632693 - RNA, 19 nt, Artificial Sequence
  Description of Artificial Sequence: Synthetic oligonucleotide
accugagggcuuuuguccu

SEQ ID NO: 2632694 - RNA, 19 nt, Artificial Sequence
  Description of Artificial Sequence: Synthetic oligonucleotide
uuggaacacugcucccucc

SEQ ID NO: 2632695 - RNA, 19 nt, Artificial Sequence
  Description of Artificial Sequence: Synthetic oligonucleotide
caaccucaguuuccaagag

SEQ ID NO: 2632696 - RNA, 19 nt, Artificial Sequence
  Description of Artificial Sequence: Synthetic oligonucleotide
ucucaucauccaguaaagu

SEQ ID NO: 2632697 - RNA, 19 nt, Artificial Sequence
  Description of Artificial Sequence: Synthetic oligonucleotide
uucucaccugcuugucgag

SEQ ID NO: 2632698 - RNA, 19 nt, Artificial Sequence
  Description of Artificial Sequence: Synthetic oligonucleotide
ccuccuggguuucagauac

SEQ ID NO: 2632699 - RNA, 19 nt, Artificial Sequence
  Description of Artificial Sequence: Synthetic oligonucleotide
caaaggcucccgcuucugc

SEQ ID NO: 2632700 - RNA, 19 nt, Artificial Sequence
  Description of Artificial Sequence: Synthetic oligonucleotide
aaacgaccgcacauuguca

SEQ ID NO: 2632701 - RNA, 19 nt, Artificial Sequence
  Description of Artificial Sequence: Synthetic oligonucleotide
ggaucauacaguccaugca

SEQ ID NO: 2632702 - RNA, 19 nt, Artificial Sequence
  Description of Artificial Sequence: Synthetic oligonucleotide
aguaaaguccuggucugaa

SEQ ID NO: 2632703 - RNA, 19 nt, Artificial Sequence
  Description of Artificial Sequence: Synthetic oligonucleotide
gcaaccucaguuuccaaga

SEQ ID NO: 2632704 - RNA, 19 nt, Artificial Sequence
  Description of Artificial Sequence: Synthetic oligonucleotide
ucugguuaaccuggugggu

SEQ ID NO: 2632705 - RNA, 19 nt, Artificial Sequence
  Description of Artificial Sequence: Synthetic oligonucleotide
ggcuucacgggccaaggug

SEQ ID NO: 2632706 - RNA, 19 nt, Artificial Sequence
  Description of Artificial Sequence: Synthetic oligonucleotide
ucccuccuggguuucagau

SEQ ID NO: 2632707 - RNA, 19 nt, Artificial Sequence
  Description of Artificial Sequence: Synthetic oligonucleotide
cuucacgggccaaggugcc

SEQ ID NO: 2632708 - RNA, 19 nt, Artificial Sequence
  Description of Artificial Sequence: Synthetic oligonucleotide
  modified_base (19)..(19): a, c, u, g, unknown or other
gagggagagcucaggaugn

SEQ ID NO: 2632709 - RNA, 19 nt, Artificial Sequence
  Description of Artificial Sequence: Synthetic oligonucleotide
ugcaccgauguccuuucuu

SEQ ID NO: 2632710 - RNA, 19 nt, Artificial Sequence
  Description of Artificial Sequence: Synthetic oligonucleotide
aagagaccuuggaaaagau

SEQ ID NO: 2632711 - RNA, 19 nt, Artificial Sequence
  Description of Artificial Sequence: Synthetic oligonucleotide
cagcauugggaucccgggc

SEQ ID NO: 2632712 - RNA, 19 nt, Artificial Sequence
  Description of Artificial Sequence: Synthetic oligonucleotide
gcucgaacagucauuuugc

SEQ ID NO: 2632713 - RNA, 19 nt, Artificial Sequence
  Description of Artificial Sequence: Synthetic oligonucleotide
  modified_base (8)..(8): a, c, u, g, unknown or other
caggaugnuaauggcucag

SEQ ID NO: 2632714 - RNA, 19 nt, Artificial Sequence
  Description of Artificial Sequence: Synthetic oligonucleotide
uuuucagcauugggauccc

SEQ ID NO: 2632715 - RNA, 19 nt, Artificial Sequence
  Description of Artificial Sequence: Synthetic oligonucleotide
gucuaugaagaaggagccc

SEQ ID NO: 2632716 - RNA, 19 nt, Artificial Sequence
  Description of Artificial Sequence: Synthetic oligonucleotide
aaggugcccaggccucuca

SEQ ID NO: 2632717 - RNA, 19 nt, Artificial Sequence
  Description of Artificial Sequence: Synthetic oligonucleotide
gaccuuggaaaagauagau

SEQ ID NO: 2632718 - RNA, 19 nt, Artificial Sequence
  Description of Artificial Sequence: Synthetic oligonucleotide
uuccucugaucuucuucac

SEQ ID NO: 2632719 - RNA, 19 nt, Artificial Sequence
  Description of Artificial Sequence: Synthetic oligonucleotide
aggcucccgcuucugcaac

SEQ ID NO: 2632720 - RNA, 19 nt, Artificial Sequence
  Description of Artificial Sequence: Synthetic oligonucleotide
ucacgggccaaggugccca

SEQ ID NO: 2632721 - RNA, 19 nt, Artificial Sequence
  Description of Artificial Sequence: Synthetic oligonucleotide
acucacgggaucauacagu

SEQ ID NO: 2632722 - RNA, 19 nt, Artificial Sequence
  Description of Artificial Sequence: Synthetic oligonucleotide
ugcaagccuuggcaaccug

SEQ ID NO: 2632723 - RNA, 19 nt, Artificial Sequence
  Description of Artificial Sequence: Synthetic oligonucleotide
cucauugccagauggcgcu

SEQ ID NO: 2632724 - RNA, 19 nt, Artificial Sequence
  Description of Artificial Sequence: Synthetic oligonucleotide
accgauguccuuucuucuu

SEQ ID NO: 2632725 - RNA, 19 nt, Artificial Sequence
  Description of Artificial Sequence: Synthetic oligonucleotide
ccuguaaaugggucaggag

SEQ ID NO: 2632726 - RNA, 19 nt, Artificial Sequence
  Description of Artificial Sequence: Synthetic oligonucleotide
cucgaacagucauuuugca

SEQ ID NO: 2632727 - RNA, 19 nt, Artificial Sequence
  Description of Artificial Sequence: Synthetic oligonucleotide
cuuccauuuccgcccagca

SEQ ID NO: 2632728 - RNA, 19 nt, Artificial Sequence
  Description of Artificial Sequence: Synthetic oligonucleotide
cucguggaucacuucagaa

SEQ ID NO: 2632729 - RNA, 19 nt, Artificial Sequence
  Description of Artificial Sequence: Synthetic oligonucleotide
gcuucacgggccaaggugc

SEQ ID NO: 2632730 - RNA, 19 nt, Artificial Sequence
  Description of Artificial Sequence: Synthetic oligonucleotide
cauuuccgcccagcaaacg

SEQ ID NO: 2632731 - RNA, 19 nt, Artificial Sequence
  Description of Artificial Sequence: Synthetic oligonucleotide
ggcuuuuguccuguaaaug

SEQ ID NO: 2632732 - RNA, 19 nt, Artificial Sequence
  Description of Artificial Sequence: Synthetic oligonucleotide
uuguaccuucucaccugcu

SEQ ID NO: 2632733 - RNA, 19 nt, Artificial Sequence
  Description of Artificial Sequence: Synthetic oligonucleotide
agaccuuggaaaagauaga

SEQ ID NO: 2632734 - RNA, 19 nt, Artificial Sequence
  Description of Artificial Sequence: Synthetic oligonucleotide
ugggaucccgggcucuuuc

SEQ ID NO: 2632735 - RNA, 19 nt, Artificial Sequence
  Description of Artificial Sequence: Synthetic oligonucleotide
auacggaacacaggcucga

SEQ ID NO: 2632736 - RNA, 19 nt, Artificial Sequence
  Description of Artificial Sequence: Synthetic oligonucleotide
caccaggaggucaaguaaa

SEQ ID NO: 2632737 - RNA, 19 nt, Artificial Sequence
  Description of Artificial Sequence: Synthetic oligonucleotide
acugcucccuccuggguuu

SEQ ID NO: 2632738 - RNA, 19 nt, Artificial Sequence
  Description of Artificial Sequence: Synthetic oligonucleotide
gcaccgauguccuuucuuc

SEQ ID NO: 2632739 - RNA, 19 nt, Artificial Sequence
  Description of Artificial Sequence: Synthetic oligonucleotide
  modified_base (8)..(8): a, c, u, g, unknown or other
gaaagccngggguuccucu

SEQ ID NO: 2632740 - RNA, 19 nt, Artificial Sequence
  Description of Artificial Sequence: Synthetic oligonucleotide
uggcgcuuuucagcauugg

SEQ ID NO: 2632741 - RNA, 19 nt, Artificial Sequence
  Description of Artificial Sequence: Synthetic oligonucleotide
uggucugaagggugauguc

SEQ ID NO: 2632742 - RNA, 19 nt, Artificial Sequence
  Description of Artificial Sequence: Synthetic oligonucleotide
agagagagagagagagaga

SEQ ID NO: 2632743 - RNA, 19 nt, Artificial Sequence
  Description of Artificial Sequence: Synthetic oligonucleotide
gccagauggcgcuuuucag

SEQ ID NO: 2632744 - RNA, 19 nt, Artificial Sequence
  Description of Artificial Sequence: Synthetic oligonucleotide
guaaaugggucaggagaga

SEQ ID NO: 2632745 - RNA, 19 nt, Artificial Sequence
  Description of Artificial Sequence: Synthetic oligonucleotide
gugucugguuaaccuggug

SEQ ID NO: 2632746 - RNA, 19 nt, Artificial Sequence
  Description of Artificial Sequence: Synthetic oligonucleotide
agagagagagagagaggga

SEQ ID NO: 2632747 - RNA, 19 nt, Artificial Sequence
  Description of Artificial Sequence: Synthetic oligonucleotide
  modified_base (6)..(6): a, c, u, g, unknown or other
ggaugnuaauggcucagcu

SEQ ID NO: 2632748 - RNA, 19 nt, Artificial Sequence
  Description of Artificial Sequence: Synthetic oligonucleotide
ccucucauugccagauggc

SEQ ID NO: 2632749 - RNA, 19 nt, Artificial Sequence
  Description of Artificial Sequence: Synthetic oligonucleotide
accuucucaccugcuuguc

SEQ ID NO: 2632750 - RNA, 19 nt, Artificial Sequence
  Description of Artificial Sequence: Synthetic oligonucleotide
guccuguaaaugggucagg

SEQ ID NO: 2632751 - RNA, 19 nt, Artificial Sequence
  Description of Artificial Sequence: Synthetic oligonucleotide
gauggcgcuuuucagcauu

SEQ ID NO: 2632752 - RNA, 19 nt, Artificial Sequence
  Description of Artificial Sequence: Synthetic oligonucleotide
uugcaagccuuggcaaccu

SEQ ID NO: 2632753 - RNA, 19 nt, Artificial Sequence
  Description of Artificial Sequence: Synthetic oligonucleotide
ugcuugucgaggggcuuca

SEQ ID NO: 2632754 - RNA, 19 nt, Artificial Sequence
  Description of Artificial Sequence: Synthetic oligonucleotide
agagaccuuggaaaagaua

SEQ ID NO: 2632755 - RNA, 19 nt, Artificial Sequence
  Description of Artificial Sequence: Synthetic oligonucleotide
aagaaggagcccaggccuu

SEQ ID NO: 2632756 - RNA, 19 nt, Artificial Sequence
  Description of Artificial Sequence: Synthetic oligonucleotide
gggucuucacacucucgug

SEQ ID NO: 2632757 - RNA, 19 nt, Artificial Sequence
  Description of Artificial Sequence: Synthetic oligonucleotide
agagagagagagggaggga

SEQ ID NO: 2632758 - RNA, 19 nt, Artificial Sequence
  Description of Artificial Sequence: Synthetic oligonucleotide
gguuucagauacggaacac

SEQ ID NO: 2632759 - RNA, 19 nt, Artificial Sequence
  Description of Artificial Sequence: Synthetic oligonucleotide
gcgcuuuucagcauuggga

SEQ ID NO: 2632760 - RNA, 19 nt, Artificial Sequence
  Description of Artificial Sequence: Synthetic oligonucleotide
accuuggaaaagauagauu

SEQ ID NO: 2632761 - RNA, 19 nt, Artificial Sequence
  Description of Artificial Sequence: Synthetic oligonucleotide
cauccaguaaaguccuggu

SEQ ID NO: 2632762 - RNA, 19 nt, Artificial Sequence
  Description of Artificial Sequence: Synthetic oligonucleotide
cuccuggguuucagauacg

SEQ ID NO: 2632763 - RNA, 19 nt, Artificial Sequence
  Description of Artificial Sequence: Synthetic oligonucleotide
uucacgggccaaggugccc

SEQ ID NO: 2632764 - RNA, 19 nt, Artificial Sequence
  Description of Artificial Sequence: Synthetic oligonucleotide
gaggucaaguaaaacuuuu

SEQ ID NO: 2632765 - RNA, 19 nt, Artificial Sequence
  Description of Artificial Sequence: Synthetic oligonucleotide
cuuuggaacacugcucccu

SEQ ID NO: 2632766 - RNA, 19 nt, Artificial Sequence
  Description of Artificial Sequence: Synthetic oligonucleotide
ccgauguccuuucuucuug

SEQ ID NO: 2632767 - RNA, 19 nt, Artificial Sequence
  Description of Artificial Sequence: Synthetic oligonucleotide
gaacacaggcucgaacagu

SEQ ID NO: 2632768 - RNA, 19 nt, Artificial Sequence
  Description of Artificial Sequence: Synthetic oligonucleotide
ccaagagaccuuggaaaag

SEQ ID NO: 2632769 - RNA, 19 nt, Artificial Sequence
  Description of Artificial Sequence: Synthetic oligonucleotide
cuucuugggcugggaagug

SEQ ID NO: 2632770 - RNA, 19 nt, Artificial Sequence
  Description of Artificial Sequence: Synthetic oligonucleotide
cggaacacaggcucgaaca

SEQ ID NO: 2632771 - RNA, 19 nt, Artificial Sequence
  Description of Artificial Sequence: Synthetic oligonucleotide
gucugaagggugaugucua

SEQ ID NO: 2632772 - RNA, 19 nt, Artificial Sequence
  Description of Artificial Sequence: Synthetic oligonucleotide
cgauguccuuucuucuugg

SEQ ID NO: 2632773 - RNA, 19 nt, Artificial Sequence
  Description of Artificial Sequence: Synthetic oligonucleotide
cagucauuuugcaagccuu

SEQ ID NO: 2632774 - RNA, 19 nt, Artificial Sequence
  Description of Artificial Sequence: Synthetic oligonucleotide
uugcaccgauguccuuucu

SEQ ID NO: 2632775 - RNA, 19 nt, Artificial Sequence
  Description of Artificial Sequence: Synthetic oligonucleotide
cauucucaucauccaguaa

SEQ ID NO: 2632776 - RNA, 19 nt, Artificial Sequence
  Description of Artificial Sequence: Synthetic oligonucleotide
auggcgcuuuucagcauug

SEQ ID NO: 2632777 - RNA, 19 nt, Artificial Sequence
  Description of Artificial Sequence: Synthetic oligonucleotide
ggaucccgggcucuuucug

SEQ ID NO: 2632778 - RNA, 19 nt, Artificial Sequence
  Description of Artificial Sequence: Synthetic oligonucleotide
gccaagaugaaaaccacau

SEQ ID NO: 2632779 - RNA, 19 nt, Artificial Sequence
  Description of Artificial Sequence: Synthetic oligonucleotide
agauggcgcuuuucagcau

SEQ ID NO: 2632780 - RNA, 19 nt, Artificial Sequence
  Description of Artificial Sequence: Synthetic oligonucleotide
cacucucguggaucacuuc

SEQ ID NO: 2632781 - RNA, 19 nt, Artificial Sequence
  Description of Artificial Sequence: Synthetic oligonucleotide
gcccaggccucucauugcc

SEQ ID NO: 2632782 - RNA, 19 nt, Artificial Sequence
  Description of Artificial Sequence: Synthetic oligonucleotide
  modified_base (15)..(15): a, c, u, g, unknown or other
gagagcucaggaugnuaau

SEQ ID NO: 2632783 - RNA, 19 nt, Artificial Sequence
  Description of Artificial Sequence: Synthetic oligonucleotide
uacggaacacaggcucgaa

SEQ ID NO: 2632784 - RNA, 19 nt, Artificial Sequence
  Description of Artificial Sequence: Synthetic oligonucleotide
  modified_base (5)..(5): a, c, u, g, unknown or other
agccngggguuccucugau

SEQ ID NO: 2632785 - RNA, 19 nt, Artificial Sequence
  Description of Artificial Sequence: Synthetic oligonucleotide
ggucugaagggugaugucu

SEQ ID NO: 2632786 - RNA, 19 nt, Artificial Sequence
  Description of Artificial Sequence: Synthetic oligonucleotide
ucccgggcucuuucugcca

SEQ ID NO: 2632787 - RNA, 19 nt, Artificial Sequence
  Description of Artificial Sequence: Synthetic oligonucleotide
cucagcugccggggaaagc

SEQ ID NO: 2632788 - RNA, 19 nt, Artificial Sequence
  Description of Artificial Sequence: Synthetic oligonucleotide
caugcaccaggaggucaag

SEQ ID NO: 2632789 - RNA, 19 nt, Artificial Sequence
  Description of Artificial Sequence: Synthetic oligonucleotide
ccauuuccgcccagcaaac

SEQ ID NO: 2632790 - RNA, 19 nt, Artificial Sequence
  Description of Artificial Sequence: Synthetic oligonucleotide
gcuucugcaaccucaguuu

SEQ ID NO: 2632791 - RNA, 19 nt, Artificial Sequence
  Description of Artificial Sequence: Synthetic oligonucleotide
cagauacggaacacaggcu

SEQ ID NO: 2632792 - RNA, 19 nt, Artificial Sequence
  Description of Artificial Sequence: Synthetic oligonucleotide
cugcuugucgaggggcuuc

SEQ ID NO: 2632793 - RNA, 19 nt, Artificial Sequence
  Description of Artificial Sequence: Synthetic oligonucleotide
gggucaggagagaauccug

SEQ ID NO: 2632794 - RNA, 19 nt, Artificial Sequence
  Description of Artificial Sequence: Synthetic oligonucleotide
acgaccgcacauugucauu

SEQ ID NO: 2632795 - RNA, 19 nt, Artificial Sequence
  Description of Artificial Sequence: Synthetic oligonucleotide
acaggcucgaacagucauu

SEQ ID NO: 2632796 - RNA, 19 nt, Artificial Sequence
  Description of Artificial Sequence: Synthetic oligonucleotide
acacucucguggaucacuu

SEQ ID NO: 2632797 - RNA, 19 nt, Artificial Sequence
  Description of Artificial Sequence: Synthetic oligonucleotide
uugccagauggcgcuuuuc

SEQ ID NO: 2632798 - RNA, 19 nt, Artificial Sequence
  Description of Artificial Sequence: Synthetic oligonucleotide
cuuucuucuugggcuggga

SEQ ID NO: 2632799 - RNA, 19 nt, Artificial Sequence
  Description of Artificial Sequence: Synthetic oligonucleotide
cguggaucacuucagaacu

SEQ ID NO: 2632800 - RNA, 19 nt, Artificial Sequence
  Description of Artificial Sequence: Synthetic oligonucleotide
cccgcuucugcaaccucag

SEQ ID NO: 2632801 - RNA, 19 nt, Artificial Sequence
  Description of Artificial Sequence: Synthetic oligonucleotide
  modified_base (11)..(11): a, c, u, g, unknown or other
ggggaaagccngggguucc

SEQ ID NO: 2632802 - RNA, 19 nt, Artificial Sequence
  Description of Artificial Sequence: Synthetic oligonucleotide
uccuggucugaagggugau

SEQ ID NO: 2632803 - RNA, 19 nt, Artificial Sequence
  Description of Artificial Sequence: Synthetic oligonucleotide
guccuggucugaaggguga

SEQ ID NO: 2632804 - RNA, 19 nt, Artificial Sequence
  Description of Artificial Sequence: Synthetic oligonucleotide
  modified_base (3)..(3): a, c, u, g, unknown or other
ccngggguuccucugaucu

SEQ ID NO: 2632805 - RNA, 19 nt, Artificial Sequence
  Description of Artificial Sequence: Synthetic oligonucleotide
ugagggcuuuuguccugua

SEQ ID NO: 2632806 - RNA, 19 nt, Artificial Sequence
  Description of Artificial Sequence: Synthetic oligonucleotide
acacaggcucgaacaguca

SEQ ID NO: 2632807 - RNA, 19 nt, Artificial Sequence
  Description of Artificial Sequence: Synthetic oligonucleotide
caguaaaguccuggucuga

SEQ ID NO: 2632808 - RNA, 19 nt, Artificial Sequence
  Description of Artificial Sequence: Synthetic oligonucleotide
cacaggcucgaacagucau

SEQ ID NO: 2632809 - RNA, 19 nt, Artificial Sequence
  Description of Artificial Sequence: Synthetic oligonucleotide
aggugcccaggccucucau

SEQ ID NO: 2632810 - RNA, 19 nt, Artificial Sequence
  Description of Artificial Sequence: Synthetic oligonucleotide
guuaaccuggugggugaaa

SEQ ID NO: 2632811 - RNA, 19 nt, Artificial Sequence
  Description of Artificial Sequence: Synthetic oligonucleotide
cacgggccaaggugcccag

SEQ ID NO: 2632812 - RNA, 19 nt, Artificial Sequence
  Description of Artificial Sequence: Synthetic oligonucleotide
ggucaggagagaauccugu

SEQ ID NO: 2632813 - RNA, 19 nt, Artificial Sequence
  Description of Artificial Sequence: Synthetic oligonucleotide
agauugcaccgauguccuu

SEQ ID NO: 2632814 - RNA, 19 nt, Artificial Sequence
  Description of Artificial Sequence: Synthetic oligonucleotide
ggcccuggaucuugcccag

SEQ ID NO: 2632815 - RNA, 19 nt, Artificial Sequence
  Description of Artificial Sequence: Synthetic oligonucleotide
caccgauguccuuucuucu

SEQ ID NO: 2632816 - RNA, 19 nt, Artificial Sequence
  Description of Artificial Sequence: Synthetic oligonucleotide
  modified_base (17)..(17): a, c, u, g, unknown or other
gcugccggggaaagccngg

SEQ ID NO: 2632817 - RNA, 19 nt, Artificial Sequence
  Description of Artificial Sequence: Synthetic oligonucleotide
ggcucccgcuucugcaacc

SEQ ID NO: 2632818 - RNA, 19 nt, Artificial Sequence
  Description of Artificial Sequence: Synthetic oligonucleotide
  modified_base (11)..(11): a, c, u, g, unknown or other
gcucaggaugnuaauggcu

SEQ ID NO: 2632819 - RNA, 19 nt, Artificial Sequence
  Description of Artificial Sequence: Synthetic oligonucleotide
ucauugccagauggcgcuu

SEQ ID NO: 2632820 - RNA, 19 nt, Artificial Sequence
  Description of Artificial Sequence: Synthetic oligonucleotide
gggcuuuuguccuguaaau

SEQ ID NO: 2632821 - RNA, 19 nt, Artificial Sequence
  Description of Artificial Sequence: Synthetic oligonucleotide
gggugaugucuaugaagaa

SEQ ID NO: 2632822 - RNA, 19 nt, Artificial Sequence
  Description of Artificial Sequence: Synthetic oligonucleotide
ggcaaccugagggcuuuug

SEQ ID NO: 2632823 - RNA, 19 nt, Artificial Sequence
  Description of Artificial Sequence: Synthetic oligonucleotide
  modified_base (18)..(18): a, c, u, g, unknown or other
agggagagcucaggaugnu

SEQ ID NO: 2632824 - RNA, 19 nt, Artificial Sequence
  Description of Artificial Sequence: Synthetic oligonucleotide
ggccaaggugcccaggccu

SEQ ID NO: 2632825 - RNA, 19 nt, Artificial Sequence
  Description of Artificial Sequence: Synthetic oligonucleotide
gcaaccugagggcuuuugu

SEQ ID NO: 2632826 - RNA, 19 nt, Artificial Sequence
  Description of Artificial Sequence: Synthetic oligonucleotide
cucccuccuggguuucaga

SEQ ID NO: 2632827 - RNA, 19 nt, Artificial Sequence
  Description of Artificial Sequence: Synthetic oligonucleotide
cacacucucguggaucacu

SEQ ID NO: 2632828 - RNA, 19 nt, Artificial Sequence
  Description of Artificial Sequence: Synthetic oligonucleotide
gcauugggaucccgggcuc

SEQ ID NO: 2632829 - RNA, 19 nt, Artificial Sequence
  Description of Artificial Sequence: Synthetic oligonucleotide
acgggccaaggugcccagg

SEQ ID NO: 2632830 - RNA, 19 nt, Artificial Sequence
  Description of Artificial Sequence: Synthetic oligonucleotide
caaggugcccaggccucuc

SEQ ID NO: 2632831 - RNA, 19 nt, Artificial Sequence
  Description of Artificial Sequence: Synthetic oligonucleotide
cuuggcaaccugagggcuu

SEQ ID NO: 2632832 - RNA, 19 nt, Artificial Sequence
  Description of Artificial Sequence: Synthetic oligonucleotide
cucccgcuucugcaaccuc

SEQ ID NO: 2632833 - RNA, 19 nt, Artificial Sequence
  Description of Artificial Sequence: Synthetic oligonucleotide
cagaacucacgggaucaua

SEQ ID NO: 2632834 - RNA, 19 nt, Artificial Sequence
  Description of Artificial Sequence: Synthetic oligonucleotide
acgggaucauacaguccau

SEQ ID NO: 2632835 - RNA, 19 nt, Artificial Sequence
  Description of Artificial Sequence: Synthetic oligonucleotide
caggcucgaacagucauuu

SEQ ID NO: 2632836 - RNA, 19 nt, Artificial Sequence
  Description of Artificial Sequence: Synthetic oligonucleotide
ggccucucauugccagaug

SEQ ID NO: 2632837 - RNA, 19 nt, Artificial Sequence
  Description of Artificial Sequence: Synthetic oligonucleotide
cgggccaaggugcccaggc

SEQ ID NO: 2632838 - RNA, 19 nt, Artificial Sequence
  Description of Artificial Sequence: Synthetic oligonucleotide
uugggaucccgggcucuuu

SEQ ID NO: 2632839 - RNA, 19 nt, Artificial Sequence
  Description of Artificial Sequence: Synthetic oligonucleotide
  modified_base (9)..(9): a, c, u, g, unknown or other
ggaaagccngggguuccuc

SEQ ID NO: 2632840 - RNA, 19 nt, Artificial Sequence
  Description of Artificial Sequence: Synthetic oligonucleotide
cgaccgcacauugucauuc

SEQ ID NO: 2632841 - RNA, 19 nt, Artificial Sequence
  Description of Artificial Sequence: Synthetic oligonucleotide
cgcuuuucagcauugggau

SEQ ID NO: 2632842 - RNA, 19 nt, Artificial Sequence
  Description of Artificial Sequence: Synthetic oligonucleotide
ggaggucaaguaaaacuuu

SEQ ID NO: 2632843 - RNA, 19 nt, Artificial Sequence
  Description of Artificial Sequence: Synthetic oligonucleotide
cacugcucccuccuggguu

SEQ ID NO: 2632844 - RNA, 19 nt, Artificial Sequence
  Description of Artificial Sequence: Synthetic oligonucleotide
ccuggucugaagggugaug

SEQ ID NO: 2632845 - RNA, 19 nt, Artificial Sequence
  Description of Artificial Sequence: Synthetic oligonucleotide
ccagcaaacgaccgcacau

SEQ ID NO: 2632846 - RNA, 19 nt, Artificial Sequence
  Description of Artificial Sequence: Synthetic oligonucleotide
  modified_base (4)..(4): a, c, u, g, unknown or other
gccngggguuccucugauc

SEQ ID NO: 2632847 - RNA, 19 nt, Artificial Sequence
  Description of Artificial Sequence: Synthetic oligonucleotide
gccaaggugcccaggccuc

SEQ ID NO: 2632848 - RNA, 19 nt, Artificial Sequence
  Description of Artificial Sequence: Synthetic oligonucleotide
cccagcaaacgaccgcaca

SEQ ID NO: 2632849 - RNA, 19 nt, Artificial Sequence
  Description of Artificial Sequence: Synthetic oligonucleotide
gguuaaccuggugggugaa

SEQ ID NO: 2632850 - RNA, 19 nt, Artificial Sequence
  Description of Artificial Sequence: Synthetic oligonucleotide
cgggaucauacaguccaug

SEQ ID NO: 2632851 - RNA, 19 nt, Artificial Sequence
  Description of Artificial Sequence: Synthetic oligonucleotide
gcaaacgaccgcacauugu

SEQ ID NO: 2632852 - RNA, 19 nt, Artificial Sequence
  Description of Artificial Sequence: Synthetic oligonucleotide
ccgggcucuuucugccaag

SEQ ID NO: 2632853 - RNA, 19 nt, Artificial Sequence
  Description of Artificial Sequence: Synthetic oligonucleotide
cagcaaacgaccgcacauu

SEQ ID NO: 2632854 - RNA, 19 nt, Artificial Sequence
  Description of Artificial Sequence: Synthetic oligonucleotide
cauugggaucccgggcucu

SEQ ID NO: 2632855 - RNA, 19 nt, Artificial Sequence
  Description of Artificial Sequence: Synthetic oligonucleotide
  modified_base (17)..(17): a, c, u, g, unknown or other
gggagagcucaggaugnua

SEQ ID NO: 2632856 - RNA, 19 nt, Artificial Sequence
  Description of Artificial Sequence: Synthetic oligonucleotide
ggcucagcugccggggaaa

SEQ ID NO: 2632857 - RNA, 19 nt, Artificial Sequence
  Description of Artificial Sequence: Synthetic oligonucleotide
gggaucccgggcucuuucu

SEQ ID NO: 2632858 - RNA, 19 nt, Artificial Sequence
  Description of Artificial Sequence: Synthetic oligonucleotide
  modified_base (10)..(10): a, c, u, g, unknown or other
gggaaagccngggguuccu

SEQ ID NO: 2632859 - RNA, 19 nt, Artificial Sequence
  Description of Artificial Sequence: Synthetic oligonucleotide
  modified_base (2)..(2): a, c, u, g, unknown or other
cngggguuccucugaucuu

SEQ ID NO: 2632860 - RNA, 19 nt, Artificial Sequence
  Description of Artificial Sequence: Synthetic oligonucleotide
  modified_base (12)..(12): a, c, u, g, unknown or other
cggggaaagccngggguuc

SEQ ID NO: 2632861 - RNA, 19 nt, Artificial Sequence
  Description of Artificial Sequence: Synthetic oligonucleotide
cccuccuggguuucagaua

SEQ ID NO: 2632862 - RNA, 19 nt, Artificial Sequence
  Description of Artificial Sequence: Synthetic oligonucleotide
cgcccagcaaacgaccgca

SEQ ID NO: 2632863 - RNA, 19 nt, Artificial Sequence
  Description of Artificial Sequence: Synthetic oligonucleotide
gcccagcaaacgaccgcac

SEQ ID NO: 2632864 - RNA, 19 nt, Artificial Sequence
  Description of Artificial Sequence: Synthetic oligonucleotide
cauugccagauggcgcuuu

SEQ ID NO: 2632865 - RNA, 19 nt, Artificial Sequence
  Description of Artificial Sequence: Synthetic oligonucleotide
gggcucuuucugccaagau

SEQ ID NO: 2632866 - RNA, 19 nt, Artificial Sequence
  Description of Artificial Sequence: Synthetic oligonucleotide
gcuugucgaggggcuucac

SEQ ID NO: 2632867 - RNA, 19 nt, Artificial Sequence
  Description of Artificial Sequence: Synthetic oligonucleotide
ccuuggcaaccugagggcu

SEQ ID NO: 2632868 - RNA, 19 nt, Artificial Sequence
  Description of Artificial Sequence: Synthetic oligonucleotide
  modified_base (13)..(13): a, c, u, g, unknown or other
ccggggaaagccngggguu

SEQ ID NO: 2632869 - RNA, 19 nt, Artificial Sequence
  Description of Artificial Sequence: Synthetic oligonucleotide
gggguuccucugaucuucu

SEQ ID NO: 2632870 - RNA, 19 nt, Artificial Sequence
  Description of Artificial Sequence: Synthetic oligonucleotide
ccaaggugcccaggccucu

SEQ ID NO: 2632871 - RNA, 19 nt, Artificial Sequence
  Description of Artificial Sequence: Synthetic oligonucleotide
ccgcuucugcaaccucagu

SEQ ID NO: 2632872 - RNA, 19 nt, Artificial Sequence
  Description of Artificial Sequence: Synthetic oligonucleotide
  modified_base (1)..(1): a, c, u, g, unknown or other
nuaauggcucagcugccgg

SEQ ID NO: 2632873 - RNA, 19 nt, Artificial Sequence
  Description of Artificial Sequence: Synthetic oligonucleotide
  modified_base (1)..(1): a, c, u, g, unknown or other
ngggguuccucugaucuuc

SEQ ID NO: 2632874 - RNA, 19 nt, Artificial Sequence
  Description of Artificial Sequence: Synthetic oligonucleotide
uggacaguggcauugaugg

SEQ ID NO: 2632875 - RNA, 19 nt, Artificial Sequence
  Description of Artificial Sequence: Synthetic oligonucleotide
aaaguggaggucuucauag

SEQ ID NO: 2632876 - RNA, 19 nt, Artificial Sequence
  Description of Artificial Sequence: Synthetic oligonucleotide
uguacagugacacaccaug

SEQ ID NO: 2632877 - RNA, 19 nt, Artificial Sequence
  Description of Artificial Sequence: Synthetic oligonucleotide
uguacuuccacucaacagu

SEQ ID NO: 2632878 - RNA, 19 nt, Artificial Sequence
  Description of Artificial Sequence: Synthetic oligonucleotide
aguguaauugggcacaguc

SEQ ID NO: 2632879 - RNA, 19 nt, Artificial Sequence
  Description of Artificial Sequence: Synthetic oligonucleotide
uuuauaugcacagcgauug

SEQ ID NO: 2632880 - RNA, 19 nt, Artificial Sequence
  Description of Artificial Sequence: Synthetic oligonucleotide
uuuggaauuuauaugcaca

SEQ ID NO: 2632881 - RNA, 19 nt, Artificial Sequence
  Description of Artificial Sequence: Synthetic oligonucleotide
ggaauuuauaugcacagcg

SEQ ID NO: 2632882 - RNA, 19 nt, Artificial Sequence
  Description of Artificial Sequence: Synthetic oligonucleotide
aacaguggggacuccaugg

SEQ ID NO: 2632883 - RNA, 19 nt, Artificial Sequence
  Description of Artificial Sequence: Synthetic oligonucleotide
aauuuauaugcacagcgau

SEQ ID NO: 2632884 - RNA, 19 nt, Artificial Sequence
  Description of Artificial Sequence: Synthetic oligonucleotide
uuuaacagcugaucuaucc

SEQ ID NO: 2632885 - RNA, 19 nt, Artificial Sequence
  Description of Artificial Sequence: Synthetic oligonucleotide
aacaucuuucauuucaagu

SEQ ID NO: 2632886 - RNA, 19 nt, Artificial Sequence
  Description of Artificial Sequence: Synthetic oligonucleotide
uugaguuugugucuccucg

SEQ ID NO: 2632887 - RNA, 19 nt, Artificial Sequence
  Description of Artificial Sequence: Synthetic oligonucleotide
aauaucuucuuggacagug

SEQ ID NO: 2632888 - RNA, 19 nt, Artificial Sequence
  Description of Artificial Sequence: Synthetic oligonucleotide
uuggaauuuauaugcacag

SEQ ID NO: 2632889 - RNA, 19 nt, Artificial Sequence
  Description of Artificial Sequence: Synthetic oligonucleotide
gaagacagcgacaaagugg

SEQ ID NO: 2632890 - RNA, 19 nt, Artificial Sequence
  Description of Artificial Sequence: Synthetic oligonucleotide
ugacucugaagacagcggg

SEQ ID NO: 2632891 - RNA, 19 nt, Artificial Sequence
  Description of Artificial Sequence: Synthetic oligonucleotide
ugcucuguaacagugauga

SEQ ID NO: 2632892 - RNA, 19 nt, Artificial Sequence
  Description of Artificial Sequence: Synthetic oligonucleotide
uucauuucaaguuccucag

SEQ ID NO: 2632893 - RNA, 19 nt, Artificial Sequence
  Description of Artificial Sequence: Synthetic oligonucleotide
uuaacagcugaucuauccc

SEQ ID NO: 2632894 - RNA, 19 nt, Artificial Sequence
  Description of Artificial Sequence: Synthetic oligonucleotide
uguaacagugaugauguag

SEQ ID NO: 2632895 - RNA, 19 nt, Artificial Sequence
  Description of Artificial Sequence: Synthetic oligonucleotide
uucauagcggaucucagac

SEQ ID NO: 2632896 - RNA, 19 nt, Artificial Sequence
  Description of Artificial Sequence: Synthetic oligonucleotide
ugagccuagccuuuaacag

SEQ ID NO: 2632897 - RNA, 19 nt, Artificial Sequence
  Description of Artificial Sequence: Synthetic oligonucleotide
ugauguagcaaccggaguc

SEQ ID NO: 2632898 - RNA, 19 nt, Artificial Sequence
  Description of Artificial Sequence: Synthetic oligonucleotide
auuucaaguuccucagugg

SEQ ID NO: 2632899 - RNA, 19 nt, Artificial Sequence
  Description of Artificial Sequence: Synthetic oligonucleotide
acaugcagcacaauugugc

SEQ ID NO: 2632900 - RNA, 19 nt, Artificial Sequence
  Description of Artificial Sequence: Synthetic oligonucleotide
ugaucuaucccuccagccc

SEQ ID NO: 2632901 - RNA, 19 nt, Artificial Sequence
  Description of Artificial Sequence: Synthetic oligonucleotide
aguggaggucuucauagcg

SEQ ID NO: 2632902 - RNA, 19 nt, Artificial Sequence
  Description of Artificial Sequence: Synthetic oligonucleotide
uuucaaguuccucaguggu

SEQ ID NO: 2632903 - RNA, 19 nt, Artificial Sequence
  Description of Artificial Sequence: Synthetic oligonucleotide
ucggcuaacacucaacauc

SEQ ID NO: 2632904 - RNA, 19 nt, Artificial Sequence
  Description of Artificial Sequence: Synthetic oligonucleotide
acuuccacucaacaguggg

SEQ ID NO: 2632905 - RNA, 19 nt, Artificial Sequence
  Description of Artificial Sequence: Synthetic oligonucleotide
ugcagcaaggauuggcucg

SEQ ID NO: 2632906 - RNA, 19 nt, Artificial Sequence
  Description of Artificial Sequence: Synthetic oligonucleotide
aagacagcgacaaagugga

SEQ ID NO: 2632907 - RNA, 19 nt, Artificial Sequence
  Description of Artificial Sequence: Synthetic oligonucleotide
aaguggaggucuucauagc

SEQ ID NO: 2632908 - RNA, 19 nt, Artificial Sequence
  Description of Artificial Sequence: Synthetic oligonucleotide
uuuuggaauuuauaugcac

SEQ ID NO: 2632909 - RNA, 19 nt, Artificial Sequence
  Description of Artificial Sequence: Synthetic oligonucleotide
aguuugugucuccucgucc

SEQ ID NO: 2632910 - RNA, 19 nt, Artificial Sequence
  Description of Artificial Sequence: Synthetic oligonucleotide
guaacagugaugauguagc

SEQ ID NO: 2632911 - RNA, 19 nt, Artificial Sequence
  Description of Artificial Sequence: Synthetic oligonucleotide
cuaacacucaacaucuuuc

SEQ ID NO: 2632912 - RNA, 19 nt, Artificial Sequence
  Description of Artificial Sequence: Synthetic oligonucleotide
gauuggcucgguuuguucc

SEQ ID NO: 2632913 - RNA, 19 nt, Artificial Sequence
  Description of Artificial Sequence: Synthetic oligonucleotide
uugacuggaaaauacuguc

SEQ ID NO: 2632914 - RNA, 19 nt, Artificial Sequence
  Description of Artificial Sequence: Synthetic oligonucleotide
ugaugauguagcaaccgga

SEQ ID NO: 2632915 - RNA, 19 nt, Artificial Sequence
  Description of Artificial Sequence: Synthetic oligonucleotide
cacccgaaaagcuggaugg

SEQ ID NO: 2632916 - RNA, 19 nt, Artificial Sequence
  Description of Artificial Sequence: Synthetic oligonucleotide
ucuuuguggcguuugggag

SEQ ID NO: 2632917 - RNA, 19 nt, Artificial Sequence
  Description of Artificial Sequence: Synthetic oligonucleotide
uugucgaaggugcagacuc

SEQ ID NO: 2632918 - RNA, 19 nt, Artificial Sequence
  Description of Artificial Sequence: Synthetic oligonucleotide
uggcauugauggcugaccg

SEQ ID NO: 2632919 - RNA, 19 nt, Artificial Sequence
  Description of Artificial Sequence: Synthetic oligonucleotide
auugugccaaacugucugc

SEQ ID NO: 2632920 - RNA, 19 nt, Artificial Sequence
  Description of Artificial Sequence: Synthetic oligonucleotide
caugacucugaagacagcg

SEQ ID NO: 2632921 - RNA, 19 nt, Artificial Sequence
  Description of Artificial Sequence: Synthetic oligonucleotide
cagcagaauaucuucuugg

SEQ ID NO: 2632922 - RNA, 19 nt, Artificial Sequence
  Description of Artificial Sequence: Synthetic oligonucleotide
gaugauguagcaaccggag

SEQ ID NO: 2632923 - RNA, 19 nt, Artificial Sequence
  Description of Artificial Sequence: Synthetic oligonucleotide
gacagcgacaaaguggagg

SEQ ID NO: 2632924 - RNA, 19 nt, Artificial Sequence
  Description of Artificial Sequence: Synthetic oligonucleotide
cauagcggaucucagacac

SEQ ID NO: 2632925 - RNA, 19 nt, Artificial Sequence
  Description of Artificial Sequence: Synthetic oligonucleotide
aauugggcacagucucggc

SEQ ID NO: 2632926 - RNA, 19 nt, Artificial Sequence
  Description of Artificial Sequence: Synthetic oligonucleotide
ugucuuucucuugagguag

SEQ ID NO: 2632927 - RNA, 19 nt, Artificial Sequence
  Description of Artificial Sequence: Synthetic oligonucleotide
caaacugucugcucccugg

SEQ ID NO: 2632928 - RNA, 19 nt, Artificial Sequence
  Description of Artificial Sequence: Synthetic oligonucleotide
uaacacucaacaucuuuca

SEQ ID NO: 2632929 - RNA, 19 nt, Artificial Sequence
  Description of Artificial Sequence: Synthetic oligonucleotide
uguguacuuccacucaaca

SEQ ID NO: 2632930 - RNA, 19 nt, Artificial Sequence
  Description of Artificial Sequence: Synthetic oligonucleotide
uccguugacuggaaaauac

SEQ ID NO: 2632931 - RNA, 19 nt, Artificial Sequence
  Description of Artificial Sequence: Synthetic oligonucleotide
gacacaugcagcacaauug

SEQ ID NO: 2632932 - RNA, 19 nt, Artificial Sequence
  Description of Artificial Sequence: Synthetic oligonucleotide
gauggagccauugucgaag

SEQ ID NO: 2632933 - RNA, 19 nt, Artificial Sequence
  Description of Artificial Sequence: Synthetic oligonucleotide
acagucucggcuaacacuc

SEQ ID NO: 2632934 - RNA, 19 nt, Artificial Sequence
  Description of Artificial Sequence: Synthetic oligonucleotide
aaacugucugcucccuggg

SEQ ID NO: 2632935 - RNA, 19 nt, Artificial Sequence
  Description of Artificial Sequence: Synthetic oligonucleotide
uacugucuuucucuugagg

SEQ ID NO: 2632936 - RNA, 19 nt, Artificial Sequence
  Description of Artificial Sequence: Synthetic oligonucleotide
ucucggcuaacacucaaca

SEQ ID NO: 2632937 - RNA, 19 nt, Artificial Sequence
  Description of Artificial Sequence: Synthetic oligonucleotide
acagcgacaaaguggaggu

SEQ ID NO: 2632938 - RNA, 19 nt, Artificial Sequence
  Description of Artificial Sequence: Synthetic oligonucleotide
gaggaauguacagugacac

SEQ ID NO: 2632939 - RNA, 19 nt, Artificial Sequence
  Description of Artificial Sequence: Synthetic oligonucleotide
ugucuccucguccuuuugg

SEQ ID NO: 2632940 - RNA, 19 nt, Artificial Sequence
  Description of Artificial Sequence: Synthetic oligonucleotide
agcgauugcagacccacag

SEQ ID NO: 2632941 - RNA, 19 nt, Artificial Sequence
  Description of Artificial Sequence: Synthetic oligonucleotide
gugaugauguagcaaccgg

SEQ ID NO: 2632942 - RNA, 19 nt, Artificial Sequence
  Description of Artificial Sequence: Synthetic oligonucleotide
ugaucagcaccacagccac

SEQ ID NO: 2632943 - RNA, 19 nt, Artificial Sequence
  Description of Artificial Sequence: Synthetic oligonucleotide
uaauugggcacagucucgg

SEQ ID NO: 2632944 - RNA, 19 nt, Artificial Sequence
  Description of Artificial Sequence: Synthetic oligonucleotide
gaccgaggaauguacagug

SEQ ID NO: 2632945 - RNA, 19 nt, Artificial Sequence
  Description of Artificial Sequence: Synthetic oligonucleotide
agugaugauguagcaaccg

SEQ ID NO: 2632946 - RNA, 19 nt, Artificial Sequence
  Description of Artificial Sequence: Synthetic oligonucleotide
uaacagcugaucuaucccu

SEQ ID NO: 2632947 - RNA, 19 nt, Artificial Sequence
  Description of Artificial Sequence: Synthetic oligonucleotide
uugauguguacuuccacuc

SEQ ID NO: 2632948 - RNA, 19 nt, Artificial Sequence
  Description of Artificial Sequence: Synthetic oligonucleotide
cucuguaacagugaugaug

SEQ ID NO: 2632949 - RNA, 19 nt, Artificial Sequence
  Description of Artificial Sequence: Synthetic oligonucleotide
uacagugacacaccaugac

SEQ ID NO: 2632950 - RNA, 19 nt, Artificial Sequence
  Description of Artificial Sequence: Synthetic oligonucleotide
ugacuggaaaauacugucu

SEQ ID NO: 2632951 - RNA, 19 nt, Artificial Sequence
  Description of Artificial Sequence: Synthetic oligonucleotide
agaagacagcgacaaagug

SEQ ID NO: 2632952 - RNA, 19 nt, Artificial Sequence
  Description of Artificial Sequence: Synthetic oligonucleotide
guagcaguguaauugggca

SEQ ID NO: 2632953 - RNA, 19 nt, Artificial Sequence
  Description of Artificial Sequence: Synthetic oligonucleotide
cagacucugucuuuguggc

SEQ ID NO: 2632954 - RNA, 19 nt, Artificial Sequence
  Description of Artificial Sequence: Synthetic oligonucleotide
uguuccguugacuggaaaa

SEQ ID NO: 2632955 - RNA, 19 nt, Artificial Sequence
  Description of Artificial Sequence: Synthetic oligonucleotide
auuggcucgguuuguuccg

SEQ ID NO: 2632956 - RNA, 19 nt, Artificial Sequence
  Description of Artificial Sequence: Synthetic oligonucleotide
agcacaauugugccaaacu

SEQ ID NO: 2632957 - RNA, 19 nt, Artificial Sequence
  Description of Artificial Sequence: Synthetic oligonucleotide
ugauguguacuuccacuca

SEQ ID NO: 2632958 - RNA, 19 nt, Artificial Sequence
  Description of Artificial Sequence: Synthetic oligonucleotide
acacaugcagcacaauugu

SEQ ID NO: 2632959 - RNA, 19 nt, Artificial Sequence
  Description of Artificial Sequence: Synthetic oligonucleotide
aagcagagcaaagaagaca

SEQ ID NO: 2632960 - RNA, 19 nt, Artificial Sequence
  Description of Artificial Sequence: Synthetic oligonucleotide
acagcagaauaucuucuug

SEQ ID NO: 2632961 - RNA, 19 nt, Artificial Sequence
  Description of Artificial Sequence: Synthetic oligonucleotide
guuugggagacaguuggcg

SEQ ID NO: 2632962 - RNA, 19 nt, Artificial Sequence
  Description of Artificial Sequence: Synthetic oligonucleotide
acagugacacaccaugacu

SEQ ID NO: 2632963 - RNA, 19 nt, Artificial Sequence
  Description of Artificial Sequence: Synthetic oligonucleotide
gauguagcaaccggagucc

SEQ ID NO: 2632964 - RNA, 19 nt, Artificial Sequence
  Description of Artificial Sequence: Synthetic oligonucleotide
agccuuuaacagcugaucu

SEQ ID NO: 2632965 - RNA, 19 nt, Artificial Sequence
  Description of Artificial Sequence: Synthetic oligonucleotide
acaccaugacucugaagac

SEQ ID NO: 2632966 - RNA, 19 nt, Artificial Sequence
  Description of Artificial Sequence: Synthetic oligonucleotide
acagcgauugcagacccac

SEQ ID NO: 2632967 - RNA, 19 nt, Artificial Sequence
  Description of Artificial Sequence: Synthetic oligonucleotide
uugcagacccacaggaggc

SEQ ID NO: 2632968 - RNA, 19 nt, Artificial Sequence
  Description of Artificial Sequence: Synthetic oligonucleotide
agcagaauaucuucuugga

SEQ ID NO: 2632969 - RNA, 19 nt, Artificial Sequence
  Description of Artificial Sequence: Synthetic oligonucleotide
aagaagacagcgacaaagu

SEQ ID NO: 2632970 - RNA, 19 nt, Artificial Sequence
  Description of Artificial Sequence: Synthetic oligonucleotide
guguacuuccacucaacag

SEQ ID NO: 2632971 - RNA, 19 nt, Artificial Sequence
  Description of Artificial Sequence: Synthetic oligonucleotide
aaaagcuggauggagccau

SEQ ID NO: 2632972 - RNA, 19 nt, Artificial Sequence
  Description of Artificial Sequence: Synthetic oligonucleotide
uuauaugcacagcgauugc

SEQ ID NO: 2632973 - RNA, 19 nt, Artificial Sequence
  Description of Artificial Sequence: Synthetic oligonucleotide
uuugggagacaguuggcgu

SEQ ID NO: 2632974 - RNA, 19 nt, Artificial Sequence
  Description of Artificial Sequence: Synthetic oligonucleotide
cagugacacaccaugacuc

SEQ ID NO: 2632975 - RNA, 19 nt, Artificial Sequence
  Description of Artificial Sequence: Synthetic oligonucleotide
uuccacuccacgaucuucu

SEQ ID NO: 2632976 - RNA, 19 nt, Artificial Sequence
  Description of Artificial Sequence: Synthetic oligonucleotide
ugacacaccaugacucuga

SEQ ID NO: 2632977 - RNA, 19 nt, Artificial Sequence
  Description of Artificial Sequence: Synthetic oligonucleotide
acccacaggaggcugauca

SEQ ID NO: 2632978 - RNA, 19 nt, Artificial Sequence
  Description of Artificial Sequence: Synthetic oligonucleotide
cugaucuaucccuccagcc

SEQ ID NO: 2632979 - RNA, 19 nt, Artificial Sequence
  Description of Artificial Sequence: Synthetic oligonucleotide
cuuccacucaacagugggg

SEQ ID NO: 2632980 - RNA, 19 nt, Artificial Sequence
  Description of Artificial Sequence: Synthetic oligonucleotide
ggaauguacagugacacac

SEQ ID NO: 2632981 - RNA, 19 nt, Artificial Sequence
  Description of Artificial Sequence: Synthetic oligonucleotide
agacaguuggcgugggguc

SEQ ID NO: 2632982 - RNA, 19 nt, Artificial Sequence
  Description of Artificial Sequence: Synthetic oligonucleotide
gaauuuauaugcacagcga

SEQ ID NO: 2632983 - RNA, 19 nt, Artificial Sequence
  Description of Artificial Sequence: Synthetic oligonucleotide
cuccauggcaggaauaguc

SEQ ID NO: 2632984 - RNA, 19 nt, Artificial Sequence
  Description of Artificial Sequence: Synthetic oligonucleotide
uguggcguuugggagacag

SEQ ID NO: 2632985 - RNA, 19 nt, Artificial Sequence
  Description of Artificial Sequence: Synthetic oligonucleotide
cucaguggugcuuucuuug

SEQ ID NO: 2632986 - RNA, 19 nt, Artificial Sequence
  Description of Artificial Sequence: Synthetic oligonucleotide
accaugacucugaagacag

SEQ ID NO: 2632987 - RNA, 19 nt, Artificial Sequence
  Description of Artificial Sequence: Synthetic oligonucleotide
uuccacucaacagugggga

SEQ ID NO: 2632988 - RNA, 19 nt, Artificial Sequence
  Description of Artificial Sequence: Synthetic oligonucleotide
acacccgaaaagcuggaug

SEQ ID NO: 2632989 - RNA, 19 nt, Artificial Sequence
  Description of Artificial Sequence: Synthetic oligonucleotide
aaccggagucccucacccc

SEQ ID NO: 2632990 - RNA, 19 nt, Artificial Sequence
  Description of Artificial Sequence: Synthetic oligonucleotide
gcagacucugucuuugugg

SEQ ID NO: 2632991 - RNA, 19 nt, Artificial Sequence
  Description of Artificial Sequence: Synthetic oligonucleotide
aacacucaacaucuuucau

SEQ ID NO: 2632992 - RNA, 19 nt, Artificial Sequence
  Description of Artificial Sequence: Synthetic oligonucleotide
ugucuuuguggcguuuggg

SEQ ID NO: 2632993 - RNA, 19 nt, Artificial Sequence
  Description of Artificial Sequence: Synthetic oligonucleotide
uaugcacagcgauugcaga

SEQ ID NO: 2632994 - RNA, 19 nt, Artificial Sequence
  Description of Artificial Sequence: Synthetic oligonucleotide
ugcagcacaauugugccaa

SEQ ID NO: 2632995 - RNA, 19 nt, Artificial Sequence
  Description of Artificial Sequence: Synthetic oligonucleotide
aguggugcuuucuuugagu

SEQ ID NO: 2632996 - RNA, 19 nt, Artificial Sequence
  Description of Artificial Sequence: Synthetic oligonucleotide
uggauggagccauugucga

SEQ ID NO: 2632997 - RNA, 19 nt, Artificial Sequence
  Description of Artificial Sequence: Synthetic oligonucleotide
gcguuugggagacaguugg

SEQ ID NO: 2632998 - RNA, 19 nt, Artificial Sequence
  Description of Artificial Sequence: Synthetic oligonucleotide
uaacagugaugauguagca

SEQ ID NO: 2632999 - RNA, 19 nt, Artificial Sequence
  Description of Artificial Sequence: Synthetic oligonucleotide
uucuuggacaguggcauug

SEQ ID NO: 2633000 - RNA, 19 nt, Artificial Sequence
  Description of Artificial Sequence: Synthetic oligonucleotide
cugaccgaggaauguacag

SEQ ID NO: 2633001 - RNA, 19 nt, Artificial Sequence
  Description of Artificial Sequence: Synthetic oligonucleotide
uacuuccacucaacagugg

SEQ ID NO: 2633002 - RNA, 19 nt, Artificial Sequence
  Description of Artificial Sequence: Synthetic oligonucleotide
gcggaucucagacacaugc

SEQ ID NO: 2633003 - RNA, 19 nt, Artificial Sequence
  Description of Artificial Sequence: Synthetic oligonucleotide
agugacacaccaugacucu

SEQ ID NO: 2633004 - RNA, 19 nt, Artificial Sequence
  Description of Artificial Sequence: Synthetic oligonucleotide
aacagugaugauguagcaa

SEQ ID NO: 2633005 - RNA, 19 nt, Artificial Sequence
  Description of Artificial Sequence: Synthetic oligonucleotide
ugcagacucugucuuugug

SEQ ID NO: 2633006 - RNA, 19 nt, Artificial Sequence
  Description of Artificial Sequence: Synthetic oligonucleotide
auugggcacagucucggcu

SEQ ID NO: 2633007 - RNA, 19 nt, Artificial Sequence
  Description of Artificial Sequence: Synthetic oligonucleotide
caagcagagcaaagaagac

SEQ ID NO: 2633008 - RNA, 19 nt, Artificial Sequence
  Description of Artificial Sequence: Synthetic oligonucleotide
gcacaauugugccaaacug

SEQ ID NO: 2633009 - RNA, 19 nt, Artificial Sequence
  Description of Artificial Sequence: Synthetic oligonucleotide
gauguguacuuccacucaa

SEQ ID NO: 2633010 - RNA, 19 nt, Artificial Sequence
  Description of Artificial Sequence: Synthetic oligonucleotide
ucuugagguagcaguguaa

SEQ ID NO: 2633011 - RNA, 19 nt, Artificial Sequence
  Description of Artificial Sequence: Synthetic oligonucleotide
uaguccacugacagcagaa

SEQ ID NO: 2633012 - RNA, 19 nt, Artificial Sequence
  Description of Artificial Sequence: Synthetic oligonucleotide
cuuuuggaauuuauaugca

SEQ ID NO: 2633013 - RNA, 19 nt, Artificial Sequence
  Description of Artificial Sequence: Synthetic oligonucleotide
guaauugggcacagucucg

SEQ ID NO: 2633014 - RNA, 19 nt, Artificial Sequence
  Description of Artificial Sequence: Synthetic oligonucleotide
agcgacaaaguggaggucu

SEQ ID NO: 2633015 - RNA, 19 nt, Artificial Sequence
  Description of Artificial Sequence: Synthetic oligonucleotide
uuugaguuugugucuccuc

SEQ ID NO: 2633016 - RNA, 19 nt, Artificial Sequence
  Description of Artificial Sequence: Synthetic oligonucleotide
ucauuucaaguuccucagu

SEQ ID NO: 2633017 - RNA, 19 nt, Artificial Sequence
  Description of Artificial Sequence: Synthetic oligonucleotide
cauggcaggaauaguccac

SEQ ID NO: 2633018 - RNA, 19 nt, Artificial Sequence
  Description of Artificial Sequence: Synthetic oligonucleotide
ugaguuugugucuccucgu

SEQ ID NO: 2633019 - RNA, 19 nt, Artificial Sequence
  Description of Artificial Sequence: Synthetic oligonucleotide
gugagccuagccuuuaaca

SEQ ID NO: 2633020 - RNA, 19 nt, Artificial Sequence
  Description of Artificial Sequence: Synthetic oligonucleotide
caaccggagucccucaccc

SEQ ID NO: 2633021 - RNA, 19 nt, Artificial Sequence
  Description of Artificial Sequence: Synthetic oligonucleotide
gucuuuguggcguuuggga

SEQ ID NO: 2633022 - RNA, 19 nt, Artificial Sequence
  Description of Artificial Sequence: Synthetic oligonucleotide
ucauagcggaucucagaca

SEQ ID NO: 2633023 - RNA, 19 nt, Artificial Sequence
  Description of Artificial Sequence: Synthetic oligonucleotide
ugggagacaguuggcgugg

SEQ ID NO: 2633024 - RNA, 19 nt, Artificial Sequence
  Description of Artificial Sequence: Synthetic oligonucleotide
gauugcagacccacaggag

SEQ ID NO: 2633025 - RNA, 19 nt, Artificial Sequence
  Description of Artificial Sequence: Synthetic oligonucleotide
cagugaugauguagcaacc

SEQ ID NO: 2633026 - RNA, 19 nt, Artificial Sequence
  Description of Artificial Sequence: Synthetic oligonucleotide
gguuuguuccguugacugg

SEQ ID NO: 2633027 - RNA, 19 nt, Artificial Sequence
  Description of Artificial Sequence: Synthetic oligonucleotide
ugauggcugaccgaggaau

SEQ ID NO: 2633028 - RNA, 19 nt, Artificial Sequence
  Description of Artificial Sequence: Synthetic oligonucleotide
uuuguggcguuugggagac

SEQ ID NO: 2633029 - RNA, 19 nt, Artificial Sequence
  Description of Artificial Sequence: Synthetic oligonucleotide
gacaaaguggaggucuuca

SEQ ID NO: 2633030 - RNA, 19 nt, Artificial Sequence
  Description of Artificial Sequence: Synthetic oligonucleotide
gcaagcagagcaaagaaga

SEQ ID NO: 2633031 - RNA, 19 nt, Artificial Sequence
  Description of Artificial Sequence: Synthetic oligonucleotide
guuuguuccguugacugga

SEQ ID NO: 2633032 - RNA, 19 nt, Artificial Sequence
  Description of Artificial Sequence: Synthetic oligonucleotide
auaguccacugacagcaga

SEQ ID NO: 2633033 - RNA, 19 nt, Artificial Sequence
  Description of Artificial Sequence: Synthetic oligonucleotide
augauguagcaaccggagu

SEQ ID NO: 2633034 - RNA, 19 nt, Artificial Sequence
  Description of Artificial Sequence: Synthetic oligonucleotide
gcugaucagcaccacagcc

SEQ ID NO: 2633035 - RNA, 19 nt, Artificial Sequence
  Description of Artificial Sequence: Synthetic oligonucleotide
ucugucuuuguggcguuug

SEQ ID NO: 2633036 - RNA, 19 nt, Artificial Sequence
  Description of Artificial Sequence: Synthetic oligonucleotide
cauugauggcugaccgagg

SEQ ID NO: 2633037 - RNA, 19 nt, Artificial Sequence
  Description of Artificial Sequence: Synthetic oligonucleotide
agacucugucuuuguggcg

SEQ ID NO: 2633038 - RNA, 19 nt, Artificial Sequence
  Description of Artificial Sequence: Synthetic oligonucleotide
ucaacaguggggacuccau

SEQ ID NO: 2633039 - RNA, 19 nt, Artificial Sequence
  Description of Artificial Sequence: Synthetic oligonucleotide
aauaguccacugacagcag

SEQ ID NO: 2633040 - RNA, 19 nt, Artificial Sequence
  Description of Artificial Sequence: Synthetic oligonucleotide
cauugucgaaggugcagac

SEQ ID NO: 2633041 - RNA, 19 nt, Artificial Sequence
  Description of Artificial Sequence: Synthetic oligonucleotide
gaucuaucccuccagcccu

SEQ ID NO: 2633042 - RNA, 19 nt, Artificial Sequence
  Description of Artificial Sequence: Synthetic oligonucleotide
guuggcguggggucccugg

SEQ ID NO: 2633043 - RNA, 19 nt, Artificial Sequence
  Description of Artificial Sequence: Synthetic oligonucleotide
cuugauguguacuuccacu

SEQ ID NO: 2633044 - RNA, 19 nt, Artificial Sequence
  Description of Artificial Sequence: Synthetic oligonucleotide
cuuuguggcguuugggaga

SEQ ID NO: 2633045 - RNA, 19 nt, Artificial Sequence
  Description of Artificial Sequence: Synthetic oligonucleotide
gaggucuucauagcggauc

SEQ ID NO: 2633046 - RNA, 19 nt, Artificial Sequence
  Description of Artificial Sequence: Synthetic oligonucleotide
gcauugauggcugaccgag

SEQ ID NO: 2633047 - RNA, 19 nt, Artificial Sequence
  Description of Artificial Sequence: Synthetic oligonucleotide
ggaauaguccacugacagc

SEQ ID NO: 2633048 - RNA, 19 nt, Artificial Sequence
  Description of Artificial Sequence: Synthetic oligonucleotide
auguagcaaccggaguccc

SEQ ID NO: 2633049 - RNA, 19 nt, Artificial Sequence
  Description of Artificial Sequence: Synthetic oligonucleotide
aggaauguacagugacaca

SEQ ID NO: 2633050 - RNA, 19 nt, Artificial Sequence
  Description of Artificial Sequence: Synthetic oligonucleotide
auguguacuuccacucaac

SEQ ID NO: 2633051 - RNA, 19 nt, Artificial Sequence
  Description of Artificial Sequence: Synthetic oligonucleotide
agcaccacagccaccgcgg

SEQ ID NO: 2633052 - RNA, 19 nt, Artificial Sequence
  Description of Artificial Sequence: Synthetic oligonucleotide
gacucugaagacagcgggc

SEQ ID NO: 2633053 - RNA, 19 nt, Artificial Sequence
  Description of Artificial Sequence: Synthetic oligonucleotide
agcaaccggagucccucac

SEQ ID NO: 2633054 - RNA, 19 nt, Artificial Sequence
  Description of Artificial Sequence: Synthetic oligonucleotide
auuuauaugcacagcgauu

SEQ ID NO: 2633055 - RNA, 19 nt, Artificial Sequence
  Description of Artificial Sequence: Synthetic oligonucleotide
acaaaguggaggucuucau

SEQ ID NO: 2633056 - RNA, 19 nt, Artificial Sequence
  Description of Artificial Sequence: Synthetic oligonucleotide
uguagcaaccggagucccu

SEQ ID NO: 2633057 - RNA, 19 nt, Artificial Sequence
  Description of Artificial Sequence: Synthetic oligonucleotide
gaguuugugucuccucguc

SEQ ID NO: 2633058 - RNA, 19 nt, Artificial Sequence
  Description of Artificial Sequence: Synthetic oligonucleotide
uagccuuuaacagcugauc

SEQ ID NO: 2633059 - RNA, 19 nt, Artificial Sequence
  Description of Artificial Sequence: Synthetic oligonucleotide
ucguccuuuuggaauuuau

SEQ ID NO: 2633060 - RNA, 19 nt, Artificial Sequence
  Description of Artificial Sequence: Synthetic oligonucleotide
uugggcacagucucggcua

SEQ ID NO: 2633061 - RNA, 19 nt, Artificial Sequence
  Description of Artificial Sequence: Synthetic oligonucleotide
acaguuggcgugggguccc

SEQ ID NO: 2633062 - RNA, 19 nt, Artificial Sequence
  Description of Artificial Sequence: Synthetic oligonucleotide
ugucgaaggugcagacucu

SEQ ID NO: 2633063 - RNA, 19 nt, Artificial Sequence
  Description of Artificial Sequence: Synthetic oligonucleotide
uagcggaucucagacacau

SEQ ID NO: 2633064 - RNA, 19 nt, Artificial Sequence
  Description of Artificial Sequence: Synthetic oligonucleotide
cuucauagcggaucucaga

SEQ ID NO: 2633065 - RNA, 19 nt, Artificial Sequence
  Description of Artificial Sequence: Synthetic oligonucleotide
gacaguggcauugauggcu

SEQ ID NO: 2633066 - RNA, 19 nt, Artificial Sequence
  Description of Artificial Sequence: Synthetic oligonucleotide
gauggcugaccgaggaaug

SEQ ID NO: 2633067 - RNA, 19 nt, Artificial Sequence
  Description of Artificial Sequence: Synthetic oligonucleotide
gguagcaguguaauugggc

SEQ ID NO: 2633068 - RNA, 19 nt, Artificial Sequence
  Description of Artificial Sequence: Synthetic oligonucleotide
cacaauugugccaaacugu

SEQ ID NO: 2633069 - RNA, 19 nt, Artificial Sequence
  Description of Artificial Sequence: Synthetic oligonucleotide
ugguuuccacuccacgauc

SEQ ID NO: 2633070 - RNA, 19 nt, Artificial Sequence
  Description of Artificial Sequence: Synthetic oligonucleotide
gacaguuggcguggggucc

SEQ ID NO: 2633071 - RNA, 19 nt, Artificial Sequence
  Description of Artificial Sequence: Synthetic oligonucleotide
gacuggaaaauacugucuu

SEQ ID NO: 2633072 - RNA, 19 nt, Artificial Sequence
  Description of Artificial Sequence: Synthetic oligonucleotide
ggagccauugucgaaggug

SEQ ID NO: 2633073 - RNA, 19 nt, Artificial Sequence
  Description of Artificial Sequence: Synthetic oligonucleotide
cccacacccgaaaagcugg

SEQ ID NO: 2633074 - RNA, 19 nt, Artificial Sequence
  Description of Artificial Sequence: Synthetic oligonucleotide
uucugcuccaccccagcuu

SEQ ID NO: 2633075 - RNA, 19 nt, Artificial Sequence
  Description of Artificial Sequence: Synthetic oligonucleotide
uuuguuccguugacuggaa

SEQ ID NO: 2633076 - RNA, 19 nt, Artificial Sequence
  Description of Artificial Sequence: Synthetic oligonucleotide
ucucuugagguagcagugu

SEQ ID NO: 2633077 - RNA, 19 nt, Artificial Sequence
  Description of Artificial Sequence: Synthetic oligonucleotide
ucgaaggugcagacucugu

SEQ ID NO: 2633078 - RNA, 19 nt, Artificial Sequence
  Description of Artificial Sequence: Synthetic oligonucleotide
cagcaccacagccaccgcg

SEQ ID NO: 2633079 - RNA, 19 nt, Artificial Sequence
  Description of Artificial Sequence: Synthetic oligonucleotide
cucugaagacagcgggcgg

SEQ ID NO: 2633080 - RNA, 19 nt, Artificial Sequence
  Description of Artificial Sequence: Synthetic oligonucleotide
acugacagcagaauaucuu

SEQ ID NO: 2633081 - RNA, 19 nt, Artificial Sequence
  Description of Artificial Sequence: Synthetic oligonucleotide
ccgaaaagcuggauggagc

SEQ ID NO: 2633082 - RNA, 19 nt, Artificial Sequence
  Description of Artificial Sequence: Synthetic oligonucleotide
gcaaagaagacagcgacaa

SEQ ID NO: 2633083 - RNA, 19 nt, Artificial Sequence
  Description of Artificial Sequence: Synthetic oligonucleotide
ucccugggugcucuguaac

SEQ ID NO: 2633084 - RNA, 19 nt, Artificial Sequence
  Description of Artificial Sequence: Synthetic oligonucleotide
guuugugucuccucguccu

SEQ ID NO: 2633085 - RNA, 19 nt, Artificial Sequence
  Description of Artificial Sequence: Synthetic oligonucleotide
uugauggcugaccgaggaa

SEQ ID NO: 2633086 - RNA, 19 nt, Artificial Sequence
  Description of Artificial Sequence: Synthetic oligonucleotide
uccucaguggugcuuucuu

SEQ ID NO: 2633087 - RNA, 19 nt, Artificial Sequence
  Description of Artificial Sequence: Synthetic oligonucleotide
ucuuggacaguggcauuga

SEQ ID NO: 2633088 - RNA, 19 nt, Artificial Sequence
  Description of Artificial Sequence: Synthetic oligonucleotide
cugaagacagcgggcggcg

SEQ ID NO: 2633089 - RNA, 19 nt, Artificial Sequence
  Description of Artificial Sequence: Synthetic oligonucleotide
agcuggauggagccauugu

SEQ ID NO: 2633090 - RNA, 19 nt, Artificial Sequence
  Description of Artificial Sequence: Synthetic oligonucleotide
uggcaggaauaguccacug

SEQ ID NO: 2633091 - RNA, 19 nt, Artificial Sequence
  Description of Artificial Sequence: Synthetic oligonucleotide
auggcaggaauaguccacu

SEQ ID NO: 2633092 - RNA, 19 nt, Artificial Sequence
  Description of Artificial Sequence: Synthetic oligonucleotide
accccagcuugauguguac

SEQ ID NO: 2633093 - RNA, 19 nt, Artificial Sequence
  Description of Artificial Sequence: Synthetic oligonucleotide
uugugccaaacugucugcu

SEQ ID NO: 2633094 - RNA, 19 nt, Artificial Sequence
  Description of Artificial Sequence: Synthetic oligonucleotide
agcaaagaagacagcgaca

SEQ ID NO: 2633095 - RNA, 19 nt, Artificial Sequence
  Description of Artificial Sequence: Synthetic oligonucleotide
ucgguuuguuccguugacu

SEQ ID NO: 2633096 - RNA, 19 nt, Artificial Sequence
  Description of Artificial Sequence: Synthetic oligonucleotide
gcugaucuaucccuccagc

SEQ ID NO: 2633097 - RNA, 19 nt, Artificial Sequence
  Description of Artificial Sequence: Synthetic oligonucleotide
auugucgaaggugcagacu

SEQ ID NO: 2633098 - RNA, 19 nt, Artificial Sequence
  Description of Artificial Sequence: Synthetic oligonucleotide
caacaguggggacuccaug

SEQ ID NO: 2633099 - RNA, 19 nt, Artificial Sequence
  Description of Artificial Sequence: Synthetic oligonucleotide
cucgguuuguuccguugac

SEQ ID NO: 2633100 - RNA, 19 nt, Artificial Sequence
  Description of Artificial Sequence: Synthetic oligonucleotide
guagcaaccggagucccuc

SEQ ID NO: 2633101 - RNA, 19 nt, Artificial Sequence
  Description of Artificial Sequence: Synthetic oligonucleotide
agguagcaguguaauuggg

SEQ ID NO: 2633102 - RNA, 19 nt, Artificial Sequence
  Description of Artificial Sequence: Synthetic oligonucleotide
uccacucaacaguggggac

SEQ ID NO: 2633103 - RNA, 19 nt, Artificial Sequence
  Description of Artificial Sequence: Synthetic oligonucleotide
caggaauaguccacugaca

SEQ ID NO: 2633104 - RNA, 19 nt, Artificial Sequence
  Description of Artificial Sequence: Synthetic oligonucleotide
uugagguagcaguguaauu

SEQ ID NO: 2633105 - RNA, 19 nt, Artificial Sequence
  Description of Artificial Sequence: Synthetic oligonucleotide
cggcggucaacccagagcg

SEQ ID NO: 2633106 - RNA, 19 nt, Artificial Sequence
  Description of Artificial Sequence: Synthetic oligonucleotide
cacuccacgaucuucugcu

SEQ ID NO: 2633107 - RNA, 19 nt, Artificial Sequence
  Description of Artificial Sequence: Synthetic oligonucleotide
gacucugucuuuguggcgu

SEQ ID NO: 2633108 - RNA, 19 nt, Artificial Sequence
  Description of Artificial Sequence: Synthetic oligonucleotide
augcagcacaauugugcca

SEQ ID NO: 2633109 - RNA, 19 nt, Artificial Sequence
  Description of Artificial Sequence: Synthetic oligonucleotide
aucuucuuggacaguggca

SEQ ID NO: 2633110 - RNA, 19 nt, Artificial Sequence
  Description of Artificial Sequence: Synthetic oligonucleotide
gcgauugcagacccacagg

SEQ ID NO: 2633111 - RNA, 19 nt, Artificial Sequence
  Description of Artificial Sequence: Synthetic oligonucleotide
acagccaccgcggcaagca

SEQ ID NO: 2633112 - RNA, 19 nt, Artificial Sequence
  Description of Artificial Sequence: Synthetic oligonucleotide
ugaagacagcgggcggcgg

SEQ ID NO: 2633113 - RNA, 19 nt, Artificial Sequence
  Description of Artificial Sequence: Synthetic oligonucleotide
uuugugucuccucguccuu

SEQ ID NO: 2633114 - RNA, 19 nt, Artificial Sequence
  Description of Artificial Sequence: Synthetic oligonucleotide
caccgcggcaagcagagca

SEQ ID NO: 2633115 - RNA, 19 nt, Artificial Sequence
  Description of Artificial Sequence: Synthetic oligonucleotide
ugugucuccucguccuuuu

SEQ ID NO: 2633116 - RNA, 19 nt, Artificial Sequence
  Description of Artificial Sequence: Synthetic oligonucleotide
caaaguggaggucuucaua

SEQ ID NO: 2633117 - RNA, 19 nt, Artificial Sequence
  Description of Artificial Sequence: Synthetic oligonucleotide
agucucggcuaacacucaa

SEQ ID NO: 2633118 - RNA, 19 nt, Artificial Sequence
  Description of Artificial Sequence: Synthetic oligonucleotide
gagacaguuggcguggggu

SEQ ID NO: 2633119 - RNA, 19 nt, Artificial Sequence
  Description of Artificial Sequence: Synthetic oligonucleotide
ggugcagacucugucuuug

SEQ ID NO: 2633120 - RNA, 19 nt, Artificial Sequence
  Description of Artificial Sequence: Synthetic oligonucleotide
uuguuccguugacuggaaa

SEQ ID NO: 2633121 - RNA, 19 nt, Artificial Sequence
  Description of Artificial Sequence: Synthetic oligonucleotide
ccgaggaauguacagugac

SEQ ID NO: 2633122 - RNA, 19 nt, Artificial Sequence
  Description of Artificial Sequence: Synthetic oligonucleotide
gucgaaggugcagacucug

SEQ ID NO: 2633123 - RNA, 19 nt, Artificial Sequence
  Description of Artificial Sequence: Synthetic oligonucleotide
uuccguugacuggaaaaua

SEQ ID NO: 2633124 - RNA, 19 nt, Artificial Sequence
  Description of Artificial Sequence: Synthetic oligonucleotide
uuggcguggggucccuggu

SEQ ID NO: 2633125 - RNA, 19 nt, Artificial Sequence
  Description of Artificial Sequence: Synthetic oligonucleotide
gcagcaaggauuggcucgg

SEQ ID NO: 2633126 - RNA, 19 nt, Artificial Sequence
  Description of Artificial Sequence: Synthetic oligonucleotide
cugucuuucucuugaggua

SEQ ID NO: 2633127 - RNA, 19 nt, Artificial Sequence
  Description of Artificial Sequence: Synthetic oligonucleotide
guacagugacacaccauga

SEQ ID NO: 2633128 - RNA, 19 nt, Artificial Sequence
  Description of Artificial Sequence: Synthetic oligonucleotide
gcggucaacccagagcgcg

SEQ ID NO: 2633129 - RNA, 19 nt, Artificial Sequence
  Description of Artificial Sequence: Synthetic oligonucleotide
agcuugauguguacuucca

SEQ ID NO: 2633130 - RNA, 19 nt, Artificial Sequence
  Description of Artificial Sequence: Synthetic oligonucleotide
uggagccauugucgaaggu

SEQ ID NO: 2633131 - RNA, 19 nt, Artificial Sequence
  Description of Artificial Sequence: Synthetic oligonucleotide
uggugcuuucuuugaguuu

SEQ ID NO: 2633132 - RNA, 19 nt, Artificial Sequence
  Description of Artificial Sequence: Synthetic oligonucleotide
gcuugauguguacuuccac

SEQ ID NO: 2633133 - RNA, 19 nt, Artificial Sequence
  Description of Artificial Sequence: Synthetic oligonucleotide
caacccagagcgcgagcag

SEQ ID NO: 2633134 - RNA, 19 nt, Artificial Sequence
  Description of Artificial Sequence: Synthetic oligonucleotide
aggaggcugaucagcacca

SEQ ID NO: 2633135 - RNA, 19 nt, Artificial Sequence
  Description of Artificial Sequence: Synthetic oligonucleotide
auggcugaccgaggaaugu

SEQ ID NO: 2633136 - RNA, 19 nt, Artificial Sequence
  Description of Artificial Sequence: Synthetic oligonucleotide
cacagucucggcuaacacu

SEQ ID NO: 2633137 - RNA, 19 nt, Artificial Sequence
  Description of Artificial Sequence: Synthetic oligonucleotide
agcgggcggcggucaaccc

SEQ ID NO: 2633138 - RNA, 19 nt, Artificial Sequence
  Description of Artificial Sequence: Synthetic oligonucleotide
cgguuuguuccguugacug

SEQ ID NO: 2633139 - RNA, 19 nt, Artificial Sequence
  Description of Artificial Sequence: Synthetic oligonucleotide
guguaauugggcacagucu

SEQ ID NO: 2633140 - RNA, 19 nt, Artificial Sequence
  Description of Artificial Sequence: Synthetic oligonucleotide
uagcaaccggagucccuca

SEQ ID NO: 2633141 - RNA, 19 nt, Artificial Sequence
  Description of Artificial Sequence: Synthetic oligonucleotide
ccugguuuccacuccacga

SEQ ID NO: 2633142 - RNA, 19 nt, Artificial Sequence
  Description of Artificial Sequence: Synthetic oligonucleotide
cagcacaauugugccaaac

SEQ ID NO: 2633143 - RNA, 19 nt, Artificial Sequence
  Description of Artificial Sequence: Synthetic oligonucleotide
ucuaucccuccagcccugc

SEQ ID NO: 2633144 - RNA, 19 nt, Artificial Sequence
  Description of Artificial Sequence: Synthetic oligonucleotide
acucaacaguggggacucc

SEQ ID NO: 2633145 - RNA, 19 nt, Artificial Sequence
  Description of Artificial Sequence: Synthetic oligonucleotide
ggagacaguuggcgugggg

SEQ ID NO: 2633146 - RNA, 19 nt, Artificial Sequence
  Description of Artificial Sequence: Synthetic oligonucleotide
gcacagcgauugcagaccc

SEQ ID NO: 2633147 - RNA, 19 nt, Artificial Sequence
  Description of Artificial Sequence: Synthetic oligonucleotide
agcaaggauuggcucgguu

SEQ ID NO: 2633148 - RNA, 19 nt, Artificial Sequence
  Description of Artificial Sequence: Synthetic oligonucleotide
cuugagguagcaguguaau

SEQ ID NO: 2633149 - RNA, 19 nt, Artificial Sequence
  Description of Artificial Sequence: Synthetic oligonucleotide
cucuugagguagcagugua

SEQ ID NO: 2633150 - RNA, 19 nt, Artificial Sequence
  Description of Artificial Sequence: Synthetic oligonucleotide
acuccauggcaggaauagu

SEQ ID NO: 2633151 - RNA, 19 nt, Artificial Sequence
  Description of Artificial Sequence: Synthetic oligonucleotide
cuagccuuuaacagcugau

SEQ ID NO: 2633152 - RNA, 19 nt, Artificial Sequence
  Description of Artificial Sequence: Synthetic oligonucleotide
gucucggcuaacacucaac

SEQ ID NO: 2633153 - RNA, 19 nt, Artificial Sequence
  Description of Artificial Sequence: Synthetic oligonucleotide
guuccguugacuggaaaau

SEQ ID NO: 2633154 - RNA, 19 nt, Artificial Sequence
  Description of Artificial Sequence: Synthetic oligonucleotide
gccauugucgaaggugcag

SEQ ID NO: 2633155 - RNA, 19 nt, Artificial Sequence
  Description of Artificial Sequence: Synthetic oligonucleotide
gcggcggucaacccagagc

SEQ ID NO: 2633156 - RNA, 19 nt, Artificial Sequence
  Description of Artificial Sequence: Synthetic oligonucleotide
ggcucgguuuguuccguug

SEQ ID NO: 2633157 - RNA, 19 nt, Artificial Sequence
  Description of Artificial Sequence: Synthetic oligonucleotide
gcaaccggagucccucacc

SEQ ID NO: 2633158 - RNA, 19 nt, Artificial Sequence
  Description of Artificial Sequence: Synthetic oligonucleotide
gugcucuguaacagugaug

SEQ ID NO: 2633159 - RNA, 19 nt, Artificial Sequence
  Description of Artificial Sequence: Synthetic oligonucleotide
guggugcuuucuuugaguu

SEQ ID NO: 2633160 - RNA, 19 nt, Artificial Sequence
  Description of Artificial Sequence: Synthetic oligonucleotide
caauugugccaaacugucu

SEQ ID NO: 2633161 - RNA, 19 nt, Artificial Sequence
  Description of Artificial Sequence: Synthetic oligonucleotide
uggcugaccgaggaaugua

SEQ ID NO: 2633162 - RNA, 19 nt, Artificial Sequence
  Description of Artificial Sequence: Synthetic oligonucleotide
ggauuggcucgguuuguuc

SEQ ID NO: 2633163 - RNA, 19 nt, Artificial Sequence
  Description of Artificial Sequence: Synthetic oligonucleotide
uuggcucgguuuguuccgu

SEQ ID NO: 2633164 - RNA, 19 nt, Artificial Sequence
  Description of Artificial Sequence: Synthetic oligonucleotide
gccuuuaacagcugaucua

SEQ ID NO: 2633165 - RNA, 19 nt, Artificial Sequence
  Description of Artificial Sequence: Synthetic oligonucleotide
acagcgggcggcggucaac

SEQ ID NO: 2633166 - RNA, 19 nt, Artificial Sequence
  Description of Artificial Sequence: Synthetic oligonucleotide
caaagaagacagcgacaaa

SEQ ID NO: 2633167 - RNA, 19 nt, Artificial Sequence
  Description of Artificial Sequence: Synthetic oligonucleotide
cccgaaaagcuggauggag

SEQ ID NO: 2633168 - RNA, 19 nt, Artificial Sequence
  Description of Artificial Sequence: Synthetic oligonucleotide
cugguuuccacuccacgau

SEQ ID NO: 2633169 - RNA, 19 nt, Artificial Sequence
  Description of Artificial Sequence: Synthetic oligonucleotide
auguacagugacacaccau

SEQ ID NO: 2633170 - RNA, 19 nt, Artificial Sequence
  Description of Artificial Sequence: Synthetic oligonucleotide
cagcgggcggcggucaacc

SEQ ID NO: 2633171 - RNA, 19 nt, Artificial Sequence
  Description of Artificial Sequence: Synthetic oligonucleotide
gcucgguuuguuccguuga

SEQ ID NO: 2633172 - RNA, 19 nt, Artificial Sequence
  Description of Artificial Sequence: Synthetic oligonucleotide
caguggggacuccauggca

SEQ ID NO: 2633173 - RNA, 19 nt, Artificial Sequence
  Description of Artificial Sequence: Synthetic oligonucleotide
cgaucuucugcuccacccc

SEQ ID NO: 2633174 - RNA, 19 nt, Artificial Sequence
  Description of Artificial Sequence: Synthetic oligonucleotide
ggcauugauggcugaccga

SEQ ID NO: 2633175 - RNA, 19 nt, Artificial Sequence
  Description of Artificial Sequence: Synthetic oligonucleotide
ggugcucuguaacagugau

SEQ ID NO: 2633176 - RNA, 19 nt, Artificial Sequence
  Description of Artificial Sequence: Synthetic oligonucleotide
cagacccacaggaggcuga

SEQ ID NO: 2633177 - RNA, 19 nt, Artificial Sequence
  Description of Artificial Sequence: Synthetic oligonucleotide
aaagcuggauggagccauu

SEQ ID NO: 2633178 - RNA, 19 nt, Artificial Sequence
  Description of Artificial Sequence: Synthetic oligonucleotide
cuccucguccuuuuggaau

SEQ ID NO: 2633179 - RNA, 19 nt, Artificial Sequence
  Description of Artificial Sequence: Synthetic oligonucleotide
gcacagucucggcuaacac

SEQ ID NO: 2633180 - RNA, 19 nt, Artificial Sequence
  Description of Artificial Sequence: Synthetic oligonucleotide
cgauugcagacccacagga

SEQ ID NO: 2633181 - RNA, 19 nt, Artificial Sequence
  Description of Artificial Sequence: Synthetic oligonucleotide
ggcugaccgaggaauguac

SEQ ID NO: 2633182 - RNA, 19 nt, Artificial Sequence
  Description of Artificial Sequence: Synthetic oligonucleotide
ccccacacccgaaaagcug

SEQ ID NO: 2633183 - RNA, 19 nt, Artificial Sequence
  Description of Artificial Sequence: Synthetic oligonucleotide
gcuaacacucaacaucuuu

SEQ ID NO: 2633184 - RNA, 19 nt, Artificial Sequence
  Description of Artificial Sequence: Synthetic oligonucleotide
auagcggaucucagacaca

SEQ ID NO: 2633185 - RNA, 19 nt, Artificial Sequence
  Description of Artificial Sequence: Synthetic oligonucleotide
ggcguuugggagacaguug

SEQ ID NO: 2633186 - RNA, 19 nt, Artificial Sequence
  Description of Artificial Sequence: Synthetic oligonucleotide
ccacuccacgaucuucugc

SEQ ID NO: 2633187 - RNA, 19 nt, Artificial Sequence
  Description of Artificial Sequence: Synthetic oligonucleotide
acucugucuuuguggcguu

SEQ ID NO: 2633188 - RNA, 19 nt, Artificial Sequence
  Description of Artificial Sequence: Synthetic oligonucleotide
aucuaucccuccagcccug

SEQ ID NO: 2633189 - RNA, 19 nt, Artificial Sequence
  Description of Artificial Sequence: Synthetic oligonucleotide
gcaaggauuggcucgguuu

SEQ ID NO: 2633190 - RNA, 19 nt, Artificial Sequence
  Description of Artificial Sequence: Synthetic oligonucleotide
cuuugaguuugugucuccu

SEQ ID NO: 2633191 - RNA, 19 nt, Artificial Sequence
  Description of Artificial Sequence: Synthetic oligonucleotide
ugcuccaccccagcuugau

SEQ ID NO: 2633192 - RNA, 19 nt, Artificial Sequence
  Description of Artificial Sequence: Synthetic oligonucleotide
aggauuggcucgguuuguu

SEQ ID NO: 2633193 - RNA, 19 nt, Artificial Sequence
  Description of Artificial Sequence: Synthetic oligonucleotide
ccacugacagcagaauauc

SEQ ID NO: 2633194 - RNA, 19 nt, Artificial Sequence
  Description of Artificial Sequence: Synthetic oligonucleotide
ccauggcaggaauagucca

SEQ ID NO: 2633195 - RNA, 19 nt, Artificial Sequence
  Description of Artificial Sequence: Synthetic oligonucleotide
uggcguggggucccugguu

SEQ ID NO: 2633196 - RNA, 19 nt, Artificial Sequence
  Description of Artificial Sequence: Synthetic oligonucleotide
gcggcaagcagagcaaaga

SEQ ID NO: 2633197 - RNA, 19 nt, Artificial Sequence
  Description of Artificial Sequence: Synthetic oligonucleotide
ugcucccugggugcucugu

SEQ ID NO: 2633198 - RNA, 19 nt, Artificial Sequence
  Description of Artificial Sequence: Synthetic oligonucleotide
agccauugucgaaggugca

SEQ ID NO: 2633199 - RNA, 19 nt, Artificial Sequence
  Description of Artificial Sequence: Synthetic oligonucleotide
cagccaccgcggcaagcag

SEQ ID NO: 2633200 - RNA, 19 nt, Artificial Sequence
  Description of Artificial Sequence: Synthetic oligonucleotide
cucggcuaacacucaacau

SEQ ID NO: 2633201 - RNA, 19 nt, Artificial Sequence
  Description of Artificial Sequence: Synthetic oligonucleotide
ccaaacugucugcucccug

SEQ ID NO: 2633202 - RNA, 19 nt, Artificial Sequence
  Description of Artificial Sequence: Synthetic oligonucleotide
ccaugacucugaagacagc

SEQ ID NO: 2633203 - RNA, 19 nt, Artificial Sequence
  Description of Artificial Sequence: Synthetic oligonucleotide
cacagccaccgcggcaagc

SEQ ID NO: 2633204 - RNA, 19 nt, Artificial Sequence
  Description of Artificial Sequence: Synthetic oligonucleotide
cguuugggagacaguuggc

SEQ ID NO: 2633205 - RNA, 19 nt, Artificial Sequence
  Description of Artificial Sequence: Synthetic oligonucleotide
caccccagcuugaugugua

SEQ ID NO: 2633206 - RNA, 19 nt, Artificial Sequence
  Description of Artificial Sequence: Synthetic oligonucleotide
cgaggaauguacagugaca

SEQ ID NO: 2633207 - RNA, 19 nt, Artificial Sequence
  Description of Artificial Sequence: Synthetic oligonucleotide
gguuuccacuccacgaucu

SEQ ID NO: 2633208 - RNA, 19 nt, Artificial Sequence
  Description of Artificial Sequence: Synthetic oligonucleotide
agacccacaggaggcugau

SEQ ID NO: 2633209 - RNA, 19 nt, Artificial Sequence
  Description of Artificial Sequence: Synthetic oligonucleotide
agacagcgacaaaguggag

SEQ ID NO: 2633210 - RNA, 19 nt, Artificial Sequence
  Description of Artificial Sequence: Synthetic oligonucleotide
ccauugucgaaggugcaga

SEQ ID NO: 2633211 - RNA, 19 nt, Artificial Sequence
  Description of Artificial Sequence: Synthetic oligonucleotide
gcugcagcaaggauuggcu

SEQ ID NO: 2633212 - RNA, 19 nt, Artificial Sequence
  Description of Artificial Sequence: Synthetic oligonucleotide
cagcgauugcagacccaca

SEQ ID NO: 2633213 - RNA, 19 nt, Artificial Sequence
  Description of Artificial Sequence: Synthetic oligonucleotide
cacagcgauugcagaccca

SEQ ID NO: 2633214 - RNA, 19 nt, Artificial Sequence
  Description of Artificial Sequence: Synthetic oligonucleotide
cagucucggcuaacacuca

SEQ ID NO: 2633215 - RNA, 19 nt, Artificial Sequence
  Description of Artificial Sequence: Synthetic oligonucleotide
ggcggcggucaacccagag

SEQ ID NO: 2633216 - RNA, 19 nt, Artificial Sequence
  Description of Artificial Sequence: Synthetic oligonucleotide
agcggaucucagacacaug

SEQ ID NO: 2633217 - RNA, 19 nt, Artificial Sequence
  Description of Artificial Sequence: Synthetic oligonucleotide
gcugaccgaggaauguaca

SEQ ID NO: 2633218 - RNA, 19 nt, Artificial Sequence
  Description of Artificial Sequence: Synthetic oligonucleotide
accgcggcaagcagagcaa

SEQ ID NO: 2633219 - RNA, 19 nt, Artificial Sequence
  Description of Artificial Sequence: Synthetic oligonucleotide
uccagcccugcugcagcaa

SEQ ID NO: 2633220 - RNA, 19 nt, Artificial Sequence
  Description of Artificial Sequence: Synthetic oligonucleotide
agacagcgggcggcgguca

SEQ ID NO: 2633221 - RNA, 19 nt, Artificial Sequence
  Description of Artificial Sequence: Synthetic oligonucleotide
uggcucgguuuguuccguu

SEQ ID NO: 2633222 - RNA, 19 nt, Artificial Sequence
  Description of Artificial Sequence: Synthetic oligonucleotide
cuguaacagugaugaugua

SEQ ID NO: 2633223 - RNA, 19 nt, Artificial Sequence
  Description of Artificial Sequence: Synthetic oligonucleotide
guuuccacuccacgaucuu

SEQ ID NO: 2633224 - RNA, 19 nt, Artificial Sequence
  Description of Artificial Sequence: Synthetic oligonucleotide
cagcgacaaaguggagguc

SEQ ID NO: 2633225 - RNA, 19 nt, Artificial Sequence
  Description of Artificial Sequence: Synthetic oligonucleotide
aguuggcguggggucccug

SEQ ID NO: 2633226 - RNA, 19 nt, Artificial Sequence
  Description of Artificial Sequence: Synthetic oligonucleotide
cgggcggcggucaacccag

SEQ ID NO: 2633227 - RNA, 19 nt, Artificial Sequence
  Description of Artificial Sequence: Synthetic oligonucleotide
cguccuuuuggaauuuaua

SEQ ID NO: 2633228 - RNA, 19 nt, Artificial Sequence
  Description of Artificial Sequence: Synthetic oligonucleotide
caguggcauugauggcuga

SEQ ID NO: 2633229 - RNA, 19 nt, Artificial Sequence
  Description of Artificial Sequence: Synthetic oligonucleotide
gacagcgggcggcggucaa

SEQ ID NO: 2633230 - RNA, 19 nt, Artificial Sequence
  Description of Artificial Sequence: Synthetic oligonucleotide
guggggucccugguuucca

SEQ ID NO: 2633231 - RNA, 19 nt, Artificial Sequence
  Description of Artificial Sequence: Synthetic oligonucleotide
cgcggcaagcagagcaaag

SEQ ID NO: 2633232 - RNA, 19 nt, Artificial Sequence
  Description of Artificial Sequence: Synthetic oligonucleotide
gggugcucuguaacaguga

SEQ ID NO: 2633233 - RNA, 19 nt, Artificial Sequence
  Description of Artificial Sequence: Synthetic oligonucleotide
cccugggugcucuguaaca

SEQ ID NO: 2633234 - RNA, 19 nt, Artificial Sequence
  Description of Artificial Sequence: Synthetic oligonucleotide
gacccacaggaggcugauc

SEQ ID NO: 2633235 - RNA, 19 nt, Artificial Sequence
  Description of Artificial Sequence: Synthetic oligonucleotide
gggacuccauggcaggaau

SEQ ID NO: 2633236 - RNA, 19 nt, Artificial Sequence
  Description of Artificial Sequence: Synthetic oligonucleotide
gcgggcggcggucaaccca

SEQ ID NO: 2633237 - RNA, 19 nt, Artificial Sequence
  Description of Artificial Sequence: Synthetic oligonucleotide
cugcuccaccccagcuuga

SEQ ID NO: 2633238 - RNA, 19 nt, Artificial Sequence
  Description of Artificial Sequence: Synthetic oligonucleotide
cucguccuuuuggaauuua

SEQ ID NO: 2633239 - RNA, 19 nt, Artificial Sequence
  Description of Artificial Sequence: Synthetic oligonucleotide
ggggacuccauggcaggaa

SEQ ID NO: 2633240 - RNA, 19 nt, Artificial Sequence
  Description of Artificial Sequence: Synthetic oligonucleotide
cguggggucccugguuucc

SEQ ID NO: 2633241 - RNA, 19 nt, Artificial Sequence
  Description of Artificial Sequence: Synthetic oligonucleotide
uuguggcguuugggagaca

SEQ ID NO: 2633242 - RNA, 19 nt, Artificial Sequence
  Description of Artificial Sequence: Synthetic oligonucleotide
cuaucccuccagcccugcu

SEQ ID NO: 2633243 - RNA, 19 nt, Artificial Sequence
  Description of Artificial Sequence: Synthetic oligonucleotide
ggcguggggucccugguuu

SEQ ID NO: 2633244 - RNA, 19 nt, Artificial Sequence
  Description of Artificial Sequence: Synthetic oligonucleotide
ggacuccauggcaggaaua

SEQ ID NO: 2633245 - RNA, 19 nt, Artificial Sequence
  Description of Artificial Sequence: Synthetic oligonucleotide
ccacacccgaaaagcugga

SEQ ID NO: 2633246 - RNA, 19 nt, Artificial Sequence
  Description of Artificial Sequence: Synthetic oligonucleotide
gcguggggucccugguuuc

SEQ ID NO: 2633247 - RNA, 19 nt, Artificial Sequence
  Description of Artificial Sequence: Synthetic oligonucleotide
ccacgaucuucugcuccac

SEQ ID NO: 2633248 - RNA, 19 nt, Artificial Sequence
  Description of Artificial Sequence: Synthetic oligonucleotide
ggggucccugguuuccacu

SEQ ID NO: 2633249 - RNA, 19 nt, Artificial Sequence
  Description of Artificial Sequence: Synthetic oligonucleotide
gcagcacaauugugccaaa

SEQ ID NO: 2633250 - RNA, 19 nt, Artificial Sequence
  Description of Artificial Sequence: Synthetic oligonucleotide
guggcguuugggagacagu

SEQ ID NO: 2633251 - RNA, 19 nt, Artificial Sequence
  Description of Artificial Sequence: Synthetic oligonucleotide
caguguaauugggcacagu

SEQ ID NO: 2633252 - RNA, 19 nt, Artificial Sequence
  Description of Artificial Sequence: Synthetic oligonucleotide
cgacaaaguggaggucuuc

SEQ ID NO: 2633253 - RNA, 19 nt, Artificial Sequence
  Description of Artificial Sequence: Synthetic oligonucleotide
cacacccgaaaagcuggau

SEQ ID NO: 2633254 - RNA, 19 nt, Artificial Sequence
  Description of Artificial Sequence: Synthetic oligonucleotide
gggcacagucucggcuaac

SEQ ID NO: 2633255 - RNA, 19 nt, Artificial Sequence
  Description of Artificial Sequence: Synthetic oligonucleotide
ccucaguggugcuuucuuu

SEQ ID NO: 2633256 - RNA, 19 nt, Artificial Sequence
  Description of Artificial Sequence: Synthetic oligonucleotide
ggaggucuucauagcggau

SEQ ID NO: 2633257 - RNA, 19 nt, Artificial Sequence
  Description of Artificial Sequence: Synthetic oligonucleotide
cagacacaugcagcacaau

SEQ ID NO: 2633258 - RNA, 19 nt, Artificial Sequence
  Description of Artificial Sequence: Synthetic oligonucleotide
gcgacaaaguggaggucuu

SEQ ID NO: 2633259 - RNA, 19 nt, Artificial Sequence
  Description of Artificial Sequence: Synthetic oligonucleotide
cucugucuuuguggcguuu

SEQ ID NO: 2633260 - RNA, 19 nt, Artificial Sequence
  Description of Artificial Sequence: Synthetic oligonucleotide
ggcuaacacucaacaucuu

SEQ ID NO: 2633261 - RNA, 19 nt, Artificial Sequence
  Description of Artificial Sequence: Synthetic oligonucleotide
cagcaaggauuggcucggu

SEQ ID NO: 2633262 - RNA, 19 nt, Artificial Sequence
  Description of Artificial Sequence: Synthetic oligonucleotide
ccaccgcggcaagcagagc

SEQ ID NO: 2633263 - RNA, 19 nt, Artificial Sequence
  Description of Artificial Sequence: Synthetic oligonucleotide
ccccagcuugauguguacu

SEQ ID NO: 2633264 - RNA, 19 nt, Artificial Sequence
  Description of Artificial Sequence: Synthetic oligonucleotide
ccaccccagcuugaugugu

SEQ ID NO: 2633265 - RNA, 19 nt, Artificial Sequence
  Description of Artificial Sequence: Synthetic oligonucleotide
ccgcggcaagcagagcaaa

SEQ ID NO: 2633266 - RNA, 19 nt, Artificial Sequence
  Description of Artificial Sequence: Synthetic oligonucleotide
caguuggcguggggucccu

SEQ ID NO: 2633267 - RNA, 19 nt, Artificial Sequence
  Description of Artificial Sequence: Synthetic oligonucleotide
gggcggcggucaacccaga

SEQ ID NO: 2633268 - RNA, 19 nt, Artificial Sequence
  Description of Artificial Sequence: Synthetic oligonucleotide
ccucguccuuuuggaauuu

SEQ ID NO: 2633269 - RNA, 19 nt, Artificial Sequence
  Description of Artificial Sequence: Synthetic oligonucleotide
aaugugauggacuucgagg

SEQ ID NO: 2633270 - RNA, 19 nt, Artificial Sequence
  Description of Artificial Sequence: Synthetic oligonucleotide
auauguuugacguuacucc

SEQ ID NO: 2633271 - RNA, 19 nt, Artificial Sequence
  Description of Artificial Sequence: Synthetic oligonucleotide
guucaaacaguuuucuucg

SEQ ID NO: 2633272 - RNA, 19 nt, Artificial Sequence
  Description of Artificial Sequence: Synthetic oligonucleotide
auaucugagugauacuggc

SEQ ID NO: 2633273 - RNA, 19 nt, Artificial Sequence
  Description of Artificial Sequence: Synthetic oligonucleotide
  modified_base (14)..(14): a, c, u, g, unknown or other
ugcgcaaugaacunugggu

SEQ ID NO: 2633274 - RNA, 19 nt, Artificial Sequence
  Description of Artificial Sequence: Synthetic oligonucleotide
aucugagugauacuggcgg

SEQ ID NO: 2633275 - RNA, 19 nt, Artificial Sequence
  Description of Artificial Sequence: Synthetic oligonucleotide
aagacaccccaugagauac

SEQ ID NO: 2633276 - RNA, 19 nt, Artificial Sequence
  Description of Artificial Sequence: Synthetic oligonucleotide
aagguguuccaauagcaug

SEQ ID NO: 2633277 - RNA, 19 nt, Artificial Sequence
  Description of Artificial Sequence: Synthetic oligonucleotide
uguccaucucugcagauag

SEQ ID NO: 2633278 - RNA, 19 nt, Artificial Sequence
  Description of Artificial Sequence: Synthetic oligonucleotide
uuugacguuacucccguug

SEQ ID NO: 2633279 - RNA, 19 nt, Artificial Sequence
  Description of Artificial Sequence: Synthetic oligonucleotide
uauguuugacguuacuccc

SEQ ID NO: 2633280 - RNA, 19 nt, Artificial Sequence
  Description of Artificial Sequence: Synthetic oligonucleotide
aaaucguguccaucucugc

SEQ ID NO: 2633281 - RNA, 19 nt, Artificial Sequence
  Description of Artificial Sequence: Synthetic oligonucleotide
ugaugguucaaacaguuuu

SEQ ID NO: 2633282 - RNA, 19 nt, Artificial Sequence
  Description of Artificial Sequence: Synthetic oligonucleotide
  modified_base (2)..(2): a, c, u, g, unknown or other
unuggguccacuucaauuc

SEQ ID NO: 2633283 - RNA, 19 nt, Artificial Sequence
  Description of Artificial Sequence: Synthetic oligonucleotide
uacccagagugccagacgg

SEQ ID NO: 2633284 - RNA, 19 nt, Artificial Sequence
  Description of Artificial Sequence: Synthetic oligonucleotide
ugucucuuggcacaggaga

SEQ ID NO: 2633285 - RNA, 19 nt, Artificial Sequence
  Description of Artificial Sequence: Synthetic oligonucleotide
  modified_base (7)..(7): a, c, u, g, unknown or other
ugaacunuggguccacuuc

SEQ ID NO: 2633286 - RNA, 19 nt, Artificial Sequence
  Description of Artificial Sequence: Synthetic oligonucleotide
agaagguaccgcuaccaac

SEQ ID NO: 2633287 - RNA, 19 nt, Artificial Sequence
  Description of Artificial Sequence: Synthetic oligonucleotide
gauagcaggugauugugug

SEQ ID NO: 2633288 - RNA, 19 nt, Artificial Sequence
  Description of Artificial Sequence: Synthetic oligonucleotide
uaucugagugauacuggcg

SEQ ID NO: 2633289 - RNA, 19 nt, Artificial Sequence
  Description of Artificial Sequence: Synthetic oligonucleotide
aagaggaagacaccccaug

SEQ ID NO: 2633290 - RNA, 19 nt, Artificial Sequence
  Description of Artificial Sequence: Synthetic oligonucleotide
aaucguguccaucucugca

SEQ ID NO: 2633291 - RNA, 19 nt, Artificial Sequence
  Description of Artificial Sequence: Synthetic oligonucleotide
uguguguccagaagguacc

SEQ ID NO: 2633292 - RNA, 19 nt, Artificial Sequence
  Description of Artificial Sequence: Synthetic oligonucleotide
uuguguguccagaagguac

SEQ ID NO: 2633293 - RNA, 19 nt, Artificial Sequence
  Description of Artificial Sequence: Synthetic oligonucleotide
gauauguuugacguuacuc

SEQ ID NO: 2633294 - RNA, 19 nt, Artificial Sequence
  Description of Artificial Sequence: Synthetic oligonucleotide
auggacuucgaggagcugc

SEQ ID NO: 2633295 - RNA, 19 nt, Artificial Sequence
  Description of Artificial Sequence: Synthetic oligonucleotide
accagauacccagagugcc

SEQ ID NO: 2633296 - RNA, 19 nt, Artificial Sequence
  Description of Artificial Sequence: Synthetic oligonucleotide
caccccaugagauacugcc

SEQ ID NO: 2633297 - RNA, 19 nt, Artificial Sequence
  Description of Artificial Sequence: Synthetic oligonucleotide
gaaugugauggacuucgag

SEQ ID NO: 2633298 - RNA, 19 nt, Artificial Sequence
  Description of Artificial Sequence: Synthetic oligonucleotide
cugcaugauauguuugacg

SEQ ID NO: 2633299 - RNA, 19 nt, Artificial Sequence
  Description of Artificial Sequence: Synthetic oligonucleotide
cauaucaaacaucagcaca

SEQ ID NO: 2633300 - RNA, 19 nt, Artificial Sequence
  Description of Artificial Sequence: Synthetic oligonucleotide
uugacguuacucccguugc

SEQ ID NO: 2633301 - RNA, 19 nt, Artificial Sequence
  Description of Artificial Sequence: Synthetic oligonucleotide
gguucaaacaguuuucuuc

SEQ ID NO: 2633302 - RNA, 19 nt, Artificial Sequence
  Description of Artificial Sequence: Synthetic oligonucleotide
acugacacuggcaauaucu

SEQ ID NO: 2633303 - RNA, 19 nt, Artificial Sequence
  Description of Artificial Sequence: Synthetic oligonucleotide
ucugagugauacuggcggg

SEQ ID NO: 2633304 - RNA, 19 nt, Artificial Sequence
  Description of Artificial Sequence: Synthetic oligonucleotide
auagcauggcuguuccuuc

SEQ ID NO: 2633305 - RNA, 19 nt, Artificial Sequence
  Description of Artificial Sequence: Synthetic oligonucleotide
cagacagacucgauggugc

SEQ ID NO: 2633306 - RNA, 19 nt, Artificial Sequence
  Description of Artificial Sequence: Synthetic oligonucleotide
uucaaacaguuuucuucgg

SEQ ID NO: 2633307 - RNA, 19 nt, Artificial Sequence
  Description of Artificial Sequence: Synthetic oligonucleotide
aagacuguccacaaaucgu

SEQ ID NO: 2633308 - RNA, 19 nt, Artificial Sequence
  Description of Artificial Sequence: Synthetic oligonucleotide
ugugugcucacggggaugg

SEQ ID NO: 2633309 - RNA, 19 nt, Artificial Sequence
  Description of Artificial Sequence: Synthetic oligonucleotide
ugcgauguccaguugugug

SEQ ID NO: 2633310 - RNA, 19 nt, Artificial Sequence
  Description of Artificial Sequence: Synthetic oligonucleotide
aacggccacugacacuggc

SEQ ID NO: 2633311 - RNA, 19 nt, Artificial Sequence
  Description of Artificial Sequence: Synthetic oligonucleotide
acuguccacaaaucguguc

SEQ ID NO: 2633312 - RNA, 19 nt, Artificial Sequence
  Description of Artificial Sequence: Synthetic oligonucleotide
ggcaauaucugagugauac

SEQ ID NO: 2633313 - RNA, 19 nt, Artificial Sequence
  Description of Artificial Sequence: Synthetic oligonucleotide
  modified_base (6)..(6): a, c, u, g, unknown or other
gaacunuggguccacuuca

SEQ ID NO: 2633314 - RNA, 19 nt, Artificial Sequence
  Description of Artificial Sequence: Synthetic oligonucleotide
aucguguccaucucugcag

SEQ ID NO: 2633315 - RNA, 19 nt, Artificial Sequence
  Description of Artificial Sequence: Synthetic oligonucleotide
caaaucguguccaucucug

SEQ ID NO: 2633316 - RNA, 19 nt, Artificial Sequence
  Description of Artificial Sequence: Synthetic oligonucleotide
uguuugacguuacucccgu

SEQ ID NO: 2633317 - RNA, 19 nt, Artificial Sequence
  Description of Artificial Sequence: Synthetic oligonucleotide
ugcaguugaugguucaaac

SEQ ID NO: 2633318 - RNA, 19 nt, Artificial Sequence
  Description of Artificial Sequence: Synthetic oligonucleotide
cuguccacaaaucgugucc

SEQ ID NO: 2633319 - RNA, 19 nt, Artificial Sequence
  Description of Artificial Sequence: Synthetic oligonucleotide
ugacguuacucccguugcg

SEQ ID NO: 2633320 - RNA, 19 nt, Artificial Sequence
  Description of Artificial Sequence: Synthetic oligonucleotide
acguuacucccguugcggc

SEQ ID NO: 2633321 - RNA, 19 nt, Artificial Sequence
  Description of Artificial Sequence: Synthetic oligonucleotide
ucuaggaaggaggugcaug

SEQ ID NO: 2633322 - RNA, 19 nt, Artificial Sequence
  Description of Artificial Sequence: Synthetic oligonucleotide
acaaaucguguccaucucu

SEQ ID NO: 2633323 - RNA, 19 nt, Artificial Sequence
  Description of Artificial Sequence: Synthetic oligonucleotide
ucaagucaccagcauuccc

SEQ ID NO: 2633324 - RNA, 19 nt, Artificial Sequence
  Description of Artificial Sequence: Synthetic oligonucleotide
uaccagauacccagagugc

SEQ ID NO: 2633325 - RNA, 19 nt, Artificial Sequence
  Description of Artificial Sequence: Synthetic oligonucleotide
uugcggcccaucaugaaga

SEQ ID NO: 2633326 - RNA, 19 nt, Artificial Sequence
  Description of Artificial Sequence: Synthetic oligonucleotide
gacguuacucccguugcgg

SEQ ID NO: 2633327 - RNA, 19 nt, Artificial Sequence
  Description of Artificial Sequence: Synthetic oligonucleotide
gacuucgaggagcugcucc

SEQ ID NO: 2633328 - RNA, 19 nt, Artificial Sequence
  Description of Artificial Sequence: Synthetic oligonucleotide
guugcggcccaucaugaag

SEQ ID NO: 2633329 - RNA, 19 nt, Artificial Sequence
  Description of Artificial Sequence: Synthetic oligonucleotide
gaugguucaaacaguuuuc

SEQ ID NO: 2633330 - RNA, 19 nt, Artificial Sequence
  Description of Artificial Sequence: Synthetic oligonucleotide
caagucaccagcauuccca

SEQ ID NO: 2633331 - RNA, 19 nt, Artificial Sequence
  Description of Artificial Sequence: Synthetic oligonucleotide
gaagaggugaugcugggcu

SEQ ID NO: 2633332 - RNA, 19 nt, Artificial Sequence
  Description of Artificial Sequence: Synthetic oligonucleotide
uuuggucccgauaccagau

SEQ ID NO: 2633333 - RNA, 19 nt, Artificial Sequence
  Description of Artificial Sequence: Synthetic oligonucleotide
augagauacugccuugcca

SEQ ID NO: 2633334 - RNA, 19 nt, Artificial Sequence
  Description of Artificial Sequence: Synthetic oligonucleotide
agaggugaugcugggcugc

SEQ ID NO: 2633335 - RNA, 19 nt, Artificial Sequence
  Description of Artificial Sequence: Synthetic oligonucleotide
augaagaggugaugcuggg

SEQ ID NO: 2633336 - RNA, 19 nt, Artificial Sequence
  Description of Artificial Sequence: Synthetic oligonucleotide
cacaagaggaagacacccc

SEQ ID NO: 2633337 - RNA, 19 nt, Artificial Sequence
  Description of Artificial Sequence: Synthetic oligonucleotide
uguccucugcaugauaugu

SEQ ID NO: 2633338 - RNA, 19 nt, Artificial Sequence
  Description of Artificial Sequence: Synthetic oligonucleotide
ucugcagauagcaggugau

SEQ ID NO: 2633339 - RNA, 19 nt, Artificial Sequence
  Description of Artificial Sequence: Synthetic oligonucleotide
ugauauguuugacguuacu

SEQ ID NO: 2633340 - RNA, 19 nt, Artificial Sequence
  Description of Artificial Sequence: Synthetic oligonucleotide
caggaaaguggaucugugc

SEQ ID NO: 2633341 - RNA, 19 nt, Artificial Sequence
  Description of Artificial Sequence: Synthetic oligonucleotide
caguugugugcucacgggg

SEQ ID NO: 2633342 - RNA, 19 nt, Artificial Sequence
  Description of Artificial Sequence: Synthetic oligonucleotide
uggucccgauaccagauac

SEQ ID NO: 2633343 - RNA, 19 nt, Artificial Sequence
  Description of Artificial Sequence: Synthetic oligonucleotide
agcaggugauugugugucc

SEQ ID NO: 2633344 - RNA, 19 nt, Artificial Sequence
  Description of Artificial Sequence: Synthetic oligonucleotide
aucaaacaucagcacaaga

SEQ ID NO: 2633345 - RNA, 19 nt, Artificial Sequence
  Description of Artificial Sequence: Synthetic oligonucleotide
uggaucugugccccugucc

SEQ ID NO: 2633346 - RNA, 19 nt, Artificial Sequence
  Description of Artificial Sequence: Synthetic oligonucleotide
caugagauacugccuugcc

SEQ ID NO: 2633347 - RNA, 19 nt, Artificial Sequence
  Description of Artificial Sequence: Synthetic oligonucleotide
auacccagagugccagacg

SEQ ID NO: 2633348 - RNA, 19 nt, Artificial Sequence
  Description of Artificial Sequence: Synthetic oligonucleotide
auacuggcggggcagccuc

SEQ ID NO: 2633349 - RNA, 19 nt, Artificial Sequence
  Description of Artificial Sequence: Synthetic oligonucleotide
agugauacuggcggggcag

SEQ ID NO: 2633350 - RNA, 19 nt, Artificial Sequence
  Description of Artificial Sequence: Synthetic oligonucleotide
ugccaagcuucccgcaagg

SEQ ID NO: 2633351 - RNA, 19 nt, Artificial Sequence
  Description of Artificial Sequence: Synthetic oligonucleotide
agacuguccacaaaucgug

SEQ ID NO: 2633352 - RNA, 19 nt, Artificial Sequence
  Description of Artificial Sequence: Synthetic oligonucleotide
uucuguggauugcuggggu

SEQ ID NO: 2633353 - RNA, 19 nt, Artificial Sequence
  Description of Artificial Sequence: Synthetic oligonucleotide
caugauauguuugacguua

SEQ ID NO: 2633354 - RNA, 19 nt, Artificial Sequence
  Description of Artificial Sequence: Synthetic oligonucleotide
cccgauaccagauacccag

SEQ ID NO: 2633355 - RNA, 19 nt, Artificial Sequence
  Description of Artificial Sequence: Synthetic oligonucleotide
ugcuccaucagcugcgcaa

SEQ ID NO: 2633356 - RNA, 19 nt, Artificial Sequence
  Description of Artificial Sequence: Synthetic oligonucleotide
gauuucuucuguggauugc

SEQ ID NO: 2633357 - RNA, 19 nt, Artificial Sequence
  Description of Artificial Sequence: Synthetic oligonucleotide
uguccacaaaucgugucca

SEQ ID NO: 2633358 - RNA, 19 nt, Artificial Sequence
  Description of Artificial Sequence: Synthetic oligonucleotide
uccaauagcauggcuguuc

SEQ ID NO: 2633359 - RNA, 19 nt, Artificial Sequence
  Description of Artificial Sequence: Synthetic oligonucleotide
gguaccgcuaccaacggcc

SEQ ID NO: 2633360 - RNA, 19 nt, Artificial Sequence
  Description of Artificial Sequence: Synthetic oligonucleotide
gucccgauaccagauaccc

SEQ ID NO: 2633361 - RNA, 19 nt, Artificial Sequence
  Description of Artificial Sequence: Synthetic oligonucleotide
uggacuucgaggagcugcu

SEQ ID NO: 2633362 - RNA, 19 nt, Artificial Sequence
  Description of Artificial Sequence: Synthetic oligonucleotide
auguuugacguuacucccg

SEQ ID NO: 2633363 - RNA, 19 nt, Artificial Sequence
  Description of Artificial Sequence: Synthetic oligonucleotide
uuacuuagcucugucuguc

SEQ ID NO: 2633364 - RNA, 19 nt, Artificial Sequence
  Description of Artificial Sequence: Synthetic oligonucleotide
agguaccgcuaccaacggc

SEQ ID NO: 2633365 - RNA, 19 nt, Artificial Sequence
  Description of Artificial Sequence: Synthetic oligonucleotide
uccucugcaugauauguuu

SEQ ID NO: 2633366 - RNA, 19 nt, Artificial Sequence
  Description of Artificial Sequence: Synthetic oligonucleotide
  modified_base (9)..(9): a, c, u, g, unknown or other
aaugaacunuggguccacu

SEQ ID NO: 2633367 - RNA, 19 nt, Artificial Sequence
  Description of Artificial Sequence: Synthetic oligonucleotide
caggcagacagacucgaug

SEQ ID NO: 2633368 - RNA, 19 nt, Artificial Sequence
  Description of Artificial Sequence: Synthetic oligonucleotide
cagagugccagacgggcag

SEQ ID NO: 2633369 - RNA, 19 nt, Artificial Sequence
  Description of Artificial Sequence: Synthetic oligonucleotide
  modified_base (15)..(15): a, c, u, g, unknown or other
cugcgcaaugaacunuggg

SEQ ID NO: 2633370 - RNA, 19 nt, Artificial Sequence
  Description of Artificial Sequence: Synthetic oligonucleotide
ugagugauacuggcggggc

SEQ ID NO: 2633371 - RNA, 19 nt, Artificial Sequence
  Description of Artificial Sequence: Synthetic oligonucleotide
uaccaacggccacugacac

SEQ ID NO: 2633372 - RNA, 19 nt, Artificial Sequence
  Description of Artificial Sequence: Synthetic oligonucleotide
uucaagucaccagcauucc

SEQ ID NO: 2633373 - RNA, 19 nt, Artificial Sequence
  Description of Artificial Sequence: Synthetic oligonucleotide
augauauguuugacguuac

SEQ ID NO: 2633374 - RNA, 19 nt, Artificial Sequence
  Description of Artificial Sequence: Synthetic oligonucleotide
acacuggcaauaucugagu

SEQ ID NO: 2633375 - RNA, 19 nt, Artificial Sequence
  Description of Artificial Sequence: Synthetic oligonucleotide
cugagugauacuggcgggg

SEQ ID NO: 2633376 - RNA, 19 nt, Artificial Sequence
  Description of Artificial Sequence: Synthetic oligonucleotide
auucccagaaugugaugga

SEQ ID NO: 2633377 - RNA, 19 nt, Artificial Sequence
  Description of Artificial Sequence: Synthetic oligonucleotide
ucguguccaucucugcaga

SEQ ID NO: 2633378 - RNA, 19 nt, Artificial Sequence
  Description of Artificial Sequence: Synthetic oligonucleotide
agacgguggauuucuucug

SEQ ID NO: 2633379 - RNA, 19 nt, Artificial Sequence
  Description of Artificial Sequence: Synthetic oligonucleotide
gcuaccaacggccacugac

SEQ ID NO: 2633380 - RNA, 19 nt, Artificial Sequence
  Description of Artificial Sequence: Synthetic oligonucleotide
augguucaaacaguuuucu

SEQ ID NO: 2633381 - RNA, 19 nt, Artificial Sequence
  Description of Artificial Sequence: Synthetic oligonucleotide
uccgccuucuaggaaggag

SEQ ID NO: 2633382 - RNA, 19 nt, Artificial Sequence
  Description of Artificial Sequence: Synthetic oligonucleotide
cagauagcaggugauugug

SEQ ID NO: 2633383 - RNA, 19 nt, Artificial Sequence
  Description of Artificial Sequence: Synthetic oligonucleotide
uggauuucuucuguggauu

SEQ ID NO: 2633384 - RNA, 19 nt, Artificial Sequence
  Description of Artificial Sequence: Synthetic oligonucleotide
caagcuucccgcaaggugu

SEQ ID NO: 2633385 - RNA, 19 nt, Artificial Sequence
  Description of Artificial Sequence: Synthetic oligonucleotide
acagacucgauggugcccu

SEQ ID NO: 2633386 - RNA, 19 nt, Artificial Sequence
  Description of Artificial Sequence: Synthetic oligonucleotide
augccaagcuucccgcaag

SEQ ID NO: 2633387 - RNA, 19 nt, Artificial Sequence
  Description of Artificial Sequence: Synthetic oligonucleotide
guuacucccguugcggccc

SEQ ID NO: 2633388 - RNA, 19 nt, Artificial Sequence
  Description of Artificial Sequence: Synthetic oligonucleotide
cuaccaacggccacugaca

SEQ ID NO: 2633389 - RNA, 19 nt, Artificial Sequence
  Description of Artificial Sequence: Synthetic oligonucleotide
aguugaugguucaaacagu

SEQ ID NO: 2633390 - RNA, 19 nt, Artificial Sequence
  Description of Artificial Sequence: Synthetic oligonucleotide
agaccuuggagggacccag

SEQ ID NO: 2633391 - RNA, 19 nt, Artificial Sequence
  Description of Artificial Sequence: Synthetic oligonucleotide
uugaugguucaaacaguuu

SEQ ID NO: 2633392 - RNA, 19 nt, Artificial Sequence
  Description of Artificial Sequence: Synthetic oligonucleotide
ugccagacgggcaggugca

SEQ ID NO: 2633393 - RNA, 19 nt, Artificial Sequence
  Description of Artificial Sequence: Synthetic oligonucleotide
cagauacccagagugccag

SEQ ID NO: 2633394 - RNA, 19 nt, Artificial Sequence
  Description of Artificial Sequence: Synthetic oligonucleotide
ggcuccgccuucuaggaag

SEQ ID NO: 2633395 - RNA, 19 nt, Artificial Sequence
  Description of Artificial Sequence: Synthetic oligonucleotide
  modified_base (8)..(8): a, c, u, g, unknown or other
augaacunuggguccacuu

SEQ ID NO: 2633396 - RNA, 19 nt, Artificial Sequence
  Description of Artificial Sequence: Synthetic oligonucleotide
uguggauugcuggggucag

SEQ ID NO: 2633397 - RNA, 19 nt, Artificial Sequence
  Description of Artificial Sequence: Synthetic oligonucleotide
gguggauuucuucugugga

SEQ ID NO: 2633398 - RNA, 19 nt, Artificial Sequence
  Description of Artificial Sequence: Synthetic oligonucleotide
gacaccccaugagauacug

SEQ ID NO: 2633399 - RNA, 19 nt, Artificial Sequence
  Description of Artificial Sequence: Synthetic oligonucleotide
ugggcugcgauguccaguu

SEQ ID NO: 2633400 - RNA, 19 nt, Artificial Sequence
  Description of Artificial Sequence: Synthetic oligonucleotide
cuuuggucccgauaccaga

SEQ ID NO: 2633401 - RNA, 19 nt, Artificial Sequence
  Description of Artificial Sequence: Synthetic oligonucleotide
gaagacaccccaugagaua

SEQ ID NO: 2633402 - RNA, 19 nt, Artificial Sequence
  Description of Artificial Sequence: Synthetic oligonucleotide
uucccagaaugugauggac

SEQ ID NO: 2633403 - RNA, 19 nt, Artificial Sequence
  Description of Artificial Sequence: Synthetic oligonucleotide
aguugugugcucacgggga

SEQ ID NO: 2633404 - RNA, 19 nt, Artificial Sequence
  Description of Artificial Sequence: Synthetic oligonucleotide
gauaccagauacccagagu

SEQ ID NO: 2633405 - RNA, 19 nt, Artificial Sequence
  Description of Artificial Sequence: Synthetic oligonucleotide
uggcggaugccaagcuucc

SEQ ID NO: 2633406 - RNA, 19 nt, Artificial Sequence
  Description of Artificial Sequence: Synthetic oligonucleotide
gcggaugccaagcuucccg

SEQ ID NO: 2633407 - RNA, 19 nt, Artificial Sequence
  Description of Artificial Sequence: Synthetic oligonucleotide
ccaauagcauggcuguucc

SEQ ID NO: 2633408 - RNA, 19 nt, Artificial Sequence
  Description of Artificial Sequence: Synthetic oligonucleotide
aaguggaucugugccccug

SEQ ID NO: 2633409 - RNA, 19 nt, Artificial Sequence
  Description of Artificial Sequence: Synthetic oligonucleotide
gauuguguguccagaaggu

SEQ ID NO: 2633410 - RNA, 19 nt, Artificial Sequence
  Description of Artificial Sequence: Synthetic oligonucleotide
gcacaagaggaagacaccc

SEQ ID NO: 2633411 - RNA, 19 nt, Artificial Sequence
  Description of Artificial Sequence: Synthetic oligonucleotide
ccaacggccacugacacug

SEQ ID NO: 2633412 - RNA, 19 nt, Artificial Sequence
  Description of Artificial Sequence: Synthetic oligonucleotide
ucuguggauugcugggguc

SEQ ID NO: 2633413 - RNA, 19 nt, Artificial Sequence
  Description of Artificial Sequence: Synthetic oligonucleotide
agguagacgguggauuucu

SEQ ID NO: 2633414 - RNA, 19 nt, Artificial Sequence
  Description of Artificial Sequence: Synthetic oligonucleotide
  modified_base (4)..(4): a, c, u, g, unknown or other
acunuggguccacuucaau

SEQ ID NO: 2633415 - RNA, 19 nt, Artificial Sequence
  Description of Artificial Sequence: Synthetic oligonucleotide
ucccgauaccagauaccca

SEQ ID NO: 2633416 - RNA, 19 nt, Artificial Sequence
  Description of Artificial Sequence: Synthetic oligonucleotide
ucacggggauggcggaugc

SEQ ID NO: 2633417 - RNA, 19 nt, Artificial Sequence
  Description of Artificial Sequence: Synthetic oligonucleotide
ccgccuucuaggaaggagg

SEQ ID NO: 2633418 - RNA, 19 nt, Artificial Sequence
  Description of Artificial Sequence: Synthetic oligonucleotide
caggugauuguguguccag

SEQ ID NO: 2633419 - RNA, 19 nt, Artificial Sequence
  Description of Artificial Sequence: Synthetic oligonucleotide
cagacgggcaggugcagug

SEQ ID NO: 2633420 - RNA, 19 nt, Artificial Sequence
  Description of Artificial Sequence: Synthetic oligonucleotide
uggagguagacgguggauu

SEQ ID NO: 2633421 - RNA, 19 nt, Artificial Sequence
  Description of Artificial Sequence: Synthetic oligonucleotide
ugguucaaacaguuuucuu

SEQ ID NO: 2633422 - RNA, 19 nt, Artificial Sequence
  Description of Artificial Sequence: Synthetic oligonucleotide
cagcauucccagaauguga

SEQ ID NO: 2633423 - RNA, 19 nt, Artificial Sequence
  Description of Artificial Sequence: Synthetic oligonucleotide
gucucuuggcacaggagac

SEQ ID NO: 2633424 - RNA, 19 nt, Artificial Sequence
  Description of Artificial Sequence: Synthetic oligonucleotide
aguggaucugugccccugu

SEQ ID NO: 2633425 - RNA, 19 nt, Artificial Sequence
  Description of Artificial Sequence: Synthetic oligonucleotide
cacaaaucguguccaucuc

SEQ ID NO: 2633426 - RNA, 19 nt, Artificial Sequence
  Description of Artificial Sequence: Synthetic oligonucleotide
uguccaguugugugcucac

SEQ ID NO: 2633427 - RNA, 19 nt, Artificial Sequence
  Description of Artificial Sequence: Synthetic oligonucleotide
  modified_base (17)..(17): a, c, u, g, unknown or other
agcugcgcaaugaacunug

SEQ ID NO: 2633428 - RNA, 19 nt, Artificial Sequence
  Description of Artificial Sequence: Synthetic oligonucleotide
ugcggcccaucaugaagag

SEQ ID NO: 2633429 - RNA, 19 nt, Artificial Sequence
  Description of Artificial Sequence: Synthetic oligonucleotide
  modified_base (10)..(10): a, c, u, g, unknown or other
caaugaacunuggguccac

SEQ ID NO: 2633430 - RNA, 19 nt, Artificial Sequence
  Description of Artificial Sequence: Synthetic oligonucleotide
auguccaguugugugcuca

SEQ ID NO: 2633431 - RNA, 19 nt, Artificial Sequence
  Description of Artificial Sequence: Synthetic oligonucleotide
uacugccuugccaggcaga

SEQ ID NO: 2633432 - RNA, 19 nt, Artificial Sequence
  Description of Artificial Sequence: Synthetic oligonucleotide
cuucuaggaaggaggugca

SEQ ID NO: 2633433 - RNA, 19 nt, Artificial Sequence
  Description of Artificial Sequence: Synthetic oligonucleotide
gguccacuucaauucuucc

SEQ ID NO: 2633434 - RNA, 19 nt, Artificial Sequence
  Description of Artificial Sequence: Synthetic oligonucleotide
  modified_base (5)..(5): a, c, u, g, unknown or other
aacunuggguccacuucaa

SEQ ID NO: 2633435 - RNA, 19 nt, Artificial Sequence
  Description of Artificial Sequence: Synthetic oligonucleotide
  modified_base (12)..(12): a, c, u, g, unknown or other
cgcaaugaacunugggucc

SEQ ID NO: 2633436 - RNA, 19 nt, Artificial Sequence
  Description of Artificial Sequence: Synthetic oligonucleotide
gaggugaugcugggcugcg

SEQ ID NO: 2633437 - RNA, 19 nt, Artificial Sequence
  Description of Artificial Sequence: Synthetic oligonucleotide
ugauacuggcggggcagcc

SEQ ID NO: 2633438 - RNA, 19 nt, Artificial Sequence
  Description of Artificial Sequence: Synthetic oligonucleotide
acaccccaugagauacugc

SEQ ID NO: 2633439 - RNA, 19 nt, Artificial Sequence
  Description of Artificial Sequence: Synthetic oligonucleotide
agauagcaggugauugugu

SEQ ID NO: 2633440 - RNA, 19 nt, Artificial Sequence
  Description of Artificial Sequence: Synthetic oligonucleotide
accgcuaccaacggccacu

SEQ ID NO: 2633441 - RNA, 19 nt, Artificial Sequence
  Description of Artificial Sequence: Synthetic oligonucleotide
ggugauuguguguccagaa

SEQ ID NO: 2633442 - RNA, 19 nt, Artificial Sequence
  Description of Artificial Sequence: Synthetic oligonucleotide
aggugauuguguguccaga

SEQ ID NO: 2633443 - RNA, 19 nt, Artificial Sequence
  Description of Artificial Sequence: Synthetic oligonucleotide
gagugauacuggcggggca

SEQ ID NO: 2633444 - RNA, 19 nt, Artificial Sequence
  Description of Artificial Sequence: Synthetic oligonucleotide
  modified_base (3)..(3): a, c, u, g, unknown or other
cunuggguccacuucaauu

SEQ ID NO: 2633445 - RNA, 19 nt, Artificial Sequence
  Description of Artificial Sequence: Synthetic oligonucleotide
gcagugaagacuguccaca

SEQ ID NO: 2633446 - RNA, 19 nt, Artificial Sequence
  Description of Artificial Sequence: Synthetic oligonucleotide
gugaugcugggcugcgaug

SEQ ID NO: 2633447 - RNA, 19 nt, Artificial Sequence
  Description of Artificial Sequence: Synthetic oligonucleotide
guugaugguucaaacaguu

SEQ ID NO: 2633448 - RNA, 19 nt, Artificial Sequence
  Description of Artificial Sequence: Synthetic oligonucleotide
  modified_base (13)..(13): a, c, u, g, unknown or other
gcgcaaugaacunuggguc

SEQ ID NO: 2633449 - RNA, 19 nt, Artificial Sequence
  Description of Artificial Sequence: Synthetic oligonucleotide
ucccgcaagguguuccaau

SEQ ID NO: 2633450 - RNA, 19 nt, Artificial Sequence
  Description of Artificial Sequence: Synthetic oligonucleotide
uuggucccgauaccagaua

SEQ ID NO: 2633451 - RNA, 19 nt, Artificial Sequence
  Description of Artificial Sequence: Synthetic oligonucleotide
uugugugcucacggggaug

SEQ ID NO: 2633452 - RNA, 19 nt, Artificial Sequence
  Description of Artificial Sequence: Synthetic oligonucleotide
gacgguggauuucuucugu

SEQ ID NO: 2633453 - RNA, 19 nt, Artificial Sequence
  Description of Artificial Sequence: Synthetic oligonucleotide
ccaagcuucccgcaaggug

SEQ ID NO: 2633454 - RNA, 19 nt, Artificial Sequence
  Description of Artificial Sequence: Synthetic oligonucleotide
augcaguugaugguucaaa

SEQ ID NO: 2633455 - RNA, 19 nt, Artificial Sequence
  Description of Artificial Sequence: Synthetic oligonucleotide
guccaguugugugcucacg

SEQ ID NO: 2633456 - RNA, 19 nt, Artificial Sequence
  Description of Artificial Sequence: Synthetic oligonucleotide
accaacggccacugacacu

SEQ ID NO: 2633457 - RNA, 19 nt, Artificial Sequence
  Description of Artificial Sequence: Synthetic oligonucleotide
uggguccacuucaauucuu

SEQ ID NO: 2633458 - RNA, 19 nt, Artificial Sequence
  Description of Artificial Sequence: Synthetic oligonucleotide
uaccgcuaccaacggccac

SEQ ID NO: 2633459 - RNA, 19 nt, Artificial Sequence
  Description of Artificial Sequence: Synthetic oligonucleotide
uggcggggcagccucccac

SEQ ID NO: 2633460 - RNA, 19 nt, Artificial Sequence
  Description of Artificial Sequence: Synthetic oligonucleotide
cuguggauugcugggguca

SEQ ID NO: 2633461 - RNA, 19 nt, Artificial Sequence
  Description of Artificial Sequence: Synthetic oligonucleotide
ggggucaggaaaguggauc

SEQ ID NO: 2633462 - RNA, 19 nt, Artificial Sequence
  Description of Artificial Sequence: Synthetic oligonucleotide
  modified_base (16)..(16): a, c, u, g, unknown or other
gcugcgcaaugaacunugg

SEQ ID NO: 2633463 - RNA, 19 nt, Artificial Sequence
  Description of Artificial Sequence: Synthetic oligonucleotide
uggggucaggaaaguggau

SEQ ID NO: 2633464 - RNA, 19 nt, Artificial Sequence
  Description of Artificial Sequence: Synthetic oligonucleotide
caagguguuccaauagcau

SEQ ID NO: 2633465 - RNA, 19 nt, Artificial Sequence
  Description of Artificial Sequence: Synthetic oligonucleotide
cuggcuccgccuucuagga

SEQ ID NO: 2633466 - RNA, 19 nt, Artificial Sequence
  Description of Artificial Sequence: Synthetic oligonucleotide
gaaggaggugcaugcaguu

SEQ ID NO: 2633467 - RNA, 19 nt, Artificial Sequence
  Description of Artificial Sequence: Synthetic oligonucleotide
aggagaccuuggagggacc

SEQ ID NO: 2633468 - RNA, 19 nt, Artificial Sequence
  Description of Artificial Sequence: Synthetic oligonucleotide
uacuggcggggcagccucc

SEQ ID NO: 2633469 - RNA, 19 nt, Artificial Sequence
  Description of Artificial Sequence: Synthetic oligonucleotide
gggucaggaaaguggaucu

SEQ ID NO: 2633470 - RNA, 19 nt, Artificial Sequence
  Description of Artificial Sequence: Synthetic oligonucleotide
gucaggaaaguggaucugu

SEQ ID NO: 2633471 - RNA, 19 nt, Artificial Sequence
  Description of Artificial Sequence: Synthetic oligonucleotide
uuacucccguugcggccca

SEQ ID NO: 2633472 - RNA, 19 nt, Artificial Sequence
  Description of Artificial Sequence: Synthetic oligonucleotide
ccaugagauacugccuugc

SEQ ID NO: 2633473 - RNA, 19 nt, Artificial Sequence
  Description of Artificial Sequence: Synthetic oligonucleotide
uucuaggaaggaggugcau

SEQ ID NO: 2633474 - RNA, 19 nt, Artificial Sequence
  Description of Artificial Sequence: Synthetic oligonucleotide
gacgggcaggugcagugaa

SEQ ID NO: 2633475 - RNA, 19 nt, Artificial Sequence
  Description of Artificial Sequence: Synthetic oligonucleotide
cuucccgcaagguguucca

SEQ ID NO: 2633476 - RNA, 19 nt, Artificial Sequence
  Description of Artificial Sequence: Synthetic oligonucleotide
cgauaccagauacccagag

SEQ ID NO: 2633477 - RNA, 19 nt, Artificial Sequence
  Description of Artificial Sequence: Synthetic oligonucleotide
gggauggcggaugccaagc

SEQ ID NO: 2633478 - RNA, 19 nt, Artificial Sequence
  Description of Artificial Sequence: Synthetic oligonucleotide
uggcaauaucugagugaua

SEQ ID NO: 2633479 - RNA, 19 nt, Artificial Sequence
  Description of Artificial Sequence: Synthetic oligonucleotide
gauggacuucgaggagcug

SEQ ID NO: 2633480 - RNA, 19 nt, Artificial Sequence
  Description of Artificial Sequence: Synthetic oligonucleotide
gugauacuggcggggcagc

SEQ ID NO: 2633481 - RNA, 19 nt, Artificial Sequence
  Description of Artificial Sequence: Synthetic oligonucleotide
  modified_base (11)..(11): a, c, u, g, unknown or other
gcaaugaacunugggucca

SEQ ID NO: 2633482 - RNA, 19 nt, Artificial Sequence
  Description of Artificial Sequence: Synthetic oligonucleotide
ggagaccuuggagggaccc

SEQ ID NO: 2633483 - RNA, 19 nt, Artificial Sequence
  Description of Artificial Sequence: Synthetic oligonucleotide
cccguugcggcccaucaug

SEQ ID NO: 2633484 - RNA, 19 nt, Artificial Sequence
  Description of Artificial Sequence: Synthetic oligonucleotide
cagaagguaccgcuaccaa

SEQ ID NO: 2633485 - RNA, 19 nt, Artificial Sequence
  Description of Artificial Sequence: Synthetic oligonucleotide
ccacaaaucguguccaucu

SEQ ID NO: 2633486 - RNA, 19 nt, Artificial Sequence
  Description of Artificial Sequence: Synthetic oligonucleotide
cacugacacuggcaauauc

SEQ ID NO: 2633487 - RNA, 19 nt, Artificial Sequence
  Description of Artificial Sequence: Synthetic oligonucleotide
ggucccgauaccagauacc

SEQ ID NO: 2633488 - RNA, 19 nt, Artificial Sequence
  Description of Artificial Sequence: Synthetic oligonucleotide
caacggccacugacacugg

SEQ ID NO: 2633489 - RNA, 19 nt, Artificial Sequence
  Description of Artificial Sequence: Synthetic oligonucleotide
accccaugagauacugccu

SEQ ID NO: 2633490 - RNA, 19 nt, Artificial Sequence
  Description of Artificial Sequence: Synthetic oligonucleotide
gauggcggaugccaagcuu

SEQ ID NO: 2633491 - RNA, 19 nt, Artificial Sequence
  Description of Artificial Sequence: Synthetic oligonucleotide
gcuucccgcaagguguucc

SEQ ID NO: 2633492 - RNA, 19 nt, Artificial Sequence
  Description of Artificial Sequence: Synthetic oligonucleotide
gcauucccagaaugugaug

SEQ ID NO: 2633493 - RNA, 19 nt, Artificial Sequence
  Description of Artificial Sequence: Synthetic oligonucleotide
uggcuccgccuucuaggaa

SEQ ID NO: 2633494 - RNA, 19 nt, Artificial Sequence
  Description of Artificial Sequence: Synthetic oligonucleotide
acucccguugcggcccauc

SEQ ID NO: 2633495 - RNA, 19 nt, Artificial Sequence
  Description of Artificial Sequence: Synthetic oligonucleotide
ccgcaagguguuccaauag

SEQ ID NO: 2633496 - RNA, 19 nt, Artificial Sequence
  Description of Artificial Sequence: Synthetic oligonucleotide
cccaugagauacugccuug

SEQ ID NO: 2633497 - RNA, 19 nt, Artificial Sequence
  Description of Artificial Sequence: Synthetic oligonucleotide
gacuguccacaaaucgugu

SEQ ID NO: 2633498 - RNA, 19 nt, Artificial Sequence
  Description of Artificial Sequence: Synthetic oligonucleotide
gcaugcaguugaugguuca

SEQ ID NO: 2633499 - RNA, 19 nt, Artificial Sequence
  Description of Artificial Sequence: Synthetic oligonucleotide
cguuacucccguugcggcc

SEQ ID NO: 2633500 - RNA, 19 nt, Artificial Sequence
  Description of Artificial Sequence: Synthetic oligonucleotide
agacgggcaggugcaguga

SEQ ID NO: 2633501 - RNA, 19 nt, Artificial Sequence
  Description of Artificial Sequence: Synthetic oligonucleotide
caugcaguugaugguucaa

SEQ ID NO: 2633502 - RNA, 19 nt, Artificial Sequence
  Description of Artificial Sequence: Synthetic oligonucleotide
ggaagacaccccaugagau

SEQ ID NO: 2633503 - RNA, 19 nt, Artificial Sequence
  Description of Artificial Sequence: Synthetic oligonucleotide
gagggacccagcaucugcu

SEQ ID NO: 2633504 - RNA, 19 nt, Artificial Sequence
  Description of Artificial Sequence: Synthetic oligonucleotide
ccuugccaggcagacagac

SEQ ID NO: 2633505 - RNA, 19 nt, Artificial Sequence
  Description of Artificial Sequence: Synthetic oligonucleotide
ggguccacuucaauucuuc

SEQ ID NO: 2633506 - RNA, 19 nt, Artificial Sequence
  Description of Artificial Sequence: Synthetic oligonucleotide
agggacccagcaucugcuu

SEQ ID NO: 2633507 - RNA, 19 nt, Artificial Sequence
  Description of Artificial Sequence: Synthetic oligonucleotide
guguccaucucugcagaua

SEQ ID NO: 2633508 - RNA, 19 nt, Artificial Sequence
  Description of Artificial Sequence: Synthetic oligonucleotide
gcuccgccuucuaggaagg

SEQ ID NO: 2633509 - RNA, 19 nt, Artificial Sequence
  Description of Artificial Sequence: Synthetic oligonucleotide
gccacugacacuggcaaua

SEQ ID NO: 2633510 - RNA, 19 nt, Artificial Sequence
  Description of Artificial Sequence: Synthetic oligonucleotide
guaccgcuaccaacggcca

SEQ ID NO: 2633511 - RNA, 19 nt, Artificial Sequence
  Description of Artificial Sequence: Synthetic oligonucleotide
ggcugcgauguccaguugu

SEQ ID NO: 2633512 - RNA, 19 nt, Artificial Sequence
  Description of Artificial Sequence: Synthetic oligonucleotide
ccagauacccagagugcca

SEQ ID NO: 2633513 - RNA, 19 nt, Artificial Sequence
  Description of Artificial Sequence: Synthetic oligonucleotide
uucccgcaagguguuccaa

SEQ ID NO: 2633514 - RNA, 19 nt, Artificial Sequence
  Description of Artificial Sequence: Synthetic oligonucleotide
agcuucccgcaagguguuc

SEQ ID NO: 2633515 - RNA, 19 nt, Artificial Sequence
  Description of Artificial Sequence: Synthetic oligonucleotide
gcaauaucugagugauacu

SEQ ID NO: 2633516 - RNA, 19 nt, Artificial Sequence
  Description of Artificial Sequence: Synthetic oligonucleotide
cagacucgauggugcccug

SEQ ID NO: 2633517 - RNA, 19 nt, Artificial Sequence
  Description of Artificial Sequence: Synthetic oligonucleotide
agacaccccaugagauacu

SEQ ID NO: 2633518 - RNA, 19 nt, Artificial Sequence
  Description of Artificial Sequence: Synthetic oligonucleotide
ggugaugcugggcugcgau

SEQ ID NO: 2633519 - RNA, 19 nt, Artificial Sequence
  Description of Artificial Sequence: Synthetic oligonucleotide
gugcaugcaguugaugguu

SEQ ID NO: 2633520 - RNA, 19 nt, Artificial Sequence
  Description of Artificial Sequence: Synthetic oligonucleotide
gcccaucaugaagagguga

SEQ ID NO: 2633521 - RNA, 19 nt, Artificial Sequence
  Description of Artificial Sequence: Synthetic oligonucleotide
cacggggauggcggaugcc

SEQ ID NO: 2633522 - RNA, 19 nt, Artificial Sequence
  Description of Artificial Sequence: Synthetic oligonucleotide
gacccagcaucugcuucaa

SEQ ID NO: 2633523 - RNA, 19 nt, Artificial Sequence
  Description of Artificial Sequence: Synthetic oligonucleotide
ggauugcuggggucaggaa

SEQ ID NO: 2633524 - RNA, 19 nt, Artificial Sequence
  Description of Artificial Sequence: Synthetic oligonucleotide
caauagcauggcuguuccu

SEQ ID NO: 2633525 - RNA, 19 nt, Artificial Sequence
  Description of Artificial Sequence: Synthetic oligonucleotide
aggugaugcugggcugcga

SEQ ID NO: 2633526 - RNA, 19 nt, Artificial Sequence
  Description of Artificial Sequence: Synthetic oligonucleotide
ggcccaucaugaagaggug

SEQ ID NO: 2633527 - RNA, 19 nt, Artificial Sequence
  Description of Artificial Sequence: Synthetic oligonucleotide
cccaucaugaagaggugau

SEQ ID NO: 2633528 - RNA, 19 nt, Artificial Sequence
  Description of Artificial Sequence: Synthetic oligonucleotide
cccagaaugugauggacuu

SEQ ID NO: 2633529 - RNA, 19 nt, Artificial Sequence
  Description of Artificial Sequence: Synthetic oligonucleotide
ccagagugccagacgggca

SEQ ID NO: 2633530 - RNA, 19 nt, Artificial Sequence
  Description of Artificial Sequence: Synthetic oligonucleotide
ggcagacagacucgauggu

SEQ ID NO: 2633531 - RNA, 19 nt, Artificial Sequence
  Description of Artificial Sequence: Synthetic oligonucleotide
cccgcaagguguuccaaua

SEQ ID NO: 2633532 - RNA, 19 nt, Artificial Sequence
  Description of Artificial Sequence: Synthetic oligonucleotide
ggcggaugccaagcuuccc

SEQ ID NO: 2633533 - RNA, 19 nt, Artificial Sequence
  Description of Artificial Sequence: Synthetic oligonucleotide
guccacaaaucguguccau

SEQ ID NO: 2633534 - RNA, 19 nt, Artificial Sequence
  Description of Artificial Sequence: Synthetic oligonucleotide
cugcuccaucagcugcgca

SEQ ID NO: 2633535 - RNA, 19 nt, Artificial Sequence
  Description of Artificial Sequence: Synthetic oligonucleotide
ggauggcggaugccaagcu

SEQ ID NO: 2633536 - RNA, 19 nt, Artificial Sequence
  Description of Artificial Sequence: Synthetic oligonucleotide
ccguugcggcccaucauga

SEQ ID NO: 2633537 - RNA, 19 nt, Artificial Sequence
  Description of Artificial Sequence: Synthetic oligonucleotide
cugggcugcgauguccagu

SEQ ID NO: 2633538 - RNA, 19 nt, Artificial Sequence
  Description of Artificial Sequence: Synthetic oligonucleotide
guuugacguuacucccguu

SEQ ID NO: 2633539 - RNA, 19 nt, Artificial Sequence
  Description of Artificial Sequence: Synthetic oligonucleotide
cugccuugccaggcagaca

SEQ ID NO: 2633540 - RNA, 19 nt, Artificial Sequence
  Description of Artificial Sequence: Synthetic oligonucleotide
cugcgauguccaguugugu

SEQ ID NO: 2633541 - RNA, 19 nt, Artificial Sequence
  Description of Artificial Sequence: Synthetic oligonucleotide
cuggagguagacgguggau

SEQ ID NO: 2633542 - RNA, 19 nt, Artificial Sequence
  Description of Artificial Sequence: Synthetic oligonucleotide
cugcagauagcaggugauu

SEQ ID NO: 2633543 - RNA, 19 nt, Artificial Sequence
  Description of Artificial Sequence: Synthetic oligonucleotide
ccccaugagauacugccuu

SEQ ID NO: 2633544 - RNA, 19 nt, Artificial Sequence
  Description of Artificial Sequence: Synthetic oligonucleotide
  modified_base (18)..(18): a, c, u, g, unknown or other
cagcugcgcaaugaacunu

SEQ ID NO: 2633545 - RNA, 19 nt, Artificial Sequence
  Description of Artificial Sequence: Synthetic oligonucleotide
gccagacgggcaggugcag

SEQ ID NO: 2633546 - RNA, 19 nt, Artificial Sequence
  Description of Artificial Sequence: Synthetic oligonucleotide
ggacuucgaggagcugcuc

SEQ ID NO: 2633547 - RNA, 19 nt, Artificial Sequence
  Description of Artificial Sequence: Synthetic oligonucleotide
cuccgccuucuaggaagga

SEQ ID NO: 2633548 - RNA, 19 nt, Artificial Sequence
  Description of Artificial Sequence: Synthetic oligonucleotide
ccgcuaccaacggccacug

SEQ ID NO: 2633549 - RNA, 19 nt, Artificial Sequence
  Description of Artificial Sequence: Synthetic oligonucleotide
ggcggggcagccucccacu

SEQ ID NO: 2633550 - RNA, 19 nt, Artificial Sequence
  Description of Artificial Sequence: Synthetic oligonucleotide
uacucccguugcggcccau

SEQ ID NO: 2633551 - RNA, 19 nt, Artificial Sequence
  Description of Artificial Sequence: Synthetic oligonucleotide
gccaagcuucccgcaaggu

SEQ ID NO: 2633552 - RNA, 19 nt, Artificial Sequence
  Description of Artificial Sequence: Synthetic oligonucleotide
cgccuucuaggaaggaggu

SEQ ID NO: 2633553 - RNA, 19 nt, Artificial Sequence
  Description of Artificial Sequence: Synthetic oligonucleotide
cgauguccaguugugugcu

SEQ ID NO: 2633554 - RNA, 19 nt, Artificial Sequence
  Description of Artificial Sequence: Synthetic oligonucleotide
cguugcggcccaucaugaa

SEQ ID NO: 2633555 - RNA, 19 nt, Artificial Sequence
  Description of Artificial Sequence: Synthetic oligonucleotide
gguagacgguggauuucuu

SEQ ID NO: 2633556 - RNA, 19 nt, Artificial Sequence
  Description of Artificial Sequence: Synthetic oligonucleotide
cggggauggcggaugccaa

SEQ ID NO: 2633557 - RNA, 19 nt, Artificial Sequence
  Description of Artificial Sequence: Synthetic oligonucleotide
ccacugacacuggcaauau

SEQ ID NO: 2633558 - RNA, 19 nt, Artificial Sequence
  Description of Artificial Sequence: Synthetic oligonucleotide
ccaggcagacagacucgau

SEQ ID NO: 2633559 - RNA, 19 nt, Artificial Sequence
  Description of Artificial Sequence: Synthetic oligonucleotide
ccagacgggcaggugcagu

SEQ ID NO: 2633560 - RNA, 19 nt, Artificial Sequence
  Description of Artificial Sequence: Synthetic oligonucleotide
gcucacggggauggcggau

SEQ ID NO: 2633561 - RNA, 19 nt, Artificial Sequence
  Description of Artificial Sequence: Synthetic oligonucleotide
cgcuaccaacggccacuga

SEQ ID NO: 2633562 - RNA, 19 nt, Artificial Sequence
  Description of Artificial Sequence: Synthetic oligonucleotide
uaauucauuaaucagaagg

SEQ ID NO: 2633563 - RNA, 19 nt, Artificial Sequence
  Description of Artificial Sequence: Synthetic oligonucleotide
aaaauuucagcacggaucc

SEQ ID NO: 2633564 - RNA, 19 nt, Artificial Sequence
  Description of Artificial Sequence: Synthetic oligonucleotide
aauaagaaguuauuacucc

SEQ ID NO: 2633565 - RNA, 19 nt, Artificial Sequence
  Description of Artificial Sequence: Synthetic oligonucleotide
aaguuauuacuccacaugc

SEQ ID NO: 2633566 - RNA, 19 nt, Artificial Sequence
  Description of Artificial Sequence: Synthetic oligonucleotide
uuuaaaacagcuuucagcu

SEQ ID NO: 2633567 - RNA, 19 nt, Artificial Sequence
  Description of Artificial Sequence: Synthetic oligonucleotide
uauauagaagcucacaugu

SEQ ID NO: 2633568 - RNA, 19 nt, Artificial Sequence
  Description of Artificial Sequence: Synthetic oligonucleotide
uguuuacaaacaauggugg

SEQ ID NO: 2633569 - RNA, 19 nt, Artificial Sequence
  Description of Artificial Sequence: Synthetic oligonucleotide
aaucagaagguuuucauga

SEQ ID NO: 2633570 - RNA, 19 nt, Artificial Sequence
  Description of Artificial Sequence: Synthetic oligonucleotide
aauauauagaagcucacau

SEQ ID NO: 2633571 - RNA, 19 nt, Artificial Sequence
  Description of Artificial Sequence: Synthetic oligonucleotide
aauuaauucauuaaucaga

SEQ ID NO: 2633572 - RNA, 19 nt, Artificial Sequence
  Description of Artificial Sequence: Synthetic oligonucleotide
cuuuaaaacagcuuucagc

SEQ ID NO: 2633573 - RNA, 19 nt, Artificial Sequence
  Description of Artificial Sequence: Synthetic oligonucleotide
uuuuaaauguccuaacacu

SEQ ID NO: 2633574 - RNA, 19 nt, Artificial Sequence
  Description of Artificial Sequence: Synthetic oligonucleotide
gaaacugucuguccaaugg

SEQ ID NO: 2633575 - RNA, 19 nt, Artificial Sequence
  Description of Artificial Sequence: Synthetic oligonucleotide
caugagacaaugaugggcg

SEQ ID NO: 2633576 - RNA, 19 nt, Artificial Sequence
  Description of Artificial Sequence: Synthetic oligonucleotide
aaacugucuguccaauggc

SEQ ID NO: 2633577 - RNA, 19 nt, Artificial Sequence
  Description of Artificial Sequence: Synthetic oligonucleotide
aacaaugguggucucauug

SEQ ID NO: 2633578 - RNA, 19 nt, Artificial Sequence
  Description of Artificial Sequence: Synthetic oligonucleotide
uuuaaauguccuaacacuc

SEQ ID NO: 2633579 - RNA, 19 nt, Artificial Sequence
  Description of Artificial Sequence: Synthetic oligonucleotide
aaaauuccauauaacagag

SEQ ID NO: 2633580 - RNA, 19 nt, Artificial Sequence
  Description of Artificial Sequence: Synthetic oligonucleotide
gugaucgucauccagggcg

SEQ ID NO: 2633581 - RNA, 19 nt, Artificial Sequence
  Description of Artificial Sequence: Synthetic oligonucleotide
uuaaauguccuaacacucc

SEQ ID NO: 2633582 - RNA, 19 nt, Artificial Sequence
  Description of Artificial Sequence: Synthetic oligonucleotide
uucgugaucgucauccagg

SEQ ID NO: 2633583 - RNA, 19 nt, Artificial Sequence
  Description of Artificial Sequence: Synthetic oligonucleotide
gaaguuauuacuccacaug

SEQ ID NO: 2633584 - RNA, 19 nt, Artificial Sequence
  Description of Artificial Sequence: Synthetic oligonucleotide
uuuaguucacggaugagaa

SEQ ID NO: 2633585 - RNA, 19 nt, Artificial Sequence
  Description of Artificial Sequence: Synthetic oligonucleotide
agcaugaagcucuucaguc

SEQ ID NO: 2633586 - RNA, 19 nt, Artificial Sequence
  Description of Artificial Sequence: Synthetic oligonucleotide
gaaaauuucagcacggauc

SEQ ID NO: 2633587 - RNA, 19 nt, Artificial Sequence
  Description of Artificial Sequence: Synthetic oligonucleotide
uguguacuuauauuuguug

SEQ ID NO: 2633588 - RNA, 19 nt, Artificial Sequence
  Description of Artificial Sequence: Synthetic oligonucleotide
auauauagaagcucacaug

SEQ ID NO: 2633589 - RNA, 19 nt, Artificial Sequence
  Description of Artificial Sequence: Synthetic oligonucleotide
agaaaugggcuaaaauucc

SEQ ID NO: 2633590 - RNA, 19 nt, Artificial Sequence
  Description of Artificial Sequence: Synthetic oligonucleotide
ucauugaugggauugggaa

SEQ ID NO: 2633591 - RNA, 19 nt, Artificial Sequence
  Description of Artificial Sequence: Synthetic oligonucleotide
ucuacugacugcuugcaca

SEQ ID NO: 2633592 - RNA, 19 nt, Artificial Sequence
  Description of Artificial Sequence: Synthetic oligonucleotide
uuacaaacaaugguggucu

SEQ ID NO: 2633593 - RNA, 19 nt, Artificial Sequence
  Description of Artificial Sequence: Synthetic oligonucleotide
ucauuaaucagaagguuuu

SEQ ID NO: 2633594 - RNA, 19 nt, Artificial Sequence
  Description of Artificial Sequence: Synthetic oligonucleotide
uaagaaguuauuacuccac

SEQ ID NO: 2633595 - RNA, 19 nt, Artificial Sequence
  Description of Artificial Sequence: Synthetic oligonucleotide
agcucacauguuuacaaac

SEQ ID NO: 2633596 - RNA, 19 nt, Artificial Sequence
  Description of Artificial Sequence: Synthetic oligonucleotide
ugggaugccuguuuggagg

SEQ ID NO: 2633597 - RNA, 19 nt, Artificial Sequence
  Description of Artificial Sequence: Synthetic oligonucleotide
auaagaaguuauuacucca

SEQ ID NO: 2633598 - RNA, 19 nt, Artificial Sequence
  Description of Artificial Sequence: Synthetic oligonucleotide
uccaaauacucccuaauua

SEQ ID NO: 2633599 - RNA, 19 nt, Artificial Sequence
  Description of Artificial Sequence: Synthetic oligonucleotide
auguuuacaaacaauggug

SEQ ID NO: 2633600 - RNA, 19 nt, Artificial Sequence
  Description of Artificial Sequence: Synthetic oligonucleotide
guuauuacuccacaugcac

SEQ ID NO: 2633601 - RNA, 19 nt, Artificial Sequence
  Description of Artificial Sequence: Synthetic oligonucleotide
ugcaguaaaccuugagggg

SEQ ID NO: 2633602 - RNA, 19 nt, Artificial Sequence
  Description of Artificial Sequence: Synthetic oligonucleotide
ucaugagacaaugaugggc

SEQ ID NO: 2633603 - RNA, 19 nt, Artificial Sequence
  Description of Artificial Sequence: Synthetic oligonucleotide
uuauuacuccacaugcaca

SEQ ID NO: 2633604 - RNA, 19 nt, Artificial Sequence
  Description of Artificial Sequence: Synthetic oligonucleotide
uucagcucagugacggucg

SEQ ID NO: 2633605 - RNA, 19 nt, Artificial Sequence
  Description of Artificial Sequence: Synthetic oligonucleotide
gauucugccaugaggacag

SEQ ID NO: 2633606 - RNA, 19 nt, Artificial Sequence
  Description of Artificial Sequence: Synthetic oligonucleotide
uccaauggcacuauggguu

SEQ ID NO: 2633607 - RNA, 19 nt, Artificial Sequence
  Description of Artificial Sequence: Synthetic oligonucleotide
aagguguccuuuaaaacag

SEQ ID NO: 2633608 - RNA, 19 nt, Artificial Sequence
  Description of Artificial Sequence: Synthetic oligonucleotide
ucaggugguugucauuugg

SEQ ID NO: 2633609 - RNA, 19 nt, Artificial Sequence
  Description of Artificial Sequence: Synthetic oligonucleotide
uguacuuauauuuguugaa

SEQ ID NO: 2633610 - RNA, 19 nt, Artificial Sequence
  Description of Artificial Sequence: Synthetic oligonucleotide
acaugcacagcugagauca

SEQ ID NO: 2633611 - RNA, 19 nt, Artificial Sequence
  Description of Artificial Sequence: Synthetic oligonucleotide
uaguucacggaugagaaac

SEQ ID NO: 2633612 - RNA, 19 nt, Artificial Sequence
  Description of Artificial Sequence: Synthetic oligonucleotide
aaggcauuuaguucacgga

SEQ ID NO: 2633613 - RNA, 19 nt, Artificial Sequence
  Description of Artificial Sequence: Synthetic oligonucleotide
uuaaucagaagguuuucau

SEQ ID NO: 2633614 - RNA, 19 nt, Artificial Sequence
  Description of Artificial Sequence: Synthetic oligonucleotide
auccuuugauucuucaaag

SEQ ID NO: 2633615 - RNA, 19 nt, Artificial Sequence
  Description of Artificial Sequence: Synthetic oligonucleotide
uuuacaaacaauggugguc

SEQ ID NO: 2633616 - RNA, 19 nt, Artificial Sequence
  Description of Artificial Sequence: Synthetic oligonucleotide
ugaaaauuucagcacggau

SEQ ID NO: 2633617 - RNA, 19 nt, Artificial Sequence
  Description of Artificial Sequence: Synthetic oligonucleotide
acauguuuacaaacaaugg

SEQ ID NO: 2633618 - RNA, 19 nt, Artificial Sequence
  Description of Artificial Sequence: Synthetic oligonucleotide
gagaucaggagccugccug

SEQ ID NO: 2633619 - RNA, 19 nt, Artificial Sequence
  Description of Artificial Sequence: Synthetic oligonucleotide
ugaauauauagaagcucac

SEQ ID NO: 2633620 - RNA, 19 nt, Artificial Sequence
  Description of Artificial Sequence: Synthetic oligonucleotide
gaugagaaacugucugucc

SEQ ID NO: 2633621 - RNA, 19 nt, Artificial Sequence
  Description of Artificial Sequence: Synthetic oligonucleotide
aauuccaaauacucccuaa

SEQ ID NO: 2633622 - RNA, 19 nt, Artificial Sequence
  Description of Artificial Sequence: Synthetic oligonucleotide
cuauggguuggccagauuc

SEQ ID NO: 2633623 - RNA, 19 nt, Artificial Sequence
  Description of Artificial Sequence: Synthetic oligonucleotide
ugucgacucagucugcagc

SEQ ID NO: 2633624 - RNA, 19 nt, Artificial Sequence
  Description of Artificial Sequence: Synthetic oligonucleotide
uccaagguguccuuuaaaa

SEQ ID NO: 2633625 - RNA, 19 nt, Artificial Sequence
  Description of Artificial Sequence: Synthetic oligonucleotide
ucacggaugagaaacuguc

SEQ ID NO: 2633626 - RNA, 19 nt, Artificial Sequence
  Description of Artificial Sequence: Synthetic oligonucleotide
acggaugagaaacugucug

SEQ ID NO: 2633627 - RNA, 19 nt, Artificial Sequence
  Description of Artificial Sequence: Synthetic oligonucleotide
auuuaguucacggaugaga

SEQ ID NO: 2633628 - RNA, 19 nt, Artificial Sequence
  Description of Artificial Sequence: Synthetic oligonucleotide
gggcugaauauauagaagc

SEQ ID NO: 2633629 - RNA, 19 nt, Artificial Sequence
  Description of Artificial Sequence: Synthetic oligonucleotide
uuguugaauuccaaauacu

SEQ ID NO: 2633630 - RNA, 19 nt, Artificial Sequence
  Description of Artificial Sequence: Synthetic oligonucleotide
uuaauucauuaaucagaag

SEQ ID NO: 2633631 - RNA, 19 nt, Artificial Sequence
  Description of Artificial Sequence: Synthetic oligonucleotide
aauggcacuauggguuggc

SEQ ID NO: 2633632 - RNA, 19 nt, Artificial Sequence
  Description of Artificial Sequence: Synthetic oligonucleotide
augagaaacugucugucca

SEQ ID NO: 2633633 - RNA, 19 nt, Artificial Sequence
  Description of Artificial Sequence: Synthetic oligonucleotide
gggaauaagaaguuauuac

SEQ ID NO: 2633634 - RNA, 19 nt, Artificial Sequence
  Description of Artificial Sequence: Synthetic oligonucleotide
ucgugaucgucauccaggg

SEQ ID NO: 2633635 - RNA, 19 nt, Artificial Sequence
  Description of Artificial Sequence: Synthetic oligonucleotide
auugaguuauccuuugauu

SEQ ID NO: 2633636 - RNA, 19 nt, Artificial Sequence
  Description of Artificial Sequence: Synthetic oligonucleotide
uucaugagacaaugauggg

SEQ ID NO: 2633637 - RNA, 19 nt, Artificial Sequence
  Description of Artificial Sequence: Synthetic oligonucleotide
aaugggcuaaaauuccaua

SEQ ID NO: 2633638 - RNA, 19 nt, Artificial Sequence
  Description of Artificial Sequence: Synthetic oligonucleotide
gaagcucacauguuuacaa

SEQ ID NO: 2633639 - RNA, 19 nt, Artificial Sequence
  Description of Artificial Sequence: Synthetic oligonucleotide
aauguccuaacacucccuu

SEQ ID NO: 2633640 - RNA, 19 nt, Artificial Sequence
  Description of Artificial Sequence: Synthetic oligonucleotide
cugccaugaggacagaggc

SEQ ID NO: 2633641 - RNA, 19 nt, Artificial Sequence
  Description of Artificial Sequence: Synthetic oligonucleotide
uggugcaugcaucaucuac

SEQ ID NO: 2633642 - RNA, 19 nt, Artificial Sequence
  Description of Artificial Sequence: Synthetic oligonucleotide
gaugggauugggaauaaga

SEQ ID NO: 2633643 - RNA, 19 nt, Artificial Sequence
  Description of Artificial Sequence: Synthetic oligonucleotide
uguccuaacacucccuuuu

SEQ ID NO: 2633644 - RNA, 19 nt, Artificial Sequence
  Description of Artificial Sequence: Synthetic oligonucleotide
uccuuuaaaacagcuuuca

SEQ ID NO: 2633645 - RNA, 19 nt, Artificial Sequence
  Description of Artificial Sequence: Synthetic oligonucleotide
ccuaauuaauucauuaauc

SEQ ID NO: 2633646 - RNA, 19 nt, Artificial Sequence
  Description of Artificial Sequence: Synthetic oligonucleotide
acaaugaugggcgggguuc

SEQ ID NO: 2633647 - RNA, 19 nt, Artificial Sequence
  Description of Artificial Sequence: Synthetic oligonucleotide
ucacaggugcaguaaaccu

SEQ ID NO: 2633648 - RNA, 19 nt, Artificial Sequence
  Description of Artificial Sequence: Synthetic oligonucleotide
aggugguugucauuugguc

SEQ ID NO: 2633649 - RNA, 19 nt, Artificial Sequence
  Description of Artificial Sequence: Synthetic oligonucleotide
guguacuuauauuuguuga

SEQ ID NO: 2633650 - RNA, 19 nt, Artificial Sequence
  Description of Artificial Sequence: Synthetic oligonucleotide
ucccuaauuaauucauuaa

SEQ ID NO: 2633651 - RNA, 19 nt, Artificial Sequence
  Description of Artificial Sequence: Synthetic oligonucleotide
ggauccuugcuuuuaaaug

SEQ ID NO: 2633652 - RNA, 19 nt, Artificial Sequence
  Description of Artificial Sequence: Synthetic oligonucleotide
gaauauauagaagcucaca

SEQ ID NO: 2633653 - RNA, 19 nt, Artificial Sequence
  Description of Artificial Sequence: Synthetic oligonucleotide
agaaguuauuacuccacau

SEQ ID NO: 2633654 - RNA, 19 nt, Artificial Sequence
  Description of Artificial Sequence: Synthetic oligonucleotide
augggcuaaaauuccauau

SEQ ID NO: 2633655 - RNA, 19 nt, Artificial Sequence
  Description of Artificial Sequence: Synthetic oligonucleotide
uggagugucgacucagucu

SEQ ID NO: 2633656 - RNA, 19 nt, Artificial Sequence
  Description of Artificial Sequence: Synthetic oligonucleotide
uacuuauauuuguugaauu

SEQ ID NO: 2633657 - RNA, 19 nt, Artificial Sequence
  Description of Artificial Sequence: Synthetic oligonucleotide
aaauacucccuaauuaauu

SEQ ID NO: 2633658 - RNA, 19 nt, Artificial Sequence
  Description of Artificial Sequence: Synthetic oligonucleotide
ggcguugaaaauuucagca

SEQ ID NO: 2633659 - RNA, 19 nt, Artificial Sequence
  Description of Artificial Sequence: Synthetic oligonucleotide
cuacugacugcuugcacag

SEQ ID NO: 2633660 - RNA, 19 nt, Artificial Sequence
  Description of Artificial Sequence: Synthetic oligonucleotide
ggagugucgacucagucug

SEQ ID NO: 2633661 - RNA, 19 nt, Artificial Sequence
  Description of Artificial Sequence: Synthetic oligonucleotide
agaucaggagccugccugg

SEQ ID NO: 2633662 - RNA, 19 nt, Artificial Sequence
  Description of Artificial Sequence: Synthetic oligonucleotide
aaccuugaggggcugaaua

SEQ ID NO: 2633663 - RNA, 19 nt, Artificial Sequence
  Description of Artificial Sequence: Synthetic oligonucleotide
gcaugcaucaucuacugac

SEQ ID NO: 2633664 - RNA, 19 nt, Artificial Sequence
  Description of Artificial Sequence: Synthetic oligonucleotide
aggcauuuaguucacggau

SEQ ID NO: 2633665 - RNA, 19 nt, Artificial Sequence
  Description of Artificial Sequence: Synthetic oligonucleotide
uacucccuaauuaauucau

SEQ ID NO: 2633666 - RNA, 19 nt, Artificial Sequence
  Description of Artificial Sequence: Synthetic oligonucleotide
auauaacagaggaauugag

SEQ ID NO: 2633667 - RNA, 19 nt, Artificial Sequence
  Description of Artificial Sequence: Synthetic oligonucleotide
auugggaauaagaaguuau

SEQ ID NO: 2633668 - RNA, 19 nt, Artificial Sequence
  Description of Artificial Sequence: Synthetic oligonucleotide
ugacugcuugcacagcagc

SEQ ID NO: 2633669 - RNA, 19 nt, Artificial Sequence
  Description of Artificial Sequence: Synthetic oligonucleotide
uaacagaggaauugaguua

SEQ ID NO: 2633670 - RNA, 19 nt, Artificial Sequence
  Description of Artificial Sequence: Synthetic oligonucleotide
cuguuuggagguuggagug

SEQ ID NO: 2633671 - RNA, 19 nt, Artificial Sequence
  Description of Artificial Sequence: Synthetic oligonucleotide
ggaauaagaaguuauuacu

SEQ ID NO: 2633672 - RNA, 19 nt, Artificial Sequence
  Description of Artificial Sequence: Synthetic oligonucleotide
ugggaauaagaaguuauua

SEQ ID NO: 2633673 - RNA, 19 nt, Artificial Sequence
  Description of Artificial Sequence: Synthetic oligonucleotide
aucuacugacugcuugcac

SEQ ID NO: 2633674 - RNA, 19 nt, Artificial Sequence
  Description of Artificial Sequence: Synthetic oligonucleotide
aggcuguguacuuauauuu

SEQ ID NO: 2633675 - RNA, 19 nt, Artificial Sequence
  Description of Artificial Sequence: Synthetic oligonucleotide
agguuuucaugagacaaug

SEQ ID NO: 2633676 - RNA, 19 nt, Artificial Sequence
  Description of Artificial Sequence: Synthetic oligonucleotide
cauauaacagaggaauuga

SEQ ID NO: 2633677 - RNA, 19 nt, Artificial Sequence
  Description of Artificial Sequence: Synthetic oligonucleotide
uugggaauaagaaguuauu

SEQ ID NO: 2633678 - RNA, 19 nt, Artificial Sequence
  Description of Artificial Sequence: Synthetic oligonucleotide
gaccacgcaagaaaugggc

SEQ ID NO: 2633679 - RNA, 19 nt, Artificial Sequence
  Description of Artificial Sequence: Synthetic oligonucleotide
ggcacuauggguuggccag

SEQ ID NO: 2633680 - RNA, 19 nt, Artificial Sequence
  Description of Artificial Sequence: Synthetic oligonucleotide
cuguugggcuuccagcugg

SEQ ID NO: 2633681 - RNA, 19 nt, Artificial Sequence
  Description of Artificial Sequence: Synthetic oligonucleotide
uugaaaauuucagcacgga

SEQ ID NO: 2633682 - RNA, 19 nt, Artificial Sequence
  Description of Artificial Sequence: Synthetic oligonucleotide
cguugaaaauuucagcacg

SEQ ID NO: 2633683 - RNA, 19 nt, Artificial Sequence
  Description of Artificial Sequence: Synthetic oligonucleotide
gccagauucugccaugagg

SEQ ID NO: 2633684 - RNA, 19 nt, Artificial Sequence
  Description of Artificial Sequence: Synthetic oligonucleotide
ugaucgucauccagggcgu

SEQ ID NO: 2633685 - RNA, 19 nt, Artificial Sequence
  Description of Artificial Sequence: Synthetic oligonucleotide
gagcuuuucacaggugcag

SEQ ID NO: 2633686 - RNA, 19 nt, Artificial Sequence
  Description of Artificial Sequence: Synthetic oligonucleotide
agggcguugaaaauuucag

SEQ ID NO: 2633687 - RNA, 19 nt, Artificial Sequence
  Description of Artificial Sequence: Synthetic oligonucleotide
augagacaaugaugggcgg

SEQ ID NO: 2633688 - RNA, 19 nt, Artificial Sequence
  Description of Artificial Sequence: Synthetic oligonucleotide
aaaugggcuaaaauuccau

SEQ ID NO: 2633689 - RNA, 19 nt, Artificial Sequence
  Description of Artificial Sequence: Synthetic oligonucleotide
gagguuggagugucgacuc

SEQ ID NO: 2633690 - RNA, 19 nt, Artificial Sequence
  Description of Artificial Sequence: Synthetic oligonucleotide
uuucagcucagugacgguc

SEQ ID NO: 2633691 - RNA, 19 nt, Artificial Sequence
  Description of Artificial Sequence: Synthetic oligonucleotide
ucuggaggaccacgcaaga

SEQ ID NO: 2633692 - RNA, 19 nt, Artificial Sequence
  Description of Artificial Sequence: Synthetic oligonucleotide
gaugccuguuuggagguug

SEQ ID NO: 2633693 - RNA, 19 nt, Artificial Sequence
  Description of Artificial Sequence: Synthetic oligonucleotide
guucgugaucgucauccag

SEQ ID NO: 2633694 - RNA, 19 nt, Artificial Sequence
  Description of Artificial Sequence: Synthetic oligonucleotide
uggguuggccagauucugc

SEQ ID NO: 2633695 - RNA, 19 nt, Artificial Sequence
  Description of Artificial Sequence: Synthetic oligonucleotide
ugaugggcgggguucguga

SEQ ID NO: 2633696 - RNA, 19 nt, Artificial Sequence
  Description of Artificial Sequence: Synthetic oligonucleotide
gcaguaaaccuugaggggc

SEQ ID NO: 2633697 - RNA, 19 nt, Artificial Sequence
  Description of Artificial Sequence: Synthetic oligonucleotide
uccagggcguugaaaauuu

SEQ ID NO: 2633698 - RNA, 19 nt, Artificial Sequence
  Description of Artificial Sequence: Synthetic oligonucleotide
aguuauuacuccacaugca

SEQ ID NO: 2633699 - RNA, 19 nt, Artificial Sequence
  Description of Artificial Sequence: Synthetic oligonucleotide
gugcaugcaucaucuacug

SEQ ID NO: 2633700 - RNA, 19 nt, Artificial Sequence
  Description of Artificial Sequence: Synthetic oligonucleotide
ggguucgugaucgucaucc

SEQ ID NO: 2633701 - RNA, 19 nt, Artificial Sequence
  Description of Artificial Sequence: Synthetic oligonucleotide
caugccaucuggaggacca

SEQ ID NO: 2633702 - RNA, 19 nt, Artificial Sequence
  Description of Artificial Sequence: Synthetic oligonucleotide
aagguuuucaugagacaau

SEQ ID NO: 2633703 - RNA, 19 nt, Artificial Sequence
  Description of Artificial Sequence: Synthetic oligonucleotide
aggugcaguaaaccuugag

SEQ ID NO: 2633704 - RNA, 19 nt, Artificial Sequence
  Description of Artificial Sequence: Synthetic oligonucleotide
uuaguucacggaugagaaa

SEQ ID NO: 2633705 - RNA, 19 nt, Artificial Sequence
  Description of Artificial Sequence: Synthetic oligonucleotide
aggacagaggcuguguacu

SEQ ID NO: 2633706 - RNA, 19 nt, Artificial Sequence
  Description of Artificial Sequence: Synthetic oligonucleotide
cuugcacagcagcaugaag

SEQ ID NO: 2633707 - RNA, 19 nt, Artificial Sequence
  Description of Artificial Sequence: Synthetic oligonucleotide
aaauguccuaacacucccu

SEQ ID NO: 2633708 - RNA, 19 nt, Artificial Sequence
  Description of Artificial Sequence: Synthetic oligonucleotide
uuucagcacggauccuugc

SEQ ID NO: 2633709 - RNA, 19 nt, Artificial Sequence
  Description of Artificial Sequence: Synthetic oligonucleotide
ccauauaacagaggaauug

SEQ ID NO: 2633710 - RNA, 19 nt, Artificial Sequence
  Description of Artificial Sequence: Synthetic oligonucleotide
uggcacuauggguuggcca

SEQ ID NO: 2633711 - RNA, 19 nt, Artificial Sequence
  Description of Artificial Sequence: Synthetic oligonucleotide
auccuugcuuuuaaauguc

SEQ ID NO: 2633712 - RNA, 19 nt, Artificial Sequence
  Description of Artificial Sequence: Synthetic oligonucleotide
cucccuaauuaauucauua

SEQ ID NO: 2633713 - RNA, 19 nt, Artificial Sequence
  Description of Artificial Sequence: Synthetic oligonucleotide
aucuggaggaccacgcaag

SEQ ID NO: 2633714 - RNA, 19 nt, Artificial Sequence
  Description of Artificial Sequence: Synthetic oligonucleotide
agcugggaugccuguuugg

SEQ ID NO: 2633715 - RNA, 19 nt, Artificial Sequence
  Description of Artificial Sequence: Synthetic oligonucleotide
ugcaugcaucaucuacuga

SEQ ID NO: 2633716 - RNA, 19 nt, Artificial Sequence
  Description of Artificial Sequence: Synthetic oligonucleotide
ucagcacggauccuugcuu

SEQ ID NO: 2633717 - RNA, 19 nt, Artificial Sequence
  Description of Artificial Sequence: Synthetic oligonucleotide
ugagaucaggagccugccu

SEQ ID NO: 2633718 - RNA, 19 nt, Artificial Sequence
  Description of Artificial Sequence: Synthetic oligonucleotide
cucauugaugggauuggga

SEQ ID NO: 2633719 - RNA, 19 nt, Artificial Sequence
  Description of Artificial Sequence: Synthetic oligonucleotide
gggauugggaauaagaagu

SEQ ID NO: 2633720 - RNA, 19 nt, Artificial Sequence
  Description of Artificial Sequence: Synthetic oligonucleotide
gucgacucagucugcagca

SEQ ID NO: 2633721 - RNA, 19 nt, Artificial Sequence
  Description of Artificial Sequence: Synthetic oligonucleotide
ggucucauugaugggauug

SEQ ID NO: 2633722 - RNA, 19 nt, Artificial Sequence
  Description of Artificial Sequence: Synthetic oligonucleotide
cugggaugccuguuuggag

SEQ ID NO: 2633723 - RNA, 19 nt, Artificial Sequence
  Description of Artificial Sequence: Synthetic oligonucleotide
acaaacaaugguggucuca

SEQ ID NO: 2633724 - RNA, 19 nt, Artificial Sequence
  Description of Artificial Sequence: Synthetic oligonucleotide
agaagcucacauguuuaca

SEQ ID NO: 2633725 - RNA, 19 nt, Artificial Sequence
  Description of Artificial Sequence: Synthetic oligonucleotide
ugguggucucauugauggg

SEQ ID NO: 2633726 - RNA, 19 nt, Artificial Sequence
  Description of Artificial Sequence: Synthetic oligonucleotide
gaauuccaaauacucccua

SEQ ID NO: 2633727 - RNA, 19 nt, Artificial Sequence
  Description of Artificial Sequence: Synthetic oligonucleotide
ucagugacggucgccauuu

SEQ ID NO: 2633728 - RNA, 19 nt, Artificial Sequence
  Description of Artificial Sequence: Synthetic oligonucleotide
guucacggaugagaaacug

SEQ ID NO: 2633729 - RNA, 19 nt, Artificial Sequence
  Description of Artificial Sequence: Synthetic oligonucleotide
auggcacuauggguuggcc

SEQ ID NO: 2633730 - RNA, 19 nt, Artificial Sequence
  Description of Artificial Sequence: Synthetic oligonucleotide
uaaaccuugaggggcugaa

SEQ ID NO: 2633731 - RNA, 19 nt, Artificial Sequence
  Description of Artificial Sequence: Synthetic oligonucleotide
gcauuuaguucacggauga

SEQ ID NO: 2633732 - RNA, 19 nt, Artificial Sequence
  Description of Artificial Sequence: Synthetic oligonucleotide
guuuacaaacaaugguggu

SEQ ID NO: 2633733 - RNA, 19 nt, Artificial Sequence
  Description of Artificial Sequence: Synthetic oligonucleotide
agguguccuuuaaaacagc

SEQ ID NO: 2633734 - RNA, 19 nt, Artificial Sequence
  Description of Artificial Sequence: Synthetic oligonucleotide
auagaagcucacauguuua

SEQ ID NO: 2633735 - RNA, 19 nt, Artificial Sequence
  Description of Artificial Sequence: Synthetic oligonucleotide
cagucauggugcucagccc

SEQ ID NO: 2633736 - RNA, 19 nt, Artificial Sequence
  Description of Artificial Sequence: Synthetic oligonucleotide
ggguuggccagauucugcc

SEQ ID NO: 2633737 - RNA, 19 nt, Artificial Sequence
  Description of Artificial Sequence: Synthetic oligonucleotide
cagggcguugaaaauuuca

SEQ ID NO: 2633738 - RNA, 19 nt, Artificial Sequence
  Description of Artificial Sequence: Synthetic oligonucleotide
gcguugaaaauuucagcac

SEQ ID NO: 2633739 - RNA, 19 nt, Artificial Sequence
  Description of Artificial Sequence: Synthetic oligonucleotide
cagauucugccaugaggac

SEQ ID NO: 2633740 - RNA, 19 nt, Artificial Sequence
  Description of Artificial Sequence: Synthetic oligonucleotide
ccuuuaaaacagcuuucag

SEQ ID NO: 2633741 - RNA, 19 nt, Artificial Sequence
  Description of Artificial Sequence: Synthetic oligonucleotide
auuccauauaacagaggaa

SEQ ID NO: 2633742 - RNA, 19 nt, Artificial Sequence
  Description of Artificial Sequence: Synthetic oligonucleotide
uugauucuucaaaggcauu

SEQ ID NO: 2633743 - RNA, 19 nt, Artificial Sequence
  Description of Artificial Sequence: Synthetic oligonucleotide
agccccguguccuuccuca

SEQ ID NO: 2633744 - RNA, 19 nt, Artificial Sequence
  Description of Artificial Sequence: Synthetic oligonucleotide
ggcauuuaguucacggaug

SEQ ID NO: 2633745 - RNA, 19 nt, Artificial Sequence
  Description of Artificial Sequence: Synthetic oligonucleotide
cauuuaguucacggaugag

SEQ ID NO: 2633746 - RNA, 19 nt, Artificial Sequence
  Description of Artificial Sequence: Synthetic oligonucleotide
uugaggggcugaauauaua

SEQ ID NO: 2633747 - RNA, 19 nt, Artificial Sequence
  Description of Artificial Sequence: Synthetic oligonucleotide
caaaggcauuuaguucacg

SEQ ID NO: 2633748 - RNA, 19 nt, Artificial Sequence
  Description of Artificial Sequence: Synthetic oligonucleotide
ggggcugaauauauagaag

SEQ ID NO: 2633749 - RNA, 19 nt, Artificial Sequence
  Description of Artificial Sequence: Synthetic oligonucleotide
gaggggcugaauauauaga

SEQ ID NO: 2633750 - RNA, 19 nt, Artificial Sequence
  Description of Artificial Sequence: Synthetic oligonucleotide
agugucgacucagucugca

SEQ ID NO: 2633751 - RNA, 19 nt, Artificial Sequence
  Description of Artificial Sequence: Synthetic oligonucleotide
uuccucaggugguugucau

SEQ ID NO: 2633752 - RNA, 19 nt, Artificial Sequence
  Description of Artificial Sequence: Synthetic oligonucleotide
gaggaccacgcaagaaaug

SEQ ID NO: 2633753 - RNA, 19 nt, Artificial Sequence
  Description of Artificial Sequence: Synthetic oligonucleotide
ggaugagaaacugucuguc

SEQ ID NO: 2633754 - RNA, 19 nt, Artificial Sequence
  Description of Artificial Sequence: Synthetic oligonucleotide
cugagaucaggagccugcc

SEQ ID NO: 2633755 - RNA, 19 nt, Artificial Sequence
  Description of Artificial Sequence: Synthetic oligonucleotide
ggcuguguacuuauauuug

SEQ ID NO: 2633756 - RNA, 19 nt, Artificial Sequence
  Description of Artificial Sequence: Synthetic oligonucleotide
cacaugcacagcugagauc

SEQ ID NO: 2633757 - RNA, 19 nt, Artificial Sequence
  Description of Artificial Sequence: Synthetic oligonucleotide
auggguuggccagauucug

SEQ ID NO: 2633758 - RNA, 19 nt, Artificial Sequence
  Description of Artificial Sequence: Synthetic oligonucleotide
augggcgggguucgugauc

SEQ ID NO: 2633759 - RNA, 19 nt, Artificial Sequence
  Description of Artificial Sequence: Synthetic oligonucleotide
ggugguugucauuuggucu

SEQ ID NO: 2633760 - RNA, 19 nt, Artificial Sequence
  Description of Artificial Sequence: Synthetic oligonucleotide
agcacguucugcaugccau

SEQ ID NO: 2633761 - RNA, 19 nt, Artificial Sequence
  Description of Artificial Sequence: Synthetic oligonucleotide
gugucgacucagucugcag

SEQ ID NO: 2633762 - RNA, 19 nt, Artificial Sequence
  Description of Artificial Sequence: Synthetic oligonucleotide
aguucacggaugagaaacu

SEQ ID NO: 2633763 - RNA, 19 nt, Artificial Sequence
  Description of Artificial Sequence: Synthetic oligonucleotide
guacuuauauuuguugaau

SEQ ID NO: 2633764 - RNA, 19 nt, Artificial Sequence
  Description of Artificial Sequence: Synthetic oligonucleotide
gguuggagugucgacucag

SEQ ID NO: 2633765 - RNA, 19 nt, Artificial Sequence
  Description of Artificial Sequence: Synthetic oligonucleotide
uggucuucuguugggcuuc

SEQ ID NO: 2633766 - RNA, 19 nt, Artificial Sequence
  Description of Artificial Sequence: Synthetic oligonucleotide
gcugagaucaggagccugc

SEQ ID NO: 2633767 - RNA, 19 nt, Artificial Sequence
  Description of Artificial Sequence: Synthetic oligonucleotide
aaaccuugaggggcugaau

SEQ ID NO: 2633768 - RNA, 19 nt, Artificial Sequence
  Description of Artificial Sequence: Synthetic oligonucleotide
caugcaucaucuacugacu

SEQ ID NO: 2633769 - RNA, 19 nt, Artificial Sequence
  Description of Artificial Sequence: Synthetic oligonucleotide
cuuuucacaggugcaguaa

SEQ ID NO: 2633770 - RNA, 19 nt, Artificial Sequence
  Description of Artificial Sequence: Synthetic oligonucleotide
cuugaggggcugaauauau

SEQ ID NO: 2633771 - RNA, 19 nt, Artificial Sequence
  Description of Artificial Sequence: Synthetic oligonucleotide
uggccagauucugccauga

SEQ ID NO: 2633772 - RNA, 19 nt, Artificial Sequence
  Description of Artificial Sequence: Synthetic oligonucleotide
gaggcuguguacuuauauu

SEQ ID NO: 2633773 - RNA, 19 nt, Artificial Sequence
  Description of Artificial Sequence: Synthetic oligonucleotide
aguaaaccuugaggggcug

SEQ ID NO: 2633774 - RNA, 19 nt, Artificial Sequence
  Description of Artificial Sequence: Synthetic oligonucleotide
gugguugucauuuggucuu

SEQ ID NO: 2633775 - RNA, 19 nt, Artificial Sequence
  Description of Artificial Sequence: Synthetic oligonucleotide
caucuggaggaccacgcaa

SEQ ID NO: 2633776 - RNA, 19 nt, Artificial Sequence
  Description of Artificial Sequence: Synthetic oligonucleotide
aaugaugggcgggguucgu

SEQ ID NO: 2633777 - RNA, 19 nt, Artificial Sequence
  Description of Artificial Sequence: Synthetic oligonucleotide
gcucacauguuuacaaaca

SEQ ID NO: 2633778 - RNA, 19 nt, Artificial Sequence
  Description of Artificial Sequence: Synthetic oligonucleotide
auguccuaacacucccuuu

SEQ ID NO: 2633779 - RNA, 19 nt, Artificial Sequence
  Description of Artificial Sequence: Synthetic oligonucleotide
augccuguuuggagguugg

SEQ ID NO: 2633780 - RNA, 19 nt, Artificial Sequence
  Description of Artificial Sequence: Synthetic oligonucleotide
cucagccccguguccuucc

SEQ ID NO: 2633781 - RNA, 19 nt, Artificial Sequence
  Description of Artificial Sequence: Synthetic oligonucleotide
acagaggaauugaguuauc

SEQ ID NO: 2633782 - RNA, 19 nt, Artificial Sequence
  Description of Artificial Sequence: Synthetic oligonucleotide
caugaagcucuucagucau

SEQ ID NO: 2633783 - RNA, 19 nt, Artificial Sequence
  Description of Artificial Sequence: Synthetic oligonucleotide
uugaugggauugggaauaa

SEQ ID NO: 2633784 - RNA, 19 nt, Artificial Sequence
  Description of Artificial Sequence: Synthetic oligonucleotide
cagcugggaugccuguuug

SEQ ID NO: 2633785 - RNA, 19 nt, Artificial Sequence
  Description of Artificial Sequence: Synthetic oligonucleotide
gcuguguacuuauauuugu

SEQ ID NO: 2633786 - RNA, 19 nt, Artificial Sequence
  Description of Artificial Sequence: Synthetic oligonucleotide
caugcacagcugagaucag

SEQ ID NO: 2633787 - RNA, 19 nt, Artificial Sequence
  Description of Artificial Sequence: Synthetic oligonucleotide
acggauccuugcuuuuaaa

SEQ ID NO: 2633788 - RNA, 19 nt, Artificial Sequence
  Description of Artificial Sequence: Synthetic oligonucleotide
agguuggagugucgacuca

SEQ ID NO: 2633789 - RNA, 19 nt, Artificial Sequence
  Description of Artificial Sequence: Synthetic oligonucleotide
cacgcaagaaaugggcuaa

SEQ ID NO: 2633790 - RNA, 19 nt, Artificial Sequence
  Description of Artificial Sequence: Synthetic oligonucleotide
gccuguuuggagguuggag

SEQ ID NO: 2633791 - RNA, 19 nt, Artificial Sequence
  Description of Artificial Sequence: Synthetic oligonucleotide
uacugacugcuugcacagc

SEQ ID NO: 2633792 - RNA, 19 nt, Artificial Sequence
  Description of Artificial Sequence: Synthetic oligonucleotide
caucuacugacugcuugca

SEQ ID NO: 2633793 - RNA, 19 nt, Artificial Sequence
  Description of Artificial Sequence: Synthetic oligonucleotide
ucagccccguguccuuccu

SEQ ID NO: 2633794 - RNA, 19 nt, Artificial Sequence
  Description of Artificial Sequence: Synthetic oligonucleotide
ucgacucagucugcagcac

SEQ ID NO: 2633795 - RNA, 19 nt, Artificial Sequence
  Description of Artificial Sequence: Synthetic oligonucleotide
augaugggcgggguucgug

SEQ ID NO: 2633796 - RNA, 19 nt, Artificial Sequence
  Description of Artificial Sequence: Synthetic oligonucleotide
agcacggauccuugcuuuu

SEQ ID NO: 2633797 - RNA, 19 nt, Artificial Sequence
  Description of Artificial Sequence: Synthetic oligonucleotide
agacaaugaugggcggggu

SEQ ID NO: 2633798 - RNA, 19 nt, Artificial Sequence
  Description of Artificial Sequence: Synthetic oligonucleotide
gacucagucugcagcacgu

SEQ ID NO: 2633799 - RNA, 19 nt, Artificial Sequence
  Description of Artificial Sequence: Synthetic oligonucleotide
caguaaaccuugaggggcu

SEQ ID NO: 2633800 - RNA, 19 nt, Artificial Sequence
  Description of Artificial Sequence: Synthetic oligonucleotide
ugguugucauuuggucuuc

SEQ ID NO: 2633801 - RNA, 19 nt, Artificial Sequence
  Description of Artificial Sequence: Synthetic oligonucleotide
cugucuguccaauggcacu

SEQ ID NO: 2633802 - RNA, 19 nt, Artificial Sequence
  Description of Artificial Sequence: Synthetic oligonucleotide
acucccuaauuaauucauu

SEQ ID NO: 2633803 - RNA, 19 nt, Artificial Sequence
  Description of Artificial Sequence: Synthetic oligonucleotide
cuguguacuuauauuuguu

SEQ ID NO: 2633804 - RNA, 19 nt, Artificial Sequence
  Description of Artificial Sequence: Synthetic oligonucleotide
cccuaauuaauucauuaau

SEQ ID NO: 2633805 - RNA, 19 nt, Artificial Sequence
  Description of Artificial Sequence: Synthetic oligonucleotide
guaaaccuugaggggcuga

SEQ ID NO: 2633806 - RNA, 19 nt, Artificial Sequence
  Description of Artificial Sequence: Synthetic oligonucleotide
cagcaugaagcucuucagu

SEQ ID NO: 2633807 - RNA, 19 nt, Artificial Sequence
  Description of Artificial Sequence: Synthetic oligonucleotide
ggcugaauauauagaagcu

SEQ ID NO: 2633808 - RNA, 19 nt, Artificial Sequence
  Description of Artificial Sequence: Synthetic oligonucleotide
uccucaggugguugucauu

SEQ ID NO: 2633809 - RNA, 19 nt, Artificial Sequence
  Description of Artificial Sequence: Synthetic oligonucleotide
gaguuauccuuugauucuu

SEQ ID NO: 2633810 - RNA, 19 nt, Artificial Sequence
  Description of Artificial Sequence: Synthetic oligonucleotide
cacggauccuugcuuuuaa

SEQ ID NO: 2633811 - RNA, 19 nt, Artificial Sequence
  Description of Artificial Sequence: Synthetic oligonucleotide
gacaaugaugggcgggguu

SEQ ID NO: 2633812 - RNA, 19 nt, Artificial Sequence
  Description of Artificial Sequence: Synthetic oligonucleotide
cacggaugagaaacugucu

SEQ ID NO: 2633813 - RNA, 19 nt, Artificial Sequence
  Description of Artificial Sequence: Synthetic oligonucleotide
ccugccuggugcaugcauc

SEQ ID NO: 2633814 - RNA, 19 nt, Artificial Sequence
  Description of Artificial Sequence: Synthetic oligonucleotide
gcuuuucacaggugcagua

SEQ ID NO: 2633815 - RNA, 19 nt, Artificial Sequence
  Description of Artificial Sequence: Synthetic oligonucleotide
ugccuguuuggagguugga

SEQ ID NO: 2633816 - RNA, 19 nt, Artificial Sequence
  Description of Artificial Sequence: Synthetic oligonucleotide
acuauggguuggccagauu

SEQ ID NO: 2633817 - RNA, 19 nt, Artificial Sequence
  Description of Artificial Sequence: Synthetic oligonucleotide
ggagguuggagugucgacu

SEQ ID NO: 2633818 - RNA, 19 nt, Artificial Sequence
  Description of Artificial Sequence: Synthetic oligonucleotide
gguguccuuuaaaacagcu

SEQ ID NO: 2633819 - RNA, 19 nt, Artificial Sequence
  Description of Artificial Sequence: Synthetic oligonucleotide
cagcacguucugcaugcca

SEQ ID NO: 2633820 - RNA, 19 nt, Artificial Sequence
  Description of Artificial Sequence: Synthetic oligonucleotide
gguuggccagauucugcca

SEQ ID NO: 2633821 - RNA, 19 nt, Artificial Sequence
  Description of Artificial Sequence: Synthetic oligonucleotide
cgacucagucugcagcacg

SEQ ID NO: 2633822 - RNA, 19 nt, Artificial Sequence
  Description of Artificial Sequence: Synthetic oligonucleotide
ggccagauucugccaugag

SEQ ID NO: 2633823 - RNA, 19 nt, Artificial Sequence
  Description of Artificial Sequence: Synthetic oligonucleotide
gccuggugcaugcaucauc

SEQ ID NO: 2633824 - RNA, 19 nt, Artificial Sequence
  Description of Artificial Sequence: Synthetic oligonucleotide
gguucgugaucgucaucca

SEQ ID NO: 2633825 - RNA, 19 nt, Artificial Sequence
  Description of Artificial Sequence: Synthetic oligonucleotide
ggagccugccuggugcaug

SEQ ID NO: 2633826 - RNA, 19 nt, Artificial Sequence
  Description of Artificial Sequence: Synthetic oligonucleotide
gaugggcgggguucgugau

SEQ ID NO: 2633827 - RNA, 19 nt, Artificial Sequence
  Description of Artificial Sequence: Synthetic oligonucleotide
guuggagugucgacucagu

SEQ ID NO: 2633828 - RNA, 19 nt, Artificial Sequence
  Description of Artificial Sequence: Synthetic oligonucleotide
acgcaagaaaugggcuaaa

SEQ ID NO: 2633829 - RNA, 19 nt, Artificial Sequence
  Description of Artificial Sequence: Synthetic oligonucleotide
cuggaggaccacgcaagaa

SEQ ID NO: 2633830 - RNA, 19 nt, Artificial Sequence
  Description of Artificial Sequence: Synthetic oligonucleotide
gcgggguucgugaucguca

SEQ ID NO: 2633831 - RNA, 19 nt, Artificial Sequence
  Description of Artificial Sequence: Synthetic oligonucleotide
ccacgcaagaaaugggcua

SEQ ID NO: 2633832 - RNA, 19 nt, Artificial Sequence
  Description of Artificial Sequence: Synthetic oligonucleotide
gggaugccuguuuggaggu

SEQ ID NO: 2633833 - RNA, 19 nt, Artificial Sequence
  Description of Artificial Sequence: Synthetic oligonucleotide
cuuucagcucagugacggu

SEQ ID NO: 2633834 - RNA, 19 nt, Artificial Sequence
  Description of Artificial Sequence: Synthetic oligonucleotide
ugccuggugcaugcaucau

SEQ ID NO: 2633835 - RNA, 19 nt, Artificial Sequence
  Description of Artificial Sequence: Synthetic oligonucleotide
gaucaggagccugccuggu

SEQ ID NO: 2633836 - RNA, 19 nt, Artificial Sequence
  Description of Artificial Sequence: Synthetic oligonucleotide
cagcacggauccuugcuuu

SEQ ID NO: 2633837 - RNA, 19 nt, Artificial Sequence
  Description of Artificial Sequence: Synthetic oligonucleotide
ccagggcguugaaaauuuc

SEQ ID NO: 2633838 - RNA, 19 nt, Artificial Sequence
  Description of Artificial Sequence: Synthetic oligonucleotide
cgugaucgucauccagggc

SEQ ID NO: 2633839 - RNA, 19 nt, Artificial Sequence
  Description of Artificial Sequence: Synthetic oligonucleotide
cuggugcaugcaucaucua

SEQ ID NO: 2633840 - RNA, 19 nt, Artificial Sequence
  Description of Artificial Sequence: Synthetic oligonucleotide
ccacaugcacagcugagau

SEQ ID NO: 2633841 - RNA, 19 nt, Artificial Sequence
  Description of Artificial Sequence: Synthetic oligonucleotide
cagccccguguccuuccuc

SEQ ID NO: 2633842 - RNA, 19 nt, Artificial Sequence
  Description of Artificial Sequence: Synthetic oligonucleotide
ggcgggguucgugaucguc

SEQ ID NO: 2633843 - RNA, 19 nt, Artificial Sequence
  Description of Artificial Sequence: Synthetic oligonucleotide
gcacagcagcaugaagcuc

SEQ ID NO: 2633844 - RNA, 19 nt, Artificial Sequence
  Description of Artificial Sequence: Synthetic oligonucleotide
ccuugaggggcugaauaua

SEQ ID NO: 2633845 - RNA, 19 nt, Artificial Sequence
  Description of Artificial Sequence: Synthetic oligonucleotide
gggguucgugaucgucauc

SEQ ID NO: 2633846 - RNA, 19 nt, Artificial Sequence
  Description of Artificial Sequence: Synthetic oligonucleotide
cggaugagaaacugucugu

SEQ ID NO: 2633847 - RNA, 19 nt, Artificial Sequence
  Description of Artificial Sequence: Synthetic oligonucleotide
gcacuauggguuggccaga

SEQ ID NO: 2633848 - RNA, 19 nt, Artificial Sequence
  Description of Artificial Sequence: Synthetic oligonucleotide
cggauccuugcuuuuaaau

SEQ ID NO: 2633849 - RNA, 19 nt, Artificial Sequence
  Description of Artificial Sequence: Synthetic oligonucleotide
ccucaggugguugucauuu

SEQ ID NO: 2633850 - RNA, 19 nt, Artificial Sequence
  Description of Artificial Sequence: Synthetic oligonucleotide
gguugucauuuggucuucu

SEQ ID NO: 2633851 - RNA, 19 nt, Artificial Sequence
  Description of Artificial Sequence: Synthetic oligonucleotide
cacuauggguuggccagau

SEQ ID NO: 2633852 - RNA, 19 nt, Artificial Sequence
  Description of Artificial Sequence: Synthetic oligonucleotide
gcacggauccuugcuuuua

SEQ ID NO: 2633853 - RNA, 19 nt, Artificial Sequence
  Description of Artificial Sequence: Synthetic oligonucleotide
gucuguccaauggcacuau

SEQ ID NO: 2633854 - RNA, 19 nt, Artificial Sequence
  Description of Artificial Sequence: Synthetic oligonucleotide
cgcaagaaaugggcuaaaa

SEQ ID NO: 2633855 - RNA, 19 nt, Artificial Sequence
  Description of Artificial Sequence: Synthetic oligonucleotide
cagcugagaucaggagccu

SEQ ID NO: 2633856 - RNA, 19 nt, Artificial Sequence
  Description of Artificial Sequence: Synthetic oligonucleotide
cagugacggucgccauuuu

SEQ ID NO: 2633857 - RNA, 19 nt, Artificial Sequence
  Description of Artificial Sequence: Synthetic oligonucleotide
cgggguucgugaucgucau

SEQ ID NO: 2633858 - RNA, 19 nt, Artificial Sequence
  Description of Artificial Sequence: Synthetic oligonucleotide
gggcgggguucgugaucgu

SEQ ID NO: 2633859 - RNA, 19 nt, Artificial Sequence
  Description of Artificial Sequence: Synthetic oligonucleotide
aaaucuuccacacaaaugu

SEQ ID NO: 2633860 - RNA, 19 nt, Artificial Sequence
  Description of Artificial Sequence: Synthetic oligonucleotide
agcaacauuacauugaagg

SEQ ID NO: 2633861 - RNA, 19 nt, Artificial Sequence
  Description of Artificial Sequence: Synthetic oligonucleotide
auaguuagauaccaguucc

SEQ ID NO: 2633862 - RNA, 19 nt, Artificial Sequence
  Description of Artificial Sequence: Synthetic oligonucleotide
gaaacgagacuguagaagg

SEQ ID NO: 2633863 - RNA, 19 nt, Artificial Sequence
  Description of Artificial Sequence: Synthetic oligonucleotide
acaucagacauauacuugg

SEQ ID NO: 2633864 - RNA, 19 nt, Artificial Sequence
  Description of Artificial Sequence: Synthetic oligonucleotide
uaagauaccaggaucugag

SEQ ID NO: 2633865 - RNA, 19 nt, Artificial Sequence
  Description of Artificial Sequence: Synthetic oligonucleotide
ucuuggagaacaauggcag

SEQ ID NO: 2633866 - RNA, 19 nt, Artificial Sequence
  Description of Artificial Sequence: Synthetic oligonucleotide
aacaauggcagccucacca

SEQ ID NO: 2633867 - RNA, 19 nt, Artificial Sequence
  Description of Artificial Sequence: Synthetic oligonucleotide
uauacuugggacccagugg

SEQ ID NO: 2633868 - RNA, 19 nt, Artificial Sequence
  Description of Artificial Sequence: Synthetic oligonucleotide
uuagauaccaguuccuggc

SEQ ID NO: 2633869 - RNA, 19 nt, Artificial Sequence
  Description of Artificial Sequence: Synthetic oligonucleotide
cucgauguaagauaccagg

SEQ ID NO: 2633870 - RNA, 19 nt, Artificial Sequence
  Description of Artificial Sequence: Synthetic oligonucleotide
ugcacacauaguuagauac

SEQ ID NO: 2633871 - RNA, 19 nt, Artificial Sequence
  Description of Artificial Sequence: Synthetic oligonucleotide
aucaaaaucuuccacacaa

SEQ ID NO: 2633872 - RNA, 19 nt, Artificial Sequence
  Description of Artificial Sequence: Synthetic oligonucleotide
ucagacauauacuugggac

SEQ ID NO: 2633873 - RNA, 19 nt, Artificial Sequence
  Description of Artificial Sequence: Synthetic oligonucleotide
ggaucugagaaguugaggg

SEQ ID NO: 2633874 - RNA, 19 nt, Artificial Sequence
  Description of Artificial Sequence: Synthetic oligonucleotide
acaggaaagagccacucuc

SEQ ID NO: 2633875 - RNA, 19 nt, Artificial Sequence
  Description of Artificial Sequence: Synthetic oligonucleotide
ucgggaggaaccaugacag

SEQ ID NO: 2633876 - RNA, 19 nt, Artificial Sequence
  Description of Artificial Sequence: Synthetic oligonucleotide
ucuuccacacaaauguugc

SEQ ID NO: 2633877 - RNA, 19 nt, Artificial Sequence
  Description of Artificial Sequence: Synthetic oligonucleotide
accaguuccuggcaaagcc

SEQ ID NO: 2633878 - RNA, 19 nt, Artificial Sequence
  Description of Artificial Sequence: Synthetic oligonucleotide
agacauauacuugggaccc

SEQ ID NO: 2633879 - RNA, 19 nt, Artificial Sequence
  Description of Artificial Sequence: Synthetic oligonucleotide
gauaccaggaucugagaag

SEQ ID NO: 2633880 - RNA, 19 nt, Artificial Sequence
  Description of Artificial Sequence: Synthetic oligonucleotide
aagaaaaggccacucaaaa

SEQ ID NO: 2633881 - RNA, 19 nt, Artificial Sequence
  Description of Artificial Sequence: Synthetic oligonucleotide
uucucauggauccagccug

SEQ ID NO: 2633882 - RNA, 19 nt, Artificial Sequence
  Description of Artificial Sequence: Synthetic oligonucleotide
aaggugaggaugaagagug

SEQ ID NO: 2633883 - RNA, 19 nt, Artificial Sequence
  Description of Artificial Sequence: Synthetic oligonucleotide
caaauguugcaccaggggc

SEQ ID NO: 2633884 - RNA, 19 nt, Artificial Sequence
  Description of Artificial Sequence: Synthetic oligonucleotide
acaaauguugcaccagggg

SEQ ID NO: 2633885 - RNA, 19 nt, Artificial Sequence
  Description of Artificial Sequence: Synthetic oligonucleotide
gauguaagauaccaggauc

SEQ ID NO: 2633886 - RNA, 19 nt, Artificial Sequence
  Description of Artificial Sequence: Synthetic oligonucleotide
ugcacuugcucucgaaugg

SEQ ID NO: 2633887 - RNA, 19 nt, Artificial Sequence
  Description of Artificial Sequence: Synthetic oligonucleotide
ugugaucacaggaaagagc

SEQ ID NO: 2633888 - RNA, 19 nt, Artificial Sequence
  Description of Artificial Sequence: Synthetic oligonucleotide
ugaucaaaaucuuccacac

SEQ ID NO: 2633889 - RNA, 19 nt, Artificial Sequence
  Description of Artificial Sequence: Synthetic oligonucleotide
uuugcagacagauaacauc

SEQ ID NO: 2633890 - RNA, 19 nt, Artificial Sequence
  Description of Artificial Sequence: Synthetic oligonucleotide
aaguugagggaaacgagac

SEQ ID NO: 2633891 - RNA, 19 nt, Artificial Sequence
  Description of Artificial Sequence: Synthetic oligonucleotide
gggguuguauucuugaugg

SEQ ID NO: 2633892 - RNA, 19 nt, Artificial Sequence
  Description of Artificial Sequence: Synthetic oligonucleotide
gugaucacaggaaagagcc

SEQ ID NO: 2633893 - RNA, 19 nt, Artificial Sequence
  Description of Artificial Sequence: Synthetic oligonucleotide
cagacagauaacaucagac

SEQ ID NO: 2633894 - RNA, 19 nt, Artificial Sequence
  Description of Artificial Sequence: Synthetic oligonucleotide
guuagauaccaguuccugg

SEQ ID NO: 2633895 - RNA, 19 nt, Artificial Sequence
  Description of Artificial Sequence: Synthetic oligonucleotide
aaggcucuccgguucacac

SEQ ID NO: 2633896 - RNA, 19 nt, Artificial Sequence
  Description of Artificial Sequence: Synthetic oligonucleotide
uuacauugaaggcagcaaa

SEQ ID NO: 2633897 - RNA, 19 nt, Artificial Sequence
  Description of Artificial Sequence: Synthetic oligonucleotide
cagacauauacuugggacc

SEQ ID NO: 2633898 - RNA, 19 nt, Artificial Sequence
  Description of Artificial Sequence: Synthetic oligonucleotide
ucgaauggugaucaaaauc

SEQ ID NO: 2633899 - RNA, 19 nt, Artificial Sequence
  Description of Artificial Sequence: Synthetic oligonucleotide
auugaaggcagcaaacagg

SEQ ID NO: 2633900 - RNA, 19 nt, Artificial Sequence
  Description of Artificial Sequence: Synthetic oligonucleotide
acacaaauguugcaccagg

SEQ ID NO: 2633901 - RNA, 19 nt, Artificial Sequence
  Description of Artificial Sequence: Synthetic oligonucleotide
ucucgaauggugaucaaaa

SEQ ID NO: 2633902 - RNA, 19 nt, Artificial Sequence
  Description of Artificial Sequence: Synthetic oligonucleotide
uucuugaugguacuugcac

SEQ ID NO: 2633903 - RNA, 19 nt, Artificial Sequence
  Description of Artificial Sequence: Synthetic oligonucleotide
ugaagaguggaccugugau

SEQ ID NO: 2633904 - RNA, 19 nt, Artificial Sequence
  Description of Artificial Sequence: Synthetic oligonucleotide
agacagauaacaucagaca

SEQ ID NO: 2633905 - RNA, 19 nt, Artificial Sequence
  Description of Artificial Sequence: Synthetic oligonucleotide
aagaccagcaacauuacau

SEQ ID NO: 2633906 - RNA, 19 nt, Artificial Sequence
  Description of Artificial Sequence: Synthetic oligonucleotide
aagaguggaccugugauca

SEQ ID NO: 2633907 - RNA, 19 nt, Artificial Sequence
  Description of Artificial Sequence: Synthetic oligonucleotide
guugagggaaacgagacug

SEQ ID NO: 2633908 - RNA, 19 nt, Artificial Sequence
  Description of Artificial Sequence: Synthetic oligonucleotide
aaagcccuggucaaagggg

SEQ ID NO: 2633909 - RNA, 19 nt, Artificial Sequence
  Description of Artificial Sequence: Synthetic oligonucleotide
acacucaccacgugcaccg

SEQ ID NO: 2633910 - RNA, 19 nt, Artificial Sequence
  Description of Artificial Sequence: Synthetic oligonucleotide
ucgauguaagauaccagga

SEQ ID NO: 2633911 - RNA, 19 nt, Artificial Sequence
  Description of Artificial Sequence: Synthetic oligonucleotide
uggaccugugaucacagga

SEQ ID NO: 2633912 - RNA, 19 nt, Artificial Sequence
  Description of Artificial Sequence: Synthetic oligonucleotide
agggaaacgagacuguaga

SEQ ID NO: 2633913 - RNA, 19 nt, Artificial Sequence
  Description of Artificial Sequence: Synthetic oligonucleotide
cuuuggacaccacugcagg

SEQ ID NO: 2633914 - RNA, 19 nt, Artificial Sequence
  Description of Artificial Sequence: Synthetic oligonucleotide
aaggcagcaaacaggcucg

SEQ ID NO: 2633915 - RNA, 19 nt, Artificial Sequence
  Description of Artificial Sequence: Synthetic oligonucleotide
aaauguugcaccaggggca

SEQ ID NO: 2633916 - RNA, 19 nt, Artificial Sequence
  Description of Artificial Sequence: Synthetic oligonucleotide
cauaguuagauaccaguuc

SEQ ID NO: 2633917 - RNA, 19 nt, Artificial Sequence
  Description of Artificial Sequence: Synthetic oligonucleotide
uucugagccagccaccuac

SEQ ID NO: 2633918 - RNA, 19 nt, Artificial Sequence
  Description of Artificial Sequence: Synthetic oligonucleotide
uuggagaacaauggcagcc

SEQ ID NO: 2633919 - RNA, 19 nt, Artificial Sequence
  Description of Artificial Sequence: Synthetic oligonucleotide
accacgugcaccgucaugg

SEQ ID NO: 2633920 - RNA, 19 nt, Artificial Sequence
  Description of Artificial Sequence: Synthetic oligonucleotide
gagggcaugguggugaggg

SEQ ID NO: 2633921 - RNA, 19 nt, Artificial Sequence
  Description of Artificial Sequence: Synthetic oligonucleotide
gagaaccguguucaggagg

SEQ ID NO: 2633922 - RNA, 19 nt, Artificial Sequence
  Description of Artificial Sequence: Synthetic oligonucleotide
aaaagaccagcaacauuac

SEQ ID NO: 2633923 - RNA, 19 nt, Artificial Sequence
  Description of Artificial Sequence: Synthetic oligonucleotide
ucuugaugguacuugcacu

SEQ ID NO: 2633924 - RNA, 19 nt, Artificial Sequence
  Description of Artificial Sequence: Synthetic oligonucleotide
aacaucagacauauacuug

SEQ ID NO: 2633925 - RNA, 19 nt, Artificial Sequence
  Description of Artificial Sequence: Synthetic oligonucleotide
guggugcacacauaguuag

SEQ ID NO: 2633926 - RNA, 19 nt, Artificial Sequence
  Description of Artificial Sequence: Synthetic oligonucleotide
ugguacuugcacuugcucu

SEQ ID NO: 2633927 - RNA, 19 nt, Artificial Sequence
  Description of Artificial Sequence: Synthetic oligonucleotide
aacgagacuguagaaggug

SEQ ID NO: 2633928 - RNA, 19 nt, Artificial Sequence
  Description of Artificial Sequence: Synthetic oligonucleotide
ugaugguacuugcacuugc

SEQ ID NO: 2633929 - RNA, 19 nt, Artificial Sequence
  Description of Artificial Sequence: Synthetic oligonucleotide
gaucacaggaaagagccac

SEQ ID NO: 2633930 - RNA, 19 nt, Artificial Sequence
  Description of Artificial Sequence: Synthetic oligonucleotide
uccguucugagccagccac

SEQ ID NO: 2633931 - RNA, 19 nt, Artificial Sequence
  Description of Artificial Sequence: Synthetic oligonucleotide
guuguauucuugaugguac

SEQ ID NO: 2633932 - RNA, 19 nt, Artificial Sequence
  Description of Artificial Sequence: Synthetic oligonucleotide
caaagcccuggucaaaggg

SEQ ID NO: 2633933 - RNA, 19 nt, Artificial Sequence
  Description of Artificial Sequence: Synthetic oligonucleotide
gagaaguugagggaaacga

SEQ ID NO: 2633934 - RNA, 19 nt, Artificial Sequence
  Description of Artificial Sequence: Synthetic oligonucleotide
aaagaccagcaacauuaca

SEQ ID NO: 2633935 - RNA, 19 nt, Artificial Sequence
  Description of Artificial Sequence: Synthetic oligonucleotide
cacaaauguugcaccaggg

SEQ ID NO: 2633936 - RNA, 19 nt, Artificial Sequence
  Description of Artificial Sequence: Synthetic oligonucleotide
agaaccguguucaggaggg

SEQ ID NO: 2633937 - RNA, 19 nt, Artificial Sequence
  Description of Artificial Sequence: Synthetic oligonucleotide
aacccgaagaaaaggccac

SEQ ID NO: 2633938 - RNA, 19 nt, Artificial Sequence
  Description of Artificial Sequence: Synthetic oligonucleotide
uacaagggaacccgaagaa

SEQ ID NO: 2633939 - RNA, 19 nt, Artificial Sequence
  Description of Artificial Sequence: Synthetic oligonucleotide
agccucaccacuuccuagg

SEQ ID NO: 2633940 - RNA, 19 nt, Artificial Sequence
  Description of Artificial Sequence: Synthetic oligonucleotide
agauaccaggaucugagaa

SEQ ID NO: 2633941 - RNA, 19 nt, Artificial Sequence
  Description of Artificial Sequence: Synthetic oligonucleotide
cugugcucgaagauugggg

SEQ ID NO: 2633942 - RNA, 19 nt, Artificial Sequence
  Description of Artificial Sequence: Synthetic oligonucleotide
acuugggacccaguggugc

SEQ ID NO: 2633943 - RNA, 19 nt, Artificial Sequence
  Description of Artificial Sequence: Synthetic oligonucleotide
guucacacucaccacgugc

SEQ ID NO: 2633944 - RNA, 19 nt, Artificial Sequence
  Description of Artificial Sequence: Synthetic oligonucleotide
ucauggauccagccugucc

SEQ ID NO: 2633945 - RNA, 19 nt, Artificial Sequence
  Description of Artificial Sequence: Synthetic oligonucleotide
gaccagcaacauuacauug

SEQ ID NO: 2633946 - RNA, 19 nt, Artificial Sequence
  Description of Artificial Sequence: Synthetic oligonucleotide
agggguuguauucuugaug

SEQ ID NO: 2633947 - RNA, 19 nt, Artificial Sequence
  Description of Artificial Sequence: Synthetic oligonucleotide
auguaagauaccaggaucu

SEQ ID NO: 2633948 - RNA, 19 nt, Artificial Sequence
  Description of Artificial Sequence: Synthetic oligonucleotide
uggacaccacugcaggcgg

SEQ ID NO: 2633949 - RNA, 19 nt, Artificial Sequence
  Description of Artificial Sequence: Synthetic oligonucleotide
gacagauaacaucagacau

SEQ ID NO: 2633950 - RNA, 19 nt, Artificial Sequence
  Description of Artificial Sequence: Synthetic oligonucleotide
ucaaaaucuuccacacaaa

SEQ ID NO: 2633951 - RNA, 19 nt, Artificial Sequence
  Description of Artificial Sequence: Synthetic oligonucleotide
caggaaagagccacucucc

SEQ ID NO: 2633952 - RNA, 19 nt, Artificial Sequence
  Description of Artificial Sequence: Synthetic oligonucleotide
uggugaucaaaaucuucca

SEQ ID NO: 2633953 - RNA, 19 nt, Artificial Sequence
  Description of Artificial Sequence: Synthetic oligonucleotide
caacauuacauugaaggca

SEQ ID NO: 2633954 - RNA, 19 nt, Artificial Sequence
  Description of Artificial Sequence: Synthetic oligonucleotide
gaagaguggaccugugauc

SEQ ID NO: 2633955 - RNA, 19 nt, Artificial Sequence
  Description of Artificial Sequence: Synthetic oligonucleotide
aaacaggcucgggaggaac

SEQ ID NO: 2633956 - RNA, 19 nt, Artificial Sequence
  Description of Artificial Sequence: Synthetic oligonucleotide
augguacuugcacuugcuc

SEQ ID NO: 2633957 - RNA, 19 nt, Artificial Sequence
  Description of Artificial Sequence: Synthetic oligonucleotide
guauucuugaugguacuug

SEQ ID NO: 2633958 - RNA, 19 nt, Artificial Sequence
  Description of Artificial Sequence: Synthetic oligonucleotide
ugcagacagauaacaucag

SEQ ID NO: 2633959 - RNA, 19 nt, Artificial Sequence
  Description of Artificial Sequence: Synthetic oligonucleotide
gauggagccucgauguaag

SEQ ID NO: 2633960 - RNA, 19 nt, Artificial Sequence
  Description of Artificial Sequence: Synthetic oligonucleotide
aagauaccaggaucugaga

SEQ ID NO: 2633961 - RNA, 19 nt, Artificial Sequence
  Description of Artificial Sequence: Synthetic oligonucleotide
auggauccagccugucccc

SEQ ID NO: 2633962 - RNA, 19 nt, Artificial Sequence
  Description of Artificial Sequence: Synthetic oligonucleotide
aguuagauaccaguuccug

SEQ ID NO: 2633963 - RNA, 19 nt, Artificial Sequence
  Description of Artificial Sequence: Synthetic oligonucleotide
uaguuagauaccaguuccu

SEQ ID NO: 2633964 - RNA, 19 nt, Artificial Sequence
  Description of Artificial Sequence: Synthetic oligonucleotide
uuuggacaccacugcaggc

SEQ ID NO: 2633965 - RNA, 19 nt, Artificial Sequence
  Description of Artificial Sequence: Synthetic oligonucleotide
uguaagauaccaggaucug

SEQ ID NO: 2633966 - RNA, 19 nt, Artificial Sequence
  Description of Artificial Sequence: Synthetic oligonucleotide
auaccaggaucugagaagu

SEQ ID NO: 2633967 - RNA, 19 nt, Artificial Sequence
  Description of Artificial Sequence: Synthetic oligonucleotide
aucagacauauacuuggga

SEQ ID NO: 2633968 - RNA, 19 nt, Artificial Sequence
  Description of Artificial Sequence: Synthetic oligonucleotide
ggaaacgagacuguagaag

SEQ ID NO: 2633969 - RNA, 19 nt, Artificial Sequence
  Description of Artificial Sequence: Synthetic oligonucleotide
cuuggagaacaauggcagc

SEQ ID NO: 2633970 - RNA, 19 nt, Artificial Sequence
  Description of Artificial Sequence: Synthetic oligonucleotide
aagggaacccgaagaaaag

SEQ ID NO: 2633971 - RNA, 19 nt, Artificial Sequence
  Description of Artificial Sequence: Synthetic oligonucleotide
cagcaaacaggcucgggag

SEQ ID NO: 2633972 - RNA, 19 nt, Artificial Sequence
  Description of Artificial Sequence: Synthetic oligonucleotide
ugcucucgaauggugauca

SEQ ID NO: 2633973 - RNA, 19 nt, Artificial Sequence
  Description of Artificial Sequence: Synthetic oligonucleotide
cugcugugcucgaagauug

SEQ ID NO: 2633974 - RNA, 19 nt, Artificial Sequence
  Description of Artificial Sequence: Synthetic oligonucleotide
accacugcaggcggaaggc

SEQ ID NO: 2633975 - RNA, 19 nt, Artificial Sequence
  Description of Artificial Sequence: Synthetic oligonucleotide
caagggaacccgaagaaaa

SEQ ID NO: 2633976 - RNA, 19 nt, Artificial Sequence
  Description of Artificial Sequence: Synthetic oligonucleotide
agugguagguccggggugg

SEQ ID NO: 2633977 - RNA, 19 nt, Artificial Sequence
  Description of Artificial Sequence: Synthetic oligonucleotide
uuguauucuugaugguacu

SEQ ID NO: 2633978 - RNA, 19 nt, Artificial Sequence
  Description of Artificial Sequence: Synthetic oligonucleotide
uagauaccaguuccuggca

SEQ ID NO: 2633979 - RNA, 19 nt, Artificial Sequence
  Description of Artificial Sequence: Synthetic oligonucleotide
auuacauugaaggcagcaa

SEQ ID NO: 2633980 - RNA, 19 nt, Artificial Sequence
  Description of Artificial Sequence: Synthetic oligonucleotide
cuacaagggaacccgaaga

SEQ ID NO: 2633981 - RNA, 19 nt, Artificial Sequence
  Description of Artificial Sequence: Synthetic oligonucleotide
gaacccgaagaaaaggcca

SEQ ID NO: 2633982 - RNA, 19 nt, Artificial Sequence
  Description of Artificial Sequence: Synthetic oligonucleotide
acauugaaggcagcaaaca

SEQ ID NO: 2633983 - RNA, 19 nt, Artificial Sequence
  Description of Artificial Sequence: Synthetic oligonucleotide
accaggaucugagaaguug

SEQ ID NO: 2633984 - RNA, 19 nt, Artificial Sequence
  Description of Artificial Sequence: Synthetic oligonucleotide
aguugagggaaacgagacu

SEQ ID NO: 2633985 - RNA, 19 nt, Artificial Sequence
  Description of Artificial Sequence: Synthetic oligonucleotide
cuuccuaggggccccuucc

SEQ ID NO: 2633986 - RNA, 19 nt, Artificial Sequence
  Description of Artificial Sequence: Synthetic oligonucleotide
gagggaaacgagacuguag

SEQ ID NO: 2633987 - RNA, 19 nt, Artificial Sequence
  Description of Artificial Sequence: Synthetic oligonucleotide
ugcucgaagauuggggcug

SEQ ID NO: 2633988 - RNA, 19 nt, Artificial Sequence
  Description of Artificial Sequence: Synthetic oligonucleotide
acuuuggacaccacugcag

SEQ ID NO: 2633989 - RNA, 19 nt, Artificial Sequence
  Description of Artificial Sequence: Synthetic oligonucleotide
ggugaucaaaaucuuccac

SEQ ID NO: 2633990 - RNA, 19 nt, Artificial Sequence
  Description of Artificial Sequence: Synthetic oligonucleotide
gggaggaaccaugacaggg

SEQ ID NO: 2633991 - RNA, 19 nt, Artificial Sequence
  Description of Artificial Sequence: Synthetic oligonucleotide
uugagggaaacgagacugu

SEQ ID NO: 2633992 - RNA, 19 nt, Artificial Sequence
  Description of Artificial Sequence: Synthetic oligonucleotide
uggucaaagggguuguauu

SEQ ID NO: 2633993 - RNA, 19 nt, Artificial Sequence
  Description of Artificial Sequence: Synthetic oligonucleotide
cuguagaaggugaggauga

SEQ ID NO: 2633994 - RNA, 19 nt, Artificial Sequence
  Description of Artificial Sequence: Synthetic oligonucleotide
aagggguuguauucuugau

SEQ ID NO: 2633995 - RNA, 19 nt, Artificial Sequence
  Description of Artificial Sequence: Synthetic oligonucleotide
ucgaagauuggggcugggg

SEQ ID NO: 2633996 - RNA, 19 nt, Artificial Sequence
  Description of Artificial Sequence: Synthetic oligonucleotide
ugaucacaggaaagagcca

SEQ ID NO: 2633997 - RNA, 19 nt, Artificial Sequence
  Description of Artificial Sequence: Synthetic oligonucleotide
augaagaguggaccuguga

SEQ ID NO: 2633998 - RNA, 19 nt, Artificial Sequence
  Description of Artificial Sequence: Synthetic oligonucleotide
caaagggguuguauucuug

SEQ ID NO: 2633999 - RNA, 19 nt, Artificial Sequence
  Description of Artificial Sequence: Synthetic oligonucleotide
cugugaucacaggaaagag

SEQ ID NO: 2634000 - RNA, 19 nt, Artificial Sequence
  Description of Artificial Sequence: Synthetic oligonucleotide
cuccgguucacacucacca

SEQ ID NO: 2634001 - RNA, 19 nt, Artificial Sequence
  Description of Artificial Sequence: Synthetic oligonucleotide
ugcugugcucgaagauugg

SEQ ID NO: 2634002 - RNA, 19 nt, Artificial Sequence
  Description of Artificial Sequence: Synthetic oligonucleotide
aaacgagacuguagaaggu

SEQ ID NO: 2634003 - RNA, 19 nt, Artificial Sequence
  Description of Artificial Sequence: Synthetic oligonucleotide
cacacauaguuagauacca

SEQ ID NO: 2634004 - RNA, 19 nt, Artificial Sequence
  Description of Artificial Sequence: Synthetic oligonucleotide
gagccucgauguaagauac

SEQ ID NO: 2634005 - RNA, 19 nt, Artificial Sequence
  Description of Artificial Sequence: Synthetic oligonucleotide
caggaucugagaaguugag

SEQ ID NO: 2634006 - RNA, 19 nt, Artificial Sequence
  Description of Artificial Sequence: Synthetic oligonucleotide
acuuccuaggggccccuuc

SEQ ID NO: 2634007 - RNA, 19 nt, Artificial Sequence
  Description of Artificial Sequence: Synthetic oligonucleotide
ccacucuccguucugagcc

SEQ ID NO: 2634008 - RNA, 19 nt, Artificial Sequence
  Description of Artificial Sequence: Synthetic oligonucleotide
gaaagagccacucuccguu

SEQ ID NO: 2634009 - RNA, 19 nt, Artificial Sequence
  Description of Artificial Sequence: Synthetic oligonucleotide
acauaguuagauaccaguu

SEQ ID NO: 2634010 - RNA, 19 nt, Artificial Sequence
  Description of Artificial Sequence: Synthetic oligonucleotide
cacauaguuagauaccagu

SEQ ID NO: 2634011 - RNA, 19 nt, Artificial Sequence
  Description of Artificial Sequence: Synthetic oligonucleotide
caccacugcaggcggaagg

SEQ ID NO: 2634012 - RNA, 19 nt, Artificial Sequence
  Description of Artificial Sequence: Synthetic oligonucleotide
cucgggaggaaccaugaca

SEQ ID NO: 2634013 - RNA, 19 nt, Artificial Sequence
  Description of Artificial Sequence: Synthetic oligonucleotide
ggaggaaccaugacagggg

SEQ ID NO: 2634014 - RNA, 19 nt, Artificial Sequence
  Description of Artificial Sequence: Synthetic oligonucleotide
ggucaaagggguuguauuc

SEQ ID NO: 2634015 - RNA, 19 nt, Artificial Sequence
  Description of Artificial Sequence: Synthetic oligonucleotide
ucucauggauccagccugu

SEQ ID NO: 2634016 - RNA, 19 nt, Artificial Sequence
  Description of Artificial Sequence: Synthetic oligonucleotide
agaguggaccugugaucac

SEQ ID NO: 2634017 - RNA, 19 nt, Artificial Sequence
  Description of Artificial Sequence: Synthetic oligonucleotide
aaccguguucaggagggca

SEQ ID NO: 2634018 - RNA, 19 nt, Artificial Sequence
  Description of Artificial Sequence: Synthetic oligonucleotide
guuccuggcaaagcccugg

SEQ ID NO: 2634019 - RNA, 19 nt, Artificial Sequence
  Description of Artificial Sequence: Synthetic oligonucleotide
gaggaugaagaguggaccu

SEQ ID NO: 2634020 - RNA, 19 nt, Artificial Sequence
  Description of Artificial Sequence: Synthetic oligonucleotide
uggagaacaauggcagccu

SEQ ID NO: 2634021 - RNA, 19 nt, Artificial Sequence
  Description of Artificial Sequence: Synthetic oligonucleotide
cuggagaaccguguucagg

SEQ ID NO: 2634022 - RNA, 19 nt, Artificial Sequence
  Description of Artificial Sequence: Synthetic oligonucleotide
cauuacauugaaggcagca

SEQ ID NO: 2634023 - RNA, 19 nt, Artificial Sequence
  Description of Artificial Sequence: Synthetic oligonucleotide
ucuccguucugagccagcc

SEQ ID NO: 2634024 - RNA, 19 nt, Artificial Sequence
  Description of Artificial Sequence: Synthetic oligonucleotide
ucugagccagccaccuaca

SEQ ID NO: 2634025 - RNA, 19 nt, Artificial Sequence
  Description of Artificial Sequence: Synthetic oligonucleotide
acagauaacaucagacaua

SEQ ID NO: 2634026 - RNA, 19 nt, Artificial Sequence
  Description of Artificial Sequence: Synthetic oligonucleotide
uugaugguacuugcacuug

SEQ ID NO: 2634027 - RNA, 19 nt, Artificial Sequence
  Description of Artificial Sequence: Synthetic oligonucleotide
uguauucuugaugguacuu

SEQ ID NO: 2634028 - RNA, 19 nt, Artificial Sequence
  Description of Artificial Sequence: Synthetic oligonucleotide
agggcaugguggugagggc

SEQ ID NO: 2634029 - RNA, 19 nt, Artificial Sequence
  Description of Artificial Sequence: Synthetic oligonucleotide
acucaccacgugcaccguc

SEQ ID NO: 2634030 - RNA, 19 nt, Artificial Sequence
  Description of Artificial Sequence: Synthetic oligonucleotide
auccagccuguccccaugg

SEQ ID NO: 2634031 - RNA, 19 nt, Artificial Sequence
  Description of Artificial Sequence: Synthetic oligonucleotide
guaagauaccaggaucuga

SEQ ID NO: 2634032 - RNA, 19 nt, Artificial Sequence
  Description of Artificial Sequence: Synthetic oligonucleotide
guggauggagccucgaugu

SEQ ID NO: 2634033 - RNA, 19 nt, Artificial Sequence
  Description of Artificial Sequence: Synthetic oligonucleotide
gaaggugaggaugaagagu

SEQ ID NO: 2634034 - RNA, 19 nt, Artificial Sequence
  Description of Artificial Sequence: Synthetic oligonucleotide
guacuugcacuugcucucg

SEQ ID NO: 2634035 - RNA, 19 nt, Artificial Sequence
  Description of Artificial Sequence: Synthetic oligonucleotide
uggugcacacauaguuaga

SEQ ID NO: 2634036 - RNA, 19 nt, Artificial Sequence
  Description of Artificial Sequence: Synthetic oligonucleotide
cuaggggccccuucccugc

SEQ ID NO: 2634037 - RNA, 19 nt, Artificial Sequence
  Description of Artificial Sequence: Synthetic oligonucleotide
uuccuaggggccccuuccc

SEQ ID NO: 2634038 - RNA, 19 nt, Artificial Sequence
  Description of Artificial Sequence: Synthetic oligonucleotide
acacauaguuagauaccag

SEQ ID NO: 2634039 - RNA, 19 nt, Artificial Sequence
  Description of Artificial Sequence: Synthetic oligonucleotide
cccaguggugcacacauag

SEQ ID NO: 2634040 - RNA, 19 nt, Artificial Sequence
  Description of Artificial Sequence: Synthetic oligonucleotide
aauggcagccucaccacuu

SEQ ID NO: 2634041 - RNA, 19 nt, Artificial Sequence
  Description of Artificial Sequence: Synthetic oligonucleotide
uguccccauggucuuugca

SEQ ID NO: 2634042 - RNA, 19 nt, Artificial Sequence
  Description of Artificial Sequence: Synthetic oligonucleotide
acauuacauugaaggcagc

SEQ ID NO: 2634043 - RNA, 19 nt, Artificial Sequence
  Description of Artificial Sequence: Synthetic oligonucleotide
gaccugugaucacaggaaa

SEQ ID NO: 2634044 - RNA, 19 nt, Artificial Sequence
  Description of Artificial Sequence: Synthetic oligonucleotide
gaugaagaguggaccugug

SEQ ID NO: 2634045 - RNA, 19 nt, Artificial Sequence
  Description of Artificial Sequence: Synthetic oligonucleotide
gugaggaugaagaguggac

SEQ ID NO: 2634046 - RNA, 19 nt, Artificial Sequence
  Description of Artificial Sequence: Synthetic oligonucleotide
ugcuguggcuccuguacaa

SEQ ID NO: 2634047 - RNA, 19 nt, Artificial Sequence
  Description of Artificial Sequence: Synthetic oligonucleotide
aguggaccugugaucacag

SEQ ID NO: 2634048 - RNA, 19 nt, Artificial Sequence
  Description of Artificial Sequence: Synthetic oligonucleotide
aggaugaagaguggaccug

SEQ ID NO: 2634049 - RNA, 19 nt, Artificial Sequence
  Description of Artificial Sequence: Synthetic oligonucleotide
gauccagccuguccccaug

SEQ ID NO: 2634050 - RNA, 19 nt, Artificial Sequence
  Description of Artificial Sequence: Synthetic oligonucleotide
uacuugggacccaguggug

SEQ ID NO: 2634051 - RNA, 19 nt, Artificial Sequence
  Description of Artificial Sequence: Synthetic oligonucleotide
caaaaucuuccacacaaau

SEQ ID NO: 2634052 - RNA, 19 nt, Artificial Sequence
  Description of Artificial Sequence: Synthetic oligonucleotide
agccaccuacaagggaacc

SEQ ID NO: 2634053 - RNA, 19 nt, Artificial Sequence
  Description of Artificial Sequence: Synthetic oligonucleotide
ggaacccgaagaaaaggcc

SEQ ID NO: 2634054 - RNA, 19 nt, Artificial Sequence
  Description of Artificial Sequence: Synthetic oligonucleotide
cacuugcucucgaauggug

SEQ ID NO: 2634055 - RNA, 19 nt, Artificial Sequence
  Description of Artificial Sequence: Synthetic oligonucleotide
cugagaaguugagggaaac

SEQ ID NO: 2634056 - RNA, 19 nt, Artificial Sequence
  Description of Artificial Sequence: Synthetic oligonucleotide
accugugaucacaggaaag

SEQ ID NO: 2634057 - RNA, 19 nt, Artificial Sequence
  Description of Artificial Sequence: Synthetic oligonucleotide
uggagccucgauguaagau

SEQ ID NO: 2634058 - RNA, 19 nt, Artificial Sequence
  Description of Artificial Sequence: Synthetic oligonucleotide
cagcaacauuacauugaag

SEQ ID NO: 2634059 - RNA, 19 nt, Artificial Sequence
  Description of Artificial Sequence: Synthetic oligonucleotide
cacgugcaccgucaugggg

SEQ ID NO: 2634060 - RNA, 19 nt, Artificial Sequence
  Description of Artificial Sequence: Synthetic oligonucleotide
acuugcucucgaaugguga

SEQ ID NO: 2634061 - RNA, 19 nt, Artificial Sequence
  Description of Artificial Sequence: Synthetic oligonucleotide
uccgguucacacucaccac

SEQ ID NO: 2634062 - RNA, 19 nt, Artificial Sequence
  Description of Artificial Sequence: Synthetic oligonucleotide
gcagcaaacaggcucggga

SEQ ID NO: 2634063 - RNA, 19 nt, Artificial Sequence
  Description of Artificial Sequence: Synthetic oligonucleotide
cgaauggugaucaaaaucu

SEQ ID NO: 2634064 - RNA, 19 nt, Artificial Sequence
  Description of Artificial Sequence: Synthetic oligonucleotide
acgugcaccgucauggggu

SEQ ID NO: 2634065 - RNA, 19 nt, Artificial Sequence
  Description of Artificial Sequence: Synthetic oligonucleotide
uaccaguuccuggcaaagc

SEQ ID NO: 2634066 - RNA, 19 nt, Artificial Sequence
  Description of Artificial Sequence: Synthetic oligonucleotide
ccgguucacacucaccacg

SEQ ID NO: 2634067 - RNA, 19 nt, Artificial Sequence
  Description of Artificial Sequence: Synthetic oligonucleotide
ccuacaagggaacccgaag

SEQ ID NO: 2634068 - RNA, 19 nt, Artificial Sequence
  Description of Artificial Sequence: Synthetic oligonucleotide
ugagggaaacgagacugua

SEQ ID NO: 2634069 - RNA, 19 nt, Artificial Sequence
  Description of Artificial Sequence: Synthetic oligonucleotide
aggcggaaggcucuccggu

SEQ ID NO: 2634070 - RNA, 19 nt, Artificial Sequence
  Description of Artificial Sequence: Synthetic oligonucleotide
uccuaggggccccuucccu

SEQ ID NO: 2634071 - RNA, 19 nt, Artificial Sequence
  Description of Artificial Sequence: Synthetic oligonucleotide
cagauaacaucagacauau

SEQ ID NO: 2634072 - RNA, 19 nt, Artificial Sequence
  Description of Artificial Sequence: Synthetic oligonucleotide
caggcggaaggcucuccgg

SEQ ID NO: 2634073 - RNA, 19 nt, Artificial Sequence
  Description of Artificial Sequence: Synthetic oligonucleotide
uugcaccaggggcaguggu

SEQ ID NO: 2634074 - RNA, 19 nt, Artificial Sequence
  Description of Artificial Sequence: Synthetic oligonucleotide
cacugcaggcggaaggcuc

SEQ ID NO: 2634075 - RNA, 19 nt, Artificial Sequence
  Description of Artificial Sequence: Synthetic oligonucleotide
acgagacuguagaagguga

SEQ ID NO: 2634076 - RNA, 19 nt, Artificial Sequence
  Description of Artificial Sequence: Synthetic oligonucleotide
caggcaucugcuguggcuc

SEQ ID NO: 2634077 - RNA, 19 nt, Artificial Sequence
  Description of Artificial Sequence: Synthetic oligonucleotide
cucaccacgugcaccguca

SEQ ID NO: 2634078 - RNA, 19 nt, Artificial Sequence
  Description of Artificial Sequence: Synthetic oligonucleotide
cuugaugguacuugcacuu

SEQ ID NO: 2634079 - RNA, 19 nt, Artificial Sequence
  Description of Artificial Sequence: Synthetic oligonucleotide
cagccucaccacuuccuag

SEQ ID NO: 2634080 - RNA, 19 nt, Artificial Sequence
  Description of Artificial Sequence: Synthetic oligonucleotide
uuccuggcaaagcccuggu

SEQ ID NO: 2634081 - RNA, 19 nt, Artificial Sequence
  Description of Artificial Sequence: Synthetic oligonucleotide
gaguggaccugugaucaca

SEQ ID NO: 2634082 - RNA, 19 nt, Artificial Sequence
  Description of Artificial Sequence: Synthetic oligonucleotide
aguggugcacacauaguua

SEQ ID NO: 2634083 - RNA, 19 nt, Artificial Sequence
  Description of Artificial Sequence: Synthetic oligonucleotide
ggcagugguagguccgggg

SEQ ID NO: 2634084 - RNA, 19 nt, Artificial Sequence
  Description of Artificial Sequence: Synthetic oligonucleotide
ccaccuacaagggaacccg

SEQ ID NO: 2634085 - RNA, 19 nt, Artificial Sequence
  Description of Artificial Sequence: Synthetic oligonucleotide
cuuccacacaaauguugca

SEQ ID NO: 2634086 - RNA, 19 nt, Artificial Sequence
  Description of Artificial Sequence: Synthetic oligonucleotide
accgucaugggguccucgu

SEQ ID NO: 2634087 - RNA, 19 nt, Artificial Sequence
  Description of Artificial Sequence: Synthetic oligonucleotide
acuugcacuugcucucgaa

SEQ ID NO: 2634088 - RNA, 19 nt, Artificial Sequence
  Description of Artificial Sequence: Synthetic oligonucleotide
uacuugcacuugcucucga

SEQ ID NO: 2634089 - RNA, 19 nt, Artificial Sequence
  Description of Artificial Sequence: Synthetic oligonucleotide
cacuuuggacaccacugca

SEQ ID NO: 2634090 - RNA, 19 nt, Artificial Sequence
  Description of Artificial Sequence: Synthetic oligonucleotide
ccaguuccuggcaaagccc

SEQ ID NO: 2634091 - RNA, 19 nt, Artificial Sequence
  Description of Artificial Sequence: Synthetic oligonucleotide
ggagccucgauguaagaua

SEQ ID NO: 2634092 - RNA, 19 nt, Artificial Sequence
  Description of Artificial Sequence: Synthetic oligonucleotide
gcaaagcccuggucaaagg

SEQ ID NO: 2634093 - RNA, 19 nt, Artificial Sequence
  Description of Artificial Sequence: Synthetic oligonucleotide
gcagacagauaacaucaga

SEQ ID NO: 2634094 - RNA, 19 nt, Artificial Sequence
  Description of Artificial Sequence: Synthetic oligonucleotide
gacccaguggugcacacau

SEQ ID NO: 2634095 - RNA, 19 nt, Artificial Sequence
  Description of Artificial Sequence: Synthetic oligonucleotide
cagugguagguccggggug

SEQ ID NO: 2634096 - RNA, 19 nt, Artificial Sequence
  Description of Artificial Sequence: Synthetic oligonucleotide
gcugugcucgaagauuggg

SEQ ID NO: 2634097 - RNA, 19 nt, Artificial Sequence
  Description of Artificial Sequence: Synthetic oligonucleotide
ggagaaccguguucaggag

SEQ ID NO: 2634098 - RNA, 19 nt, Artificial Sequence
  Description of Artificial Sequence: Synthetic oligonucleotide
gguuguauucuugauggua

SEQ ID NO: 2634099 - RNA, 19 nt, Artificial Sequence
  Description of Artificial Sequence: Synthetic oligonucleotide
gcacacauaguuagauacc

SEQ ID NO: 2634100 - RNA, 19 nt, Artificial Sequence
  Description of Artificial Sequence: Synthetic oligonucleotide
cuugggacccaguggugca

SEQ ID NO: 2634101 - RNA, 19 nt, Artificial Sequence
  Description of Artificial Sequence: Synthetic oligonucleotide
cucuccgguucacacucac

SEQ ID NO: 2634102 - RNA, 19 nt, Artificial Sequence
  Description of Artificial Sequence: Synthetic oligonucleotide
uccggggugggcgaugaaa

SEQ ID NO: 2634103 - RNA, 19 nt, Artificial Sequence
  Description of Artificial Sequence: Synthetic oligonucleotide
agccucgauguaagauacc

SEQ ID NO: 2634104 - RNA, 19 nt, Artificial Sequence
  Description of Artificial Sequence: Synthetic oligonucleotide
gucaugggguccucgugga

SEQ ID NO: 2634105 - RNA, 19 nt, Artificial Sequence
  Description of Artificial Sequence: Synthetic oligonucleotide
cagccaccuacaagggaac

SEQ ID NO: 2634106 - RNA, 19 nt, Artificial Sequence
  Description of Artificial Sequence: Synthetic oligonucleotide
aggcucuccgguucacacu

SEQ ID NO: 2634107 - RNA, 19 nt, Artificial Sequence
  Description of Artificial Sequence: Synthetic oligonucleotide
aucacaggaaagagccacu

SEQ ID NO: 2634108 - RNA, 19 nt, Artificial Sequence
  Description of Artificial Sequence: Synthetic oligonucleotide
gguccucguggauggagcc

SEQ ID NO: 2634109 - RNA, 19 nt, Artificial Sequence
  Description of Artificial Sequence: Synthetic oligonucleotide
ggugaggaugaagagugga

SEQ ID NO: 2634110 - RNA, 19 nt, Artificial Sequence
  Description of Artificial Sequence: Synthetic oligonucleotide
ccucgauguaagauaccag

SEQ ID NO: 2634111 - RNA, 19 nt, Artificial Sequence
  Description of Artificial Sequence: Synthetic oligonucleotide
gccucgauguaagauacca

SEQ ID NO: 2634112 - RNA, 19 nt, Artificial Sequence
  Description of Artificial Sequence: Synthetic oligonucleotide
aggggcagugguagguccg

SEQ ID NO: 2634113 - RNA, 19 nt, Artificial Sequence
  Description of Artificial Sequence: Synthetic oligonucleotide
gaugguacuugcacuugcu

SEQ ID NO: 2634114 - RNA, 19 nt, Artificial Sequence
  Description of Artificial Sequence: Synthetic oligonucleotide
uggauggagccucgaugua

SEQ ID NO: 2634115 - RNA, 19 nt, Artificial Sequence
  Description of Artificial Sequence: Synthetic oligonucleotide
aggugaggaugaagagugg

SEQ ID NO: 2634116 - RNA, 19 nt, Artificial Sequence
  Description of Artificial Sequence: Synthetic oligonucleotide
uccagccuguccccauggu

SEQ ID NO: 2634117 - RNA, 19 nt, Artificial Sequence
  Description of Artificial Sequence: Synthetic oligonucleotide
cgucaugggguccucgugg

SEQ ID NO: 2634118 - RNA, 19 nt, Artificial Sequence
  Description of Artificial Sequence: Synthetic oligonucleotide
cacaggcaucugcuguggc

SEQ ID NO: 2634119 - RNA, 19 nt, Artificial Sequence
  Description of Artificial Sequence: Synthetic oligonucleotide
ccggggugggcgaugaaag

SEQ ID NO: 2634120 - RNA, 19 nt, Artificial Sequence
  Description of Artificial Sequence: Synthetic oligonucleotide
gggugggcgaugaaagcag

SEQ ID NO: 2634121 - RNA, 19 nt, Artificial Sequence
  Description of Artificial Sequence: Synthetic oligonucleotide
ccagccaccuacaagggaa

SEQ ID NO: 2634122 - RNA, 19 nt, Artificial Sequence
  Description of Artificial Sequence: Synthetic oligonucleotide
gacauauacuugggaccca

SEQ ID NO: 2634123 - RNA, 19 nt, Artificial Sequence
  Description of Artificial Sequence: Synthetic oligonucleotide
ccugugaucacaggaaaga

SEQ ID NO: 2634124 - RNA, 19 nt, Artificial Sequence
  Description of Artificial Sequence: Synthetic oligonucleotide
acucuccguucugagccag

SEQ ID NO: 2634125 - RNA, 19 nt, Artificial Sequence
  Description of Artificial Sequence: Synthetic oligonucleotide
auggagccucgauguaaga

SEQ ID NO: 2634126 - RNA, 19 nt, Artificial Sequence
  Description of Artificial Sequence: Synthetic oligonucleotide
gugcacacauaguuagaua

SEQ ID NO: 2634127 - RNA, 19 nt, Artificial Sequence
  Description of Artificial Sequence: Synthetic oligonucleotide
ggagaacaauggcagccuc

SEQ ID NO: 2634128 - RNA, 19 nt, Artificial Sequence
  Description of Artificial Sequence: Synthetic oligonucleotide
gccucaccacuuccuaggg

SEQ ID NO: 2634129 - RNA, 19 nt, Artificial Sequence
  Description of Artificial Sequence: Synthetic oligonucleotide
agccagccaccuacaaggg

SEQ ID NO: 2634130 - RNA, 19 nt, Artificial Sequence
  Description of Artificial Sequence: Synthetic oligonucleotide
cucuccguucugagccagc

SEQ ID NO: 2634131 - RNA, 19 nt, Artificial Sequence
  Description of Artificial Sequence: Synthetic oligonucleotide
uggauccagccugucccca

SEQ ID NO: 2634132 - RNA, 19 nt, Artificial Sequence
  Description of Artificial Sequence: Synthetic oligonucleotide
cgaugaaagcagcacuuug

SEQ ID NO: 2634133 - RNA, 19 nt, Artificial Sequence
  Description of Artificial Sequence: Synthetic oligonucleotide
cucucgaauggugaucaaa

SEQ ID NO: 2634134 - RNA, 19 nt, Artificial Sequence
  Description of Artificial Sequence: Synthetic oligonucleotide
gccaccuacaagggaaccc

SEQ ID NO: 2634135 - RNA, 19 nt, Artificial Sequence
  Description of Artificial Sequence: Synthetic oligonucleotide
cguggauggagccucgaug

SEQ ID NO: 2634136 - RNA, 19 nt, Artificial Sequence
  Description of Artificial Sequence: Synthetic oligonucleotide
gccacucuccguucugagc

SEQ ID NO: 2634137 - RNA, 19 nt, Artificial Sequence
  Description of Artificial Sequence: Synthetic oligonucleotide
gaaggcucuccgguucaca

SEQ ID NO: 2634138 - RNA, 19 nt, Artificial Sequence
  Description of Artificial Sequence: Synthetic oligonucleotide
gaaccguguucaggagggc

SEQ ID NO: 2634139 - RNA, 19 nt, Artificial Sequence
  Description of Artificial Sequence: Synthetic oligonucleotide
accguguucaggagggcau

SEQ ID NO: 2634140 - RNA, 19 nt, Artificial Sequence
  Description of Artificial Sequence: Synthetic oligonucleotide
cuugcucucgaauggugau

SEQ ID NO: 2634141 - RNA, 19 nt, Artificial Sequence
  Description of Artificial Sequence: Synthetic oligonucleotide
uugggacccaguggugcac

SEQ ID NO: 2634142 - RNA, 19 nt, Artificial Sequence
  Description of Artificial Sequence: Synthetic oligonucleotide
cgagacuguagaaggugag

SEQ ID NO: 2634143 - RNA, 19 nt, Artificial Sequence
  Description of Artificial Sequence: Synthetic oligonucleotide
guggcuccuguacaagugu

SEQ ID NO: 2634144 - RNA, 19 nt, Artificial Sequence
  Description of Artificial Sequence: Synthetic oligonucleotide
gaauggugaucaaaaucuu

SEQ ID NO: 2634145 - RNA, 19 nt, Artificial Sequence
  Description of Artificial Sequence: Synthetic oligonucleotide
gacaccacugcaggcggaa

SEQ ID NO: 2634146 - RNA, 19 nt, Artificial Sequence
  Description of Artificial Sequence: Synthetic oligonucleotide
ggaccugugaucacaggaa

SEQ ID NO: 2634147 - RNA, 19 nt, Artificial Sequence
  Description of Artificial Sequence: Synthetic oligonucleotide
gguucacacucaccacgug

SEQ ID NO: 2634148 - RNA, 19 nt, Artificial Sequence
  Description of Artificial Sequence: Synthetic oligonucleotide
acccgaagaaaaggccacu

SEQ ID NO: 2634149 - RNA, 19 nt, Artificial Sequence
  Description of Artificial Sequence: Synthetic oligonucleotide
cucgaauggugaucaaaau

SEQ ID NO: 2634150 - RNA, 19 nt, Artificial Sequence
  Description of Artificial Sequence: Synthetic oligonucleotide
ggggugggcgaugaaagca

SEQ ID NO: 2634151 - RNA, 19 nt, Artificial Sequence
  Description of Artificial Sequence: Synthetic oligonucleotide
ccacacaaauguugcacca

SEQ ID NO: 2634152 - RNA, 19 nt, Artificial Sequence
  Description of Artificial Sequence: Synthetic oligonucleotide
gggaaacgagacuguagaa

SEQ ID NO: 2634153 - RNA, 19 nt, Artificial Sequence
  Description of Artificial Sequence: Synthetic oligonucleotide
accuacaagggaacccgaa

SEQ ID NO: 2634154 - RNA, 19 nt, Artificial Sequence
  Description of Artificial Sequence: Synthetic oligonucleotide
aguuccuggcaaagcccug

SEQ ID NO: 2634155 - RNA, 19 nt, Artificial Sequence
  Description of Artificial Sequence: Synthetic oligonucleotide
ugcaggcggaaggcucucc

SEQ ID NO: 2634156 - RNA, 19 nt, Artificial Sequence
  Description of Artificial Sequence: Synthetic oligonucleotide
ccucaccacuuccuagggg

SEQ ID NO: 2634157 - RNA, 19 nt, Artificial Sequence
  Description of Artificial Sequence: Synthetic oligonucleotide
aggcagcaaacaggcucgg

SEQ ID NO: 2634158 - RNA, 19 nt, Artificial Sequence
  Description of Artificial Sequence: Synthetic oligonucleotide
acaccacugcaggcggaag

SEQ ID NO: 2634159 - RNA, 19 nt, Artificial Sequence
  Description of Artificial Sequence: Synthetic oligonucleotide
cucgaagauuggggcuggg

SEQ ID NO: 2634160 - RNA, 19 nt, Artificial Sequence
  Description of Artificial Sequence: Synthetic oligonucleotide
gugcucgaagauuggggcu

SEQ ID NO: 2634161 - RNA, 19 nt, Artificial Sequence
  Description of Artificial Sequence: Synthetic oligonucleotide
gugggcgaugaaagcagca

SEQ ID NO: 2634162 - RNA, 19 nt, Artificial Sequence
  Description of Artificial Sequence: Synthetic oligonucleotide
ggaaagagccacucuccgu

SEQ ID NO: 2634163 - RNA, 19 nt, Artificial Sequence
  Description of Artificial Sequence: Synthetic oligonucleotide
gagggcugugucuucucau

SEQ ID NO: 2634164 - RNA, 19 nt, Artificial Sequence
  Description of Artificial Sequence: Synthetic oligonucleotide
ggugcacacauaguuagau

SEQ ID NO: 2634165 - RNA, 19 nt, Artificial Sequence
  Description of Artificial Sequence: Synthetic oligonucleotide
uggugagggcugugucuuc

SEQ ID NO: 2634166 - RNA, 19 nt, Artificial Sequence
  Description of Artificial Sequence: Synthetic oligonucleotide
caccuacaagggaacccga

SEQ ID NO: 2634167 - RNA, 19 nt, Artificial Sequence
  Description of Artificial Sequence: Synthetic oligonucleotide
uaggggccccuucccugcu

SEQ ID NO: 2634168 - RNA, 19 nt, Artificial Sequence
  Description of Artificial Sequence: Synthetic oligonucleotide
gcuguggcuccuguacaag

SEQ ID NO: 2634169 - RNA, 19 nt, Artificial Sequence
  Description of Artificial Sequence: Synthetic oligonucleotide
cuguggcuccuguacaagu

SEQ ID NO: 2634170 - RNA, 19 nt, Artificial Sequence
  Description of Artificial Sequence: Synthetic oligonucleotide
ggcagcaaacaggcucggg

SEQ ID NO: 2634171 - RNA, 19 nt, Artificial Sequence
  Description of Artificial Sequence: Synthetic oligonucleotide
gcucgaagauuggggcugg

SEQ ID NO: 2634172 - RNA, 19 nt, Artificial Sequence
  Description of Artificial Sequence: Synthetic oligonucleotide
cagcacuuuggacaccacu

SEQ ID NO: 2634173 - RNA, 19 nt, Artificial Sequence
  Description of Artificial Sequence: Synthetic oligonucleotide
ccgaagaaaaggccacuca

SEQ ID NO: 2634174 - RNA, 19 nt, Artificial Sequence
  Description of Artificial Sequence: Synthetic oligonucleotide
cacucuccguucugagcca

SEQ ID NO: 2634175 - RNA, 19 nt, Artificial Sequence
  Description of Artificial Sequence: Synthetic oligonucleotide
gcggaaggcucuccgguuc

SEQ ID NO: 2634176 - RNA, 19 nt, Artificial Sequence
  Description of Artificial Sequence: Synthetic oligonucleotide
gggcgaugaaagcagcacu

SEQ ID NO: 2634177 - RNA, 19 nt, Artificial Sequence
  Description of Artificial Sequence: Synthetic oligonucleotide
ggaugaagaguggaccugu

SEQ ID NO: 2634178 - RNA, 19 nt, Artificial Sequence
  Description of Artificial Sequence: Synthetic oligonucleotide
gcccuggucaaagggguug

SEQ ID NO: 2634179 - RNA, 19 nt, Artificial Sequence
  Description of Artificial Sequence: Synthetic oligonucleotide
gggguccucguggauggag

SEQ ID NO: 2634180 - RNA, 19 nt, Artificial Sequence
  Description of Artificial Sequence: Synthetic oligonucleotide
ccacgugcaccgucauggg

SEQ ID NO: 2634181 - RNA, 19 nt, Artificial Sequence
  Description of Artificial Sequence: Synthetic oligonucleotide
ccagccuguccccaugguc

SEQ ID NO: 2634182 - RNA, 19 nt, Artificial Sequence
  Description of Artificial Sequence: Synthetic oligonucleotide
gugucuucucauggaucca

SEQ ID NO: 2634183 - RNA, 19 nt, Artificial Sequence
  Description of Artificial Sequence: Synthetic oligonucleotide
ggcuccuguacaaguguca

SEQ ID NO: 2634184 - RNA, 19 nt, Artificial Sequence
  Description of Artificial Sequence: Synthetic oligonucleotide
ccguucugagccagccacc

SEQ ID NO: 2634185 - RNA, 19 nt, Artificial Sequence
  Description of Artificial Sequence: Synthetic oligonucleotide
cuccguucugagccagcca

SEQ ID NO: 2634186 - RNA, 19 nt, Artificial Sequence
  Description of Artificial Sequence: Synthetic oligonucleotide
gcagugguagguccggggu

SEQ ID NO: 2634187 - RNA, 19 nt, Artificial Sequence
  Description of Artificial Sequence: Synthetic oligonucleotide
aggggccccuucccugcug

SEQ ID NO: 2634188 - RNA, 19 nt, Artificial Sequence
  Description of Artificial Sequence: Synthetic oligonucleotide
cccgaagaaaaggccacuc

SEQ ID NO: 2634189 - RNA, 19 nt, Artificial Sequence
  Description of Artificial Sequence: Synthetic oligonucleotide
caauggcagccucaccacu

SEQ ID NO: 2634190 - RNA, 19 nt, Artificial Sequence
  Description of Artificial Sequence: Synthetic oligonucleotide
gggaccacaggcaucugcu

SEQ ID NO: 2634191 - RNA, 19 nt, Artificial Sequence
  Description of Artificial Sequence: Synthetic oligonucleotide
ggcucgggaggaaccauga

SEQ ID NO: 2634192 - RNA, 19 nt, Artificial Sequence
  Description of Artificial Sequence: Synthetic oligonucleotide
ggccccuucccugcugugc

SEQ ID NO: 2634193 - RNA, 19 nt, Artificial Sequence
  Description of Artificial Sequence: Synthetic oligonucleotide
gcucgggaggaaccaugac

SEQ ID NO: 2634194 - RNA, 19 nt, Artificial Sequence
  Description of Artificial Sequence: Synthetic oligonucleotide
guucugagccagccaccua

SEQ ID NO: 2634195 - RNA, 19 nt, Artificial Sequence
  Description of Artificial Sequence: Synthetic oligonucleotide
gccagccaccuacaaggga

SEQ ID NO: 2634196 - RNA, 19 nt, Artificial Sequence
  Description of Artificial Sequence: Synthetic oligonucleotide
agauaacaucagacauaua

SEQ ID NO: 2634197 - RNA, 19 nt, Artificial Sequence
  Description of Artificial Sequence: Synthetic oligonucleotide
ggcgaugaaagcagcacuu

SEQ ID NO: 2634198 - RNA, 19 nt, Artificial Sequence
  Description of Artificial Sequence: Synthetic oligonucleotide
cgggaggaaccaugacagg

SEQ ID NO: 2634199 - RNA, 19 nt, Artificial Sequence
  Description of Artificial Sequence: Synthetic oligonucleotide
ccgucaugggguccucgug

SEQ ID NO: 2634200 - RNA, 19 nt, Artificial Sequence
  Description of Artificial Sequence: Synthetic oligonucleotide
cggggugggcgaugaaagc

SEQ ID NO: 2634201 - RNA, 19 nt, Artificial Sequence
  Description of Artificial Sequence: Synthetic oligonucleotide
gugcaccgucauggggucc

SEQ ID NO: 2634202 - RNA, 19 nt, Artificial Sequence
  Description of Artificial Sequence: Synthetic oligonucleotide
cgauguaagauaccaggau

SEQ ID NO: 2634203 - RNA, 19 nt, Artificial Sequence
  Description of Artificial Sequence: Synthetic oligonucleotide
ggguuguauucuugauggu

SEQ ID NO: 2634204 - RNA, 19 nt, Artificial Sequence
  Description of Artificial Sequence: Synthetic oligonucleotide
ggugagggcugugucuucu

SEQ ID NO: 2634205 - RNA, 19 nt, Artificial Sequence
  Description of Artificial Sequence: Synthetic oligonucleotide
uagguccggggugggcgau

SEQ ID NO: 2634206 - RNA, 19 nt, Artificial Sequence
  Description of Artificial Sequence: Synthetic oligonucleotide
agguccggggugggcgaug

SEQ ID NO: 2634207 - RNA, 19 nt, Artificial Sequence
  Description of Artificial Sequence: Synthetic oligonucleotide
cugcaggcggaaggcucuc

SEQ ID NO: 2634208 - RNA, 19 nt, Artificial Sequence
  Description of Artificial Sequence: Synthetic oligonucleotide
cgugcaccgucaugggguc

SEQ ID NO: 2634209 - RNA, 19 nt, Artificial Sequence
  Description of Artificial Sequence: Synthetic oligonucleotide
ccguguucaggagggcaug

SEQ ID NO: 2634210 - RNA, 19 nt, Artificial Sequence
  Description of Artificial Sequence: Synthetic oligonucleotide
cuucccugcugugcucgaa

SEQ ID NO: 2634211 - RNA, 19 nt, Artificial Sequence
  Description of Artificial Sequence: Synthetic oligonucleotide
ggacccaguggugcacaca

SEQ ID NO: 2634212 - RNA, 19 nt, Artificial Sequence
  Description of Artificial Sequence: Synthetic oligonucleotide
gcacuugcucucgaauggu

SEQ ID NO: 2634213 - RNA, 19 nt, Artificial Sequence
  Description of Artificial Sequence: Synthetic oligonucleotide
ggauccagccuguccccau

SEQ ID NO: 2634214 - RNA, 19 nt, Artificial Sequence
  Description of Artificial Sequence: Synthetic oligonucleotide
acccaguggugcacacaua

SEQ ID NO: 2634215 - RNA, 19 nt, Artificial Sequence
  Description of Artificial Sequence: Synthetic oligonucleotide
gcucucgaauggugaucaa

SEQ ID NO: 2634216 - RNA, 19 nt, Artificial Sequence
  Description of Artificial Sequence: Synthetic oligonucleotide
gggccccuucccugcugug

SEQ ID NO: 2634217 - RNA, 19 nt, Artificial Sequence
  Description of Artificial Sequence: Synthetic oligonucleotide
ggacaccacugcaggcgga

SEQ ID NO: 2634218 - RNA, 19 nt, Artificial Sequence
  Description of Artificial Sequence: Synthetic oligonucleotide
ggcggaaggcucuccgguu

SEQ ID NO: 2634219 - RNA, 19 nt, Artificial Sequence
  Description of Artificial Sequence: Synthetic oligonucleotide
ccugcugugcucgaagauu

SEQ ID NO: 2634220 - RNA, 19 nt, Artificial Sequence
  Description of Artificial Sequence: Synthetic oligonucleotide
gcgaugaaagcagcacuuu

SEQ ID NO: 2634221 - RNA, 19 nt, Artificial Sequence
  Description of Artificial Sequence: Synthetic oligonucleotide
ggggccccuucccugcugu

SEQ ID NO: 2634222 - RNA, 19 nt, Artificial Sequence
  Description of Artificial Sequence: Synthetic oligonucleotide
cgguucacacucaccacgu

SEQ ID NO: 2634223 - RNA, 19 nt, Artificial Sequence
  Description of Artificial Sequence: Synthetic oligonucleotide
cggaaggcucuccgguuca

SEQ ID NO: 2634224 - RNA, 19 nt, Artificial Sequence
  Description of Artificial Sequence: Synthetic oligonucleotide
ccccuucccugcugugcuc

SEQ ID NO: 2634225 - RNA, 19 nt, Artificial Sequence
  Description of Artificial Sequence: Synthetic oligonucleotide
gggccuggagaaccguguu

SEQ ID NO: 2634226 - RNA, 19 nt, Artificial Sequence
  Description of Artificial Sequence: Synthetic oligonucleotide
ccuucccugcugugcucga

SEQ ID NO: 2634227 - RNA, 19 nt, Artificial Sequence
  Description of Artificial Sequence: Synthetic oligonucleotide
gcucuccgguucacacuca

SEQ ID NO: 2634228 - RNA, 19 nt, Artificial Sequence
  Description of Artificial Sequence: Synthetic oligonucleotide
guccggggugggcgaugaa

SEQ ID NO: 2634229 - RNA, 19 nt, Artificial Sequence
  Description of Artificial Sequence: Synthetic oligonucleotide
caggcucgggaggaaccau

SEQ ID NO: 2634230 - RNA, 19 nt, Artificial Sequence
  Description of Artificial Sequence: Synthetic oligonucleotide
cacucaccacgugcaccgu

SEQ ID NO: 2634231 - RNA, 19 nt, Artificial Sequence
  Description of Artificial Sequence: Synthetic oligonucleotide
cccugcugugcucgaagau

SEQ ID NO: 2634232 - RNA, 19 nt, Artificial Sequence
  Description of Artificial Sequence: Synthetic oligonucleotide
ccacugcaggcggaaggcu

SEQ ID NO: 2634233 - RNA, 19 nt, Artificial Sequence
  Description of Artificial Sequence: Synthetic oligonucleotide
cacuuccuaggggccccuu

SEQ ID NO: 2634234 - RNA, 19 nt, Artificial Sequence
  Description of Artificial Sequence: Synthetic oligonucleotide
gccuguccccauggucuuu

SEQ ID NO: 2634235 - RNA, 19 nt, Artificial Sequence
  Description of Artificial Sequence: Synthetic oligonucleotide
ccacuuccuaggggccccu

SEQ ID NO: 2634236 - RNA, 19 nt, Artificial Sequence
  Description of Artificial Sequence: Synthetic oligonucleotide
aauaucuuuauuuugguuc

SEQ ID NO: 2634237 - RNA, 19 nt, Artificial Sequence
  Description of Artificial Sequence: Synthetic oligonucleotide
uuuauuuugguucuugugg

SEQ ID NO: 2634238 - RNA, 19 nt, Artificial Sequence
  Description of Artificial Sequence: Synthetic oligonucleotide
gagacaaagguacaaaugg

SEQ ID NO: 2634239 - RNA, 19 nt, Artificial Sequence
  Description of Artificial Sequence: Synthetic oligonucleotide
auuaagcagauguaaaagc

SEQ ID NO: 2634240 - RNA, 19 nt, Artificial Sequence
  Description of Artificial Sequence: Synthetic oligonucleotide
aaagcaaauaucuuuauuu

SEQ ID NO: 2634241 - RNA, 19 nt, Artificial Sequence
  Description of Artificial Sequence: Synthetic oligonucleotide
aaaagcuucuuucugccuc

SEQ ID NO: 2634242 - RNA, 19 nt, Artificial Sequence
  Description of Artificial Sequence: Synthetic oligonucleotide
aaacuauggaaagauuucc

SEQ ID NO: 2634243 - RNA, 19 nt, Artificial Sequence
  Description of Artificial Sequence: Synthetic oligonucleotide
guacaaaugggacugaccg

SEQ ID NO: 2634244 - RNA, 19 nt, Artificial Sequence
  Description of Artificial Sequence: Synthetic oligonucleotide
acuauggaaagauuucccc

SEQ ID NO: 2634245 - RNA, 19 nt, Artificial Sequence
  Description of Artificial Sequence: Synthetic oligonucleotide
agaguuucuagauucgucg

SEQ ID NO: 2634246 - RNA, 19 nt, Artificial Sequence
  Description of Artificial Sequence: Synthetic oligonucleotide
aaauccaaggcucuucguc

SEQ ID NO: 2634247 - RNA, 19 nt, Artificial Sequence
  Description of Artificial Sequence: Synthetic oligonucleotide
uguaucgauauucucaaca

SEQ ID NO: 2634248 - RNA, 19 nt, Artificial Sequence
  Description of Artificial Sequence: Synthetic oligonucleotide
aaaauguaucgauauucuc

SEQ ID NO: 2634249 - RNA, 19 nt, Artificial Sequence
  Description of Artificial Sequence: Synthetic oligonucleotide
aaguagaccuccuuuggac

SEQ ID NO: 2634250 - RNA, 19 nt, Artificial Sequence
  Description of Artificial Sequence: Synthetic oligonucleotide
auagguguugcauauuugg

SEQ ID NO: 2634251 - RNA, 19 nt, Artificial Sequence
  Description of Artificial Sequence: Synthetic oligonucleotide
uuuuagaguuucuagauuc

SEQ ID NO: 2634252 - RNA, 19 nt, Artificial Sequence
  Description of Artificial Sequence: Synthetic oligonucleotide
auucucaacaguuugccuc

SEQ ID NO: 2634253 - RNA, 19 nt, Artificial Sequence
  Description of Artificial Sequence: Synthetic oligonucleotide
uauggaaagauuuccccgg

SEQ ID NO: 2634254 - RNA, 19 nt, Artificial Sequence
  Description of Artificial Sequence: Synthetic oligonucleotide
uuaagcagauguaaaagcu

SEQ ID NO: 2634255 - RNA, 19 nt, Artificial Sequence
  Description of Artificial Sequence: Synthetic oligonucleotide
aaagguacaaaugggacug

SEQ ID NO: 2634256 - RNA, 19 nt, Artificial Sequence
  Description of Artificial Sequence: Synthetic oligonucleotide
aaagcuucuuucugccucc

SEQ ID NO: 2634257 - RNA, 19 nt, Artificial Sequence
  Description of Artificial Sequence: Synthetic oligonucleotide
uguggcuuuaagaugucgg

SEQ ID NO: 2634258 - RNA, 19 nt, Artificial Sequence
  Description of Artificial Sequence: Synthetic oligonucleotide
aaauguaucgauauucuca

SEQ ID NO: 2634259 - RNA, 19 nt, Artificial Sequence
  Description of Artificial Sequence: Synthetic oligonucleotide
aauguaucgauauucucaa

SEQ ID NO: 2634260 - RNA, 19 nt, Artificial Sequence
  Description of Artificial Sequence: Synthetic oligonucleotide
uuuagaguuucuagauucg

SEQ ID NO: 2634261 - RNA, 19 nt, Artificial Sequence
  Description of Artificial Sequence: Synthetic oligonucleotide
uaaaauguaucgauauucu

SEQ ID NO: 2634262 - RNA, 19 nt, Artificial Sequence
  Description of Artificial Sequence: Synthetic oligonucleotide
gaaaauccaaggcucuucg

SEQ ID NO: 2634263 - RNA, 19 nt, Artificial Sequence
  Description of Artificial Sequence: Synthetic oligonucleotide
uguuccagaagagaaaugc

SEQ ID NO: 2634264 - RNA, 19 nt, Artificial Sequence
  Description of Artificial Sequence: Synthetic oligonucleotide
  modified_base (4)..(4): a, c, u, g, unknown or other
  modified_base (9)..(9): a, c, u, g, unknown or other
uucngggunccacuggagg

SEQ ID NO: 2634265 - RNA, 19 nt, Artificial Sequence
  Description of Artificial Sequence: Synthetic oligonucleotide
aacuauggaaagauuuccc

SEQ ID NO: 2634266 - RNA, 19 nt, Artificial Sequence
  Description of Artificial Sequence: Synthetic oligonucleotide
aaaauaacguuggcacucc

SEQ ID NO: 2634267 - RNA, 19 nt, Artificial Sequence
  Description of Artificial Sequence: Synthetic oligonucleotide
uguggagucaccaggaagu

SEQ ID NO: 2634268 - RNA, 19 nt, Artificial Sequence
  Description of Artificial Sequence: Synthetic oligonucleotide
auauucucaacaguuugcc

SEQ ID NO: 2634269 - RNA, 19 nt, Artificial Sequence
  Description of Artificial Sequence: Synthetic oligonucleotide
cuccuuguaaaauguaucg

SEQ ID NO: 2634270 - RNA, 19 nt, Artificial Sequence
  Description of Artificial Sequence: Synthetic oligonucleotide
cuauggaaagauuuccccg

SEQ ID NO: 2634271 - RNA, 19 nt, Artificial Sequence
  Description of Artificial Sequence: Synthetic oligonucleotide
uauuuggugccacaacucc

SEQ ID NO: 2634272 - RNA, 19 nt, Artificial Sequence
  Description of Artificial Sequence: Synthetic oligonucleotide
uuauuuugguucuugugga

SEQ ID NO: 2634273 - RNA, 19 nt, Artificial Sequence
  Description of Artificial Sequence: Synthetic oligonucleotide
agaaaugccacuguccuuc

SEQ ID NO: 2634274 - RNA, 19 nt, Artificial Sequence
  Description of Artificial Sequence: Synthetic oligonucleotide
aacguuggcacuccugauc

SEQ ID NO: 2634275 - RNA, 19 nt, Artificial Sequence
  Description of Artificial Sequence: Synthetic oligonucleotide
  modified_base (16)..(16): a, c, u, g, unknown or other
uccugaucuggauucnggg

SEQ ID NO: 2634276 - RNA, 19 nt, Artificial Sequence
  Description of Artificial Sequence: Synthetic oligonucleotide
uugauuuucuucuggugag

SEQ ID NO: 2634277 - RNA, 19 nt, Artificial Sequence
  Description of Artificial Sequence: Synthetic oligonucleotide
aaccaaagcaaauaucuuu

SEQ ID NO: 2634278 - RNA, 19 nt, Artificial Sequence
  Description of Artificial Sequence: Synthetic oligonucleotide
agcuaccgaaucuuguucc

SEQ ID NO: 2634279 - RNA, 19 nt, Artificial Sequence
  Description of Artificial Sequence: Synthetic oligonucleotide
aauccaaggcucuucgucu

SEQ ID NO: 2634280 - RNA, 19 nt, Artificial Sequence
  Description of Artificial Sequence: Synthetic oligonucleotide
uuguaaaauguaucgauau

SEQ ID NO: 2634281 - RNA, 19 nt, Artificial Sequence
  Description of Artificial Sequence: Synthetic oligonucleotide
acucagaaaauccaaggcu

SEQ ID NO: 2634282 - RNA, 19 nt, Artificial Sequence
  Description of Artificial Sequence: Synthetic oligonucleotide
ucuguugacucgcuucugg

SEQ ID NO: 2634283 - RNA, 19 nt, Artificial Sequence
  Description of Artificial Sequence: Synthetic oligonucleotide
gacucagaaaauccaaggc

SEQ ID NO: 2634284 - RNA, 19 nt, Artificial Sequence
  Description of Artificial Sequence: Synthetic oligonucleotide
acaaaugggacugaccggg

SEQ ID NO: 2634285 - RNA, 19 nt, Artificial Sequence
  Description of Artificial Sequence: Synthetic oligonucleotide
uuuaagaugucggcgcugg

SEQ ID NO: 2634286 - RNA, 19 nt, Artificial Sequence
  Description of Artificial Sequence: Synthetic oligonucleotide
ucaacaguuugccucauuc

SEQ ID NO: 2634287 - RNA, 19 nt, Artificial Sequence
  Description of Artificial Sequence: Synthetic oligonucleotide
auaucuuuauuuugguucu

SEQ ID NO: 2634288 - RNA, 19 nt, Artificial Sequence
  Description of Artificial Sequence: Synthetic oligonucleotide
gaaggcaaguucuucauca

SEQ ID NO: 2634289 - RNA, 19 nt, Artificial Sequence
  Description of Artificial Sequence: Synthetic oligonucleotide
agcaauuagcacauguggc

SEQ ID NO: 2634290 - RNA, 19 nt, Artificial Sequence
  Description of Artificial Sequence: Synthetic oligonucleotide
aagagcuuggguauugagg

SEQ ID NO: 2634291 - RNA, 19 nt, Artificial Sequence
  Description of Artificial Sequence: Synthetic oligonucleotide
agcaaauaucuuuauuuug

SEQ ID NO: 2634292 - RNA, 19 nt, Artificial Sequence
  Description of Artificial Sequence: Synthetic oligonucleotide
ugaaauggcguccuccucu

SEQ ID NO: 2634293 - RNA, 19 nt, Artificial Sequence
  Description of Artificial Sequence: Synthetic oligonucleotide
cagcaauuagcacaugugg

SEQ ID NO: 2634294 - RNA, 19 nt, Artificial Sequence
  Description of Artificial Sequence: Synthetic oligonucleotide
cucagaaaauccaaggcuc

SEQ ID NO: 2634295 - RNA, 19 nt, Artificial Sequence
  Description of Artificial Sequence: Synthetic oligonucleotide
aaguacguuguugauuuuc

SEQ ID NO: 2634296 - RNA, 19 nt, Artificial Sequence
  Description of Artificial Sequence: Synthetic oligonucleotide
uggguauugaggaaggcaa

SEQ ID NO: 2634297 - RNA, 19 nt, Artificial Sequence
  Description of Artificial Sequence: Synthetic oligonucleotide
uggacuggcagaaacuaug

SEQ ID NO: 2634298 - RNA, 19 nt, Artificial Sequence
  Description of Artificial Sequence: Synthetic oligonucleotide
acaaagguacaaaugggac

SEQ ID NO: 2634299 - RNA, 19 nt, Artificial Sequence
  Description of Artificial Sequence: Synthetic oligonucleotide
ucugccuccuuguaaaaug

SEQ ID NO: 2634300 - RNA, 19 nt, Artificial Sequence
  Description of Artificial Sequence: Synthetic oligonucleotide
auaacguuggcacuccuga

SEQ ID NO: 2634301 - RNA, 19 nt, Artificial Sequence
  Description of Artificial Sequence: Synthetic oligonucleotide
uucgucuuuauuuggggug

SEQ ID NO: 2634302 - RNA, 19 nt, Artificial Sequence
  Description of Artificial Sequence: Synthetic oligonucleotide
cuucuggugagccagguac

SEQ ID NO: 2634303 - RNA, 19 nt, Artificial Sequence
  Description of Artificial Sequence: Synthetic oligonucleotide
cauuaagcagauguaaaag

SEQ ID NO: 2634304 - RNA, 19 nt, Artificial Sequence
  Description of Artificial Sequence: Synthetic oligonucleotide
gauauucucaacaguuugc

SEQ ID NO: 2634305 - RNA, 19 nt, Artificial Sequence
  Description of Artificial Sequence: Synthetic oligonucleotide
uauugaggaaggcaaguuc

SEQ ID NO: 2634306 - RNA, 19 nt, Artificial Sequence
  Description of Artificial Sequence: Synthetic oligonucleotide
acguuguugauuuucuucu

SEQ ID NO: 2634307 - RNA, 19 nt, Artificial Sequence
  Description of Artificial Sequence: Synthetic oligonucleotide
uguccuucugaaauggcgu

SEQ ID NO: 2634308 - RNA, 19 nt, Artificial Sequence
  Description of Artificial Sequence: Synthetic oligonucleotide
uacaaaugggacugaccgg

SEQ ID NO: 2634309 - RNA, 19 nt, Artificial Sequence
  Description of Artificial Sequence: Synthetic oligonucleotide
uggaaguagaccuccuuug

SEQ ID NO: 2634310 - RNA, 19 nt, Artificial Sequence
  Description of Artificial Sequence: Synthetic oligonucleotide
aaagauuuccccgggacaa

SEQ ID NO: 2634311 - RNA, 19 nt, Artificial Sequence
  Description of Artificial Sequence: Synthetic oligonucleotide
uguugauuuucuucuggug

SEQ ID NO: 2634312 - RNA, 19 nt, Artificial Sequence
  Description of Artificial Sequence: Synthetic oligonucleotide
guugacucgcuucuggaag

SEQ ID NO: 2634313 - RNA, 19 nt, Artificial Sequence
  Description of Artificial Sequence: Synthetic oligonucleotide
ugcagcaauuagcacaugu

SEQ ID NO: 2634314 - RNA, 19 nt, Artificial Sequence
  Description of Artificial Sequence: Synthetic oligonucleotide
agguguugcauauuuggug

SEQ ID NO: 2634315 - RNA, 19 nt, Artificial Sequence
  Description of Artificial Sequence: Synthetic oligonucleotide
guugcuugcagcaauuagc

SEQ ID NO: 2634316 - RNA, 19 nt, Artificial Sequence
  Description of Artificial Sequence: Synthetic oligonucleotide
uuguggagucaccaggaag

SEQ ID NO: 2634317 - RNA, 19 nt, Artificial Sequence
  Description of Artificial Sequence: Synthetic oligonucleotide
uggugagccagguacaaga

SEQ ID NO: 2634318 - RNA, 19 nt, Artificial Sequence
  Description of Artificial Sequence: Synthetic oligonucleotide
gguguugcauauuuggugc

SEQ ID NO: 2634319 - RNA, 19 nt, Artificial Sequence
  Description of Artificial Sequence: Synthetic oligonucleotide
aggcaaguucuucaucagc

SEQ ID NO: 2634320 - RNA, 19 nt, Artificial Sequence
  Description of Artificial Sequence: Synthetic oligonucleotide
auguaaaagcuucuuucug

SEQ ID NO: 2634321 - RNA, 19 nt, Artificial Sequence
  Description of Artificial Sequence: Synthetic oligonucleotide
cuuuauuugggguggacca

SEQ ID NO: 2634322 - RNA, 19 nt, Artificial Sequence
  Description of Artificial Sequence: Synthetic oligonucleotide
ucuuguggagucaccagga

SEQ ID NO: 2634323 - RNA, 19 nt, Artificial Sequence
  Description of Artificial Sequence: Synthetic oligonucleotide
uacguuguugauuuucuuc

SEQ ID NO: 2634324 - RNA, 19 nt, Artificial Sequence
  Description of Artificial Sequence: Synthetic oligonucleotide
aaggcaaguucuucaucag

SEQ ID NO: 2634325 - RNA, 19 nt, Artificial Sequence
  Description of Artificial Sequence: Synthetic oligonucleotide
uguaaaauguaucgauauu

SEQ ID NO: 2634326 - RNA, 19 nt, Artificial Sequence
  Description of Artificial Sequence: Synthetic oligonucleotide
aaagccuucugugcagccg

SEQ ID NO: 2634327 - RNA, 19 nt, Artificial Sequence
  Description of Artificial Sequence: Synthetic oligonucleotide
uaucgauauucucaacagu

SEQ ID NO: 2634328 - RNA, 19 nt, Artificial Sequence
  Description of Artificial Sequence: Synthetic oligonucleotide
uccccgggacaaaauaacg

SEQ ID NO: 2634329 - RNA, 19 nt, Artificial Sequence
  Description of Artificial Sequence: Synthetic oligonucleotide
uucucaacaguuugccuca

SEQ ID NO: 2634330 - RNA, 19 nt, Artificial Sequence
  Description of Artificial Sequence: Synthetic oligonucleotide
caaaauaacguuggcacuc

SEQ ID NO: 2634331 - RNA, 19 nt, Artificial Sequence
  Description of Artificial Sequence: Synthetic oligonucleotide
ucuagauucgucgauuaau

SEQ ID NO: 2634332 - RNA, 19 nt, Artificial Sequence
  Description of Artificial Sequence: Synthetic oligonucleotide
agaaaauccaaggcucuuc

SEQ ID NO: 2634333 - RNA, 19 nt, Artificial Sequence
  Description of Artificial Sequence: Synthetic oligonucleotide
  modified_base (13)..(13): a, c, u, g, unknown or other
  modified_base (18)..(18): a, c, u, g, unknown or other
ugaucuggauucngggunc

SEQ ID NO: 2634334 - RNA, 19 nt, Artificial Sequence
  Description of Artificial Sequence: Synthetic oligonucleotide
ucuuguuccagaagagaaa

SEQ ID NO: 2634335 - RNA, 19 nt, Artificial Sequence
  Description of Artificial Sequence: Synthetic oligonucleotide
aaucuuguuccagaagaga

SEQ ID NO: 2634336 - RNA, 19 nt, Artificial Sequence
  Description of Artificial Sequence: Synthetic oligonucleotide
  modified_base (8)..(8): a, c, u, g, unknown or other
  modified_base (13)..(13): a, c, u, g, unknown or other
uggauucngggunccacug

SEQ ID NO: 2634337 - RNA, 19 nt, Artificial Sequence
  Description of Artificial Sequence: Synthetic oligonucleotide
uggcuuuaagaugucggcg

SEQ ID NO: 2634338 - RNA, 19 nt, Artificial Sequence
  Description of Artificial Sequence: Synthetic oligonucleotide
uaagcagauguaaaagcuu

SEQ ID NO: 2634339 - RNA, 19 nt, Artificial Sequence
  Description of Artificial Sequence: Synthetic oligonucleotide
agacaaagguacaaauggg

SEQ ID NO: 2634340 - RNA, 19 nt, Artificial Sequence
  Description of Artificial Sequence: Synthetic oligonucleotide
cauucuguugacucgcuuc

SEQ ID NO: 2634341 - RNA, 19 nt, Artificial Sequence
  Description of Artificial Sequence: Synthetic oligonucleotide
gacaaagguacaaauggga

SEQ ID NO: 2634342 - RNA, 19 nt, Artificial Sequence
  Description of Artificial Sequence: Synthetic oligonucleotide
auucuguugacucgcuucu

SEQ ID NO: 2634343 - RNA, 19 nt, Artificial Sequence
  Description of Artificial Sequence: Synthetic oligonucleotide
uuuccauuaagcagaugua

SEQ ID NO: 2634344 - RNA, 19 nt, Artificial Sequence
  Description of Artificial Sequence: Synthetic oligonucleotide
  modified_base (2)..(2): a, c, u, g, unknown or other
unccacuggagguugcuug

SEQ ID NO: 2634345 - RNA, 19 nt, Artificial Sequence
  Description of Artificial Sequence: Synthetic oligonucleotide
  modified_base (3)..(3): a, c, u, g, unknown or other
  modified_base (8)..(8): a, c, u, g, unknown or other
ucngggunccacuggaggu

SEQ ID NO: 2634346 - RNA, 19 nt, Artificial Sequence
  Description of Artificial Sequence: Synthetic oligonucleotide
auggaaagauuuccccggg

SEQ ID NO: 2634347 - RNA, 19 nt, Artificial Sequence
  Description of Artificial Sequence: Synthetic oligonucleotide
aaaauccaaggcucuucgu

SEQ ID NO: 2634348 - RNA, 19 nt, Artificial Sequence
  Description of Artificial Sequence: Synthetic oligonucleotide
auauuuggugccacaacuc

SEQ ID NO: 2634349 - RNA, 19 nt, Artificial Sequence
  Description of Artificial Sequence: Synthetic oligonucleotide
uagguguugcauauuuggu

SEQ ID NO: 2634350 - RNA, 19 nt, Artificial Sequence
  Description of Artificial Sequence: Synthetic oligonucleotide
cuucugugcagccggagag

SEQ ID NO: 2634351 - RNA, 19 nt, Artificial Sequence
  Description of Artificial Sequence: Synthetic oligonucleotide
uuuccccgggacaaaauaa

SEQ ID NO: 2634352 - RNA, 19 nt, Artificial Sequence
  Description of Artificial Sequence: Synthetic oligonucleotide
accuccuuuggacuggcag

SEQ ID NO: 2634353 - RNA, 19 nt, Artificial Sequence
  Description of Artificial Sequence: Synthetic oligonucleotide
uuggguauugaggaaggca

SEQ ID NO: 2634354 - RNA, 19 nt, Artificial Sequence
  Description of Artificial Sequence: Synthetic oligonucleotide
uuccauuaagcagauguaa

SEQ ID NO: 2634355 - RNA, 19 nt, Artificial Sequence
  Description of Artificial Sequence: Synthetic oligonucleotide
guggcuuuaagaugucggc

SEQ ID NO: 2634356 - RNA, 19 nt, Artificial Sequence
  Description of Artificial Sequence: Synthetic oligonucleotide
ucugaggggaacuggguuc

SEQ ID NO: 2634357 - RNA, 19 nt, Artificial Sequence
  Description of Artificial Sequence: Synthetic oligonucleotide
  modified_base (6)..(6): a, c, u, g, unknown or other
  modified_base (11)..(11): a, c, u, g, unknown or other
gauucngggunccacugga

SEQ ID NO: 2634358 - RNA, 19 nt, Artificial Sequence
  Description of Artificial Sequence: Synthetic oligonucleotide
  modified_base (10)..(10): a, c, u, g, unknown or other
  modified_base (15)..(15): a, c, u, g, unknown or other
ucuggauucngggunccac

SEQ ID NO: 2634359 - RNA, 19 nt, Artificial Sequence
  Description of Artificial Sequence: Synthetic oligonucleotide
gaggaaggcaaguucuuca

SEQ ID NO: 2634360 - RNA, 19 nt, Artificial Sequence
  Description of Artificial Sequence: Synthetic oligonucleotide
aauuagcacauguggcuuu

SEQ ID NO: 2634361 - RNA, 19 nt, Artificial Sequence
  Description of Artificial Sequence: Synthetic oligonucleotide
uagcacauguggcuuuaag

SEQ ID NO: 2634362 - RNA, 19 nt, Artificial Sequence
  Description of Artificial Sequence: Synthetic oligonucleotide
cacauguggcuuuaagaug

SEQ ID NO: 2634363 - RNA, 19 nt, Artificial Sequence
  Description of Artificial Sequence: Synthetic oligonucleotide
ggaaguagaccuccuuugg

SEQ ID NO: 2634364 - RNA, 19 nt, Artificial Sequence
  Description of Artificial Sequence: Synthetic oligonucleotide
aucgauauucucaacaguu

SEQ ID NO: 2634365 - RNA, 19 nt, Artificial Sequence
  Description of Artificial Sequence: Synthetic oligonucleotide
uggcguccuccucugaggg

SEQ ID NO: 2634366 - RNA, 19 nt, Artificial Sequence
  Description of Artificial Sequence: Synthetic oligonucleotide
uauucucaacaguuugccu

SEQ ID NO: 2634367 - RNA, 19 nt, Artificial Sequence
  Description of Artificial Sequence: Synthetic oligonucleotide
uuucuagauucgucgauua

SEQ ID NO: 2634368 - RNA, 19 nt, Artificial Sequence
  Description of Artificial Sequence: Synthetic oligonucleotide
ugccacaacuccguggcgg

SEQ ID NO: 2634369 - RNA, 19 nt, Artificial Sequence
  Description of Artificial Sequence: Synthetic oligonucleotide
acguuggcacuccugaucu

SEQ ID NO: 2634370 - RNA, 19 nt, Artificial Sequence
  Description of Artificial Sequence: Synthetic oligonucleotide
guuggcacuccugaucugg

SEQ ID NO: 2634371 - RNA, 19 nt, Artificial Sequence
  Description of Artificial Sequence: Synthetic oligonucleotide
cuggcagaaacuauggaaa

SEQ ID NO: 2634372 - RNA, 19 nt, Artificial Sequence
  Description of Artificial Sequence: Synthetic oligonucleotide
ucgauauucucaacaguuu

SEQ ID NO: 2634373 - RNA, 19 nt, Artificial Sequence
  Description of Artificial Sequence: Synthetic oligonucleotide
uccuuguaaaauguaucga

SEQ ID NO: 2634374 - RNA, 19 nt, Artificial Sequence
  Description of Artificial Sequence: Synthetic oligonucleotide
uuagaguuucuagauucgu

SEQ ID NO: 2634375 - RNA, 19 nt, Artificial Sequence
  Description of Artificial Sequence: Synthetic oligonucleotide
ggcuuuaagaugucggcgc

SEQ ID NO: 2634376 - RNA, 19 nt, Artificial Sequence
  Description of Artificial Sequence: Synthetic oligonucleotide
cagccgacucagaaaaucc

SEQ ID NO: 2634377 - RNA, 19 nt, Artificial Sequence
  Description of Artificial Sequence: Synthetic oligonucleotide
gaaguagaccuccuuugga

SEQ ID NO: 2634378 - RNA, 19 nt, Artificial Sequence
  Description of Artificial Sequence: Synthetic oligonucleotide
uuccccgggacaaaauaac

SEQ ID NO: 2634379 - RNA, 19 nt, Artificial Sequence
  Description of Artificial Sequence: Synthetic oligonucleotide
gcuugcagcaauuagcaca

SEQ ID NO: 2634380 - RNA, 19 nt, Artificial Sequence
  Description of Artificial Sequence: Synthetic oligonucleotide
auuuggugccacaacuccg

SEQ ID NO: 2634381 - RNA, 19 nt, Artificial Sequence
  Description of Artificial Sequence: Synthetic oligonucleotide
uccguggcggcugaaaagc

SEQ ID NO: 2634382 - RNA, 19 nt, Artificial Sequence
  Description of Artificial Sequence: Synthetic oligonucleotide
gaaauggcguccuccucug

SEQ ID NO: 2634383 - RNA, 19 nt, Artificial Sequence
  Description of Artificial Sequence: Synthetic oligonucleotide
aagggcagccgacucagaa

SEQ ID NO: 2634384 - RNA, 19 nt, Artificial Sequence
  Description of Artificial Sequence: Synthetic oligonucleotide
guagaccuccuuuggacug

SEQ ID NO: 2634385 - RNA, 19 nt, Artificial Sequence
  Description of Artificial Sequence: Synthetic oligonucleotide
gaccacuugggacuguuuc

SEQ ID NO: 2634386 - RNA, 19 nt, Artificial Sequence
  Description of Artificial Sequence: Synthetic oligonucleotide
cuuguaaaauguaucgaua

SEQ ID NO: 2634387 - RNA, 19 nt, Artificial Sequence
  Description of Artificial Sequence: Synthetic oligonucleotide
uuaagaugucggcgcuggg

SEQ ID NO: 2634388 - RNA, 19 nt, Artificial Sequence
  Description of Artificial Sequence: Synthetic oligonucleotide
cauagguguugcauauuug

SEQ ID NO: 2634389 - RNA, 19 nt, Artificial Sequence
  Description of Artificial Sequence: Synthetic oligonucleotide
  modified_base (17)..(17): a, c, u, g, unknown or other
cuccugaucuggauucngg

SEQ ID NO: 2634390 - RNA, 19 nt, Artificial Sequence
  Description of Artificial Sequence: Synthetic oligonucleotide
agcuuggguauugaggaag

SEQ ID NO: 2634391 - RNA, 19 nt, Artificial Sequence
  Description of Artificial Sequence: Synthetic oligonucleotide
ggugccacaacuccguggc

SEQ ID NO: 2634392 - RNA, 19 nt, Artificial Sequence
  Description of Artificial Sequence: Synthetic oligonucleotide
aaauaacguuggcacuccu

SEQ ID NO: 2634393 - RNA, 19 nt, Artificial Sequence
  Description of Artificial Sequence: Synthetic oligonucleotide
uaaaagcuucuuucugccu

SEQ ID NO: 2634394 - RNA, 19 nt, Artificial Sequence
  Description of Artificial Sequence: Synthetic oligonucleotide
uuguuccagaagagaaaug

SEQ ID NO: 2634395 - RNA, 19 nt, Artificial Sequence
  Description of Artificial Sequence: Synthetic oligonucleotide
uaccgaaucuuguuccaga

SEQ ID NO: 2634396 - RNA, 19 nt, Artificial Sequence
  Description of Artificial Sequence: Synthetic oligonucleotide
ucagcuaccgaaucuuguu

SEQ ID NO: 2634397 - RNA, 19 nt, Artificial Sequence
  Description of Artificial Sequence: Synthetic oligonucleotide
uggugccacaacuccgugg

SEQ ID NO: 2634398 - RNA, 19 nt, Artificial Sequence
  Description of Artificial Sequence: Synthetic oligonucleotide
  modified_base (14)..(14): a, c, u, g, unknown or other
  modified_base (19)..(19): a, c, u, g, unknown or other
cugaucuggauucngggun

SEQ ID NO: 2634399 - RNA, 19 nt, Artificial Sequence
  Description of Artificial Sequence: Synthetic oligonucleotide
aguuucuagauucgucgau

SEQ ID NO: 2634400 - RNA, 19 nt, Artificial Sequence
  Description of Artificial Sequence: Synthetic oligonucleotide
auuuugguucuuguggagu

SEQ ID NO: 2634401 - RNA, 19 nt, Artificial Sequence
  Description of Artificial Sequence: Synthetic oligonucleotide
guucuuguggagucaccag

SEQ ID NO: 2634402 - RNA, 19 nt, Artificial Sequence
  Description of Artificial Sequence: Synthetic oligonucleotide
uugacucgcuucuggaagu

SEQ ID NO: 2634403 - RNA, 19 nt, Artificial Sequence
  Description of Artificial Sequence: Synthetic oligonucleotide
auggcguccuccucugagg

SEQ ID NO: 2634404 - RNA, 19 nt, Artificial Sequence
  Description of Artificial Sequence: Synthetic oligonucleotide
uuugccucauucuguugac

SEQ ID NO: 2634405 - RNA, 19 nt, Artificial Sequence
  Description of Artificial Sequence: Synthetic oligonucleotide
uguugacucgcuucuggaa

SEQ ID NO: 2634406 - RNA, 19 nt, Artificial Sequence
  Description of Artificial Sequence: Synthetic oligonucleotide
cucgcuucuggaaguagac

SEQ ID NO: 2634407 - RNA, 19 nt, Artificial Sequence
  Description of Artificial Sequence: Synthetic oligonucleotide
ggaaagauuuccccgggac

SEQ ID NO: 2634408 - RNA, 19 nt, Artificial Sequence
  Description of Artificial Sequence: Synthetic oligonucleotide
uuuauuugggguggaccac

SEQ ID NO: 2634409 - RNA, 19 nt, Artificial Sequence
  Description of Artificial Sequence: Synthetic oligonucleotide
  modified_base (7)..(7): a, c, u, g, unknown or other
  modified_base (12)..(12): a, c, u, g, unknown or other
ggauucngggunccacugg

SEQ ID NO: 2634410 - RNA, 19 nt, Artificial Sequence
  Description of Artificial Sequence: Synthetic oligonucleotide
uggaaagauuuccccggga

SEQ ID NO: 2634411 - RNA, 19 nt, Artificial Sequence
  Description of Artificial Sequence: Synthetic oligonucleotide
ugcagccggagagacaaag

SEQ ID NO: 2634412 - RNA, 19 nt, Artificial Sequence
  Description of Artificial Sequence: Synthetic oligonucleotide
uucuagauucgucgauuaa

SEQ ID NO: 2634413 - RNA, 19 nt, Artificial Sequence
  Description of Artificial Sequence: Synthetic oligonucleotide
uucuggugagccagguaca

SEQ ID NO: 2634414 - RNA, 19 nt, Artificial Sequence
  Description of Artificial Sequence: Synthetic oligonucleotide
agguaagggcagccgacuc

SEQ ID NO: 2634415 - RNA, 19 nt, Artificial Sequence
  Description of Artificial Sequence: Synthetic oligonucleotide
agguacaaaugggacugac

SEQ ID NO: 2634416 - RNA, 19 nt, Artificial Sequence
  Description of Artificial Sequence: Synthetic oligonucleotide
uguugcauauuuggugcca

SEQ ID NO: 2634417 - RNA, 19 nt, Artificial Sequence
  Description of Artificial Sequence: Synthetic oligonucleotide
guaagggcagccgacucag

SEQ ID NO: 2634418 - RNA, 19 nt, Artificial Sequence
  Description of Artificial Sequence: Synthetic oligonucleotide
uacaagagcuuggguauug

SEQ ID NO: 2634419 - RNA, 19 nt, Artificial Sequence
  Description of Artificial Sequence: Synthetic oligonucleotide
auuuccccgggacaaaaua

SEQ ID NO: 2634420 - RNA, 19 nt, Artificial Sequence
  Description of Artificial Sequence: Synthetic oligonucleotide
accaaagcaaauaucuuua

SEQ ID NO: 2634421 - RNA, 19 nt, Artificial Sequence
  Description of Artificial Sequence: Synthetic oligonucleotide
gguugcuugcagcaauuag

SEQ ID NO: 2634422 - RNA, 19 nt, Artificial Sequence
  Description of Artificial Sequence: Synthetic oligonucleotide
uuugguucuuguggaguca

SEQ ID NO: 2634423 - RNA, 19 nt, Artificial Sequence
  Description of Artificial Sequence: Synthetic oligonucleotide
uagaccuccuuuggacugg

SEQ ID NO: 2634424 - RNA, 19 nt, Artificial Sequence
  Description of Artificial Sequence: Synthetic oligonucleotide
caaaugggacugaccgggg

SEQ ID NO: 2634425 - RNA, 19 nt, Artificial Sequence
  Description of Artificial Sequence: Synthetic oligonucleotide
uuucuucauagguguugca

SEQ ID NO: 2634426 - RNA, 19 nt, Artificial Sequence
  Description of Artificial Sequence: Synthetic oligonucleotide
  modified_base (5)..(5): a, c, u, g, unknown or other
  modified_base (10)..(10): a, c, u, g, unknown or other
auucngggunccacuggag

SEQ ID NO: 2634427 - RNA, 19 nt, Artificial Sequence
  Description of Artificial Sequence: Synthetic oligonucleotide
gagagacaaagguacaaau

SEQ ID NO: 2634428 - RNA, 19 nt, Artificial Sequence
  Description of Artificial Sequence: Synthetic oligonucleotide
aggaaggcaaguucuucau

SEQ ID NO: 2634429 - RNA, 19 nt, Artificial Sequence
  Description of Artificial Sequence: Synthetic oligonucleotide
caaagguacaaaugggacu

SEQ ID NO: 2634430 - RNA, 19 nt, Artificial Sequence
  Description of Artificial Sequence: Synthetic oligonucleotide
uuggacuggcagaaacuau

SEQ ID NO: 2634431 - RNA, 19 nt, Artificial Sequence
  Description of Artificial Sequence: Synthetic oligonucleotide
accgaaucuuguuccagaa

SEQ ID NO: 2634432 - RNA, 19 nt, Artificial Sequence
  Description of Artificial Sequence: Synthetic oligonucleotide
ggacuguuuccauuaagca

SEQ ID NO: 2634433 - RNA, 19 nt, Artificial Sequence
  Description of Artificial Sequence: Synthetic oligonucleotide
guguugcauauuuggugcc

SEQ ID NO: 2634434 - RNA, 19 nt, Artificial Sequence
  Description of Artificial Sequence: Synthetic oligonucleotide
caucagcuaccgaaucuug

SEQ ID NO: 2634435 - RNA, 19 nt, Artificial Sequence
  Description of Artificial Sequence: Synthetic oligonucleotide
ucugugcagccggagagac

SEQ ID NO: 2634436 - RNA, 19 nt, Artificial Sequence
  Description of Artificial Sequence: Synthetic oligonucleotide
acaguuugccucauucugu

SEQ ID NO: 2634437 - RNA, 19 nt, Artificial Sequence
  Description of Artificial Sequence: Synthetic oligonucleotide
ugggcuccuuuaaauuaac

SEQ ID NO: 2634438 - RNA, 19 nt, Artificial Sequence
  Description of Artificial Sequence: Synthetic oligonucleotide
auguggcuuuaagaugucg

SEQ ID NO: 2634439 - RNA, 19 nt, Artificial Sequence
  Description of Artificial Sequence: Synthetic oligonucleotide
cgggacaaaauaacguugg

SEQ ID NO: 2634440 - RNA, 19 nt, Artificial Sequence
  Description of Artificial Sequence: Synthetic oligonucleotide
ggaaguacguuguugauuu

SEQ ID NO: 2634441 - RNA, 19 nt, Artificial Sequence
  Description of Artificial Sequence: Synthetic oligonucleotide
cgacucagaaaauccaagg

SEQ ID NO: 2634442 - RNA, 19 nt, Artificial Sequence
  Description of Artificial Sequence: Synthetic oligonucleotide
uuggcacuccugaucugga

SEQ ID NO: 2634443 - RNA, 19 nt, Artificial Sequence
  Description of Artificial Sequence: Synthetic oligonucleotide
aguuugccucauucuguug

SEQ ID NO: 2634444 - RNA, 19 nt, Artificial Sequence
  Description of Artificial Sequence: Synthetic oligonucleotide
uugguucuuguggagucac

SEQ ID NO: 2634445 - RNA, 19 nt, Artificial Sequence
  Description of Artificial Sequence: Synthetic oligonucleotide
uucuggaaguagaccuccu

SEQ ID NO: 2634446 - RNA, 19 nt, Artificial Sequence
  Description of Artificial Sequence: Synthetic oligonucleotide
cuggagguugcuugcagca

SEQ ID NO: 2634447 - RNA, 19 nt, Artificial Sequence
  Description of Artificial Sequence: Synthetic oligonucleotide
gccucauucuguugacucg

SEQ ID NO: 2634448 - RNA, 19 nt, Artificial Sequence
  Description of Artificial Sequence: Synthetic oligonucleotide
cuccguggcggcugaaaag

SEQ ID NO: 2634449 - RNA, 19 nt, Artificial Sequence
  Description of Artificial Sequence: Synthetic oligonucleotide
gacuggcagaaacuaugga

SEQ ID NO: 2634450 - RNA, 19 nt, Artificial Sequence
  Description of Artificial Sequence: Synthetic oligonucleotide
agccagguacaagagcuug

SEQ ID NO: 2634451 - RNA, 19 nt, Artificial Sequence
  Description of Artificial Sequence: Synthetic oligonucleotide
auuugggguggaccacuug

SEQ ID NO: 2634452 - RNA, 19 nt, Artificial Sequence
  Description of Artificial Sequence: Synthetic oligonucleotide
ccuccuuguaaaauguauc

SEQ ID NO: 2634453 - RNA, 19 nt, Artificial Sequence
  Description of Artificial Sequence: Synthetic oligonucleotide
gccggagagacaaagguac

SEQ ID NO: 2634454 - RNA, 19 nt, Artificial Sequence
  Description of Artificial Sequence: Synthetic oligonucleotide
cuugcagcaauuagcacau

SEQ ID NO: 2634455 - RNA, 19 nt, Artificial Sequence
  Description of Artificial Sequence: Synthetic oligonucleotide
cagcuaccgaaucuuguuc

SEQ ID NO: 2634456 - RNA, 19 nt, Artificial Sequence
  Description of Artificial Sequence: Synthetic oligonucleotide
guugcauauuuggugccac

SEQ ID NO: 2634457 - RNA, 19 nt, Artificial Sequence
  Description of Artificial Sequence: Synthetic oligonucleotide
cuaccgaaucuuguuccag

SEQ ID NO: 2634458 - RNA, 19 nt, Artificial Sequence
  Description of Artificial Sequence: Synthetic oligonucleotide
cuagauucgucgauuaauu

SEQ ID NO: 2634459 - RNA, 19 nt, Artificial Sequence
  Description of Artificial Sequence: Synthetic oligonucleotide
cuuuaagaugucggcgcug

SEQ ID NO: 2634460 - RNA, 19 nt, Artificial Sequence
  Description of Artificial Sequence: Synthetic oligonucleotide
gcaauuagcacauguggcu

SEQ ID NO: 2634461 - RNA, 19 nt, Artificial Sequence
  Description of Artificial Sequence: Synthetic oligonucleotide
gggacaaaauaacguuggc

SEQ ID NO: 2634462 - RNA, 19 nt, Artificial Sequence
  Description of Artificial Sequence: Synthetic oligonucleotide
  modified_base (12)..(12): a, c, u, g, unknown or other
  modified_base (17)..(17): a, c, u, g, unknown or other
gaucuggauucnggguncc

SEQ ID NO: 2634463 - RNA, 19 nt, Artificial Sequence
  Description of Artificial Sequence: Synthetic oligonucleotide
gcuccuuuaaauuaacuuu

SEQ ID NO: 2634464 - RNA, 19 nt, Artificial Sequence
  Description of Artificial Sequence: Synthetic oligonucleotide
gguacaagagcuuggguau

SEQ ID NO: 2634465 - RNA, 19 nt, Artificial Sequence
  Description of Artificial Sequence: Synthetic oligonucleotide
uucuuucugccuccuugua

SEQ ID NO: 2634466 - RNA, 19 nt, Artificial Sequence
  Description of Artificial Sequence: Synthetic oligonucleotide
aggaaguacguuguugauu

SEQ ID NO: 2634467 - RNA, 19 nt, Artificial Sequence
  Description of Artificial Sequence: Synthetic oligonucleotide
ucuucuggugagccaggua

SEQ ID NO: 2634468 - RNA, 19 nt, Artificial Sequence
  Description of Artificial Sequence: Synthetic oligonucleotide
aaauggcguccuccucuga

SEQ ID NO: 2634469 - RNA, 19 nt, Artificial Sequence
  Description of Artificial Sequence: Synthetic oligonucleotide
ucuggugagccagguacaa

SEQ ID NO: 2634470 - RNA, 19 nt, Artificial Sequence
  Description of Artificial Sequence: Synthetic oligonucleotide
acuccguggcggcugaaaa

SEQ ID NO: 2634471 - RNA, 19 nt, Artificial Sequence
  Description of Artificial Sequence: Synthetic oligonucleotide
aucagcuaccgaaucuugu

SEQ ID NO: 2634472 - RNA, 19 nt, Artificial Sequence
  Description of Artificial Sequence: Synthetic oligonucleotide
agaccuccuuuggacuggc

SEQ ID NO: 2634473 - RNA, 19 nt, Artificial Sequence
  Description of Artificial Sequence: Synthetic oligonucleotide
uaacguuggcacuccugau

SEQ ID NO: 2634474 - RNA, 19 nt, Artificial Sequence
  Description of Artificial Sequence: Synthetic oligonucleotide
  modified_base (9)..(9): a, c, u, g, unknown or other
  modified_base (14)..(14): a, c, u, g, unknown or other
cuggauucngggunccacu

SEQ ID NO: 2634475 - RNA, 19 nt, Artificial Sequence
  Description of Artificial Sequence: Synthetic oligonucleotide
cacuggagguugcuugcag

SEQ ID NO: 2634476 - RNA, 19 nt, Artificial Sequence
  Description of Artificial Sequence: Synthetic oligonucleotide
ccaggaaguacguuguuga

SEQ ID NO: 2634477 - RNA, 19 nt, Artificial Sequence
  Description of Artificial Sequence: Synthetic oligonucleotide
ccgacucagaaaauccaag

SEQ ID NO: 2634478 - RNA, 19 nt, Artificial Sequence
  Description of Artificial Sequence: Synthetic oligonucleotide
uucugugcagccggagaga

SEQ ID NO: 2634479 - RNA, 19 nt, Artificial Sequence
  Description of Artificial Sequence: Synthetic oligonucleotide
aggggaacuggguucuuuu

SEQ ID NO: 2634480 - RNA, 19 nt, Artificial Sequence
  Description of Artificial Sequence: Synthetic oligonucleotide
gcacauguggcuuuaagau

SEQ ID NO: 2634481 - RNA, 19 nt, Artificial Sequence
  Description of Artificial Sequence: Synthetic oligonucleotide
gcuuggguauugaggaagg

SEQ ID NO: 2634482 - RNA, 19 nt, Artificial Sequence
  Description of Artificial Sequence: Synthetic oligonucleotide
cuucauagguguugcauau

SEQ ID NO: 2634483 - RNA, 19 nt, Artificial Sequence
  Description of Artificial Sequence: Synthetic oligonucleotide
aagguacaaaugggacuga

SEQ ID NO: 2634484 - RNA, 19 nt, Artificial Sequence
  Description of Artificial Sequence: Synthetic oligonucleotide
cugggcuccuuuaaauuaa

SEQ ID NO: 2634485 - RNA, 19 nt, Artificial Sequence
  Description of Artificial Sequence: Synthetic oligonucleotide
ccgggacaaaauaacguug

SEQ ID NO: 2634486 - RNA, 19 nt, Artificial Sequence
  Description of Artificial Sequence: Synthetic oligonucleotide
acucgcuucuggaaguaga

SEQ ID NO: 2634487 - RNA, 19 nt, Artificial Sequence
  Description of Artificial Sequence: Synthetic oligonucleotide
uggagucaccaggaaguac

SEQ ID NO: 2634488 - RNA, 19 nt, Artificial Sequence
  Description of Artificial Sequence: Synthetic oligonucleotide
cuuuggacuggcagaaacu

SEQ ID NO: 2634489 - RNA, 19 nt, Artificial Sequence
  Description of Artificial Sequence: Synthetic oligonucleotide
ccauuaagcagauguaaaa

SEQ ID NO: 2634490 - RNA, 19 nt, Artificial Sequence
  Description of Artificial Sequence: Synthetic oligonucleotide
agggcagccgacucagaaa

SEQ ID NO: 2634491 - RNA, 19 nt, Artificial Sequence
  Description of Artificial Sequence: Synthetic oligonucleotide
uucuguugacucgcuucug

SEQ ID NO: 2634492 - RNA, 19 nt, Artificial Sequence
  Description of Artificial Sequence: Synthetic oligonucleotide
cuguugacucgcuucugga

SEQ ID NO: 2634493 - RNA, 19 nt, Artificial Sequence
  Description of Artificial Sequence: Synthetic oligonucleotide
cuuguuccagaagagaaau

SEQ ID NO: 2634494 - RNA, 19 nt, Artificial Sequence
  Description of Artificial Sequence: Synthetic oligonucleotide
gcacuccugaucuggauuc

SEQ ID NO: 2634495 - RNA, 19 nt, Artificial Sequence
  Description of Artificial Sequence: Synthetic oligonucleotide
ugccuccuuguaaaaugua

SEQ ID NO: 2634496 - RNA, 19 nt, Artificial Sequence
  Description of Artificial Sequence: Synthetic oligonucleotide
ccagguacaagagcuuggg

SEQ ID NO: 2634497 - RNA, 19 nt, Artificial Sequence
  Description of Artificial Sequence: Synthetic oligonucleotide
cugaaauggcguccuccuc

SEQ ID NO: 2634498 - RNA, 19 nt, Artificial Sequence
  Description of Artificial Sequence: Synthetic oligonucleotide
cuucgucuuuauuuggggu

SEQ ID NO: 2634499 - RNA, 19 nt, Artificial Sequence
  Description of Artificial Sequence: Synthetic oligonucleotide
agauuuccccgggacaaaa

SEQ ID NO: 2634500 - RNA, 19 nt, Artificial Sequence
  Description of Artificial Sequence: Synthetic oligonucleotide
  modified_base (11)..(11): a, c, u, g, unknown or other
  modified_base (16)..(16): a, c, u, g, unknown or other
aucuggauucnggguncca

SEQ ID NO: 2634501 - RNA, 19 nt, Artificial Sequence
  Description of Artificial Sequence: Synthetic oligonucleotide
gguaagggcagccgacuca

SEQ ID NO: 2634502 - RNA, 19 nt, Artificial Sequence
  Description of Artificial Sequence: Synthetic oligonucleotide
cauguggcuuuaagauguc

SEQ ID NO: 2634503 - RNA, 19 nt, Artificial Sequence
  Description of Artificial Sequence: Synthetic oligonucleotide
acaagagcuuggguauuga

SEQ ID NO: 2634504 - RNA, 19 nt, Artificial Sequence
  Description of Artificial Sequence: Synthetic oligonucleotide
agccgacucagaaaaucca

SEQ ID NO: 2634505 - RNA, 19 nt, Artificial Sequence
  Description of Artificial Sequence: Synthetic oligonucleotide
gggguggaccacuugggac

SEQ ID NO: 2634506 - RNA, 19 nt, Artificial Sequence
  Description of Artificial Sequence: Synthetic oligonucleotide
acaacuccguggcggcuga

SEQ ID NO: 2634507 - RNA, 19 nt, Artificial Sequence
  Description of Artificial Sequence: Synthetic oligonucleotide
ccucauucuguugacucgc

SEQ ID NO: 2634508 - RNA, 19 nt, Artificial Sequence
  Description of Artificial Sequence: Synthetic oligonucleotide
ggcuccuuuaaauuaacuu

SEQ ID NO: 2634509 - RNA, 19 nt, Artificial Sequence
  Description of Artificial Sequence: Synthetic oligonucleotide
auccaaggcucuucgucuu

SEQ ID NO: 2634510 - RNA, 19 nt, Artificial Sequence
  Description of Artificial Sequence: Synthetic oligonucleotide
auuagcacauguggcuuua

SEQ ID NO: 2634511 - RNA, 19 nt, Artificial Sequence
  Description of Artificial Sequence: Synthetic oligonucleotide
cacaacuccguggcggcug

SEQ ID NO: 2634512 - RNA, 19 nt, Artificial Sequence
  Description of Artificial Sequence: Synthetic oligonucleotide
caacaguuugccucauucu

SEQ ID NO: 2634513 - RNA, 19 nt, Artificial Sequence
  Description of Artificial Sequence: Synthetic oligonucleotide
ggguauugaggaaggcaag

SEQ ID NO: 2634514 - RNA, 19 nt, Artificial Sequence
  Description of Artificial Sequence: Synthetic oligonucleotide
gggcagccgacucagaaaa

SEQ ID NO: 2634515 - RNA, 19 nt, Artificial Sequence
  Description of Artificial Sequence: Synthetic oligonucleotide
aacuccguggcggcugaaa

SEQ ID NO: 2634516 - RNA, 19 nt, Artificial Sequence
  Description of Artificial Sequence: Synthetic oligonucleotide
uugccucauucuguugacu

SEQ ID NO: 2634517 - RNA, 19 nt, Artificial Sequence
  Description of Artificial Sequence: Synthetic oligonucleotide
ggaaggcaaguucuucauc

SEQ ID NO: 2634518 - RNA, 19 nt, Artificial Sequence
  Description of Artificial Sequence: Synthetic oligonucleotide
uggagguugcuugcagcaa

SEQ ID NO: 2634519 - RNA, 19 nt, Artificial Sequence
  Description of Artificial Sequence: Synthetic oligonucleotide
uaagggcagccgacucaga

SEQ ID NO: 2634520 - RNA, 19 nt, Artificial Sequence
  Description of Artificial Sequence: Synthetic oligonucleotide
uucauagguguugcauauu

SEQ ID NO: 2634521 - RNA, 19 nt, Artificial Sequence
  Description of Artificial Sequence: Synthetic oligonucleotide
ggcagaaacuauggaaaga

SEQ ID NO: 2634522 - RNA, 19 nt, Artificial Sequence
  Description of Artificial Sequence: Synthetic oligonucleotide
ggagagacaaagguacaaa

SEQ ID NO: 2634523 - RNA, 19 nt, Artificial Sequence
  Description of Artificial Sequence: Synthetic oligonucleotide
gccagguacaagagcuugg

SEQ ID NO: 2634524 - RNA, 19 nt, Artificial Sequence
  Description of Artificial Sequence: Synthetic oligonucleotide
uggcacuccugaucuggau

SEQ ID NO: 2634525 - RNA, 19 nt, Artificial Sequence
  Description of Artificial Sequence: Synthetic oligonucleotide
cuucugaaauggcguccuc

SEQ ID NO: 2634526 - RNA, 19 nt, Artificial Sequence
  Description of Artificial Sequence: Synthetic oligonucleotide
gggagguaagggcagccga

SEQ ID NO: 2634527 - RNA, 19 nt, Artificial Sequence
  Description of Artificial Sequence: Synthetic oligonucleotide
gcagccggagagacaaagg

SEQ ID NO: 2634528 - RNA, 19 nt, Artificial Sequence
  Description of Artificial Sequence: Synthetic oligonucleotide
uuagcacauguggcuuuaa

SEQ ID NO: 2634529 - RNA, 19 nt, Artificial Sequence
  Description of Artificial Sequence: Synthetic oligonucleotide
cuuguggagucaccaggaa

SEQ ID NO: 2634530 - RNA, 19 nt, Artificial Sequence
  Description of Artificial Sequence: Synthetic oligonucleotide
gcagccgacucagaaaauc

SEQ ID NO: 2634531 - RNA, 19 nt, Artificial Sequence
  Description of Artificial Sequence: Synthetic oligonucleotide
uggcggcugaaaagccuuc

SEQ ID NO: 2634532 - RNA, 19 nt, Artificial Sequence
  Description of Artificial Sequence: Synthetic oligonucleotide
cuccuuuggacuggcagaa

SEQ ID NO: 2634533 - RNA, 19 nt, Artificial Sequence
  Description of Artificial Sequence: Synthetic oligonucleotide
ccgaaucuuguuccagaag

SEQ ID NO: 2634534 - RNA, 19 nt, Artificial Sequence
  Description of Artificial Sequence: Synthetic oligonucleotide
gcuaccgaaucuuguucca

SEQ ID NO: 2634535 - RNA, 19 nt, Artificial Sequence
  Description of Artificial Sequence: Synthetic oligonucleotide
guuucuagauucgucgauu

SEQ ID NO: 2634536 - RNA, 19 nt, Artificial Sequence
  Description of Artificial Sequence: Synthetic oligonucleotide
gccacaacuccguggcggc

SEQ ID NO: 2634537 - RNA, 19 nt, Artificial Sequence
  Description of Artificial Sequence: Synthetic oligonucleotide
ggagguaagggcagccgac

SEQ ID NO: 2634538 - RNA, 19 nt, Artificial Sequence
  Description of Artificial Sequence: Synthetic oligonucleotide
ggggagguaagggcagccg

SEQ ID NO: 2634539 - RNA, 19 nt, Artificial Sequence
  Description of Artificial Sequence: Synthetic oligonucleotide
ggguggaccacuugggacu

SEQ ID NO: 2634540 - RNA, 19 nt, Artificial Sequence
  Description of Artificial Sequence: Synthetic oligonucleotide
cuggaaguagaccuccuuu

SEQ ID NO: 2634541 - RNA, 19 nt, Artificial Sequence
  Description of Artificial Sequence: Synthetic oligonucleotide
cugccuccuuguaaaaugu

SEQ ID NO: 2634542 - RNA, 19 nt, Artificial Sequence
  Description of Artificial Sequence: Synthetic oligonucleotide
uggaccacuugggacuguu

SEQ ID NO: 2634543 - RNA, 19 nt, Artificial Sequence
  Description of Artificial Sequence: Synthetic oligonucleotide
agccggagagacaaaggua

SEQ ID NO: 2634544 - RNA, 19 nt, Artificial Sequence
  Description of Artificial Sequence: Synthetic oligonucleotide
ccuccuuuggacuggcaga

SEQ ID NO: 2634545 - RNA, 19 nt, Artificial Sequence
  Description of Artificial Sequence: Synthetic oligonucleotide
gcggcugaaaagccuucug

SEQ ID NO: 2634546 - RNA, 19 nt, Artificial Sequence
  Description of Artificial Sequence: Synthetic oligonucleotide
gguggaccacuugggacug

SEQ ID NO: 2634547 - RNA, 19 nt, Artificial Sequence
  Description of Artificial Sequence: Synthetic oligonucleotide
ucucaacaguuugccucau

SEQ ID NO: 2634548 - RNA, 19 nt, Artificial Sequence
  Description of Artificial Sequence: Synthetic oligonucleotide
uccuuuggacuggcagaaa

SEQ ID NO: 2634549 - RNA, 19 nt, Artificial Sequence
  Description of Artificial Sequence: Synthetic oligonucleotide
gcuuuaagaugucggcgcu

SEQ ID NO: 2634550 - RNA, 19 nt, Artificial Sequence
  Description of Artificial Sequence: Synthetic oligonucleotide
agguugcuugcagcaauua

SEQ ID NO: 2634551 - RNA, 19 nt, Artificial Sequence
  Description of Artificial Sequence: Synthetic oligonucleotide
caauuagcacauguggcuu

SEQ ID NO: 2634552 - RNA, 19 nt, Artificial Sequence
  Description of Artificial Sequence: Synthetic oligonucleotide
caguuugccucauucuguu

SEQ ID NO: 2634553 - RNA, 19 nt, Artificial Sequence
  Description of Artificial Sequence: Synthetic oligonucleotide
uugcagcaauuagcacaug

SEQ ID NO: 2634554 - RNA, 19 nt, Artificial Sequence
  Description of Artificial Sequence: Synthetic oligonucleotide
ggagguugcuugcagcaau

SEQ ID NO: 2634555 - RNA, 19 nt, Artificial Sequence
  Description of Artificial Sequence: Synthetic oligonucleotide
agucaccaggaaguacguu

SEQ ID NO: 2634556 - RNA, 19 nt, Artificial Sequence
  Description of Artificial Sequence: Synthetic oligonucleotide
guacguuguugauuuucuu

SEQ ID NO: 2634557 - RNA, 19 nt, Artificial Sequence
  Description of Artificial Sequence: Synthetic oligonucleotide
cucauucuguugacucgcu

SEQ ID NO: 2634558 - RNA, 19 nt, Artificial Sequence
  Description of Artificial Sequence: Synthetic oligonucleotide
gauuuccccgggacaaaau

SEQ ID NO: 2634559 - RNA, 19 nt, Artificial Sequence
  Description of Artificial Sequence: Synthetic oligonucleotide
gcguccuccucugagggga

SEQ ID NO: 2634560 - RNA, 19 nt, Artificial Sequence
  Description of Artificial Sequence: Synthetic oligonucleotide
gccgacucagaaaauccaa

SEQ ID NO: 2634561 - RNA, 19 nt, Artificial Sequence
  Description of Artificial Sequence: Synthetic oligonucleotide
cugugcagccggagagaca

SEQ ID NO: 2634562 - RNA, 19 nt, Artificial Sequence
  Description of Artificial Sequence: Synthetic oligonucleotide
cugaggggaacuggguucu

SEQ ID NO: 2634563 - RNA, 19 nt, Artificial Sequence
  Description of Artificial Sequence: Synthetic oligonucleotide
ccagaagagaaaugccacu

SEQ ID NO: 2634564 - RNA, 19 nt, Artificial Sequence
  Description of Artificial Sequence: Synthetic oligonucleotide
caggaaguacguuguugau

SEQ ID NO: 2634565 - RNA, 19 nt, Artificial Sequence
  Description of Artificial Sequence: Synthetic oligonucleotide
guggagucaccaggaagua

SEQ ID NO: 2634566 - RNA, 19 nt, Artificial Sequence
  Description of Artificial Sequence: Synthetic oligonucleotide
  modified_base (19)..(19): a, c, u, g, unknown or other
cacuccugaucuggauucn

SEQ ID NO: 2634567 - RNA, 19 nt, Artificial Sequence
  Description of Artificial Sequence: Synthetic oligonucleotide
gaaguacguuguugauuuu

SEQ ID NO: 2634568 - RNA, 19 nt, Artificial Sequence
  Description of Artificial Sequence: Synthetic oligonucleotide
ccguggcggcugaaaagcc

SEQ ID NO: 2634569 - RNA, 19 nt, Artificial Sequence
  Description of Artificial Sequence: Synthetic oligonucleotide
  modified_base (15)..(15): a, c, u, g, unknown or other
ccugaucuggauucngggu

SEQ ID NO: 2634570 - RNA, 19 nt, Artificial Sequence
  Description of Artificial Sequence: Synthetic oligonucleotide
ggcgcugggcuccuuuaaa

SEQ ID NO: 2634571 - RNA, 19 nt, Artificial Sequence
  Description of Artificial Sequence: Synthetic oligonucleotide
  modified_base (2)..(2): a, c, u, g, unknown or other
  modified_base (7)..(7): a, c, u, g, unknown or other
cngggunccacuggagguu

SEQ ID NO: 2634572 - RNA, 19 nt, Artificial Sequence
  Description of Artificial Sequence: Synthetic oligonucleotide
ggcacuccugaucuggauu

SEQ ID NO: 2634573 - RNA, 19 nt, Artificial Sequence
  Description of Artificial Sequence: Synthetic oligonucleotide
gccuccuuguaaaauguau

SEQ ID NO: 2634574 - RNA, 19 nt, Artificial Sequence
  Description of Artificial Sequence: Synthetic oligonucleotide
ccccgggacaaaauaacgu

SEQ ID NO: 2634575 - RNA, 19 nt, Artificial Sequence
  Description of Artificial Sequence: Synthetic oligonucleotide
  modified_base (4)..(4): a, c, u, g, unknown or other
ggunccacuggagguugcu

SEQ ID NO: 2634576 - RNA, 19 nt, Artificial Sequence
  Description of Artificial Sequence: Synthetic oligonucleotide
guggcggcugaaaagccuu

SEQ ID NO: 2634577 - RNA, 19 nt, Artificial Sequence
  Description of Artificial Sequence: Synthetic oligonucleotide
cccgggacaaaauaacguu

SEQ ID NO: 2634578 - RNA, 19 nt, Artificial Sequence
  Description of Artificial Sequence: Synthetic oligonucleotide
  modified_base (5)..(5): a, c, u, g, unknown or other
gggunccacuggagguugc

SEQ ID NO: 2634579 - RNA, 19 nt, Artificial Sequence
  Description of Artificial Sequence: Synthetic oligonucleotide
gaccuccuuuggacuggca

SEQ ID NO: 2634580 - RNA, 19 nt, Artificial Sequence
  Description of Artificial Sequence: Synthetic oligonucleotide
guacaagagcuuggguauu

SEQ ID NO: 2634581 - RNA, 19 nt, Artificial Sequence
  Description of Artificial Sequence: Synthetic oligonucleotide
gagccagguacaagagcuu

SEQ ID NO: 2634582 - RNA, 19 nt, Artificial Sequence
  Description of Artificial Sequence: Synthetic oligonucleotide
  modified_base (3)..(3): a, c, u, g, unknown or other
gunccacuggagguugcuu

SEQ ID NO: 2634583 - RNA, 19 nt, Artificial Sequence
  Description of Artificial Sequence: Synthetic oligonucleotide
gggcuccuuuaaauuaacu

SEQ ID NO: 2634584 - RNA, 19 nt, Artificial Sequence
  Description of Artificial Sequence: Synthetic oligonucleotide
gcgcugggcuccuuuaaau

SEQ ID NO: 2634585 - RNA, 19 nt, Artificial Sequence
  Description of Artificial Sequence: Synthetic oligonucleotide
cguuggcacuccugaucug

SEQ ID NO: 2634586 - RNA, 19 nt, Artificial Sequence
  Description of Artificial Sequence: Synthetic oligonucleotide
ggcggcugaaaagccuucu

SEQ ID NO: 2634587 - RNA, 19 nt, Artificial Sequence
  Description of Artificial Sequence: Synthetic oligonucleotide
cggcugaaaagccuucugu

SEQ ID NO: 2634588 - RNA, 19 nt, Artificial Sequence
  Description of Artificial Sequence: Synthetic oligonucleotide
ccaaggcucuucgucuuua

SEQ ID NO: 2634589 - RNA, 19 nt, Artificial Sequence
  Description of Artificial Sequence: Synthetic oligonucleotide
ccacuggagguugcuugca

SEQ ID NO: 2634590 - RNA, 19 nt, Artificial Sequence
  Description of Artificial Sequence: Synthetic oligonucleotide
ggcagccgacucagaaaau

SEQ ID NO: 2634591 - RNA, 19 nt, Artificial Sequence
  Description of Artificial Sequence: Synthetic oligonucleotide
ggaccacuugggacuguuu

SEQ ID NO: 2634592 - RNA, 19 nt, Artificial Sequence
  Description of Artificial Sequence: Synthetic oligonucleotide
ccacaacuccguggcggcu

SEQ ID NO: 2634593 - RNA, 19 nt, Artificial Sequence
  Description of Artificial Sequence: Synthetic oligonucleotide
  modified_base (1)..(1): a, c, u, g, unknown or other
nccacuggagguugcuugc

SEQ ID NO: 2634594 - RNA, 19 nt, Artificial Sequence
  Description of Artificial Sequence: Synthetic oligonucleotide
  modified_base (1)..(1): a, c, u, g, unknown or other
  modified_base (6)..(6): a, c, u, g, unknown or other
ngggunccacuggagguug

SEQ ID NO: 2634595 - RNA, 19 nt, Artificial Sequence
  Description of Artificial Sequence: Synthetic oligonucleotide
aaaacuguugcuaagaugc

SEQ ID NO: 2634596 - RNA, 19 nt, Artificial Sequence
  Description of Artificial Sequence: Synthetic oligonucleotide
ugaagaucaggaaauaggg

SEQ ID NO: 2634597 - RNA, 19 nt, Artificial Sequence
  Description of Artificial Sequence: Synthetic oligonucleotide
uuuauuugaagcaaugucu

SEQ ID NO: 2634598 - RNA, 19 nt, Artificial Sequence
  Description of Artificial Sequence: Synthetic oligonucleotide
uuuggaaugagaaaacaag

SEQ ID NO: 2634599 - RNA, 19 nt, Artificial Sequence
  Description of Artificial Sequence: Synthetic oligonucleotide
uuacaaauauacaacaucu

SEQ ID NO: 2634600 - RNA, 19 nt, Artificial Sequence
  Description of Artificial Sequence: Synthetic oligonucleotide
gagaaaauaaaugaguucc

SEQ ID NO: 2634601 - RNA, 19 nt, Artificial Sequence
  Description of Artificial Sequence: Synthetic oligonucleotide
uuugucguuuugcagaugg

SEQ ID NO: 2634602 - RNA, 19 nt, Artificial Sequence
  Description of Artificial Sequence: Synthetic oligonucleotide
aauauacaacaucucacuc

SEQ ID NO: 2634603 - RNA, 19 nt, Artificial Sequence
  Description of Artificial Sequence: Synthetic oligonucleotide
aagaucaggaaauaggggu

SEQ ID NO: 2634604 - RNA, 19 nt, Artificial Sequence
  Description of Artificial Sequence: Synthetic oligonucleotide
uuuguuagaaacaggaagu

SEQ ID NO: 2634605 - RNA, 19 nt, Artificial Sequence
  Description of Artificial Sequence: Synthetic oligonucleotide
aauaaaugaguuccccaac

SEQ ID NO: 2634606 - RNA, 19 nt, Artificial Sequence
  Description of Artificial Sequence: Synthetic oligonucleotide
uucuuuguuagaaacagga

SEQ ID NO: 2634607 - RNA, 19 nt, Artificial Sequence
  Description of Artificial Sequence: Synthetic oligonucleotide
uauauugcaagccaggcuc

SEQ ID NO: 2634608 - RNA, 19 nt, Artificial Sequence
  Description of Artificial Sequence: Synthetic oligonucleotide
uuuauuguacuuuucuuug

SEQ ID NO: 2634609 - RNA, 19 nt, Artificial Sequence
  Description of Artificial Sequence: Synthetic oligonucleotide
ugagagaaaauaaaugagu

SEQ ID NO: 2634610 - RNA, 19 nt, Artificial Sequence
  Description of Artificial Sequence: Synthetic oligonucleotide
uuuucuuuguuagaaacag

SEQ ID NO: 2634611 - RNA, 19 nt, Artificial Sequence
  Description of Artificial Sequence: Synthetic oligonucleotide
uuuuaucuauuaugaaugg

SEQ ID NO: 2634612 - RNA, 19 nt, Artificial Sequence
  Description of Artificial Sequence: Synthetic oligonucleotide
ugaucuuuuauuugaagca

SEQ ID NO: 2634613 - RNA, 19 nt, Artificial Sequence
  Description of Artificial Sequence: Synthetic oligonucleotide
ucucacucaacuuaguagc

SEQ ID NO: 2634614 - RNA, 19 nt, Artificial Sequence
  Description of Artificial Sequence: Synthetic oligonucleotide
auuuuaucuauuaugaaug

SEQ ID NO: 2634615 - RNA, 19 nt, Artificial Sequence
  Description of Artificial Sequence: Synthetic oligonucleotide
agagaaaauaaaugaguuc

SEQ ID NO: 2634616 - RNA, 19 nt, Artificial Sequence
  Description of Artificial Sequence: Synthetic oligonucleotide
uuguauuuuggaaugagaa

SEQ ID NO: 2634617 - RNA, 19 nt, Artificial Sequence
  Description of Artificial Sequence: Synthetic oligonucleotide
ugggauuacaaauauacaa

SEQ ID NO: 2634618 - RNA, 19 nt, Artificial Sequence
  Description of Artificial Sequence: Synthetic oligonucleotide
aaaugaguuccccaacuag

SEQ ID NO: 2634619 - RNA, 19 nt, Artificial Sequence
  Description of Artificial Sequence: Synthetic oligonucleotide
uuaucuauuaugaaugguu

SEQ ID NO: 2634620 - RNA, 19 nt, Artificial Sequence
  Description of Artificial Sequence: Synthetic oligonucleotide
uucauuguauuuuggaaug

SEQ ID NO: 2634621 - RNA, 19 nt, Artificial Sequence
  Description of Artificial Sequence: Synthetic oligonucleotide
ucugaguuaguucugcuac

SEQ ID NO: 2634622 - RNA, 19 nt, Artificial Sequence
  Description of Artificial Sequence: Synthetic oligonucleotide
uuggaaugagaaaacaaga

SEQ ID NO: 2634623 - RNA, 19 nt, Artificial Sequence
  Description of Artificial Sequence: Synthetic oligonucleotide
ucuucugcaaguacuagca

SEQ ID NO: 2634624 - RNA, 19 nt, Artificial Sequence
  Description of Artificial Sequence: Synthetic oligonucleotide
aaugagaaaacaagacuuc

SEQ ID NO: 2634625 - RNA, 19 nt, Artificial Sequence
  Description of Artificial Sequence: Synthetic oligonucleotide
uauacaacaucucacucaa

SEQ ID NO: 2634626 - RNA, 19 nt, Artificial Sequence
  Description of Artificial Sequence: Synthetic oligonucleotide
cuugacauauauugcaagc

SEQ ID NO: 2634627 - RNA, 19 nt, Artificial Sequence
  Description of Artificial Sequence: Synthetic oligonucleotide
caaugagagaaaauaaaug

SEQ ID NO: 2634628 - RNA, 19 nt, Artificial Sequence
  Description of Artificial Sequence: Synthetic oligonucleotide
ugucuugacauauauugca

SEQ ID NO: 2634629 - RNA, 19 nt, Artificial Sequence
  Description of Artificial Sequence: Synthetic oligonucleotide
uacuagcacaugaagauca

SEQ ID NO: 2634630 - RNA, 19 nt, Artificial Sequence
  Description of Artificial Sequence: Synthetic oligonucleotide
ucuuuuauuugaagcaaug

SEQ ID NO: 2634631 - RNA, 19 nt, Artificial Sequence
  Description of Artificial Sequence: Synthetic oligonucleotide
uuuucuuugugacaaacuu

SEQ ID NO: 2634632 - RNA, 19 nt, Artificial Sequence
  Description of Artificial Sequence: Synthetic oligonucleotide
uuaugaaugguucauugua

SEQ ID NO: 2634633 - RNA, 19 nt, Artificial Sequence
  Description of Artificial Sequence: Synthetic oligonucleotide
ugaagcaaugucuugacau

SEQ ID NO: 2634634 - RNA, 19 nt, Artificial Sequence
  Description of Artificial Sequence: Synthetic oligonucleotide
uguuccgaugucuugaucu

SEQ ID NO: 2634635 - RNA, 19 nt, Artificial Sequence
  Description of Artificial Sequence: Synthetic oligonucleotide
aguacuagcacaugaagau

SEQ ID NO: 2634636 - RNA, 19 nt, Artificial Sequence
  Description of Artificial Sequence: Synthetic oligonucleotide
cuuucaauccuccugcccc

SEQ ID NO: 2634637 - RNA, 19 nt, Artificial Sequence
  Description of Artificial Sequence: Synthetic oligonucleotide
uaucuauuaugaaugguuc

SEQ ID NO: 2634638 - RNA, 19 nt, Artificial Sequence
  Description of Artificial Sequence: Synthetic oligonucleotide
ugacauauauugcaagcca

SEQ ID NO: 2634639 - RNA, 19 nt, Artificial Sequence
  Description of Artificial Sequence: Synthetic oligonucleotide
auauacaacaucucacuca

SEQ ID NO: 2634640 - RNA, 19 nt, Artificial Sequence
  Description of Artificial Sequence: Synthetic oligonucleotide
aauagggguguuccgaugu

SEQ ID NO: 2634641 - RNA, 19 nt, Artificial Sequence
  Description of Artificial Sequence: Synthetic oligonucleotide
aucucacucaacuuaguag

SEQ ID NO: 2634642 - RNA, 19 nt, Artificial Sequence
  Description of Artificial Sequence: Synthetic oligonucleotide
uuuccaaugagagaaaaua

SEQ ID NO: 2634643 - RNA, 19 nt, Artificial Sequence
  Description of Artificial Sequence: Synthetic oligonucleotide
augaagaucaggaaauagg

SEQ ID NO: 2634644 - RNA, 19 nt, Artificial Sequence
  Description of Artificial Sequence: Synthetic oligonucleotide
uuaguagcagucuuaauuu

SEQ ID NO: 2634645 - RNA, 19 nt, Artificial Sequence
  Description of Artificial Sequence: Synthetic oligonucleotide
aacuuucaauccuccugcc

SEQ ID NO: 2634646 - RNA, 19 nt, Artificial Sequence
  Description of Artificial Sequence: Synthetic oligonucleotide
uuucuuuguuagaaacagg

SEQ ID NO: 2634647 - RNA, 19 nt, Artificial Sequence
  Description of Artificial Sequence: Synthetic oligonucleotide
ucuugacauauauugcaag

SEQ ID NO: 2634648 - RNA, 19 nt, Artificial Sequence
  Description of Artificial Sequence: Synthetic oligonucleotide
cauucccaaacauuuauug

SEQ ID NO: 2634649 - RNA, 19 nt, Artificial Sequence
  Description of Artificial Sequence: Synthetic oligonucleotide
ugcaaguacuagcacauga

SEQ ID NO: 2634650 - RNA, 19 nt, Artificial Sequence
  Description of Artificial Sequence: Synthetic oligonucleotide
agaaaauaaaugaguuccc

SEQ ID NO: 2634651 - RNA, 19 nt, Artificial Sequence
  Description of Artificial Sequence: Synthetic oligonucleotide
caagacuucauucccaaac

SEQ ID NO: 2634652 - RNA, 19 nt, Artificial Sequence
  Description of Artificial Sequence: Synthetic oligonucleotide
uuauuugaagcaaugucuu

SEQ ID NO: 2634653 - RNA, 19 nt, Artificial Sequence
  Description of Artificial Sequence: Synthetic oligonucleotide
uugacauauauugcaagcc

SEQ ID NO: 2634654 - RNA, 19 nt, Artificial Sequence
  Description of Artificial Sequence: Synthetic oligonucleotide
auaaaugaguuccccaacu

SEQ ID NO: 2634655 - RNA, 19 nt, Artificial Sequence
  Description of Artificial Sequence: Synthetic oligonucleotide
gaagaacucggcuaccagc

SEQ ID NO: 2634656 - RNA, 19 nt, Artificial Sequence
  Description of Artificial Sequence: Synthetic oligonucleotide
aucaucacccuccucggcg

SEQ ID NO: 2634657 - RNA, 19 nt, Artificial Sequence
  Description of Artificial Sequence: Synthetic oligonucleotide
acuuucaauccuccugccc

SEQ ID NO: 2634658 - RNA, 19 nt, Artificial Sequence
  Description of Artificial Sequence: Synthetic oligonucleotide
uagagcacaggucuucugc

SEQ ID NO: 2634659 - RNA, 19 nt, Artificial Sequence
  Description of Artificial Sequence: Synthetic oligonucleotide
agcagucuuaauuucauaa

SEQ ID NO: 2634660 - RNA, 19 nt, Artificial Sequence
  Description of Artificial Sequence: Synthetic oligonucleotide
uucugcaaguacuagcaca

SEQ ID NO: 2634661 - RNA, 19 nt, Artificial Sequence
  Description of Artificial Sequence: Synthetic oligonucleotide
guauuuuggaaugagaaaa

SEQ ID NO: 2634662 - RNA, 19 nt, Artificial Sequence
  Description of Artificial Sequence: Synthetic oligonucleotide
uaugaaugguucauuguau

SEQ ID NO: 2634663 - RNA, 19 nt, Artificial Sequence
  Description of Artificial Sequence: Synthetic oligonucleotide
uucccaaacauuuauugua

SEQ ID NO: 2634664 - RNA, 19 nt, Artificial Sequence
  Description of Artificial Sequence: Synthetic oligonucleotide
gaagaucaggaaauagggg

SEQ ID NO: 2634665 - RNA, 19 nt, Artificial Sequence
  Description of Artificial Sequence: Synthetic oligonucleotide
auuaugaaugguucauugu

SEQ ID NO: 2634666 - RNA, 19 nt, Artificial Sequence
  Description of Artificial Sequence: Synthetic oligonucleotide
uuccaaugagagaaaauaa

SEQ ID NO: 2634667 - RNA, 19 nt, Artificial Sequence
  Description of Artificial Sequence: Synthetic oligonucleotide
augagagaaaauaaaugag

SEQ ID NO: 2634668 - RNA, 19 nt, Artificial Sequence
  Description of Artificial Sequence: Synthetic oligonucleotide
aguuuucuuugugacaaac

SEQ ID NO: 2634669 - RNA, 19 nt, Artificial Sequence
  Description of Artificial Sequence: Synthetic oligonucleotide
aacaucucacucaacuuag

SEQ ID NO: 2634670 - RNA, 19 nt, Artificial Sequence
  Description of Artificial Sequence: Synthetic oligonucleotide
gaguuccccaacuagagca

SEQ ID NO: 2634671 - RNA, 19 nt, Artificial Sequence
  Description of Artificial Sequence: Synthetic oligonucleotide
gaaguuuucuuugugacaa

SEQ ID NO: 2634672 - RNA, 19 nt, Artificial Sequence
  Description of Artificial Sequence: Synthetic oligonucleotide
aaugaguuccccaacuaga

SEQ ID NO: 2634673 - RNA, 19 nt, Artificial Sequence
  Description of Artificial Sequence: Synthetic oligonucleotide
gacauauauugcaagccag

SEQ ID NO: 2634674 - RNA, 19 nt, Artificial Sequence
  Description of Artificial Sequence: Synthetic oligonucleotide
uacaaauauacaacaucuc

SEQ ID NO: 2634675 - RNA, 19 nt, Artificial Sequence
  Description of Artificial Sequence: Synthetic oligonucleotide
acuguugcuaagaugcugg

SEQ ID NO: 2634676 - RNA, 19 nt, Artificial Sequence
  Description of Artificial Sequence: Synthetic oligonucleotide
aaguacuagcacaugaaga

SEQ ID NO: 2634677 - RNA, 19 nt, Artificial Sequence
  Description of Artificial Sequence: Synthetic oligonucleotide
uuugaagcaaugucuugac

SEQ ID NO: 2634678 - RNA, 19 nt, Artificial Sequence
  Description of Artificial Sequence: Synthetic oligonucleotide
aacaagacuucauucccaa

SEQ ID NO: 2634679 - RNA, 19 nt, Artificial Sequence
  Description of Artificial Sequence: Synthetic oligonucleotide
ucuauuaugaaugguucau

SEQ ID NO: 2634680 - RNA, 19 nt, Artificial Sequence
  Description of Artificial Sequence: Synthetic oligonucleotide
auuugaagcaaugucuuga

SEQ ID NO: 2634681 - RNA, 19 nt, Artificial Sequence
  Description of Artificial Sequence: Synthetic oligonucleotide
auauauugcaagccaggcu

SEQ ID NO: 2634682 - RNA, 19 nt, Artificial Sequence
  Description of Artificial Sequence: Synthetic oligonucleotide
caaguacuagcacaugaag

SEQ ID NO: 2634683 - RNA, 19 nt, Artificial Sequence
  Description of Artificial Sequence: Synthetic oligonucleotide
ucugccgucacgcccugcg

SEQ ID NO: 2634684 - RNA, 19 nt, Artificial Sequence
  Description of Artificial Sequence: Synthetic oligonucleotide
auucccaaacauuuauugu

SEQ ID NO: 2634685 - RNA, 19 nt, Artificial Sequence
  Description of Artificial Sequence: Synthetic oligonucleotide
ugguucauuguauuuugga

SEQ ID NO: 2634686 - RNA, 19 nt, Artificial Sequence
  Description of Artificial Sequence: Synthetic oligonucleotide
ucaucaucacccuccucgg

SEQ ID NO: 2634687 - RNA, 19 nt, Artificial Sequence
  Description of Artificial Sequence: Synthetic oligonucleotide
cauauauugcaagccaggc

SEQ ID NO: 2634688 - RNA, 19 nt, Artificial Sequence
  Description of Artificial Sequence: Synthetic oligonucleotide
uauuugaagcaaugucuug

SEQ ID NO: 2634689 - RNA, 19 nt, Artificial Sequence
  Description of Artificial Sequence: Synthetic oligonucleotide
ucaacuuaguagcagucuu

SEQ ID NO: 2634690 - RNA, 19 nt, Artificial Sequence
  Description of Artificial Sequence: Synthetic oligonucleotide
augucuugacauauauugc

SEQ ID NO: 2634691 - RNA, 19 nt, Artificial Sequence
  Description of Artificial Sequence: Synthetic oligonucleotide
ucuuuguuagaaacaggaa

SEQ ID NO: 2634692 - RNA, 19 nt, Artificial Sequence
  Description of Artificial Sequence: Synthetic oligonucleotide
uuuaucuauuaugaauggu

SEQ ID NO: 2634693 - RNA, 19 nt, Artificial Sequence
  Description of Artificial Sequence: Synthetic oligonucleotide
ugcagaugguccaucugag

SEQ ID NO: 2634694 - RNA, 19 nt, Artificial Sequence
  Description of Artificial Sequence: Synthetic oligonucleotide
guuaguucugcuaccaaug

SEQ ID NO: 2634695 - RNA, 19 nt, Artificial Sequence
  Description of Artificial Sequence: Synthetic oligonucleotide
acauauauugcaagccagg

SEQ ID NO: 2634696 - RNA, 19 nt, Artificial Sequence
  Description of Artificial Sequence: Synthetic oligonucleotide
aaauagggguguuccgaug

SEQ ID NO: 2634697 - RNA, 19 nt, Artificial Sequence
  Description of Artificial Sequence: Synthetic oligonucleotide
gacacuugcagccgccggg

SEQ ID NO: 2634698 - RNA, 19 nt, Artificial Sequence
  Description of Artificial Sequence: Synthetic oligonucleotide
acacccgacguacucgccc

SEQ ID NO: 2634699 - RNA, 19 nt, Artificial Sequence
  Description of Artificial Sequence: Synthetic oligonucleotide
aagaacucggcuaccagcu

SEQ ID NO: 2634700 - RNA, 19 nt, Artificial Sequence
  Description of Artificial Sequence: Synthetic oligonucleotide
agaaacaggaaguuuucuu

SEQ ID NO: 2634701 - RNA, 19 nt, Artificial Sequence
  Description of Artificial Sequence: Synthetic oligonucleotide
gcugggauuacaaauauac

SEQ ID NO: 2634702 - RNA, 19 nt, Artificial Sequence
  Description of Artificial Sequence: Synthetic oligonucleotide
gaugguccaucugaguuag

SEQ ID NO: 2634703 - RNA, 19 nt, Artificial Sequence
  Description of Artificial Sequence: Synthetic oligonucleotide
ucuugaucuuuuauuugaa

SEQ ID NO: 2634704 - RNA, 19 nt, Artificial Sequence
  Description of Artificial Sequence: Synthetic oligonucleotide
uuuugcagaugguccaucu

SEQ ID NO: 2634705 - RNA, 19 nt, Artificial Sequence
  Description of Artificial Sequence: Synthetic oligonucleotide
gaacucggcuaccagcucc

SEQ ID NO: 2634706 - RNA, 19 nt, Artificial Sequence
  Description of Artificial Sequence: Synthetic oligonucleotide
uaaaugaguuccccaacua

SEQ ID NO: 2634707 - RNA, 19 nt, Artificial Sequence
  Description of Artificial Sequence: Synthetic oligonucleotide
acaggucuucugcaaguac

SEQ ID NO: 2634708 - RNA, 19 nt, Artificial Sequence
  Description of Artificial Sequence: Synthetic oligonucleotide
acaggacacuugcagccgc

SEQ ID NO: 2634709 - RNA, 19 nt, Artificial Sequence
  Description of Artificial Sequence: Synthetic oligonucleotide
caggaaauagggguguucc

SEQ ID NO: 2634710 - RNA, 19 nt, Artificial Sequence
  Description of Artificial Sequence: Synthetic oligonucleotide
caggcuccaacuuucaauc

SEQ ID NO: 2634711 - RNA, 19 nt, Artificial Sequence
  Description of Artificial Sequence: Synthetic oligonucleotide
uuugcagaugguccaucug

SEQ ID NO: 2634712 - RNA, 19 nt, Artificial Sequence
  Description of Artificial Sequence: Synthetic oligonucleotide
auuuuggaaugagaaaaca

SEQ ID NO: 2634713 - RNA, 19 nt, Artificial Sequence
  Description of Artificial Sequence: Synthetic oligonucleotide
ugaguuccccaacuagagc

SEQ ID NO: 2634714 - RNA, 19 nt, Artificial Sequence
  Description of Artificial Sequence: Synthetic oligonucleotide
aggaaauagggguguuccg

SEQ ID NO: 2634715 - RNA, 19 nt, Artificial Sequence
  Description of Artificial Sequence: Synthetic oligonucleotide
gucuucugcaaguacuagc

SEQ ID NO: 2634716 - RNA, 19 nt, Artificial Sequence
  Description of Artificial Sequence: Synthetic oligonucleotide
aacuguugcuaagaugcug

SEQ ID NO: 2634717 - RNA, 19 nt, Artificial Sequence
  Description of Artificial Sequence: Synthetic oligonucleotide
aacuuaguagcagucuuaa

SEQ ID NO: 2634718 - RNA, 19 nt, Artificial Sequence
  Description of Artificial Sequence: Synthetic oligonucleotide
cauuguauuuuggaaugag

SEQ ID NO: 2634719 - RNA, 19 nt, Artificial Sequence
  Description of Artificial Sequence: Synthetic oligonucleotide
auggcgaccccuucgcuuc

SEQ ID NO: 2634720 - RNA, 19 nt, Artificial Sequence
  Description of Artificial Sequence: Synthetic oligonucleotide
gucguuuugcagauggucc

SEQ ID NO: 2634721 - RNA, 19 nt, Artificial Sequence
  Description of Artificial Sequence: Synthetic oligonucleotide
gcuaccagcucccucaucc

SEQ ID NO: 2634722 - RNA, 19 nt, Artificial Sequence
  Description of Artificial Sequence: Synthetic oligonucleotide
ugaguuaguucugcuacca

SEQ ID NO: 2634723 - RNA, 19 nt, Artificial Sequence
  Description of Artificial Sequence: Synthetic oligonucleotide
aacucggcuaccagcuccc

SEQ ID NO: 2634724 - RNA, 19 nt, Artificial Sequence
  Description of Artificial Sequence: Synthetic oligonucleotide
aaacaagacuucauuccca

SEQ ID NO: 2634725 - RNA, 19 nt, Artificial Sequence
  Description of Artificial Sequence: Synthetic oligonucleotide
uugaagcaaugucuugaca

SEQ ID NO: 2634726 - RNA, 19 nt, Artificial Sequence
  Description of Artificial Sequence: Synthetic oligonucleotide
gggauuacaaauauacaac

SEQ ID NO: 2634727 - RNA, 19 nt, Artificial Sequence
  Description of Artificial Sequence: Synthetic oligonucleotide
ugaaguagcugggauuaca

SEQ ID NO: 2634728 - RNA, 19 nt, Artificial Sequence
  Description of Artificial Sequence: Synthetic oligonucleotide
auauugcaagccaggcucc

SEQ ID NO: 2634729 - RNA, 19 nt, Artificial Sequence
  Description of Artificial Sequence: Synthetic oligonucleotide
cuuaguagcagucuuaauu

SEQ ID NO: 2634730 - RNA, 19 nt, Artificial Sequence
  Description of Artificial Sequence: Synthetic oligonucleotide
gaucuuuuauuugaagcaa

SEQ ID NO: 2634731 - RNA, 19 nt, Artificial Sequence
  Description of Artificial Sequence: Synthetic oligonucleotide
aggcuccaacuuucaaucc

SEQ ID NO: 2634732 - RNA, 19 nt, Artificial Sequence
  Description of Artificial Sequence: Synthetic oligonucleotide
gaugucuugaucuuuuauu

SEQ ID NO: 2634733 - RNA, 19 nt, Artificial Sequence
  Description of Artificial Sequence: Synthetic oligonucleotide
uaccagcucccucauccgg

SEQ ID NO: 2634734 - RNA, 19 nt, Artificial Sequence
  Description of Artificial Sequence: Synthetic oligonucleotide
agcacaggucuucugcaag

SEQ ID NO: 2634735 - RNA, 19 nt, Artificial Sequence
  Description of Artificial Sequence: Synthetic oligonucleotide
aguucugcuaccaauguuu

SEQ ID NO: 2634736 - RNA, 19 nt, Artificial Sequence
  Description of Artificial Sequence: Synthetic oligonucleotide
ucucugaaguagcugggau

SEQ ID NO: 2634737 - RNA, 19 nt, Artificial Sequence
  Description of Artificial Sequence: Synthetic oligonucleotide
uccauggcgaccccuucgc

SEQ ID NO: 2634738 - RNA, 19 nt, Artificial Sequence
  Description of Artificial Sequence: Synthetic oligonucleotide
cugaguuaguucugcuacc

SEQ ID NO: 2634739 - RNA, 19 nt, Artificial Sequence
  Description of Artificial Sequence: Synthetic oligonucleotide
ugccgucacgcccugcgcg

SEQ ID NO: 2634740 - RNA, 19 nt, Artificial Sequence
  Description of Artificial Sequence: Synthetic oligonucleotide
guucauuguauuuuggaau

SEQ ID NO: 2634741 - RNA, 19 nt, Artificial Sequence
  Description of Artificial Sequence: Synthetic oligonucleotide
guugcuaagaugcugguuu

SEQ ID NO: 2634742 - RNA, 19 nt, Artificial Sequence
  Description of Artificial Sequence: Synthetic oligonucleotide
augaguuccccaacuagag

SEQ ID NO: 2634743 - RNA, 19 nt, Artificial Sequence
  Description of Artificial Sequence: Synthetic oligonucleotide
aagccaggcuccaacuuuc

SEQ ID NO: 2634744 - RNA, 19 nt, Artificial Sequence
  Description of Artificial Sequence: Synthetic oligonucleotide
cucgccgucacacccgacg

SEQ ID NO: 2634745 - RNA, 19 nt, Artificial Sequence
  Description of Artificial Sequence: Synthetic oligonucleotide
aaguagcugggauuacaaa

SEQ ID NO: 2634746 - RNA, 19 nt, Artificial Sequence
  Description of Artificial Sequence: Synthetic oligonucleotide
agaggguccgcgucgcccg

SEQ ID NO: 2634747 - RNA, 19 nt, Artificial Sequence
  Description of Artificial Sequence: Synthetic oligonucleotide
uuccccaacuagagcacag

SEQ ID NO: 2634748 - RNA, 19 nt, Artificial Sequence
  Description of Artificial Sequence: Synthetic oligonucleotide
agaucaggaaauaggggug

SEQ ID NO: 2634749 - RNA, 19 nt, Artificial Sequence
  Description of Artificial Sequence: Synthetic oligonucleotide
guacucgcccgucagcucc

SEQ ID NO: 2634750 - RNA, 19 nt, Artificial Sequence
  Description of Artificial Sequence: Synthetic oligonucleotide
ucacacccgacguacucgc

SEQ ID NO: 2634751 - RNA, 19 nt, Artificial Sequence
  Description of Artificial Sequence: Synthetic oligonucleotide
gaagcaaugucuugacaua

SEQ ID NO: 2634752 - RNA, 19 nt, Artificial Sequence
  Description of Artificial Sequence: Synthetic oligonucleotide
ucauucccaaacauuuauu

SEQ ID NO: 2634753 - RNA, 19 nt, Artificial Sequence
  Description of Artificial Sequence: Synthetic oligonucleotide
acucaacuuaguagcaguc

SEQ ID NO: 2634754 - RNA, 19 nt, Artificial Sequence
  Description of Artificial Sequence: Synthetic oligonucleotide
ucauuguauuuuggaauga

SEQ ID NO: 2634755 - RNA, 19 nt, Artificial Sequence
  Description of Artificial Sequence: Synthetic oligonucleotide
uagcugggauuacaaauau

SEQ ID NO: 2634756 - RNA, 19 nt, Artificial Sequence
  Description of Artificial Sequence: Synthetic oligonucleotide
acaggcucuggagaggguc

SEQ ID NO: 2634757 - RNA, 19 nt, Artificial Sequence
  Description of Artificial Sequence: Synthetic oligonucleotide
guacuuuucuuuguuagaa

SEQ ID NO: 2634758 - RNA, 19 nt, Artificial Sequence
  Description of Artificial Sequence: Synthetic oligonucleotide
uccggaucugccgucacgc

SEQ ID NO: 2634759 - RNA, 19 nt, Artificial Sequence
  Description of Artificial Sequence: Synthetic oligonucleotide
ucauccgggccacacccgc

SEQ ID NO: 2634760 - RNA, 19 nt, Artificial Sequence
  Description of Artificial Sequence: Synthetic oligonucleotide
uguuagaaacaggaaguuu

SEQ ID NO: 2634761 - RNA, 19 nt, Artificial Sequence
  Description of Artificial Sequence: Synthetic oligonucleotide
uugcaagccaggcuccaac

SEQ ID NO: 2634762 - RNA, 19 nt, Artificial Sequence
  Description of Artificial Sequence: Synthetic oligonucleotide
ggaaugagaaaacaagacu

SEQ ID NO: 2634763 - RNA, 19 nt, Artificial Sequence
  Description of Artificial Sequence: Synthetic oligonucleotide
uaguagcagucuuaauuuc

SEQ ID NO: 2634764 - RNA, 19 nt, Artificial Sequence
  Description of Artificial Sequence: Synthetic oligonucleotide
gguucauuguauuuuggaa

SEQ ID NO: 2634765 - RNA, 19 nt, Artificial Sequence
  Description of Artificial Sequence: Synthetic oligonucleotide
agacuucauucccaaacau

SEQ ID NO: 2634766 - RNA, 19 nt, Artificial Sequence
  Description of Artificial Sequence: Synthetic oligonucleotide
auagggguguuccgauguc

SEQ ID NO: 2634767 - RNA, 19 nt, Artificial Sequence
  Description of Artificial Sequence: Synthetic oligonucleotide
cuagcacaugaagaucagg

SEQ ID NO: 2634768 - RNA, 19 nt, Artificial Sequence
  Description of Artificial Sequence: Synthetic oligonucleotide
ucuggagaggguccgcguc

SEQ ID NO: 2634769 - RNA, 19 nt, Artificial Sequence
  Description of Artificial Sequence: Synthetic oligonucleotide
uccgaugucuugaucuuuu

SEQ ID NO: 2634770 - RNA, 19 nt, Artificial Sequence
  Description of Artificial Sequence: Synthetic oligonucleotide
agaugguccaucugaguua

SEQ ID NO: 2634771 - RNA, 19 nt, Artificial Sequence
  Description of Artificial Sequence: Synthetic oligonucleotide
ccaacuuucaauccuccug

SEQ ID NO: 2634772 - RNA, 19 nt, Artificial Sequence
  Description of Artificial Sequence: Synthetic oligonucleotide
cuggagaggguccgcgucg

SEQ ID NO: 2634773 - RNA, 19 nt, Artificial Sequence
  Description of Artificial Sequence: Synthetic oligonucleotide
uuguuagaaacaggaaguu

SEQ ID NO: 2634774 - RNA, 19 nt, Artificial Sequence
  Description of Artificial Sequence: Synthetic oligonucleotide
gucagcuccauggcgaccc

SEQ ID NO: 2634775 - RNA, 19 nt, Artificial Sequence
  Description of Artificial Sequence: Synthetic oligonucleotide
ugcaagccaggcuccaacu

SEQ ID NO: 2634776 - RNA, 19 nt, Artificial Sequence
  Description of Artificial Sequence: Synthetic oligonucleotide
caacaucucacucaacuua

SEQ ID NO: 2634777 - RNA, 19 nt, Artificial Sequence
  Description of Artificial Sequence: Synthetic oligonucleotide
aucugaguuaguucugcua

SEQ ID NO: 2634778 - RNA, 19 nt, Artificial Sequence
  Description of Artificial Sequence: Synthetic oligonucleotide
cacaugaagaucaggaaau

SEQ ID NO: 2634779 - RNA, 19 nt, Artificial Sequence
  Description of Artificial Sequence: Synthetic oligonucleotide
aguuccccaacuagagcac

SEQ ID NO: 2634780 - RNA, 19 nt, Artificial Sequence
  Description of Artificial Sequence: Synthetic oligonucleotide
cuaccagcucccucauccg

SEQ ID NO: 2634781 - RNA, 19 nt, Artificial Sequence
  Description of Artificial Sequence: Synthetic oligonucleotide
gucacacccgacguacucg

SEQ ID NO: 2634782 - RNA, 19 nt, Artificial Sequence
  Description of Artificial Sequence: Synthetic oligonucleotide
uccccaacuagagcacagg

SEQ ID NO: 2634783 - RNA, 19 nt, Artificial Sequence
  Description of Artificial Sequence: Synthetic oligonucleotide
ucaucacccuccucggcgu

SEQ ID NO: 2634784 - RNA, 19 nt, Artificial Sequence
  Description of Artificial Sequence: Synthetic oligonucleotide
uaguucugcuaccaauguu

SEQ ID NO: 2634785 - RNA, 19 nt, Artificial Sequence
  Description of Artificial Sequence: Synthetic oligonucleotide
agucucugaaguagcuggg

SEQ ID NO: 2634786 - RNA, 19 nt, Artificial Sequence
  Description of Artificial Sequence: Synthetic oligonucleotide
auccgggccacacccgccg

SEQ ID NO: 2634787 - RNA, 19 nt, Artificial Sequence
  Description of Artificial Sequence: Synthetic oligonucleotide
ugguccaucugaguuaguu

SEQ ID NO: 2634788 - RNA, 19 nt, Artificial Sequence
  Description of Artificial Sequence: Synthetic oligonucleotide
cacccgacguacucgcccg

SEQ ID NO: 2634789 - RNA, 19 nt, Artificial Sequence
  Description of Artificial Sequence: Synthetic oligonucleotide
ggaaguuuucuuugugaca

SEQ ID NO: 2634790 - RNA, 19 nt, Artificial Sequence
  Description of Artificial Sequence: Synthetic oligonucleotide
cuucuguaucaucuucauc

SEQ ID NO: 2634791 - RNA, 19 nt, Artificial Sequence
  Description of Artificial Sequence: Synthetic oligonucleotide
ucaggaaauagggguguuc

SEQ ID NO: 2634792 - RNA, 19 nt, Artificial Sequence
  Description of Artificial Sequence: Synthetic oligonucleotide
guagcugggauuacaaaua

SEQ ID NO: 2634793 - RNA, 19 nt, Artificial Sequence
  Description of Artificial Sequence: Synthetic oligonucleotide
gcacaugaagaucaggaaa

SEQ ID NO: 2634794 - RNA, 19 nt, Artificial Sequence
  Description of Artificial Sequence: Synthetic oligonucleotide
cuucugcaaguacuagcac

SEQ ID NO: 2634795 - RNA, 19 nt, Artificial Sequence
  Description of Artificial Sequence: Synthetic oligonucleotide
uugucguuuugcagauggu

SEQ ID NO: 2634796 - RNA, 19 nt, Artificial Sequence
  Description of Artificial Sequence: Synthetic oligonucleotide
gacguacucgcccgucagc

SEQ ID NO: 2634797 - RNA, 19 nt, Artificial Sequence
  Description of Artificial Sequence: Synthetic oligonucleotide
acacuugcagccgccgggg

SEQ ID NO: 2634798 - RNA, 19 nt, Artificial Sequence
  Description of Artificial Sequence: Synthetic oligonucleotide
gaaauagggguguuccgau

SEQ ID NO: 2634799 - RNA, 19 nt, Artificial Sequence
  Description of Artificial Sequence: Synthetic oligonucleotide
ucgcccgacgccucacagg

SEQ ID NO: 2634800 - RNA, 19 nt, Artificial Sequence
  Description of Artificial Sequence: Synthetic oligonucleotide
acuagcacaugaagaucag

SEQ ID NO: 2634801 - RNA, 19 nt, Artificial Sequence
  Description of Artificial Sequence: Synthetic oligonucleotide
cucacucaacuuaguagca

SEQ ID NO: 2634802 - RNA, 19 nt, Artificial Sequence
  Description of Artificial Sequence: Synthetic oligonucleotide
gaggggcccgaagaacucg

SEQ ID NO: 2634803 - RNA, 19 nt, Artificial Sequence
  Description of Artificial Sequence: Synthetic oligonucleotide
ucgccgucacacccgacgu

SEQ ID NO: 2634804 - RNA, 19 nt, Artificial Sequence
  Description of Artificial Sequence: Synthetic oligonucleotide
cuguaucaucuucaucauc

SEQ ID NO: 2634805 - RNA, 19 nt, Artificial Sequence
  Description of Artificial Sequence: Synthetic oligonucleotide
ggaaauagggguguuccga

SEQ ID NO: 2634806 - RNA, 19 nt, Artificial Sequence
  Description of Artificial Sequence: Synthetic oligonucleotide
uauugcaagccaggcucca

SEQ ID NO: 2634807 - RNA, 19 nt, Artificial Sequence
  Description of Artificial Sequence: Synthetic oligonucleotide
uugcuaagaugcugguuuu

SEQ ID NO: 2634808 - RNA, 19 nt, Artificial Sequence
  Description of Artificial Sequence: Synthetic oligonucleotide
acuuaguagcagucuuaau

SEQ ID NO: 2634809 - RNA, 19 nt, Artificial Sequence
  Description of Artificial Sequence: Synthetic oligonucleotide
acuugcagccgccggggcu

SEQ ID NO: 2634810 - RNA, 19 nt, Artificial Sequence
  Description of Artificial Sequence: Synthetic oligonucleotide
guacuagcacaugaagauc

SEQ ID NO: 2634811 - RNA, 19 nt, Artificial Sequence
  Description of Artificial Sequence: Synthetic oligonucleotide
gagaggguccgcgucgccc

SEQ ID NO: 2634812 - RNA, 19 nt, Artificial Sequence
  Description of Artificial Sequence: Synthetic oligonucleotide
ccaacuagagcacaggucu

SEQ ID NO: 2634813 - RNA, 19 nt, Artificial Sequence
  Description of Artificial Sequence: Synthetic oligonucleotide
caucaucacccuccucggc

SEQ ID NO: 2634814 - RNA, 19 nt, Artificial Sequence
  Description of Artificial Sequence: Synthetic oligonucleotide
acguacucgcccgucagcu

SEQ ID NO: 2634815 - RNA, 19 nt, Artificial Sequence
  Description of Artificial Sequence: Synthetic oligonucleotide
cucauccgggccacacccg

SEQ ID NO: 2634816 - RNA, 19 nt, Artificial Sequence
  Description of Artificial Sequence: Synthetic oligonucleotide
uccugccccagucucugaa

SEQ ID NO: 2634817 - RNA, 19 nt, Artificial Sequence
  Description of Artificial Sequence: Synthetic oligonucleotide
gguccaucugaguuaguuc

SEQ ID NO: 2634818 - RNA, 19 nt, Artificial Sequence
  Description of Artificial Sequence: Synthetic oligonucleotide
uagcagucuuaauuucaua

SEQ ID NO: 2634819 - RNA, 19 nt, Artificial Sequence
  Description of Artificial Sequence: Synthetic oligonucleotide
caucucacucaacuuagua

SEQ ID NO: 2634820 - RNA, 19 nt, Artificial Sequence
  Description of Artificial Sequence: Synthetic oligonucleotide
gucuugacauauauugcaa

SEQ ID NO: 2634821 - RNA, 19 nt, Artificial Sequence
  Description of Artificial Sequence: Synthetic oligonucleotide
gucccgcugcuccacgagg

SEQ ID NO: 2634822 - RNA, 19 nt, Artificial Sequence
  Description of Artificial Sequence: Synthetic oligonucleotide
caggacacuugcagccgcc

SEQ ID NO: 2634823 - RNA, 19 nt, Artificial Sequence
  Description of Artificial Sequence: Synthetic oligonucleotide
aggacacuugcagccgccg

SEQ ID NO: 2634824 - RNA, 19 nt, Artificial Sequence
  Description of Artificial Sequence: Synthetic oligonucleotide
uuuugucguuuugcagaug

SEQ ID NO: 2634825 - RNA, 19 nt, Artificial Sequence
  Description of Artificial Sequence: Synthetic oligonucleotide
uguugcuaagaugcugguu

SEQ ID NO: 2634826 - RNA, 19 nt, Artificial Sequence
  Description of Artificial Sequence: Synthetic oligonucleotide
ccucauccgggccacaccc

SEQ ID NO: 2634827 - RNA, 19 nt, Artificial Sequence
  Description of Artificial Sequence: Synthetic oligonucleotide
cuccggaucugccgucacg

SEQ ID NO: 2634828 - RNA, 19 nt, Artificial Sequence
  Description of Artificial Sequence: Synthetic oligonucleotide
gaucaggaaauaggggugu

SEQ ID NO: 2634829 - RNA, 19 nt, Artificial Sequence
  Description of Artificial Sequence: Synthetic oligonucleotide
caacuuaguagcagucuua

SEQ ID NO: 2634830 - RNA, 19 nt, Artificial Sequence
  Description of Artificial Sequence: Synthetic oligonucleotide
auacaacaucucacucaac

SEQ ID NO: 2634831 - RNA, 19 nt, Artificial Sequence
  Description of Artificial Sequence: Synthetic oligonucleotide
gaguuaguucugcuaccaa

SEQ ID NO: 2634832 - RNA, 19 nt, Artificial Sequence
  Description of Artificial Sequence: Synthetic oligonucleotide
cugcgcgucccgcugcucc

SEQ ID NO: 2634833 - RNA, 19 nt, Artificial Sequence
  Description of Artificial Sequence: Synthetic oligonucleotide
cacucaacuuaguagcagu

SEQ ID NO: 2634834 - RNA, 19 nt, Artificial Sequence
  Description of Artificial Sequence: Synthetic oligonucleotide
acaugaagaucaggaaaua

SEQ ID NO: 2634835 - RNA, 19 nt, Artificial Sequence
  Description of Artificial Sequence: Synthetic oligonucleotide
ggacacuugcagccgccgg

SEQ ID NO: 2634836 - RNA, 19 nt, Artificial Sequence
  Description of Artificial Sequence: Synthetic oligonucleotide
ccaaugagagaaaauaaau

SEQ ID NO: 2634837 - RNA, 19 nt, Artificial Sequence
  Description of Artificial Sequence: Synthetic oligonucleotide
cuugcagccgccggggcuc

SEQ ID NO: 2634838 - RNA, 19 nt, Artificial Sequence
  Description of Artificial Sequence: Synthetic oligonucleotide
gagcacaggucuucugcaa

SEQ ID NO: 2634839 - RNA, 19 nt, Artificial Sequence
  Description of Artificial Sequence: Synthetic oligonucleotide
cagaugguccaucugaguu

SEQ ID NO: 2634840 - RNA, 19 nt, Artificial Sequence
  Description of Artificial Sequence: Synthetic oligonucleotide
gucgcccgacgccucacag

SEQ ID NO: 2634841 - RNA, 19 nt, Artificial Sequence
  Description of Artificial Sequence: Synthetic oligonucleotide
uacucgcccgucagcucca

SEQ ID NO: 2634842 - RNA, 19 nt, Artificial Sequence
  Description of Artificial Sequence: Synthetic oligonucleotide
cccaacuagagcacagguc

SEQ ID NO: 2634843 - RNA, 19 nt, Artificial Sequence
  Description of Artificial Sequence: Synthetic oligonucleotide
aggggcccgaagaacucgg

SEQ ID NO: 2634844 - RNA, 19 nt, Artificial Sequence
  Description of Artificial Sequence: Synthetic oligonucleotide
gcaaugucuugacauauau

SEQ ID NO: 2634845 - RNA, 19 nt, Artificial Sequence
  Description of Artificial Sequence: Synthetic oligonucleotide
ccaucugaguuaguucugc

SEQ ID NO: 2634846 - RNA, 19 nt, Artificial Sequence
  Description of Artificial Sequence: Synthetic oligonucleotide
ggggcucgccgucacaccc

SEQ ID NO: 2634847 - RNA, 19 nt, Artificial Sequence
  Description of Artificial Sequence: Synthetic oligonucleotide
gacuucauucccaaacauu

SEQ ID NO: 2634848 - RNA, 19 nt, Artificial Sequence
  Description of Artificial Sequence: Synthetic oligonucleotide
ugccccagucucugaagua

SEQ ID NO: 2634849 - RNA, 19 nt, Artificial Sequence
  Description of Artificial Sequence: Synthetic oligonucleotide
gcccgaagaacucggcuac

SEQ ID NO: 2634850 - RNA, 19 nt, Artificial Sequence
  Description of Artificial Sequence: Synthetic oligonucleotide
gccacacccgccgacaggc

SEQ ID NO: 2634851 - RNA, 19 nt, Artificial Sequence
  Description of Artificial Sequence: Synthetic oligonucleotide
gucucugaaguagcuggga

SEQ ID NO: 2634852 - RNA, 19 nt, Artificial Sequence
  Description of Artificial Sequence: Synthetic oligonucleotide
cacacccgccgacaggcuc

SEQ ID NO: 2634853 - RNA, 19 nt, Artificial Sequence
  Description of Artificial Sequence: Synthetic oligonucleotide
cucaacuuaguagcagucu

SEQ ID NO: 2634854 - RNA, 19 nt, Artificial Sequence
  Description of Artificial Sequence: Synthetic oligonucleotide
cacacccgacguacucgcc

SEQ ID NO: 2634855 - RNA, 19 nt, Artificial Sequence
  Description of Artificial Sequence: Synthetic oligonucleotide
acaucucacucaacuuagu

SEQ ID NO: 2634856 - RNA, 19 nt, Artificial Sequence
  Description of Artificial Sequence: Synthetic oligonucleotide
ucccucauccgggccacac

SEQ ID NO: 2634857 - RNA, 19 nt, Artificial Sequence
  Description of Artificial Sequence: Synthetic oligonucleotide
uccuccggaucugccguca

SEQ ID NO: 2634858 - RNA, 19 nt, Artificial Sequence
  Description of Artificial Sequence: Synthetic oligonucleotide
agcaaugucuugacauaua

SEQ ID NO: 2634859 - RNA, 19 nt, Artificial Sequence
  Description of Artificial Sequence: Synthetic oligonucleotide
gggguguuccgaugucuug

SEQ ID NO: 2634860 - RNA, 19 nt, Artificial Sequence
  Description of Artificial Sequence: Synthetic oligonucleotide
ucacgcccugcgcgucccg

SEQ ID NO: 2634861 - RNA, 19 nt, Artificial Sequence
  Description of Artificial Sequence: Synthetic oligonucleotide
ugcuccacgaggggcccga

SEQ ID NO: 2634862 - RNA, 19 nt, Artificial Sequence
  Description of Artificial Sequence: Synthetic oligonucleotide
auugcaagccaggcuccaa

SEQ ID NO: 2634863 - RNA, 19 nt, Artificial Sequence
  Description of Artificial Sequence: Synthetic oligonucleotide
ggguguuccgaugucuuga

SEQ ID NO: 2634864 - RNA, 19 nt, Artificial Sequence
  Description of Artificial Sequence: Synthetic oligonucleotide
gcucuggagaggguccgcg

SEQ ID NO: 2634865 - RNA, 19 nt, Artificial Sequence
  Description of Artificial Sequence: Synthetic oligonucleotide
gaucugccgucacgcccug

SEQ ID NO: 2634866 - RNA, 19 nt, Artificial Sequence
  Description of Artificial Sequence: Synthetic oligonucleotide
cucggcuaccagcucccuc

SEQ ID NO: 2634867 - RNA, 19 nt, Artificial Sequence
  Description of Artificial Sequence: Synthetic oligonucleotide
guguuccgaugucuugauc

SEQ ID NO: 2634868 - RNA, 19 nt, Artificial Sequence
  Description of Artificial Sequence: Synthetic oligonucleotide
guuccccaacuagagcaca

SEQ ID NO: 2634869 - RNA, 19 nt, Artificial Sequence
  Description of Artificial Sequence: Synthetic oligonucleotide
gcccgucagcuccauggcg

SEQ ID NO: 2634870 - RNA, 19 nt, Artificial Sequence
  Description of Artificial Sequence: Synthetic oligonucleotide
cuccacgaggggcccgaag

SEQ ID NO: 2634871 - RNA, 19 nt, Artificial Sequence
  Description of Artificial Sequence: Synthetic oligonucleotide
acacccgccgacaggcucu

SEQ ID NO: 2634872 - RNA, 19 nt, Artificial Sequence
  Description of Artificial Sequence: Synthetic oligonucleotide
caaugucuugacauauauu

SEQ ID NO: 2634873 - RNA, 19 nt, Artificial Sequence
  Description of Artificial Sequence: Synthetic oligonucleotide
cugccgucacgcccugcgc

SEQ ID NO: 2634874 - RNA, 19 nt, Artificial Sequence
  Description of Artificial Sequence: Synthetic oligonucleotide
ggcccgaagaacucggcua

SEQ ID NO: 2634875 - RNA, 19 nt, Artificial Sequence
  Description of Artificial Sequence: Synthetic oligonucleotide
ccccagucucugaaguagc

SEQ ID NO: 2634876 - RNA, 19 nt, Artificial Sequence
  Description of Artificial Sequence: Synthetic oligonucleotide
cacuugcagccgccggggc

SEQ ID NO: 2634877 - RNA, 19 nt, Artificial Sequence
  Description of Artificial Sequence: Synthetic oligonucleotide
gccgucacacccgacguac

SEQ ID NO: 2634878 - RNA, 19 nt, Artificial Sequence
  Description of Artificial Sequence: Synthetic oligonucleotide
caucugaguuaguucugcu

SEQ ID NO: 2634879 - RNA, 19 nt, Artificial Sequence
  Description of Artificial Sequence: Synthetic oligonucleotide
aucaggaaauagggguguu

SEQ ID NO: 2634880 - RNA, 19 nt, Artificial Sequence
  Description of Artificial Sequence: Synthetic oligonucleotide
uggcgaccccuucgcuuca

SEQ ID NO: 2634881 - RNA, 19 nt, Artificial Sequence
  Description of Artificial Sequence: Synthetic oligonucleotide
cucggcguccuccggaucu

SEQ ID NO: 2634882 - RNA, 19 nt, Artificial Sequence
  Description of Artificial Sequence: Synthetic oligonucleotide
ucggcguccuccggaucug

SEQ ID NO: 2634883 - RNA, 19 nt, Artificial Sequence
  Description of Artificial Sequence: Synthetic oligonucleotide
agggguguuccgaugucuu

SEQ ID NO: 2634884 - RNA, 19 nt, Artificial Sequence
  Description of Artificial Sequence: Synthetic oligonucleotide
aucugccgucacgcccugc

SEQ ID NO: 2634885 - RNA, 19 nt, Artificial Sequence
  Description of Artificial Sequence: Synthetic oligonucleotide
cccgucagcuccauggcga

SEQ ID NO: 2634886 - RNA, 19 nt, Artificial Sequence
  Description of Artificial Sequence: Synthetic oligonucleotide
cggaucugccgucacgccc

SEQ ID NO: 2634887 - RNA, 19 nt, Artificial Sequence
  Description of Artificial Sequence: Synthetic oligonucleotide
ccaaacauuuauuguacuu

SEQ ID NO: 2634888 - RNA, 19 nt, Artificial Sequence
  Description of Artificial Sequence: Synthetic oligonucleotide
caucacccuccucggcguc

SEQ ID NO: 2634889 - RNA, 19 nt, Artificial Sequence
  Description of Artificial Sequence: Synthetic oligonucleotide
cuguugcuaagaugcuggu

SEQ ID NO: 2634890 - RNA, 19 nt, Artificial Sequence
  Description of Artificial Sequence: Synthetic oligonucleotide
cagccgccggggcucgccg

SEQ ID NO: 2634891 - RNA, 19 nt, Artificial Sequence
  Description of Artificial Sequence: Synthetic oligonucleotide
acgccucacaggacacuug

SEQ ID NO: 2634892 - RNA, 19 nt, Artificial Sequence
  Description of Artificial Sequence: Synthetic oligonucleotide
ggguccgcgucgcccgacg

SEQ ID NO: 2634893 - RNA, 19 nt, Artificial Sequence
  Description of Artificial Sequence: Synthetic oligonucleotide
cccgacgccucacaggaca

SEQ ID NO: 2634894 - RNA, 19 nt, Artificial Sequence
  Description of Artificial Sequence: Synthetic oligonucleotide
cauggcgaccccuucgcuu

SEQ ID NO: 2634895 - RNA, 19 nt, Artificial Sequence
  Description of Artificial Sequence: Synthetic oligonucleotide
agcuccauggcgaccccuu

SEQ ID NO: 2634896 - RNA, 19 nt, Artificial Sequence
  Description of Artificial Sequence: Synthetic oligonucleotide
ccgccgacaggcucuggag

SEQ ID NO: 2634897 - RNA, 19 nt, Artificial Sequence
  Description of Artificial Sequence: Synthetic oligonucleotide
gacgccucacaggacacuu

SEQ ID NO: 2634898 - RNA, 19 nt, Artificial Sequence
  Description of Artificial Sequence: Synthetic oligonucleotide
gucacgcccugcgcguccc

SEQ ID NO: 2634899 - RNA, 19 nt, Artificial Sequence
  Description of Artificial Sequence: Synthetic oligonucleotide
cacaggucuucugcaagua

SEQ ID NO: 2634900 - RNA, 19 nt, Artificial Sequence
  Description of Artificial Sequence: Synthetic oligonucleotide
gggccacacccgccgacag

SEQ ID NO: 2634901 - RNA, 19 nt, Artificial Sequence
  Description of Artificial Sequence: Synthetic oligonucleotide
gcacaggucuucugcaagu

SEQ ID NO: 2634902 - RNA, 19 nt, Artificial Sequence
  Description of Artificial Sequence: Synthetic oligonucleotide
aggguccgcgucgcccgac

SEQ ID NO: 2634903 - RNA, 19 nt, Artificial Sequence
  Description of Artificial Sequence: Synthetic oligonucleotide
ggaucugccgucacgcccu

SEQ ID NO: 2634904 - RNA, 19 nt, Artificial Sequence
  Description of Artificial Sequence: Synthetic oligonucleotide
acccgacguacucgcccgu

SEQ ID NO: 2634905 - RNA, 19 nt, Artificial Sequence
  Description of Artificial Sequence: Synthetic oligonucleotide
cacgcccugcgcgucccgc

SEQ ID NO: 2634906 - RNA, 19 nt, Artificial Sequence
  Description of Artificial Sequence: Synthetic oligonucleotide
agccaggcuccaacuuuca

SEQ ID NO: 2634907 - RNA, 19 nt, Artificial Sequence
  Description of Artificial Sequence: Synthetic oligonucleotide
guccuccggaucugccguc

SEQ ID NO: 2634908 - RNA, 19 nt, Artificial Sequence
  Description of Artificial Sequence: Synthetic oligonucleotide
gggcucgccgucacacccg

SEQ ID NO: 2634909 - RNA, 19 nt, Artificial Sequence
  Description of Artificial Sequence: Synthetic oligonucleotide
ccaggcuccaacuuucaau

SEQ ID NO: 2634910 - RNA, 19 nt, Artificial Sequence
  Description of Artificial Sequence: Synthetic oligonucleotide
gguguuccgaugucuugau

SEQ ID NO: 2634911 - RNA, 19 nt, Artificial Sequence
  Description of Artificial Sequence: Synthetic oligonucleotide
ccggaucugccgucacgcc

SEQ ID NO: 2634912 - RNA, 19 nt, Artificial Sequence
  Description of Artificial Sequence: Synthetic oligonucleotide
gguccgcgucgcccgacgc

SEQ ID NO: 2634913 - RNA, 19 nt, Artificial Sequence
  Description of Artificial Sequence: Synthetic oligonucleotide
gcagaugguccaucugagu

SEQ ID NO: 2634914 - RNA, 19 nt, Artificial Sequence
  Description of Artificial Sequence: Synthetic oligonucleotide
ggagaggguccgcgucgcc

SEQ ID NO: 2634915 - RNA, 19 nt, Artificial Sequence
  Description of Artificial Sequence: Synthetic oligonucleotide
cccgcugcuccacgagggg

SEQ ID NO: 2634916 - RNA, 19 nt, Artificial Sequence
  Description of Artificial Sequence: Synthetic oligonucleotide
cgacguacucgcccgucag

SEQ ID NO: 2634917 - RNA, 19 nt, Artificial Sequence
  Description of Artificial Sequence: Synthetic oligonucleotide
gaggguccgcgucgcccga

SEQ ID NO: 2634918 - RNA, 19 nt, Artificial Sequence
  Description of Artificial Sequence: Synthetic oligonucleotide
caacuagagcacaggucuu

SEQ ID NO: 2634919 - RNA, 19 nt, Artificial Sequence
  Description of Artificial Sequence: Synthetic oligonucleotide
cucuggagaggguccgcgu

SEQ ID NO: 2634920 - RNA, 19 nt, Artificial Sequence
  Description of Artificial Sequence: Synthetic oligonucleotide
cucgcccgucagcuccaug

SEQ ID NO: 2634921 - RNA, 19 nt, Artificial Sequence
  Description of Artificial Sequence: Synthetic oligonucleotide
ccgacgccucacaggacac

SEQ ID NO: 2634922 - RNA, 19 nt, Artificial Sequence
  Description of Artificial Sequence: Synthetic oligonucleotide
cccaaacauuuauuguacu

SEQ ID NO: 2634923 - RNA, 19 nt, Artificial Sequence
  Description of Artificial Sequence: Synthetic oligonucleotide
cgucacacccgacguacuc

SEQ ID NO: 2634924 - RNA, 19 nt, Artificial Sequence
  Description of Artificial Sequence: Synthetic oligonucleotide
agccgccggggcucgccgu

SEQ ID NO: 2634925 - RNA, 19 nt, Artificial Sequence
  Description of Artificial Sequence: Synthetic oligonucleotide
gcuccauggcgaccccuuc

SEQ ID NO: 2634926 - RNA, 19 nt, Artificial Sequence
  Description of Artificial Sequence: Synthetic oligonucleotide
ggcucgccgucacacccga

SEQ ID NO: 2634927 - RNA, 19 nt, Artificial Sequence
  Description of Artificial Sequence: Synthetic oligonucleotide
cgcccgacgccucacagga

SEQ ID NO: 2634928 - RNA, 19 nt, Artificial Sequence
  Description of Artificial Sequence: Synthetic oligonucleotide
cccgaagaacucggcuacc

SEQ ID NO: 2634929 - RNA, 19 nt, Artificial Sequence
  Description of Artificial Sequence: Synthetic oligonucleotide
gggcccgaagaacucggcu

SEQ ID NO: 2634930 - RNA, 19 nt, Artificial Sequence
  Description of Artificial Sequence: Synthetic oligonucleotide
ccgcugcuccacgaggggc

SEQ ID NO: 2634931 - RNA, 19 nt, Artificial Sequence
  Description of Artificial Sequence: Synthetic oligonucleotide
ccggggcucgccgucacac

SEQ ID NO: 2634932 - RNA, 19 nt, Artificial Sequence
  Description of Artificial Sequence: Synthetic oligonucleotide
ggcucuggagaggguccgc

SEQ ID NO: 2634933 - RNA, 19 nt, Artificial Sequence
  Description of Artificial Sequence: Synthetic oligonucleotide
ggggcccgaagaacucggc

SEQ ID NO: 2634934 - RNA, 19 nt, Artificial Sequence
  Description of Artificial Sequence: Synthetic oligonucleotide
cgaggggcccgaagaacuc

SEQ ID NO: 2634935 - RNA, 19 nt, Artificial Sequence
  Description of Artificial Sequence: Synthetic oligonucleotide
cuccugccccagucucuga

SEQ ID NO: 2634936 - RNA, 19 nt, Artificial Sequence
  Description of Artificial Sequence: Synthetic oligonucleotide
cacccgccgacaggcucug

SEQ ID NO: 2634937 - RNA, 19 nt, Artificial Sequence
  Description of Artificial Sequence: Synthetic oligonucleotide
gcaagccaggcuccaacuu

SEQ ID NO: 2634938 - RNA, 19 nt, Artificial Sequence
  Description of Artificial Sequence: Synthetic oligonucleotide
cccgccgacaggcucugga

SEQ ID NO: 2634939 - RNA, 19 nt, Artificial Sequence
  Description of Artificial Sequence: Synthetic oligonucleotide
cgcccgucagcuccauggc

SEQ ID NO: 2634940 - RNA, 19 nt, Artificial Sequence
  Description of Artificial Sequence: Synthetic oligonucleotide
ccgacguacucgcccguca

SEQ ID NO: 2634941 - RNA, 19 nt, Artificial Sequence
  Description of Artificial Sequence: Synthetic oligonucleotide
gcccugcgcgucccgcugc

SEQ ID NO: 2634942 - RNA, 19 nt, Artificial Sequence
  Description of Artificial Sequence: Synthetic oligonucleotide
augguccaucugaguuagu

SEQ ID NO: 2634943 - RNA, 19 nt, Artificial Sequence
  Description of Artificial Sequence: Synthetic oligonucleotide
ccuccggaucugccgucac

SEQ ID NO: 2634944 - RNA, 19 nt, Artificial Sequence
  Description of Artificial Sequence: Synthetic oligonucleotide
ccgaugucuugaucuuuua

SEQ ID NO: 2634945 - RNA, 19 nt, Artificial Sequence
  Description of Artificial Sequence: Synthetic oligonucleotide
cgucacgcccugcgcgucc

SEQ ID NO: 2634946 - RNA, 19 nt, Artificial Sequence
  Description of Artificial Sequence: Synthetic oligonucleotide
gcgucccgcugcuccacga

SEQ ID NO: 2634947 - RNA, 19 nt, Artificial Sequence
  Description of Artificial Sequence: Synthetic oligonucleotide
acccgccgacaggcucugg

SEQ ID NO: 2634948 - RNA, 19 nt, Artificial Sequence
  Description of Artificial Sequence: Synthetic oligonucleotide
gccgucacgcccugcgcgu

SEQ ID NO: 2634949 - RNA, 19 nt, Artificial Sequence
  Description of Artificial Sequence: Synthetic oligonucleotide
acucgcccgucagcuccau

SEQ ID NO: 2634950 - RNA, 19 nt, Artificial Sequence
  Description of Artificial Sequence: Synthetic oligonucleotide
cggggcucgccgucacacc

SEQ ID NO: 2634951 - RNA, 19 nt, Artificial Sequence
  Description of Artificial Sequence: Synthetic oligonucleotide
cgccgacaggcucuggaga

SEQ ID NO: 2634952 - RNA, 19 nt, Artificial Sequence
  Description of Artificial Sequence: Synthetic oligonucleotide
cgucagcuccauggcgacc

SEQ ID NO: 2634953 - RNA, 19 nt, Artificial Sequence
  Description of Artificial Sequence: Synthetic oligonucleotide
cccgacguacucgcccguc

SEQ ID NO: 2634954 - RNA, 19 nt, Artificial Sequence
  Description of Artificial Sequence: Synthetic oligonucleotide
cgcgucccgcugcuccacg

SEQ ID NO: 2634955 - RNA, 19 nt, Artificial Sequence
  Description of Artificial Sequence: Synthetic oligonucleotide
cguccuccggaucugccgu

SEQ ID NO: 2634956 - RNA, 19 nt, Artificial Sequence
  Description of Artificial Sequence: Synthetic oligonucleotide
cucccucauccgggccaca

SEQ ID NO: 2634957 - RNA, 19 nt, Artificial Sequence
  Description of Artificial Sequence: Synthetic oligonucleotide
gccggggcucgccgucaca

SEQ ID NO: 2634958 - RNA, 19 nt, Artificial Sequence
  Description of Artificial Sequence: Synthetic oligonucleotide
gcgcgucccgcugcuccac

SEQ ID NO: 2634959 - RNA, 19 nt, Artificial Sequence
  Description of Artificial Sequence: Synthetic oligonucleotide
gcgucgcccgacgccucac

SEQ ID NO: 2634960 - RNA, 19 nt, Artificial Sequence
  Description of Artificial Sequence: Synthetic oligonucleotide
gcccgacgccucacaggac

SEQ ID NO: 2634961 - RNA, 19 nt, Artificial Sequence
  Description of Artificial Sequence: Synthetic oligonucleotide
ccgucacgcccugcgcguc

SEQ ID NO: 2634962 - RNA, 19 nt, Artificial Sequence
  Description of Artificial Sequence: Synthetic oligonucleotide
ccauggcgaccccuucgcu

SEQ ID NO: 2634963 - RNA, 19 nt, Artificial Sequence
  Description of Artificial Sequence: Synthetic oligonucleotide
cggcguccuccggaucugc

SEQ ID NO: 2634964 - RNA, 19 nt, Artificial Sequence
  Description of Artificial Sequence: Synthetic oligonucleotide
ccgucacacccgacguacu

SEQ ID NO: 2634965 - RNA, 19 nt, Artificial Sequence
  Description of Artificial Sequence: Synthetic oligonucleotide
gcucgccgucacacccgac

SEQ ID NO: 2634966 - RNA, 19 nt, Artificial Sequence
  Description of Artificial Sequence: Synthetic oligonucleotide
cguuuugcagaugguccau

SEQ ID NO: 2634967 - RNA, 19 nt, Artificial Sequence
  Description of Artificial Sequence: Synthetic oligonucleotide
ccgcgucgcccgacgccuc

SEQ ID NO: 2634968 - RNA, 19 nt, Artificial Sequence
  Description of Artificial Sequence: Synthetic oligonucleotide
cgggccacacccgccgaca

SEQ ID NO: 2634969 - RNA, 19 nt, Artificial Sequence
  Description of Artificial Sequence: Synthetic oligonucleotide
ccugcgcgucccgcugcuc

SEQ ID NO: 2634970 - RNA, 19 nt, Artificial Sequence
  Description of Artificial Sequence: Synthetic oligonucleotide
cgucgcccgacgccucaca

SEQ ID NO: 2634971 - RNA, 19 nt, Artificial Sequence
  Description of Artificial Sequence: Synthetic oligonucleotide
cgcgucgcccgacgccuca

SEQ ID NO: 2634972 - RNA, 19 nt, Artificial Sequence
  Description of Artificial Sequence: Synthetic oligonucleotide
gcuccacgaggggcccgaa

SEQ ID NO: 2634973 - RNA, 19 nt, Artificial Sequence
  Description of Artificial Sequence: Synthetic oligonucleotide
ccacacccgccgacaggcu

SEQ ID NO: 2634974 - RNA, 19 nt, Artificial Sequence
  Description of Artificial Sequence: Synthetic oligonucleotide
cgccgucacacccgacgua

SEQ ID NO: 2634975 - RNA, 19 nt, Artificial Sequence
  Description of Artificial Sequence: Synthetic oligonucleotide
cccugcgcgucccgcugcu

SEQ ID NO: 2634976 - RNA, 19 nt, Artificial Sequence
  Description of Artificial Sequence: Synthetic oligonucleotide
ccgccggggcucgccguca

SEQ ID NO: 2634977 - RNA, 19 nt, Artificial Sequence
  Description of Artificial Sequence: Synthetic oligonucleotide
cgacgccucacaggacacu

SEQ ID NO: 2634978 - RNA, 19 nt, Artificial Sequence
  Description of Artificial Sequence: Synthetic oligonucleotide
ugguguuaaagauagaggg

SEQ ID NO: 2634979 - RNA, 19 nt, Artificial Sequence
  Description of Artificial Sequence: Synthetic oligonucleotide
agucagauuaaacuugucc

SEQ ID NO: 2634980 - RNA, 19 nt, Artificial Sequence
  Description of Artificial Sequence: Synthetic oligonucleotide
aacucauuaccacggagcc

SEQ ID NO: 2634981 - RNA, 19 nt, Artificial Sequence
  Description of Artificial Sequence: Synthetic oligonucleotide
aaaaccauagacuuccuga

SEQ ID NO: 2634982 - RNA, 19 nt, Artificial Sequence
  Description of Artificial Sequence: Synthetic oligonucleotide
uauuccuuuaauuuaaacu

SEQ ID NO: 2634983 - RNA, 19 nt, Artificial Sequence
  Description of Artificial Sequence: Synthetic oligonucleotide
uacuuuuccaacauuuggg

SEQ ID NO: 2634984 - RNA, 19 nt, Artificial Sequence
  Description of Artificial Sequence: Synthetic oligonucleotide
ucuggaugcaccaugaaga

SEQ ID NO: 2634985 - RNA, 19 nt, Artificial Sequence
  Description of Artificial Sequence: Synthetic oligonucleotide
auaacuauuccuuuaauuu

SEQ ID NO: 2634986 - RNA, 19 nt, Artificial Sequence
  Description of Artificial Sequence: Synthetic oligonucleotide
aaagucucccugcugguac

SEQ ID NO: 2634987 - RNA, 19 nt, Artificial Sequence
  Description of Artificial Sequence: Synthetic oligonucleotide
uccaagaucaugucuagag

SEQ ID NO: 2634988 - RNA, 19 nt, Artificial Sequence
  Description of Artificial Sequence: Synthetic oligonucleotide
uuaaacuuguccuggaugu

SEQ ID NO: 2634989 - RNA, 19 nt, Artificial Sequence
  Description of Artificial Sequence: Synthetic oligonucleotide
aauaacuauuccuuuaauu

SEQ ID NO: 2634990 - RNA, 19 nt, Artificial Sequence
  Description of Artificial Sequence: Synthetic oligonucleotide
aagauagagggaugggugg

SEQ ID NO: 2634991 - RNA, 19 nt, Artificial Sequence
  Description of Artificial Sequence: Synthetic oligonucleotide
agaagaacucauuaccacg

SEQ ID NO: 2634992 - RNA, 19 nt, Artificial Sequence
  Description of Artificial Sequence: Synthetic oligonucleotide
ugugagggaaaccagugcc

SEQ ID NO: 2634993 - RNA, 19 nt, Artificial Sequence
  Description of Artificial Sequence: Synthetic oligonucleotide
uacacguccaugcacuugg

SEQ ID NO: 2634994 - RNA, 19 nt, Artificial Sequence
  Description of Artificial Sequence: Synthetic oligonucleotide
ugggauguccgaaaggccg

SEQ ID NO: 2634995 - RNA, 19 nt, Artificial Sequence
  Description of Artificial Sequence: Synthetic oligonucleotide
uggaucaacccauaaagca

SEQ ID NO: 2634996 - RNA, 19 nt, Artificial Sequence
  Description of Artificial Sequence: Synthetic oligonucleotide
caugucuagagcuugccgg

SEQ ID NO: 2634997 - RNA, 19 nt, Artificial Sequence
  Description of Artificial Sequence: Synthetic oligonucleotide
guuaaagauagagggaugg

SEQ ID NO: 2634998 - RNA, 19 nt, Artificial Sequence
  Description of Artificial Sequence: Synthetic oligonucleotide
aguccagucagauuaaacu

SEQ ID NO: 2634999 - RNA, 19 nt, Artificial Sequence
  Description of Artificial Sequence: Synthetic oligonucleotide
gaagaacucauuaccacgg

SEQ ID NO: 2635000 - RNA, 19 nt, Artificial Sequence
  Description of Artificial Sequence: Synthetic oligonucleotide
cacagaagaacucauuacc

SEQ ID NO: 2635001 - RNA, 19 nt, Artificial Sequence
  Description of Artificial Sequence: Synthetic oligonucleotide
acguccaugcacuuggggc

SEQ ID NO: 2635002 - RNA, 19 nt, Artificial Sequence
  Description of Artificial Sequence: Synthetic oligonucleotide
auuaaacuuguccuggaug

SEQ ID NO: 2635003 - RNA, 19 nt, Artificial Sequence
  Description of Artificial Sequence: Synthetic oligonucleotide
uuuauuucauguucccacc

SEQ ID NO: 2635004 - RNA, 19 nt, Artificial Sequence
  Description of Artificial Sequence: Synthetic oligonucleotide
ucagauuaaacuuguccug

SEQ ID NO: 2635005 - RNA, 19 nt, Artificial Sequence
  Description of Artificial Sequence: Synthetic oligonucleotide
aaagauagagggaugggug

SEQ ID NO: 2635006 - RNA, 19 nt, Artificial Sequence
  Description of Artificial Sequence: Synthetic oligonucleotide
uguucaaucaggucacucu

SEQ ID NO: 2635007 - RNA, 19 nt, Artificial Sequence
  Description of Artificial Sequence: Synthetic oligonucleotide
aagagcaugugagggaaac

SEQ ID NO: 2635008 - RNA, 19 nt, Artificial Sequence
  Description of Artificial Sequence: Synthetic oligonucleotide
caugaagagcaugugaggg

SEQ ID NO: 2635009 - RNA, 19 nt, Artificial Sequence
  Description of Artificial Sequence: Synthetic oligonucleotide
gaugggaagcauuggcugg

SEQ ID NO: 2635010 - RNA, 19 nt, Artificial Sequence
  Description of Artificial Sequence: Synthetic oligonucleotide
ugcaccaugaagagcaugu

SEQ ID NO: 2635011 - RNA, 19 nt, Artificial Sequence
  Description of Artificial Sequence: Synthetic oligonucleotide
uccagguccaagaucaugu

SEQ ID NO: 2635012 - RNA, 19 nt, Artificial Sequence
  Description of Artificial Sequence: Synthetic oligonucleotide
augauuuggguguguacac

SEQ ID NO: 2635013 - RNA, 19 nt, Artificial Sequence
  Description of Artificial Sequence: Synthetic oligonucleotide
ucaugucuagagcuugccg

SEQ ID NO: 2635014 - RNA, 19 nt, Artificial Sequence
  Description of Artificial Sequence: Synthetic oligonucleotide
uugacugggcucuugaagu

SEQ ID NO: 2635015 - RNA, 19 nt, Artificial Sequence
  Description of Artificial Sequence: Synthetic oligonucleotide
cagcgaaucgucuugacug

SEQ ID NO: 2635016 - RNA, 19 nt, Artificial Sequence
  Description of Artificial Sequence: Synthetic oligonucleotide
aacccauaaagcaucuccg

SEQ ID NO: 2635017 - RNA, 19 nt, Artificial Sequence
  Description of Artificial Sequence: Synthetic oligonucleotide
uucaaucaggucacucugg

SEQ ID NO: 2635018 - RNA, 19 nt, Artificial Sequence
  Description of Artificial Sequence: Synthetic oligonucleotide
aaaccauagacuuccugaa

SEQ ID NO: 2635019 - RNA, 19 nt, Artificial Sequence
  Description of Artificial Sequence: Synthetic oligonucleotide
auuaccacggagcccacag

SEQ ID NO: 2635020 - RNA, 19 nt, Artificial Sequence
  Description of Artificial Sequence: Synthetic oligonucleotide
aaaccagugccgaaguagg

SEQ ID NO: 2635021 - RNA, 19 nt, Artificial Sequence
  Description of Artificial Sequence: Synthetic oligonucleotide
ugcucauugaguccaguca

SEQ ID NO: 2635022 - RNA, 19 nt, Artificial Sequence
  Description of Artificial Sequence: Synthetic oligonucleotide
uuaaagauagagggauggg

SEQ ID NO: 2635023 - RNA, 19 nt, Artificial Sequence
  Description of Artificial Sequence: Synthetic oligonucleotide
acccauaaagcaucuccgc

SEQ ID NO: 2635024 - RNA, 19 nt, Artificial Sequence
  Description of Artificial Sequence: Synthetic oligonucleotide
aaucgucuugacugggcuc

SEQ ID NO: 2635025 - RNA, 19 nt, Artificial Sequence
  Description of Artificial Sequence: Synthetic oligonucleotide
auguccgaaaggccgaugg

SEQ ID NO: 2635026 - RNA, 19 nt, Artificial Sequence
  Description of Artificial Sequence: Synthetic oligonucleotide
gaugauuuggguguguaca

SEQ ID NO: 2635027 - RNA, 19 nt, Artificial Sequence
  Description of Artificial Sequence: Synthetic oligonucleotide
uucaccauggccucgccug

SEQ ID NO: 2635028 - RNA, 19 nt, Artificial Sequence
  Description of Artificial Sequence: Synthetic oligonucleotide
uguuaaagauagagggaug

SEQ ID NO: 2635029 - RNA, 19 nt, Artificial Sequence
  Description of Artificial Sequence: Synthetic oligonucleotide
ucauguucccaccacaaua

SEQ ID NO: 2635030 - RNA, 19 nt, Artificial Sequence
  Description of Artificial Sequence: Synthetic oligonucleotide
gaacucauuaccacggagc

SEQ ID NO: 2635031 - RNA, 19 nt, Artificial Sequence
  Description of Artificial Sequence: Synthetic oligonucleotide
uaacuauuccuuuaauuua

SEQ ID NO: 2635032 - RNA, 19 nt, Artificial Sequence
  Description of Artificial Sequence: Synthetic oligonucleotide
gaggacaguagccaaaguc

SEQ ID NO: 2635033 - RNA, 19 nt, Artificial Sequence
  Description of Artificial Sequence: Synthetic oligonucleotide
cauaaagcaucuccgcugc

SEQ ID NO: 2635034 - RNA, 19 nt, Artificial Sequence
  Description of Artificial Sequence: Synthetic oligonucleotide
aaaggaauggugguguuaa

SEQ ID NO: 2635035 - RNA, 19 nt, Artificial Sequence
  Description of Artificial Sequence: Synthetic oligonucleotide
gaaaggguggaagcaaagg

SEQ ID NO: 2635036 - RNA, 19 nt, Artificial Sequence
  Description of Artificial Sequence: Synthetic oligonucleotide
uaaagauagagggaugggu

SEQ ID NO: 2635037 - RNA, 19 nt, Artificial Sequence
  Description of Artificial Sequence: Synthetic oligonucleotide
uuauuucauguucccacca

SEQ ID NO: 2635038 - RNA, 19 nt, Artificial Sequence
  Description of Artificial Sequence: Synthetic oligonucleotide
auggugguguuaaagauag

SEQ ID NO: 2635039 - RNA, 19 nt, Artificial Sequence
  Description of Artificial Sequence: Synthetic oligonucleotide
ucacagaagaacucauuac

SEQ ID NO: 2635040 - RNA, 19 nt, Artificial Sequence
  Description of Artificial Sequence: Synthetic oligonucleotide
ugaaaggguggaagcaaag

SEQ ID NO: 2635041 - RNA, 19 nt, Artificial Sequence
  Description of Artificial Sequence: Synthetic oligonucleotide
ggaagcaaaggaauggugg

SEQ ID NO: 2635042 - RNA, 19 nt, Artificial Sequence
  Description of Artificial Sequence: Synthetic oligonucleotide
guugcuggcggcuuggagc

SEQ ID NO: 2635043 - RNA, 19 nt, Artificial Sequence
  Description of Artificial Sequence: Synthetic oligonucleotide
cauagacuuccugaaaggg

SEQ ID NO: 2635044 - RNA, 19 nt, Artificial Sequence
  Description of Artificial Sequence: Synthetic oligonucleotide
accaugaagagcaugugag

SEQ ID NO: 2635045 - RNA, 19 nt, Artificial Sequence
  Description of Artificial Sequence: Synthetic oligonucleotide
ggugguguuaaagauagag

SEQ ID NO: 2635046 - RNA, 19 nt, Artificial Sequence
  Description of Artificial Sequence: Synthetic oligonucleotide
agaacucauuaccacggag

SEQ ID NO: 2635047 - RNA, 19 nt, Artificial Sequence
  Description of Artificial Sequence: Synthetic oligonucleotide
uguucccaccacaauaacu

SEQ ID NO: 2635048 - RNA, 19 nt, Artificial Sequence
  Description of Artificial Sequence: Synthetic oligonucleotide
ugccuugaugauuugggug

SEQ ID NO: 2635049 - RNA, 19 nt, Artificial Sequence
  Description of Artificial Sequence: Synthetic oligonucleotide
cagauuaaacuuguccugg

SEQ ID NO: 2635050 - RNA, 19 nt, Artificial Sequence
  Description of Artificial Sequence: Synthetic oligonucleotide
aacuauuccuuuaauuuaa

SEQ ID NO: 2635051 - RNA, 19 nt, Artificial Sequence
  Description of Artificial Sequence: Synthetic oligonucleotide
cuugacugggcucuugaag

SEQ ID NO: 2635052 - RNA, 19 nt, Artificial Sequence
  Description of Artificial Sequence: Synthetic oligonucleotide
ucaaucaggucacucuggu

SEQ ID NO: 2635053 - RNA, 19 nt, Artificial Sequence
  Description of Artificial Sequence: Synthetic oligonucleotide
uuucauguucccaccacaa

SEQ ID NO: 2635054 - RNA, 19 nt, Artificial Sequence
  Description of Artificial Sequence: Synthetic oligonucleotide
uacacacgaggacaguagc

SEQ ID NO: 2635055 - RNA, 19 nt, Artificial Sequence
  Description of Artificial Sequence: Synthetic oligonucleotide
gucagauuaaacuuguccu

SEQ ID NO: 2635056 - RNA, 19 nt, Artificial Sequence
  Description of Artificial Sequence: Synthetic oligonucleotide
uggaagcaaaggaauggug

SEQ ID NO: 2635057 - RNA, 19 nt, Artificial Sequence
  Description of Artificial Sequence: Synthetic oligonucleotide
agagcuucaccauggccuc

SEQ ID NO: 2635058 - RNA, 19 nt, Artificial Sequence
  Description of Artificial Sequence: Synthetic oligonucleotide
auuucauguucccaccaca

SEQ ID NO: 2635059 - RNA, 19 nt, Artificial Sequence
  Description of Artificial Sequence: Synthetic oligonucleotide
cagaagaacucauuaccac

SEQ ID NO: 2635060 - RNA, 19 nt, Artificial Sequence
  Description of Artificial Sequence: Synthetic oligonucleotide
aucaggucacucugguugg

SEQ ID NO: 2635061 - RNA, 19 nt, Artificial Sequence
  Description of Artificial Sequence: Synthetic oligonucleotide
uuccugaaaggguggaagc

SEQ ID NO: 2635062 - RNA, 19 nt, Artificial Sequence
  Description of Artificial Sequence: Synthetic oligonucleotide
aaguaggcgccguccgucg

SEQ ID NO: 2635063 - RNA, 19 nt, Artificial Sequence
  Description of Artificial Sequence: Synthetic oligonucleotide
ucagcgaaucgucuugacu

SEQ ID NO: 2635064 - RNA, 19 nt, Artificial Sequence
  Description of Artificial Sequence: Synthetic oligonucleotide
ugauuuggguguguacacg

SEQ ID NO: 2635065 - RNA, 19 nt, Artificial Sequence
  Description of Artificial Sequence: Synthetic oligonucleotide
ugggcgaggagucagcgaa

SEQ ID NO: 2635066 - RNA, 19 nt, Artificial Sequence
  Description of Artificial Sequence: Synthetic oligonucleotide
cucuugaaguugcuggcgg

SEQ ID NO: 2635067 - RNA, 19 nt, Artificial Sequence
  Description of Artificial Sequence: Synthetic oligonucleotide
agcgaaucgucuugacugg

SEQ ID NO: 2635068 - RNA, 19 nt, Artificial Sequence
  Description of Artificial Sequence: Synthetic oligonucleotide
uguccgaaaggccgauggg

SEQ ID NO: 2635069 - RNA, 19 nt, Artificial Sequence
  Description of Artificial Sequence: Synthetic oligonucleotide
cucuggaugcaccaugaag

SEQ ID NO: 2635070 - RNA, 19 nt, Artificial Sequence
  Description of Artificial Sequence: Synthetic oligonucleotide
gguguguacacguccaugc

SEQ ID NO: 2635071 - RNA, 19 nt, Artificial Sequence
  Description of Artificial Sequence: Synthetic oligonucleotide
aggacaguagccaaagucu

SEQ ID NO: 2635072 - RNA, 19 nt, Artificial Sequence
  Description of Artificial Sequence: Synthetic oligonucleotide
guuggugaggauguaucgg

SEQ ID NO: 2635073 - RNA, 19 nt, Artificial Sequence
  Description of Artificial Sequence: Synthetic oligonucleotide
uccaacauuugggcgaugc

SEQ ID NO: 2635074 - RNA, 19 nt, Artificial Sequence
  Description of Artificial Sequence: Synthetic oligonucleotide
aucaugucuagagcuugcc

SEQ ID NO: 2635075 - RNA, 19 nt, Artificial Sequence
  Description of Artificial Sequence: Synthetic oligonucleotide
ucacaguacacacgaggac

SEQ ID NO: 2635076 - RNA, 19 nt, Artificial Sequence
  Description of Artificial Sequence: Synthetic oligonucleotide
aagaacucauuaccacgga

SEQ ID NO: 2635077 - RNA, 19 nt, Artificial Sequence
  Description of Artificial Sequence: Synthetic oligonucleotide
uccgcugccuguucaauca

SEQ ID NO: 2635078 - RNA, 19 nt, Artificial Sequence
  Description of Artificial Sequence: Synthetic oligonucleotide
gauguaucgggcguggauc

SEQ ID NO: 2635079 - RNA, 19 nt, Artificial Sequence
  Description of Artificial Sequence: Synthetic oligonucleotide
gguggaagcaaaggaaugg

SEQ ID NO: 2635080 - RNA, 19 nt, Artificial Sequence
  Description of Artificial Sequence: Synthetic oligonucleotide
uuggcugguucucacagua

SEQ ID NO: 2635081 - RNA, 19 nt, Artificial Sequence
  Description of Artificial Sequence: Synthetic oligonucleotide
uaucgggcguggaucaacc

SEQ ID NO: 2635082 - RNA, 19 nt, Artificial Sequence
  Description of Artificial Sequence: Synthetic oligonucleotide
acagaagaacucauuacca

SEQ ID NO: 2635083 - RNA, 19 nt, Artificial Sequence
  Description of Artificial Sequence: Synthetic oligonucleotide
auaaagcaucuccgcugcc

SEQ ID NO: 2635084 - RNA, 19 nt, Artificial Sequence
  Description of Artificial Sequence: Synthetic oligonucleotide
accacaauaacuauuccuu

SEQ ID NO: 2635085 - RNA, 19 nt, Artificial Sequence
  Description of Artificial Sequence: Synthetic oligonucleotide
cucauuaccacggagccca

SEQ ID NO: 2635086 - RNA, 19 nt, Artificial Sequence
  Description of Artificial Sequence: Synthetic oligonucleotide
acuuguccuggauguaguc

SEQ ID NO: 2635087 - RNA, 19 nt, Artificial Sequence
  Description of Artificial Sequence: Synthetic oligonucleotide
uaccacggagcccacagaa

SEQ ID NO: 2635088 - RNA, 19 nt, Artificial Sequence
  Description of Artificial Sequence: Synthetic oligonucleotide
ugcugguacuuuuccaaca

SEQ ID NO: 2635089 - RNA, 19 nt, Artificial Sequence
  Description of Artificial Sequence: Synthetic oligonucleotide
agauuaaacuuguccugga

SEQ ID NO: 2635090 - RNA, 19 nt, Artificial Sequence
  Description of Artificial Sequence: Synthetic oligonucleotide
uccgaaaggccgaugggaa

SEQ ID NO: 2635091 - RNA, 19 nt, Artificial Sequence
  Description of Artificial Sequence: Synthetic oligonucleotide
gguuggugaggauguaucg

SEQ ID NO: 2635092 - RNA, 19 nt, Artificial Sequence
  Description of Artificial Sequence: Synthetic oligonucleotide
ggaugcaccaugaagagca

SEQ ID NO: 2635093 - RNA, 19 nt, Artificial Sequence
  Description of Artificial Sequence: Synthetic oligonucleotide
aauggugguguuaaagaua

SEQ ID NO: 2635094 - RNA, 19 nt, Artificial Sequence
  Description of Artificial Sequence: Synthetic oligonucleotide
agcuugccgguagugaggc

SEQ ID NO: 2635095 - RNA, 19 nt, Artificial Sequence
  Description of Artificial Sequence: Synthetic oligonucleotide
acacacgaggacaguagcc

SEQ ID NO: 2635096 - RNA, 19 nt, Artificial Sequence
  Description of Artificial Sequence: Synthetic oligonucleotide
cguggaucaacccauaaag

SEQ ID NO: 2635097 - RNA, 19 nt, Artificial Sequence
  Description of Artificial Sequence: Synthetic oligonucleotide
gagucagcgaaucgucuug

SEQ ID NO: 2635098 - RNA, 19 nt, Artificial Sequence
  Description of Artificial Sequence: Synthetic oligonucleotide
agauagagggauggguggg

SEQ ID NO: 2635099 - RNA, 19 nt, Artificial Sequence
  Description of Artificial Sequence: Synthetic oligonucleotide
ggcacuugcucauugaguc

SEQ ID NO: 2635100 - RNA, 19 nt, Artificial Sequence
  Description of Artificial Sequence: Synthetic oligonucleotide
acauuugggcgaugccucg

SEQ ID NO: 2635101 - RNA, 19 nt, Artificial Sequence
  Description of Artificial Sequence: Synthetic oligonucleotide
accagugccgaaguaggcg

SEQ ID NO: 2635102 - RNA, 19 nt, Artificial Sequence
  Description of Artificial Sequence: Synthetic oligonucleotide
aaccagugccgaaguaggc

SEQ ID NO: 2635103 - RNA, 19 nt, Artificial Sequence
  Description of Artificial Sequence: Synthetic oligonucleotide
ggugaggauguaucgggcg

SEQ ID NO: 2635104 - RNA, 19 nt, Artificial Sequence
  Description of Artificial Sequence: Synthetic oligonucleotide
cuuguccuggauguagucc

SEQ ID NO: 2635105 - RNA, 19 nt, Artificial Sequence
  Description of Artificial Sequence: Synthetic oligonucleotide
ggugccuugaugauuuggg

SEQ ID NO: 2635106 - RNA, 19 nt, Artificial Sequence
  Description of Artificial Sequence: Synthetic oligonucleotide
ucgggcguggaucaaccca

SEQ ID NO: 2635107 - RNA, 19 nt, Artificial Sequence
  Description of Artificial Sequence: Synthetic oligonucleotide
acucauuaccacggagccc

SEQ ID NO: 2635108 - RNA, 19 nt, Artificial Sequence
  Description of Artificial Sequence: Synthetic oligonucleotide
auguucccaccacaauaac

SEQ ID NO: 2635109 - RNA, 19 nt, Artificial Sequence
  Description of Artificial Sequence: Synthetic oligonucleotide
guagagcuucaccauggcc

SEQ ID NO: 2635110 - RNA, 19 nt, Artificial Sequence
  Description of Artificial Sequence: Synthetic oligonucleotide
cauguucccaccacaauaa

SEQ ID NO: 2635111 - RNA, 19 nt, Artificial Sequence
  Description of Artificial Sequence: Synthetic oligonucleotide
agaucaugucuagagcuug

SEQ ID NO: 2635112 - RNA, 19 nt, Artificial Sequence
  Description of Artificial Sequence: Synthetic oligonucleotide
ucaccauggccucgccugg

SEQ ID NO: 2635113 - RNA, 19 nt, Artificial Sequence
  Description of Artificial Sequence: Synthetic oligonucleotide
auagacuuccugaaagggu

SEQ ID NO: 2635114 - RNA, 19 nt, Artificial Sequence
  Description of Artificial Sequence: Synthetic oligonucleotide
augucuagagcuugccggu

SEQ ID NO: 2635115 - RNA, 19 nt, Artificial Sequence
  Description of Artificial Sequence: Synthetic oligonucleotide
agggaaaccagugccgaag

SEQ ID NO: 2635116 - RNA, 19 nt, Artificial Sequence
  Description of Artificial Sequence: Synthetic oligonucleotide
uugggcgaugccucgguug

SEQ ID NO: 2635117 - RNA, 19 nt, Artificial Sequence
  Description of Artificial Sequence: Synthetic oligonucleotide
cuugccgguagugaggcac

SEQ ID NO: 2635118 - RNA, 19 nt, Artificial Sequence
  Description of Artificial Sequence: Synthetic oligonucleotide
acaguacacacgaggacag

SEQ ID NO: 2635119 - RNA, 19 nt, Artificial Sequence
  Description of Artificial Sequence: Synthetic oligonucleotide
ugagggaaaccagugccga

SEQ ID NO: 2635120 - RNA, 19 nt, Artificial Sequence
  Description of Artificial Sequence: Synthetic oligonucleotide
uugcuggcggcuuggagcu

SEQ ID NO: 2635121 - RNA, 19 nt, Artificial Sequence
  Description of Artificial Sequence: Synthetic oligonucleotide
cucacagaagaacucauua

SEQ ID NO: 2635122 - RNA, 19 nt, Artificial Sequence
  Description of Artificial Sequence: Synthetic oligonucleotide
auguaucgggcguggauca

SEQ ID NO: 2635123 - RNA, 19 nt, Artificial Sequence
  Description of Artificial Sequence: Synthetic oligonucleotide
uugcucauugaguccaguc

SEQ ID NO: 2635124 - RNA, 19 nt, Artificial Sequence
  Description of Artificial Sequence: Synthetic oligonucleotide
auagagggaugggugggcg

SEQ ID NO: 2635125 - RNA, 19 nt, Artificial Sequence
  Description of Artificial Sequence: Synthetic oligonucleotide
uccugaaaggguggaagca

SEQ ID NO: 2635126 - RNA, 19 nt, Artificial Sequence
  Description of Artificial Sequence: Synthetic oligonucleotide
guacacacgaggacaguag

SEQ ID NO: 2635127 - RNA, 19 nt, Artificial Sequence
  Description of Artificial Sequence: Synthetic oligonucleotide
gauuuggguguguacacgu

SEQ ID NO: 2635128 - RNA, 19 nt, Artificial Sequence
  Description of Artificial Sequence: Synthetic oligonucleotide
guggaucaacccauaaagc

SEQ ID NO: 2635129 - RNA, 19 nt, Artificial Sequence
  Description of Artificial Sequence: Synthetic oligonucleotide
uucauguucccaccacaau

SEQ ID NO: 2635130 - RNA, 19 nt, Artificial Sequence
  Description of Artificial Sequence: Synthetic oligonucleotide
uggugccuugaugauuugg

SEQ ID NO: 2635131 - RNA, 19 nt, Artificial Sequence
  Description of Artificial Sequence: Synthetic oligonucleotide
ugaggcacuugcucauuga

SEQ ID NO: 2635132 - RNA, 19 nt, Artificial Sequence
  Description of Artificial Sequence: Synthetic oligonucleotide
gugagggaaaccagugccg

SEQ ID NO: 2635133 - RNA, 19 nt, Artificial Sequence
  Description of Artificial Sequence: Synthetic oligonucleotide
aucgucuugacugggcucu

SEQ ID NO: 2635134 - RNA, 19 nt, Artificial Sequence
  Description of Artificial Sequence: Synthetic oligonucleotide
ucauugaguccagucagau

SEQ ID NO: 2635135 - RNA, 19 nt, Artificial Sequence
  Description of Artificial Sequence: Synthetic oligonucleotide
gauagagggaugggugggc

SEQ ID NO: 2635136 - RNA, 19 nt, Artificial Sequence
  Description of Artificial Sequence: Synthetic oligonucleotide
aucgggcguggaucaaccc

SEQ ID NO: 2635137 - RNA, 19 nt, Artificial Sequence
  Description of Artificial Sequence: Synthetic oligonucleotide
cugggauguccgaaaggcc

SEQ ID NO: 2635138 - RNA, 19 nt, Artificial Sequence
  Description of Artificial Sequence: Synthetic oligonucleotide
cacaguacacacgaggaca

SEQ ID NO: 2635139 - RNA, 19 nt, Artificial Sequence
  Description of Artificial Sequence: Synthetic oligonucleotide
gucuagagcuugccgguag

SEQ ID NO: 2635140 - RNA, 19 nt, Artificial Sequence
  Description of Artificial Sequence: Synthetic oligonucleotide
ugaggauguaucgggcgug

SEQ ID NO: 2635141 - RNA, 19 nt, Artificial Sequence
  Description of Artificial Sequence: Synthetic oligonucleotide
gguagugaggcacuugcuc

SEQ ID NO: 2635142 - RNA, 19 nt, Artificial Sequence
  Description of Artificial Sequence: Synthetic oligonucleotide
acgaggacaguagccaaag

SEQ ID NO: 2635143 - RNA, 19 nt, Artificial Sequence
  Description of Artificial Sequence: Synthetic oligonucleotide
aacuuguccuggauguagu

SEQ ID NO: 2635144 - RNA, 19 nt, Artificial Sequence
  Description of Artificial Sequence: Synthetic oligonucleotide
agcccacagaaccaggaaa

SEQ ID NO: 2635145 - RNA, 19 nt, Artificial Sequence
  Description of Artificial Sequence: Synthetic oligonucleotide
aagaucaugucuagagcuu

SEQ ID NO: 2635146 - RNA, 19 nt, Artificial Sequence
  Description of Artificial Sequence: Synthetic oligonucleotide
guguuaaagauagagggau

SEQ ID NO: 2635147 - RNA, 19 nt, Artificial Sequence
  Description of Artificial Sequence: Synthetic oligonucleotide
gaguccagucagauuaaac

SEQ ID NO: 2635148 - RNA, 19 nt, Artificial Sequence
  Description of Artificial Sequence: Synthetic oligonucleotide
uugaguccagucagauuaa

SEQ ID NO: 2635149 - RNA, 19 nt, Artificial Sequence
  Description of Artificial Sequence: Synthetic oligonucleotide
gcggcuuggagcugcaggg

SEQ ID NO: 2635150 - RNA, 19 nt, Artificial Sequence
  Description of Artificial Sequence: Synthetic oligonucleotide
ucgugguggugccuugaug

SEQ ID NO: 2635151 - RNA, 19 nt, Artificial Sequence
  Description of Artificial Sequence: Synthetic oligonucleotide
ccugggauguccgaaaggc

SEQ ID NO: 2635152 - RNA, 19 nt, Artificial Sequence
  Description of Artificial Sequence: Synthetic oligonucleotide
gagcuugccgguagugagg

SEQ ID NO: 2635153 - RNA, 19 nt, Artificial Sequence
  Description of Artificial Sequence: Synthetic oligonucleotide
cuuggagcugcaggggccg

SEQ ID NO: 2635154 - RNA, 19 nt, Artificial Sequence
  Description of Artificial Sequence: Synthetic oligonucleotide
ucuugacugggcucuugaa

SEQ ID NO: 2635155 - RNA, 19 nt, Artificial Sequence
  Description of Artificial Sequence: Synthetic oligonucleotide
auuuggguguguacacguc

SEQ ID NO: 2635156 - RNA, 19 nt, Artificial Sequence
  Description of Artificial Sequence: Synthetic oligonucleotide
cugcugguacuuuuccaac

SEQ ID NO: 2635157 - RNA, 19 nt, Artificial Sequence
  Description of Artificial Sequence: Synthetic oligonucleotide
uugaugauuugggugugua

SEQ ID NO: 2635158 - RNA, 19 nt, Artificial Sequence
  Description of Artificial Sequence: Synthetic oligonucleotide
auuugggcgaugccucggu

SEQ ID NO: 2635159 - RNA, 19 nt, Artificial Sequence
  Description of Artificial Sequence: Synthetic oligonucleotide
uggaugcaccaugaagagc

SEQ ID NO: 2635160 - RNA, 19 nt, Artificial Sequence
  Description of Artificial Sequence: Synthetic oligonucleotide
aguacacacgaggacagua

SEQ ID NO: 2635161 - RNA, 19 nt, Artificial Sequence
  Description of Artificial Sequence: Synthetic oligonucleotide
agguccaagaucaugucua

SEQ ID NO: 2635162 - RNA, 19 nt, Artificial Sequence
  Description of Artificial Sequence: Synthetic oligonucleotide
gggcaguagagcuucacca

SEQ ID NO: 2635163 - RNA, 19 nt, Artificial Sequence
  Description of Artificial Sequence: Synthetic oligonucleotide
uuuccaacauuugggcgau

SEQ ID NO: 2635164 - RNA, 19 nt, Artificial Sequence
  Description of Artificial Sequence: Synthetic oligonucleotide
aggucacucugguuggggu

SEQ ID NO: 2635165 - RNA, 19 nt, Artificial Sequence
  Description of Artificial Sequence: Synthetic oligonucleotide
uuaccacggagcccacaga

SEQ ID NO: 2635166 - RNA, 19 nt, Artificial Sequence
  Description of Artificial Sequence: Synthetic oligonucleotide
cacguccaugcacuugggg

SEQ ID NO: 2635167 - RNA, 19 nt, Artificial Sequence
  Description of Artificial Sequence: Synthetic oligonucleotide
agacuuccugaaagggugg

SEQ ID NO: 2635168 - RNA, 19 nt, Artificial Sequence
  Description of Artificial Sequence: Synthetic oligonucleotide
gguccaagaucaugucuag

SEQ ID NO: 2635169 - RNA, 19 nt, Artificial Sequence
  Description of Artificial Sequence: Synthetic oligonucleotide
gaaguaggcgccguccguc

SEQ ID NO: 2635170 - RNA, 19 nt, Artificial Sequence
  Description of Artificial Sequence: Synthetic oligonucleotide
gaggagucagcgaaucguc

SEQ ID NO: 2635171 - RNA, 19 nt, Artificial Sequence
  Description of Artificial Sequence: Synthetic oligonucleotide
ccacggagcccacagaacc

SEQ ID NO: 2635172 - RNA, 19 nt, Artificial Sequence
  Description of Artificial Sequence: Synthetic oligonucleotide
aaggaauggugguguuaaa

SEQ ID NO: 2635173 - RNA, 19 nt, Artificial Sequence
  Description of Artificial Sequence: Synthetic oligonucleotide
caccacaauaacuauuccu

SEQ ID NO: 2635174 - RNA, 19 nt, Artificial Sequence
  Description of Artificial Sequence: Synthetic oligonucleotide
gguguuaaagauagaggga

SEQ ID NO: 2635175 - RNA, 19 nt, Artificial Sequence
  Description of Artificial Sequence: Synthetic oligonucleotide
aagcauuggcugguucuca

SEQ ID NO: 2635176 - RNA, 19 nt, Artificial Sequence
  Description of Artificial Sequence: Synthetic oligonucleotide
ggcggcuuggagcugcagg

SEQ ID NO: 2635177 - RNA, 19 nt, Artificial Sequence
  Description of Artificial Sequence: Synthetic oligonucleotide
gaugggugggcgaggaguc

SEQ ID NO: 2635178 - RNA, 19 nt, Artificial Sequence
  Description of Artificial Sequence: Synthetic oligonucleotide
gcaguagagcuucaccaug

SEQ ID NO: 2635179 - RNA, 19 nt, Artificial Sequence
  Description of Artificial Sequence: Synthetic oligonucleotide
cacacgaggacaguagcca

SEQ ID NO: 2635180 - RNA, 19 nt, Artificial Sequence
  Description of Artificial Sequence: Synthetic oligonucleotide
uagagggaugggugggcga

SEQ ID NO: 2635181 - RNA, 19 nt, Artificial Sequence
  Description of Artificial Sequence: Synthetic oligonucleotide
gccgaugggaagcauuggc

SEQ ID NO: 2635182 - RNA, 19 nt, Artificial Sequence
  Description of Artificial Sequence: Synthetic oligonucleotide
ccagugccgaaguaggcgc

SEQ ID NO: 2635183 - RNA, 19 nt, Artificial Sequence
  Description of Artificial Sequence: Synthetic oligonucleotide
cauuugggcgaugccucgg

SEQ ID NO: 2635184 - RNA, 19 nt, Artificial Sequence
  Description of Artificial Sequence: Synthetic oligonucleotide
ugcaggggccgguacucug

SEQ ID NO: 2635185 - RNA, 19 nt, Artificial Sequence
  Description of Artificial Sequence: Synthetic oligonucleotide
cacuugcucauugagucca

SEQ ID NO: 2635186 - RNA, 19 nt, Artificial Sequence
  Description of Artificial Sequence: Synthetic oligonucleotide
cugaaaggguggaagcaaa

SEQ ID NO: 2635187 - RNA, 19 nt, Artificial Sequence
  Description of Artificial Sequence: Synthetic oligonucleotide
uugccgguagugaggcacu

SEQ ID NO: 2635188 - RNA, 19 nt, Artificial Sequence
  Description of Artificial Sequence: Synthetic oligonucleotide
ggcugguucucacaguaca

SEQ ID NO: 2635189 - RNA, 19 nt, Artificial Sequence
  Description of Artificial Sequence: Synthetic oligonucleotide
acacgaggacaguagccaa

SEQ ID NO: 2635190 - RNA, 19 nt, Artificial Sequence
  Description of Artificial Sequence: Synthetic oligonucleotide
ccgguagugaggcacuugc

SEQ ID NO: 2635191 - RNA, 19 nt, Artificial Sequence
  Description of Artificial Sequence: Synthetic oligonucleotide
gucuugacugggcucuuga

SEQ ID NO: 2635192 - RNA, 19 nt, Artificial Sequence
  Description of Artificial Sequence: Synthetic oligonucleotide
aggccgaugggaagcauug

SEQ ID NO: 2635193 - RNA, 19 nt, Artificial Sequence
  Description of Artificial Sequence: Synthetic oligonucleotide
uggcugguucucacaguac

SEQ ID NO: 2635194 - RNA, 19 nt, Artificial Sequence
  Description of Artificial Sequence: Synthetic oligonucleotide
ggggccgguacucuggaug

SEQ ID NO: 2635195 - RNA, 19 nt, Artificial Sequence
  Description of Artificial Sequence: Synthetic oligonucleotide
ggggcaguagagcuucacc

SEQ ID NO: 2635196 - RNA, 19 nt, Artificial Sequence
  Description of Artificial Sequence: Synthetic oligonucleotide
uaaacuuguccuggaugua

SEQ ID NO: 2635197 - RNA, 19 nt, Artificial Sequence
  Description of Artificial Sequence: Synthetic oligonucleotide
ugacugggcucuugaaguu

SEQ ID NO: 2635198 - RNA, 19 nt, Artificial Sequence
  Description of Artificial Sequence: Synthetic oligonucleotide
cuagagcuugccgguagug

SEQ ID NO: 2635199 - RNA, 19 nt, Artificial Sequence
  Description of Artificial Sequence: Synthetic oligonucleotide
cuguucaaucaggucacuc

SEQ ID NO: 2635200 - RNA, 19 nt, Artificial Sequence
  Description of Artificial Sequence: Synthetic oligonucleotide
guccgaaaggccgauggga

SEQ ID NO: 2635201 - RNA, 19 nt, Artificial Sequence
  Description of Artificial Sequence: Synthetic oligonucleotide
acggagcccacagaaccag

SEQ ID NO: 2635202 - RNA, 19 nt, Artificial Sequence
  Description of Artificial Sequence: Synthetic oligonucleotide
accacggagcccacagaac

SEQ ID NO: 2635203 - RNA, 19 nt, Artificial Sequence
  Description of Artificial Sequence: Synthetic oligonucleotide
augggaagcauuggcuggu

SEQ ID NO: 2635204 - RNA, 19 nt, Artificial Sequence
  Description of Artificial Sequence: Synthetic oligonucleotide
guguguacacguccaugca

SEQ ID NO: 2635205 - RNA, 19 nt, Artificial Sequence
  Description of Artificial Sequence: Synthetic oligonucleotide
auggccucgccugggaugu

SEQ ID NO: 2635206 - RNA, 19 nt, Artificial Sequence
  Description of Artificial Sequence: Synthetic oligonucleotide
gaaaggccgaugggaagca

SEQ ID NO: 2635207 - RNA, 19 nt, Artificial Sequence
  Description of Artificial Sequence: Synthetic oligonucleotide
caggucacucugguugggg

SEQ ID NO: 2635208 - RNA, 19 nt, Artificial Sequence
  Description of Artificial Sequence: Synthetic oligonucleotide
cagugccgaaguaggcgcc

SEQ ID NO: 2635209 - RNA, 19 nt, Artificial Sequence
  Description of Artificial Sequence: Synthetic oligonucleotide
ugaguccagucagauuaaa

SEQ ID NO: 2635210 - RNA, 19 nt, Artificial Sequence
  Description of Artificial Sequence: Synthetic oligonucleotide
agucagcgaaucgucuuga

SEQ ID NO: 2635211 - RNA, 19 nt, Artificial Sequence
  Description of Artificial Sequence: Synthetic oligonucleotide
cugccuguucaaucagguc

SEQ ID NO: 2635212 - RNA, 19 nt, Artificial Sequence
  Description of Artificial Sequence: Synthetic oligonucleotide
ucgguuggugaggauguau

SEQ ID NO: 2635213 - RNA, 19 nt, Artificial Sequence
  Description of Artificial Sequence: Synthetic oligonucleotide
cagucagauuaaacuuguc

SEQ ID NO: 2635214 - RNA, 19 nt, Artificial Sequence
  Description of Artificial Sequence: Synthetic oligonucleotide
ggaagcauuggcugguucu

SEQ ID NO: 2635215 - RNA, 19 nt, Artificial Sequence
  Description of Artificial Sequence: Synthetic oligonucleotide
gggccgguacucuggaugc

SEQ ID NO: 2635216 - RNA, 19 nt, Artificial Sequence
  Description of Artificial Sequence: Synthetic oligonucleotide
uggguguguacacguccau

SEQ ID NO: 2635217 - RNA, 19 nt, Artificial Sequence
  Description of Artificial Sequence: Synthetic oligonucleotide
cuccgcugccuguucaauc

SEQ ID NO: 2635218 - RNA, 19 nt, Artificial Sequence
  Description of Artificial Sequence: Synthetic oligonucleotide
ugggguugucuuccagcuc

SEQ ID NO: 2635219 - RNA, 19 nt, Artificial Sequence
  Description of Artificial Sequence: Synthetic oligonucleotide
aaggccgaugggaagcauu

SEQ ID NO: 2635220 - RNA, 19 nt, Artificial Sequence
  Description of Artificial Sequence: Synthetic oligonucleotide
gauguccgaaaggccgaug

SEQ ID NO: 2635221 - RNA, 19 nt, Artificial Sequence
  Description of Artificial Sequence: Synthetic oligonucleotide
guacacguccaugcacuug

SEQ ID NO: 2635222 - RNA, 19 nt, Artificial Sequence
  Description of Artificial Sequence: Synthetic oligonucleotide
aggcacuugcucauugagu

SEQ ID NO: 2635223 - RNA, 19 nt, Artificial Sequence
  Description of Artificial Sequence: Synthetic oligonucleotide
ucgccugggauguccgaaa

SEQ ID NO: 2635224 - RNA, 19 nt, Artificial Sequence
  Description of Artificial Sequence: Synthetic oligonucleotide
uggugguguuaaagauaga

SEQ ID NO: 2635225 - RNA, 19 nt, Artificial Sequence
  Description of Artificial Sequence: Synthetic oligonucleotide
gggguugucuuccagcucu

SEQ ID NO: 2635226 - RNA, 19 nt, Artificial Sequence
  Description of Artificial Sequence: Synthetic oligonucleotide
cgugguggugccuugauga

SEQ ID NO: 2635227 - RNA, 19 nt, Artificial Sequence
  Description of Artificial Sequence: Synthetic oligonucleotide
caccucacagaagaacuca

SEQ ID NO: 2635228 - RNA, 19 nt, Artificial Sequence
  Description of Artificial Sequence: Synthetic oligonucleotide
gucagcgaaucgucuugac

SEQ ID NO: 2635229 - RNA, 19 nt, Artificial Sequence
  Description of Artificial Sequence: Synthetic oligonucleotide
uuugggcgaugccucgguu

SEQ ID NO: 2635230 - RNA, 19 nt, Artificial Sequence
  Description of Artificial Sequence: Synthetic oligonucleotide
guaggcgccguccgucgug

SEQ ID NO: 2635231 - RNA, 19 nt, Artificial Sequence
  Description of Artificial Sequence: Synthetic oligonucleotide
uugaaguugcuggcggcuu

SEQ ID NO: 2635232 - RNA, 19 nt, Artificial Sequence
  Description of Artificial Sequence: Synthetic oligonucleotide
gcacuugcucauugagucc

SEQ ID NO: 2635233 - RNA, 19 nt, Artificial Sequence
  Description of Artificial Sequence: Synthetic oligonucleotide
guaucgggcguggaucaac

SEQ ID NO: 2635234 - RNA, 19 nt, Artificial Sequence
  Description of Artificial Sequence: Synthetic oligonucleotide
gacuuccugaaagggugga

SEQ ID NO: 2635235 - RNA, 19 nt, Artificial Sequence
  Description of Artificial Sequence: Synthetic oligonucleotide
ggacaguagccaaagucuc

SEQ ID NO: 2635236 - RNA, 19 nt, Artificial Sequence
  Description of Artificial Sequence: Synthetic oligonucleotide
cacuuggggcaguagagcu

SEQ ID NO: 2635237 - RNA, 19 nt, Artificial Sequence
  Description of Artificial Sequence: Synthetic oligonucleotide
aggagucagcgaaucgucu

SEQ ID NO: 2635238 - RNA, 19 nt, Artificial Sequence
  Description of Artificial Sequence: Synthetic oligonucleotide
acucuggaugcaccaugaa

SEQ ID NO: 2635239 - RNA, 19 nt, Artificial Sequence
  Description of Artificial Sequence: Synthetic oligonucleotide
ggguggaagcaaaggaaug

SEQ ID NO: 2635240 - RNA, 19 nt, Artificial Sequence
  Description of Artificial Sequence: Synthetic oligonucleotide
caugcacuuggggcaguag

SEQ ID NO: 2635241 - RNA, 19 nt, Artificial Sequence
  Description of Artificial Sequence: Synthetic oligonucleotide
gcgaggagucagcgaaucg

SEQ ID NO: 2635242 - RNA, 19 nt, Artificial Sequence
  Description of Artificial Sequence: Synthetic oligonucleotide
ucauuaccacggagcccac

SEQ ID NO: 2635243 - RNA, 19 nt, Artificial Sequence
  Description of Artificial Sequence: Synthetic oligonucleotide
cacggagcccacagaacca

SEQ ID NO: 2635244 - RNA, 19 nt, Artificial Sequence
  Description of Artificial Sequence: Synthetic oligonucleotide
gccugggauguccgaaagg

SEQ ID NO: 2635245 - RNA, 19 nt, Artificial Sequence
  Description of Artificial Sequence: Synthetic oligonucleotide
gagggaaaccagugccgaa

SEQ ID NO: 2635246 - RNA, 19 nt, Artificial Sequence
  Description of Artificial Sequence: Synthetic oligonucleotide
aguaggcgccguccgucgu

SEQ ID NO: 2635247 - RNA, 19 nt, Artificial Sequence
  Description of Artificial Sequence: Synthetic oligonucleotide
aguccucauccaccucaca

SEQ ID NO: 2635248 - RNA, 19 nt, Artificial Sequence
  Description of Artificial Sequence: Synthetic oligonucleotide
guggaagcaaaggaauggu

SEQ ID NO: 2635249 - RNA, 19 nt, Artificial Sequence
  Description of Artificial Sequence: Synthetic oligonucleotide
ccgaaguaggcgccguccg

SEQ ID NO: 2635250 - RNA, 19 nt, Artificial Sequence
  Description of Artificial Sequence: Synthetic oligonucleotide
acuugcucauugaguccag

SEQ ID NO: 2635251 - RNA, 19 nt, Artificial Sequence
  Description of Artificial Sequence: Synthetic oligonucleotide
uggggcaguagagcuucac

SEQ ID NO: 2635252 - RNA, 19 nt, Artificial Sequence
  Description of Artificial Sequence: Synthetic oligonucleotide
ugucuagagcuugccggua

SEQ ID NO: 2635253 - RNA, 19 nt, Artificial Sequence
  Description of Artificial Sequence: Synthetic oligonucleotide
accucacagaagaacucau

SEQ ID NO: 2635254 - RNA, 19 nt, Artificial Sequence
  Description of Artificial Sequence: Synthetic oligonucleotide
cacgaggacaguagccaaa

SEQ ID NO: 2635255 - RNA, 19 nt, Artificial Sequence
  Description of Artificial Sequence: Synthetic oligonucleotide
ggaucaacccauaaagcau

SEQ ID NO: 2635256 - RNA, 19 nt, Artificial Sequence
  Description of Artificial Sequence: Synthetic oligonucleotide
gccuguucaaucaggucac

SEQ ID NO: 2635257 - RNA, 19 nt, Artificial Sequence
  Description of Artificial Sequence: Synthetic oligonucleotide
aaaggccgaugggaagcau

SEQ ID NO: 2635258 - RNA, 19 nt, Artificial Sequence
  Description of Artificial Sequence: Synthetic oligonucleotide
aaguugcuggcggcuugga

SEQ ID NO: 2635259 - RNA, 19 nt, Artificial Sequence
  Description of Artificial Sequence: Synthetic oligonucleotide
ugccgaaguaggcgccguc

SEQ ID NO: 2635260 - RNA, 19 nt, Artificial Sequence
  Description of Artificial Sequence: Synthetic oligonucleotide
gccucgguuggugaggaug

SEQ ID NO: 2635261 - RNA, 19 nt, Artificial Sequence
  Description of Artificial Sequence: Synthetic oligonucleotide
agggaugggugggcgagga

SEQ ID NO: 2635262 - RNA, 19 nt, Artificial Sequence
  Description of Artificial Sequence: Synthetic oligonucleotide
gugccuugaugauuugggu

SEQ ID NO: 2635263 - RNA, 19 nt, Artificial Sequence
  Description of Artificial Sequence: Synthetic oligonucleotide
ccaccacaauaacuauucc

SEQ ID NO: 2635264 - RNA, 19 nt, Artificial Sequence
  Description of Artificial Sequence: Synthetic oligonucleotide
ugguggugccuugaugauu

SEQ ID NO: 2635265 - RNA, 19 nt, Artificial Sequence
  Description of Artificial Sequence: Synthetic oligonucleotide
uccgucgugguggugccuu

SEQ ID NO: 2635266 - RNA, 19 nt, Artificial Sequence
  Description of Artificial Sequence: Synthetic oligonucleotide
uguaucgggcguggaucaa

SEQ ID NO: 2635267 - RNA, 19 nt, Artificial Sequence
  Description of Artificial Sequence: Synthetic oligonucleotide
uuggggcaguagagcuuca

SEQ ID NO: 2635268 - RNA, 19 nt, Artificial Sequence
  Description of Artificial Sequence: Synthetic oligonucleotide
cgaaucgucuugacugggc

SEQ ID NO: 2635269 - RNA, 19 nt, Artificial Sequence
  Description of Artificial Sequence: Synthetic oligonucleotide
acacguccaugcacuuggg

SEQ ID NO: 2635270 - RNA, 19 nt, Artificial Sequence
  Description of Artificial Sequence: Synthetic oligonucleotide
ccgaaaggccgaugggaag

SEQ ID NO: 2635271 - RNA, 19 nt, Artificial Sequence
  Description of Artificial Sequence: Synthetic oligonucleotide
gcgccguccgucguggugg

SEQ ID NO: 2635272 - RNA, 19 nt, Artificial Sequence
  Description of Artificial Sequence: Synthetic oligonucleotide
caucuccgcugccuguuca

SEQ ID NO: 2635273 - RNA, 19 nt, Artificial Sequence
  Description of Artificial Sequence: Synthetic oligonucleotide
augccucgguuggugagga

SEQ ID NO: 2635274 - RNA, 19 nt, Artificial Sequence
  Description of Artificial Sequence: Synthetic oligonucleotide
caaaggaauggugguguua

SEQ ID NO: 2635275 - RNA, 19 nt, Artificial Sequence
  Description of Artificial Sequence: Synthetic oligonucleotide
ggguguguacacguccaug

SEQ ID NO: 2635276 - RNA, 19 nt, Artificial Sequence
  Description of Artificial Sequence: Synthetic oligonucleotide
gcgaaucgucuugacuggg

SEQ ID NO: 2635277 - RNA, 19 nt, Artificial Sequence
  Description of Artificial Sequence: Synthetic oligonucleotide
cuugaaguugcuggcggcu

SEQ ID NO: 2635278 - RNA, 19 nt, Artificial Sequence
  Description of Artificial Sequence: Synthetic oligonucleotide
guccaagaucaugucuaga

SEQ ID NO: 2635279 - RNA, 19 nt, Artificial Sequence
  Description of Artificial Sequence: Synthetic oligonucleotide
ccgguacucuggaugcacc

SEQ ID NO: 2635280 - RNA, 19 nt, Artificial Sequence
  Description of Artificial Sequence: Synthetic oligonucleotide
ucuccgcugccuguucaau

SEQ ID NO: 2635281 - RNA, 19 nt, Artificial Sequence
  Description of Artificial Sequence: Synthetic oligonucleotide
gcguggaucaacccauaaa

SEQ ID NO: 2635282 - RNA, 19 nt, Artificial Sequence
  Description of Artificial Sequence: Synthetic oligonucleotide
gccgaaguaggcgccgucc

SEQ ID NO: 2635283 - RNA, 19 nt, Artificial Sequence
  Description of Artificial Sequence: Synthetic oligonucleotide
cgguuggugaggauguauc

SEQ ID NO: 2635284 - RNA, 19 nt, Artificial Sequence
  Description of Artificial Sequence: Synthetic oligonucleotide
gugggcgaggagucagcga

SEQ ID NO: 2635285 - RNA, 19 nt, Artificial Sequence
  Description of Artificial Sequence: Synthetic oligonucleotide
guggugccuugaugauuug

SEQ ID NO: 2635286 - RNA, 19 nt, Artificial Sequence
  Description of Artificial Sequence: Synthetic oligonucleotide
aggauguaucgggcgugga

SEQ ID NO: 2635287 - RNA, 19 nt, Artificial Sequence
  Description of Artificial Sequence: Synthetic oligonucleotide
gggaagcauuggcugguuc

SEQ ID NO: 2635288 - RNA, 19 nt, Artificial Sequence
  Description of Artificial Sequence: Synthetic oligonucleotide
ggcaguagagcuucaccau

SEQ ID NO: 2635289 - RNA, 19 nt, Artificial Sequence
  Description of Artificial Sequence: Synthetic oligonucleotide
ccguccgucgugguggugc

SEQ ID NO: 2635290 - RNA, 19 nt, Artificial Sequence
  Description of Artificial Sequence: Synthetic oligonucleotide
agugaggcacuugcucauu

SEQ ID NO: 2635291 - RNA, 19 nt, Artificial Sequence
  Description of Artificial Sequence: Synthetic oligonucleotide
ccagucagauuaaacuugu

SEQ ID NO: 2635292 - RNA, 19 nt, Artificial Sequence
  Description of Artificial Sequence: Synthetic oligonucleotide
ggaugggugggcgaggagu

SEQ ID NO: 2635293 - RNA, 19 nt, Artificial Sequence
  Description of Artificial Sequence: Synthetic oligonucleotide
ggccgaugggaagcauugg

SEQ ID NO: 2635294 - RNA, 19 nt, Artificial Sequence
  Description of Artificial Sequence: Synthetic oligonucleotide
ggcgaggagucagcgaauc

SEQ ID NO: 2635295 - RNA, 19 nt, Artificial Sequence
  Description of Artificial Sequence: Synthetic oligonucleotide
ggauguaucgggcguggau

SEQ ID NO: 2635296 - RNA, 19 nt, Artificial Sequence
  Description of Artificial Sequence: Synthetic oligonucleotide
caaagucucccugcuggua

SEQ ID NO: 2635297 - RNA, 19 nt, Artificial Sequence
  Description of Artificial Sequence: Synthetic oligonucleotide
gggaaaccagugccgaagu

SEQ ID NO: 2635298 - RNA, 19 nt, Artificial Sequence
  Description of Artificial Sequence: Synthetic oligonucleotide
gggauguccgaaaggccga

SEQ ID NO: 2635299 - RNA, 19 nt, Artificial Sequence
  Description of Artificial Sequence: Synthetic oligonucleotide
augggugggcgaggaguca

SEQ ID NO: 2635300 - RNA, 19 nt, Artificial Sequence
  Description of Artificial Sequence: Synthetic oligonucleotide
cauugaguccagucagauu

SEQ ID NO: 2635301 - RNA, 19 nt, Artificial Sequence
  Description of Artificial Sequence: Synthetic oligonucleotide
ggaaaccagugccgaagua

SEQ ID NO: 2635302 - RNA, 19 nt, Artificial Sequence
  Description of Artificial Sequence: Synthetic oligonucleotide
ugggaagcauuggcugguu

SEQ ID NO: 2635303 - RNA, 19 nt, Artificial Sequence
  Description of Artificial Sequence: Synthetic oligonucleotide
ggagucagcgaaucgucuu

SEQ ID NO: 2635304 - RNA, 19 nt, Artificial Sequence
  Description of Artificial Sequence: Synthetic oligonucleotide
ccugaaaggguggaagcaa

SEQ ID NO: 2635305 - RNA, 19 nt, Artificial Sequence
  Description of Artificial Sequence: Synthetic oligonucleotide
ggcguggaucaacccauaa

SEQ ID NO: 2635306 - RNA, 19 nt, Artificial Sequence
  Description of Artificial Sequence: Synthetic oligonucleotide
ggcgccguccgucguggug

SEQ ID NO: 2635307 - RNA, 19 nt, Artificial Sequence
  Description of Artificial Sequence: Synthetic oligonucleotide
cccauaaagcaucuccgcu

SEQ ID NO: 2635308 - RNA, 19 nt, Artificial Sequence
  Description of Artificial Sequence: Synthetic oligonucleotide
cucgccugggauguccgaa

SEQ ID NO: 2635309 - RNA, 19 nt, Artificial Sequence
  Description of Artificial Sequence: Synthetic oligonucleotide
cauuaccacggagcccaca

SEQ ID NO: 2635310 - RNA, 19 nt, Artificial Sequence
  Description of Artificial Sequence: Synthetic oligonucleotide
cuucaccauggccucgccu

SEQ ID NO: 2635311 - RNA, 19 nt, Artificial Sequence
  Description of Artificial Sequence: Synthetic oligonucleotide
cuugaugauuugggugugu

SEQ ID NO: 2635312 - RNA, 19 nt, Artificial Sequence
  Description of Artificial Sequence: Synthetic oligonucleotide
gcugccuguucaaucaggu

SEQ ID NO: 2635313 - RNA, 19 nt, Artificial Sequence
  Description of Artificial Sequence: Synthetic oligonucleotide
uggcggcuuggagcugcag

SEQ ID NO: 2635314 - RNA, 19 nt, Artificial Sequence
  Description of Artificial Sequence: Synthetic oligonucleotide
gugguggugccuugaugau

SEQ ID NO: 2635315 - RNA, 19 nt, Artificial Sequence
  Description of Artificial Sequence: Synthetic oligonucleotide
ccgaugggaagcauuggcu

SEQ ID NO: 2635316 - RNA, 19 nt, Artificial Sequence
  Description of Artificial Sequence: Synthetic oligonucleotide
ggccucgccugggaugucc

SEQ ID NO: 2635317 - RNA, 19 nt, Artificial Sequence
  Description of Artificial Sequence: Synthetic oligonucleotide
caggggccgguacucugga

SEQ ID NO: 2635318 - RNA, 19 nt, Artificial Sequence
  Description of Artificial Sequence: Synthetic oligonucleotide
caaucaggucacucugguu

SEQ ID NO: 2635319 - RNA, 19 nt, Artificial Sequence
  Description of Artificial Sequence: Synthetic oligonucleotide
aggggccgguacucuggau

SEQ ID NO: 2635320 - RNA, 19 nt, Artificial Sequence
  Description of Artificial Sequence: Synthetic oligonucleotide
gccucgccugggauguccg

SEQ ID NO: 2635321 - RNA, 19 nt, Artificial Sequence
  Description of Artificial Sequence: Synthetic oligonucleotide
gaugcaccaugaagagcau

SEQ ID NO: 2635322 - RNA, 19 nt, Artificial Sequence
  Description of Artificial Sequence: Synthetic oligonucleotide
caguagccaaagucucccu

SEQ ID NO: 2635323 - RNA, 19 nt, Artificial Sequence
  Description of Artificial Sequence: Synthetic oligonucleotide
ugccgguagugaggcacuu

SEQ ID NO: 2635324 - RNA, 19 nt, Artificial Sequence
  Description of Artificial Sequence: Synthetic oligonucleotide
gcccacagaaccaggaaau

SEQ ID NO: 2635325 - RNA, 19 nt, Artificial Sequence
  Description of Artificial Sequence: Synthetic oligonucleotide
ccucgguuggugaggaugu

SEQ ID NO: 2635326 - RNA, 19 nt, Artificial Sequence
  Description of Artificial Sequence: Synthetic oligonucleotide
ugccucgguuggugaggau

SEQ ID NO: 2635327 - RNA, 19 nt, Artificial Sequence
  Description of Artificial Sequence: Synthetic oligonucleotide
gucgugguggugccuugau

SEQ ID NO: 2635328 - RNA, 19 nt, Artificial Sequence
  Description of Artificial Sequence: Synthetic oligonucleotide
ucgucuugacugggcucuu

SEQ ID NO: 2635329 - RNA, 19 nt, Artificial Sequence
  Description of Artificial Sequence: Synthetic oligonucleotide
gccgguagugaggcacuug

SEQ ID NO: 2635330 - RNA, 19 nt, Artificial Sequence
  Description of Artificial Sequence: Synthetic oligonucleotide
ccgcugccuguucaaucag

SEQ ID NO: 2635331 - RNA, 19 nt, Artificial Sequence
  Description of Artificial Sequence: Synthetic oligonucleotide
ugcuggcggcuuggagcug

SEQ ID NO: 2635332 - RNA, 19 nt, Artificial Sequence
  Description of Artificial Sequence: Synthetic oligonucleotide
ccacaauaacuauuccuuu

SEQ ID NO: 2635333 - RNA, 19 nt, Artificial Sequence
  Description of Artificial Sequence: Synthetic oligonucleotide
cgccugggauguccgaaag

SEQ ID NO: 2635334 - RNA, 19 nt, Artificial Sequence
  Description of Artificial Sequence: Synthetic oligonucleotide
cguccgucgugguggugcc

SEQ ID NO: 2635335 - RNA, 19 nt, Artificial Sequence
  Description of Artificial Sequence: Synthetic oligonucleotide
gguacucuggaugcaccau

SEQ ID NO: 2635336 - RNA, 19 nt, Artificial Sequence
  Description of Artificial Sequence: Synthetic oligonucleotide
cgaggagucagcgaaucgu

SEQ ID NO: 2635337 - RNA, 19 nt, Artificial Sequence
  Description of Artificial Sequence: Synthetic oligonucleotide
aggcgccguccgucguggu

SEQ ID NO: 2635338 - RNA, 19 nt, Artificial Sequence
  Description of Artificial Sequence: Synthetic oligonucleotide
caguacacacgaggacagu

SEQ ID NO: 2635339 - RNA, 19 nt, Artificial Sequence
  Description of Artificial Sequence: Synthetic oligonucleotide
ccucacagaagaacucauu

SEQ ID NO: 2635340 - RNA, 19 nt, Artificial Sequence
  Description of Artificial Sequence: Synthetic oligonucleotide
cucgguuggugaggaugua

SEQ ID NO: 2635341 - RNA, 19 nt, Artificial Sequence
  Description of Artificial Sequence: Synthetic oligonucleotide
gcuugccgguagugaggca

SEQ ID NO: 2635342 - RNA, 19 nt, Artificial Sequence
  Description of Artificial Sequence: Synthetic oligonucleotide
ccgucgugguggugccuug

SEQ ID NO: 2635343 - RNA, 19 nt, Artificial Sequence
  Description of Artificial Sequence: Synthetic oligonucleotide
gugccgaaguaggcgccgu

SEQ ID NO: 2635344 - RNA, 19 nt, Artificial Sequence
  Description of Artificial Sequence: Synthetic oligonucleotide
ggccgguacucuggaugca

SEQ ID NO: 2635345 - RNA, 19 nt, Artificial Sequence
  Description of Artificial Sequence: Synthetic oligonucleotide
ggauguccgaaaggccgau

SEQ ID NO: 2635346 - RNA, 19 nt, Artificial Sequence
  Description of Artificial Sequence: Synthetic oligonucleotide
uggccucgccugggauguc

SEQ ID NO: 2635347 - RNA, 19 nt, Artificial Sequence
  Description of Artificial Sequence: Synthetic oligonucleotide
cgggcguggaucaacccau

SEQ ID NO: 2635348 - RNA, 19 nt, Artificial Sequence
  Description of Artificial Sequence: Synthetic oligonucleotide
ccucgccugggauguccga

SEQ ID NO: 2635349 - RNA, 19 nt, Artificial Sequence
  Description of Artificial Sequence: Synthetic oligonucleotide
cugcaggggccgguacucu

SEQ ID NO: 2635350 - RNA, 19 nt, Artificial Sequence
  Description of Artificial Sequence: Synthetic oligonucleotide
cgaaguaggcgccguccgu

SEQ ID NO: 2635351 - RNA, 19 nt, Artificial Sequence
  Description of Artificial Sequence: Synthetic oligonucleotide
gggcguggaucaacccaua

SEQ ID NO: 2635352 - RNA, 19 nt, Artificial Sequence
  Description of Artificial Sequence: Synthetic oligonucleotide
ccaugcacuuggggcagua

SEQ ID NO: 2635353 - RNA, 19 nt, Artificial Sequence
  Description of Artificial Sequence: Synthetic oligonucleotide
guccgucgugguggugccu

SEQ ID NO: 2635354 - RNA, 19 nt, Artificial Sequence
  Description of Artificial Sequence: Synthetic oligonucleotide
ccuguucaaucaggucacu

SEQ ID NO: 2635355 - RNA, 19 nt, Artificial Sequence
  Description of Artificial Sequence: Synthetic oligonucleotide
cgucgugguggugccuuga

SEQ ID NO: 2635356 - RNA, 19 nt, Artificial Sequence
  Description of Artificial Sequence: Synthetic oligonucleotide
gccguccgucgugguggug

SEQ ID NO: 2635357 - RNA, 19 nt, Artificial Sequence
  Description of Artificial Sequence: Synthetic oligonucleotide
gggcgaggagucagcgaau

SEQ ID NO: 2635358 - RNA, 19 nt, Artificial Sequence
  Description of Artificial Sequence: Synthetic oligonucleotide
cgccguccgucgugguggu

SEQ ID NO: 2635359 - RNA, 19 nt, Artificial Sequence
  Description of Artificial Sequence: Synthetic oligonucleotide
uagcaugcuauucagagcg

SEQ ID NO: 2635360 - RNA, 19 nt, Artificial Sequence
  Description of Artificial Sequence: Synthetic oligonucleotide
cugaagggaaccaagagcg

SEQ ID NO: 2635361 - RNA, 19 nt, Artificial Sequence
  Description of Artificial Sequence: Synthetic oligonucleotide
gacauaguacaacaguugg

SEQ ID NO: 2635362 - RNA, 19 nt, Artificial Sequence
  Description of Artificial Sequence: Synthetic oligonucleotide
ugucucuggcacaagaggg

SEQ ID NO: 2635363 - RNA, 19 nt, Artificial Sequence
  Description of Artificial Sequence: Synthetic oligonucleotide
auucagagcgaagucaucc

SEQ ID NO: 2635364 - RNA, 19 nt, Artificial Sequence
  Description of Artificial Sequence: Synthetic oligonucleotide
uaguacaacaguuggcagg

SEQ ID NO: 2635365 - RNA, 19 nt, Artificial Sequence
  Description of Artificial Sequence: Synthetic oligonucleotide
uucuugaggacguugcuag

SEQ ID NO: 2635366 - RNA, 19 nt, Artificial Sequence
  Description of Artificial Sequence: Synthetic oligonucleotide
cucguugucuuccauaucc

SEQ ID NO: 2635367 - RNA, 19 nt, Artificial Sequence
  Description of Artificial Sequence: Synthetic oligonucleotide
cuuccaagcauucugugcc

SEQ ID NO: 2635368 - RNA, 19 nt, Artificial Sequence
  Description of Artificial Sequence: Synthetic oligonucleotide
ugacauaguacaacaguug

SEQ ID NO: 2635369 - RNA, 19 nt, Artificial Sequence
  Description of Artificial Sequence: Synthetic oligonucleotide
ucugucuguccucagagga

SEQ ID NO: 2635370 - RNA, 19 nt, Artificial Sequence
  Description of Artificial Sequence: Synthetic oligonucleotide
ucuuccauaucccaacgcu

SEQ ID NO: 2635371 - RNA, 19 nt, Artificial Sequence
  Description of Artificial Sequence: Synthetic oligonucleotide
acuucucgagaucuucucc

SEQ ID NO: 2635372 - RNA, 19 nt, Artificial Sequence
  Description of Artificial Sequence: Synthetic oligonucleotide
uuccauaucccaacgcucc

SEQ ID NO: 2635373 - RNA, 19 nt, Artificial Sequence
  Description of Artificial Sequence: Synthetic oligonucleotide
agagcgaagucauccuucc

SEQ ID NO: 2635374 - RNA, 19 nt, Artificial Sequence
  Description of Artificial Sequence: Synthetic oligonucleotide
aguacaacaguuggcaggg

SEQ ID NO: 2635375 - RNA, 19 nt, Artificial Sequence
  Description of Artificial Sequence: Synthetic oligonucleotide
cucaccaugcuccaggcgg

SEQ ID NO: 2635376 - RNA, 19 nt, Artificial Sequence
  Description of Artificial Sequence: Synthetic oligonucleotide
acguugcuagcuuugcugc

SEQ ID NO: 2635377 - RNA, 19 nt, Artificial Sequence
  Description of Artificial Sequence: Synthetic oligonucleotide
ucuagcauggcuuucuuuu

SEQ ID NO: 2635378 - RNA, 19 nt, Artificial Sequence
  Description of Artificial Sequence: Synthetic oligonucleotide
aguuucuugaggacguugc

SEQ ID NO: 2635379 - RNA, 19 nt, Artificial Sequence
  Description of Artificial Sequence: Synthetic oligonucleotide
gacguugcuagcuuugcug

SEQ ID NO: 2635380 - RNA, 19 nt, Artificial Sequence
  Description of Artificial Sequence: Synthetic oligonucleotide
acgaugacauaguacaaca

SEQ ID NO: 2635381 - RNA, 19 nt, Artificial Sequence
  Description of Artificial Sequence: Synthetic oligonucleotide
ugucuuccauaucccaacg

SEQ ID NO: 2635382 - RNA, 19 nt, Artificial Sequence
  Description of Artificial Sequence: Synthetic oligonucleotide
cucacuaugcccagguccc

SEQ ID NO: 2635383 - RNA, 19 nt, Artificial Sequence
  Description of Artificial Sequence: Synthetic oligonucleotide
uccuggauguggcugagug

SEQ ID NO: 2635384 - RNA, 19 nt, Artificial Sequence
  Description of Artificial Sequence: Synthetic oligonucleotide
gaguccaagguaugcaacc

SEQ ID NO: 2635385 - RNA, 19 nt, Artificial Sequence
  Description of Artificial Sequence: Synthetic oligonucleotide
aauugccugcguagcaugc

SEQ ID NO: 2635386 - RNA, 19 nt, Artificial Sequence
  Description of Artificial Sequence: Synthetic oligonucleotide
acauaguacaacaguuggc

SEQ ID NO: 2635387 - RNA, 19 nt, Artificial Sequence
  Description of Artificial Sequence: Synthetic oligonucleotide
agaucuucuccucacuaug

SEQ ID NO: 2635388 - RNA, 19 nt, Artificial Sequence
  Description of Artificial Sequence: Synthetic oligonucleotide
ugucuguugcacacugggg

SEQ ID NO: 2635389 - RNA, 19 nt, Artificial Sequence
  Description of Artificial Sequence: Synthetic oligonucleotide
cugucuguugcacacuggg

SEQ ID NO: 2635390 - RNA, 19 nt, Artificial Sequence
  Description of Artificial Sequence: Synthetic oligonucleotide
gaugacauaguacaacagu

SEQ ID NO: 2635391 - RNA, 19 nt, Artificial Sequence
  Description of Artificial Sequence: Synthetic oligonucleotide
cauaguacaacaguuggca

SEQ ID NO: 2635392 - RNA, 19 nt, Artificial Sequence
  Description of Artificial Sequence: Synthetic oligonucleotide
auaguacaacaguuggcag

SEQ ID NO: 2635393 - RNA, 19 nt, Artificial Sequence
  Description of Artificial Sequence: Synthetic oligonucleotide
acaagagggauggcuaggc

SEQ ID NO: 2635394 - RNA, 19 nt, Artificial Sequence
  Description of Artificial Sequence: Synthetic oligonucleotide
aagaacugucuguugcaca

SEQ ID NO: 2635395 - RNA, 19 nt, Artificial Sequence
  Description of Artificial Sequence: Synthetic oligonucleotide
caagguaugcaaccguagc

SEQ ID NO: 2635396 - RNA, 19 nt, Artificial Sequence
  Description of Artificial Sequence: Synthetic oligonucleotide
agaggaguccaagguaugc

SEQ ID NO: 2635397 - RNA, 19 nt, Artificial Sequence
  Description of Artificial Sequence: Synthetic oligonucleotide
uugucuuccauaucccaac

SEQ ID NO: 2635398 - RNA, 19 nt, Artificial Sequence
  Description of Artificial Sequence: Synthetic oligonucleotide
ugaagggaaccaagagcgg

SEQ ID NO: 2635399 - RNA, 19 nt, Artificial Sequence
  Description of Artificial Sequence: Synthetic oligonucleotide
accacucacgaugacauag

SEQ ID NO: 2635400 - RNA, 19 nt, Artificial Sequence
  Description of Artificial Sequence: Synthetic oligonucleotide
aagagggauggcuaggcua

SEQ ID NO: 2635401 - RNA, 19 nt, Artificial Sequence
  Description of Artificial Sequence: Synthetic oligonucleotide
uucuggaacuucucgagau

SEQ ID NO: 2635402 - RNA, 19 nt, Artificial Sequence
  Description of Artificial Sequence: Synthetic oligonucleotide
ugggcugaagggaaccaag

SEQ ID NO: 2635403 - RNA, 19 nt, Artificial Sequence
  Description of Artificial Sequence: Synthetic oligonucleotide
gguggaugaucucugugcg

SEQ ID NO: 2635404 - RNA, 19 nt, Artificial Sequence
  Description of Artificial Sequence: Synthetic oligonucleotide
uuggugguccucuugguuc

SEQ ID NO: 2635405 - RNA, 19 nt, Artificial Sequence
  Description of Artificial Sequence: Synthetic oligonucleotide
uucucaugcucugugguca

SEQ ID NO: 2635406 - RNA, 19 nt, Artificial Sequence
  Description of Artificial Sequence: Synthetic oligonucleotide
uacaacaguuggcaggguc

SEQ ID NO: 2635407 - RNA, 19 nt, Artificial Sequence
  Description of Artificial Sequence: Synthetic oligonucleotide
cauaucccaacgcuccucc

SEQ ID NO: 2635408 - RNA, 19 nt, Artificial Sequence
  Description of Artificial Sequence: Synthetic oligonucleotide
cuaggcuagccuuugccug

SEQ ID NO: 2635409 - RNA, 19 nt, Artificial Sequence
  Description of Artificial Sequence: Synthetic oligonucleotide
aaccaagagcgguggauga

SEQ ID NO: 2635410 - RNA, 19 nt, Artificial Sequence
  Description of Artificial Sequence: Synthetic oligonucleotide
uggucugcggcccuggcac

SEQ ID NO: 2635411 - RNA, 19 nt, Artificial Sequence
  Description of Artificial Sequence: Synthetic oligonucleotide
cuggauguggcugagugug

SEQ ID NO: 2635412 - RNA, 19 nt, Artificial Sequence
  Description of Artificial Sequence: Synthetic oligonucleotide
agcgaagucauccuuccaa

SEQ ID NO: 2635413 - RNA, 19 nt, Artificial Sequence
  Description of Artificial Sequence: Synthetic oligonucleotide
gaauugccugcguagcaug

SEQ ID NO: 2635414 - RNA, 19 nt, Artificial Sequence
  Description of Artificial Sequence: Synthetic oligonucleotide
agccucaccaugcuccagg

SEQ ID NO: 2635415 - RNA, 19 nt, Artificial Sequence
  Description of Artificial Sequence: Synthetic oligonucleotide
caugcuauucagagcgaag

SEQ ID NO: 2635416 - RNA, 19 nt, Artificial Sequence
  Description of Artificial Sequence: Synthetic oligonucleotide
ugguucugcugacaaagaa

SEQ ID NO: 2635417 - RNA, 19 nt, Artificial Sequence
  Description of Artificial Sequence: Synthetic oligonucleotide
guagcaugcuauucagagc

SEQ ID NO: 2635418 - RNA, 19 nt, Artificial Sequence
  Description of Artificial Sequence: Synthetic oligonucleotide
guaugcaaccguagcaggg

SEQ ID NO: 2635419 - RNA, 19 nt, Artificial Sequence
  Description of Artificial Sequence: Synthetic oligonucleotide
aguccaagguaugcaaccg

SEQ ID NO: 2635420 - RNA, 19 nt, Artificial Sequence
  Description of Artificial Sequence: Synthetic oligonucleotide
ugugcugcggucagccuca

SEQ ID NO: 2635421 - RNA, 19 nt, Artificial Sequence
  Description of Artificial Sequence: Synthetic oligonucleotide
ugcuauucagagcgaaguc

SEQ ID NO: 2635422 - RNA, 19 nt, Artificial Sequence
  Description of Artificial Sequence: Synthetic oligonucleotide
aucucugugcgcuucaguu

SEQ ID NO: 2635423 - RNA, 19 nt, Artificial Sequence
  Description of Artificial Sequence: Synthetic oligonucleotide
ucguugucuuccauauccc

SEQ ID NO: 2635424 - RNA, 19 nt, Artificial Sequence
  Description of Artificial Sequence: Synthetic oligonucleotide
uuuucccggaauugccugc

SEQ ID NO: 2635425 - RNA, 19 nt, Artificial Sequence
  Description of Artificial Sequence: Synthetic oligonucleotide
ugcucguugucuuccauau

SEQ ID NO: 2635426 - RNA, 19 nt, Artificial Sequence
  Description of Artificial Sequence: Synthetic oligonucleotide
cuuccauaucccaacgcuc

SEQ ID NO: 2635427 - RNA, 19 nt, Artificial Sequence
  Description of Artificial Sequence: Synthetic oligonucleotide
gcugacaaagaacugucug

SEQ ID NO: 2635428 - RNA, 19 nt, Artificial Sequence
  Description of Artificial Sequence: Synthetic oligonucleotide
gucagccucaccaugcucc

SEQ ID NO: 2635429 - RNA, 19 nt, Artificial Sequence
  Description of Artificial Sequence: Synthetic oligonucleotide
gcuggcaccacucacgaug

SEQ ID NO: 2635430 - RNA, 19 nt, Artificial Sequence
  Description of Artificial Sequence: Synthetic oligonucleotide
agagggauggcuaggcuag

SEQ ID NO: 2635431 - RNA, 19 nt, Artificial Sequence
  Description of Artificial Sequence: Synthetic oligonucleotide
augcuauucagagcgaagu

SEQ ID NO: 2635432 - RNA, 19 nt, Artificial Sequence
  Description of Artificial Sequence: Synthetic oligonucleotide
uccaagguaugcaaccgua

SEQ ID NO: 2635433 - RNA, 19 nt, Artificial Sequence
  Description of Artificial Sequence: Synthetic oligonucleotide
ucucgagaucuucuccuca

SEQ ID NO: 2635434 - RNA, 19 nt, Artificial Sequence
  Description of Artificial Sequence: Synthetic oligonucleotide
uucagagcgaagucauccu

SEQ ID NO: 2635435 - RNA, 19 nt, Artificial Sequence
  Description of Artificial Sequence: Synthetic oligonucleotide
aguuggcagggucuguuug

SEQ ID NO: 2635436 - RNA, 19 nt, Artificial Sequence
  Description of Artificial Sequence: Synthetic oligonucleotide
augacauaguacaacaguu

SEQ ID NO: 2635437 - RNA, 19 nt, Artificial Sequence
  Description of Artificial Sequence: Synthetic oligonucleotide
uccuccucuagcauggcuu

SEQ ID NO: 2635438 - RNA, 19 nt, Artificial Sequence
  Description of Artificial Sequence: Synthetic oligonucleotide
aagagcgguggaugaucuc

SEQ ID NO: 2635439 - RNA, 19 nt, Artificial Sequence
  Description of Artificial Sequence: Synthetic oligonucleotide
aagggaaccaagagcggug

SEQ ID NO: 2635440 - RNA, 19 nt, Artificial Sequence
  Description of Artificial Sequence: Synthetic oligonucleotide
guuggcagggucuguuugc

SEQ ID NO: 2635441 - RNA, 19 nt, Artificial Sequence
  Description of Artificial Sequence: Synthetic oligonucleotide
ugcugacaaagaacugucu

SEQ ID NO: 2635442 - RNA, 19 nt, Artificial Sequence
  Description of Artificial Sequence: Synthetic oligonucleotide
cacgaugacauaguacaac

SEQ ID NO: 2635443 - RNA, 19 nt, Artificial Sequence
  Description of Artificial Sequence: Synthetic oligonucleotide
ugucuguccucagaggagu

SEQ ID NO: 2635444 - RNA, 19 nt, Artificial Sequence
  Description of Artificial Sequence: Synthetic oligonucleotide
aucccaacgcuccuccuug

SEQ ID NO: 2635445 - RNA, 19 nt, Artificial Sequence
  Description of Artificial Sequence: Synthetic oligonucleotide
cucgagaucuucuccucac

SEQ ID NO: 2635446 - RNA, 19 nt, Artificial Sequence
  Description of Artificial Sequence: Synthetic oligonucleotide
ugcaaccguagcagggcag

SEQ ID NO: 2635447 - RNA, 19 nt, Artificial Sequence
  Description of Artificial Sequence: Synthetic oligonucleotide
agagcgguggaugaucucu

SEQ ID NO: 2635448 - RNA, 19 nt, Artificial Sequence
  Description of Artificial Sequence: Synthetic oligonucleotide
aggacguugcuagcuuugc

SEQ ID NO: 2635449 - RNA, 19 nt, Artificial Sequence
  Description of Artificial Sequence: Synthetic oligonucleotide
acaacaguuggcagggucu

SEQ ID NO: 2635450 - RNA, 19 nt, Artificial Sequence
  Description of Artificial Sequence: Synthetic oligonucleotide
uccuuccaagcauucugug

SEQ ID NO: 2635451 - RNA, 19 nt, Artificial Sequence
  Description of Artificial Sequence: Synthetic oligonucleotide
gauguggcugagugugggc

SEQ ID NO: 2635452 - RNA, 19 nt, Artificial Sequence
  Description of Artificial Sequence: Synthetic oligonucleotide
cugucuguccucagaggag

SEQ ID NO: 2635453 - RNA, 19 nt, Artificial Sequence
  Description of Artificial Sequence: Synthetic oligonucleotide
guucugcugacaaagaacu

SEQ ID NO: 2635454 - RNA, 19 nt, Artificial Sequence
  Description of Artificial Sequence: Synthetic oligonucleotide
uuucuugaggacguugcua

SEQ ID NO: 2635455 - RNA, 19 nt, Artificial Sequence
  Description of Artificial Sequence: Synthetic oligonucleotide
cuucucaugcucugugguc

SEQ ID NO: 2635456 - RNA, 19 nt, Artificial Sequence
  Description of Artificial Sequence: Synthetic oligonucleotide
uaggcuagccuuugccugu

SEQ ID NO: 2635457 - RNA, 19 nt, Artificial Sequence
  Description of Artificial Sequence: Synthetic oligonucleotide
aggaguccaagguaugcaa

SEQ ID NO: 2635458 - RNA, 19 nt, Artificial Sequence
  Description of Artificial Sequence: Synthetic oligonucleotide
cagagcgaagucauccuuc

SEQ ID NO: 2635459 - RNA, 19 nt, Artificial Sequence
  Description of Artificial Sequence: Synthetic oligonucleotide
agggauggcuaggcuagcc

SEQ ID NO: 2635460 - RNA, 19 nt, Artificial Sequence
  Description of Artificial Sequence: Synthetic oligonucleotide
ucuugaggacguugcuagc

SEQ ID NO: 2635461 - RNA, 19 nt, Artificial Sequence
  Description of Artificial Sequence: Synthetic oligonucleotide
ucaccaugcuccaggcgga

SEQ ID NO: 2635462 - RNA, 19 nt, Artificial Sequence
  Description of Artificial Sequence: Synthetic oligonucleotide
ucuguccucagaggagucc

SEQ ID NO: 2635463 - RNA, 19 nt, Artificial Sequence
  Description of Artificial Sequence: Synthetic oligonucleotide
uccauaucccaacgcuccu

SEQ ID NO: 2635464 - RNA, 19 nt, Artificial Sequence
  Description of Artificial Sequence: Synthetic oligonucleotide
ucgagaucuucuccucacu

SEQ ID NO: 2635465 - RNA, 19 nt, Artificial Sequence
  Description of Artificial Sequence: Synthetic oligonucleotide
ugcggucagccucaccaug

SEQ ID NO: 2635466 - RNA, 19 nt, Artificial Sequence
  Description of Artificial Sequence: Synthetic oligonucleotide
gucuuccauaucccaacgc

SEQ ID NO: 2635467 - RNA, 19 nt, Artificial Sequence
  Description of Artificial Sequence: Synthetic oligonucleotide
agggaaccaagagcggugg

SEQ ID NO: 2635468 - RNA, 19 nt, Artificial Sequence
  Description of Artificial Sequence: Synthetic oligonucleotide
gugcgcuucaguuucuguc

SEQ ID NO: 2635469 - RNA, 19 nt, Artificial Sequence
  Description of Artificial Sequence: Synthetic oligonucleotide
uaucccaacgcuccuccuu

SEQ ID NO: 2635470 - RNA, 19 nt, Artificial Sequence
  Description of Artificial Sequence: Synthetic oligonucleotide
gcacaguuucuugaggacg

SEQ ID NO: 2635471 - RNA, 19 nt, Artificial Sequence
  Description of Artificial Sequence: Synthetic oligonucleotide
ccugggugguucuuggugg

SEQ ID NO: 2635472 - RNA, 19 nt, Artificial Sequence
  Description of Artificial Sequence: Synthetic oligonucleotide
uggugguccucuugguucu

SEQ ID NO: 2635473 - RNA, 19 nt, Artificial Sequence
  Description of Artificial Sequence: Synthetic oligonucleotide
guugcuagcuuugcugcug

SEQ ID NO: 2635474 - RNA, 19 nt, Artificial Sequence
  Description of Artificial Sequence: Synthetic oligonucleotide
gcugcggucagccucacca

SEQ ID NO: 2635475 - RNA, 19 nt, Artificial Sequence
  Description of Artificial Sequence: Synthetic oligonucleotide
gguucugcugacaaagaac

SEQ ID NO: 2635476 - RNA, 19 nt, Artificial Sequence
  Description of Artificial Sequence: Synthetic oligonucleotide
uugaggacguugcuagcuu

SEQ ID NO: 2635477 - RNA, 19 nt, Artificial Sequence
  Description of Artificial Sequence: Synthetic oligonucleotide
uucucgagaucuucuccuc

SEQ ID NO: 2635478 - RNA, 19 nt, Artificial Sequence
  Description of Artificial Sequence: Synthetic oligonucleotide
gaugaucucugugcgcuuc

SEQ ID NO: 2635479 - RNA, 19 nt, Artificial Sequence
  Description of Artificial Sequence: Synthetic oligonucleotide
ucuuggugguccucuuggu

SEQ ID NO: 2635480 - RNA, 19 nt, Artificial Sequence
  Description of Artificial Sequence: Synthetic oligonucleotide
ucauccuuccaagcauucu

SEQ ID NO: 2635481 - RNA, 19 nt, Artificial Sequence
  Description of Artificial Sequence: Synthetic oligonucleotide
cuugcggcuggcaccacuc

SEQ ID NO: 2635482 - RNA, 19 nt, Artificial Sequence
  Description of Artificial Sequence: Synthetic oligonucleotide
uuccaagcauucugugccu

SEQ ID NO: 2635483 - RNA, 19 nt, Artificial Sequence
  Description of Artificial Sequence: Synthetic oligonucleotide
aguuucugucuguccucag

SEQ ID NO: 2635484 - RNA, 19 nt, Artificial Sequence
  Description of Artificial Sequence: Synthetic oligonucleotide
cacaagagggauggcuagg

SEQ ID NO: 2635485 - RNA, 19 nt, Artificial Sequence
  Description of Artificial Sequence: Synthetic oligonucleotide
aacgcuccuccuugcggcu

SEQ ID NO: 2635486 - RNA, 19 nt, Artificial Sequence
  Description of Artificial Sequence: Synthetic oligonucleotide
uuugccuguagugccuggu

SEQ ID NO: 2635487 - RNA, 19 nt, Artificial Sequence
  Description of Artificial Sequence: Synthetic oligonucleotide
gcgaagucauccuuccaag

SEQ ID NO: 2635488 - RNA, 19 nt, Artificial Sequence
  Description of Artificial Sequence: Synthetic oligonucleotide
ugugcgcuucaguuucugu

SEQ ID NO: 2635489 - RNA, 19 nt, Artificial Sequence
  Description of Artificial Sequence: Synthetic oligonucleotide
guggaugaucucugugcgc

SEQ ID NO: 2635490 - RNA, 19 nt, Artificial Sequence
  Description of Artificial Sequence: Synthetic oligonucleotide
gaggacguugcuagcuuug

SEQ ID NO: 2635491 - RNA, 19 nt, Artificial Sequence
  Description of Artificial Sequence: Synthetic oligonucleotide
uuccuccucuagcauggcu

SEQ ID NO: 2635492 - RNA, 19 nt, Artificial Sequence
  Description of Artificial Sequence: Synthetic oligonucleotide
cagugugcugcggucagcc

SEQ ID NO: 2635493 - RNA, 19 nt, Artificial Sequence
  Description of Artificial Sequence: Synthetic oligonucleotide
cuuugccuguagugccugg

SEQ ID NO: 2635494 - RNA, 19 nt, Artificial Sequence
  Description of Artificial Sequence: Synthetic oligonucleotide
uugccuguagugccugguc

SEQ ID NO: 2635495 - RNA, 19 nt, Artificial Sequence
  Description of Artificial Sequence: Synthetic oligonucleotide
acugugcccguggugcugg

SEQ ID NO: 2635496 - RNA, 19 nt, Artificial Sequence
  Description of Artificial Sequence: Synthetic oligonucleotide
auguggcugagugugggca

SEQ ID NO: 2635497 - RNA, 19 nt, Artificial Sequence
  Description of Artificial Sequence: Synthetic oligonucleotide
gcuauucagagcgaaguca

SEQ ID NO: 2635498 - RNA, 19 nt, Artificial Sequence
  Description of Artificial Sequence: Synthetic oligonucleotide
uuggcagggucuguuugca

SEQ ID NO: 2635499 - RNA, 19 nt, Artificial Sequence
  Description of Artificial Sequence: Synthetic oligonucleotide
ugaggacguugcuagcuuu

SEQ ID NO: 2635500 - RNA, 19 nt, Artificial Sequence
  Description of Artificial Sequence: Synthetic oligonucleotide
aaccguagcagggcagcca

SEQ ID NO: 2635501 - RNA, 19 nt, Artificial Sequence
  Description of Artificial Sequence: Synthetic oligonucleotide
ucucuggcacaagagggau

SEQ ID NO: 2635502 - RNA, 19 nt, Artificial Sequence
  Description of Artificial Sequence: Synthetic oligonucleotide
ugcggcuggcaccacucac

SEQ ID NO: 2635503 - RNA, 19 nt, Artificial Sequence
  Description of Artificial Sequence: Synthetic oligonucleotide
ggcuaggcuagccuuugcc

SEQ ID NO: 2635504 - RNA, 19 nt, Artificial Sequence
  Description of Artificial Sequence: Synthetic oligonucleotide
gaagggaaccaagagcggu

SEQ ID NO: 2635505 - RNA, 19 nt, Artificial Sequence
  Description of Artificial Sequence: Synthetic oligonucleotide
uugccugcguagcaugcua

SEQ ID NO: 2635506 - RNA, 19 nt, Artificial Sequence
  Description of Artificial Sequence: Synthetic oligonucleotide
gugugcugcggucagccuc

SEQ ID NO: 2635507 - RNA, 19 nt, Artificial Sequence
  Description of Artificial Sequence: Synthetic oligonucleotide
ggauguggcugaguguggg

SEQ ID NO: 2635508 - RNA, 19 nt, Artificial Sequence
  Description of Artificial Sequence: Synthetic oligonucleotide
uucggucguccucugucuc

SEQ ID NO: 2635509 - RNA, 19 nt, Artificial Sequence
  Description of Artificial Sequence: Synthetic oligonucleotide
gcacaagagggauggcuag

SEQ ID NO: 2635510 - RNA, 19 nt, Artificial Sequence
  Description of Artificial Sequence: Synthetic oligonucleotide
ucggucguccucugucucu

SEQ ID NO: 2635511 - RNA, 19 nt, Artificial Sequence
  Description of Artificial Sequence: Synthetic oligonucleotide
ccaagguaugcaaccguag

SEQ ID NO: 2635512 - RNA, 19 nt, Artificial Sequence
  Description of Artificial Sequence: Synthetic oligonucleotide
cagaggaguccaagguaug

SEQ ID NO: 2635513 - RNA, 19 nt, Artificial Sequence
  Description of Artificial Sequence: Synthetic oligonucleotide
gagaucuucuccucacuau

SEQ ID NO: 2635514 - RNA, 19 nt, Artificial Sequence
  Description of Artificial Sequence: Synthetic oligonucleotide
caguuucuugaggacguug

SEQ ID NO: 2635515 - RNA, 19 nt, Artificial Sequence
  Description of Artificial Sequence: Synthetic oligonucleotide
uggaacuucucgagaucuu

SEQ ID NO: 2635516 - RNA, 19 nt, Artificial Sequence
  Description of Artificial Sequence: Synthetic oligonucleotide
cacaguuucuugaggacgu

SEQ ID NO: 2635517 - RNA, 19 nt, Artificial Sequence
  Description of Artificial Sequence: Synthetic oligonucleotide
ccuggcacaguuucuugag

SEQ ID NO: 2635518 - RNA, 19 nt, Artificial Sequence
  Description of Artificial Sequence: Synthetic oligonucleotide
caacaguuggcagggucug

SEQ ID NO: 2635519 - RNA, 19 nt, Artificial Sequence
  Description of Artificial Sequence: Synthetic oligonucleotide
aggaccugcucguugucuu

SEQ ID NO: 2635520 - RNA, 19 nt, Artificial Sequence
  Description of Artificial Sequence: Synthetic oligonucleotide
ugccugcguagcaugcuau

SEQ ID NO: 2635521 - RNA, 19 nt, Artificial Sequence
  Description of Artificial Sequence: Synthetic oligonucleotide
ggcacaguuucuugaggac

SEQ ID NO: 2635522 - RNA, 19 nt, Artificial Sequence
  Description of Artificial Sequence: Synthetic oligonucleotide
aacaguuggcagggucugu

SEQ ID NO: 2635523 - RNA, 19 nt, Artificial Sequence
  Description of Artificial Sequence: Synthetic oligonucleotide
ucccggaauugccugcgua

SEQ ID NO: 2635524 - RNA, 19 nt, Artificial Sequence
  Description of Artificial Sequence: Synthetic oligonucleotide
cucuggcacaagagggaug

SEQ ID NO: 2635525 - RNA, 19 nt, Artificial Sequence
  Description of Artificial Sequence: Synthetic oligonucleotide
cuggcaccacucacgauga

SEQ ID NO: 2635526 - RNA, 19 nt, Artificial Sequence
  Description of Artificial Sequence: Synthetic oligonucleotide
auaucccaacgcuccuccu

SEQ ID NO: 2635527 - RNA, 19 nt, Artificial Sequence
  Description of Artificial Sequence: Synthetic oligonucleotide
agcgguggaugaucucugu

SEQ ID NO: 2635528 - RNA, 19 nt, Artificial Sequence
  Description of Artificial Sequence: Synthetic oligonucleotide
uccucacuaugcccagguc

SEQ ID NO: 2635529 - RNA, 19 nt, Artificial Sequence
  Description of Artificial Sequence: Synthetic oligonucleotide
auugccugcguagcaugcu

SEQ ID NO: 2635530 - RNA, 19 nt, Artificial Sequence
  Description of Artificial Sequence: Synthetic oligonucleotide
cuucuucagugugcugcgg

SEQ ID NO: 2635531 - RNA, 19 nt, Artificial Sequence
  Description of Artificial Sequence: Synthetic oligonucleotide
cccggaauugccugcguag

SEQ ID NO: 2635532 - RNA, 19 nt, Artificial Sequence
  Description of Artificial Sequence: Synthetic oligonucleotide
uggcuaggcuagccuuugc

SEQ ID NO: 2635533 - RNA, 19 nt, Artificial Sequence
  Description of Artificial Sequence: Synthetic oligonucleotide
guggcugagugugggcagg

SEQ ID NO: 2635534 - RNA, 19 nt, Artificial Sequence
  Description of Artificial Sequence: Synthetic oligonucleotide
gagcgguggaugaucucug

SEQ ID NO: 2635535 - RNA, 19 nt, Artificial Sequence
  Description of Artificial Sequence: Synthetic oligonucleotide
ucaggaccugcucguuguc

SEQ ID NO: 2635536 - RNA, 19 nt, Artificial Sequence
  Description of Artificial Sequence: Synthetic oligonucleotide
gggucccugggcugaaggg

SEQ ID NO: 2635537 - RNA, 19 nt, Artificial Sequence
  Description of Artificial Sequence: Synthetic oligonucleotide
ucccaacgcuccuccuugc

SEQ ID NO: 2635538 - RNA, 19 nt, Artificial Sequence
  Description of Artificial Sequence: Synthetic oligonucleotide
uccaagcauucugugccuc

SEQ ID NO: 2635539 - RNA, 19 nt, Artificial Sequence
  Description of Artificial Sequence: Synthetic oligonucleotide
guuucuugaggacguugcu

SEQ ID NO: 2635540 - RNA, 19 nt, Artificial Sequence
  Description of Artificial Sequence: Synthetic oligonucleotide
gucaggaccugcucguugu

SEQ ID NO: 2635541 - RNA, 19 nt, Artificial Sequence
  Description of Artificial Sequence: Synthetic oligonucleotide
accaugcuccaggcggaac

SEQ ID NO: 2635542 - RNA, 19 nt, Artificial Sequence
  Description of Artificial Sequence: Synthetic oligonucleotide
ugugcccguggugcugggg

SEQ ID NO: 2635543 - RNA, 19 nt, Artificial Sequence
  Description of Artificial Sequence: Synthetic oligonucleotide
cucuguggucaggaccugc

SEQ ID NO: 2635544 - RNA, 19 nt, Artificial Sequence
  Description of Artificial Sequence: Synthetic oligonucleotide
ggucaggaccugcucguug

SEQ ID NO: 2635545 - RNA, 19 nt, Artificial Sequence
  Description of Artificial Sequence: Synthetic oligonucleotide
cuucagugugcugcgguca

SEQ ID NO: 2635546 - RNA, 19 nt, Artificial Sequence
  Description of Artificial Sequence: Synthetic oligonucleotide
cuguccucagaggagucca

SEQ ID NO: 2635547 - RNA, 19 nt, Artificial Sequence
  Description of Artificial Sequence: Synthetic oligonucleotide
ggaguccaagguaugcaac

SEQ ID NO: 2635548 - RNA, 19 nt, Artificial Sequence
  Description of Artificial Sequence: Synthetic oligonucleotide
cuugaggacguugcuagcu

SEQ ID NO: 2635549 - RNA, 19 nt, Artificial Sequence
  Description of Artificial Sequence: Synthetic oligonucleotide
gagcgaagucauccuucca

SEQ ID NO: 2635550 - RNA, 19 nt, Artificial Sequence
  Description of Artificial Sequence: Synthetic oligonucleotide
gcuagcuuugcugcugcug

SEQ ID NO: 2635551 - RNA, 19 nt, Artificial Sequence
  Description of Artificial Sequence: Synthetic oligonucleotide
guuggucugcggcccuggc

SEQ ID NO: 2635552 - RNA, 19 nt, Artificial Sequence
  Description of Artificial Sequence: Synthetic oligonucleotide
ccuccuugcggcuggcacc

SEQ ID NO: 2635553 - RNA, 19 nt, Artificial Sequence
  Description of Artificial Sequence: Synthetic oligonucleotide
caaccguagcagggcagcc

SEQ ID NO: 2635554 - RNA, 19 nt, Artificial Sequence
  Description of Artificial Sequence: Synthetic oligonucleotide
caagagcgguggaugaucu

SEQ ID NO: 2635555 - RNA, 19 nt, Artificial Sequence
  Description of Artificial Sequence: Synthetic oligonucleotide
uucccggaauugccugcgu

SEQ ID NO: 2635556 - RNA, 19 nt, Artificial Sequence
  Description of Artificial Sequence: Synthetic oligonucleotide
gucauccuuccaagcauuc

SEQ ID NO: 2635557 - RNA, 19 nt, Artificial Sequence
  Description of Artificial Sequence: Synthetic oligonucleotide
ccuucggucguccucuguc

SEQ ID NO: 2635558 - RNA, 19 nt, Artificial Sequence
  Description of Artificial Sequence: Synthetic oligonucleotide
gcaaccguagcagggcagc

SEQ ID NO: 2635559 - RNA, 19 nt, Artificial Sequence
  Description of Artificial Sequence: Synthetic oligonucleotide
caguuucugucuguccuca

SEQ ID NO: 2635560 - RNA, 19 nt, Artificial Sequence
  Description of Artificial Sequence: Synthetic oligonucleotide
gcggcuggcaccacucacg

SEQ ID NO: 2635561 - RNA, 19 nt, Artificial Sequence
  Description of Artificial Sequence: Synthetic oligonucleotide
guggucaggaccugcucgu

SEQ ID NO: 2635562 - RNA, 19 nt, Artificial Sequence
  Description of Artificial Sequence: Synthetic oligonucleotide
cacucacgaugacauagua

SEQ ID NO: 2635563 - RNA, 19 nt, Artificial Sequence
  Description of Artificial Sequence: Synthetic oligonucleotide
gcgguggaugaucucugug

SEQ ID NO: 2635564 - RNA, 19 nt, Artificial Sequence
  Description of Artificial Sequence: Synthetic oligonucleotide
accaagagcgguggaugau

SEQ ID NO: 2635565 - RNA, 19 nt, Artificial Sequence
  Description of Artificial Sequence: Synthetic oligonucleotide
guccaagguaugcaaccgu

SEQ ID NO: 2635566 - RNA, 19 nt, Artificial Sequence
  Description of Artificial Sequence: Synthetic oligonucleotide
gcuaggcuagccuuugccu

SEQ ID NO: 2635567 - RNA, 19 nt, Artificial Sequence
  Description of Artificial Sequence: Synthetic oligonucleotide
gagggauggcuaggcuagc

SEQ ID NO: 2635568 - RNA, 19 nt, Artificial Sequence
  Description of Artificial Sequence: Synthetic oligonucleotide
aggcggaacauggcaucug

SEQ ID NO: 2635569 - RNA, 19 nt, Artificial Sequence
  Description of Artificial Sequence: Synthetic oligonucleotide
cugcucguugucuuccaua

SEQ ID NO: 2635570 - RNA, 19 nt, Artificial Sequence
  Description of Artificial Sequence: Synthetic oligonucleotide
ggcacaagagggauggcua

SEQ ID NO: 2635571 - RNA, 19 nt, Artificial Sequence
  Description of Artificial Sequence: Synthetic oligonucleotide
ggcacugggucccugggcu

SEQ ID NO: 2635572 - RNA, 19 nt, Artificial Sequence
  Description of Artificial Sequence: Synthetic oligonucleotide
gugccugguccuucucuuc

SEQ ID NO: 2635573 - RNA, 19 nt, Artificial Sequence
  Description of Artificial Sequence: Synthetic oligonucleotide
gcggucagccucaccaugc

SEQ ID NO: 2635574 - RNA, 19 nt, Artificial Sequence
  Description of Artificial Sequence: Synthetic oligonucleotide
cuucggucguccucugucu

SEQ ID NO: 2635575 - RNA, 19 nt, Artificial Sequence
  Description of Artificial Sequence: Synthetic oligonucleotide
cugugcgcuucaguuucug

SEQ ID NO: 2635576 - RNA, 19 nt, Artificial Sequence
  Description of Artificial Sequence: Synthetic oligonucleotide
agcaugcuauucagagcga

SEQ ID NO: 2635577 - RNA, 19 nt, Artificial Sequence
  Description of Artificial Sequence: Synthetic oligonucleotide
gucugcggcccuggcacag

SEQ ID NO: 2635578 - RNA, 19 nt, Artificial Sequence
  Description of Artificial Sequence: Synthetic oligonucleotide
gguuggucugcggcccugg

SEQ ID NO: 2635579 - RNA, 19 nt, Artificial Sequence
  Description of Artificial Sequence: Synthetic oligonucleotide
cuccuugcggcuggcacca

SEQ ID NO: 2635580 - RNA, 19 nt, Artificial Sequence
  Description of Artificial Sequence: Synthetic oligonucleotide
ccggaauugccugcguagc

SEQ ID NO: 2635581 - RNA, 19 nt, Artificial Sequence
  Description of Artificial Sequence: Synthetic oligonucleotide
gcggcccuggcacaguuuc

SEQ ID NO: 2635582 - RNA, 19 nt, Artificial Sequence
  Description of Artificial Sequence: Synthetic oligonucleotide
ggucccugggcugaaggga

SEQ ID NO: 2635583 - RNA, 19 nt, Artificial Sequence
  Description of Artificial Sequence: Synthetic oligonucleotide
uggcaccacucacgaugac

SEQ ID NO: 2635584 - RNA, 19 nt, Artificial Sequence
  Description of Artificial Sequence: Synthetic oligonucleotide
ccaagagcgguggaugauc

SEQ ID NO: 2635585 - RNA, 19 nt, Artificial Sequence
  Description of Artificial Sequence: Synthetic oligonucleotide
cccaacgcuccuccuugcg

SEQ ID NO: 2635586 - RNA, 19 nt, Artificial Sequence
  Description of Artificial Sequence: Synthetic oligonucleotide
gauggcuaggcuagccuuu

SEQ ID NO: 2635587 - RNA, 19 nt, Artificial Sequence
  Description of Artificial Sequence: Synthetic oligonucleotide
ccugcguagcaugcuauuc

SEQ ID NO: 2635588 - RNA, 19 nt, Artificial Sequence
  Description of Artificial Sequence: Synthetic oligonucleotide
ccucaccaugcuccaggcg

SEQ ID NO: 2635589 - RNA, 19 nt, Artificial Sequence
  Description of Artificial Sequence: Synthetic oligonucleotide
gaacugucuguugcacacu

SEQ ID NO: 2635590 - RNA, 19 nt, Artificial Sequence
  Description of Artificial Sequence: Synthetic oligonucleotide
ucugcggcccuggcacagu

SEQ ID NO: 2635591 - RNA, 19 nt, Artificial Sequence
  Description of Artificial Sequence: Synthetic oligonucleotide
cuuggugguccucuugguu

SEQ ID NO: 2635592 - RNA, 19 nt, Artificial Sequence
  Description of Artificial Sequence: Synthetic oligonucleotide
gggcugaagggaaccaaga

SEQ ID NO: 2635593 - RNA, 19 nt, Artificial Sequence
  Description of Artificial Sequence: Synthetic oligonucleotide
cacugugcccguggugcug

SEQ ID NO: 2635594 - RNA, 19 nt, Artificial Sequence
  Description of Artificial Sequence: Synthetic oligonucleotide
agccuucggucguccucug

SEQ ID NO: 2635595 - RNA, 19 nt, Artificial Sequence
  Description of Artificial Sequence: Synthetic oligonucleotide
gcaugcuauucagagcgaa

SEQ ID NO: 2635596 - RNA, 19 nt, Artificial Sequence
  Description of Artificial Sequence: Synthetic oligonucleotide
ggcggaacauggcaucugu

SEQ ID NO: 2635597 - RNA, 19 nt, Artificial Sequence
  Description of Artificial Sequence: Synthetic oligonucleotide
cuggcacaagagggauggc

SEQ ID NO: 2635598 - RNA, 19 nt, Artificial Sequence
  Description of Artificial Sequence: Synthetic oligonucleotide
gucuguccucagaggaguc

SEQ ID NO: 2635599 - RNA, 19 nt, Artificial Sequence
  Description of Artificial Sequence: Synthetic oligonucleotide
cugugcccguggugcuggg

SEQ ID NO: 2635600 - RNA, 19 nt, Artificial Sequence
  Description of Artificial Sequence: Synthetic oligonucleotide
gcaccacucacgaugacau

SEQ ID NO: 2635601 - RNA, 19 nt, Artificial Sequence
  Description of Artificial Sequence: Synthetic oligonucleotide
cuccucuagcauggcuuuc

SEQ ID NO: 2635602 - RNA, 19 nt, Artificial Sequence
  Description of Artificial Sequence: Synthetic oligonucleotide
gcccuggcacaguuucuug

SEQ ID NO: 2635603 - RNA, 19 nt, Artificial Sequence
  Description of Artificial Sequence: Synthetic oligonucleotide
ggauggcuaggcuagccuu

SEQ ID NO: 2635604 - RNA, 19 nt, Artificial Sequence
  Description of Artificial Sequence: Synthetic oligonucleotide
cugggcugaagggaaccaa

SEQ ID NO: 2635605 - RNA, 19 nt, Artificial Sequence
  Description of Artificial Sequence: Synthetic oligonucleotide
cguugucuuccauauccca

SEQ ID NO: 2635606 - RNA, 19 nt, Artificial Sequence
  Description of Artificial Sequence: Synthetic oligonucleotide
ggaauugccugcguagcau

SEQ ID NO: 2635607 - RNA, 19 nt, Artificial Sequence
  Description of Artificial Sequence: Synthetic oligonucleotide
ggaaccaagagcgguggau

SEQ ID NO: 2635608 - RNA, 19 nt, Artificial Sequence
  Description of Artificial Sequence: Synthetic oligonucleotide
uggucaggaccugcucguu

SEQ ID NO: 2635609 - RNA, 19 nt, Artificial Sequence
  Description of Artificial Sequence: Synthetic oligonucleotide
cugggugguucuugguggu

SEQ ID NO: 2635610 - RNA, 19 nt, Artificial Sequence
  Description of Artificial Sequence: Synthetic oligonucleotide
ggcuagccuuugccuguag

SEQ ID NO: 2635611 - RNA, 19 nt, Artificial Sequence
  Description of Artificial Sequence: Synthetic oligonucleotide
ccauaucccaacgcuccuc

SEQ ID NO: 2635612 - RNA, 19 nt, Artificial Sequence
  Description of Artificial Sequence: Synthetic oligonucleotide
gcucguugucuuccauauc

SEQ ID NO: 2635613 - RNA, 19 nt, Artificial Sequence
  Description of Artificial Sequence: Synthetic oligonucleotide
ggacguugcuagcuuugcu

SEQ ID NO: 2635614 - RNA, 19 nt, Artificial Sequence
  Description of Artificial Sequence: Synthetic oligonucleotide
gcuagccuuugccuguagu

SEQ ID NO: 2635615 - RNA, 19 nt, Artificial Sequence
  Description of Artificial Sequence: Synthetic oligonucleotide
gugguucuuggugguccuc

SEQ ID NO: 2635616 - RNA, 19 nt, Artificial Sequence
  Description of Artificial Sequence: Synthetic oligonucleotide
cagccucaccaugcuccag

SEQ ID NO: 2635617 - RNA, 19 nt, Artificial Sequence
  Description of Artificial Sequence: Synthetic oligonucleotide
cagccuucggucguccucu

SEQ ID NO: 2635618 - RNA, 19 nt, Artificial Sequence
  Description of Artificial Sequence: Synthetic oligonucleotide
ccuuugccuguagugccug

SEQ ID NO: 2635619 - RNA, 19 nt, Artificial Sequence
  Description of Artificial Sequence: Synthetic oligonucleotide
caccacucacgaugacaua

SEQ ID NO: 2635620 - RNA, 19 nt, Artificial Sequence
  Description of Artificial Sequence: Synthetic oligonucleotide
gcguagcaugcuauucaga

SEQ ID NO: 2635621 - RNA, 19 nt, Artificial Sequence
  Description of Artificial Sequence: Synthetic oligonucleotide
aggcuagccuuugccugua

SEQ ID NO: 2635622 - RNA, 19 nt, Artificial Sequence
  Description of Artificial Sequence: Synthetic oligonucleotide
gcggaacauggcaucuguc

SEQ ID NO: 2635623 - RNA, 19 nt, Artificial Sequence
  Description of Artificial Sequence: Synthetic oligonucleotide
caggcggaacauggcaucu

SEQ ID NO: 2635624 - RNA, 19 nt, Artificial Sequence
  Description of Artificial Sequence: Synthetic oligonucleotide
caggaccugcucguugucu

SEQ ID NO: 2635625 - RNA, 19 nt, Artificial Sequence
  Description of Artificial Sequence: Synthetic oligonucleotide
cggaauugccugcguagca

SEQ ID NO: 2635626 - RNA, 19 nt, Artificial Sequence
  Description of Artificial Sequence: Synthetic oligonucleotide
gcagccagccuucggucgu

SEQ ID NO: 2635627 - RNA, 19 nt, Artificial Sequence
  Description of Artificial Sequence: Synthetic oligonucleotide
ccguagcagggcagccagc

SEQ ID NO: 2635628 - RNA, 19 nt, Artificial Sequence
  Description of Artificial Sequence: Synthetic oligonucleotide
ccacucacgaugacauagu

SEQ ID NO: 2635629 - RNA, 19 nt, Artificial Sequence
  Description of Artificial Sequence: Synthetic oligonucleotide
ggucugcggcccuggcaca

SEQ ID NO: 2635630 - RNA, 19 nt, Artificial Sequence
  Description of Artificial Sequence: Synthetic oligonucleotide
cugcggucagccucaccau

SEQ ID NO: 2635631 - RNA, 19 nt, Artificial Sequence
  Description of Artificial Sequence: Synthetic oligonucleotide
guacaacaguuggcagggu

SEQ ID NO: 2635632 - RNA, 19 nt, Artificial Sequence
  Description of Artificial Sequence: Synthetic oligonucleotide
caccaugcuccaggcggaa

SEQ ID NO: 2635633 - RNA, 19 nt, Artificial Sequence
  Description of Artificial Sequence: Synthetic oligonucleotide
ggaugaucucugugcgcuu

SEQ ID NO: 2635634 - RNA, 19 nt, Artificial Sequence
  Description of Artificial Sequence: Synthetic oligonucleotide
ccuccucuagcauggcuuu

SEQ ID NO: 2635635 - RNA, 19 nt, Artificial Sequence
  Description of Artificial Sequence: Synthetic oligonucleotide
cggcuggcaccacucacga

SEQ ID NO: 2635636 - RNA, 19 nt, Artificial Sequence
  Description of Artificial Sequence: Synthetic oligonucleotide
gccugcguagcaugcuauu

SEQ ID NO: 2635637 - RNA, 19 nt, Artificial Sequence
  Description of Artificial Sequence: Synthetic oligonucleotide
gugcugcggucagccucac

SEQ ID NO: 2635638 - RNA, 19 nt, Artificial Sequence
  Description of Artificial Sequence: Synthetic oligonucleotide
cguugcuagcuuugcugcu

SEQ ID NO: 2635639 - RNA, 19 nt, Artificial Sequence
  Description of Artificial Sequence: Synthetic oligonucleotide
gggguuggucugcggcccu

SEQ ID NO: 2635640 - RNA, 19 nt, Artificial Sequence
  Description of Artificial Sequence: Synthetic oligonucleotide
cuccuggauguggcugagu

SEQ ID NO: 2635641 - RNA, 19 nt, Artificial Sequence
  Description of Artificial Sequence: Synthetic oligonucleotide
cugcggcccuggcacaguu

SEQ ID NO: 2635642 - RNA, 19 nt, Artificial Sequence
  Description of Artificial Sequence: Synthetic oligonucleotide
ccuugcggcuggcaccacu

SEQ ID NO: 2635643 - RNA, 19 nt, Artificial Sequence
  Description of Artificial Sequence: Synthetic oligonucleotide
gccuucggucguccucugu

SEQ ID NO: 2635644 - RNA, 19 nt, Artificial Sequence
  Description of Artificial Sequence: Synthetic oligonucleotide
gccagccuucggucguccu

SEQ ID NO: 2635645 - RNA, 19 nt, Artificial Sequence
  Description of Artificial Sequence: Synthetic oligonucleotide
ccacugugcccguggugcu

SEQ ID NO: 2635646 - RNA, 19 nt, Artificial Sequence
  Description of Artificial Sequence: Synthetic oligonucleotide
ggcuggcaccacucacgau

SEQ ID NO: 2635647 - RNA, 19 nt, Artificial Sequence
  Description of Artificial Sequence: Synthetic oligonucleotide
cggucagccucaccaugcu

SEQ ID NO: 2635648 - RNA, 19 nt, Artificial Sequence
  Description of Artificial Sequence: Synthetic oligonucleotide
aaugaauugcuugacaucc

SEQ ID NO: 2635649 - RNA, 19 nt, Artificial Sequence
  Description of Artificial Sequence: Synthetic oligonucleotide
uguauaaagauaaagcgcc

SEQ ID NO: 2635650 - RNA, 19 nt, Artificial Sequence
  Description of Artificial Sequence: Synthetic oligonucleotide
uuuaugaucaggcaugggg

SEQ ID NO: 2635651 - RNA, 19 nt, Artificial Sequence
  Description of Artificial Sequence: Synthetic oligonucleotide
aacacuagaaguuuuauga

SEQ ID NO: 2635652 - RNA, 19 nt, Artificial Sequence
  Description of Artificial Sequence: Synthetic oligonucleotide
uuauguauuacagucacgg

SEQ ID NO: 2635653 - RNA, 19 nt, Artificial Sequence
  Description of Artificial Sequence: Synthetic oligonucleotide
uuauuuacuuuucugaaca

SEQ ID NO: 2635654 - RNA, 19 nt, Artificial Sequence
  Description of Artificial Sequence: Synthetic oligonucleotide
aagguuuauacucuacaac

SEQ ID NO: 2635655 - RNA, 19 nt, Artificial Sequence
  Description of Artificial Sequence: Synthetic oligonucleotide
aauagaaauaucucuauua

SEQ ID NO: 2635656 - RNA, 19 nt, Artificial Sequence
  Description of Artificial Sequence: Synthetic oligonucleotide
agugacgucaaucaauugg

SEQ ID NO: 2635657 - RNA, 19 nt, Artificial Sequence
  Description of Artificial Sequence: Synthetic oligonucleotide
gguguauaaagauaaagcg

SEQ ID NO: 2635658 - RNA, 19 nt, Artificial Sequence
  Description of Artificial Sequence: Synthetic oligonucleotide
agaaguuuuaugaucaggc

SEQ ID NO: 2635659 - RNA, 19 nt, Artificial Sequence
  Description of Artificial Sequence: Synthetic oligonucleotide
aaaacauuuuaacacugug

SEQ ID NO: 2635660 - RNA, 19 nt, Artificial Sequence
  Description of Artificial Sequence: Synthetic oligonucleotide
uguaauaccaucuacuuuu

SEQ ID NO: 2635661 - RNA, 19 nt, Artificial Sequence
  Description of Artificial Sequence: Synthetic oligonucleotide
ucaaggauaauguaauacc

SEQ ID NO: 2635662 - RNA, 19 nt, Artificial Sequence
  Description of Artificial Sequence: Synthetic oligonucleotide
cuauuagugcuauugauag

SEQ ID NO: 2635663 - RNA, 19 nt, Artificial Sequence
  Description of Artificial Sequence: Synthetic oligonucleotide
agaaauaucucuauuagug

SEQ ID NO: 2635664 - RNA, 19 nt, Artificial Sequence
  Description of Artificial Sequence: Synthetic oligonucleotide
uaauguaauaccaucuacu

SEQ ID NO: 2635665 - RNA, 19 nt, Artificial Sequence
  Description of Artificial Sequence: Synthetic oligonucleotide
agugcuauugauaggaccc

SEQ ID NO: 2635666 - RNA, 19 nt, Artificial Sequence
  Description of Artificial Sequence: Synthetic oligonucleotide
uaaaagggccauuaauugg

SEQ ID NO: 2635667 - RNA, 19 nt, Artificial Sequence
  Description of Artificial Sequence: Synthetic oligonucleotide
ugcauggugacuaaagagc

SEQ ID NO: 2635668 - RNA, 19 nt, Artificial Sequence
  Description of Artificial Sequence: Synthetic oligonucleotide
uggucccucaauaaaaggg

SEQ ID NO: 2635669 - RNA, 19 nt, Artificial Sequence
  Description of Artificial Sequence: Synthetic oligonucleotide
uugaagguuacauuggaug

SEQ ID NO: 2635670 - RNA, 19 nt, Artificial Sequence
  Description of Artificial Sequence: Synthetic oligonucleotide
aagcauuaucccuaguauc

SEQ ID NO: 2635671 - RNA, 19 nt, Artificial Sequence
  Description of Artificial Sequence: Synthetic oligonucleotide
auaaaagggccauuaauug

SEQ ID NO: 2635672 - RNA, 19 nt, Artificial Sequence
  Description of Artificial Sequence: Synthetic oligonucleotide
auugauaggacccugcgga

SEQ ID NO: 2635673 - RNA, 19 nt, Artificial Sequence
  Description of Artificial Sequence: Synthetic oligonucleotide
aaaagcauuaucccuagua

SEQ ID NO: 2635674 - RNA, 19 nt, Artificial Sequence
  Description of Artificial Sequence: Synthetic oligonucleotide
aggauaauguaauaccauc

SEQ ID NO: 2635675 - RNA, 19 nt, Artificial Sequence
  Description of Artificial Sequence: Synthetic oligonucleotide
agguuuauacucuacaaca

SEQ ID NO: 2635676 - RNA, 19 nt, Artificial Sequence
  Description of Artificial Sequence: Synthetic oligonucleotide
ccuucauagacuuugaagg

SEQ ID NO: 2635677 - RNA, 19 nt, Artificial Sequence
  Description of Artificial Sequence: Synthetic oligonucleotide
aauguaauaccaucuacuu

SEQ ID NO: 2635678 - RNA, 19 nt, Artificial Sequence
  Description of Artificial Sequence: Synthetic oligonucleotide
uuuaccaaugauuuuaguu

SEQ ID NO: 2635679 - RNA, 19 nt, Artificial Sequence
  Description of Artificial Sequence: Synthetic oligonucleotide
acucacagcauuuacaagu

SEQ ID NO: 2635680 - RNA, 19 nt, Artificial Sequence
  Description of Artificial Sequence: Synthetic oligonucleotide
uaaagggucacaaucucca

SEQ ID NO: 2635681 - RNA, 19 nt, Artificial Sequence
  Description of Artificial Sequence: Synthetic oligonucleotide
aaagcauuaucccuaguau

SEQ ID NO: 2635682 - RNA, 19 nt, Artificial Sequence
  Description of Artificial Sequence: Synthetic oligonucleotide
uuaccaaugauuuuaguuu

SEQ ID NO: 2635683 - RNA, 19 nt, Artificial Sequence
  Description of Artificial Sequence: Synthetic oligonucleotide
uuuaacacugugaacacua

SEQ ID NO: 2635684 - RNA, 19 nt, Artificial Sequence
  Description of Artificial Sequence: Synthetic oligonucleotide
cauuuuaacacugugaaca

SEQ ID NO: 2635685 - RNA, 19 nt, Artificial Sequence
  Description of Artificial Sequence: Synthetic oligonucleotide
acagcaaaacauuuuaaca

SEQ ID NO: 2635686 - RNA, 19 nt, Artificial Sequence
  Description of Artificial Sequence: Synthetic oligonucleotide
uacacaaggccucuuagug

SEQ ID NO: 2635687 - RNA, 19 nt, Artificial Sequence
  Description of Artificial Sequence: Synthetic oligonucleotide
aaagguuuauacucuacaa

SEQ ID NO: 2635688 - RNA, 19 nt, Artificial Sequence
  Description of Artificial Sequence: Synthetic oligonucleotide
acgucaaucaauuggaggu

SEQ ID NO: 2635689 - RNA, 19 nt, Artificial Sequence
  Description of Artificial Sequence: Synthetic oligonucleotide
aucaauuggagguaggagu

SEQ ID NO: 2635690 - RNA, 19 nt, Artificial Sequence
  Description of Artificial Sequence: Synthetic oligonucleotide
uuuacaagucacuuacagc

SEQ ID NO: 2635691 - RNA, 19 nt, Artificial Sequence
  Description of Artificial Sequence: Synthetic oligonucleotide
ugaccaucuacacaaggcc

SEQ ID NO: 2635692 - RNA, 19 nt, Artificial Sequence
  Description of Artificial Sequence: Synthetic oligonucleotide
gaacuaaagggucacaauc

SEQ ID NO: 2635693 - RNA, 19 nt, Artificial Sequence
  Description of Artificial Sequence: Synthetic oligonucleotide
acaacagugaugcugguga

SEQ ID NO: 2635694 - RNA, 19 nt, Artificial Sequence
  Description of Artificial Sequence: Synthetic oligonucleotide
agggccauuaauuggagag

SEQ ID NO: 2635695 - RNA, 19 nt, Artificial Sequence
  Description of Artificial Sequence: Synthetic oligonucleotide
uauugauaggacccugcgg

SEQ ID NO: 2635696 - RNA, 19 nt, Artificial Sequence
  Description of Artificial Sequence: Synthetic oligonucleotide
uacagcaaaacauuuuaac

SEQ ID NO: 2635697 - RNA, 19 nt, Artificial Sequence
  Description of Artificial Sequence: Synthetic oligonucleotide
ucuauuagugcuauugaua

SEQ ID NO: 2635698 - RNA, 19 nt, Artificial Sequence
  Description of Artificial Sequence: Synthetic oligonucleotide
ucaaugaauugcuugacau

SEQ ID NO: 2635699 - RNA, 19 nt, Artificial Sequence
  Description of Artificial Sequence: Synthetic oligonucleotide
uuauacucuacaacaguga

SEQ ID NO: 2635700 - RNA, 19 nt, Artificial Sequence
  Description of Artificial Sequence: Synthetic oligonucleotide
uuuauguauuacagucacg

SEQ ID NO: 2635701 - RNA, 19 nt, Artificial Sequence
  Description of Artificial Sequence: Synthetic oligonucleotide
aauuggagagagcaguuau

SEQ ID NO: 2635702 - RNA, 19 nt, Artificial Sequence
  Description of Artificial Sequence: Synthetic oligonucleotide
cauagucuaacucacagca

SEQ ID NO: 2635703 - RNA, 19 nt, Artificial Sequence
  Description of Artificial Sequence: Synthetic oligonucleotide
auuaauuggagagagcagu

SEQ ID NO: 2635704 - RNA, 19 nt, Artificial Sequence
  Description of Artificial Sequence: Synthetic oligonucleotide
uacagucacggauauauga

SEQ ID NO: 2635705 - RNA, 19 nt, Artificial Sequence
  Description of Artificial Sequence: Synthetic oligonucleotide
accauagucuaacucacag

SEQ ID NO: 2635706 - RNA, 19 nt, Artificial Sequence
  Description of Artificial Sequence: Synthetic oligonucleotide
uggggaaagguuuauacuc

SEQ ID NO: 2635707 - RNA, 19 nt, Artificial Sequence
  Description of Artificial Sequence: Synthetic oligonucleotide
aaucaauuggagguaggag

SEQ ID NO: 2635708 - RNA, 19 nt, Artificial Sequence
  Description of Artificial Sequence: Synthetic oligonucleotide
aaaagggccauuaauugga

SEQ ID NO: 2635709 - RNA, 19 nt, Artificial Sequence
  Description of Artificial Sequence: Synthetic oligonucleotide
agugacgccggccaguuuc

SEQ ID NO: 2635710 - RNA, 19 nt, Artificial Sequence
  Description of Artificial Sequence: Synthetic oligonucleotide
uuuucaacaguaagagaac

SEQ ID NO: 2635711 - RNA, 19 nt, Artificial Sequence
  Description of Artificial Sequence: Synthetic oligonucleotide
guguauaaagauaaagcgc

SEQ ID NO: 2635712 - RNA, 19 nt, Artificial Sequence
  Description of Artificial Sequence: Synthetic oligonucleotide
uauacucuacaacagugau

SEQ ID NO: 2635713 - RNA, 19 nt, Artificial Sequence
  Description of Artificial Sequence: Synthetic oligonucleotide
uaggaguuuaucaaugaau

SEQ ID NO: 2635714 - RNA, 19 nt, Artificial Sequence
  Description of Artificial Sequence: Synthetic oligonucleotide
auuaucccuaguaucaagg

SEQ ID NO: 2635715 - RNA, 19 nt, Artificial Sequence
  Description of Artificial Sequence: Synthetic oligonucleotide
gaaagguuuauacucuaca

SEQ ID NO: 2635716 - RNA, 19 nt, Artificial Sequence
  Description of Artificial Sequence: Synthetic oligonucleotide
ucuacacaaggccucuuag

SEQ ID NO: 2635717 - RNA, 19 nt, Artificial Sequence
  Description of Artificial Sequence: Synthetic oligonucleotide
agcaacugagcgcagugac

SEQ ID NO: 2635718 - RNA, 19 nt, Artificial Sequence
  Description of Artificial Sequence: Synthetic oligonucleotide
acuagaaguuuuaugauca

SEQ ID NO: 2635719 - RNA, 19 nt, Artificial Sequence
  Description of Artificial Sequence: Synthetic oligonucleotide
uggagaauagaaauaucuc

SEQ ID NO: 2635720 - RNA, 19 nt, Artificial Sequence
  Description of Artificial Sequence: Synthetic oligonucleotide
gugacuaaagagcugagga

SEQ ID NO: 2635721 - RNA, 19 nt, Artificial Sequence
  Description of Artificial Sequence: Synthetic oligonucleotide
acacacauauaaaauacag

SEQ ID NO: 2635722 - RNA, 19 nt, Artificial Sequence
  Description of Artificial Sequence: Synthetic oligonucleotide
uagaaguuuuaugaucagg

SEQ ID NO: 2635723 - RNA, 19 nt, Artificial Sequence
  Description of Artificial Sequence: Synthetic oligonucleotide
aguuuuaugaucaggcaug

SEQ ID NO: 2635724 - RNA, 19 nt, Artificial Sequence
  Description of Artificial Sequence: Synthetic oligonucleotide
gaacacuagaaguuuuaug

SEQ ID NO: 2635725 - RNA, 19 nt, Artificial Sequence
  Description of Artificial Sequence: Synthetic oligonucleotide
aauacagacauugcauggu

SEQ ID NO: 2635726 - RNA, 19 nt, Artificial Sequence
  Description of Artificial Sequence: Synthetic oligonucleotide
uuagugacgucaaucaauu

SEQ ID NO: 2635727 - RNA, 19 nt, Artificial Sequence
  Description of Artificial Sequence: Synthetic oligonucleotide
ucucuauuagugcuauuga

SEQ ID NO: 2635728 - RNA, 19 nt, Artificial Sequence
  Description of Artificial Sequence: Synthetic oligonucleotide
aucucuauuagugcuauug

SEQ ID NO: 2635729 - RNA, 19 nt, Artificial Sequence
  Description of Artificial Sequence: Synthetic oligonucleotide
agagcaguuauuuacuuuu

SEQ ID NO: 2635730 - RNA, 19 nt, Artificial Sequence
  Description of Artificial Sequence: Synthetic oligonucleotide
guuauuuacuuuucugaac

SEQ ID NO: 2635731 - RNA, 19 nt, Artificial Sequence
  Description of Artificial Sequence: Synthetic oligonucleotide
uagaaauaucucuauuagu

SEQ ID NO: 2635732 - RNA, 19 nt, Artificial Sequence
  Description of Artificial Sequence: Synthetic oligonucleotide
aagucacuuacagcaaaac

SEQ ID NO: 2635733 - RNA, 19 nt, Artificial Sequence
  Description of Artificial Sequence: Synthetic oligonucleotide
uuagggaacuaaaggguca

SEQ ID NO: 2635734 - RNA, 19 nt, Artificial Sequence
  Description of Artificial Sequence: Synthetic oligonucleotide
ucaaucaauuggagguagg

SEQ ID NO: 2635735 - RNA, 19 nt, Artificial Sequence
  Description of Artificial Sequence: Synthetic oligonucleotide
uauuagugcuauugauagg

SEQ ID NO: 2635736 - RNA, 19 nt, Artificial Sequence
  Description of Artificial Sequence: Synthetic oligonucleotide
aagagcgguguauaaagau

SEQ ID NO: 2635737 - RNA, 19 nt, Artificial Sequence
  Description of Artificial Sequence: Synthetic oligonucleotide
cauugcauggugacuaaag

SEQ ID NO: 2635738 - RNA, 19 nt, Artificial Sequence
  Description of Artificial Sequence: Synthetic oligonucleotide
agaauagaaauaucucuau

SEQ ID NO: 2635739 - RNA, 19 nt, Artificial Sequence
  Description of Artificial Sequence: Synthetic oligonucleotide
auuagggaacuaaaggguc

SEQ ID NO: 2635740 - RNA, 19 nt, Artificial Sequence
  Description of Artificial Sequence: Synthetic oligonucleotide
cacggauauaugaacacac

SEQ ID NO: 2635741 - RNA, 19 nt, Artificial Sequence
  Description of Artificial Sequence: Synthetic oligonucleotide
uacuuuucugaacacuuaa

SEQ ID NO: 2635742 - RNA, 19 nt, Artificial Sequence
  Description of Artificial Sequence: Synthetic oligonucleotide
cuauugauaggacccugcg

SEQ ID NO: 2635743 - RNA, 19 nt, Artificial Sequence
  Description of Artificial Sequence: Synthetic oligonucleotide
aguaucaaggauaauguaa

SEQ ID NO: 2635744 - RNA, 19 nt, Artificial Sequence
  Description of Artificial Sequence: Synthetic oligonucleotide
gauaauguaauaccaucua

SEQ ID NO: 2635745 - RNA, 19 nt, Artificial Sequence
  Description of Artificial Sequence: Synthetic oligonucleotide
agucacuuacagcaaaaca

SEQ ID NO: 2635746 - RNA, 19 nt, Artificial Sequence
  Description of Artificial Sequence: Synthetic oligonucleotide
gauuuaccaaugauuuuag

SEQ ID NO: 2635747 - RNA, 19 nt, Artificial Sequence
  Description of Artificial Sequence: Synthetic oligonucleotide
ucaacaguaagagaaccaa

SEQ ID NO: 2635748 - RNA, 19 nt, Artificial Sequence
  Description of Artificial Sequence: Synthetic oligonucleotide
caaggauaauguaauacca

SEQ ID NO: 2635749 - RNA, 19 nt, Artificial Sequence
  Description of Artificial Sequence: Synthetic oligonucleotide
aacucacagcauuuacaag

SEQ ID NO: 2635750 - RNA, 19 nt, Artificial Sequence
  Description of Artificial Sequence: Synthetic oligonucleotide
gcauuuacaagucacuuac

SEQ ID NO: 2635751 - RNA, 19 nt, Artificial Sequence
  Description of Artificial Sequence: Synthetic oligonucleotide
uagugcuauugauaggacc

SEQ ID NO: 2635752 - RNA, 19 nt, Artificial Sequence
  Description of Artificial Sequence: Synthetic oligonucleotide
uuggauggauuuaccaaug

SEQ ID NO: 2635753 - RNA, 19 nt, Artificial Sequence
  Description of Artificial Sequence: Synthetic oligonucleotide
gaaguuuuaugaucaggca

SEQ ID NO: 2635754 - RNA, 19 nt, Artificial Sequence
  Description of Artificial Sequence: Synthetic oligonucleotide
uagucuaacucacagcauu

SEQ ID NO: 2635755 - RNA, 19 nt, Artificial Sequence
  Description of Artificial Sequence: Synthetic oligonucleotide
acauuggauggauuuacca

SEQ ID NO: 2635756 - RNA, 19 nt, Artificial Sequence
  Description of Artificial Sequence: Synthetic oligonucleotide
cauuaauuggagagagcag

SEQ ID NO: 2635757 - RNA, 19 nt, Artificial Sequence
  Description of Artificial Sequence: Synthetic oligonucleotide
uuaucccuaguaucaagga

SEQ ID NO: 2635758 - RNA, 19 nt, Artificial Sequence
  Description of Artificial Sequence: Synthetic oligonucleotide
agaaggaaaagaauagccu

SEQ ID NO: 2635759 - RNA, 19 nt, Artificial Sequence
  Description of Artificial Sequence: Synthetic oligonucleotide
uuacauuggauggauuuac

SEQ ID NO: 2635760 - RNA, 19 nt, Artificial Sequence
  Description of Artificial Sequence: Synthetic oligonucleotide
ugcugugugguaagagcgg

SEQ ID NO: 2635761 - RNA, 19 nt, Artificial Sequence
  Description of Artificial Sequence: Synthetic oligonucleotide
cacaaggccucuuagugac

SEQ ID NO: 2635762 - RNA, 19 nt, Artificial Sequence
  Description of Artificial Sequence: Synthetic oligonucleotide
aagaauagccuggucccuc

SEQ ID NO: 2635763 - RNA, 19 nt, Artificial Sequence
  Description of Artificial Sequence: Synthetic oligonucleotide
ugcuugacauccaucauuu

SEQ ID NO: 2635764 - RNA, 19 nt, Artificial Sequence
  Description of Artificial Sequence: Synthetic oligonucleotide
cacuagaaguuuuaugauc

SEQ ID NO: 2635765 - RNA, 19 nt, Artificial Sequence
  Description of Artificial Sequence: Synthetic oligonucleotide
uacauuggauggauuuacc

SEQ ID NO: 2635766 - RNA, 19 nt, Artificial Sequence
  Description of Artificial Sequence: Synthetic oligonucleotide
uuacagcaaaacauuuuaa

SEQ ID NO: 2635767 - RNA, 19 nt, Artificial Sequence
  Description of Artificial Sequence: Synthetic oligonucleotide
ccuaguaucaaggauaaug

SEQ ID NO: 2635768 - RNA, 19 nt, Artificial Sequence
  Description of Artificial Sequence: Synthetic oligonucleotide
agcauuaucccuaguauca

SEQ ID NO: 2635769 - RNA, 19 nt, Artificial Sequence
  Description of Artificial Sequence: Synthetic oligonucleotide
auacagacauugcauggug

SEQ ID NO: 2635770 - RNA, 19 nt, Artificial Sequence
  Description of Artificial Sequence: Synthetic oligonucleotide
uuugaagguuacauuggau

SEQ ID NO: 2635771 - RNA, 19 nt, Artificial Sequence
  Description of Artificial Sequence: Synthetic oligonucleotide
gacccugcggaaaugaagc

SEQ ID NO: 2635772 - RNA, 19 nt, Artificial Sequence
  Description of Artificial Sequence: Synthetic oligonucleotide
uauguauuacagucacgga

SEQ ID NO: 2635773 - RNA, 19 nt, Artificial Sequence
  Description of Artificial Sequence: Synthetic oligonucleotide
aucaaugaauugcuugaca

SEQ ID NO: 2635774 - RNA, 19 nt, Artificial Sequence
  Description of Artificial Sequence: Synthetic oligonucleotide
ugacuaaagagcugaggaa

SEQ ID NO: 2635775 - RNA, 19 nt, Artificial Sequence
  Description of Artificial Sequence: Synthetic oligonucleotide
guuuuaugaucaggcaugg

SEQ ID NO: 2635776 - RNA, 19 nt, Artificial Sequence
  Description of Artificial Sequence: Synthetic oligonucleotide
aacugagcgcagugacgcc

SEQ ID NO: 2635777 - RNA, 19 nt, Artificial Sequence
  Description of Artificial Sequence: Synthetic oligonucleotide
uauuuacuuuucugaacac

SEQ ID NO: 2635778 - RNA, 19 nt, Artificial Sequence
  Description of Artificial Sequence: Synthetic oligonucleotide
auggauuuaccaaugauuu

SEQ ID NO: 2635779 - RNA, 19 nt, Artificial Sequence
  Description of Artificial Sequence: Synthetic oligonucleotide
cuuacagcaaaacauuuua

SEQ ID NO: 2635780 - RNA, 19 nt, Artificial Sequence
  Description of Artificial Sequence: Synthetic oligonucleotide
auaaaaccauagucuaacu

SEQ ID NO: 2635781 - RNA, 19 nt, Artificial Sequence
  Description of Artificial Sequence: Synthetic oligonucleotide
ugaucaggcauggggaaag

SEQ ID NO: 2635782 - RNA, 19 nt, Artificial Sequence
  Description of Artificial Sequence: Synthetic oligonucleotide
gagaauagaaauaucucua

SEQ ID NO: 2635783 - RNA, 19 nt, Artificial Sequence
  Description of Artificial Sequence: Synthetic oligonucleotide
cucuuagugacgucaauca

SEQ ID NO: 2635784 - RNA, 19 nt, Artificial Sequence
  Description of Artificial Sequence: Synthetic oligonucleotide
uuaauuggagagagcaguu

SEQ ID NO: 2635785 - RNA, 19 nt, Artificial Sequence
  Description of Artificial Sequence: Synthetic oligonucleotide
ugcaucaugccuucauaga

SEQ ID NO: 2635786 - RNA, 19 nt, Artificial Sequence
  Description of Artificial Sequence: Synthetic oligonucleotide
uaucccuaguaucaaggau

SEQ ID NO: 2635787 - RNA, 19 nt, Artificial Sequence
  Description of Artificial Sequence: Synthetic oligonucleotide
cuggagaauagaaauaucu

SEQ ID NO: 2635788 - RNA, 19 nt, Artificial Sequence
  Description of Artificial Sequence: Synthetic oligonucleotide
uacagacauugcaugguga

SEQ ID NO: 2635789 - RNA, 19 nt, Artificial Sequence
  Description of Artificial Sequence: Synthetic oligonucleotide
auuuacuuuucugaacacu

SEQ ID NO: 2635790 - RNA, 19 nt, Artificial Sequence
  Description of Artificial Sequence: Synthetic oligonucleotide
cauuaucccuaguaucaag

SEQ ID NO: 2635791 - RNA, 19 nt, Artificial Sequence
  Description of Artificial Sequence: Synthetic oligonucleotide
ucuuagugacgucaaucaa

SEQ ID NO: 2635792 - RNA, 19 nt, Artificial Sequence
  Description of Artificial Sequence: Synthetic oligonucleotide
aaggauaauguaauaccau

SEQ ID NO: 2635793 - RNA, 19 nt, Artificial Sequence
  Description of Artificial Sequence: Synthetic oligonucleotide
agugaugcuggugaccauc

SEQ ID NO: 2635794 - RNA, 19 nt, Artificial Sequence
  Description of Artificial Sequence: Synthetic oligonucleotide
cacacauauaaaauacaga

SEQ ID NO: 2635795 - RNA, 19 nt, Artificial Sequence
  Description of Artificial Sequence: Synthetic oligonucleotide
caaugaauugcuugacauc

SEQ ID NO: 2635796 - RNA, 19 nt, Artificial Sequence
  Description of Artificial Sequence: Synthetic oligonucleotide
ucccucaauaaaagggcca

SEQ ID NO: 2635797 - RNA, 19 nt, Artificial Sequence
  Description of Artificial Sequence: Synthetic oligonucleotide
ucccuaguaucaaggauaa

SEQ ID NO: 2635798 - RNA, 19 nt, Artificial Sequence
  Description of Artificial Sequence: Synthetic oligonucleotide
auggugacuaaagagcuga

SEQ ID NO: 2635799 - RNA, 19 nt, Artificial Sequence
  Description of Artificial Sequence: Synthetic oligonucleotide
cuagaaguuuuaugaucag

SEQ ID NO: 2635800 - RNA, 19 nt, Artificial Sequence
  Description of Artificial Sequence: Synthetic oligonucleotide
uggauggauuuaccaauga

SEQ ID NO: 2635801 - RNA, 19 nt, Artificial Sequence
  Description of Artificial Sequence: Synthetic oligonucleotide
gaaaugaagccggagugga

SEQ ID NO: 2635802 - RNA, 19 nt, Artificial Sequence
  Description of Artificial Sequence: Synthetic oligonucleotide
uuagugcuauugauaggac

SEQ ID NO: 2635803 - RNA, 19 nt, Artificial Sequence
  Description of Artificial Sequence: Synthetic oligonucleotide
uuacagucacggauauaug

SEQ ID NO: 2635804 - RNA, 19 nt, Artificial Sequence
  Description of Artificial Sequence: Synthetic oligonucleotide
ugacaugagcugugcauca

SEQ ID NO: 2635805 - RNA, 19 nt, Artificial Sequence
  Description of Artificial Sequence: Synthetic oligonucleotide
ugugaacacuagaaguuuu

SEQ ID NO: 2635806 - RNA, 19 nt, Artificial Sequence
  Description of Artificial Sequence: Synthetic oligonucleotide
cucacagcauuuacaaguc

SEQ ID NO: 2635807 - RNA, 19 nt, Artificial Sequence
  Description of Artificial Sequence: Synthetic oligonucleotide
cgguguauaaagauaaagc

SEQ ID NO: 2635808 - RNA, 19 nt, Artificial Sequence
  Description of Artificial Sequence: Synthetic oligonucleotide
ggagaauagaaauaucucu

SEQ ID NO: 2635809 - RNA, 19 nt, Artificial Sequence
  Description of Artificial Sequence: Synthetic oligonucleotide
aguggaagccagcaacuga

SEQ ID NO: 2635810 - RNA, 19 nt, Artificial Sequence
  Description of Artificial Sequence: Synthetic oligonucleotide
uuuuaugaucaggcauggg

SEQ ID NO: 2635811 - RNA, 19 nt, Artificial Sequence
  Description of Artificial Sequence: Synthetic oligonucleotide
uaucaaugaauugcuugac

SEQ ID NO: 2635812 - RNA, 19 nt, Artificial Sequence
  Description of Artificial Sequence: Synthetic oligonucleotide
gucacggauauaugaacac

SEQ ID NO: 2635813 - RNA, 19 nt, Artificial Sequence
  Description of Artificial Sequence: Synthetic oligonucleotide
aagguuacauuggauggau

SEQ ID NO: 2635814 - RNA, 19 nt, Artificial Sequence
  Description of Artificial Sequence: Synthetic oligonucleotide
acacuagaaguuuuaugau

SEQ ID NO: 2635815 - RNA, 19 nt, Artificial Sequence
  Description of Artificial Sequence: Synthetic oligonucleotide
ucacggauauaugaacaca

SEQ ID NO: 2635816 - RNA, 19 nt, Artificial Sequence
  Description of Artificial Sequence: Synthetic oligonucleotide
gguuuauacucuacaacag

SEQ ID NO: 2635817 - RNA, 19 nt, Artificial Sequence
  Description of Artificial Sequence: Synthetic oligonucleotide
agcauuuacaagucacuua

SEQ ID NO: 2635818 - RNA, 19 nt, Artificial Sequence
  Description of Artificial Sequence: Synthetic oligonucleotide
cauuggauggauuuaccaa

SEQ ID NO: 2635819 - RNA, 19 nt, Artificial Sequence
  Description of Artificial Sequence: Synthetic oligonucleotide
ggaguuuaucaaugaauug

SEQ ID NO: 2635820 - RNA, 19 nt, Artificial Sequence
  Description of Artificial Sequence: Synthetic oligonucleotide
uacaagucacuuacagcaa

SEQ ID NO: 2635821 - RNA, 19 nt, Artificial Sequence
  Description of Artificial Sequence: Synthetic oligonucleotide
cagucacggauauaugaac

SEQ ID NO: 2635822 - RNA, 19 nt, Artificial Sequence
  Description of Artificial Sequence: Synthetic oligonucleotide
auuuaccaaugauuuuagu

SEQ ID NO: 2635823 - RNA, 19 nt, Artificial Sequence
  Description of Artificial Sequence: Synthetic oligonucleotide
acacaaggccucuuaguga

SEQ ID NO: 2635824 - RNA, 19 nt, Artificial Sequence
  Description of Artificial Sequence: Synthetic oligonucleotide
uuggagagagcaguuauuu

SEQ ID NO: 2635825 - RNA, 19 nt, Artificial Sequence
  Description of Artificial Sequence: Synthetic oligonucleotide
gucacuuacagcaaaacau

SEQ ID NO: 2635826 - RNA, 19 nt, Artificial Sequence
  Description of Artificial Sequence: Synthetic oligonucleotide
aauuggagguaggaguuua

SEQ ID NO: 2635827 - RNA, 19 nt, Artificial Sequence
  Description of Artificial Sequence: Synthetic oligonucleotide
accaucuacacaaggccuc

SEQ ID NO: 2635828 - RNA, 19 nt, Artificial Sequence
  Description of Artificial Sequence: Synthetic oligonucleotide
gauggauuuaccaaugauu

SEQ ID NO: 2635829 - RNA, 19 nt, Artificial Sequence
  Description of Artificial Sequence: Synthetic oligonucleotide
aagggccauuaauuggaga

SEQ ID NO: 2635830 - RNA, 19 nt, Artificial Sequence
  Description of Artificial Sequence: Synthetic oligonucleotide
cauuagggaacuaaagggu

SEQ ID NO: 2635831 - RNA, 19 nt, Artificial Sequence
  Description of Artificial Sequence: Synthetic oligonucleotide
acaugagcugugcaucaug

SEQ ID NO: 2635832 - RNA, 19 nt, Artificial Sequence
  Description of Artificial Sequence: Synthetic oligonucleotide
agucacggauauaugaaca

SEQ ID NO: 2635833 - RNA, 19 nt, Artificial Sequence
  Description of Artificial Sequence: Synthetic oligonucleotide
aucaugccuucauagacuu

SEQ ID NO: 2635834 - RNA, 19 nt, Artificial Sequence
  Description of Artificial Sequence: Synthetic oligonucleotide
acugagcgcagugacgccg

SEQ ID NO: 2635835 - RNA, 19 nt, Artificial Sequence
  Description of Artificial Sequence: Synthetic oligonucleotide
ggaaaugaagccggagugg

SEQ ID NO: 2635836 - RNA, 19 nt, Artificial Sequence
  Description of Artificial Sequence: Synthetic oligonucleotide
ugaacacuagaaguuuuau

SEQ ID NO: 2635837 - RNA, 19 nt, Artificial Sequence
  Description of Artificial Sequence: Synthetic oligonucleotide
ggugaccaucuacacaagg

SEQ ID NO: 2635838 - RNA, 19 nt, Artificial Sequence
  Description of Artificial Sequence: Synthetic oligonucleotide
agacauugcauggugacua

SEQ ID NO: 2635839 - RNA, 19 nt, Artificial Sequence
  Description of Artificial Sequence: Synthetic oligonucleotide
uaucaaggauaauguaaua

SEQ ID NO: 2635840 - RNA, 19 nt, Artificial Sequence
  Description of Artificial Sequence: Synthetic oligonucleotide
aaagggccauuaauuggag

SEQ ID NO: 2635841 - RNA, 19 nt, Artificial Sequence
  Description of Artificial Sequence: Synthetic oligonucleotide
aaagggucacaaucuccau

SEQ ID NO: 2635842 - RNA, 19 nt, Artificial Sequence
  Description of Artificial Sequence: Synthetic oligonucleotide
gcaucaugccuucauagac

SEQ ID NO: 2635843 - RNA, 19 nt, Artificial Sequence
  Description of Artificial Sequence: Synthetic oligonucleotide
gagcgguguauaaagauaa

SEQ ID NO: 2635844 - RNA, 19 nt, Artificial Sequence
  Description of Artificial Sequence: Synthetic oligonucleotide
uacaacagugaugcuggug

SEQ ID NO: 2635845 - RNA, 19 nt, Artificial Sequence
  Description of Artificial Sequence: Synthetic oligonucleotide
uaaagagcugaggaauaaa

SEQ ID NO: 2635846 - RNA, 19 nt, Artificial Sequence
  Description of Artificial Sequence: Synthetic oligonucleotide
ucacaaucuccauggcacu

SEQ ID NO: 2635847 - RNA, 19 nt, Artificial Sequence
  Description of Artificial Sequence: Synthetic oligonucleotide
uggugacuaaagagcugag

SEQ ID NO: 2635848 - RNA, 19 nt, Artificial Sequence
  Description of Artificial Sequence: Synthetic oligonucleotide
agaauagccuggucccuca

SEQ ID NO: 2635849 - RNA, 19 nt, Artificial Sequence
  Description of Artificial Sequence: Synthetic oligonucleotide
ggauuuaccaaugauuuua

SEQ ID NO: 2635850 - RNA, 19 nt, Artificial Sequence
  Description of Artificial Sequence: Synthetic oligonucleotide
ggucccucaauaaaagggc

SEQ ID NO: 2635851 - RNA, 19 nt, Artificial Sequence
  Description of Artificial Sequence: Synthetic oligonucleotide
guaggaguuuaucaaugaa

SEQ ID NO: 2635852 - RNA, 19 nt, Artificial Sequence
  Description of Artificial Sequence: Synthetic oligonucleotide
agguaggaguuuaucaaug

SEQ ID NO: 2635853 - RNA, 19 nt, Artificial Sequence
  Description of Artificial Sequence: Synthetic oligonucleotide
aucccuaguaucaaggaua

SEQ ID NO: 2635854 - RNA, 19 nt, Artificial Sequence
  Description of Artificial Sequence: Synthetic oligonucleotide
cacugugaacacuagaagu

SEQ ID NO: 2635855 - RNA, 19 nt, Artificial Sequence
  Description of Artificial Sequence: Synthetic oligonucleotide
auacucuacaacagugaug

SEQ ID NO: 2635856 - RNA, 19 nt, Artificial Sequence
  Description of Artificial Sequence: Synthetic oligonucleotide
ggugacuaaagagcugagg

SEQ ID NO: 2635857 - RNA, 19 nt, Artificial Sequence
  Description of Artificial Sequence: Synthetic oligonucleotide
gacuaaagagcugaggaau

SEQ ID NO: 2635858 - RNA, 19 nt, Artificial Sequence
  Description of Artificial Sequence: Synthetic oligonucleotide
cuuagugacgucaaucaau

SEQ ID NO: 2635859 - RNA, 19 nt, Artificial Sequence
  Description of Artificial Sequence: Synthetic oligonucleotide
auaucucuauuagugcuau

SEQ ID NO: 2635860 - RNA, 19 nt, Artificial Sequence
  Description of Artificial Sequence: Synthetic oligonucleotide
ggccauuaauuggagagag

SEQ ID NO: 2635861 - RNA, 19 nt, Artificial Sequence
  Description of Artificial Sequence: Synthetic oligonucleotide
uggauuuaccaaugauuuu

SEQ ID NO: 2635862 - RNA, 19 nt, Artificial Sequence
  Description of Artificial Sequence: Synthetic oligonucleotide
ccauuaauuggagagagca

SEQ ID NO: 2635863 - RNA, 19 nt, Artificial Sequence
  Description of Artificial Sequence: Synthetic oligonucleotide
gcaaaacauuuuaacacug

SEQ ID NO: 2635864 - RNA, 19 nt, Artificial Sequence
  Description of Artificial Sequence: Synthetic oligonucleotide
ugcuauugauaggacccug

SEQ ID NO: 2635865 - RNA, 19 nt, Artificial Sequence
  Description of Artificial Sequence: Synthetic oligonucleotide
gcgguguauaaagauaaag

SEQ ID NO: 2635866 - RNA, 19 nt, Artificial Sequence
  Description of Artificial Sequence: Synthetic oligonucleotide
gguaggaguuuaucaauga

SEQ ID NO: 2635867 - RNA, 19 nt, Artificial Sequence
  Description of Artificial Sequence: Synthetic oligonucleotide
acagucacggauauaugaa

SEQ ID NO: 2635868 - RNA, 19 nt, Artificial Sequence
  Description of Artificial Sequence: Synthetic oligonucleotide
uaauuggagagagcaguua

SEQ ID NO: 2635869 - RNA, 19 nt, Artificial Sequence
  Description of Artificial Sequence: Synthetic oligonucleotide
ugguaagagcgguguauaa

SEQ ID NO: 2635870 - RNA, 19 nt, Artificial Sequence
  Description of Artificial Sequence: Synthetic oligonucleotide
caaucaauuggagguagga

SEQ ID NO: 2635871 - RNA, 19 nt, Artificial Sequence
  Description of Artificial Sequence: Synthetic oligonucleotide
uugauaggacccugcggaa

SEQ ID NO: 2635872 - RNA, 19 nt, Artificial Sequence
  Description of Artificial Sequence: Synthetic oligonucleotide
gucccucaauaaaagggcc

SEQ ID NO: 2635873 - RNA, 19 nt, Artificial Sequence
  Description of Artificial Sequence: Synthetic oligonucleotide
cuucauagacuuugaaggu

SEQ ID NO: 2635874 - RNA, 19 nt, Artificial Sequence
  Description of Artificial Sequence: Synthetic oligonucleotide
gaucaggcauggggaaagg

SEQ ID NO: 2635875 - RNA, 19 nt, Artificial Sequence
  Description of Artificial Sequence: Synthetic oligonucleotide
acuuacagcaaaacauuuu

SEQ ID NO: 2635876 - RNA, 19 nt, Artificial Sequence
  Description of Artificial Sequence: Synthetic oligonucleotide
uuggagguaggaguuuauc

SEQ ID NO: 2635877 - RNA, 19 nt, Artificial Sequence
  Description of Artificial Sequence: Synthetic oligonucleotide
ccauagucuaacucacagc

SEQ ID NO: 2635878 - RNA, 19 nt, Artificial Sequence
  Description of Artificial Sequence: Synthetic oligonucleotide
gacgccggccaguuucugc

SEQ ID NO: 2635879 - RNA, 19 nt, Artificial Sequence
  Description of Artificial Sequence: Synthetic oligonucleotide
ggauauaugaacacacaua

SEQ ID NO: 2635880 - RNA, 19 nt, Artificial Sequence
  Description of Artificial Sequence: Synthetic oligonucleotide
ugauaggacccugcggaaa

SEQ ID NO: 2635881 - RNA, 19 nt, Artificial Sequence
  Description of Artificial Sequence: Synthetic oligonucleotide
aaccauagucuaacucaca

SEQ ID NO: 2635882 - RNA, 19 nt, Artificial Sequence
  Description of Artificial Sequence: Synthetic oligonucleotide
caacagugaugcuggugac

SEQ ID NO: 2635883 - RNA, 19 nt, Artificial Sequence
  Description of Artificial Sequence: Synthetic oligonucleotide
ccuggucccucaauaaaag

SEQ ID NO: 2635884 - RNA, 19 nt, Artificial Sequence
  Description of Artificial Sequence: Synthetic oligonucleotide
gauaggacccugcggaaau

SEQ ID NO: 2635885 - RNA, 19 nt, Artificial Sequence
  Description of Artificial Sequence: Synthetic oligonucleotide
acggauauaugaacacaca

SEQ ID NO: 2635886 - RNA, 19 nt, Artificial Sequence
  Description of Artificial Sequence: Synthetic oligonucleotide
guuacauuggauggauuua

SEQ ID NO: 2635887 - RNA, 19 nt, Artificial Sequence
  Description of Artificial Sequence: Synthetic oligonucleotide
agagcgguguauaaagaua

SEQ ID NO: 2635888 - RNA, 19 nt, Artificial Sequence
  Description of Artificial Sequence: Synthetic oligonucleotide
ggauaauguaauaccaucu

SEQ ID NO: 2635889 - RNA, 19 nt, Artificial Sequence
  Description of Artificial Sequence: Synthetic oligonucleotide
gagagagcaguuauuuacu

SEQ ID NO: 2635890 - RNA, 19 nt, Artificial Sequence
  Description of Artificial Sequence: Synthetic oligonucleotide
gguuacauuggauggauuu

SEQ ID NO: 2635891 - RNA, 19 nt, Artificial Sequence
  Description of Artificial Sequence: Synthetic oligonucleotide
caucaugccuucauagacu

SEQ ID NO: 2635892 - RNA, 19 nt, Artificial Sequence
  Description of Artificial Sequence: Synthetic oligonucleotide
cucuauuagugcuauugau

SEQ ID NO: 2635893 - RNA, 19 nt, Artificial Sequence
  Description of Artificial Sequence: Synthetic oligonucleotide
gagcaguuauuuacuuuuc

SEQ ID NO: 2635894 - RNA, 19 nt, Artificial Sequence
  Description of Artificial Sequence: Synthetic oligonucleotide
gacauugcauggugacuaa

SEQ ID NO: 2635895 - RNA, 19 nt, Artificial Sequence
  Description of Artificial Sequence: Synthetic oligonucleotide
cuaaagagcugaggaauaa

SEQ ID NO: 2635896 - RNA, 19 nt, Artificial Sequence
  Description of Artificial Sequence: Synthetic oligonucleotide
ggaaaagaauagccugguc

SEQ ID NO: 2635897 - RNA, 19 nt, Artificial Sequence
  Description of Artificial Sequence: Synthetic oligonucleotide
ggaaagguuuauacucuac

SEQ ID NO: 2635898 - RNA, 19 nt, Artificial Sequence
  Description of Artificial Sequence: Synthetic oligonucleotide
agucuaacucacagcauuu

SEQ ID NO: 2635899 - RNA, 19 nt, Artificial Sequence
  Description of Artificial Sequence: Synthetic oligonucleotide
cggaaaugaagccggagug

SEQ ID NO: 2635900 - RNA, 19 nt, Artificial Sequence
  Description of Artificial Sequence: Synthetic oligonucleotide
gaccaucuacacaaggccu

SEQ ID NO: 2635901 - RNA, 19 nt, Artificial Sequence
  Description of Artificial Sequence: Synthetic oligonucleotide
ggacccugcggaaaugaag

SEQ ID NO: 2635902 - RNA, 19 nt, Artificial Sequence
  Description of Artificial Sequence: Synthetic oligonucleotide
gcaacugagcgcagugacg

SEQ ID NO: 2635903 - RNA, 19 nt, Artificial Sequence
  Description of Artificial Sequence: Synthetic oligonucleotide
augaauugcuugacaucca

SEQ ID NO: 2635904 - RNA, 19 nt, Artificial Sequence
  Description of Artificial Sequence: Synthetic oligonucleotide
auagucuaacucacagcau

SEQ ID NO: 2635905 - RNA, 19 nt, Artificial Sequence
  Description of Artificial Sequence: Synthetic oligonucleotide
gagagcaguuauuuacuuu

SEQ ID NO: 2635906 - RNA, 19 nt, Artificial Sequence
  Description of Artificial Sequence: Synthetic oligonucleotide
auuggagagagcaguuauu

SEQ ID NO: 2635907 - RNA, 19 nt, Artificial Sequence
  Description of Artificial Sequence: Synthetic oligonucleotide
guauuacagucacggauau

SEQ ID NO: 2635908 - RNA, 19 nt, Artificial Sequence
  Description of Artificial Sequence: Synthetic oligonucleotide
cuacacaaggccucuuagu

SEQ ID NO: 2635909 - RNA, 19 nt, Artificial Sequence
  Description of Artificial Sequence: Synthetic oligonucleotide
guauaaagauaaagcgccu

SEQ ID NO: 2635910 - RNA, 19 nt, Artificial Sequence
  Description of Artificial Sequence: Synthetic oligonucleotide
gugaacacuagaaguuuua

SEQ ID NO: 2635911 - RNA, 19 nt, Artificial Sequence
  Description of Artificial Sequence: Synthetic oligonucleotide
auaggacccugcggaaaug

SEQ ID NO: 2635912 - RNA, 19 nt, Artificial Sequence
  Description of Artificial Sequence: Synthetic oligonucleotide
ugaugcuggugaccaucua

SEQ ID NO: 2635913 - RNA, 19 nt, Artificial Sequence
  Description of Artificial Sequence: Synthetic oligonucleotide
ccucuuagugacgucaauc

SEQ ID NO: 2635914 - RNA, 19 nt, Artificial Sequence
  Description of Artificial Sequence: Synthetic oligonucleotide
caaucuccauggcacugga

SEQ ID NO: 2635915 - RNA, 19 nt, Artificial Sequence
  Description of Artificial Sequence: Synthetic oligonucleotide
uaucucuauuagugcuauu

SEQ ID NO: 2635916 - RNA, 19 nt, Artificial Sequence
  Description of Artificial Sequence: Synthetic oligonucleotide
acucuacaacagugaugcu

SEQ ID NO: 2635917 - RNA, 19 nt, Artificial Sequence
  Description of Artificial Sequence: Synthetic oligonucleotide
caggcauggggaaagguuu

SEQ ID NO: 2635918 - RNA, 19 nt, Artificial Sequence
  Description of Artificial Sequence: Synthetic oligonucleotide
gugguaagagcgguguaua

SEQ ID NO: 2635919 - RNA, 19 nt, Artificial Sequence
  Description of Artificial Sequence: Synthetic oligonucleotide
acauugcauggugacuaaa

SEQ ID NO: 2635920 - RNA, 19 nt, Artificial Sequence
  Description of Artificial Sequence: Synthetic oligonucleotide
gaauagccuggucccucaa

SEQ ID NO: 2635921 - RNA, 19 nt, Artificial Sequence
  Description of Artificial Sequence: Synthetic oligonucleotide
auuggagguaggaguuuau

SEQ ID NO: 2635922 - RNA, 19 nt, Artificial Sequence
  Description of Artificial Sequence: Synthetic oligonucleotide
ggauggauuuaccaaugau

SEQ ID NO: 2635923 - RNA, 19 nt, Artificial Sequence
  Description of Artificial Sequence: Synthetic oligonucleotide
cacuuacagcaaaacauuu

SEQ ID NO: 2635924 - RNA, 19 nt, Artificial Sequence
  Description of Artificial Sequence: Synthetic oligonucleotide
gggaaagguuuauacucua

SEQ ID NO: 2635925 - RNA, 19 nt, Artificial Sequence
  Description of Artificial Sequence: Synthetic oligonucleotide
gcauggugacuaaagagcu

SEQ ID NO: 2635926 - RNA, 19 nt, Artificial Sequence
  Description of Artificial Sequence: Synthetic oligonucleotide
gucuaacucacagcauuua

SEQ ID NO: 2635927 - RNA, 19 nt, Artificial Sequence
  Description of Artificial Sequence: Synthetic oligonucleotide
gccauuaauuggagagagc

SEQ ID NO: 2635928 - RNA, 19 nt, Artificial Sequence
  Description of Artificial Sequence: Synthetic oligonucleotide
agcgguguauaaagauaaa

SEQ ID NO: 2635929 - RNA, 19 nt, Artificial Sequence
  Description of Artificial Sequence: Synthetic oligonucleotide
gggucacaaucuccauggc

SEQ ID NO: 2635930 - RNA, 19 nt, Artificial Sequence
  Description of Artificial Sequence: Synthetic oligonucleotide
gggccauuaauuggagaga

SEQ ID NO: 2635931 - RNA, 19 nt, Artificial Sequence
  Description of Artificial Sequence: Synthetic oligonucleotide
ggggaaagguuuauacucu

SEQ ID NO: 2635932 - RNA, 19 nt, Artificial Sequence
  Description of Artificial Sequence: Synthetic oligonucleotide
cagcaacugagcgcaguga

SEQ ID NO: 2635933 - RNA, 19 nt, Artificial Sequence
  Description of Artificial Sequence: Synthetic oligonucleotide
cagcauuuacaagucacuu

SEQ ID NO: 2635934 - RNA, 19 nt, Artificial Sequence
  Description of Artificial Sequence: Synthetic oligonucleotide
aggcauggggaaagguuua

SEQ ID NO: 2635935 - RNA, 19 nt, Artificial Sequence
  Description of Artificial Sequence: Synthetic oligonucleotide
cugcggaaaugaagccgga

SEQ ID NO: 2635936 - RNA, 19 nt, Artificial Sequence
  Description of Artificial Sequence: Synthetic oligonucleotide
agguuacauuggauggauu

SEQ ID NO: 2635937 - RNA, 19 nt, Artificial Sequence
  Description of Artificial Sequence: Synthetic oligonucleotide
gccggaguggaagccagca

SEQ ID NO: 2635938 - RNA, 19 nt, Artificial Sequence
  Description of Artificial Sequence: Synthetic oligonucleotide
cggauauaugaacacacau

SEQ ID NO: 2635939 - RNA, 19 nt, Artificial Sequence
  Description of Artificial Sequence: Synthetic oligonucleotide
ccaguuucugcuguguggu

SEQ ID NO: 2635940 - RNA, 19 nt, Artificial Sequence
  Description of Artificial Sequence: Synthetic oligonucleotide
caguuucugcuguguggua

SEQ ID NO: 2635941 - RNA, 19 nt, Artificial Sequence
  Description of Artificial Sequence: Synthetic oligonucleotide
cuacaacagugaugcuggu

SEQ ID NO: 2635942 - RNA, 19 nt, Artificial Sequence
  Description of Artificial Sequence: Synthetic oligonucleotide
cuccauggcacuggagaau

SEQ ID NO: 2635943 - RNA, 19 nt, Artificial Sequence
  Description of Artificial Sequence: Synthetic oligonucleotide
ggccucuuagugacgucaa

SEQ ID NO: 2635944 - RNA, 19 nt, Artificial Sequence
  Description of Artificial Sequence: Synthetic oligonucleotide
gcgcagugacgccggccag

SEQ ID NO: 2635945 - RNA, 19 nt, Artificial Sequence
  Description of Artificial Sequence: Synthetic oligonucleotide
gcauggggaaagguuuaua

SEQ ID NO: 2635946 - RNA, 19 nt, Artificial Sequence
  Description of Artificial Sequence: Synthetic oligonucleotide
caauuggagguaggaguuu

SEQ ID NO: 2635947 - RNA, 19 nt, Artificial Sequence
  Description of Artificial Sequence: Synthetic oligonucleotide
cgucaaucaauuggaggua

SEQ ID NO: 2635948 - RNA, 19 nt, Artificial Sequence
  Description of Artificial Sequence: Synthetic oligonucleotide
ccaucuacacaaggccucu

SEQ ID NO: 2635949 - RNA, 19 nt, Artificial Sequence
  Description of Artificial Sequence: Synthetic oligonucleotide
cagugaugcuggugaccau

SEQ ID NO: 2635950 - RNA, 19 nt, Artificial Sequence
  Description of Artificial Sequence: Synthetic oligonucleotide
ccggaguggaagccagcaa

SEQ ID NO: 2635951 - RNA, 19 nt, Artificial Sequence
  Description of Artificial Sequence: Synthetic oligonucleotide
gccucuuagugacgucaau

SEQ ID NO: 2635952 - RNA, 19 nt, Artificial Sequence
  Description of Artificial Sequence: Synthetic oligonucleotide
caucuacacaaggccucuu

SEQ ID NO: 2635953 - RNA, 19 nt, Artificial Sequence
  Description of Artificial Sequence: Synthetic oligonucleotide
gcagugacgccggccaguu

SEQ ID NO: 2635954 - RNA, 19 nt, Artificial Sequence
  Description of Artificial Sequence: Synthetic oligonucleotide
cgccggccaguuucugcug

SEQ ID NO: 2635955 - RNA, 19 nt, Artificial Sequence
  Description of Artificial Sequence: Synthetic oligonucleotide
cagugacgccggccaguuu

SEQ ID NO: 2635956 - RNA, 19 nt, Artificial Sequence
  Description of Artificial Sequence: Synthetic oligonucleotide
cccuaguaucaaggauaau

SEQ ID NO: 2635957 - RNA, 19 nt, Artificial Sequence
  Description of Artificial Sequence: Synthetic oligonucleotide
ugcaacuuuacucugacca

SEQ ID NO: 2635958 - RNA, 19 nt, Artificial Sequence
  Description of Artificial Sequence: Synthetic oligonucleotide
agcgguaucgaauaagggc

SEQ ID NO: 2635959 - RNA, 19 nt, Artificial Sequence
  Description of Artificial Sequence: Synthetic oligonucleotide
cuacuaaucuucuugaagc

SEQ ID NO: 2635960 - RNA, 19 nt, Artificial Sequence
  Description of Artificial Sequence: Synthetic oligonucleotide
uauuucuuaagcaggaucu

SEQ ID NO: 2635961 - RNA, 19 nt, Artificial Sequence
  Description of Artificial Sequence: Synthetic oligonucleotide
augagguuauuucuuaagc

SEQ ID NO: 2635962 - RNA, 19 nt, Artificial Sequence
  Description of Artificial Sequence: Synthetic oligonucleotide
ugaggcguuggcaagauag

SEQ ID NO: 2635963 - RNA, 19 nt, Artificial Sequence
  Description of Artificial Sequence: Synthetic oligonucleotide
uccucuagagaucuggccg

SEQ ID NO: 2635964 - RNA, 19 nt, Artificial Sequence
  Description of Artificial Sequence: Synthetic oligonucleotide
caaagcagaggcuacaggg

SEQ ID NO: 2635965 - RNA, 19 nt, Artificial Sequence
  Description of Artificial Sequence: Synthetic oligonucleotide
uccauguuuacauaggaga

SEQ ID NO: 2635966 - RNA, 19 nt, Artificial Sequence
  Description of Artificial Sequence: Synthetic oligonucleotide
gagguuauuucuuaagcag

SEQ ID NO: 2635967 - RNA, 19 nt, Artificial Sequence
  Description of Artificial Sequence: Synthetic oligonucleotide
auguuuacauaggagaagc

SEQ ID NO: 2635968 - RNA, 19 nt, Artificial Sequence
  Description of Artificial Sequence: Synthetic oligonucleotide
ucgaauaagggccugggga

SEQ ID NO: 2635969 - RNA, 19 nt, Artificial Sequence
  Description of Artificial Sequence: Synthetic oligonucleotide
ucgucucacacaaagcccg

SEQ ID NO: 2635970 - RNA, 19 nt, Artificial Sequence
  Description of Artificial Sequence: Synthetic oligonucleotide
uguggcuucagccuugacc

SEQ ID NO: 2635971 - RNA, 19 nt, Artificial Sequence
  Description of Artificial Sequence: Synthetic oligonucleotide
uuuacucugaccagccucc

SEQ ID NO: 2635972 - RNA, 19 nt, Artificial Sequence
  Description of Artificial Sequence: Synthetic oligonucleotide
auagggaauggccuggacg

SEQ ID NO: 2635973 - RNA, 19 nt, Artificial Sequence
  Description of Artificial Sequence: Synthetic oligonucleotide
uacuaaucuucuugaagcg

SEQ ID NO: 2635974 - RNA, 19 nt, Artificial Sequence
  Description of Artificial Sequence: Synthetic oligonucleotide
gaucugggacuucagacgg

SEQ ID NO: 2635975 - RNA, 19 nt, Artificial Sequence
  Description of Artificial Sequence: Synthetic oligonucleotide
ugagguuauuucuuaagca

SEQ ID NO: 2635976 - RNA, 19 nt, Artificial Sequence
  Description of Artificial Sequence: Synthetic oligonucleotide
ugcauucuuacccuacuag

SEQ ID NO: 2635977 - RNA, 19 nt, Artificial Sequence
  Description of Artificial Sequence: Synthetic oligonucleotide
agggcagcaguucaaaggg

SEQ ID NO: 2635978 - RNA, 19 nt, Artificial Sequence
  Description of Artificial Sequence: Synthetic oligonucleotide
uucuuacccuacuagaagc

SEQ ID NO: 2635979 - RNA, 19 nt, Artificial Sequence
  Description of Artificial Sequence: Synthetic oligonucleotide
guuuacauaggagaagcgg

SEQ ID NO: 2635980 - RNA, 19 nt, Artificial Sequence
  Description of Artificial Sequence: Synthetic oligonucleotide
ucuucaugagguuauuucu

SEQ ID NO: 2635981 - RNA, 19 nt, Artificial Sequence
  Description of Artificial Sequence: Synthetic oligonucleotide
gaagcgguaucgaauaagg

SEQ ID NO: 2635982 - RNA, 19 nt, Artificial Sequence
  Description of Artificial Sequence: Synthetic oligonucleotide
gggaguaugaggcagggcg

SEQ ID NO: 2635983 - RNA, 19 nt, Artificial Sequence
  Description of Artificial Sequence: Synthetic oligonucleotide
uuaagcaggaucugggacu

SEQ ID NO: 2635984 - RNA, 19 nt, Artificial Sequence
  Description of Artificial Sequence: Synthetic oligonucleotide
aacuuuacucugaccagcc

SEQ ID NO: 2635985 - RNA, 19 nt, Artificial Sequence
  Description of Artificial Sequence: Synthetic oligonucleotide
aauaagggccuggggagcc

SEQ ID NO: 2635986 - RNA, 19 nt, Artificial Sequence
  Description of Artificial Sequence: Synthetic oligonucleotide
uguuuacauaggagaagcg

SEQ ID NO: 2635987 - RNA, 19 nt, Artificial Sequence
  Description of Artificial Sequence: Synthetic oligonucleotide
uuucuuaagcaggaucugg

SEQ ID NO: 2635988 - RNA, 19 nt, Artificial Sequence
  Description of Artificial Sequence: Synthetic oligonucleotide
ucuugaagcgauuggcugc

SEQ ID NO: 2635989 - RNA, 19 nt, Artificial Sequence
  Description of Artificial Sequence: Synthetic oligonucleotide
aucuguugggaguaugagg

SEQ ID NO: 2635990 - RNA, 19 nt, Artificial Sequence
  Description of Artificial Sequence: Synthetic oligonucleotide
gagagaauagggaauggcc

SEQ ID NO: 2635991 - RNA, 19 nt, Artificial Sequence
  Description of Artificial Sequence: Synthetic oligonucleotide
ugcgcugacagcaauguaa

SEQ ID NO: 2635992 - RNA, 19 nt, Artificial Sequence
  Description of Artificial Sequence: Synthetic oligonucleotide
cuggucugcauucuuaccc

SEQ ID NO: 2635993 - RNA, 19 nt, Artificial Sequence
  Description of Artificial Sequence: Synthetic oligonucleotide
uagggaauggccuggacgu

SEQ ID NO: 2635994 - RNA, 19 nt, Artificial Sequence
  Description of Artificial Sequence: Synthetic oligonucleotide
uacuagaagcuucccaccc

SEQ ID NO: 2635995 - RNA, 19 nt, Artificial Sequence
  Description of Artificial Sequence: Synthetic oligonucleotide
cauaggagaagcgguaucg

SEQ ID NO: 2635996 - RNA, 19 nt, Artificial Sequence
  Description of Artificial Sequence: Synthetic oligonucleotide
gagaauagggaauggccug

SEQ ID NO: 2635997 - RNA, 19 nt, Artificial Sequence
  Description of Artificial Sequence: Synthetic oligonucleotide
uggcaagauagauuccagg

SEQ ID NO: 2635998 - RNA, 19 nt, Artificial Sequence
  Description of Artificial Sequence: Synthetic oligonucleotide
aaucuucuugaagcgauug

SEQ ID NO: 2635999 - RNA, 19 nt, Artificial Sequence
  Description of Artificial Sequence: Synthetic oligonucleotide
gaagcuagggagagaauag

SEQ ID NO: 2636000 - RNA, 19 nt, Artificial Sequence
  Description of Artificial Sequence: Synthetic oligonucleotide
guggcuucagccuugacca

SEQ ID NO: 2636001 - RNA, 19 nt, Artificial Sequence
  Description of Artificial Sequence: Synthetic oligonucleotide
acacuccauguuuacauag

SEQ ID NO: 2636002 - RNA, 19 nt, Artificial Sequence
  Description of Artificial Sequence: Synthetic oligonucleotide
ggcaagauagauuccaggc

SEQ ID NO: 2636003 - RNA, 19 nt, Artificial Sequence
  Description of Artificial Sequence: Synthetic oligonucleotide
acaaagcccgcucugucuc

SEQ ID NO: 2636004 - RNA, 19 nt, Artificial Sequence
  Description of Artificial Sequence: Synthetic oligonucleotide
agguuauuucuuaagcagg

SEQ ID NO: 2636005 - RNA, 19 nt, Artificial Sequence
  Description of Artificial Sequence: Synthetic oligonucleotide
aaccaccaccaccaccacc

SEQ ID NO: 2636006 - RNA, 19 nt, Artificial Sequence
  Description of Artificial Sequence: Synthetic oligonucleotide
cucuucaugagguuauuuc

SEQ ID NO: 2636007 - RNA, 19 nt, Artificial Sequence
  Description of Artificial Sequence: Synthetic oligonucleotide
uagauuccaggccacacuc

SEQ ID NO: 2636008 - RNA, 19 nt, Artificial Sequence
  Description of Artificial Sequence: Synthetic oligonucleotide
cuuaagcaggaucugggac

SEQ ID NO: 2636009 - RNA, 19 nt, Artificial Sequence
  Description of Artificial Sequence: Synthetic oligonucleotide
aagcuagggagagaauagg

SEQ ID NO: 2636010 - RNA, 19 nt, Artificial Sequence
  Description of Artificial Sequence: Synthetic oligonucleotide
ucuuacccuacuagaagcu

SEQ ID NO: 2636011 - RNA, 19 nt, Artificial Sequence
  Description of Artificial Sequence: Synthetic oligonucleotide
uaucgaauaagggccuggg

SEQ ID NO: 2636012 - RNA, 19 nt, Artificial Sequence
  Description of Artificial Sequence: Synthetic oligonucleotide
uuggcaagauagauuccag

SEQ ID NO: 2636013 - RNA, 19 nt, Artificial Sequence
  Description of Artificial Sequence: Synthetic oligonucleotide
agcuggucugcauucuuac

SEQ ID NO: 2636014 - RNA, 19 nt, Artificial Sequence
  Description of Artificial Sequence: Synthetic oligonucleotide
ggucgucucacacaaagcc

SEQ ID NO: 2636015 - RNA, 19 nt, Artificial Sequence
  Description of Artificial Sequence: Synthetic oligonucleotide
uacccuacuagaagcuucc

SEQ ID NO: 2636016 - RNA, 19 nt, Artificial Sequence
  Description of Artificial Sequence: Synthetic oligonucleotide
cuuuacucugaccagccuc

SEQ ID NO: 2636017 - RNA, 19 nt, Artificial Sequence
  Description of Artificial Sequence: Synthetic oligonucleotide
ugaccagccuccucuagag

SEQ ID NO: 2636018 - RNA, 19 nt, Artificial Sequence
  Description of Artificial Sequence: Synthetic oligonucleotide
uguugggaguaugaggcag

SEQ ID NO: 2636019 - RNA, 19 nt, Artificial Sequence
  Description of Artificial Sequence: Synthetic oligonucleotide
ggaucugggacuucagacg

SEQ ID NO: 2636020 - RNA, 19 nt, Artificial Sequence
  Description of Artificial Sequence: Synthetic oligonucleotide
gcuacuaaucuucuugaag

SEQ ID NO: 2636021 - RNA, 19 nt, Artificial Sequence
  Description of Artificial Sequence: Synthetic oligonucleotide
uggaggucgucucacacaa

SEQ ID NO: 2636022 - RNA, 19 nt, Artificial Sequence
  Description of Artificial Sequence: Synthetic oligonucleotide
aagauagauuccaggccac

SEQ ID NO: 2636023 - RNA, 19 nt, Artificial Sequence
  Description of Artificial Sequence: Synthetic oligonucleotide
uuacccuacuagaagcuuc

SEQ ID NO: 2636024 - RNA, 19 nt, Artificial Sequence
  Description of Artificial Sequence: Synthetic oligonucleotide
accacugugcagcugcguc

SEQ ID NO: 2636025 - RNA, 19 nt, Artificial Sequence
  Description of Artificial Sequence: Synthetic oligonucleotide
uuacauaggagaagcggua

SEQ ID NO: 2636026 - RNA, 19 nt, Artificial Sequence
  Description of Artificial Sequence: Synthetic oligonucleotide
acauaggagaagcgguauc

SEQ ID NO: 2636027 - RNA, 19 nt, Artificial Sequence
  Description of Artificial Sequence: Synthetic oligonucleotide
auagauuccaggccacacu

SEQ ID NO: 2636028 - RNA, 19 nt, Artificial Sequence
  Description of Artificial Sequence: Synthetic oligonucleotide
ucugcauucuuacccuacu

SEQ ID NO: 2636029 - RNA, 19 nt, Artificial Sequence
  Description of Artificial Sequence: Synthetic oligonucleotide
agaauagggaauggccugg

SEQ ID NO: 2636030 - RNA, 19 nt, Artificial Sequence
  Description of Artificial Sequence: Synthetic oligonucleotide
acuccauguuuacauagga

SEQ ID NO: 2636031 - RNA, 19 nt, Artificial Sequence
  Description of Artificial Sequence: Synthetic oligonucleotide
ugcguccaggcuuagcugc

SEQ ID NO: 2636032 - RNA, 19 nt, Artificial Sequence
  Description of Artificial Sequence: Synthetic oligonucleotide
aucgaauaagggccugggg

SEQ ID NO: 2636033 - RNA, 19 nt, Artificial Sequence
  Description of Artificial Sequence: Synthetic oligonucleotide
agaagcuucccacccacca

SEQ ID NO: 2636034 - RNA, 19 nt, Artificial Sequence
  Description of Artificial Sequence: Synthetic oligonucleotide
cuccauguuuacauaggag

SEQ ID NO: 2636035 - RNA, 19 nt, Artificial Sequence
  Description of Artificial Sequence: Synthetic oligonucleotide
cauguuuacauaggagaag

SEQ ID NO: 2636036 - RNA, 19 nt, Artificial Sequence
  Description of Artificial Sequence: Synthetic oligonucleotide
gaagcgauuggcugcgcug

SEQ ID NO: 2636037 - RNA, 19 nt, Artificial Sequence
  Description of Artificial Sequence: Synthetic oligonucleotide
cacuccauguuuacauagg

SEQ ID NO: 2636038 - RNA, 19 nt, Artificial Sequence
  Description of Artificial Sequence: Synthetic oligonucleotide
aggcuuagcugcucugggc

SEQ ID NO: 2636039 - RNA, 19 nt, Artificial Sequence
  Description of Artificial Sequence: Synthetic oligonucleotide
uuccaggccacacuccaug

SEQ ID NO: 2636040 - RNA, 19 nt, Artificial Sequence
  Description of Artificial Sequence: Synthetic oligonucleotide
auuggcugcgcugacagca

SEQ ID NO: 2636041 - RNA, 19 nt, Artificial Sequence
  Description of Artificial Sequence: Synthetic oligonucleotide
ugucuccccuagcagcugg

SEQ ID NO: 2636042 - RNA, 19 nt, Artificial Sequence
  Description of Artificial Sequence: Synthetic oligonucleotide
cuugaagcgauuggcugcg

SEQ ID NO: 2636043 - RNA, 19 nt, Artificial Sequence
  Description of Artificial Sequence: Synthetic oligonucleotide
agagccaucagugccccgg

SEQ ID NO: 2636044 - RNA, 19 nt, Artificial Sequence
  Description of Artificial Sequence: Synthetic oligonucleotide
aucagugccccggagcuac

SEQ ID NO: 2636045 - RNA, 19 nt, Artificial Sequence
  Description of Artificial Sequence: Synthetic oligonucleotide
aagcgguaucgaauaaggg

SEQ ID NO: 2636046 - RNA, 19 nt, Artificial Sequence
  Description of Artificial Sequence: Synthetic oligonucleotide
agcuagggagagaauaggg

SEQ ID NO: 2636047 - RNA, 19 nt, Artificial Sequence
  Description of Artificial Sequence: Synthetic oligonucleotide
gagcuacuaaucuucuuga

SEQ ID NO: 2636048 - RNA, 19 nt, Artificial Sequence
  Description of Artificial Sequence: Synthetic oligonucleotide
agaagcgguaucgaauaag

SEQ ID NO: 2636049 - RNA, 19 nt, Artificial Sequence
  Description of Artificial Sequence: Synthetic oligonucleotide
gauagauuccaggccacac

SEQ ID NO: 2636050 - RNA, 19 nt, Artificial Sequence
  Description of Artificial Sequence: Synthetic oligonucleotide
ugggacuucagacggcggu

SEQ ID NO: 2636051 - RNA, 19 nt, Artificial Sequence
  Description of Artificial Sequence: Synthetic oligonucleotide
ucacacaaagcccgcucug

SEQ ID NO: 2636052 - RNA, 19 nt, Artificial Sequence
  Description of Artificial Sequence: Synthetic oligonucleotide
cuagaagcuucccacccac

SEQ ID NO: 2636053 - RNA, 19 nt, Artificial Sequence
  Description of Artificial Sequence: Synthetic oligonucleotide
guccuuggagucugggugg

SEQ ID NO: 2636054 - RNA, 19 nt, Artificial Sequence
  Description of Artificial Sequence: Synthetic oligonucleotide
cauucuuacccuacuagaa

SEQ ID NO: 2636055 - RNA, 19 nt, Artificial Sequence
  Description of Artificial Sequence: Synthetic oligonucleotide
guuggcaagauagauucca

SEQ ID NO: 2636056 - RNA, 19 nt, Artificial Sequence
  Description of Artificial Sequence: Synthetic oligonucleotide
uaugaggcagggcguggag

SEQ ID NO: 2636057 - RNA, 19 nt, Artificial Sequence
  Description of Artificial Sequence: Synthetic oligonucleotide
gucuggguggggcugaggc

SEQ ID NO: 2636058 - RNA, 19 nt, Artificial Sequence
  Description of Artificial Sequence: Synthetic oligonucleotide
gcguuggcaagauagauuc

SEQ ID NO: 2636059 - RNA, 19 nt, Artificial Sequence
  Description of Artificial Sequence: Synthetic oligonucleotide
gcgguaucgaauaagggcc

SEQ ID NO: 2636060 - RNA, 19 nt, Artificial Sequence
  Description of Artificial Sequence: Synthetic oligonucleotide
ucucacacaaagcccgcuc

SEQ ID NO: 2636061 - RNA, 19 nt, Artificial Sequence
  Description of Artificial Sequence: Synthetic oligonucleotide
agggagagaauagggaaug

SEQ ID NO: 2636062 - RNA, 19 nt, Artificial Sequence
  Description of Artificial Sequence: Synthetic oligonucleotide
aauggccuggacguccuug

SEQ ID NO: 2636063 - RNA, 19 nt, Artificial Sequence
  Description of Artificial Sequence: Synthetic oligonucleotide
acuaaucuucuugaagcga

SEQ ID NO: 2636064 - RNA, 19 nt, Artificial Sequence
  Description of Artificial Sequence: Synthetic oligonucleotide
uugggaguaugaggcaggg

SEQ ID NO: 2636065 - RNA, 19 nt, Artificial Sequence
  Description of Artificial Sequence: Synthetic oligonucleotide
acuagaagcuucccaccca

SEQ ID NO: 2636066 - RNA, 19 nt, Artificial Sequence
  Description of Artificial Sequence: Synthetic oligonucleotide
uggugcaacuuuacucuga

SEQ ID NO: 2636067 - RNA, 19 nt, Artificial Sequence
  Description of Artificial Sequence: Synthetic oligonucleotide
uggccuucugagcugugug

SEQ ID NO: 2636068 - RNA, 19 nt, Artificial Sequence
  Description of Artificial Sequence: Synthetic oligonucleotide
ugaagcgauuggcugcgcu

SEQ ID NO: 2636069 - RNA, 19 nt, Artificial Sequence
  Description of Artificial Sequence: Synthetic oligonucleotide
auuucuuaagcaggaucug

SEQ ID NO: 2636070 - RNA, 19 nt, Artificial Sequence
  Description of Artificial Sequence: Synthetic oligonucleotide
accaccaccaccaccacca

SEQ ID NO: 2636071 - RNA, 19 nt, Artificial Sequence
  Description of Artificial Sequence: Synthetic oligonucleotide
guaucgaauaagggccugg

SEQ ID NO: 2636072 - RNA, 19 nt, Artificial Sequence
  Description of Artificial Sequence: Synthetic oligonucleotide
uaggagaagcgguaucgaa

SEQ ID NO: 2636073 - RNA, 19 nt, Artificial Sequence
  Description of Artificial Sequence: Synthetic oligonucleotide
cuuggagucuggguggggc

SEQ ID NO: 2636074 - RNA, 19 nt, Artificial Sequence
  Description of Artificial Sequence: Synthetic oligonucleotide
guugggaguaugaggcagg

SEQ ID NO: 2636075 - RNA, 19 nt, Artificial Sequence
  Description of Artificial Sequence: Synthetic oligonucleotide
aagcgauuggcugcgcuga

SEQ ID NO: 2636076 - RNA, 19 nt, Artificial Sequence
  Description of Artificial Sequence: Synthetic oligonucleotide
gaauaagggccuggggagc

SEQ ID NO: 2636077 - RNA, 19 nt, Artificial Sequence
  Description of Artificial Sequence: Synthetic oligonucleotide
ugacagcaauguaaguuuu

SEQ ID NO: 2636078 - RNA, 19 nt, Artificial Sequence
  Description of Artificial Sequence: Synthetic oligonucleotide
gcaacuuuacucugaccag

SEQ ID NO: 2636079 - RNA, 19 nt, Artificial Sequence
  Description of Artificial Sequence: Synthetic oligonucleotide
cuucucuggccuucugagc

SEQ ID NO: 2636080 - RNA, 19 nt, Artificial Sequence
  Description of Artificial Sequence: Synthetic oligonucleotide
cuagagaucuggccggcuc

SEQ ID NO: 2636081 - RNA, 19 nt, Artificial Sequence
  Description of Artificial Sequence: Synthetic oligonucleotide
ugaccacugugcagcugcg

SEQ ID NO: 2636082 - RNA, 19 nt, Artificial Sequence
  Description of Artificial Sequence: Synthetic oligonucleotide
aggucgucucacacaaagc

SEQ ID NO: 2636083 - RNA, 19 nt, Artificial Sequence
  Description of Artificial Sequence: Synthetic oligonucleotide
caggcuuagcugcucuggg

SEQ ID NO: 2636084 - RNA, 19 nt, Artificial Sequence
  Description of Artificial Sequence: Synthetic oligonucleotide
gucgucucacacaaagccc

SEQ ID NO: 2636085 - RNA, 19 nt, Artificial Sequence
  Description of Artificial Sequence: Synthetic oligonucleotide
ccacccaccacccagcagc

SEQ ID NO: 2636086 - RNA, 19 nt, Artificial Sequence
  Description of Artificial Sequence: Synthetic oligonucleotide
cuucagacggcgguugcag

SEQ ID NO: 2636087 - RNA, 19 nt, Artificial Sequence
  Description of Artificial Sequence: Synthetic oligonucleotide
uagaagcuucccacccacc

SEQ ID NO: 2636088 - RNA, 19 nt, Artificial Sequence
  Description of Artificial Sequence: Synthetic oligonucleotide
uacauaggagaagcgguau

SEQ ID NO: 2636089 - RNA, 19 nt, Artificial Sequence
  Description of Artificial Sequence: Synthetic oligonucleotide
cuaaucuucuugaagcgau

SEQ ID NO: 2636090 - RNA, 19 nt, Artificial Sequence
  Description of Artificial Sequence: Synthetic oligonucleotide
gguuauuucuuaagcagga

SEQ ID NO: 2636091 - RNA, 19 nt, Artificial Sequence
  Description of Artificial Sequence: Synthetic oligonucleotide
agggcguggaggucgucuc

SEQ ID NO: 2636092 - RNA, 19 nt, Artificial Sequence
  Description of Artificial Sequence: Synthetic oligonucleotide
gaggcuacagggcagcagu

SEQ ID NO: 2636093 - RNA, 19 nt, Artificial Sequence
  Description of Artificial Sequence: Synthetic oligonucleotide
aguaugaggcagggcgugg

SEQ ID NO: 2636094 - RNA, 19 nt, Artificial Sequence
  Description of Artificial Sequence: Synthetic oligonucleotide
accaccaccaccaccacau

SEQ ID NO: 2636095 - RNA, 19 nt, Artificial Sequence
  Description of Artificial Sequence: Synthetic oligonucleotide
uggacguccuuggagucug

SEQ ID NO: 2636096 - RNA, 19 nt, Artificial Sequence
  Description of Artificial Sequence: Synthetic oligonucleotide
uggggcaaagcagaggcua

SEQ ID NO: 2636097 - RNA, 19 nt, Artificial Sequence
  Description of Artificial Sequence: Synthetic oligonucleotide
ggugcaacuuuacucugac

SEQ ID NO: 2636098 - RNA, 19 nt, Artificial Sequence
  Description of Artificial Sequence: Synthetic oligonucleotide
gaguaugaggcagggcgug

SEQ ID NO: 2636099 - RNA, 19 nt, Artificial Sequence
  Description of Artificial Sequence: Synthetic oligonucleotide
acuuuacucugaccagccu

SEQ ID NO: 2636100 - RNA, 19 nt, Artificial Sequence
  Description of Artificial Sequence: Synthetic oligonucleotide
agcuacuaaucuucuugaa

SEQ ID NO: 2636101 - RNA, 19 nt, Artificial Sequence
  Description of Artificial Sequence: Synthetic oligonucleotide
gcauucuuacccuacuaga

SEQ ID NO: 2636102 - RNA, 19 nt, Artificial Sequence
  Description of Artificial Sequence: Synthetic oligonucleotide
gacuucagacggcgguugc

SEQ ID NO: 2636103 - RNA, 19 nt, Artificial Sequence
  Description of Artificial Sequence: Synthetic oligonucleotide
ccucuagagaucuggccgg

SEQ ID NO: 2636104 - RNA, 19 nt, Artificial Sequence
  Description of Artificial Sequence: Synthetic oligonucleotide
uuggagucuggguggggcu

SEQ ID NO: 2636105 - RNA, 19 nt, Artificial Sequence
  Description of Artificial Sequence: Synthetic oligonucleotide
agcaggaucugggacuuca

SEQ ID NO: 2636106 - RNA, 19 nt, Artificial Sequence
  Description of Artificial Sequence: Synthetic oligonucleotide
cgaauaagggccuggggag

SEQ ID NO: 2636107 - RNA, 19 nt, Artificial Sequence
  Description of Artificial Sequence: Synthetic oligonucleotide
agcgauuggcugcgcugac

SEQ ID NO: 2636108 - RNA, 19 nt, Artificial Sequence
  Description of Artificial Sequence: Synthetic oligonucleotide
uccuuggagucuggguggg

SEQ ID NO: 2636109 - RNA, 19 nt, Artificial Sequence
  Description of Artificial Sequence: Synthetic oligonucleotide
cuggccggcucuucucugg

SEQ ID NO: 2636110 - RNA, 19 nt, Artificial Sequence
  Description of Artificial Sequence: Synthetic oligonucleotide
ggagaagcgguaucgaaua

SEQ ID NO: 2636111 - RNA, 19 nt, Artificial Sequence
  Description of Artificial Sequence: Synthetic oligonucleotide
aggagaagcgguaucgaau

SEQ ID NO: 2636112 - RNA, 19 nt, Artificial Sequence
  Description of Artificial Sequence: Synthetic oligonucleotide
cuggugcaacuuuacucug

SEQ ID NO: 2636113 - RNA, 19 nt, Artificial Sequence
  Description of Artificial Sequence: Synthetic oligonucleotide
gccuugaccacugugcagc

SEQ ID NO: 2636114 - RNA, 19 nt, Artificial Sequence
  Description of Artificial Sequence: Synthetic oligonucleotide
caccaccacaucuguuggg

SEQ ID NO: 2636115 - RNA, 19 nt, Artificial Sequence
  Description of Artificial Sequence: Synthetic oligonucleotide
auaagggccuggggagccc

SEQ ID NO: 2636116 - RNA, 19 nt, Artificial Sequence
  Description of Artificial Sequence: Synthetic oligonucleotide
gauuggcugcgcugacagc

SEQ ID NO: 2636117 - RNA, 19 nt, Artificial Sequence
  Description of Artificial Sequence: Synthetic oligonucleotide
uucugagcuguguggcuuc

SEQ ID NO: 2636118 - RNA, 19 nt, Artificial Sequence
  Description of Artificial Sequence: Synthetic oligonucleotide
ugccccggagcuacuaauc

SEQ ID NO: 2636119 - RNA, 19 nt, Artificial Sequence
  Description of Artificial Sequence: Synthetic oligonucleotide
acguccuuggagucugggu

SEQ ID NO: 2636120 - RNA, 19 nt, Artificial Sequence
  Description of Artificial Sequence: Synthetic oligonucleotide
caucccacuccaggcaagg

SEQ ID NO: 2636121 - RNA, 19 nt, Artificial Sequence
  Description of Artificial Sequence: Synthetic oligonucleotide
gacguccuuggagucuggg

SEQ ID NO: 2636122 - RNA, 19 nt, Artificial Sequence
  Description of Artificial Sequence: Synthetic oligonucleotide
cugacagcaauguaaguuu

SEQ ID NO: 2636123 - RNA, 19 nt, Artificial Sequence
  Description of Artificial Sequence: Synthetic oligonucleotide
ccagcagcccaccugcugg

SEQ ID NO: 2636124 - RNA, 19 nt, Artificial Sequence
  Description of Artificial Sequence: Synthetic oligonucleotide
agaggcuacagggcagcag

SEQ ID NO: 2636125 - RNA, 19 nt, Artificial Sequence
  Description of Artificial Sequence: Synthetic oligonucleotide
ggaagcuagggagagaaua

SEQ ID NO: 2636126 - RNA, 19 nt, Artificial Sequence
  Description of Artificial Sequence: Synthetic oligonucleotide
guggaggucgucucacaca

SEQ ID NO: 2636127 - RNA, 19 nt, Artificial Sequence
  Description of Artificial Sequence: Synthetic oligonucleotide
gugcaacuuuacucugacc

SEQ ID NO: 2636128 - RNA, 19 nt, Artificial Sequence
  Description of Artificial Sequence: Synthetic oligonucleotide
acccuacuagaagcuuccc

SEQ ID NO: 2636129 - RNA, 19 nt, Artificial Sequence
  Description of Artificial Sequence: Synthetic oligonucleotide
gcuacagggcagcaguuca

SEQ ID NO: 2636130 - RNA, 19 nt, Artificial Sequence
  Description of Artificial Sequence: Synthetic oligonucleotide
cugggacuucagacggcgg

SEQ ID NO: 2636131 - RNA, 19 nt, Artificial Sequence
  Description of Artificial Sequence: Synthetic oligonucleotide
cuccaggcaagggugcccc

SEQ ID NO: 2636132 - RNA, 19 nt, Artificial Sequence
  Description of Artificial Sequence: Synthetic oligonucleotide
agguggggcaaagcagagg

SEQ ID NO: 2636133 - RNA, 19 nt, Artificial Sequence
  Description of Artificial Sequence: Synthetic oligonucleotide
ccauguuuacauaggagaa

SEQ ID NO: 2636134 - RNA, 19 nt, Artificial Sequence
  Description of Artificial Sequence: Synthetic oligonucleotide
uuggcugcgcugacagcaa

SEQ ID NO: 2636135 - RNA, 19 nt, Artificial Sequence
  Description of Artificial Sequence: Synthetic oligonucleotide
uacucugaccagccuccuc

SEQ ID NO: 2636136 - RNA, 19 nt, Artificial Sequence
  Description of Artificial Sequence: Synthetic oligonucleotide
cugcguccaggcuuagcug

SEQ ID NO: 2636137 - RNA, 19 nt, Artificial Sequence
  Description of Artificial Sequence: Synthetic oligonucleotide
cccggagcuacuaaucuuc

SEQ ID NO: 2636138 - RNA, 19 nt, Artificial Sequence
  Description of Artificial Sequence: Synthetic oligonucleotide
agcagaggcuacagggcag

SEQ ID NO: 2636139 - RNA, 19 nt, Artificial Sequence
  Description of Artificial Sequence: Synthetic oligonucleotide
gaauagggaauggccugga

SEQ ID NO: 2636140 - RNA, 19 nt, Artificial Sequence
  Description of Artificial Sequence: Synthetic oligonucleotide
cugaccagccuccucuaga

SEQ ID NO: 2636141 - RNA, 19 nt, Artificial Sequence
  Description of Artificial Sequence: Synthetic oligonucleotide
gagaagcgguaucgaauaa

SEQ ID NO: 2636142 - RNA, 19 nt, Artificial Sequence
  Description of Artificial Sequence: Synthetic oligonucleotide
cuguguggcuucagccuug

SEQ ID NO: 2636143 - RNA, 19 nt, Artificial Sequence
  Description of Artificial Sequence: Synthetic oligonucleotide
ucuagagaucuggccggcu

SEQ ID NO: 2636144 - RNA, 19 nt, Artificial Sequence
  Description of Artificial Sequence: Synthetic oligonucleotide
uguguggcuucagccuuga

SEQ ID NO: 2636145 - RNA, 19 nt, Artificial Sequence
  Description of Artificial Sequence: Synthetic oligonucleotide
gggagagaauagggaaugg

SEQ ID NO: 2636146 - RNA, 19 nt, Artificial Sequence
  Description of Artificial Sequence: Synthetic oligonucleotide
cucuagagaucuggccggc

SEQ ID NO: 2636147 - RNA, 19 nt, Artificial Sequence
  Description of Artificial Sequence: Synthetic oligonucleotide
cacccaccacccagcagcc

SEQ ID NO: 2636148 - RNA, 19 nt, Artificial Sequence
  Description of Artificial Sequence: Synthetic oligonucleotide
gaggcguuggcaagauaga

SEQ ID NO: 2636149 - RNA, 19 nt, Artificial Sequence
  Description of Artificial Sequence: Synthetic oligonucleotide
ggccuggacguccuuggag

SEQ ID NO: 2636150 - RNA, 19 nt, Artificial Sequence
  Description of Artificial Sequence: Synthetic oligonucleotide
ucugagcuguguggcuuca

SEQ ID NO: 2636151 - RNA, 19 nt, Artificial Sequence
  Description of Artificial Sequence: Synthetic oligonucleotide
cagccuugaccacugugca

SEQ ID NO: 2636152 - RNA, 19 nt, Artificial Sequence
  Description of Artificial Sequence: Synthetic oligonucleotide
aggcguuggcaagauagau

SEQ ID NO: 2636153 - RNA, 19 nt, Artificial Sequence
  Description of Artificial Sequence: Synthetic oligonucleotide
caccaccaccaccaccacc

SEQ ID NO: 2636154 - RNA, 19 nt, Artificial Sequence
  Description of Artificial Sequence: Synthetic oligonucleotide
agugccccggagcuacuaa

SEQ ID NO: 2636155 - RNA, 19 nt, Artificial Sequence
  Description of Artificial Sequence: Synthetic oligonucleotide
ggcgguugcagcguuuggc

SEQ ID NO: 2636156 - RNA, 19 nt, Artificial Sequence
  Description of Artificial Sequence: Synthetic oligonucleotide
uaagggccuggggagccca

SEQ ID NO: 2636157 - RNA, 19 nt, Artificial Sequence
  Description of Artificial Sequence: Synthetic oligonucleotide
ccaccaccacaucuguugg

SEQ ID NO: 2636158 - RNA, 19 nt, Artificial Sequence
  Description of Artificial Sequence: Synthetic oligonucleotide
ccuggugcaacuuuacucu

SEQ ID NO: 2636159 - RNA, 19 nt, Artificial Sequence
  Description of Artificial Sequence: Synthetic oligonucleotide
uggccuggacguccuugga

SEQ ID NO: 2636160 - RNA, 19 nt, Artificial Sequence
  Description of Artificial Sequence: Synthetic oligonucleotide
ggggaagcuagggagagaa

SEQ ID NO: 2636161 - RNA, 19 nt, Artificial Sequence
  Description of Artificial Sequence: Synthetic oligonucleotide
ucuggccuucugagcugug

SEQ ID NO: 2636162 - RNA, 19 nt, Artificial Sequence
  Description of Artificial Sequence: Synthetic oligonucleotide
uuacucugaccagccuccu

SEQ ID NO: 2636163 - RNA, 19 nt, Artificial Sequence
  Description of Artificial Sequence: Synthetic oligonucleotide
gcugcguccaggcuuagcu

SEQ ID NO: 2636164 - RNA, 19 nt, Artificial Sequence
  Description of Artificial Sequence: Synthetic oligonucleotide
acggcgguugcagcguuug

SEQ ID NO: 2636165 - RNA, 19 nt, Artificial Sequence
  Description of Artificial Sequence: Synthetic oligonucleotide
aagcaggaucugggacuuc

SEQ ID NO: 2636166 - RNA, 19 nt, Artificial Sequence
  Description of Artificial Sequence: Synthetic oligonucleotide
cucacacaaagcccgcucu

SEQ ID NO: 2636167 - RNA, 19 nt, Artificial Sequence
  Description of Artificial Sequence: Synthetic oligonucleotide
gguaucgaauaagggccug

SEQ ID NO: 2636168 - RNA, 19 nt, Artificial Sequence
  Description of Artificial Sequence: Synthetic oligonucleotide
guaugaggcagggcgugga

SEQ ID NO: 2636169 - RNA, 19 nt, Artificial Sequence
  Description of Artificial Sequence: Synthetic oligonucleotide
caagccucccggccuggug

SEQ ID NO: 2636170 - RNA, 19 nt, Artificial Sequence
  Description of Artificial Sequence: Synthetic oligonucleotide
cacacuccauguuuacaua

SEQ ID NO: 2636171 - RNA, 19 nt, Artificial Sequence
  Description of Artificial Sequence: Synthetic oligonucleotide
cacaaagcccgcucugucu

SEQ ID NO: 2636172 - RNA, 19 nt, Artificial Sequence
  Description of Artificial Sequence: Synthetic oligonucleotide
ggccuggggagcccaagcc

SEQ ID NO: 2636173 - RNA, 19 nt, Artificial Sequence
  Description of Artificial Sequence: Synthetic oligonucleotide
ggcuuagcugcucugggcu

SEQ ID NO: 2636174 - RNA, 19 nt, Artificial Sequence
  Description of Artificial Sequence: Synthetic oligonucleotide
agcagcccaccugcuggac

SEQ ID NO: 2636175 - RNA, 19 nt, Artificial Sequence
  Description of Artificial Sequence: Synthetic oligonucleotide
gagccaucagugccccgga

SEQ ID NO: 2636176 - RNA, 19 nt, Artificial Sequence
  Description of Artificial Sequence: Synthetic oligonucleotide
gcugacagcaauguaaguu

SEQ ID NO: 2636177 - RNA, 19 nt, Artificial Sequence
  Description of Artificial Sequence: Synthetic oligonucleotide
caccaccaccaccaccaac

SEQ ID NO: 2636178 - RNA, 19 nt, Artificial Sequence
  Description of Artificial Sequence: Synthetic oligonucleotide
cuacagggcagcaguucaa

SEQ ID NO: 2636179 - RNA, 19 nt, Artificial Sequence
  Description of Artificial Sequence: Synthetic oligonucleotide
uggcuucagccuugaccac

SEQ ID NO: 2636180 - RNA, 19 nt, Artificial Sequence
  Description of Artificial Sequence: Synthetic oligonucleotide
caccacaucuguugggagu

SEQ ID NO: 2636181 - RNA, 19 nt, Artificial Sequence
  Description of Artificial Sequence: Synthetic oligonucleotide
ggacuucagacggcgguug

SEQ ID NO: 2636182 - RNA, 19 nt, Artificial Sequence
  Description of Artificial Sequence: Synthetic oligonucleotide
cugcauucuuacccuacua

SEQ ID NO: 2636183 - RNA, 19 nt, Artificial Sequence
  Description of Artificial Sequence: Synthetic oligonucleotide
cacugugcagcugcgucca

SEQ ID NO: 2636184 - RNA, 19 nt, Artificial Sequence
  Description of Artificial Sequence: Synthetic oligonucleotide
uugaagcgauuggcugcgc

SEQ ID NO: 2636185 - RNA, 19 nt, Artificial Sequence
  Description of Artificial Sequence: Synthetic oligonucleotide
ccagcgccucuucaugagg

SEQ ID NO: 2636186 - RNA, 19 nt, Artificial Sequence
  Description of Artificial Sequence: Synthetic oligonucleotide
cuagcagcuggucugcauu

SEQ ID NO: 2636187 - RNA, 19 nt, Artificial Sequence
  Description of Artificial Sequence: Synthetic oligonucleotide
gggcagcaguucaaagggg

SEQ ID NO: 2636188 - RNA, 19 nt, Artificial Sequence
  Description of Artificial Sequence: Synthetic oligonucleotide
gcagaggcuacagggcagc

SEQ ID NO: 2636189 - RNA, 19 nt, Artificial Sequence
  Description of Artificial Sequence: Synthetic oligonucleotide
ucagugccccggagcuacu

SEQ ID NO: 2636190 - RNA, 19 nt, Artificial Sequence
  Description of Artificial Sequence: Synthetic oligonucleotide
caaccaccaccaccaccac

SEQ ID NO: 2636191 - RNA, 19 nt, Artificial Sequence
  Description of Artificial Sequence: Synthetic oligonucleotide
gggcugaggcguuggcaag

SEQ ID NO: 2636192 - RNA, 19 nt, Artificial Sequence
  Description of Artificial Sequence: Synthetic oligonucleotide
cagagccaucagugccccg

SEQ ID NO: 2636193 - RNA, 19 nt, Artificial Sequence
  Description of Artificial Sequence: Synthetic oligonucleotide
ccaccacaucuguugggag

SEQ ID NO: 2636194 - RNA, 19 nt, Artificial Sequence
  Description of Artificial Sequence: Synthetic oligonucleotide
cagcuggucugcauucuua

SEQ ID NO: 2636195 - RNA, 19 nt, Artificial Sequence
  Description of Artificial Sequence: Synthetic oligonucleotide
ggccacacuccauguuuac

SEQ ID NO: 2636196 - RNA, 19 nt, Artificial Sequence
  Description of Artificial Sequence: Synthetic oligonucleotide
ggggagcccaagccucccg

SEQ ID NO: 2636197 - RNA, 19 nt, Artificial Sequence
  Description of Artificial Sequence: Synthetic oligonucleotide
cugagcuguguggcuucag

SEQ ID NO: 2636198 - RNA, 19 nt, Artificial Sequence
  Description of Artificial Sequence: Synthetic oligonucleotide
cagcgccucuucaugaggu

SEQ ID NO: 2636199 - RNA, 19 nt, Artificial Sequence
  Description of Artificial Sequence: Synthetic oligonucleotide
ccagccuccucuagagauc

SEQ ID NO: 2636200 - RNA, 19 nt, Artificial Sequence
  Description of Artificial Sequence: Synthetic oligonucleotide
gguugcagcguuuggcuuu

SEQ ID NO: 2636201 - RNA, 19 nt, Artificial Sequence
  Description of Artificial Sequence: Synthetic oligonucleotide
ccuggacguccuuggaguc

SEQ ID NO: 2636202 - RNA, 19 nt, Artificial Sequence
  Description of Artificial Sequence: Synthetic oligonucleotide
ggcuacagggcagcaguuc

SEQ ID NO: 2636203 - RNA, 19 nt, Artificial Sequence
  Description of Artificial Sequence: Synthetic oligonucleotide
aggccacacuccauguuua

SEQ ID NO: 2636204 - RNA, 19 nt, Artificial Sequence
  Description of Artificial Sequence: Synthetic oligonucleotide
ggcugcgcugacagcaaug

SEQ ID NO: 2636205 - RNA, 19 nt, Artificial Sequence
  Description of Artificial Sequence: Synthetic oligonucleotide
caccaccaccaccaccaca

SEQ ID NO: 2636206 - RNA, 19 nt, Artificial Sequence
  Description of Artificial Sequence: Synthetic oligonucleotide
cacacaaagcccgcucugu

SEQ ID NO: 2636207 - RNA, 19 nt, Artificial Sequence
  Description of Artificial Sequence: Synthetic oligonucleotide
gcgguugcagcguuuggcu

SEQ ID NO: 2636208 - RNA, 19 nt, Artificial Sequence
  Description of Artificial Sequence: Synthetic oligonucleotide
ggcguggaggucgucucac

SEQ ID NO: 2636209 - RNA, 19 nt, Artificial Sequence
  Description of Artificial Sequence: Synthetic oligonucleotide
cuuacccuacuagaagcuu

SEQ ID NO: 2636210 - RNA, 19 nt, Artificial Sequence
  Description of Artificial Sequence: Synthetic oligonucleotide
cgucucacacaaagcccgc

SEQ ID NO: 2636211 - RNA, 19 nt, Artificial Sequence
  Description of Artificial Sequence: Synthetic oligonucleotide
ggaguaugaggcagggcgu

SEQ ID NO: 2636212 - RNA, 19 nt, Artificial Sequence
  Description of Artificial Sequence: Synthetic oligonucleotide
caccaccaaccaccaccac

SEQ ID NO: 2636213 - RNA, 19 nt, Artificial Sequence
  Description of Artificial Sequence: Synthetic oligonucleotide
gaggcagggcguggagguc

SEQ ID NO: 2636214 - RNA, 19 nt, Artificial Sequence
  Description of Artificial Sequence: Synthetic oligonucleotide
gccacacuccauguuuaca

SEQ ID NO: 2636215 - RNA, 19 nt, Artificial Sequence
  Description of Artificial Sequence: Synthetic oligonucleotide
ccaucagugccccggagcu

SEQ ID NO: 2636216 - RNA, 19 nt, Artificial Sequence
  Description of Artificial Sequence: Synthetic oligonucleotide
cuucugagcuguguggcuu

SEQ ID NO: 2636217 - RNA, 19 nt, Artificial Sequence
  Description of Artificial Sequence: Synthetic oligonucleotide
gggcaaagcagaggcuaca

SEQ ID NO: 2636218 - RNA, 19 nt, Artificial Sequence
  Description of Artificial Sequence: Synthetic oligonucleotide
cgcucugucuccccuagca

SEQ ID NO: 2636219 - RNA, 19 nt, Artificial Sequence
  Description of Artificial Sequence: Synthetic oligonucleotide
caccacccagcagcccacc

SEQ ID NO: 2636220 - RNA, 19 nt, Artificial Sequence
  Description of Artificial Sequence: Synthetic oligonucleotide
ggcugaggcguuggcaaga

SEQ ID NO: 2636221 - RNA, 19 nt, Artificial Sequence
  Description of Artificial Sequence: Synthetic oligonucleotide
gcugcgcugacagcaaugu

SEQ ID NO: 2636222 - RNA, 19 nt, Artificial Sequence
  Description of Artificial Sequence: Synthetic oligonucleotide
gcccaagccucccggccug

SEQ ID NO: 2636223 - RNA, 19 nt, Artificial Sequence
  Description of Artificial Sequence: Synthetic oligonucleotide
gcuguguggcuucagccuu

SEQ ID NO: 2636224 - RNA, 19 nt, Artificial Sequence
  Description of Artificial Sequence: Synthetic oligonucleotide
gucucacacaaagcccgcu

SEQ ID NO: 2636225 - RNA, 19 nt, Artificial Sequence
  Description of Artificial Sequence: Synthetic oligonucleotide
gugccccggagcuacuaau

SEQ ID NO: 2636226 - RNA, 19 nt, Artificial Sequence
  Description of Artificial Sequence: Synthetic oligonucleotide
ggagucuggguggggcuga

SEQ ID NO: 2636227 - RNA, 19 nt, Artificial Sequence
  Description of Artificial Sequence: Synthetic oligonucleotide
ccaccacccagcagcccac

SEQ ID NO: 2636228 - RNA, 19 nt, Artificial Sequence
  Description of Artificial Sequence: Synthetic oligonucleotide
gccccggagcuacuaaucu

SEQ ID NO: 2636229 - RNA, 19 nt, Artificial Sequence
  Description of Artificial Sequence: Synthetic oligonucleotide
aggcuacagggcagcaguu

SEQ ID NO: 2636230 - RNA, 19 nt, Artificial Sequence
  Description of Artificial Sequence: Synthetic oligonucleotide
ggcuucagccuugaccacu

SEQ ID NO: 2636231 - RNA, 19 nt, Artificial Sequence
  Description of Artificial Sequence: Synthetic oligonucleotide
gccggcucuucucuggccu

SEQ ID NO: 2636232 - RNA, 19 nt, Artificial Sequence
  Description of Artificial Sequence: Synthetic oligonucleotide
cuggacguccuuggagucu

SEQ ID NO: 2636233 - RNA, 19 nt, Artificial Sequence
  Description of Artificial Sequence: Synthetic oligonucleotide
ggccuggugcaacuuuacu

SEQ ID NO: 2636234 - RNA, 19 nt, Artificial Sequence
  Description of Artificial Sequence: Synthetic oligonucleotide
gggugccccagguggggca

SEQ ID NO: 2636235 - RNA, 19 nt, Artificial Sequence
  Description of Artificial Sequence: Synthetic oligonucleotide
cugcgcugacagcaaugua

SEQ ID NO: 2636236 - RNA, 19 nt, Artificial Sequence
  Description of Artificial Sequence: Synthetic oligonucleotide
cagaggcuacagggcagca

SEQ ID NO: 2636237 - RNA, 19 nt, Artificial Sequence
  Description of Artificial Sequence: Synthetic oligonucleotide
gaccacugugcagcugcgu

SEQ ID NO: 2636238 - RNA, 19 nt, Artificial Sequence
  Description of Artificial Sequence: Synthetic oligonucleotide
ggcguuggcaagauagauu

SEQ ID NO: 2636239 - RNA, 19 nt, Artificial Sequence
  Description of Artificial Sequence: Synthetic oligonucleotide
gcagcugcguccaggcuua

SEQ ID NO: 2636240 - RNA, 19 nt, Artificial Sequence
  Description of Artificial Sequence: Synthetic oligonucleotide
gggcguggaggucgucuca

SEQ ID NO: 2636241 - RNA, 19 nt, Artificial Sequence
  Description of Artificial Sequence: Synthetic oligonucleotide
ggacguccuuggagucugg

SEQ ID NO: 2636242 - RNA, 19 nt, Artificial Sequence
  Description of Artificial Sequence: Synthetic oligonucleotide
gccuggggagcccaagccu

SEQ ID NO: 2636243 - RNA, 19 nt, Artificial Sequence
  Description of Artificial Sequence: Synthetic oligonucleotide
cagggcguggaggucgucu

SEQ ID NO: 2636244 - RNA, 19 nt, Artificial Sequence
  Description of Artificial Sequence: Synthetic oligonucleotide
ccuuggagucugggugggg

SEQ ID NO: 2636245 - RNA, 19 nt, Artificial Sequence
  Description of Artificial Sequence: Synthetic oligonucleotide
cucuggccuucugagcugu

SEQ ID NO: 2636246 - RNA, 19 nt, Artificial Sequence
  Description of Artificial Sequence: Synthetic oligonucleotide
gcgauuggcugcgcugaca

SEQ ID NO: 2636247 - RNA, 19 nt, Artificial Sequence
  Description of Artificial Sequence: Synthetic oligonucleotide
gcguggaggucgucucaca

SEQ ID NO: 2636248 - RNA, 19 nt, Artificial Sequence
  Description of Artificial Sequence: Synthetic oligonucleotide
agccuccucuagagaucug

SEQ ID NO: 2636249 - RNA, 19 nt, Artificial Sequence
  Description of Artificial Sequence: Synthetic oligonucleotide
cugaggcguuggcaagaua

SEQ ID NO: 2636250 - RNA, 19 nt, Artificial Sequence
  Description of Artificial Sequence: Synthetic oligonucleotide
cggccuggugcaacuuuac

SEQ ID NO: 2636251 - RNA, 19 nt, Artificial Sequence
  Description of Artificial Sequence: Synthetic oligonucleotide
cagacggcgguugcagcgu

SEQ ID NO: 2636252 - RNA, 19 nt, Artificial Sequence
  Description of Artificial Sequence: Synthetic oligonucleotide
gugcagcugcguccaggcu

SEQ ID NO: 2636253 - RNA, 19 nt, Artificial Sequence
  Description of Artificial Sequence: Synthetic oligonucleotide
gcgccucuucaugagguua

SEQ ID NO: 2636254 - RNA, 19 nt, Artificial Sequence
  Description of Artificial Sequence: Synthetic oligonucleotide
caucagugccccggagcua

SEQ ID NO: 2636255 - RNA, 19 nt, Artificial Sequence
  Description of Artificial Sequence: Synthetic oligonucleotide
ucccggccuggugcaacuu

SEQ ID NO: 2636256 - RNA, 19 nt, Artificial Sequence
  Description of Artificial Sequence: Synthetic oligonucleotide
ccuucugagcuguguggcu

SEQ ID NO: 2636257 - RNA, 19 nt, Artificial Sequence
  Description of Artificial Sequence: Synthetic oligonucleotide
ccggccuggugcaacuuua

SEQ ID NO: 2636258 - RNA, 19 nt, Artificial Sequence
  Description of Artificial Sequence: Synthetic oligonucleotide
gccccagguggggcaaagc

SEQ ID NO: 2636259 - RNA, 19 nt, Artificial Sequence
  Description of Artificial Sequence: Synthetic oligonucleotide
ccaccaccaccaccaccac

SEQ ID NO: 2636260 - RNA, 19 nt, Artificial Sequence
  Description of Artificial Sequence: Synthetic oligonucleotide
ccggagcuacuaaucuucu

SEQ ID NO: 2636261 - RNA, 19 nt, Artificial Sequence
  Description of Artificial Sequence: Synthetic oligonucleotide
ggugccccagguggggcaa

SEQ ID NO: 2636262 - RNA, 19 nt, Artificial Sequence
  Description of Artificial Sequence: Synthetic oligonucleotide
ccgcucugucuccccuagc

SEQ ID NO: 2636263 - RNA, 19 nt, Artificial Sequence
  Description of Artificial Sequence: Synthetic oligonucleotide
gggacuucagacggcgguu

SEQ ID NO: 2636264 - RNA, 19 nt, Artificial Sequence
  Description of Artificial Sequence: Synthetic oligonucleotide
cgguaucgaauaagggccu

SEQ ID NO: 2636265 - RNA, 19 nt, Artificial Sequence
  Description of Artificial Sequence: Synthetic oligonucleotide
cggcgguugcagcguuugg

SEQ ID NO: 2636266 - RNA, 19 nt, Artificial Sequence
  Description of Artificial Sequence: Synthetic oligonucleotide
cagugccccggagcuacua

SEQ ID NO: 2636267 - RNA, 19 nt, Artificial Sequence
  Description of Artificial Sequence: Synthetic oligonucleotide
cccaagccucccggccugg

SEQ ID NO: 2636268 - RNA, 19 nt, Artificial Sequence
  Description of Artificial Sequence: Synthetic oligonucleotide
ccuagcagcuggucugcau

SEQ ID NO: 2636269 - RNA, 19 nt, Artificial Sequence
  Description of Artificial Sequence: Synthetic oligonucleotide
gcugaggcguuggcaagau

SEQ ID NO: 2636270 - RNA, 19 nt, Artificial Sequence
  Description of Artificial Sequence: Synthetic oligonucleotide
cgccucuucaugagguuau

SEQ ID NO: 2636271 - RNA, 19 nt, Artificial Sequence
  Description of Artificial Sequence: Synthetic oligonucleotide
gcccgcucugucuccccua

SEQ ID NO: 2636272 - RNA, 19 nt, Artificial Sequence
  Description of Artificial Sequence: Synthetic oligonucleotide
gggaagcuagggagagaau

SEQ ID NO: 2636273 - RNA, 19 nt, Artificial Sequence
  Description of Artificial Sequence: Synthetic oligonucleotide
gcguccaggcuuagcugcu

SEQ ID NO: 2636274 - RNA, 19 nt, Artificial Sequence
  Description of Artificial Sequence: Synthetic oligonucleotide
ccccggagcuacuaaucuu

SEQ ID NO: 2636275 - RNA, 19 nt, Artificial Sequence
  Description of Artificial Sequence: Synthetic oligonucleotide
ccaggccacacuccauguu

SEQ ID NO: 2636276 - RNA, 19 nt, Artificial Sequence
  Description of Artificial Sequence: Synthetic oligonucleotide
ccaccaccaccaccaccaa

SEQ ID NO: 2636277 - RNA, 19 nt, Artificial Sequence
  Description of Artificial Sequence: Synthetic oligonucleotide
cccuagcagcuggucugca

SEQ ID NO: 2636278 - RNA, 19 nt, Artificial Sequence
  Description of Artificial Sequence: Synthetic oligonucleotide
cggagcuacuaaucuucuu

SEQ ID NO: 2636279 - RNA, 19 nt, Artificial Sequence
  Description of Artificial Sequence: Synthetic oligonucleotide
gcagggcguggaggucguc

SEQ ID NO: 2636280 - RNA, 19 nt, Artificial Sequence
  Description of Artificial Sequence: Synthetic oligonucleotide
cgguugcagcguuuggcuu

SEQ ID NO: 2636281 - RNA, 19 nt, Artificial Sequence
  Description of Artificial Sequence: Synthetic oligonucleotide
cccggccuggugcaacuuu

SEQ ID NO: 2636282 - RNA, 19 nt, Artificial Sequence
  Description of Artificial Sequence: Synthetic oligonucleotide
ccacaucuguugggaguau

SEQ ID NO: 2636283 - RNA, 19 nt, Artificial Sequence
  Description of Artificial Sequence: Synthetic oligonucleotide
ccaagccucccggccuggu

SEQ ID NO: 2636284 - RNA, 19 nt, Artificial Sequence
  Description of Artificial Sequence: Synthetic oligonucleotide
auuauuaucaauuaaauuc

SEQ ID NO: 2636285 - RNA, 19 nt, Artificial Sequence
  Description of Artificial Sequence: Synthetic oligonucleotide
aaacauagaaauuauuugc

SEQ ID NO: 2636286 - RNA, 19 nt, Artificial Sequence
  Description of Artificial Sequence: Synthetic oligonucleotide
aauuauucuaauuuugcac

SEQ ID NO: 2636287 - RNA, 19 nt, Artificial Sequence
  Description of Artificial Sequence: Synthetic oligonucleotide
agaguuuuggcuuuaaggc

SEQ ID NO: 2636288 - RNA, 19 nt, Artificial Sequence
  Description of Artificial Sequence: Synthetic oligonucleotide
aaaaggauuaaauaagugu

SEQ ID NO: 2636289 - RNA, 19 nt, Artificial Sequence
  Description of Artificial Sequence: Synthetic oligonucleotide
uauuuaaauccacagagug

SEQ ID NO: 2636290 - RNA, 19 nt, Artificial Sequence
  Description of Artificial Sequence: Synthetic oligonucleotide
acaauauuuaagucaauac

SEQ ID NO: 2636291 - RNA, 19 nt, Artificial Sequence
  Description of Artificial Sequence: Synthetic oligonucleotide
uacaugguauuccagaagg

SEQ ID NO: 2636292 - RNA, 19 nt, Artificial Sequence
  Description of Artificial Sequence: Synthetic oligonucleotide
uuuaagucaauacaugaca

SEQ ID NO: 2636293 - RNA, 19 nt, Artificial Sequence
  Description of Artificial Sequence: Synthetic oligonucleotide
ucuaauuuugcacaguacu

SEQ ID NO: 2636294 - RNA, 19 nt, Artificial Sequence
  Description of Artificial Sequence: Synthetic oligonucleotide
uacuuuaugcccaugaaug

SEQ ID NO: 2636295 - RNA, 19 nt, Artificial Sequence
  Description of Artificial Sequence: Synthetic oligonucleotide
guguuuaugaaacugaagc

SEQ ID NO: 2636296 - RNA, 19 nt, Artificial Sequence
  Description of Artificial Sequence: Synthetic oligonucleotide
aauuauuugcauuuggcau

SEQ ID NO: 2636297 - RNA, 19 nt, Artificial Sequence
  Description of Artificial Sequence: Synthetic oligonucleotide
aaauuuauuaccaaauaca

SEQ ID NO: 2636298 - RNA, 19 nt, Artificial Sequence
  Description of Artificial Sequence: Synthetic oligonucleotide
aaauuauuugcauuuggca

SEQ ID NO: 2636299 - RNA, 19 nt, Artificial Sequence
  Description of Artificial Sequence: Synthetic oligonucleotide
aagucaauacaugacaaac

SEQ ID NO: 2636300 - RNA, 19 nt, Artificial Sequence
  Description of Artificial Sequence: Synthetic oligonucleotide
uuaucaauuaaauucauuu

SEQ ID NO: 2636301 - RNA, 19 nt, Artificial Sequence
  Description of Artificial Sequence: Synthetic oligonucleotide
uucacaacauacuuuaugc

SEQ ID NO: 2636302 - RNA, 19 nt, Artificial Sequence
  Description of Artificial Sequence: Synthetic oligonucleotide
uuuaaugacacagugucag

SEQ ID NO: 2636303 - RNA, 19 nt, Artificial Sequence
  Description of Artificial Sequence: Synthetic oligonucleotide
aauauuuaagucaauacau

SEQ ID NO: 2636304 - RNA, 19 nt, Artificial Sequence
  Description of Artificial Sequence: Synthetic oligonucleotide
uuuaugcccaugaaugucg

SEQ ID NO: 2636305 - RNA, 19 nt, Artificial Sequence
  Description of Artificial Sequence: Synthetic oligonucleotide
uauuuauagacuauuacuu

SEQ ID NO: 2636306 - RNA, 19 nt, Artificial Sequence
  Description of Artificial Sequence: Synthetic oligonucleotide
uuuauagacuauuacuuug

SEQ ID NO: 2636307 - RNA, 19 nt, Artificial Sequence
  Description of Artificial Sequence: Synthetic oligonucleotide
aaagccauaauguuacaca

SEQ ID NO: 2636308 - RNA, 19 nt, Artificial Sequence
  Description of Artificial Sequence: Synthetic oligonucleotide
aaaugugcaacguaacaug

SEQ ID NO: 2636309 - RNA, 19 nt, Artificial Sequence
  Description of Artificial Sequence: Synthetic oligonucleotide
aauguuacacaauacuuaa

SEQ ID NO: 2636310 - RNA, 19 nt, Artificial Sequence
  Description of Artificial Sequence: Synthetic oligonucleotide
guuuuaaugacacaguguc

SEQ ID NO: 2636311 - RNA, 19 nt, Artificial Sequence
  Description of Artificial Sequence: Synthetic oligonucleotide
aaccuauuuaaauccacag

SEQ ID NO: 2636312 - RNA, 19 nt, Artificial Sequence
  Description of Artificial Sequence: Synthetic oligonucleotide
uggaaaacagaucuagugc

SEQ ID NO: 2636313 - RNA, 19 nt, Artificial Sequence
  Description of Artificial Sequence: Synthetic oligonucleotide
aauggaaacauagaaauua

SEQ ID NO: 2636314 - RNA, 19 nt, Artificial Sequence
  Description of Artificial Sequence: Synthetic oligonucleotide
uacacaauacuuaauuuac

SEQ ID NO: 2636315 - RNA, 19 nt, Artificial Sequence
  Description of Artificial Sequence: Synthetic oligonucleotide
auuacuuugagcaccuugc

SEQ ID NO: 2636316 - RNA, 19 nt, Artificial Sequence
  Description of Artificial Sequence: Synthetic oligonucleotide
uccaguuuuaaugacacag

SEQ ID NO: 2636317 - RNA, 19 nt, Artificial Sequence
  Description of Artificial Sequence: Synthetic oligonucleotide
aauuaaauucauuuucuuu

SEQ ID NO: 2636318 - RNA, 19 nt, Artificial Sequence
  Description of Artificial Sequence: Synthetic oligonucleotide
uuuaugaaacugaagcaca

SEQ ID NO: 2636319 - RNA, 19 nt, Artificial Sequence
  Description of Artificial Sequence: Synthetic oligonucleotide
auagacuauuacuuugagc

SEQ ID NO: 2636320 - RNA, 19 nt, Artificial Sequence
  Description of Artificial Sequence: Synthetic oligonucleotide
uaauuauuaucaauuaaau

SEQ ID NO: 2636321 - RNA, 19 nt, Artificial Sequence
  Description of Artificial Sequence: Synthetic oligonucleotide
uuuaaauccacagagugaa

SEQ ID NO: 2636322 - RNA, 19 nt, Artificial Sequence
  Description of Artificial Sequence: Synthetic oligonucleotide
uaaauaaguguuuaugaaa

SEQ ID NO: 2636323 - RNA, 19 nt, Artificial Sequence
  Description of Artificial Sequence: Synthetic oligonucleotide
ugcucuaccacacacacaa

SEQ ID NO: 2636324 - RNA, 19 nt, Artificial Sequence
  Description of Artificial Sequence: Synthetic oligonucleotide
uucuauuaaauauauuuau

SEQ ID NO: 2636325 - RNA, 19 nt, Artificial Sequence
  Description of Artificial Sequence: Synthetic oligonucleotide
uuucuauuaaauauauuua

SEQ ID NO: 2636326 - RNA, 19 nt, Artificial Sequence
  Description of Artificial Sequence: Synthetic oligonucleotide
uguuacacaauacuuaauu

SEQ ID NO: 2636327 - RNA, 19 nt, Artificial Sequence
  Description of Artificial Sequence: Synthetic oligonucleotide
aaacagaucuagugccugc

SEQ ID NO: 2636328 - RNA, 19 nt, Artificial Sequence
  Description of Artificial Sequence: Synthetic oligonucleotide
ucuaauuauuaucaauuaa

SEQ ID NO: 2636329 - RNA, 19 nt, Artificial Sequence
  Description of Artificial Sequence: Synthetic oligonucleotide
aauuuauuaccaaauacaa

SEQ ID NO: 2636330 - RNA, 19 nt, Artificial Sequence
  Description of Artificial Sequence: Synthetic oligonucleotide
ucuagugccugcaacagca

SEQ ID NO: 2636331 - RNA, 19 nt, Artificial Sequence
  Description of Artificial Sequence: Synthetic oligonucleotide
ugugcaacguaacaugacc

SEQ ID NO: 2636332 - RNA, 19 nt, Artificial Sequence
  Description of Artificial Sequence: Synthetic oligonucleotide
auagaaauuauuugcauuu

SEQ ID NO: 2636333 - RNA, 19 nt, Artificial Sequence
  Description of Artificial Sequence: Synthetic oligonucleotide
cacaacauacuuuaugccc

SEQ ID NO: 2636334 - RNA, 19 nt, Artificial Sequence
  Description of Artificial Sequence: Synthetic oligonucleotide
uuugcauuuggcauuaaau

SEQ ID NO: 2636335 - RNA, 19 nt, Artificial Sequence
  Description of Artificial Sequence: Synthetic oligonucleotide
aaucuaauuauuaucaauu

SEQ ID NO: 2636336 - RNA, 19 nt, Artificial Sequence
  Description of Artificial Sequence: Synthetic oligonucleotide
uacuugugaagguaaagag

SEQ ID NO: 2636337 - RNA, 19 nt, Artificial Sequence
  Description of Artificial Sequence: Synthetic oligonucleotide
aaaggauuaaauaaguguu

SEQ ID NO: 2636338 - RNA, 19 nt, Artificial Sequence
  Description of Artificial Sequence: Synthetic oligonucleotide
auggaaaacagaucuagug

SEQ ID NO: 2636339 - RNA, 19 nt, Artificial Sequence
  Description of Artificial Sequence: Synthetic oligonucleotide
uuauagacuauuacuuuga

SEQ ID NO: 2636340 - RNA, 19 nt, Artificial Sequence
  Description of Artificial Sequence: Synthetic oligonucleotide
aauuuugcacaguacuugu

SEQ ID NO: 2636341 - RNA, 19 nt, Artificial Sequence
  Description of Artificial Sequence: Synthetic oligonucleotide
uuuggcuacagaagcaaag

SEQ ID NO: 2636342 - RNA, 19 nt, Artificial Sequence
  Description of Artificial Sequence: Synthetic oligonucleotide
acagagugaauuuagggga

SEQ ID NO: 2636343 - RNA, 19 nt, Artificial Sequence
  Description of Artificial Sequence: Synthetic oligonucleotide
aagguaaagaggugccugg

SEQ ID NO: 2636344 - RNA, 19 nt, Artificial Sequence
  Description of Artificial Sequence: Synthetic oligonucleotide
aaucguccaguuuuaauga

SEQ ID NO: 2636345 - RNA, 19 nt, Artificial Sequence
  Description of Artificial Sequence: Synthetic oligonucleotide
guaaagaggugccuggugg

SEQ ID NO: 2636346 - RNA, 19 nt, Artificial Sequence
  Description of Artificial Sequence: Synthetic oligonucleotide
augaaugucgaacucaagu

SEQ ID NO: 2636347 - RNA, 19 nt, Artificial Sequence
  Description of Artificial Sequence: Synthetic oligonucleotide
acguaacaugaccaaaugc

SEQ ID NO: 2636348 - RNA, 19 nt, Artificial Sequence
  Description of Artificial Sequence: Synthetic oligonucleotide
gaaauuauuugcauuuggc

SEQ ID NO: 2636349 - RNA, 19 nt, Artificial Sequence
  Description of Artificial Sequence: Synthetic oligonucleotide
ugcacaguacuugugaagg

SEQ ID NO: 2636350 - RNA, 19 nt, Artificial Sequence
  Description of Artificial Sequence: Synthetic oligonucleotide
ucuauuaaauauauuuaua

SEQ ID NO: 2636351 - RNA, 19 nt, Artificial Sequence
  Description of Artificial Sequence: Synthetic oligonucleotide
uuuugcacaguacuuguga

SEQ ID NO: 2636352 - RNA, 19 nt, Artificial Sequence
  Description of Artificial Sequence: Synthetic oligonucleotide
aaaaccuauuuaaauccac

SEQ ID NO: 2636353 - RNA, 19 nt, Artificial Sequence
  Description of Artificial Sequence: Synthetic oligonucleotide
caaucguccaguuuuaaug

SEQ ID NO: 2636354 - RNA, 19 nt, Artificial Sequence
  Description of Artificial Sequence: Synthetic oligonucleotide
uuggcuuuaaggcuugcag

SEQ ID NO: 2636355 - RNA, 19 nt, Artificial Sequence
  Description of Artificial Sequence: Synthetic oligonucleotide
aaugucgaacucaaguuuc

SEQ ID NO: 2636356 - RNA, 19 nt, Artificial Sequence
  Description of Artificial Sequence: Synthetic oligonucleotide
uauuacuuugagcaccuug

SEQ ID NO: 2636357 - RNA, 19 nt, Artificial Sequence
  Description of Artificial Sequence: Synthetic oligonucleotide
uuaagucaauacaugacaa

SEQ ID NO: 2636358 - RNA, 19 nt, Artificial Sequence
  Description of Artificial Sequence: Synthetic oligonucleotide
ccuauuuaaauccacagag

SEQ ID NO: 2636359 - RNA, 19 nt, Artificial Sequence
  Description of Artificial Sequence: Synthetic oligonucleotide
auuuaagucaauacaugac

SEQ ID NO: 2636360 - RNA, 19 nt, Artificial Sequence
  Description of Artificial Sequence: Synthetic oligonucleotide
aauaaguguuuaugaaacu

SEQ ID NO: 2636361 - RNA, 19 nt, Artificial Sequence
  Description of Artificial Sequence: Synthetic oligonucleotide
uuacacaauacuuaauuua

SEQ ID NO: 2636362 - RNA, 19 nt, Artificial Sequence
  Description of Artificial Sequence: Synthetic oligonucleotide
augaaacugaagcacaaug

SEQ ID NO: 2636363 - RNA, 19 nt, Artificial Sequence
  Description of Artificial Sequence: Synthetic oligonucleotide
ucaauacaugacaaacucc

SEQ ID NO: 2636364 - RNA, 19 nt, Artificial Sequence
  Description of Artificial Sequence: Synthetic oligonucleotide
ugaagcacaauggaaaaca

SEQ ID NO: 2636365 - RNA, 19 nt, Artificial Sequence
  Description of Artificial Sequence: Synthetic oligonucleotide
agcaaagccauaauguuac

SEQ ID NO: 2636366 - RNA, 19 nt, Artificial Sequence
  Description of Artificial Sequence: Synthetic oligonucleotide
aacucuagaguuuuggcuu

SEQ ID NO: 2636367 - RNA, 19 nt, Artificial Sequence
  Description of Artificial Sequence: Synthetic oligonucleotide
guuucuauuaaauauauuu

SEQ ID NO: 2636368 - RNA, 19 nt, Artificial Sequence
  Description of Artificial Sequence: Synthetic oligonucleotide
ugaauuuaggggaaucuaa

SEQ ID NO: 2636369 - RNA, 19 nt, Artificial Sequence
  Description of Artificial Sequence: Synthetic oligonucleotide
ugcauuuggcauuaaauau

SEQ ID NO: 2636370 - RNA, 19 nt, Artificial Sequence
  Description of Artificial Sequence: Synthetic oligonucleotide
augacacagugucagaauc

SEQ ID NO: 2636371 - RNA, 19 nt, Artificial Sequence
  Description of Artificial Sequence: Synthetic oligonucleotide
aacguaacaugaccaaaug

SEQ ID NO: 2636372 - RNA, 19 nt, Artificial Sequence
  Description of Artificial Sequence: Synthetic oligonucleotide
uauagacuauuacuuugag

SEQ ID NO: 2636373 - RNA, 19 nt, Artificial Sequence
  Description of Artificial Sequence: Synthetic oligonucleotide
uaauuuugcacaguacuug

SEQ ID NO: 2636374 - RNA, 19 nt, Artificial Sequence
  Description of Artificial Sequence: Synthetic oligonucleotide
uuuaggggaaucuaauuau

SEQ ID NO: 2636375 - RNA, 19 nt, Artificial Sequence
  Description of Artificial Sequence: Synthetic oligonucleotide
cuacuuuggcuacagaagc

SEQ ID NO: 2636376 - RNA, 19 nt, Artificial Sequence
  Description of Artificial Sequence: Synthetic oligonucleotide
gaaacugaagcacaaugga

SEQ ID NO: 2636377 - RNA, 19 nt, Artificial Sequence
  Description of Artificial Sequence: Synthetic oligonucleotide
cacucuucugcacaggugg

SEQ ID NO: 2636378 - RNA, 19 nt, Artificial Sequence
  Description of Artificial Sequence: Synthetic oligonucleotide
gucaauacaugacaaacuc

SEQ ID NO: 2636379 - RNA, 19 nt, Artificial Sequence
  Description of Artificial Sequence: Synthetic oligonucleotide
auuuaggggaaucuaauua

SEQ ID NO: 2636380 - RNA, 19 nt, Artificial Sequence
  Description of Artificial Sequence: Synthetic oligonucleotide
guuuaugaaacugaagcac

SEQ ID NO: 2636381 - RNA, 19 nt, Artificial Sequence
  Description of Artificial Sequence: Synthetic oligonucleotide
uuacaugguauuccagaag

SEQ ID NO: 2636382 - RNA, 19 nt, Artificial Sequence
  Description of Artificial Sequence: Synthetic oligonucleotide
accaaauacaauauuuaag

SEQ ID NO: 2636383 - RNA, 19 nt, Artificial Sequence
  Description of Artificial Sequence: Synthetic oligonucleotide
uaucaauuaaauucauuuu

SEQ ID NO: 2636384 - RNA, 19 nt, Artificial Sequence
  Description of Artificial Sequence: Synthetic oligonucleotide
agaagcaaagccauaaugu

SEQ ID NO: 2636385 - RNA, 19 nt, Artificial Sequence
  Description of Artificial Sequence: Synthetic oligonucleotide
aauuuaggggaaucuaauu

SEQ ID NO: 2636386 - RNA, 19 nt, Artificial Sequence
  Description of Artificial Sequence: Synthetic oligonucleotide
uccuguaaagcaaaauaaa

SEQ ID NO: 2636387 - RNA, 19 nt, Artificial Sequence
  Description of Artificial Sequence: Synthetic oligonucleotide
uuuuaaugacacaguguca

SEQ ID NO: 2636388 - RNA, 19 nt, Artificial Sequence
  Description of Artificial Sequence: Synthetic oligonucleotide
uaccaaauacaauauuuaa

SEQ ID NO: 2636389 - RNA, 19 nt, Artificial Sequence
  Description of Artificial Sequence: Synthetic oligonucleotide
gacuauuacuuugagcacc

SEQ ID NO: 2636390 - RNA, 19 nt, Artificial Sequence
  Description of Artificial Sequence: Synthetic oligonucleotide
caauggaaaacagaucuag

SEQ ID NO: 2636391 - RNA, 19 nt, Artificial Sequence
  Description of Artificial Sequence: Synthetic oligonucleotide
ugaaugucgaacucaaguu

SEQ ID NO: 2636392 - RNA, 19 nt, Artificial Sequence
  Description of Artificial Sequence: Synthetic oligonucleotide
acuugugaagguaaagagg

SEQ ID NO: 2636393 - RNA, 19 nt, Artificial Sequence
  Description of Artificial Sequence: Synthetic oligonucleotide
acacacacaacucuagagu

SEQ ID NO: 2636394 - RNA, 19 nt, Artificial Sequence
  Description of Artificial Sequence: Synthetic oligonucleotide
ucacaacauacuuuaugcc

SEQ ID NO: 2636395 - RNA, 19 nt, Artificial Sequence
  Description of Artificial Sequence: Synthetic oligonucleotide
cguaacaugaccaaaugcc

SEQ ID NO: 2636396 - RNA, 19 nt, Artificial Sequence
  Description of Artificial Sequence: Synthetic oligonucleotide
ugguauuccagaagguucu

SEQ ID NO: 2636397 - RNA, 19 nt, Artificial Sequence
  Description of Artificial Sequence: Synthetic oligonucleotide
agacuauuacuuugagcac

SEQ ID NO: 2636398 - RNA, 19 nt, Artificial Sequence
  Description of Artificial Sequence: Synthetic oligonucleotide
aacaugaccaaaugccaau

SEQ ID NO: 2636399 - RNA, 19 nt, Artificial Sequence
  Description of Artificial Sequence: Synthetic oligonucleotide
auuuauagacuauuacuuu

SEQ ID NO: 2636400 - RNA, 19 nt, Artificial Sequence
  Description of Artificial Sequence: Synthetic oligonucleotide
uuaugaaacugaagcacaa

SEQ ID NO: 2636401 - RNA, 19 nt, Artificial Sequence
  Description of Artificial Sequence: Synthetic oligonucleotide
ucuaccacacacacaacuc

SEQ ID NO: 2636402 - RNA, 19 nt, Artificial Sequence
  Description of Artificial Sequence: Synthetic oligonucleotide
aaaacagaucuagugccug

SEQ ID NO: 2636403 - RNA, 19 nt, Artificial Sequence
  Description of Artificial Sequence: Synthetic oligonucleotide
acuccuguaaagcaaaaua

SEQ ID NO: 2636404 - RNA, 19 nt, Artificial Sequence
  Description of Artificial Sequence: Synthetic oligonucleotide
ugaccaaaugccaaucguc

SEQ ID NO: 2636405 - RNA, 19 nt, Artificial Sequence
  Description of Artificial Sequence: Synthetic oligonucleotide
agcacaauggaaaacagau

SEQ ID NO: 2636406 - RNA, 19 nt, Artificial Sequence
  Description of Artificial Sequence: Synthetic oligonucleotide
cuugugaagguaaagaggu

SEQ ID NO: 2636407 - RNA, 19 nt, Artificial Sequence
  Description of Artificial Sequence: Synthetic oligonucleotide
ugucagaaucagcuguugc

SEQ ID NO: 2636408 - RNA, 19 nt, Artificial Sequence
  Description of Artificial Sequence: Synthetic oligonucleotide
aaaccuauuuaaauccaca

SEQ ID NO: 2636409 - RNA, 19 nt, Artificial Sequence
  Description of Artificial Sequence: Synthetic oligonucleotide
uggcuuuaaggcuugcagc

SEQ ID NO: 2636410 - RNA, 19 nt, Artificial Sequence
  Description of Artificial Sequence: Synthetic oligonucleotide
accuauuuaaauccacaga

SEQ ID NO: 2636411 - RNA, 19 nt, Artificial Sequence
  Description of Artificial Sequence: Synthetic oligonucleotide
auucuaauuuugcacagua

SEQ ID NO: 2636412 - RNA, 19 nt, Artificial Sequence
  Description of Artificial Sequence: Synthetic oligonucleotide
gaccaaaugccaaucgucc

SEQ ID NO: 2636413 - RNA, 19 nt, Artificial Sequence
  Description of Artificial Sequence: Synthetic oligonucleotide
uauuaucaauuaaauucau

SEQ ID NO: 2636414 - RNA, 19 nt, Artificial Sequence
  Description of Artificial Sequence: Synthetic oligonucleotide
caugaccaaaugccaaucg

SEQ ID NO: 2636415 - RNA, 19 nt, Artificial Sequence
  Description of Artificial Sequence: Synthetic oligonucleotide
uaacaugaccaaaugccaa

SEQ ID NO: 2636416 - RNA, 19 nt, Artificial Sequence
  Description of Artificial Sequence: Synthetic oligonucleotide
uucuaauuuugcacaguac

SEQ ID NO: 2636417 - RNA, 19 nt, Artificial Sequence
  Description of Artificial Sequence: Synthetic oligonucleotide
augcccaugaaugucgaac

SEQ ID NO: 2636418 - RNA, 19 nt, Artificial Sequence
  Description of Artificial Sequence: Synthetic oligonucleotide
uacuuugagcaccuugcug

SEQ ID NO: 2636419 - RNA, 19 nt, Artificial Sequence
  Description of Artificial Sequence: Synthetic oligonucleotide
aaguuucuauuaaauauau

SEQ ID NO: 2636420 - RNA, 19 nt, Artificial Sequence
  Description of Artificial Sequence: Synthetic oligonucleotide
auacuuuaugcccaugaau

SEQ ID NO: 2636421 - RNA, 19 nt, Artificial Sequence
  Description of Artificial Sequence: Synthetic oligonucleotide
aaugugcaacguaacauga

SEQ ID NO: 2636422 - RNA, 19 nt, Artificial Sequence
  Description of Artificial Sequence: Synthetic oligonucleotide
aucuaauuauuaucaauua

SEQ ID NO: 2636423 - RNA, 19 nt, Artificial Sequence
  Description of Artificial Sequence: Synthetic oligonucleotide
cagaagcaaagccauaaug

SEQ ID NO: 2636424 - RNA, 19 nt, Artificial Sequence
  Description of Artificial Sequence: Synthetic oligonucleotide
aucuagugccugcaacagc

SEQ ID NO: 2636425 - RNA, 19 nt, Artificial Sequence
  Description of Artificial Sequence: Synthetic oligonucleotide
uaagucaauacaugacaaa

SEQ ID NO: 2636426 - RNA, 19 nt, Artificial Sequence
  Description of Artificial Sequence: Synthetic oligonucleotide
uaaagaggugccugguggc

SEQ ID NO: 2636427 - RNA, 19 nt, Artificial Sequence
  Description of Artificial Sequence: Synthetic oligonucleotide
cauaauguuacacaauacu

SEQ ID NO: 2636428 - RNA, 19 nt, Artificial Sequence
  Description of Artificial Sequence: Synthetic oligonucleotide
uuggcuacagaagcaaagc

SEQ ID NO: 2636429 - RNA, 19 nt, Artificial Sequence
  Description of Artificial Sequence: Synthetic oligonucleotide
caauacaugacaaacuccu

SEQ ID NO: 2636430 - RNA, 19 nt, Artificial Sequence
  Description of Artificial Sequence: Synthetic oligonucleotide
acuuuaugcccaugaaugu

SEQ ID NO: 2636431 - RNA, 19 nt, Artificial Sequence
  Description of Artificial Sequence: Synthetic oligonucleotide
uugcacaguacuugugaag

SEQ ID NO: 2636432 - RNA, 19 nt, Artificial Sequence
  Description of Artificial Sequence: Synthetic oligonucleotide
augccaaucguccaguuuu

SEQ ID NO: 2636433 - RNA, 19 nt, Artificial Sequence
  Description of Artificial Sequence: Synthetic oligonucleotide
uagaaauuauuugcauuug

SEQ ID NO: 2636434 - RNA, 19 nt, Artificial Sequence
  Description of Artificial Sequence: Synthetic oligonucleotide
aauggaaaacagaucuagu

SEQ ID NO: 2636435 - RNA, 19 nt, Artificial Sequence
  Description of Artificial Sequence: Synthetic oligonucleotide
aucguccaguuuuaaugac

SEQ ID NO: 2636436 - RNA, 19 nt, Artificial Sequence
  Description of Artificial Sequence: Synthetic oligonucleotide
ucguccaguuuuaaugaca

SEQ ID NO: 2636437 - RNA, 19 nt, Artificial Sequence
  Description of Artificial Sequence: Synthetic oligonucleotide
uacuuuggcuacagaagca

SEQ ID NO: 2636438 - RNA, 19 nt, Artificial Sequence
  Description of Artificial Sequence: Synthetic oligonucleotide
ugcaacagcaaugggguga

SEQ ID NO: 2636439 - RNA, 19 nt, Artificial Sequence
  Description of Artificial Sequence: Synthetic oligonucleotide
uaaauccacagagugaauu

SEQ ID NO: 2636440 - RNA, 19 nt, Artificial Sequence
  Description of Artificial Sequence: Synthetic oligonucleotide
auuuaaauccacagaguga

SEQ ID NO: 2636441 - RNA, 19 nt, Artificial Sequence
  Description of Artificial Sequence: Synthetic oligonucleotide
gaagcacaauggaaaacag

SEQ ID NO: 2636442 - RNA, 19 nt, Artificial Sequence
  Description of Artificial Sequence: Synthetic oligonucleotide
augaccaaaugccaaucgu

SEQ ID NO: 2636443 - RNA, 19 nt, Artificial Sequence
  Description of Artificial Sequence: Synthetic oligonucleotide
agaagguucucuacuuugg

SEQ ID NO: 2636444 - RNA, 19 nt, Artificial Sequence
  Description of Artificial Sequence: Synthetic oligonucleotide
uuugcacaguacuugugaa

SEQ ID NO: 2636445 - RNA, 19 nt, Artificial Sequence
  Description of Artificial Sequence: Synthetic oligonucleotide
aguacuugugaagguaaag

SEQ ID NO: 2636446 - RNA, 19 nt, Artificial Sequence
  Description of Artificial Sequence: Synthetic oligonucleotide
ucgaacucaaguuucuauu

SEQ ID NO: 2636447 - RNA, 19 nt, Artificial Sequence
  Description of Artificial Sequence: Synthetic oligonucleotide
aauacaugacaaacuccug

SEQ ID NO: 2636448 - RNA, 19 nt, Artificial Sequence
  Description of Artificial Sequence: Synthetic oligonucleotide
uuacuuugagcaccuugcu

SEQ ID NO: 2636449 - RNA, 19 nt, Artificial Sequence
  Description of Artificial Sequence: Synthetic oligonucleotide
agugaauuuaggggaaucu

SEQ ID NO: 2636450 - RNA, 19 nt, Artificial Sequence
  Description of Artificial Sequence: Synthetic oligonucleotide
uaggggaaucuaauuauua

SEQ ID NO: 2636451 - RNA, 19 nt, Artificial Sequence
  Description of Artificial Sequence: Synthetic oligonucleotide
ugcccaugaaugucgaacu

SEQ ID NO: 2636452 - RNA, 19 nt, Artificial Sequence
  Description of Artificial Sequence: Synthetic oligonucleotide
cucaaaugugcaacguaac

SEQ ID NO: 2636453 - RNA, 19 nt, Artificial Sequence
  Description of Artificial Sequence: Synthetic oligonucleotide
acugaagcacaauggaaaa

SEQ ID NO: 2636454 - RNA, 19 nt, Artificial Sequence
  Description of Artificial Sequence: Synthetic oligonucleotide
ugcagcucaaaugugcaac

SEQ ID NO: 2636455 - RNA, 19 nt, Artificial Sequence
  Description of Artificial Sequence: Synthetic oligonucleotide
uuaaugacacagugucaga

SEQ ID NO: 2636456 - RNA, 19 nt, Artificial Sequence
  Description of Artificial Sequence: Synthetic oligonucleotide
aggggaaucuaauuauuau

SEQ ID NO: 2636457 - RNA, 19 nt, Artificial Sequence
  Description of Artificial Sequence: Synthetic oligonucleotide
acagguggccugcucuacc

SEQ ID NO: 2636458 - RNA, 19 nt, Artificial Sequence
  Description of Artificial Sequence: Synthetic oligonucleotide
aaacugaagcacaauggaa

SEQ ID NO: 2636459 - RNA, 19 nt, Artificial Sequence
  Description of Artificial Sequence: Synthetic oligonucleotide
gggaaucuaauuauuauca

SEQ ID NO: 2636460 - RNA, 19 nt, Artificial Sequence
  Description of Artificial Sequence: Synthetic oligonucleotide
ugcacucuucugcacaggu

SEQ ID NO: 2636461 - RNA, 19 nt, Artificial Sequence
  Description of Artificial Sequence: Synthetic oligonucleotide
uuaggggaaucuaauuauu

SEQ ID NO: 2636462 - RNA, 19 nt, Artificial Sequence
  Description of Artificial Sequence: Synthetic oligonucleotide
ccaaauacaauauuuaagu

SEQ ID NO: 2636463 - RNA, 19 nt, Artificial Sequence
  Description of Artificial Sequence: Synthetic oligonucleotide
agguucucuacuuuggcua

SEQ ID NO: 2636464 - RNA, 19 nt, Artificial Sequence
  Description of Artificial Sequence: Synthetic oligonucleotide
ugcaacguaacaugaccaa

SEQ ID NO: 2636465 - RNA, 19 nt, Artificial Sequence
  Description of Artificial Sequence: Synthetic oligonucleotide
cacagugucagaaucagcu

SEQ ID NO: 2636466 - RNA, 19 nt, Artificial Sequence
  Description of Artificial Sequence: Synthetic oligonucleotide
aaguguuuaugaaacugaa

SEQ ID NO: 2636467 - RNA, 19 nt, Artificial Sequence
  Description of Artificial Sequence: Synthetic oligonucleotide
aguguuuaugaaacugaag

SEQ ID NO: 2636468 - RNA, 19 nt, Artificial Sequence
  Description of Artificial Sequence: Synthetic oligonucleotide
aaugccaaucguccaguuu

SEQ ID NO: 2636469 - RNA, 19 nt, Artificial Sequence
  Description of Artificial Sequence: Synthetic oligonucleotide
agucaauacaugacaaacu

SEQ ID NO: 2636470 - RNA, 19 nt, Artificial Sequence
  Description of Artificial Sequence: Synthetic oligonucleotide
uggaaacauagaaauuauu

SEQ ID NO: 2636471 - RNA, 19 nt, Artificial Sequence
  Description of Artificial Sequence: Synthetic oligonucleotide
guacuugugaagguaaaga

SEQ ID NO: 2636472 - RNA, 19 nt, Artificial Sequence
  Description of Artificial Sequence: Synthetic oligonucleotide
guaacaugaccaaaugcca

SEQ ID NO: 2636473 - RNA, 19 nt, Artificial Sequence
  Description of Artificial Sequence: Synthetic oligonucleotide
cuagaguuuuggcuuuaag

SEQ ID NO: 2636474 - RNA, 19 nt, Artificial Sequence
  Description of Artificial Sequence: Synthetic oligonucleotide
aacagaucuagugccugca

SEQ ID NO: 2636475 - RNA, 19 nt, Artificial Sequence
  Description of Artificial Sequence: Synthetic oligonucleotide
caaagccauaauguuacac

SEQ ID NO: 2636476 - RNA, 19 nt, Artificial Sequence
  Description of Artificial Sequence: Synthetic oligonucleotide
gaacucaaguuucuauuaa

SEQ ID NO: 2636477 - RNA, 19 nt, Artificial Sequence
  Description of Artificial Sequence: Synthetic oligonucleotide
acaugaccaaaugccaauc

SEQ ID NO: 2636478 - RNA, 19 nt, Artificial Sequence
  Description of Artificial Sequence: Synthetic oligonucleotide
uuaugcccaugaaugucga

SEQ ID NO: 2636479 - RNA, 19 nt, Artificial Sequence
  Description of Artificial Sequence: Synthetic oligonucleotide
gugccugcaacagcaaugg

SEQ ID NO: 2636480 - RNA, 19 nt, Artificial Sequence
  Description of Artificial Sequence: Synthetic oligonucleotide
uauucuaauuuugcacagu

SEQ ID NO: 2636481 - RNA, 19 nt, Artificial Sequence
  Description of Artificial Sequence: Synthetic oligonucleotide
uucucuacuuuggcuacag

SEQ ID NO: 2636482 - RNA, 19 nt, Artificial Sequence
  Description of Artificial Sequence: Synthetic oligonucleotide
aaauggaaacauagaaauu

SEQ ID NO: 2636483 - RNA, 19 nt, Artificial Sequence
  Description of Artificial Sequence: Synthetic oligonucleotide
cuuuaugcccaugaauguc

SEQ ID NO: 2636484 - RNA, 19 nt, Artificial Sequence
  Description of Artificial Sequence: Synthetic oligonucleotide
cuuuaaggcuugcagcuca

SEQ ID NO: 2636485 - RNA, 19 nt, Artificial Sequence
  Description of Artificial Sequence: Synthetic oligonucleotide
ggggaaucuaauuauuauc

SEQ ID NO: 2636486 - RNA, 19 nt, Artificial Sequence
  Description of Artificial Sequence: Synthetic oligonucleotide
aagcaaagccauaauguua

SEQ ID NO: 2636487 - RNA, 19 nt, Artificial Sequence
  Description of Artificial Sequence: Synthetic oligonucleotide
aagcacaauggaaaacaga

SEQ ID NO: 2636488 - RNA, 19 nt, Artificial Sequence
  Description of Artificial Sequence: Synthetic oligonucleotide
accaaaugccaaucgucca

SEQ ID NO: 2636489 - RNA, 19 nt, Artificial Sequence
  Description of Artificial Sequence: Synthetic oligonucleotide
ucagaaucagcuguugcuu

SEQ ID NO: 2636490 - RNA, 19 nt, Artificial Sequence
  Description of Artificial Sequence: Synthetic oligonucleotide
uuauuugcauuuggcauua

SEQ ID NO: 2636491 - RNA, 19 nt, Artificial Sequence
  Description of Artificial Sequence: Synthetic oligonucleotide
aggauuaaauaaguguuua

SEQ ID NO: 2636492 - RNA, 19 nt, Artificial Sequence
  Description of Artificial Sequence: Synthetic oligonucleotide
gaguuuuggcuuuaaggcu

SEQ ID NO: 2636493 - RNA, 19 nt, Artificial Sequence
  Description of Artificial Sequence: Synthetic oligonucleotide
cuguaaagcaaaauaaauu

SEQ ID NO: 2636494 - RNA, 19 nt, Artificial Sequence
  Description of Artificial Sequence: Synthetic oligonucleotide
gaagcaaagccauaauguu

SEQ ID NO: 2636495 - RNA, 19 nt, Artificial Sequence
  Description of Artificial Sequence: Synthetic oligonucleotide
agugccugcaacagcaaug

SEQ ID NO: 2636496 - RNA, 19 nt, Artificial Sequence
  Description of Artificial Sequence: Synthetic oligonucleotide
cagaucuagugccugcaac

SEQ ID NO: 2636497 - RNA, 19 nt, Artificial Sequence
  Description of Artificial Sequence: Synthetic oligonucleotide
acuauuacuuugagcaccu

SEQ ID NO: 2636498 - RNA, 19 nt, Artificial Sequence
  Description of Artificial Sequence: Synthetic oligonucleotide
cuugcagcucaaaugugca

SEQ ID NO: 2636499 - RNA, 19 nt, Artificial Sequence
  Description of Artificial Sequence: Synthetic oligonucleotide
uuuggcuuuaaggcuugca

SEQ ID NO: 2636500 - RNA, 19 nt, Artificial Sequence
  Description of Artificial Sequence: Synthetic oligonucleotide
acaugacaaacuccuguaa

SEQ ID NO: 2636501 - RNA, 19 nt, Artificial Sequence
  Description of Artificial Sequence: Synthetic oligonucleotide
caugaaugucgaacucaag

SEQ ID NO: 2636502 - RNA, 19 nt, Artificial Sequence
  Description of Artificial Sequence: Synthetic oligonucleotide
gcagcucaaaugugcaacg

SEQ ID NO: 2636503 - RNA, 19 nt, Artificial Sequence
  Description of Artificial Sequence: Synthetic oligonucleotide
aaagaggugccugguggcu

SEQ ID NO: 2636504 - RNA, 19 nt, Artificial Sequence
  Description of Artificial Sequence: Synthetic oligonucleotide
gccugcaacagcaaugggg

SEQ ID NO: 2636505 - RNA, 19 nt, Artificial Sequence
  Description of Artificial Sequence: Synthetic oligonucleotide
uaugaaacugaagcacaau

SEQ ID NO: 2636506 - RNA, 19 nt, Artificial Sequence
  Description of Artificial Sequence: Synthetic oligonucleotide
aguuuuggcuuuaaggcuu

SEQ ID NO: 2636507 - RNA, 19 nt, Artificial Sequence
  Description of Artificial Sequence: Synthetic oligonucleotide
auccacagagugaauuuag

SEQ ID NO: 2636508 - RNA, 19 nt, Artificial Sequence
  Description of Artificial Sequence: Synthetic oligonucleotide
uuuaaggcuugcagcucaa

SEQ ID NO: 2636509 - RNA, 19 nt, Artificial Sequence
  Description of Artificial Sequence: Synthetic oligonucleotide
uuaaauccacagagugaau

SEQ ID NO: 2636510 - RNA, 19 nt, Artificial Sequence
  Description of Artificial Sequence: Synthetic oligonucleotide
gucagaaucagcuguugcu

SEQ ID NO: 2636511 - RNA, 19 nt, Artificial Sequence
  Description of Artificial Sequence: Synthetic oligonucleotide
cuauuuaaauccacagagu

SEQ ID NO: 2636512 - RNA, 19 nt, Artificial Sequence
  Description of Artificial Sequence: Synthetic oligonucleotide
gaaugucgaacucaaguuu

SEQ ID NO: 2636513 - RNA, 19 nt, Artificial Sequence
  Description of Artificial Sequence: Synthetic oligonucleotide
acagcaauggggugauaaa

SEQ ID NO: 2636514 - RNA, 19 nt, Artificial Sequence
  Description of Artificial Sequence: Synthetic oligonucleotide
guuacacaauacuuaauuu

SEQ ID NO: 2636515 - RNA, 19 nt, Artificial Sequence
  Description of Artificial Sequence: Synthetic oligonucleotide
acuuuggcuacagaagcaa

SEQ ID NO: 2636516 - RNA, 19 nt, Artificial Sequence
  Description of Artificial Sequence: Synthetic oligonucleotide
aaaugccaaucguccaguu

SEQ ID NO: 2636517 - RNA, 19 nt, Artificial Sequence
  Description of Artificial Sequence: Synthetic oligonucleotide
ggaaacauagaaauuauuu

SEQ ID NO: 2636518 - RNA, 19 nt, Artificial Sequence
  Description of Artificial Sequence: Synthetic oligonucleotide
gugccugguggcuugcugc

SEQ ID NO: 2636519 - RNA, 19 nt, Artificial Sequence
  Description of Artificial Sequence: Synthetic oligonucleotide
agcucaaaugugcaacgua

SEQ ID NO: 2636520 - RNA, 19 nt, Artificial Sequence
  Description of Artificial Sequence: Synthetic oligonucleotide
aacauacuuuaugcccaug

SEQ ID NO: 2636521 - RNA, 19 nt, Artificial Sequence
  Description of Artificial Sequence: Synthetic oligonucleotide
acucuucugcacagguggc

SEQ ID NO: 2636522 - RNA, 19 nt, Artificial Sequence
  Description of Artificial Sequence: Synthetic oligonucleotide
caacucuagaguuuuggcu

SEQ ID NO: 2636523 - RNA, 19 nt, Artificial Sequence
  Description of Artificial Sequence: Synthetic oligonucleotide
ccaaaugccaaucguccag

SEQ ID NO: 2636524 - RNA, 19 nt, Artificial Sequence
  Description of Artificial Sequence: Synthetic oligonucleotide
cugaagcacaauggaaaac

SEQ ID NO: 2636525 - RNA, 19 nt, Artificial Sequence
  Description of Artificial Sequence: Synthetic oligonucleotide
ccauaauguuacacaauac

SEQ ID NO: 2636526 - RNA, 19 nt, Artificial Sequence
  Description of Artificial Sequence: Synthetic oligonucleotide
gagugaauuuaggggaauc

SEQ ID NO: 2636527 - RNA, 19 nt, Artificial Sequence
  Description of Artificial Sequence: Synthetic oligonucleotide
cuaauuuugcacaguacuu

SEQ ID NO: 2636528 - RNA, 19 nt, Artificial Sequence
  Description of Artificial Sequence: Synthetic oligonucleotide
gaauuuaggggaaucuaau

SEQ ID NO: 2636529 - RNA, 19 nt, Artificial Sequence
  Description of Artificial Sequence: Synthetic oligonucleotide
ugccugcaacagcaauggg

SEQ ID NO: 2636530 - RNA, 19 nt, Artificial Sequence
  Description of Artificial Sequence: Synthetic oligonucleotide
ggaaucuaauuauuaucaa

SEQ ID NO: 2636531 - RNA, 19 nt, Artificial Sequence
  Description of Artificial Sequence: Synthetic oligonucleotide
gcuugcagcucaaaugugc

SEQ ID NO: 2636532 - RNA, 19 nt, Artificial Sequence
  Description of Artificial Sequence: Synthetic oligonucleotide
uagugccugcaacagcaau

SEQ ID NO: 2636533 - RNA, 19 nt, Artificial Sequence
  Description of Artificial Sequence: Synthetic oligonucleotide
gaaaacagaucuagugccu

SEQ ID NO: 2636534 - RNA, 19 nt, Artificial Sequence
  Description of Artificial Sequence: Synthetic oligonucleotide
acucuagaguuuuggcuuu

SEQ ID NO: 2636535 - RNA, 19 nt, Artificial Sequence
  Description of Artificial Sequence: Synthetic oligonucleotide
agguggccugcucuaccac

SEQ ID NO: 2636536 - RNA, 19 nt, Artificial Sequence
  Description of Artificial Sequence: Synthetic oligonucleotide
gugcaacguaacaugacca

SEQ ID NO: 2636537 - RNA, 19 nt, Artificial Sequence
  Description of Artificial Sequence: Synthetic oligonucleotide
gguucucuacuuuggcuac

SEQ ID NO: 2636538 - RNA, 19 nt, Artificial Sequence
  Description of Artificial Sequence: Synthetic oligonucleotide
ggcuacagaagcaaagcca

SEQ ID NO: 2636539 - RNA, 19 nt, Artificial Sequence
  Description of Artificial Sequence: Synthetic oligonucleotide
uugcagcucaaaugugcaa

SEQ ID NO: 2636540 - RNA, 19 nt, Artificial Sequence
  Description of Artificial Sequence: Synthetic oligonucleotide
ugccugguggcuugcugca

SEQ ID NO: 2636541 - RNA, 19 nt, Artificial Sequence
  Description of Artificial Sequence: Synthetic oligonucleotide
acagaucuagugccugcaa

SEQ ID NO: 2636542 - RNA, 19 nt, Artificial Sequence
  Description of Artificial Sequence: Synthetic oligonucleotide
guuuuggcuuuaaggcuug

SEQ ID NO: 2636543 - RNA, 19 nt, Artificial Sequence
  Description of Artificial Sequence: Synthetic oligonucleotide
cguccaguuuuaaugacac

SEQ ID NO: 2636544 - RNA, 19 nt, Artificial Sequence
  Description of Artificial Sequence: Synthetic oligonucleotide
caaaugugcaacguaacau

SEQ ID NO: 2636545 - RNA, 19 nt, Artificial Sequence
  Description of Artificial Sequence: Synthetic oligonucleotide
caacguaacaugaccaaau

SEQ ID NO: 2636546 - RNA, 19 nt, Artificial Sequence
  Description of Artificial Sequence: Synthetic oligonucleotide
ugagcaccuugcuguacaa

SEQ ID NO: 2636547 - RNA, 19 nt, Artificial Sequence
  Description of Artificial Sequence: Synthetic oligonucleotide
uuugagcaccuugcuguac

SEQ ID NO: 2636548 - RNA, 19 nt, Artificial Sequence
  Description of Artificial Sequence: Synthetic oligonucleotide
ucuagaguuuuggcuuuaa

SEQ ID NO: 2636549 - RNA, 19 nt, Artificial Sequence
  Description of Artificial Sequence: Synthetic oligonucleotide
ggcuuuaaggcuugcagcu

SEQ ID NO: 2636550 - RNA, 19 nt, Artificial Sequence
  Description of Artificial Sequence: Synthetic oligonucleotide
gcugcacucuucugcacag

SEQ ID NO: 2636551 - RNA, 19 nt, Artificial Sequence
  Description of Artificial Sequence: Synthetic oligonucleotide
cagagugaauuuaggggaa

SEQ ID NO: 2636552 - RNA, 19 nt, Artificial Sequence
  Description of Artificial Sequence: Synthetic oligonucleotide
ugccaaucguccaguuuua

SEQ ID NO: 2636553 - RNA, 19 nt, Artificial Sequence
  Description of Artificial Sequence: Synthetic oligonucleotide
caauuaaauucauuuucuu

SEQ ID NO: 2636554 - RNA, 19 nt, Artificial Sequence
  Description of Artificial Sequence: Synthetic oligonucleotide
acaugguauuccagaaggu

SEQ ID NO: 2636555 - RNA, 19 nt, Artificial Sequence
  Description of Artificial Sequence: Synthetic oligonucleotide
gcucaaaugugcaacguaa

SEQ ID NO: 2636556 - RNA, 19 nt, Artificial Sequence
  Description of Artificial Sequence: Synthetic oligonucleotide
cagugucagaaucagcugu

SEQ ID NO: 2636557 - RNA, 19 nt, Artificial Sequence
  Description of Artificial Sequence: Synthetic oligonucleotide
cuuuggcuacagaagcaaa

SEQ ID NO: 2636558 - RNA, 19 nt, Artificial Sequence
  Description of Artificial Sequence: Synthetic oligonucleotide
uaugcccaugaaugucgaa

SEQ ID NO: 2636559 - RNA, 19 nt, Artificial Sequence
  Description of Artificial Sequence: Synthetic oligonucleotide
aguuucuauuaaauauauu

SEQ ID NO: 2636560 - RNA, 19 nt, Artificial Sequence
  Description of Artificial Sequence: Synthetic oligonucleotide
acaauggaaaacagaucua

SEQ ID NO: 2636561 - RNA, 19 nt, Artificial Sequence
  Description of Artificial Sequence: Synthetic oligonucleotide
uuuuggcuuuaaggcuugc

SEQ ID NO: 2636562 - RNA, 19 nt, Artificial Sequence
  Description of Artificial Sequence: Synthetic oligonucleotide
ugucgaacucaaguuucua

SEQ ID NO: 2636563 - RNA, 19 nt, Artificial Sequence
  Description of Artificial Sequence: Synthetic oligonucleotide
augucgaacucaaguuucu

SEQ ID NO: 2636564 - RNA, 19 nt, Artificial Sequence
  Description of Artificial Sequence: Synthetic oligonucleotide
cacacacaacucuagaguu

SEQ ID NO: 2636565 - RNA, 19 nt, Artificial Sequence
  Description of Artificial Sequence: Synthetic oligonucleotide
gcauuaaauauaaauguuu

SEQ ID NO: 2636566 - RNA, 19 nt, Artificial Sequence
  Description of Artificial Sequence: Synthetic oligonucleotide
agugucagaaucagcuguu

SEQ ID NO: 2636567 - RNA, 19 nt, Artificial Sequence
  Description of Artificial Sequence: Synthetic oligonucleotide
agguaaagaggugccuggu

SEQ ID NO: 2636568 - RNA, 19 nt, Artificial Sequence
  Description of Artificial Sequence: Synthetic oligonucleotide
gucgaacucaaguuucuau

SEQ ID NO: 2636569 - RNA, 19 nt, Artificial Sequence
  Description of Artificial Sequence: Synthetic oligonucleotide
agagugaauuuaggggaau

SEQ ID NO: 2636570 - RNA, 19 nt, Artificial Sequence
  Description of Artificial Sequence: Synthetic oligonucleotide
gugucagaaucagcuguug

SEQ ID NO: 2636571 - RNA, 19 nt, Artificial Sequence
  Description of Artificial Sequence: Synthetic oligonucleotide
gcauuuggcauuaaauaua

SEQ ID NO: 2636572 - RNA, 19 nt, Artificial Sequence
  Description of Artificial Sequence: Synthetic oligonucleotide
aagaggugccugguggcuu

SEQ ID NO: 2636573 - RNA, 19 nt, Artificial Sequence
  Description of Artificial Sequence: Synthetic oligonucleotide
cagcaauggggugauaaaa

SEQ ID NO: 2636574 - RNA, 19 nt, Artificial Sequence
  Description of Artificial Sequence: Synthetic oligonucleotide
auguuacacaauacuuaau

SEQ ID NO: 2636575 - RNA, 19 nt, Artificial Sequence
  Description of Artificial Sequence: Synthetic oligonucleotide
cugcaacagcaauggggug

SEQ ID NO: 2636576 - RNA, 19 nt, Artificial Sequence
  Description of Artificial Sequence: Synthetic oligonucleotide
agccauaauguuacacaau

SEQ ID NO: 2636577 - RNA, 19 nt, Artificial Sequence
  Description of Artificial Sequence: Synthetic oligonucleotide
caguacuugugaagguaaa

SEQ ID NO: 2636578 - RNA, 19 nt, Artificial Sequence
  Description of Artificial Sequence: Synthetic oligonucleotide
acacacaacucuagaguuu

SEQ ID NO: 2636579 - RNA, 19 nt, Artificial Sequence
  Description of Artificial Sequence: Synthetic oligonucleotide
cagguggccugcucuacca

SEQ ID NO: 2636580 - RNA, 19 nt, Artificial Sequence
  Description of Artificial Sequence: Synthetic oligonucleotide
auacaauauuuaagucaau

SEQ ID NO: 2636581 - RNA, 19 nt, Artificial Sequence
  Description of Artificial Sequence: Synthetic oligonucleotide
cuuugagcaccuugcugua

SEQ ID NO: 2636582 - RNA, 19 nt, Artificial Sequence
  Description of Artificial Sequence: Synthetic oligonucleotide
ccaugaaugucgaacucaa

SEQ ID NO: 2636583 - RNA, 19 nt, Artificial Sequence
  Description of Artificial Sequence: Synthetic oligonucleotide
gcuacagaagcaaagccau

SEQ ID NO: 2636584 - RNA, 19 nt, Artificial Sequence
  Description of Artificial Sequence: Synthetic oligonucleotide
caugguauuccagaagguu

SEQ ID NO: 2636585 - RNA, 19 nt, Artificial Sequence
  Description of Artificial Sequence: Synthetic oligonucleotide
ggugccugguggcuugcug

SEQ ID NO: 2636586 - RNA, 19 nt, Artificial Sequence
  Description of Artificial Sequence: Synthetic oligonucleotide
cugcacucuucugcacagg

SEQ ID NO: 2636587 - RNA, 19 nt, Artificial Sequence
  Description of Artificial Sequence: Synthetic oligonucleotide
gcacaauggaaaacagauc

SEQ ID NO: 2636588 - RNA, 19 nt, Artificial Sequence
  Description of Artificial Sequence: Synthetic oligonucleotide
accuugcuguacaauuaaa

SEQ ID NO: 2636589 - RNA, 19 nt, Artificial Sequence
  Description of Artificial Sequence: Synthetic oligonucleotide
guauuccagaagguucucu

SEQ ID NO: 2636590 - RNA, 19 nt, Artificial Sequence
  Description of Artificial Sequence: Synthetic oligonucleotide
guucucuacuuuggcuaca

SEQ ID NO: 2636591 - RNA, 19 nt, Artificial Sequence
  Description of Artificial Sequence: Synthetic oligonucleotide
uauuugcauuuggcauuaa

SEQ ID NO: 2636592 - RNA, 19 nt, Artificial Sequence
  Description of Artificial Sequence: Synthetic oligonucleotide
cacagguggccugcucuac

SEQ ID NO: 2636593 - RNA, 19 nt, Artificial Sequence
  Description of Artificial Sequence: Synthetic oligonucleotide
gcaacguaacaugaccaaa

SEQ ID NO: 2636594 - RNA, 19 nt, Artificial Sequence
  Description of Artificial Sequence: Synthetic oligonucleotide
caaaugccaaucguccagu

SEQ ID NO: 2636595 - RNA, 19 nt, Artificial Sequence
  Description of Artificial Sequence: Synthetic oligonucleotide
ccaguuuuaaugacacagu

SEQ ID NO: 2636596 - RNA, 19 nt, Artificial Sequence
  Description of Artificial Sequence: Synthetic oligonucleotide
ugguggcuugcugcacucu

SEQ ID NO: 2636597 - RNA, 19 nt, Artificial Sequence
  Description of Artificial Sequence: Synthetic oligonucleotide
cccaugaaugucgaacuca

SEQ ID NO: 2636598 - RNA, 19 nt, Artificial Sequence
  Description of Artificial Sequence: Synthetic oligonucleotide
cgaacucaaguuucuauua

SEQ ID NO: 2636599 - RNA, 19 nt, Artificial Sequence
  Description of Artificial Sequence: Synthetic oligonucleotide
caacauacuuuaugcccau

SEQ ID NO: 2636600 - RNA, 19 nt, Artificial Sequence
  Description of Artificial Sequence: Synthetic oligonucleotide
gcccaugaaugucgaacuc

SEQ ID NO: 2636601 - RNA, 19 nt, Artificial Sequence
  Description of Artificial Sequence: Synthetic oligonucleotide
cagaaucagcuguugcuuu

SEQ ID NO: 2636602 - RNA, 19 nt, Artificial Sequence
  Description of Artificial Sequence: Synthetic oligonucleotide
gcaaagccauaauguuaca

SEQ ID NO: 2636603 - RNA, 19 nt, Artificial Sequence
  Description of Artificial Sequence: Synthetic oligonucleotide
cagcucaaaugugcaacgu

SEQ ID NO: 2636604 - RNA, 19 nt, Artificial Sequence
  Description of Artificial Sequence: Synthetic oligonucleotide
gccugcucuaccacacaca

SEQ ID NO: 2636605 - RNA, 19 nt, Artificial Sequence
  Description of Artificial Sequence: Synthetic oligonucleotide
cucuagaguuuuggcuuua

SEQ ID NO: 2636606 - RNA, 19 nt, Artificial Sequence
  Description of Artificial Sequence: Synthetic oligonucleotide
ccaaucguccaguuuuaau

SEQ ID NO: 2636607 - RNA, 19 nt, Artificial Sequence
  Description of Artificial Sequence: Synthetic oligonucleotide
gguggcuugcugcacucuu

SEQ ID NO: 2636608 - RNA, 19 nt, Artificial Sequence
  Description of Artificial Sequence: Synthetic oligonucleotide
gagcaccuugcuguacaau

SEQ ID NO: 2636609 - RNA, 19 nt, Artificial Sequence
  Description of Artificial Sequence: Synthetic oligonucleotide
gcucuaccacacacacaac

SEQ ID NO: 2636610 - RNA, 19 nt, Artificial Sequence
  Description of Artificial Sequence: Synthetic oligonucleotide
gccaaucguccaguuuuaa

SEQ ID NO: 2636611 - RNA, 19 nt, Artificial Sequence
  Description of Artificial Sequence: Synthetic oligonucleotide
cuauuacuuugagcaccuu

SEQ ID NO: 2636612 - RNA, 19 nt, Artificial Sequence
  Description of Artificial Sequence: Synthetic oligonucleotide
aaauacacacuucacaguc

SEQ ID NO: 2636613 - RNA, 19 nt, Artificial Sequence
  Description of Artificial Sequence: Synthetic oligonucleotide
uauuuuagcucacagaucu

SEQ ID NO: 2636614 - RNA, 19 nt, Artificial Sequence
  Description of Artificial Sequence: Synthetic oligonucleotide
agaaauacacacuucacag

SEQ ID NO: 2636615 - RNA, 19 nt, Artificial Sequence
  Description of Artificial Sequence: Synthetic oligonucleotide
cagacuacaaaucaguccg

SEQ ID NO: 2636616 - RNA, 19 nt, Artificial Sequence
  Description of Artificial Sequence: Synthetic oligonucleotide
auaaauuacaaaaugguug

SEQ ID NO: 2636617 - RNA, 19 nt, Artificial Sequence
  Description of Artificial Sequence: Synthetic oligonucleotide
uuggauaccucauugauga

SEQ ID NO: 2636618 - RNA, 19 nt, Artificial Sequence
  Description of Artificial Sequence: Synthetic oligonucleotide
aagaaauacacacuucaca

SEQ ID NO: 2636619 - RNA, 19 nt, Artificial Sequence
  Description of Artificial Sequence: Synthetic oligonucleotide
aauguaguagcacaagcga

SEQ ID NO: 2636620 - RNA, 19 nt, Artificial Sequence
  Description of Artificial Sequence: Synthetic oligonucleotide
gauguagucagacuuuucc

SEQ ID NO: 2636621 - RNA, 19 nt, Artificial Sequence
  Description of Artificial Sequence: Synthetic oligonucleotide
ucauuuaucuuccggaugu

SEQ ID NO: 2636622 - RNA, 19 nt, Artificial Sequence
  Description of Artificial Sequence: Synthetic oligonucleotide
uuugucguauuuuagcuca

SEQ ID NO: 2636623 - RNA, 19 nt, Artificial Sequence
  Description of Artificial Sequence: Synthetic oligonucleotide
uacaaaaugguugucuggg

SEQ ID NO: 2636624 - RNA, 19 nt, Artificial Sequence
  Description of Artificial Sequence: Synthetic oligonucleotide
gauauggugggccaggggc

SEQ ID NO: 2636625 - RNA, 19 nt, Artificial Sequence
  Description of Artificial Sequence: Synthetic oligonucleotide
cuacaaaucaguccgugcg

SEQ ID NO: 2636626 - RNA, 19 nt, Artificial Sequence
  Description of Artificial Sequence: Synthetic oligonucleotide
auacacacuucacagucgc

SEQ ID NO: 2636627 - RNA, 19 nt, Artificial Sequence
  Description of Artificial Sequence: Synthetic oligonucleotide
aauuacaaaaugguugucu

SEQ ID NO: 2636628 - RNA, 19 nt, Artificial Sequence
  Description of Artificial Sequence: Synthetic oligonucleotide
caauguaguagcacaagcg

SEQ ID NO: 2636629 - RNA, 19 nt, Artificial Sequence
  Description of Artificial Sequence: Synthetic oligonucleotide
aucucugucuuugaggucc

SEQ ID NO: 2636630 - RNA, 19 nt, Artificial Sequence
  Description of Artificial Sequence: Synthetic oligonucleotide
aagcgauucucuuugccuc

SEQ ID NO: 2636631 - RNA, 19 nt, Artificial Sequence
  Description of Artificial Sequence: Synthetic oligonucleotide
uuuuagcucacagaucugg

SEQ ID NO: 2636632 - RNA, 19 nt, Artificial Sequence
  Description of Artificial Sequence: Synthetic oligonucleotide
uuugccucuugcuucacgg

SEQ ID NO: 2636633 - RNA, 19 nt, Artificial Sequence
  Description of Artificial Sequence: Synthetic oligonucleotide
acuacaaaucaguccgugc

SEQ ID NO: 2636634 - RNA, 19 nt, Artificial Sequence
  Description of Artificial Sequence: Synthetic oligonucleotide
ucauuaggaaagcuccagg

SEQ ID NO: 2636635 - RNA, 19 nt, Artificial Sequence
  Description of Artificial Sequence: Synthetic oligonucleotide
uguagucagacuuuuccgc

SEQ ID NO: 2636636 - RNA, 19 nt, Artificial Sequence
  Description of Artificial Sequence: Synthetic oligonucleotide
aguucauuuaucuuccgga

SEQ ID NO: 2636637 - RNA, 19 nt, Artificial Sequence
  Description of Artificial Sequence: Synthetic oligonucleotide
ugaaaaugugacaucucug

SEQ ID NO: 2636638 - RNA, 19 nt, Artificial Sequence
  Description of Artificial Sequence: Synthetic oligonucleotide
uguuugucguauuuuagcu

SEQ ID NO: 2636639 - RNA, 19 nt, Artificial Sequence
  Description of Artificial Sequence: Synthetic oligonucleotide
acaccucauugucagaagc

SEQ ID NO: 2636640 - RNA, 19 nt, Artificial Sequence
  Description of Artificial Sequence: Synthetic oligonucleotide
cauuaggaaagcuccaggc

SEQ ID NO: 2636641 - RNA, 19 nt, Artificial Sequence
  Description of Artificial Sequence: Synthetic oligonucleotide
uuuaucuuccggauguagu

SEQ ID NO: 2636642 - RNA, 19 nt, Artificial Sequence
  Description of Artificial Sequence: Synthetic oligonucleotide
aucaguucauuuaucuucc

SEQ ID NO: 2636643 - RNA, 19 nt, Artificial Sequence
  Description of Artificial Sequence: Synthetic oligonucleotide
ucccagguaagaaauacac

SEQ ID NO: 2636644 - RNA, 19 nt, Artificial Sequence
  Description of Artificial Sequence: Synthetic oligonucleotide
agcucuuucacccggagcu

SEQ ID NO: 2636645 - RNA, 19 nt, Artificial Sequence
  Description of Artificial Sequence: Synthetic oligonucleotide
aaugugacaucucugucuu

SEQ ID NO: 2636646 - RNA, 19 nt, Artificial Sequence
  Description of Artificial Sequence: Synthetic oligonucleotide
acaagcgauucucuuugcc

SEQ ID NO: 2636647 - RNA, 19 nt, Artificial Sequence
  Description of Artificial Sequence: Synthetic oligonucleotide
aaaaugguugucuggggaa

SEQ ID NO: 2636648 - RNA, 19 nt, Artificial Sequence
  Description of Artificial Sequence: Synthetic oligonucleotide
agccuuugcacaucucucc

SEQ ID NO: 2636649 - RNA, 19 nt, Artificial Sequence
  Description of Artificial Sequence: Synthetic oligonucleotide
uucauuuaucuuccggaug

SEQ ID NO: 2636650 - RNA, 19 nt, Artificial Sequence
  Description of Artificial Sequence: Synthetic oligonucleotide
guauuuaggcaucaguuca

SEQ ID NO: 2636651 - RNA, 19 nt, Artificial Sequence
  Description of Artificial Sequence: Synthetic oligonucleotide
aacuuuacaaguucuucuu

SEQ ID NO: 2636652 - RNA, 19 nt, Artificial Sequence
  Description of Artificial Sequence: Synthetic oligonucleotide
cuguuugucguauuuuagc

SEQ ID NO: 2636653 - RNA, 19 nt, Artificial Sequence
  Description of Artificial Sequence: Synthetic oligonucleotide
aaaucaguccgugcgcugg

SEQ ID NO: 2636654 - RNA, 19 nt, Artificial Sequence
  Description of Artificial Sequence: Synthetic oligonucleotide
guagucagacuuuuccgcg

SEQ ID NO: 2636655 - RNA, 19 nt, Artificial Sequence
  Description of Artificial Sequence: Synthetic oligonucleotide
uuaggaaagcuccaggcuu

SEQ ID NO: 2636656 - RNA, 19 nt, Artificial Sequence
  Description of Artificial Sequence: Synthetic oligonucleotide
aauacacacuucacagucg

SEQ ID NO: 2636657 - RNA, 19 nt, Artificial Sequence
  Description of Artificial Sequence: Synthetic oligonucleotide
aaucaguccgugcgcuggc

SEQ ID NO: 2636658 - RNA, 19 nt, Artificial Sequence
  Description of Artificial Sequence: Synthetic oligonucleotide
uuaucuuccggauguaguc

SEQ ID NO: 2636659 - RNA, 19 nt, Artificial Sequence
  Description of Artificial Sequence: Synthetic oligonucleotide
uuuagcucacagaucuggc

SEQ ID NO: 2636660 - RNA, 19 nt, Artificial Sequence
  Description of Artificial Sequence: Synthetic oligonucleotide
uacaaaucaguccgugcgc

SEQ ID NO: 2636661 - RNA, 19 nt, Artificial Sequence
  Description of Artificial Sequence: Synthetic oligonucleotide
cuguucuucccucaggagc

SEQ ID NO: 2636662 - RNA, 19 nt, Artificial Sequence
  Description of Artificial Sequence: Synthetic oligonucleotide
aaauuacaaaaugguuguc

SEQ ID NO: 2636663 - RNA, 19 nt, Artificial Sequence
  Description of Artificial Sequence: Synthetic oligonucleotide
acaaaaugguugucugggg

SEQ ID NO: 2636664 - RNA, 19 nt, Artificial Sequence
  Description of Artificial Sequence: Synthetic oligonucleotide
agcaucauuaggaaagcuc

SEQ ID NO: 2636665 - RNA, 19 nt, Artificial Sequence
  Description of Artificial Sequence: Synthetic oligonucleotide
uggggcagacuacaaauca

SEQ ID NO: 2636666 - RNA, 19 nt, Artificial Sequence
  Description of Artificial Sequence: Synthetic oligonucleotide
uguaguagcacaagcgauu

SEQ ID NO: 2636667 - RNA, 19 nt, Artificial Sequence
  Description of Artificial Sequence: Synthetic oligonucleotide
ugguaaaaccuucccaggu

SEQ ID NO: 2636668 - RNA, 19 nt, Artificial Sequence
  Description of Artificial Sequence: Synthetic oligonucleotide
uucacagucgccuggccgc

SEQ ID NO: 2636669 - RNA, 19 nt, Artificial Sequence
  Description of Artificial Sequence: Synthetic oligonucleotide
ucguauuuuagcucacaga

SEQ ID NO: 2636670 - RNA, 19 nt, Artificial Sequence
  Description of Artificial Sequence: Synthetic oligonucleotide
uccggauguagucagacuu

SEQ ID NO: 2636671 - RNA, 19 nt, Artificial Sequence
  Description of Artificial Sequence: Synthetic oligonucleotide
uggugaaaaugugacaucu

SEQ ID NO: 2636672 - RNA, 19 nt, Artificial Sequence
  Description of Artificial Sequence: Synthetic oligonucleotide
cuuggauaccucauugaug

SEQ ID NO: 2636673 - RNA, 19 nt, Artificial Sequence
  Description of Artificial Sequence: Synthetic oligonucleotide
aaaugguugucuggggaag

SEQ ID NO: 2636674 - RNA, 19 nt, Artificial Sequence
  Description of Artificial Sequence: Synthetic oligonucleotide
uuuacaaguucuucuucaa

SEQ ID NO: 2636675 - RNA, 19 nt, Artificial Sequence
  Description of Artificial Sequence: Synthetic oligonucleotide
cacggcagaacuuuacaag

SEQ ID NO: 2636676 - RNA, 19 nt, Artificial Sequence
  Description of Artificial Sequence: Synthetic oligonucleotide
agagccagcaucauuagga

SEQ ID NO: 2636677 - RNA, 19 nt, Artificial Sequence
  Description of Artificial Sequence: Synthetic oligonucleotide
uccugguaaaaccuuccca

SEQ ID NO: 2636678 - RNA, 19 nt, Artificial Sequence
  Description of Artificial Sequence: Synthetic oligonucleotide
aauaguggcuggugaaaau

SEQ ID NO: 2636679 - RNA, 19 nt, Artificial Sequence
  Description of Artificial Sequence: Synthetic oligonucleotide
uucacggcagaacuuuaca

SEQ ID NO: 2636680 - RNA, 19 nt, Artificial Sequence
  Description of Artificial Sequence: Synthetic oligonucleotide
uggcuggugaaaaugugac

SEQ ID NO: 2636681 - RNA, 19 nt, Artificial Sequence
  Description of Artificial Sequence: Synthetic oligonucleotide
gucguauuuuagcucacag

SEQ ID NO: 2636682 - RNA, 19 nt, Artificial Sequence
  Description of Artificial Sequence: Synthetic oligonucleotide
aggcagcacgcucagggcc

SEQ ID NO: 2636683 - RNA, 19 nt, Artificial Sequence
  Description of Artificial Sequence: Synthetic oligonucleotide
acggcagaacuuuacaagu

SEQ ID NO: 2636684 - RNA, 19 nt, Artificial Sequence
  Description of Artificial Sequence: Synthetic oligonucleotide
uccacggggauaugguggg

SEQ ID NO: 2636685 - RNA, 19 nt, Artificial Sequence
  Description of Artificial Sequence: Synthetic oligonucleotide
acugugcucaggucgaucu

SEQ ID NO: 2636686 - RNA, 19 nt, Artificial Sequence
  Description of Artificial Sequence: Synthetic oligonucleotide
uugaugaucuugguggcug

SEQ ID NO: 2636687 - RNA, 19 nt, Artificial Sequence
  Description of Artificial Sequence: Synthetic oligonucleotide
uucaauaguggcuggugaa

SEQ ID NO: 2636688 - RNA, 19 nt, Artificial Sequence
  Description of Artificial Sequence: Synthetic oligonucleotide
cugguaaaaccuucccagg

SEQ ID NO: 2636689 - RNA, 19 nt, Artificial Sequence
  Description of Artificial Sequence: Synthetic oligonucleotide
cauugaugaucuugguggc

SEQ ID NO: 2636690 - RNA, 19 nt, Artificial Sequence
  Description of Artificial Sequence: Synthetic oligonucleotide
caguucauuuaucuuccgg

SEQ ID NO: 2636691 - RNA, 19 nt, Artificial Sequence
  Description of Artificial Sequence: Synthetic oligonucleotide
uucuucagguccacugugc

SEQ ID NO: 2636692 - RNA, 19 nt, Artificial Sequence
  Description of Artificial Sequence: Synthetic oligonucleotide
ccugguaaaaccuucccag

SEQ ID NO: 2636693 - RNA, 19 nt, Artificial Sequence
  Description of Artificial Sequence: Synthetic oligonucleotide
gaacuguucuucccucagg

SEQ ID NO: 2636694 - RNA, 19 nt, Artificial Sequence
  Description of Artificial Sequence: Synthetic oligonucleotide
aggucgaucuguuugucgu

SEQ ID NO: 2636695 - RNA, 19 nt, Artificial Sequence
  Description of Artificial Sequence: Synthetic oligonucleotide
uauuuaggcaucaguucau

SEQ ID NO: 2636696 - RNA, 19 nt, Artificial Sequence
  Description of Artificial Sequence: Synthetic oligonucleotide
aucauuaggaaagcuccag

SEQ ID NO: 2636697 - RNA, 19 nt, Artificial Sequence
  Description of Artificial Sequence: Synthetic oligonucleotide
cuucacagucgccuggccg

SEQ ID NO: 2636698 - RNA, 19 nt, Artificial Sequence
  Description of Artificial Sequence: Synthetic oligonucleotide
uuugagguccugguaaaac

SEQ ID NO: 2636699 - RNA, 19 nt, Artificial Sequence
  Description of Artificial Sequence: Synthetic oligonucleotide
caggcuucacaccucauug

SEQ ID NO: 2636700 - RNA, 19 nt, Artificial Sequence
  Description of Artificial Sequence: Synthetic oligonucleotide
uaccucauugaugaucuug

SEQ ID NO: 2636701 - RNA, 19 nt, Artificial Sequence
  Description of Artificial Sequence: Synthetic oligonucleotide
uuacaaguucuucuucaau

SEQ ID NO: 2636702 - RNA, 19 nt, Artificial Sequence
  Description of Artificial Sequence: Synthetic oligonucleotide
uccccagucguccaggauc

SEQ ID NO: 2636703 - RNA, 19 nt, Artificial Sequence
  Description of Artificial Sequence: Synthetic oligonucleotide
ucaguucauuuaucuuccg

SEQ ID NO: 2636704 - RNA, 19 nt, Artificial Sequence
  Description of Artificial Sequence: Synthetic oligonucleotide
gauaccucauugaugaucu

SEQ ID NO: 2636705 - RNA, 19 nt, Artificial Sequence
  Description of Artificial Sequence: Synthetic oligonucleotide
caccucauugucagaagcc

SEQ ID NO: 2636706 - RNA, 19 nt, Artificial Sequence
  Description of Artificial Sequence: Synthetic oligonucleotide
aaccuucccagguaagaaa

SEQ ID NO: 2636707 - RNA, 19 nt, Artificial Sequence
  Description of Artificial Sequence: Synthetic oligonucleotide
uguggccccaauguaguag

SEQ ID NO: 2636708 - RNA, 19 nt, Artificial Sequence
  Description of Artificial Sequence: Synthetic oligonucleotide
gcagacuacaaaucagucc

SEQ ID NO: 2636709 - RNA, 19 nt, Artificial Sequence
  Description of Artificial Sequence: Synthetic oligonucleotide
cuucccagguaagaaauac

SEQ ID NO: 2636710 - RNA, 19 nt, Artificial Sequence
  Description of Artificial Sequence: Synthetic oligonucleotide
uucacccggagcuucuuca

SEQ ID NO: 2636711 - RNA, 19 nt, Artificial Sequence
  Description of Artificial Sequence: Synthetic oligonucleotide
aucuguuugucguauuuua

SEQ ID NO: 2636712 - RNA, 19 nt, Artificial Sequence
  Description of Artificial Sequence: Synthetic oligonucleotide
uaggaaagcuccaggcuuc

SEQ ID NO: 2636713 - RNA, 19 nt, Artificial Sequence
  Description of Artificial Sequence: Synthetic oligonucleotide
guaaaaccuucccagguaa

SEQ ID NO: 2636714 - RNA, 19 nt, Artificial Sequence
  Description of Artificial Sequence: Synthetic oligonucleotide
uagucagacuuuuccgcgc

SEQ ID NO: 2636715 - RNA, 19 nt, Artificial Sequence
  Description of Artificial Sequence: Synthetic oligonucleotide
guuugucguauuuuagcuc

SEQ ID NO: 2636716 - RNA, 19 nt, Artificial Sequence
  Description of Artificial Sequence: Synthetic oligonucleotide
aaaccuucccagguaagaa

SEQ ID NO: 2636717 - RNA, 19 nt, Artificial Sequence
  Description of Artificial Sequence: Synthetic oligonucleotide
caaaaugguugucugggga

SEQ ID NO: 2636718 - RNA, 19 nt, Artificial Sequence
  Description of Artificial Sequence: Synthetic oligonucleotide
aucaucuguggccccaaug

SEQ ID NO: 2636719 - RNA, 19 nt, Artificial Sequence
  Description of Artificial Sequence: Synthetic oligonucleotide
ucagcucuuucacccggag

SEQ ID NO: 2636720 - RNA, 19 nt, Artificial Sequence
  Description of Artificial Sequence: Synthetic oligonucleotide
aggugaacuguucuucccu

SEQ ID NO: 2636721 - RNA, 19 nt, Artificial Sequence
  Description of Artificial Sequence: Synthetic oligonucleotide
gucuuugagguccugguaa

SEQ ID NO: 2636722 - RNA, 19 nt, Artificial Sequence
  Description of Artificial Sequence: Synthetic oligonucleotide
gaaauacacacuucacagu

SEQ ID NO: 2636723 - RNA, 19 nt, Artificial Sequence
  Description of Artificial Sequence: Synthetic oligonucleotide
uaucuuccggauguaguca

SEQ ID NO: 2636724 - RNA, 19 nt, Artificial Sequence
  Description of Artificial Sequence: Synthetic oligonucleotide
ggaagagacaggugaacug

SEQ ID NO: 2636725 - RNA, 19 nt, Artificial Sequence
  Description of Artificial Sequence: Synthetic oligonucleotide
cagacuuuuccgcgcagcc

SEQ ID NO: 2636726 - RNA, 19 nt, Artificial Sequence
  Description of Artificial Sequence: Synthetic oligonucleotide
gacuacaaaucaguccgug

SEQ ID NO: 2636727 - RNA, 19 nt, Artificial Sequence
  Description of Artificial Sequence: Synthetic oligonucleotide
ucaauaguggcuggugaaa

SEQ ID NO: 2636728 - RNA, 19 nt, Artificial Sequence
  Description of Artificial Sequence: Synthetic oligonucleotide
ucuccacggggauauggug

SEQ ID NO: 2636729 - RNA, 19 nt, Artificial Sequence
  Description of Artificial Sequence: Synthetic oligonucleotide
ugcacaucucuccccaguc

SEQ ID NO: 2636730 - RNA, 19 nt, Artificial Sequence
  Description of Artificial Sequence: Synthetic oligonucleotide
cuucacggcagaacuuuac

SEQ ID NO: 2636731 - RNA, 19 nt, Artificial Sequence
  Description of Artificial Sequence: Synthetic oligonucleotide
uuuccgcgcagccuuugca

SEQ ID NO: 2636732 - RNA, 19 nt, Artificial Sequence
  Description of Artificial Sequence: Synthetic oligonucleotide
ccaauguaguagcacaagc

SEQ ID NO: 2636733 - RNA, 19 nt, Artificial Sequence
  Description of Artificial Sequence: Synthetic oligonucleotide
aucuguggccccaauguag

SEQ ID NO: 2636734 - RNA, 19 nt, Artificial Sequence
  Description of Artificial Sequence: Synthetic oligonucleotide
caggucgaucuguuugucg

SEQ ID NO: 2636735 - RNA, 19 nt, Artificial Sequence
  Description of Artificial Sequence: Synthetic oligonucleotide
uuuaggcaucaguucauuu

SEQ ID NO: 2636736 - RNA, 19 nt, Artificial Sequence
  Description of Artificial Sequence: Synthetic oligonucleotide
ucagacuuuuccgcgcagc

SEQ ID NO: 2636737 - RNA, 19 nt, Artificial Sequence
  Description of Artificial Sequence: Synthetic oligonucleotide
uuuuccgcgcagccuuugc

SEQ ID NO: 2636738 - RNA, 19 nt, Artificial Sequence
  Description of Artificial Sequence: Synthetic oligonucleotide
agcacaagcgauucucuuu

SEQ ID NO: 2636739 - RNA, 19 nt, Artificial Sequence
  Description of Artificial Sequence: Synthetic oligonucleotide
ugugcucaggucgaucugu

SEQ ID NO: 2636740 - RNA, 19 nt, Artificial Sequence
  Description of Artificial Sequence: Synthetic oligonucleotide
uugucagaagccugcuuaa

SEQ ID NO: 2636741 - RNA, 19 nt, Artificial Sequence
  Description of Artificial Sequence: Synthetic oligonucleotide
guggccccaauguaguagc

SEQ ID NO: 2636742 - RNA, 19 nt, Artificial Sequence
  Description of Artificial Sequence: Synthetic oligonucleotide
cuucuccacggggauaugg

SEQ ID NO: 2636743 - RNA, 19 nt, Artificial Sequence
  Description of Artificial Sequence: Synthetic oligonucleotide
ucuugcuucacggcagaac

SEQ ID NO: 2636744 - RNA, 19 nt, Artificial Sequence
  Description of Artificial Sequence: Synthetic oligonucleotide
agucagacuuuuccgcgca

SEQ ID NO: 2636745 - RNA, 19 nt, Artificial Sequence
  Description of Artificial Sequence: Synthetic oligonucleotide
uuugcacaucucuccccag

SEQ ID NO: 2636746 - RNA, 19 nt, Artificial Sequence
  Description of Artificial Sequence: Synthetic oligonucleotide
acagucgccuggccgcagc

SEQ ID NO: 2636747 - RNA, 19 nt, Artificial Sequence
  Description of Artificial Sequence: Synthetic oligonucleotide
ugucuuugagguccuggua

SEQ ID NO: 2636748 - RNA, 19 nt, Artificial Sequence
  Description of Artificial Sequence: Synthetic oligonucleotide
cuugcuucacggcagaacu

SEQ ID NO: 2636749 - RNA, 19 nt, Artificial Sequence
  Description of Artificial Sequence: Synthetic oligonucleotide
acaaaucaguccgugcgcu

SEQ ID NO: 2636750 - RNA, 19 nt, Artificial Sequence
  Description of Artificial Sequence: Synthetic oligonucleotide
cacagaucuucuccacggg

SEQ ID NO: 2636751 - RNA, 19 nt, Artificial Sequence
  Description of Artificial Sequence: Synthetic oligonucleotide
uggggaagagacaggugaa

SEQ ID NO: 2636752 - RNA, 19 nt, Artificial Sequence
  Description of Artificial Sequence: Synthetic oligonucleotide
gaagagacaggugaacugu

SEQ ID NO: 2636753 - RNA, 19 nt, Artificial Sequence
  Description of Artificial Sequence: Synthetic oligonucleotide
gcacaagcgauucucuuug

SEQ ID NO: 2636754 - RNA, 19 nt, Artificial Sequence
  Description of Artificial Sequence: Synthetic oligonucleotide
agcgcuaccgccagcccgc

SEQ ID NO: 2636755 - RNA, 19 nt, Artificial Sequence
  Description of Artificial Sequence: Synthetic oligonucleotide
accucauugucagaagccu

SEQ ID NO: 2636756 - RNA, 19 nt, Artificial Sequence
  Description of Artificial Sequence: Synthetic oligonucleotide
ucacccggagcuucuucag

SEQ ID NO: 2636757 - RNA, 19 nt, Artificial Sequence
  Description of Artificial Sequence: Synthetic oligonucleotide
guaguagcacaagcgauuc

SEQ ID NO: 2636758 - RNA, 19 nt, Artificial Sequence
  Description of Artificial Sequence: Synthetic oligonucleotide
uucagcucuuucacccgga

SEQ ID NO: 2636759 - RNA, 19 nt, Artificial Sequence
  Description of Artificial Sequence: Synthetic oligonucleotide
guccugguaaaaccuuccc

SEQ ID NO: 2636760 - RNA, 19 nt, Artificial Sequence
  Description of Artificial Sequence: Synthetic oligonucleotide
gucagaagccugcuuaaaa

SEQ ID NO: 2636761 - RNA, 19 nt, Artificial Sequence
  Description of Artificial Sequence: Synthetic oligonucleotide
cagaucuucuccacgggga

SEQ ID NO: 2636762 - RNA, 19 nt, Artificial Sequence
  Description of Artificial Sequence: Synthetic oligonucleotide
uggcugucuuucuucuuca

SEQ ID NO: 2636763 - RNA, 19 nt, Artificial Sequence
  Description of Artificial Sequence: Synthetic oligonucleotide
gcuaccgccagcccgcgcg

SEQ ID NO: 2636764 - RNA, 19 nt, Artificial Sequence
  Description of Artificial Sequence: Synthetic oligonucleotide
uuccgcgcagccuuugcac

SEQ ID NO: 2636765 - RNA, 19 nt, Artificial Sequence
  Description of Artificial Sequence: Synthetic oligonucleotide
gguugucuggggaagagac

SEQ ID NO: 2636766 - RNA, 19 nt, Artificial Sequence
  Description of Artificial Sequence: Synthetic oligonucleotide
ugucguauuuuagcucaca

SEQ ID NO: 2636767 - RNA, 19 nt, Artificial Sequence
  Description of Artificial Sequence: Synthetic oligonucleotide
agcgauucucuuugccucu

SEQ ID NO: 2636768 - RNA, 19 nt, Artificial Sequence
  Description of Artificial Sequence: Synthetic oligonucleotide
ucaguccgugcgcuggcug

SEQ ID NO: 2636769 - RNA, 19 nt, Artificial Sequence
  Description of Artificial Sequence: Synthetic oligonucleotide
cacaccucauugucagaag

SEQ ID NO: 2636770 - RNA, 19 nt, Artificial Sequence
  Description of Artificial Sequence: Synthetic oligonucleotide
caucucuccccagucgucc

SEQ ID NO: 2636771 - RNA, 19 nt, Artificial Sequence
  Description of Artificial Sequence: Synthetic oligonucleotide
cuuccggauguagucagac

SEQ ID NO: 2636772 - RNA, 19 nt, Artificial Sequence
  Description of Artificial Sequence: Synthetic oligonucleotide
auggggcagacuacaaauc

SEQ ID NO: 2636773 - RNA, 19 nt, Artificial Sequence
  Description of Artificial Sequence: Synthetic oligonucleotide
cuugguggcugcaucaucu

SEQ ID NO: 2636774 - RNA, 19 nt, Artificial Sequence
  Description of Artificial Sequence: Synthetic oligonucleotide
caucauuaggaaagcucca

SEQ ID NO: 2636775 - RNA, 19 nt, Artificial Sequence
  Description of Artificial Sequence: Synthetic oligonucleotide
ccggcugucaggcagcacg

SEQ ID NO: 2636776 - RNA, 19 nt, Artificial Sequence
  Description of Artificial Sequence: Synthetic oligonucleotide
uugucguauuuuagcucac

SEQ ID NO: 2636777 - RNA, 19 nt, Artificial Sequence
  Description of Artificial Sequence: Synthetic oligonucleotide
agguccugguaaaaccuuc

SEQ ID NO: 2636778 - RNA, 19 nt, Artificial Sequence
  Description of Artificial Sequence: Synthetic oligonucleotide
caaaucaguccgugcgcug

SEQ ID NO: 2636779 - RNA, 19 nt, Artificial Sequence
  Description of Artificial Sequence: Synthetic oligonucleotide
ugcuucacggcagaacuuu

SEQ ID NO: 2636780 - RNA, 19 nt, Artificial Sequence
  Description of Artificial Sequence: Synthetic oligonucleotide
agcacgcucagggccagcg

SEQ ID NO: 2636781 - RNA, 19 nt, Artificial Sequence
  Description of Artificial Sequence: Synthetic oligonucleotide
uuucacccggagcuucuuc

SEQ ID NO: 2636782 - RNA, 19 nt, Artificial Sequence
  Description of Artificial Sequence: Synthetic oligonucleotide
uuccggauguagucagacu

SEQ ID NO: 2636783 - RNA, 19 nt, Artificial Sequence
  Description of Artificial Sequence: Synthetic oligonucleotide
auguaguagcacaagcgau

SEQ ID NO: 2636784 - RNA, 19 nt, Artificial Sequence
  Description of Artificial Sequence: Synthetic oligonucleotide
ucauugucagaagccugcu

SEQ ID NO: 2636785 - RNA, 19 nt, Artificial Sequence
  Description of Artificial Sequence: Synthetic oligonucleotide
auugaugaucuugguggcu

SEQ ID NO: 2636786 - RNA, 19 nt, Artificial Sequence
  Description of Artificial Sequence: Synthetic oligonucleotide
gcugcaucaucuguggccc

SEQ ID NO: 2636787 - RNA, 19 nt, Artificial Sequence
  Description of Artificial Sequence: Synthetic oligonucleotide
uccgcgcagccuuugcaca

SEQ ID NO: 2636788 - RNA, 19 nt, Artificial Sequence
  Description of Artificial Sequence: Synthetic oligonucleotide
cagcgcuaccgccagcccg

SEQ ID NO: 2636789 - RNA, 19 nt, Artificial Sequence
  Description of Artificial Sequence: Synthetic oligonucleotide
guucauuuaucuuccggau

SEQ ID NO: 2636790 - RNA, 19 nt, Artificial Sequence
  Description of Artificial Sequence: Synthetic oligonucleotide
cacaagcgauucucuuugc

SEQ ID NO: 2636791 - RNA, 19 nt, Artificial Sequence
  Description of Artificial Sequence: Synthetic oligonucleotide
ugcaucaucuguggcccca

SEQ ID NO: 2636792 - RNA, 19 nt, Artificial Sequence
  Description of Artificial Sequence: Synthetic oligonucleotide
caagcgauucucuuugccu

SEQ ID NO: 2636793 - RNA, 19 nt, Artificial Sequence
  Description of Artificial Sequence: Synthetic oligonucleotide
gagccagcaucauuaggaa

SEQ ID NO: 2636794 - RNA, 19 nt, Artificial Sequence
  Description of Artificial Sequence: Synthetic oligonucleotide
aguggcuggugaaaaugug

SEQ ID NO: 2636795 - RNA, 19 nt, Artificial Sequence
  Description of Artificial Sequence: Synthetic oligonucleotide
cacggggauauggugggcc

SEQ ID NO: 2636796 - RNA, 19 nt, Artificial Sequence
  Description of Artificial Sequence: Synthetic oligonucleotide
ggauaccucauugaugauc

SEQ ID NO: 2636797 - RNA, 19 nt, Artificial Sequence
  Description of Artificial Sequence: Synthetic oligonucleotide
caguccgugcgcuggcugc

SEQ ID NO: 2636798 - RNA, 19 nt, Artificial Sequence
  Description of Artificial Sequence: Synthetic oligonucleotide
gggcuuggauaccucauug

SEQ ID NO: 2636799 - RNA, 19 nt, Artificial Sequence
  Description of Artificial Sequence: Synthetic oligonucleotide
guggcuggugaaaauguga

SEQ ID NO: 2636800 - RNA, 19 nt, Artificial Sequence
  Description of Artificial Sequence: Synthetic oligonucleotide
ucucugucuuugagguccu

SEQ ID NO: 2636801 - RNA, 19 nt, Artificial Sequence
  Description of Artificial Sequence: Synthetic oligonucleotide
uucacaccucauugucaga

SEQ ID NO: 2636802 - RNA, 19 nt, Artificial Sequence
  Description of Artificial Sequence: Synthetic oligonucleotide
gguggcugcaucaucugug

SEQ ID NO: 2636803 - RNA, 19 nt, Artificial Sequence
  Description of Artificial Sequence: Synthetic oligonucleotide
accuucccagguaagaaau

SEQ ID NO: 2636804 - RNA, 19 nt, Artificial Sequence
  Description of Artificial Sequence: Synthetic oligonucleotide
ggauauggugggccagggg

SEQ ID NO: 2636805 - RNA, 19 nt, Artificial Sequence
  Description of Artificial Sequence: Synthetic oligonucleotide
gacuuuuccgcgcagccuu

SEQ ID NO: 2636806 - RNA, 19 nt, Artificial Sequence
  Description of Artificial Sequence: Synthetic oligonucleotide
caggcagcacgcucagggc

SEQ ID NO: 2636807 - RNA, 19 nt, Artificial Sequence
  Description of Artificial Sequence: Synthetic oligonucleotide
cagcucuuucacccggagc

SEQ ID NO: 2636808 - RNA, 19 nt, Artificial Sequence
  Description of Artificial Sequence: Synthetic oligonucleotide
gcacaucucuccccagucg

SEQ ID NO: 2636809 - RNA, 19 nt, Artificial Sequence
  Description of Artificial Sequence: Synthetic oligonucleotide
auauggugggccaggggcu

SEQ ID NO: 2636810 - RNA, 19 nt, Artificial Sequence
  Description of Artificial Sequence: Synthetic oligonucleotide
gucgccuggccgcagcgcc

SEQ ID NO: 2636811 - RNA, 19 nt, Artificial Sequence
  Description of Artificial Sequence: Synthetic oligonucleotide
acggggauauggugggcca

SEQ ID NO: 2636812 - RNA, 19 nt, Artificial Sequence
  Description of Artificial Sequence: Synthetic oligonucleotide
auuuuagcucacagaucug

SEQ ID NO: 2636813 - RNA, 19 nt, Artificial Sequence
  Description of Artificial Sequence: Synthetic oligonucleotide
cacccggagcuucuucagg

SEQ ID NO: 2636814 - RNA, 19 nt, Artificial Sequence
  Description of Artificial Sequence: Synthetic oligonucleotide
ggcuucacaccucauuguc

SEQ ID NO: 2636815 - RNA, 19 nt, Artificial Sequence
  Description of Artificial Sequence: Synthetic oligonucleotide
ugucagaagccugcuuaaa

SEQ ID NO: 2636816 - RNA, 19 nt, Artificial Sequence
  Description of Artificial Sequence: Synthetic oligonucleotide
agccagcaucauuaggaaa

SEQ ID NO: 2636817 - RNA, 19 nt, Artificial Sequence
  Description of Artificial Sequence: Synthetic oligonucleotide
cguauuuuagcucacagau

SEQ ID NO: 2636818 - RNA, 19 nt, Artificial Sequence
  Description of Artificial Sequence: Synthetic oligonucleotide
aagagacaggugaacuguu

SEQ ID NO: 2636819 - RNA, 19 nt, Artificial Sequence
  Description of Artificial Sequence: Synthetic oligonucleotide
auuuaggcaucaguucauu

SEQ ID NO: 2636820 - RNA, 19 nt, Artificial Sequence
  Description of Artificial Sequence: Synthetic oligonucleotide
ucagguccacugugcucag

SEQ ID NO: 2636821 - RNA, 19 nt, Artificial Sequence
  Description of Artificial Sequence: Synthetic oligonucleotide
agacuuuuccgcgcagccu

SEQ ID NO: 2636822 - RNA, 19 nt, Artificial Sequence
  Description of Artificial Sequence: Synthetic oligonucleotide
uugcuucacggcagaacuu

SEQ ID NO: 2636823 - RNA, 19 nt, Artificial Sequence
  Description of Artificial Sequence: Synthetic oligonucleotide
acaucucuccccagucguc

SEQ ID NO: 2636824 - RNA, 19 nt, Artificial Sequence
  Description of Artificial Sequence: Synthetic oligonucleotide
gaugaucuugguggcugca

SEQ ID NO: 2636825 - RNA, 19 nt, Artificial Sequence
  Description of Artificial Sequence: Synthetic oligonucleotide
gucagacuuuuccgcgcag

SEQ ID NO: 2636826 - RNA, 19 nt, Artificial Sequence
  Description of Artificial Sequence: Synthetic oligonucleotide
ucuccccagucguccagga

SEQ ID NO: 2636827 - RNA, 19 nt, Artificial Sequence
  Description of Artificial Sequence: Synthetic oligonucleotide
gccuuugcacaucucuccc

SEQ ID NO: 2636828 - RNA, 19 nt, Artificial Sequence
  Description of Artificial Sequence: Synthetic oligonucleotide
aggcaucaguucauuuauc

SEQ ID NO: 2636829 - RNA, 19 nt, Artificial Sequence
  Description of Artificial Sequence: Synthetic oligonucleotide
ggggcagacuacaaaucag

SEQ ID NO: 2636830 - RNA, 19 nt, Artificial Sequence
  Description of Artificial Sequence: Synthetic oligonucleotide
cagggauggggcagacuac

SEQ ID NO: 2636831 - RNA, 19 nt, Artificial Sequence
  Description of Artificial Sequence: Synthetic oligonucleotide
caauaguggcuggugaaaa

SEQ ID NO: 2636832 - RNA, 19 nt, Artificial Sequence
  Description of Artificial Sequence: Synthetic oligonucleotide
agucgccuggccgcagcgc

SEQ ID NO: 2636833 - RNA, 19 nt, Artificial Sequence
  Description of Artificial Sequence: Synthetic oligonucleotide
gguccugguaaaaccuucc

SEQ ID NO: 2636834 - RNA, 19 nt, Artificial Sequence
  Description of Artificial Sequence: Synthetic oligonucleotide
uggccccaauguaguagca

SEQ ID NO: 2636835 - RNA, 19 nt, Artificial Sequence
  Description of Artificial Sequence: Synthetic oligonucleotide
gcuggugaaaaugugacau

SEQ ID NO: 2636836 - RNA, 19 nt, Artificial Sequence
  Description of Artificial Sequence: Synthetic oligonucleotide
ucaggucgaucuguuuguc

SEQ ID NO: 2636837 - RNA, 19 nt, Artificial Sequence
  Description of Artificial Sequence: Synthetic oligonucleotide
ccuuugcacaucucucccc

SEQ ID NO: 2636838 - RNA, 19 nt, Artificial Sequence
  Description of Artificial Sequence: Synthetic oligonucleotide
cucuuucacccggagcuuc

SEQ ID NO: 2636839 - RNA, 19 nt, Artificial Sequence
  Description of Artificial Sequence: Synthetic oligonucleotide
ggcuuggauaccucauuga

SEQ ID NO: 2636840 - RNA, 19 nt, Artificial Sequence
  Description of Artificial Sequence: Synthetic oligonucleotide
gcgcguagcccacaucucc

SEQ ID NO: 2636841 - RNA, 19 nt, Artificial Sequence
  Description of Artificial Sequence: Synthetic oligonucleotide
cugugcucaggucgaucug

SEQ ID NO: 2636842 - RNA, 19 nt, Artificial Sequence
  Description of Artificial Sequence: Synthetic oligonucleotide
ggcagacuacaaaucaguc

SEQ ID NO: 2636843 - RNA, 19 nt, Artificial Sequence
  Description of Artificial Sequence: Synthetic oligonucleotide
cucuccccagucguccagg

SEQ ID NO: 2636844 - RNA, 19 nt, Artificial Sequence
  Description of Artificial Sequence: Synthetic oligonucleotide
ucgaucuguuugucguauu

SEQ ID NO: 2636845 - RNA, 19 nt, Artificial Sequence
  Description of Artificial Sequence: Synthetic oligonucleotide
accgccagcccgcgcguag

SEQ ID NO: 2636846 - RNA, 19 nt, Artificial Sequence
  Description of Artificial Sequence: Synthetic oligonucleotide
augaucuugguggcugcau

SEQ ID NO: 2636847 - RNA, 19 nt, Artificial Sequence
  Description of Artificial Sequence: Synthetic oligonucleotide
ggugaaaaugugacaucuc

SEQ ID NO: 2636848 - RNA, 19 nt, Artificial Sequence
  Description of Artificial Sequence: Synthetic oligonucleotide
uggauaccucauugaugau

SEQ ID NO: 2636849 - RNA, 19 nt, Artificial Sequence
  Description of Artificial Sequence: Synthetic oligonucleotide
agacuacaaaucaguccgu

SEQ ID NO: 2636850 - RNA, 19 nt, Artificial Sequence
  Description of Artificial Sequence: Synthetic oligonucleotide
cagucgccuggccgcagcg

SEQ ID NO: 2636851 - RNA, 19 nt, Artificial Sequence
  Description of Artificial Sequence: Synthetic oligonucleotide
ggcguauuuaggcaucagu

SEQ ID NO: 2636852 - RNA, 19 nt, Artificial Sequence
  Description of Artificial Sequence: Synthetic oligonucleotide
ggcugucuuucuucuucag

SEQ ID NO: 2636853 - RNA, 19 nt, Artificial Sequence
  Description of Artificial Sequence: Synthetic oligonucleotide
gcagccuuugcacaucucu

SEQ ID NO: 2636854 - RNA, 19 nt, Artificial Sequence
  Description of Artificial Sequence: Synthetic oligonucleotide
cagucguccaggaucuucu

SEQ ID NO: 2636855 - RNA, 19 nt, Artificial Sequence
  Description of Artificial Sequence: Synthetic oligonucleotide
ggcuggugaaaaugugaca

SEQ ID NO: 2636856 - RNA, 19 nt, Artificial Sequence
  Description of Artificial Sequence: Synthetic oligonucleotide
ccagcaucauuaggaaagc

SEQ ID NO: 2636857 - RNA, 19 nt, Artificial Sequence
  Description of Artificial Sequence: Synthetic oligonucleotide
ugcucaggucgaucuguuu

SEQ ID NO: 2636858 - RNA, 19 nt, Artificial Sequence
  Description of Artificial Sequence: Synthetic oligonucleotide
cugcaucaucuguggcccc

SEQ ID NO: 2636859 - RNA, 19 nt, Artificial Sequence
  Description of Artificial Sequence: Synthetic oligonucleotide
gucuggggaagagacaggu

SEQ ID NO: 2636860 - RNA, 19 nt, Artificial Sequence
  Description of Artificial Sequence: Synthetic oligonucleotide
cccaauguaguagcacaag

SEQ ID NO: 2636861 - RNA, 19 nt, Artificial Sequence
  Description of Artificial Sequence: Synthetic oligonucleotide
guucuucccucaggagcag

SEQ ID NO: 2636862 - RNA, 19 nt, Artificial Sequence
  Description of Artificial Sequence: Synthetic oligonucleotide
ggauggggcagacuacaaa

SEQ ID NO: 2636863 - RNA, 19 nt, Artificial Sequence
  Description of Artificial Sequence: Synthetic oligonucleotide
cuuuuccgcgcagccuuug

SEQ ID NO: 2636864 - RNA, 19 nt, Artificial Sequence
  Description of Artificial Sequence: Synthetic oligonucleotide
gcugucaggcagcacgcuc

SEQ ID NO: 2636865 - RNA, 19 nt, Artificial Sequence
  Description of Artificial Sequence: Synthetic oligonucleotide
uccaggcuucacaccucau

SEQ ID NO: 2636866 - RNA, 19 nt, Artificial Sequence
  Description of Artificial Sequence: Synthetic oligonucleotide
agucguccaggaucuucuu

SEQ ID NO: 2636867 - RNA, 19 nt, Artificial Sequence
  Description of Artificial Sequence: Synthetic oligonucleotide
caucuguggccccaaugua

SEQ ID NO: 2636868 - RNA, 19 nt, Artificial Sequence
  Description of Artificial Sequence: Synthetic oligonucleotide
guagcacaagcgauucucu

SEQ ID NO: 2636869 - RNA, 19 nt, Artificial Sequence
  Description of Artificial Sequence: Synthetic oligonucleotide
ggggaagagacaggugaac

SEQ ID NO: 2636870 - RNA, 19 nt, Artificial Sequence
  Description of Artificial Sequence: Synthetic oligonucleotide
cagcgcccggcugucaggc

SEQ ID NO: 2636871 - RNA, 19 nt, Artificial Sequence
  Description of Artificial Sequence: Synthetic oligonucleotide
ucuucuccacggggauaug

SEQ ID NO: 2636872 - RNA, 19 nt, Artificial Sequence
  Description of Artificial Sequence: Synthetic oligonucleotide
gcguagcccacaucucccc

SEQ ID NO: 2636873 - RNA, 19 nt, Artificial Sequence
  Description of Artificial Sequence: Synthetic oligonucleotide
cuuugagguccugguaaaa

SEQ ID NO: 2636874 - RNA, 19 nt, Artificial Sequence
  Description of Artificial Sequence: Synthetic oligonucleotide
gcguauuuaggcaucaguu

SEQ ID NO: 2636875 - RNA, 19 nt, Artificial Sequence
  Description of Artificial Sequence: Synthetic oligonucleotide
auaccucauugaugaucuu

SEQ ID NO: 2636876 - RNA, 19 nt, Artificial Sequence
  Description of Artificial Sequence: Synthetic oligonucleotide
aguccgugcgcuggcugcu

SEQ ID NO: 2636877 - RNA, 19 nt, Artificial Sequence
  Description of Artificial Sequence: Synthetic oligonucleotide
aggggcuuggauaccucau

SEQ ID NO: 2636878 - RNA, 19 nt, Artificial Sequence
  Description of Artificial Sequence: Synthetic oligonucleotide
aucaguccgugcgcuggcu

SEQ ID NO: 2636879 - RNA, 19 nt, Artificial Sequence
  Description of Artificial Sequence: Synthetic oligonucleotide
cacgcucagggccagcgcu

SEQ ID NO: 2636880 - RNA, 19 nt, Artificial Sequence
  Description of Artificial Sequence: Synthetic oligonucleotide
cacugugcucaggucgauc

SEQ ID NO: 2636881 - RNA, 19 nt, Artificial Sequence
  Description of Artificial Sequence: Synthetic oligonucleotide
uccgugcgcuggcugcuuu

SEQ ID NO: 2636882 - RNA, 19 nt, Artificial Sequence
  Description of Artificial Sequence: Synthetic oligonucleotide
augugacaucucugucuuu

SEQ ID NO: 2636883 - RNA, 19 nt, Artificial Sequence
  Description of Artificial Sequence: Synthetic oligonucleotide
gcgcccggcugucaggcag

SEQ ID NO: 2636884 - RNA, 19 nt, Artificial Sequence
  Description of Artificial Sequence: Synthetic oligonucleotide
gggcagacuacaaaucagu

SEQ ID NO: 2636885 - RNA, 19 nt, Artificial Sequence
  Description of Artificial Sequence: Synthetic oligonucleotide
ggccccaauguaguagcac

SEQ ID NO: 2636886 - RNA, 19 nt, Artificial Sequence
  Description of Artificial Sequence: Synthetic oligonucleotide
gucgaucuguuugucguau

SEQ ID NO: 2636887 - RNA, 19 nt, Artificial Sequence
  Description of Artificial Sequence: Synthetic oligonucleotide
gcagcgcccggcugucagg

SEQ ID NO: 2636888 - RNA, 19 nt, Artificial Sequence
  Description of Artificial Sequence: Synthetic oligonucleotide
cagguccacugugcucagg

SEQ ID NO: 2636889 - RNA, 19 nt, Artificial Sequence
  Description of Artificial Sequence: Synthetic oligonucleotide
cauuuaucuuccggaugua

SEQ ID NO: 2636890 - RNA, 19 nt, Artificial Sequence
  Description of Artificial Sequence: Synthetic oligonucleotide
gcaucaguucauuuaucuu

SEQ ID NO: 2636891 - RNA, 19 nt, Artificial Sequence
  Description of Artificial Sequence: Synthetic oligonucleotide
ggucgaucuguuugucgua

SEQ ID NO: 2636892 - RNA, 19 nt, Artificial Sequence
  Description of Artificial Sequence: Synthetic oligonucleotide
ccagucguccaggaucuuc

SEQ ID NO: 2636893 - RNA, 19 nt, Artificial Sequence
  Description of Artificial Sequence: Synthetic oligonucleotide
cagaucuggcugucuuucu

SEQ ID NO: 2636894 - RNA, 19 nt, Artificial Sequence
  Description of Artificial Sequence: Synthetic oligonucleotide
gggcguauuuaggcaucag

SEQ ID NO: 2636895 - RNA, 19 nt, Artificial Sequence
  Description of Artificial Sequence: Synthetic oligonucleotide
ccccaauguaguagcacaa

SEQ ID NO: 2636896 - RNA, 19 nt, Artificial Sequence
  Description of Artificial Sequence: Synthetic oligonucleotide
cacagaucuggcugucuuu

SEQ ID NO: 2636897 - RNA, 19 nt, Artificial Sequence
  Description of Artificial Sequence: Synthetic oligonucleotide
acuuuuccgcgcagccuuu

SEQ ID NO: 2636898 - RNA, 19 nt, Artificial Sequence
  Description of Artificial Sequence: Synthetic oligonucleotide
gcacgcucagggccagcgc

SEQ ID NO: 2636899 - RNA, 19 nt, Artificial Sequence
  Description of Artificial Sequence: Synthetic oligonucleotide
agcgcccggcugucaggca

SEQ ID NO: 2636900 - RNA, 19 nt, Artificial Sequence
  Description of Artificial Sequence: Synthetic oligonucleotide
cauugucagaagccugcuu

SEQ ID NO: 2636901 - RNA, 19 nt, Artificial Sequence
  Description of Artificial Sequence: Synthetic oligonucleotide
ggggcguauuuaggcauca

SEQ ID NO: 2636902 - RNA, 19 nt, Artificial Sequence
  Description of Artificial Sequence: Synthetic oligonucleotide
cagcccgcgcguagcccac

SEQ ID NO: 2636903 - RNA, 19 nt, Artificial Sequence
  Description of Artificial Sequence: Synthetic oligonucleotide
cggcugucaggcagcacgc

SEQ ID NO: 2636904 - RNA, 19 nt, Artificial Sequence
  Description of Artificial Sequence: Synthetic oligonucleotide
cuguggccccaauguagua

SEQ ID NO: 2636905 - RNA, 19 nt, Artificial Sequence
  Description of Artificial Sequence: Synthetic oligonucleotide
cagcaucauuaggaaagcu

SEQ ID NO: 2636906 - RNA, 19 nt, Artificial Sequence
  Description of Artificial Sequence: Synthetic oligonucleotide
cgugcgcuggcugcuuugg

SEQ ID NO: 2636907 - RNA, 19 nt, Artificial Sequence
  Description of Artificial Sequence: Synthetic oligonucleotide
ccgcgcguagcccacaucu

SEQ ID NO: 2636908 - RNA, 19 nt, Artificial Sequence
  Description of Artificial Sequence: Synthetic oligonucleotide
ccagcccgcgcguagccca

SEQ ID NO: 2636909 - RNA, 19 nt, Artificial Sequence
  Description of Artificial Sequence: Synthetic oligonucleotide
ccagcgcuaccgccagccc

SEQ ID NO: 2636910 - RNA, 19 nt, Artificial Sequence
  Description of Artificial Sequence: Synthetic oligonucleotide
cucuugcuucacggcagaa

SEQ ID NO: 2636911 - RNA, 19 nt, Artificial Sequence
  Description of Artificial Sequence: Synthetic oligonucleotide
cgauucucuuugccucuug

SEQ ID NO: 2636912 - RNA, 19 nt, Artificial Sequence
  Description of Artificial Sequence: Synthetic oligonucleotide
ccaggggcuuggauaccuc

SEQ ID NO: 2636913 - RNA, 19 nt, Artificial Sequence
  Description of Artificial Sequence: Synthetic oligonucleotide
ccuucccagguaagaaaua

SEQ ID NO: 2636914 - RNA, 19 nt, Artificial Sequence
  Description of Artificial Sequence: Synthetic oligonucleotide
ccucuugcuucacggcaga

SEQ ID NO: 2636915 - RNA, 19 nt, Artificial Sequence
  Description of Artificial Sequence: Synthetic oligonucleotide
acgcucagggccagcgcua

SEQ ID NO: 2636916 - RNA, 19 nt, Artificial Sequence
  Description of Artificial Sequence: Synthetic oligonucleotide
ccgugcgcuggcugcuuug

SEQ ID NO: 2636917 - RNA, 19 nt, Artificial Sequence
  Description of Artificial Sequence: Synthetic oligonucleotide
ccccagucguccaggaucu

SEQ ID NO: 2636918 - RNA, 19 nt, Artificial Sequence
  Description of Artificial Sequence: Synthetic oligonucleotide
gcuucacggcagaacuuua

SEQ ID NO: 2636919 - RNA, 19 nt, Artificial Sequence
  Description of Artificial Sequence: Synthetic oligonucleotide
cguagcccacaucucccca

SEQ ID NO: 2636920 - RNA, 19 nt, Artificial Sequence
  Description of Artificial Sequence: Synthetic oligonucleotide
ccaggcuucacaccucauu

SEQ ID NO: 2636921 - RNA, 19 nt, Artificial Sequence
  Description of Artificial Sequence: Synthetic oligonucleotide
ggccaggggcuuggauacc

SEQ ID NO: 2636922 - RNA, 19 nt, Artificial Sequence
  Description of Artificial Sequence: Synthetic oligonucleotide
cgcgcguagcccacaucuc

SEQ ID NO: 2636923 - RNA, 19 nt, Artificial Sequence
  Description of Artificial Sequence: Synthetic oligonucleotide
ccggauguagucagacuuu

SEQ ID NO: 2636924 - RNA, 19 nt, Artificial Sequence
  Description of Artificial Sequence: Synthetic oligonucleotide
cgcccggcugucaggcagc

SEQ ID NO: 2636925 - RNA, 19 nt, Artificial Sequence
  Description of Artificial Sequence: Synthetic oligonucleotide
ggccgcagcgcccggcugu

SEQ ID NO: 2636926 - RNA, 19 nt, Artificial Sequence
  Description of Artificial Sequence: Synthetic oligonucleotide
ccacggggauauggugggc

SEQ ID NO: 2636927 - RNA, 19 nt, Artificial Sequence
  Description of Artificial Sequence: Synthetic oligonucleotide
gcgcagccuuugcacaucu

SEQ ID NO: 2636928 - RNA, 19 nt, Artificial Sequence
  Description of Artificial Sequence: Synthetic oligonucleotide
gugcucaggucgaucuguu

SEQ ID NO: 2636929 - RNA, 19 nt, Artificial Sequence
  Description of Artificial Sequence: Synthetic oligonucleotide
cuaccgccagcccgcgcgu

SEQ ID NO: 2636930 - RNA, 19 nt, Artificial Sequence
  Description of Artificial Sequence: Synthetic oligonucleotide
agcccgcgcguagcccaca

SEQ ID NO: 2636931 - RNA, 19 nt, Artificial Sequence
  Description of Artificial Sequence: Synthetic oligonucleotide
ggccagcgcuaccgccagc

SEQ ID NO: 2636932 - RNA, 19 nt, Artificial Sequence
  Description of Artificial Sequence: Synthetic oligonucleotide
cuccccagucguccaggau

SEQ ID NO: 2636933 - RNA, 19 nt, Artificial Sequence
  Description of Artificial Sequence: Synthetic oligonucleotide
cuuucacccggagcuucuu

SEQ ID NO: 2636934 - RNA, 19 nt, Artificial Sequence
  Description of Artificial Sequence: Synthetic oligonucleotide
gcgcuaccgccagcccgcg

SEQ ID NO: 2636935 - RNA, 19 nt, Artificial Sequence
  Description of Artificial Sequence: Synthetic oligonucleotide
ccgccagcccgcgcguagc

SEQ ID NO: 2636936 - RNA, 19 nt, Artificial Sequence
  Description of Artificial Sequence: Synthetic oligonucleotide
cgcucagggccagcgcuac

SEQ ID NO: 2636937 - RNA, 19 nt, Artificial Sequence
  Description of Artificial Sequence: Synthetic oligonucleotide
cgcagccuuugcacaucuc

SEQ ID NO: 2636938 - RNA, 19 nt, Artificial Sequence
  Description of Artificial Sequence: Synthetic oligonucleotide
cggcagaacuuuacaaguu

SEQ ID NO: 2636939 - RNA, 19 nt, Artificial Sequence
  Description of Artificial Sequence: Synthetic oligonucleotide
cccgcgcguagcccacauc

SEQ ID NO: 2636940 - RNA, 19 nt, Artificial Sequence
  Description of Artificial Sequence: Synthetic oligonucleotide
ggcugucaggcagcacgcu

SEQ ID NO: 2636941 - RNA, 19 nt, Artificial Sequence
  Description of Artificial Sequence: Synthetic oligonucleotide
cgcgcagccuuugcacauc

SEQ ID NO: 2636942 - RNA, 19 nt, Artificial Sequence
  Description of Artificial Sequence: Synthetic oligonucleotide
gcccggcugucaggcagca

SEQ ID NO: 2636943 - RNA, 19 nt, Artificial Sequence
  Description of Artificial Sequence: Synthetic oligonucleotide
gcgauucucuuugccucuu

SEQ ID NO: 2636944 - RNA, 19 nt, Artificial Sequence
  Description of Artificial Sequence: Synthetic oligonucleotide
ccgcgcagccuuugcacau

SEQ ID NO: 2636945 - RNA, 19 nt, Artificial Sequence
  Description of Artificial Sequence: Synthetic oligonucleotide
cgcuaccgccagcccgcgc

SEQ ID NO: 2636946 - RNA, 19 nt, Artificial Sequence
  Description of Artificial Sequence: Synthetic oligonucleotide
cccggcugucaggcagcac

SEQ ID NO: 2636947 - RNA, 19 nt, Artificial Sequence
  Description of Artificial Sequence: Synthetic oligonucleotide
guccgugcgcuggcugcuu

SEQ ID NO: 2636948 - RNA, 19 nt, Artificial Sequence
  Description of Artificial Sequence: Synthetic oligonucleotide
gcccgcgcguagcccacau

SEQ ID NO: 2636949 - RNA, 19 nt, Artificial Sequence
  Description of Artificial Sequence: Synthetic oligonucleotide
ccacugugcucaggucgau

SEQ ID NO: 2636950 - RNA, 19 nt, Artificial Sequence
  Description of Artificial Sequence: Synthetic oligonucleotide
ccgcagcgcccggcuguca

SEQ ID NO: 2636951 - RNA, 19 nt, Artificial Sequence
  Description of Artificial Sequence: Synthetic oligonucleotide
cccagucguccaggaucuu

SEQ ID NO: 2636952 - RNA, 19 nt, Artificial Sequence
  Description of Artificial Sequence: Synthetic oligonucleotide
aaucauuaaauauauuaac

SEQ ID NO: 2636953 - RNA, 19 nt, Artificial Sequence
  Description of Artificial Sequence: Synthetic oligonucleotide
aaaacuauuaauacagucc

SEQ ID NO: 2636954 - RNA, 19 nt, Artificial Sequence
  Description of Artificial Sequence: Synthetic oligonucleotide
uauacaauacuuuacacag

SEQ ID NO: 2636955 - RNA, 19 nt, Artificial Sequence
  Description of Artificial Sequence: Synthetic oligonucleotide
aaauguacaaacuaucuca

SEQ ID NO: 2636956 - RNA, 19 nt, Artificial Sequence
  Description of Artificial Sequence: Synthetic oligonucleotide
aauauauuaacaccgaaau

SEQ ID NO: 2636957 - RNA, 19 nt, Artificial Sequence
  Description of Artificial Sequence: Synthetic oligonucleotide
auuaaauauauuaacaccg

SEQ ID NO: 2636958 - RNA, 19 nt, Artificial Sequence
  Description of Artificial Sequence: Synthetic oligonucleotide
uuaaucauuaaauauauua

SEQ ID NO: 2636959 - RNA, 19 nt, Artificial Sequence
  Description of Artificial Sequence: Synthetic oligonucleotide
gaacauacuaccaugaagg

SEQ ID NO: 2636960 - RNA, 19 nt, Artificial Sequence
  Description of Artificial Sequence: Synthetic oligonucleotide
ucauguauaaauuaggaaa

SEQ ID NO: 2636961 - RNA, 19 nt, Artificial Sequence
  Description of Artificial Sequence: Synthetic oligonucleotide
uaaacauuauuauuaauca

SEQ ID NO: 2636962 - RNA, 19 nt, Artificial Sequence
  Description of Artificial Sequence: Synthetic oligonucleotide
aacaaaacguuaaauaaac

SEQ ID NO: 2636963 - RNA, 19 nt, Artificial Sequence
  Description of Artificial Sequence: Synthetic oligonucleotide
aaacuauuaauacagucca

SEQ ID NO: 2636964 - RNA, 19 nt, Artificial Sequence
  Description of Artificial Sequence: Synthetic oligonucleotide
aaauuacauaaacaugaac

SEQ ID NO: 2636965 - RNA, 19 nt, Artificial Sequence
  Description of Artificial Sequence: Synthetic oligonucleotide
auuauuaaucauuaaauau

SEQ ID NO: 2636966 - RNA, 19 nt, Artificial Sequence
  Description of Artificial Sequence: Synthetic oligonucleotide
aauaaauguacaaacuauc

SEQ ID NO: 2636967 - RNA, 19 nt, Artificial Sequence
  Description of Artificial Sequence: Synthetic oligonucleotide
uuauuaaucauuaaauaua

SEQ ID NO: 2636968 - RNA, 19 nt, Artificial Sequence
  Description of Artificial Sequence: Synthetic oligonucleotide
aaguaugucacaccaucgc

SEQ ID NO: 2636969 - RNA, 19 nt, Artificial Sequence
  Description of Artificial Sequence: Synthetic oligonucleotide
cauuaaauauauuaacacc

SEQ ID NO: 2636970 - RNA, 19 nt, Artificial Sequence
  Description of Artificial Sequence: Synthetic oligonucleotide
ugaacaaaacguuaaauaa

SEQ ID NO: 2636971 - RNA, 19 nt, Artificial Sequence
  Description of Artificial Sequence: Synthetic oligonucleotide
auaaacaugaacaaaacgu

SEQ ID NO: 2636972 - RNA, 19 nt, Artificial Sequence
  Description of Artificial Sequence: Synthetic oligonucleotide
cuagcuacgaacaucgagg

SEQ ID NO: 2636973 - RNA, 19 nt, Artificial Sequence
  Description of Artificial Sequence: Synthetic oligonucleotide
uacaauacuuuacacagca

SEQ ID NO: 2636974 - RNA, 19 nt, Artificial Sequence
  Description of Artificial Sequence: Synthetic oligonucleotide
uuuagauauugucucauca

SEQ ID NO: 2636975 - RNA, 19 nt, Artificial Sequence
  Description of Artificial Sequence: Synthetic oligonucleotide
uauuaaucauuaaauauau

SEQ ID NO: 2636976 - RNA, 19 nt, Artificial Sequence
  Description of Artificial Sequence: Synthetic oligonucleotide
uuacacagcaccaaguaug

SEQ ID NO: 2636977 - RNA, 19 nt, Artificial Sequence
  Description of Artificial Sequence: Synthetic oligonucleotide
cauacuaccaugaaggguc

SEQ ID NO: 2636978 - RNA, 19 nt, Artificial Sequence
  Description of Artificial Sequence: Synthetic oligonucleotide
uacaaacuaucucacaaag

SEQ ID NO: 2636979 - RNA, 19 nt, Artificial Sequence
  Description of Artificial Sequence: Synthetic oligonucleotide
gauauugucucaucacugg

SEQ ID NO: 2636980 - RNA, 19 nt, Artificial Sequence
  Description of Artificial Sequence: Synthetic oligonucleotide
aaaucauguauaaauuagg

SEQ ID NO: 2636981 - RNA, 19 nt, Artificial Sequence
  Description of Artificial Sequence: Synthetic oligonucleotide
aaaagaacggccggcaucg

SEQ ID NO: 2636982 - RNA, 19 nt, Artificial Sequence
  Description of Artificial Sequence: Synthetic oligonucleotide
uguacaaacuaucucacaa

SEQ ID NO: 2636983 - RNA, 19 nt, Artificial Sequence
  Description of Artificial Sequence: Synthetic oligonucleotide
auuaauacaguccaugaaa

SEQ ID NO: 2636984 - RNA, 19 nt, Artificial Sequence
  Description of Artificial Sequence: Synthetic oligonucleotide
caauacuuuacacagcacc

SEQ ID NO: 2636985 - RNA, 19 nt, Artificial Sequence
  Description of Artificial Sequence: Synthetic oligonucleotide
aaggguucauuucagcuag

SEQ ID NO: 2636986 - RNA, 19 nt, Artificial Sequence
  Description of Artificial Sequence: Synthetic oligonucleotide
cuuauugcugguaauuucc

SEQ ID NO: 2636987 - RNA, 19 nt, Artificial Sequence
  Description of Artificial Sequence: Synthetic oligonucleotide
uuaaauauauuaacaccga

SEQ ID NO: 2636988 - RNA, 19 nt, Artificial Sequence
  Description of Artificial Sequence: Synthetic oligonucleotide
aaacaacgcacagucaacc

SEQ ID NO: 2636989 - RNA, 19 nt, Artificial Sequence
  Description of Artificial Sequence: Synthetic oligonucleotide
aauauauacacaacugucu

SEQ ID NO: 2636990 - RNA, 19 nt, Artificial Sequence
  Description of Artificial Sequence: Synthetic oligonucleotide
ucaugauucaucagaacug

SEQ ID NO: 2636991 - RNA, 19 nt, Artificial Sequence
  Description of Artificial Sequence: Synthetic oligonucleotide
cauaaacaugaacaaaacg

SEQ ID NO: 2636992 - RNA, 19 nt, Artificial Sequence
  Description of Artificial Sequence: Synthetic oligonucleotide
auuguaucgauauacaaua

SEQ ID NO: 2636993 - RNA, 19 nt, Artificial Sequence
  Description of Artificial Sequence: Synthetic oligonucleotide
auauacaauacuuuacaca

SEQ ID NO: 2636994 - RNA, 19 nt, Artificial Sequence
  Description of Artificial Sequence: Synthetic oligonucleotide
aaacuaucucacaaagugc

SEQ ID NO: 2636995 - RNA, 19 nt, Artificial Sequence
  Description of Artificial Sequence: Synthetic oligonucleotide
uauuauuaaucauuaaaua

SEQ ID NO: 2636996 - RNA, 19 nt, Artificial Sequence
  Description of Artificial Sequence: Synthetic oligonucleotide
aauguacaaacuaucucac

SEQ ID NO: 2636997 - RNA, 19 nt, Artificial Sequence
  Description of Artificial Sequence: Synthetic oligonucleotide
aacauacuaccaugaaggg

SEQ ID NO: 2636998 - RNA, 19 nt, Artificial Sequence
  Description of Artificial Sequence: Synthetic oligonucleotide
uuuccaaacacucuuguua

SEQ ID NO: 2636999 - RNA, 19 nt, Artificial Sequence
  Description of Artificial Sequence: Synthetic oligonucleotide
agaacauacuaccaugaag

SEQ ID NO: 2637000 - RNA, 19 nt, Artificial Sequence
  Description of Artificial Sequence: Synthetic oligonucleotide
accgaaaucauguauaaau

SEQ ID NO: 2637001 - RNA, 19 nt, Artificial Sequence
  Description of Artificial Sequence: Synthetic oligonucleotide
auauauuaacaccgaaauc

SEQ ID NO: 2637002 - RNA, 19 nt, Artificial Sequence
  Description of Artificial Sequence: Synthetic oligonucleotide
uuaauacaguccaugaaaa

SEQ ID NO: 2637003 - RNA, 19 nt, Artificial Sequence
  Description of Artificial Sequence: Synthetic oligonucleotide
aaaacaaggacaaccucuc

SEQ ID NO: 2637004 - RNA, 19 nt, Artificial Sequence
  Description of Artificial Sequence: Synthetic oligonucleotide
acugacccugcucauagcc

SEQ ID NO: 2637005 - RNA, 19 nt, Artificial Sequence
  Description of Artificial Sequence: Synthetic oligonucleotide
aaauaaauguacaaacuau

SEQ ID NO: 2637006 - RNA, 19 nt, Artificial Sequence
  Description of Artificial Sequence: Synthetic oligonucleotide
uguaucgauauacaauacu

SEQ ID NO: 2637007 - RNA, 19 nt, Artificial Sequence
  Description of Artificial Sequence: Synthetic oligonucleotide
aacauuauuauuaaucauu

SEQ ID NO: 2637008 - RNA, 19 nt, Artificial Sequence
  Description of Artificial Sequence: Synthetic oligonucleotide
gauauacaauacuuuacac

SEQ ID NO: 2637009 - RNA, 19 nt, Artificial Sequence
  Description of Artificial Sequence: Synthetic oligonucleotide
uaaacaugaacaaaacguu

SEQ ID NO: 2637010 - RNA, 19 nt, Artificial Sequence
  Description of Artificial Sequence: Synthetic oligonucleotide
uuguccagaacauacuacc

SEQ ID NO: 2637011 - RNA, 19 nt, Artificial Sequence
  Description of Artificial Sequence: Synthetic oligonucleotide
aaacguuaaauaaacauua

SEQ ID NO: 2637012 - RNA, 19 nt, Artificial Sequence
  Description of Artificial Sequence: Synthetic oligonucleotide
aaucauguauaaauuagga

SEQ ID NO: 2637013 - RNA, 19 nt, Artificial Sequence
  Description of Artificial Sequence: Synthetic oligonucleotide
ugauucaucagaacugcca

SEQ ID NO: 2637014 - RNA, 19 nt, Artificial Sequence
  Description of Artificial Sequence: Synthetic oligonucleotide
uagauauugucucaucacu

SEQ ID NO: 2637015 - RNA, 19 nt, Artificial Sequence
  Description of Artificial Sequence: Synthetic oligonucleotide
aacgccugucccuuauugc

SEQ ID NO: 2637016 - RNA, 19 nt, Artificial Sequence
  Description of Artificial Sequence: Synthetic oligonucleotide
aaacauuauuauuaaucau

SEQ ID NO: 2637017 - RNA, 19 nt, Artificial Sequence
  Description of Artificial Sequence: Synthetic oligonucleotide
aaacaaggacaaccucucc

SEQ ID NO: 2637018 - RNA, 19 nt, Artificial Sequence
  Description of Artificial Sequence: Synthetic oligonucleotide
uuagauauugucucaucac

SEQ ID NO: 2637019 - RNA, 19 nt, Artificial Sequence
  Description of Artificial Sequence: Synthetic oligonucleotide
aauacuuuacacagcacca

SEQ ID NO: 2637020 - RNA, 19 nt, Artificial Sequence
  Description of Artificial Sequence: Synthetic oligonucleotide
aaggucccgucugagaugc

SEQ ID NO: 2637021 - RNA, 19 nt, Artificial Sequence
  Description of Artificial Sequence: Synthetic oligonucleotide
auagccguaaggccgcugc

SEQ ID NO: 2637022 - RNA, 19 nt, Artificial Sequence
  Description of Artificial Sequence: Synthetic oligonucleotide
ucgauauacaauacuuuac

SEQ ID NO: 2637023 - RNA, 19 nt, Artificial Sequence
  Description of Artificial Sequence: Synthetic oligonucleotide
aucauuaaauauauuaaca

SEQ ID NO: 2637024 - RNA, 19 nt, Artificial Sequence
  Description of Artificial Sequence: Synthetic oligonucleotide
ucacaaagugcuuuuaaaa

SEQ ID NO: 2637025 - RNA, 19 nt, Artificial Sequence
  Description of Artificial Sequence: Synthetic oligonucleotide
gauucaucagaacugccac

SEQ ID NO: 2637026 - RNA, 19 nt, Artificial Sequence
  Description of Artificial Sequence: Synthetic oligonucleotide
acuauuaauacaguccaug

SEQ ID NO: 2637027 - RNA, 19 nt, Artificial Sequence
  Description of Artificial Sequence: Synthetic oligonucleotide
aacacgugaugacaguaug

SEQ ID NO: 2637028 - RNA, 19 nt, Artificial Sequence
  Description of Artificial Sequence: Synthetic oligonucleotide
auauugucucaucacuggg

SEQ ID NO: 2637029 - RNA, 19 nt, Artificial Sequence
  Description of Artificial Sequence: Synthetic oligonucleotide
aaagacaacgccugucccu

SEQ ID NO: 2637030 - RNA, 19 nt, Artificial Sequence
  Description of Artificial Sequence: Synthetic oligonucleotide
aaaacaacgcacagucaac

SEQ ID NO: 2637031 - RNA, 19 nt, Artificial Sequence
  Description of Artificial Sequence: Synthetic oligonucleotide
ugaaggguucauuucagcu

SEQ ID NO: 2637032 - RNA, 19 nt, Artificial Sequence
  Description of Artificial Sequence: Synthetic oligonucleotide
guucauuucagcuagggcu

SEQ ID NO: 2637033 - RNA, 19 nt, Artificial Sequence
  Description of Artificial Sequence: Synthetic oligonucleotide
uccagaacauacuaccaug

SEQ ID NO: 2637034 - RNA, 19 nt, Artificial Sequence
  Description of Artificial Sequence: Synthetic oligonucleotide
acaaccucuccauuguauc

SEQ ID NO: 2637035 - RNA, 19 nt, Artificial Sequence
  Description of Artificial Sequence: Synthetic oligonucleotide
auaaauguacaaacuaucu

SEQ ID NO: 2637036 - RNA, 19 nt, Artificial Sequence
  Description of Artificial Sequence: Synthetic oligonucleotide
acauaaacaugaacaaaac

SEQ ID NO: 2637037 - RNA, 19 nt, Artificial Sequence
  Description of Artificial Sequence: Synthetic oligonucleotide
aaccacaccuggaugaagg

SEQ ID NO: 2637038 - RNA, 19 nt, Artificial Sequence
  Description of Artificial Sequence: Synthetic oligonucleotide
caaguaugucacaccaucg

SEQ ID NO: 2637039 - RNA, 19 nt, Artificial Sequence
  Description of Artificial Sequence: Synthetic oligonucleotide
aucgauauacaauacuuua

SEQ ID NO: 2637040 - RNA, 19 nt, Artificial Sequence
  Description of Artificial Sequence: Synthetic oligonucleotide
ucuuuuagauauugucuca

SEQ ID NO: 2637041 - RNA, 19 nt, Artificial Sequence
  Description of Artificial Sequence: Synthetic oligonucleotide
gcuacgaacaucgaggagg

SEQ ID NO: 2637042 - RNA, 19 nt, Artificial Sequence
  Description of Artificial Sequence: Synthetic oligonucleotide
gaaugagccugcuucacac

SEQ ID NO: 2637043 - RNA, 19 nt, Artificial Sequence
  Description of Artificial Sequence: Synthetic oligonucleotide
augaaggguucauuucagc

SEQ ID NO: 2637044 - RNA, 19 nt, Artificial Sequence
  Description of Artificial Sequence: Synthetic oligonucleotide
aaauuaggaaauaaaugua

SEQ ID NO: 2637045 - RNA, 19 nt, Artificial Sequence
  Description of Artificial Sequence: Synthetic oligonucleotide
aacgcuagcuacgaacauc

SEQ ID NO: 2637046 - RNA, 19 nt, Artificial Sequence
  Description of Artificial Sequence: Synthetic oligonucleotide
auugucucaucacugggca

SEQ ID NO: 2637047 - RNA, 19 nt, Artificial Sequence
  Description of Artificial Sequence: Synthetic oligonucleotide
auauauacacaacugucuu

SEQ ID NO: 2637048 - RNA, 19 nt, Artificial Sequence
  Description of Artificial Sequence: Synthetic oligonucleotide
aucauguauaaauuaggaa

SEQ ID NO: 2637049 - RNA, 19 nt, Artificial Sequence
  Description of Artificial Sequence: Synthetic oligonucleotide
uccauuguaucgauauaca

SEQ ID NO: 2637050 - RNA, 19 nt, Artificial Sequence
  Description of Artificial Sequence: Synthetic oligonucleotide
agcaccaaguaugucacac

SEQ ID NO: 2637051 - RNA, 19 nt, Artificial Sequence
  Description of Artificial Sequence: Synthetic oligonucleotide
acgugaugacaguauggcc

SEQ ID NO: 2637052 - RNA, 19 nt, Artificial Sequence
  Description of Artificial Sequence: Synthetic oligonucleotide
caugauucaucagaacugc

SEQ ID NO: 2637053 - RNA, 19 nt, Artificial Sequence
  Description of Artificial Sequence: Synthetic oligonucleotide
cuacgaacaucgaggaggg

SEQ ID NO: 2637054 - RNA, 19 nt, Artificial Sequence
  Description of Artificial Sequence: Synthetic oligonucleotide
ugucaucacacccaugaau

SEQ ID NO: 2637055 - RNA, 19 nt, Artificial Sequence
  Description of Artificial Sequence: Synthetic oligonucleotide
uaucgauauacaauacuuu

SEQ ID NO: 2637056 - RNA, 19 nt, Artificial Sequence
  Description of Artificial Sequence: Synthetic oligonucleotide
uuauugcugguaauuucca

SEQ ID NO: 2637057 - RNA, 19 nt, Artificial Sequence
  Description of Artificial Sequence: Synthetic oligonucleotide
aucacacccaugaaugagc

SEQ ID NO: 2637058 - RNA, 19 nt, Artificial Sequence
  Description of Artificial Sequence: Synthetic oligonucleotide
cuauuaauacaguccauga

SEQ ID NO: 2637059 - RNA, 19 nt, Artificial Sequence
  Description of Artificial Sequence: Synthetic oligonucleotide
aguaugucacaccaucgca

SEQ ID NO: 2637060 - RNA, 19 nt, Artificial Sequence
  Description of Artificial Sequence: Synthetic oligonucleotide
aggguccaaagacaacgcc

SEQ ID NO: 2637061 - RNA, 19 nt, Artificial Sequence
  Description of Artificial Sequence: Synthetic oligonucleotide
uggcuuguccagaacauac

SEQ ID NO: 2637062 - RNA, 19 nt, Artificial Sequence
  Description of Artificial Sequence: Synthetic oligonucleotide
aaggguccaaagacaacgc

SEQ ID NO: 2637063 - RNA, 19 nt, Artificial Sequence
  Description of Artificial Sequence: Synthetic oligonucleotide
aaaauuacauaaacaugaa

SEQ ID NO: 2637064 - RNA, 19 nt, Artificial Sequence
  Description of Artificial Sequence: Synthetic oligonucleotide
ucacacccaugaaugagcc

SEQ ID NO: 2637065 - RNA, 19 nt, Artificial Sequence
  Description of Artificial Sequence: Synthetic oligonucleotide
acacccaugaaugagccug

SEQ ID NO: 2637066 - RNA, 19 nt, Artificial Sequence
  Description of Artificial Sequence: Synthetic oligonucleotide
ugcucauagccguaaggcc

SEQ ID NO: 2637067 - RNA, 19 nt, Artificial Sequence
  Description of Artificial Sequence: Synthetic oligonucleotide
uguccagaacauacuacca

SEQ ID NO: 2637068 - RNA, 19 nt, Artificial Sequence
  Description of Artificial Sequence: Synthetic oligonucleotide
uucauuucagcuagggcuu

SEQ ID NO: 2637069 - RNA, 19 nt, Artificial Sequence
  Description of Artificial Sequence: Synthetic oligonucleotide
agaaggucccgucugagau

SEQ ID NO: 2637070 - RNA, 19 nt, Artificial Sequence
  Description of Artificial Sequence: Synthetic oligonucleotide
cuccauuguaucgauauac

SEQ ID NO: 2637071 - RNA, 19 nt, Artificial Sequence
  Description of Artificial Sequence: Synthetic oligonucleotide
caaaacguuaaauaaacau

SEQ ID NO: 2637072 - RNA, 19 nt, Artificial Sequence
  Description of Artificial Sequence: Synthetic oligonucleotide
uacacgcuugucaucacac

SEQ ID NO: 2637073 - RNA, 19 nt, Artificial Sequence
  Description of Artificial Sequence: Synthetic oligonucleotide
caaccucuccauuguaucg

SEQ ID NO: 2637074 - RNA, 19 nt, Artificial Sequence
  Description of Artificial Sequence: Synthetic oligonucleotide
gucaugauucaucagaacu

SEQ ID NO: 2637075 - RNA, 19 nt, Artificial Sequence
  Description of Artificial Sequence: Synthetic oligonucleotide
uaugucacaccaucgcagu

SEQ ID NO: 2637076 - RNA, 19 nt, Artificial Sequence
  Description of Artificial Sequence: Synthetic oligonucleotide
gaacaaaacguuaaauaaa

SEQ ID NO: 2637077 - RNA, 19 nt, Artificial Sequence
  Description of Artificial Sequence: Synthetic oligonucleotide
auacaauacuuuacacagc

SEQ ID NO: 2637078 - RNA, 19 nt, Artificial Sequence
  Description of Artificial Sequence: Synthetic oligonucleotide
uuuuagauauugucucauc

SEQ ID NO: 2637079 - RNA, 19 nt, Artificial Sequence
  Description of Artificial Sequence: Synthetic oligonucleotide
ugaaugagccugcuucaca

SEQ ID NO: 2637080 - RNA, 19 nt, Artificial Sequence
  Description of Artificial Sequence: Synthetic oligonucleotide
auuuccauacugacccugc

SEQ ID NO: 2637081 - RNA, 19 nt, Artificial Sequence
  Description of Artificial Sequence: Synthetic oligonucleotide
cacgcuugucaucacaccc

SEQ ID NO: 2637082 - RNA, 19 nt, Artificial Sequence
  Description of Artificial Sequence: Synthetic oligonucleotide
uaccaugaaggguccaaag

SEQ ID NO: 2637083 - RNA, 19 nt, Artificial Sequence
  Description of Artificial Sequence: Synthetic oligonucleotide
auuucagcuagggcuuucc

SEQ ID NO: 2637084 - RNA, 19 nt, Artificial Sequence
  Description of Artificial Sequence: Synthetic oligonucleotide
gaugaaggguucauuucag

SEQ ID NO: 2637085 - RNA, 19 nt, Artificial Sequence
  Description of Artificial Sequence: Synthetic oligonucleotide
acacgcuugucaucacacc

SEQ ID NO: 2637086 - RNA, 19 nt, Artificial Sequence
  Description of Artificial Sequence: Synthetic oligonucleotide
auugcugguaauuuccaua

SEQ ID NO: 2637087 - RNA, 19 nt, Artificial Sequence
  Description of Artificial Sequence: Synthetic oligonucleotide
acguuaaauaaacauuauu

SEQ ID NO: 2637088 - RNA, 19 nt, Artificial Sequence
  Description of Artificial Sequence: Synthetic oligonucleotide
uuguaucgauauacaauac

SEQ ID NO: 2637089 - RNA, 19 nt, Artificial Sequence
  Description of Artificial Sequence: Synthetic oligonucleotide
caucagaacugccacuggc

SEQ ID NO: 2637090 - RNA, 19 nt, Artificial Sequence
  Description of Artificial Sequence: Synthetic oligonucleotide
acgcuagcuacgaacaucg

SEQ ID NO: 2637091 - RNA, 19 nt, Artificial Sequence
  Description of Artificial Sequence: Synthetic oligonucleotide
ugucucaucacugggcaca

SEQ ID NO: 2637092 - RNA, 19 nt, Artificial Sequence
  Description of Artificial Sequence: Synthetic oligonucleotide
accaugaaggguccaaaga

SEQ ID NO: 2637093 - RNA, 19 nt, Artificial Sequence
  Description of Artificial Sequence: Synthetic oligonucleotide
gcugguaauuuccauacug

SEQ ID NO: 2637094 - RNA, 19 nt, Artificial Sequence
  Description of Artificial Sequence: Synthetic oligonucleotide
ugagcagaaggucccgucu

SEQ ID NO: 2637095 - RNA, 19 nt, Artificial Sequence
  Description of Artificial Sequence: Synthetic oligonucleotide
cacgugaugacaguauggc

SEQ ID NO: 2637096 - RNA, 19 nt, Artificial Sequence
  Description of Artificial Sequence: Synthetic oligonucleotide
guaugucacaccaucgcag

SEQ ID NO: 2637097 - RNA, 19 nt, Artificial Sequence
  Description of Artificial Sequence: Synthetic oligonucleotide
acauuauuauuaaucauua

SEQ ID NO: 2637098 - RNA, 19 nt, Artificial Sequence
  Description of Artificial Sequence: Synthetic oligonucleotide
ugaccaacaugucaugauu

SEQ ID NO: 2637099 - RNA, 19 nt, Artificial Sequence
  Description of Artificial Sequence: Synthetic oligonucleotide
acaaggacaaccucuccau

SEQ ID NO: 2637100 - RNA, 19 nt, Artificial Sequence
  Description of Artificial Sequence: Synthetic oligonucleotide
cgugaugacaguauggccc

SEQ ID NO: 2637101 - RNA, 19 nt, Artificial Sequence
  Description of Artificial Sequence: Synthetic oligonucleotide
accaacaugucaugauuca

SEQ ID NO: 2637102 - RNA, 19 nt, Artificial Sequence
  Description of Artificial Sequence: Synthetic oligonucleotide
gugaugacaguauggcccc

SEQ ID NO: 2637103 - RNA, 19 nt, Artificial Sequence
  Description of Artificial Sequence: Synthetic oligonucleotide
gcagacguggcacugggcg

SEQ ID NO: 2637104 - RNA, 19 nt, Artificial Sequence
  Description of Artificial Sequence: Synthetic oligonucleotide
gucaaccacaccuggauga

SEQ ID NO: 2637105 - RNA, 19 nt, Artificial Sequence
  Description of Artificial Sequence: Synthetic oligonucleotide
caaacgcuagcuacgaaca

SEQ ID NO: 2637106 - RNA, 19 nt, Artificial Sequence
  Description of Artificial Sequence: Synthetic oligonucleotide
uagcuacgaacaucgagga

SEQ ID NO: 2637107 - RNA, 19 nt, Artificial Sequence
  Description of Artificial Sequence: Synthetic oligonucleotide
aggaguacacgcuugucau

SEQ ID NO: 2637108 - RNA, 19 nt, Artificial Sequence
  Description of Artificial Sequence: Synthetic oligonucleotide
ugucacaccaucgcaguca

SEQ ID NO: 2637109 - RNA, 19 nt, Artificial Sequence
  Description of Artificial Sequence: Synthetic oligonucleotide
aucgcagucaggaguacac

SEQ ID NO: 2637110 - RNA, 19 nt, Artificial Sequence
  Description of Artificial Sequence: Synthetic oligonucleotide
cauguauaaauuaggaaau

SEQ ID NO: 2637111 - RNA, 19 nt, Artificial Sequence
  Description of Artificial Sequence: Synthetic oligonucleotide
ucaucacacccaugaauga

SEQ ID NO: 2637112 - RNA, 19 nt, Artificial Sequence
  Description of Artificial Sequence: Synthetic oligonucleotide
cucauagccguaaggccgc

SEQ ID NO: 2637113 - RNA, 19 nt, Artificial Sequence
  Description of Artificial Sequence: Synthetic oligonucleotide
gaaggguucauuucagcua

SEQ ID NO: 2637114 - RNA, 19 nt, Artificial Sequence
  Description of Artificial Sequence: Synthetic oligonucleotide
uggaugaaggguucauuuc

SEQ ID NO: 2637115 - RNA, 19 nt, Artificial Sequence
  Description of Artificial Sequence: Synthetic oligonucleotide
caugaaggguccaaagaca

SEQ ID NO: 2637116 - RNA, 19 nt, Artificial Sequence
  Description of Artificial Sequence: Synthetic oligonucleotide
cugguaauuuccauacuga

SEQ ID NO: 2637117 - RNA, 19 nt, Artificial Sequence
  Description of Artificial Sequence: Synthetic oligonucleotide
caaagacaacgccuguccc

SEQ ID NO: 2637118 - RNA, 19 nt, Artificial Sequence
  Description of Artificial Sequence: Synthetic oligonucleotide
uucagcuagggcuuuccaa

SEQ ID NO: 2637119 - RNA, 19 nt, Artificial Sequence
  Description of Artificial Sequence: Synthetic oligonucleotide
gaguacacgcuugucauca

SEQ ID NO: 2637120 - RNA, 19 nt, Artificial Sequence
  Description of Artificial Sequence: Synthetic oligonucleotide
aacgcacagucaaccacac

SEQ ID NO: 2637121 - RNA, 19 nt, Artificial Sequence
  Description of Artificial Sequence: Synthetic oligonucleotide
ugucaugauucaucagaac

SEQ ID NO: 2637122 - RNA, 19 nt, Artificial Sequence
  Description of Artificial Sequence: Synthetic oligonucleotide
cccacaaaauuacauaaac

SEQ ID NO: 2637123 - RNA, 19 nt, Artificial Sequence
  Description of Artificial Sequence: Synthetic oligonucleotide
gcucauagccguaaggccg

SEQ ID NO: 2637124 - RNA, 19 nt, Artificial Sequence
  Description of Artificial Sequence: Synthetic oligonucleotide
acucuuguuacagaagaaa

SEQ ID NO: 2637125 - RNA, 19 nt, Artificial Sequence
  Description of Artificial Sequence: Synthetic oligonucleotide
aggacaaccucuccauugu

SEQ ID NO: 2637126 - RNA, 19 nt, Artificial Sequence
  Description of Artificial Sequence: Synthetic oligonucleotide
aacguuaaauaaacauuau

SEQ ID NO: 2637127 - RNA, 19 nt, Artificial Sequence
  Description of Artificial Sequence: Synthetic oligonucleotide
ugacccugcucauagccgu

SEQ ID NO: 2637128 - RNA, 19 nt, Artificial Sequence
  Description of Artificial Sequence: Synthetic oligonucleotide
augauucaucagaacugcc

SEQ ID NO: 2637129 - RNA, 19 nt, Artificial Sequence
  Description of Artificial Sequence: Synthetic oligonucleotide
aaccucuccauuguaucga

SEQ ID NO: 2637130 - RNA, 19 nt, Artificial Sequence
  Description of Artificial Sequence: Synthetic oligonucleotide
ccaugaaugagccugcuuc

SEQ ID NO: 2637131 - RNA, 19 nt, Artificial Sequence
  Description of Artificial Sequence: Synthetic oligonucleotide
gcuagcuacgaacaucgag

SEQ ID NO: 2637132 - RNA, 19 nt, Artificial Sequence
  Description of Artificial Sequence: Synthetic oligonucleotide
auucaucagaacugccacu

SEQ ID NO: 2637133 - RNA, 19 nt, Artificial Sequence
  Description of Artificial Sequence: Synthetic oligonucleotide
agucaaccacaccuggaug

SEQ ID NO: 2637134 - RNA, 19 nt, Artificial Sequence
  Description of Artificial Sequence: Synthetic oligonucleotide
aagaacggccggcaucgcu

SEQ ID NO: 2637135 - RNA, 19 nt, Artificial Sequence
  Description of Artificial Sequence: Synthetic oligonucleotide
uuuccauacugacccugcu

SEQ ID NO: 2637136 - RNA, 19 nt, Artificial Sequence
  Description of Artificial Sequence: Synthetic oligonucleotide
ggaugaaggguucauuuca

SEQ ID NO: 2637137 - RNA, 19 nt, Artificial Sequence
  Description of Artificial Sequence: Synthetic oligonucleotide
acaccgaaaucauguauaa

SEQ ID NO: 2637138 - RNA, 19 nt, Artificial Sequence
  Description of Artificial Sequence: Synthetic oligonucleotide
auguacaaacuaucucaca

SEQ ID NO: 2637139 - RNA, 19 nt, Artificial Sequence
  Description of Artificial Sequence: Synthetic oligonucleotide
augaaugagccugcuucac

SEQ ID NO: 2637140 - RNA, 19 nt, Artificial Sequence
  Description of Artificial Sequence: Synthetic oligonucleotide
caucacacccaugaaugag

SEQ ID NO: 2637141 - RNA, 19 nt, Artificial Sequence
  Description of Artificial Sequence: Synthetic oligonucleotide
acgccugucccuuauugcu

SEQ ID NO: 2637142 - RNA, 19 nt, Artificial Sequence
  Description of Artificial Sequence: Synthetic oligonucleotide
acacgugaugacaguaugg

SEQ ID NO: 2637143 - RNA, 19 nt, Artificial Sequence
  Description of Artificial Sequence: Synthetic oligonucleotide
acauacuaccaugaagggu

SEQ ID NO: 2637144 - RNA, 19 nt, Artificial Sequence
  Description of Artificial Sequence: Synthetic oligonucleotide
cauuguaucgauauacaau

SEQ ID NO: 2637145 - RNA, 19 nt, Artificial Sequence
  Description of Artificial Sequence: Synthetic oligonucleotide
ccaugaaggguccaaagac

SEQ ID NO: 2637146 - RNA, 19 nt, Artificial Sequence
  Description of Artificial Sequence: Synthetic oligonucleotide
uuucagcuagggcuuucca

SEQ ID NO: 2637147 - RNA, 19 nt, Artificial Sequence
  Description of Artificial Sequence: Synthetic oligonucleotide
uauugcugguaauuuccau

SEQ ID NO: 2637148 - RNA, 19 nt, Artificial Sequence
  Description of Artificial Sequence: Synthetic oligonucleotide
cuucacacgcagacguggc

SEQ ID NO: 2637149 - RNA, 19 nt, Artificial Sequence
  Description of Artificial Sequence: Synthetic oligonucleotide
ugaaggguccaaagacaac

SEQ ID NO: 2637150 - RNA, 19 nt, Artificial Sequence
  Description of Artificial Sequence: Synthetic oligonucleotide
guacaaacuaucucacaaa

SEQ ID NO: 2637151 - RNA, 19 nt, Artificial Sequence
  Description of Artificial Sequence: Synthetic oligonucleotide
gaccaacaugucaugauuc

SEQ ID NO: 2637152 - RNA, 19 nt, Artificial Sequence
  Description of Artificial Sequence: Synthetic oligonucleotide
aaacgcuagcuacgaacau

SEQ ID NO: 2637153 - RNA, 19 nt, Artificial Sequence
  Description of Artificial Sequence: Synthetic oligonucleotide
aguacacgcuugucaucac

SEQ ID NO: 2637154 - RNA, 19 nt, Artificial Sequence
  Description of Artificial Sequence: Synthetic oligonucleotide
ccaaagacaacgccugucc

SEQ ID NO: 2637155 - RNA, 19 nt, Artificial Sequence
  Description of Artificial Sequence: Synthetic oligonucleotide
ccaaacgcuagcuacgaac

SEQ ID NO: 2637156 - RNA, 19 nt, Artificial Sequence
  Description of Artificial Sequence: Synthetic oligonucleotide
acaauacuuuacacagcac

SEQ ID NO: 2637157 - RNA, 19 nt, Artificial Sequence
  Description of Artificial Sequence: Synthetic oligonucleotide
cacaccaucgcagucagga

SEQ ID NO: 2637158 - RNA, 19 nt, Artificial Sequence
  Description of Artificial Sequence: Synthetic oligonucleotide
gagcagaaggucccgucug

SEQ ID NO: 2637159 - RNA, 19 nt, Artificial Sequence
  Description of Artificial Sequence: Synthetic oligonucleotide
caccaaguaugucacacca

SEQ ID NO: 2637160 - RNA, 19 nt, Artificial Sequence
  Description of Artificial Sequence: Synthetic oligonucleotide
cuuuacacagcaccaagua

SEQ ID NO: 2637161 - RNA, 19 nt, Artificial Sequence
  Description of Artificial Sequence: Synthetic oligonucleotide
uucacacgcagacguggca

SEQ ID NO: 2637162 - RNA, 19 nt, Artificial Sequence
  Description of Artificial Sequence: Synthetic oligonucleotide
gaaggucccgucugagaug

SEQ ID NO: 2637163 - RNA, 19 nt, Artificial Sequence
  Description of Artificial Sequence: Synthetic oligonucleotide
auacuaccaugaagggucc

SEQ ID NO: 2637164 - RNA, 19 nt, Artificial Sequence
  Description of Artificial Sequence: Synthetic oligonucleotide
caugaaugagccugcuuca

SEQ ID NO: 2637165 - RNA, 19 nt, Artificial Sequence
  Description of Artificial Sequence: Synthetic oligonucleotide
augucacaccaucgcaguc

SEQ ID NO: 2637166 - RNA, 19 nt, Artificial Sequence
  Description of Artificial Sequence: Synthetic oligonucleotide
cugcugagcagaagguccc

SEQ ID NO: 2637167 - RNA, 19 nt, Artificial Sequence
  Description of Artificial Sequence: Synthetic oligonucleotide
gucacaccaucgcagucag

SEQ ID NO: 2637168 - RNA, 19 nt, Artificial Sequence
  Description of Artificial Sequence: Synthetic oligonucleotide
acaaaacguuaaauaaaca

SEQ ID NO: 2637169 - RNA, 19 nt, Artificial Sequence
  Description of Artificial Sequence: Synthetic oligonucleotide
gguucauuucagcuagggc

SEQ ID NO: 2637170 - RNA, 19 nt, Artificial Sequence
  Description of Artificial Sequence: Synthetic oligonucleotide
acaaacuaucucacaaagu

SEQ ID NO: 2637171 - RNA, 19 nt, Artificial Sequence
  Description of Artificial Sequence: Synthetic oligonucleotide
uccaaacacucuuguuaca

SEQ ID NO: 2637172 - RNA, 19 nt, Artificial Sequence
  Description of Artificial Sequence: Synthetic oligonucleotide
aagacaacgccugucccuu

SEQ ID NO: 2637173 - RNA, 19 nt, Artificial Sequence
  Description of Artificial Sequence: Synthetic oligonucleotide
acuuuacacagcaccaagu

SEQ ID NO: 2637174 - RNA, 19 nt, Artificial Sequence
  Description of Artificial Sequence: Synthetic oligonucleotide
caacgcacagucaaccaca

SEQ ID NO: 2637175 - RNA, 19 nt, Artificial Sequence
  Description of Artificial Sequence: Synthetic oligonucleotide
aaagaacggccggcaucgc

SEQ ID NO: 2637176 - RNA, 19 nt, Artificial Sequence
  Description of Artificial Sequence: Synthetic oligonucleotide
caggaguacacgcuuguca

SEQ ID NO: 2637177 - RNA, 19 nt, Artificial Sequence
  Description of Artificial Sequence: Synthetic oligonucleotide
ucacacgcagacguggcac

SEQ ID NO: 2637178 - RNA, 19 nt, Artificial Sequence
  Description of Artificial Sequence: Synthetic oligonucleotide
caacgccugucccuuauug

SEQ ID NO: 2637179 - RNA, 19 nt, Artificial Sequence
  Description of Artificial Sequence: Synthetic oligonucleotide
augaaggguccaaagacaa

SEQ ID NO: 2637180 - RNA, 19 nt, Artificial Sequence
  Description of Artificial Sequence: Synthetic oligonucleotide
acgcagacguggcacuggg

SEQ ID NO: 2637181 - RNA, 19 nt, Artificial Sequence
  Description of Artificial Sequence: Synthetic oligonucleotide
ucgcagucaggaguacacg

SEQ ID NO: 2637182 - RNA, 19 nt, Artificial Sequence
  Description of Artificial Sequence: Synthetic oligonucleotide
aacuauuaauacaguccau

SEQ ID NO: 2637183 - RNA, 19 nt, Artificial Sequence
  Description of Artificial Sequence: Synthetic oligonucleotide
ucuccauuguaucgauaua

SEQ ID NO: 2637184 - RNA, 19 nt, Artificial Sequence
  Description of Artificial Sequence: Synthetic oligonucleotide
guaucgauauacaauacuu

SEQ ID NO: 2637185 - RNA, 19 nt, Artificial Sequence
  Description of Artificial Sequence: Synthetic oligonucleotide
ugcuucacacgcagacgug

SEQ ID NO: 2637186 - RNA, 19 nt, Artificial Sequence
  Description of Artificial Sequence: Synthetic oligonucleotide
agcuacgaacaucgaggag

SEQ ID NO: 2637187 - RNA, 19 nt, Artificial Sequence
  Description of Artificial Sequence: Synthetic oligonucleotide
cugggcacagaacacguga

SEQ ID NO: 2637188 - RNA, 19 nt, Artificial Sequence
  Description of Artificial Sequence: Synthetic oligonucleotide
gguccaaagacaacgccug

SEQ ID NO: 2637189 - RNA, 19 nt, Artificial Sequence
  Description of Artificial Sequence: Synthetic oligonucleotide
agcuagggcuuuccaaaca

SEQ ID NO: 2637190 - RNA, 19 nt, Artificial Sequence
  Description of Artificial Sequence: Synthetic oligonucleotide
acaccaucgcagucaggag

SEQ ID NO: 2637191 - RNA, 19 nt, Artificial Sequence
  Description of Artificial Sequence: Synthetic oligonucleotide
augucaugauucaucagaa

SEQ ID NO: 2637192 - RNA, 19 nt, Artificial Sequence
  Description of Artificial Sequence: Synthetic oligonucleotide
ugcugguaauuuccauacu

SEQ ID NO: 2637193 - RNA, 19 nt, Artificial Sequence
  Description of Artificial Sequence: Synthetic oligonucleotide
acgcacagucaaccacacc

SEQ ID NO: 2637194 - RNA, 19 nt, Artificial Sequence
  Description of Artificial Sequence: Synthetic oligonucleotide
ugggcacagaacacgugau

SEQ ID NO: 2637195 - RNA, 19 nt, Artificial Sequence
  Description of Artificial Sequence: Synthetic oligonucleotide
auacuuuacacagcaccaa

SEQ ID NO: 2637196 - RNA, 19 nt, Artificial Sequence
  Description of Artificial Sequence: Synthetic oligonucleotide
uauacacaacugucuuuua

SEQ ID NO: 2637197 - RNA, 19 nt, Artificial Sequence
  Description of Artificial Sequence: Synthetic oligonucleotide
gcugcugagcagaaggucc

SEQ ID NO: 2637198 - RNA, 19 nt, Artificial Sequence
  Description of Artificial Sequence: Synthetic oligonucleotide
gcuagggcuuuccaaacac

SEQ ID NO: 2637199 - RNA, 19 nt, Artificial Sequence
  Description of Artificial Sequence: Synthetic oligonucleotide
cucuccauuguaucgauau

SEQ ID NO: 2637200 - RNA, 19 nt, Artificial Sequence
  Description of Artificial Sequence: Synthetic oligonucleotide
agcagaaggucccgucuga

SEQ ID NO: 2637201 - RNA, 19 nt, Artificial Sequence
  Description of Artificial Sequence: Synthetic oligonucleotide
cagacguggcacugggcgc

SEQ ID NO: 2637202 - RNA, 19 nt, Artificial Sequence
  Description of Artificial Sequence: Synthetic oligonucleotide
cacccaugaaugagccugc

SEQ ID NO: 2637203 - RNA, 19 nt, Artificial Sequence
  Description of Artificial Sequence: Synthetic oligonucleotide
ucccuuauugcugguaauu

SEQ ID NO: 2637204 - RNA, 19 nt, Artificial Sequence
  Description of Artificial Sequence: Synthetic oligonucleotide
acggccggcaucgcuuucc

SEQ ID NO: 2637205 - RNA, 19 nt, Artificial Sequence
  Description of Artificial Sequence: Synthetic oligonucleotide
ggguucauuucagcuaggg

SEQ ID NO: 2637206 - RNA, 19 nt, Artificial Sequence
  Description of Artificial Sequence: Synthetic oligonucleotide
cgauauacaauacuuuaca

SEQ ID NO: 2637207 - RNA, 19 nt, Artificial Sequence
  Description of Artificial Sequence: Synthetic oligonucleotide
cagggugaccaacauguca

SEQ ID NO: 2637208 - RNA, 19 nt, Artificial Sequence
  Description of Artificial Sequence: Synthetic oligonucleotide
uugucucaucacugggcac

SEQ ID NO: 2637209 - RNA, 19 nt, Artificial Sequence
  Description of Artificial Sequence: Synthetic oligonucleotide
acuaccaugaaggguccaa

SEQ ID NO: 2637210 - RNA, 19 nt, Artificial Sequence
  Description of Artificial Sequence: Synthetic oligonucleotide
cugagcagaaggucccguc

SEQ ID NO: 2637211 - RNA, 19 nt, Artificial Sequence
  Description of Artificial Sequence: Synthetic oligonucleotide
ucaaccacaccuggaugaa

SEQ ID NO: 2637212 - RNA, 19 nt, Artificial Sequence
  Description of Artificial Sequence: Synthetic oligonucleotide
ggcacagaacacgugauga

SEQ ID NO: 2637213 - RNA, 19 nt, Artificial Sequence
  Description of Artificial Sequence: Synthetic oligonucleotide
ugcugagcagaaggucccg

SEQ ID NO: 2637214 - RNA, 19 nt, Artificial Sequence
  Description of Artificial Sequence: Synthetic oligonucleotide
cagcuagggcuuuccaaac

SEQ ID NO: 2637215 - RNA, 19 nt, Artificial Sequence
  Description of Artificial Sequence: Synthetic oligonucleotide
guacacgcuugucaucaca

SEQ ID NO: 2637216 - RNA, 19 nt, Artificial Sequence
  Description of Artificial Sequence: Synthetic oligonucleotide
acaccuggaugaaggguuc

SEQ ID NO: 2637217 - RNA, 19 nt, Artificial Sequence
  Description of Artificial Sequence: Synthetic oligonucleotide
ccugcucauagccguaagg

SEQ ID NO: 2637218 - RNA, 19 nt, Artificial Sequence
  Description of Artificial Sequence: Synthetic oligonucleotide
ucacaccaucgcagucagg

SEQ ID NO: 2637219 - RNA, 19 nt, Artificial Sequence
  Description of Artificial Sequence: Synthetic oligonucleotide
uacugacccugcucauagc

SEQ ID NO: 2637220 - RNA, 19 nt, Artificial Sequence
  Description of Artificial Sequence: Synthetic oligonucleotide
agucaggaguacacgcuug

SEQ ID NO: 2637221 - RNA, 19 nt, Artificial Sequence
  Description of Artificial Sequence: Synthetic oligonucleotide
agggcuuuccaaacacucu

SEQ ID NO: 2637222 - RNA, 19 nt, Artificial Sequence
  Description of Artificial Sequence: Synthetic oligonucleotide
gccugcuucacacgcagac

SEQ ID NO: 2637223 - RNA, 19 nt, Artificial Sequence
  Description of Artificial Sequence: Synthetic oligonucleotide
gcaccaaguaugucacacc

SEQ ID NO: 2637224 - RNA, 19 nt, Artificial Sequence
  Description of Artificial Sequence: Synthetic oligonucleotide
acugggcgcagggugacca

SEQ ID NO: 2637225 - RNA, 19 nt, Artificial Sequence
  Description of Artificial Sequence: Synthetic oligonucleotide
ccagaacauacuaccauga

SEQ ID NO: 2637226 - RNA, 19 nt, Artificial Sequence
  Description of Artificial Sequence: Synthetic oligonucleotide
cagaacauacuaccaugaa

SEQ ID NO: 2637227 - RNA, 19 nt, Artificial Sequence
  Description of Artificial Sequence: Synthetic oligonucleotide
ucaggaguacacgcuuguc

SEQ ID NO: 2637228 - RNA, 19 nt, Artificial Sequence
  Description of Artificial Sequence: Synthetic oligonucleotide
acagucaaccacaccugga

SEQ ID NO: 2637229 - RNA, 19 nt, Artificial Sequence
  Description of Artificial Sequence: Synthetic oligonucleotide
cugcuucacacgcagacgu

SEQ ID NO: 2637230 - RNA, 19 nt, Artificial Sequence
  Description of Artificial Sequence: Synthetic oligonucleotide
uagccguaaggccgcugcu

SEQ ID NO: 2637231 - RNA, 19 nt, Artificial Sequence
  Description of Artificial Sequence: Synthetic oligonucleotide
accucuccauuguaucgau

SEQ ID NO: 2637232 - RNA, 19 nt, Artificial Sequence
  Description of Artificial Sequence: Synthetic oligonucleotide
cacucuuguuacagaagaa

SEQ ID NO: 2637233 - RNA, 19 nt, Artificial Sequence
  Description of Artificial Sequence: Synthetic oligonucleotide
uacgaacaucgaggagggg

SEQ ID NO: 2637234 - RNA, 19 nt, Artificial Sequence
  Description of Artificial Sequence: Synthetic oligonucleotide
gccguaaggccgcugcugc

SEQ ID NO: 2637235 - RNA, 19 nt, Artificial Sequence
  Description of Artificial Sequence: Synthetic oligonucleotide
agccguaaggccgcugcug

SEQ ID NO: 2637236 - RNA, 19 nt, Artificial Sequence
  Description of Artificial Sequence: Synthetic oligonucleotide
accaucgcagucaggagua

SEQ ID NO: 2637237 - RNA, 19 nt, Artificial Sequence
  Description of Artificial Sequence: Synthetic oligonucleotide
agaacggccggcaucgcuu

SEQ ID NO: 2637238 - RNA, 19 nt, Artificial Sequence
  Description of Artificial Sequence: Synthetic oligonucleotide
gugaccaacaugucaugau

SEQ ID NO: 2637239 - RNA, 19 nt, Artificial Sequence
  Description of Artificial Sequence: Synthetic oligonucleotide
cacaccuggaugaaggguu

SEQ ID NO: 2637240 - RNA, 19 nt, Artificial Sequence
  Description of Artificial Sequence: Synthetic oligonucleotide
guaaggccgcugcugcuga

SEQ ID NO: 2637241 - RNA, 19 nt, Artificial Sequence
  Description of Artificial Sequence: Synthetic oligonucleotide
cuuuuagauauugucucau

SEQ ID NO: 2637242 - RNA, 19 nt, Artificial Sequence
  Description of Artificial Sequence: Synthetic oligonucleotide
cagaaggucccgucugaga

SEQ ID NO: 2637243 - RNA, 19 nt, Artificial Sequence
  Description of Artificial Sequence: Synthetic oligonucleotide
cgcagucaggaguacacgc

SEQ ID NO: 2637244 - RNA, 19 nt, Artificial Sequence
  Description of Artificial Sequence: Synthetic oligonucleotide
cacgcagacguggcacugg

SEQ ID NO: 2637245 - RNA, 19 nt, Artificial Sequence
  Description of Artificial Sequence: Synthetic oligonucleotide
gggcacagaacacgugaug

SEQ ID NO: 2637246 - RNA, 19 nt, Artificial Sequence
  Description of Artificial Sequence: Synthetic oligonucleotide
ccauuguaucgauauacaa

SEQ ID NO: 2637247 - RNA, 19 nt, Artificial Sequence
  Description of Artificial Sequence: Synthetic oligonucleotide
caaccacaccuggaugaag

SEQ ID NO: 2637248 - RNA, 19 nt, Artificial Sequence
  Description of Artificial Sequence: Synthetic oligonucleotide
gacaaccucuccauuguau

SEQ ID NO: 2637249 - RNA, 19 nt, Artificial Sequence
  Description of Artificial Sequence: Synthetic oligonucleotide
gaacacgugaugacaguau

SEQ ID NO: 2637250 - RNA, 19 nt, Artificial Sequence
  Description of Artificial Sequence: Synthetic oligonucleotide
ggugaccaacaugucauga

SEQ ID NO: 2637251 - RNA, 19 nt, Artificial Sequence
  Description of Artificial Sequence: Synthetic oligonucleotide
gucaggaguacacgcuugu

SEQ ID NO: 2637252 - RNA, 19 nt, Artificial Sequence
  Description of Artificial Sequence: Synthetic oligonucleotide
acuaucucacaaagugcuu

SEQ ID NO: 2637253 - RNA, 19 nt, Artificial Sequence
  Description of Artificial Sequence: Synthetic oligonucleotide
ugccacuggcuuguccaga

SEQ ID NO: 2637254 - RNA, 19 nt, Artificial Sequence
  Description of Artificial Sequence: Synthetic oligonucleotide
caccaucgcagucaggagu

SEQ ID NO: 2637255 - RNA, 19 nt, Artificial Sequence
  Description of Artificial Sequence: Synthetic oligonucleotide
ccugcuucacacgcagacg

SEQ ID NO: 2637256 - RNA, 19 nt, Artificial Sequence
  Description of Artificial Sequence: Synthetic oligonucleotide
cagucaaccacaccuggau

SEQ ID NO: 2637257 - RNA, 19 nt, Artificial Sequence
  Description of Artificial Sequence: Synthetic oligonucleotide
acacgcagacguggcacug

SEQ ID NO: 2637258 - RNA, 19 nt, Artificial Sequence
  Description of Artificial Sequence: Synthetic oligonucleotide
cuaucucacaaagugcuuu

SEQ ID NO: 2637259 - RNA, 19 nt, Artificial Sequence
  Description of Artificial Sequence: Synthetic oligonucleotide
ggaguacacgcuugucauc

SEQ ID NO: 2637260 - RNA, 19 nt, Artificial Sequence
  Description of Artificial Sequence: Synthetic oligonucleotide
accaaguaugucacaccau

SEQ ID NO: 2637261 - RNA, 19 nt, Artificial Sequence
  Description of Artificial Sequence: Synthetic oligonucleotide
ucauuucagcuagggcuuu

SEQ ID NO: 2637262 - RNA, 19 nt, Artificial Sequence
  Description of Artificial Sequence: Synthetic oligonucleotide
aggguucauuucagcuagg

SEQ ID NO: 2637263 - RNA, 19 nt, Artificial Sequence
  Description of Artificial Sequence: Synthetic oligonucleotide
cuagggcuuuccaaacacu

SEQ ID NO: 2637264 - RNA, 19 nt, Artificial Sequence
  Description of Artificial Sequence: Synthetic oligonucleotide
cuaccaugaaggguccaaa

SEQ ID NO: 2637265 - RNA, 19 nt, Artificial Sequence
  Description of Artificial Sequence: Synthetic oligonucleotide
gacaacgccugucccuuau

SEQ ID NO: 2637266 - RNA, 19 nt, Artificial Sequence
  Description of Artificial Sequence: Synthetic oligonucleotide
gcuuuccaaacacucuugu

SEQ ID NO: 2637267 - RNA, 19 nt, Artificial Sequence
  Description of Artificial Sequence: Synthetic oligonucleotide
acaacgccugucccuuauu

SEQ ID NO: 2637268 - RNA, 19 nt, Artificial Sequence
  Description of Artificial Sequence: Synthetic oligonucleotide
gcagaaggucccgucugag

SEQ ID NO: 2637269 - RNA, 19 nt, Artificial Sequence
  Description of Artificial Sequence: Synthetic oligonucleotide
caucgcagucaggaguaca

SEQ ID NO: 2637270 - RNA, 19 nt, Artificial Sequence
  Description of Artificial Sequence: Synthetic oligonucleotide
cacugggcacagaacacgu

SEQ ID NO: 2637271 - RNA, 19 nt, Artificial Sequence
  Description of Artificial Sequence: Synthetic oligonucleotide
ggguccaaagacaacgccu

SEQ ID NO: 2637272 - RNA, 19 nt, Artificial Sequence
  Description of Artificial Sequence: Synthetic oligonucleotide
cagaacacgugaugacagu

SEQ ID NO: 2637273 - RNA, 19 nt, Artificial Sequence
  Description of Artificial Sequence: Synthetic oligonucleotide
cauagccguaaggccgcug

SEQ ID NO: 2637274 - RNA, 19 nt, Artificial Sequence
  Description of Artificial Sequence: Synthetic oligonucleotide
ucauagccguaaggccgcu

SEQ ID NO: 2637275 - RNA, 19 nt, Artificial Sequence
  Description of Artificial Sequence: Synthetic oligonucleotide
gacguggcacugggcgcag

SEQ ID NO: 2637276 - RNA, 19 nt, Artificial Sequence
  Description of Artificial Sequence: Synthetic oligonucleotide
ggucccgucugagaugcuc

SEQ ID NO: 2637277 - RNA, 19 nt, Artificial Sequence
  Description of Artificial Sequence: Synthetic oligonucleotide
ccgaaaucauguauaaauu

SEQ ID NO: 2637278 - RNA, 19 nt, Artificial Sequence
  Description of Artificial Sequence: Synthetic oligonucleotide
caccgaaaucauguauaaa

SEQ ID NO: 2637279 - RNA, 19 nt, Artificial Sequence
  Description of Artificial Sequence: Synthetic oligonucleotide
guccaaagacaacgccugu

SEQ ID NO: 2637280 - RNA, 19 nt, Artificial Sequence
  Description of Artificial Sequence: Synthetic oligonucleotide
ccccacaaaauuacauaaa

SEQ ID NO: 2637281 - RNA, 19 nt, Artificial Sequence
  Description of Artificial Sequence: Synthetic oligonucleotide
cguggcacugggcgcaggg

SEQ ID NO: 2637282 - RNA, 19 nt, Artificial Sequence
  Description of Artificial Sequence: Synthetic oligonucleotide
gccacuggcuuguccagaa

SEQ ID NO: 2637283 - RNA, 19 nt, Artificial Sequence
  Description of Artificial Sequence: Synthetic oligonucleotide
gcgcagggugaccaacaug

SEQ ID NO: 2637284 - RNA, 19 nt, Artificial Sequence
  Description of Artificial Sequence: Synthetic oligonucleotide
agacaacgccugucccuua

SEQ ID NO: 2637285 - RNA, 19 nt, Artificial Sequence
  Description of Artificial Sequence: Synthetic oligonucleotide
cagucaggaguacacgcuu

SEQ ID NO: 2637286 - RNA, 19 nt, Artificial Sequence
  Description of Artificial Sequence: Synthetic oligonucleotide
cacacgcagacguggcacu

SEQ ID NO: 2637287 - RNA, 19 nt, Artificial Sequence
  Description of Artificial Sequence: Synthetic oligonucleotide
gucccgucugagaugcucu

SEQ ID NO: 2637288 - RNA, 19 nt, Artificial Sequence
  Description of Artificial Sequence: Synthetic oligonucleotide
gaacggccggcaucgcuuu

SEQ ID NO: 2637289 - RNA, 19 nt, Artificial Sequence
  Description of Artificial Sequence: Synthetic oligonucleotide
gcagucaggaguacacgcu

SEQ ID NO: 2637290 - RNA, 19 nt, Artificial Sequence
  Description of Artificial Sequence: Synthetic oligonucleotide
ggacaaccucuccauugua

SEQ ID NO: 2637291 - RNA, 19 nt, Artificial Sequence
  Description of Artificial Sequence: Synthetic oligonucleotide
caccuggaugaaggguuca

SEQ ID NO: 2637292 - RNA, 19 nt, Artificial Sequence
  Description of Artificial Sequence: Synthetic oligonucleotide
cacugggcgcagggugacc

SEQ ID NO: 2637293 - RNA, 19 nt, Artificial Sequence
  Description of Artificial Sequence: Synthetic oligonucleotide
acguggcacugggcgcagg

SEQ ID NO: 2637294 - RNA, 19 nt, Artificial Sequence
  Description of Artificial Sequence: Synthetic oligonucleotide
ggcuuguccagaacauacu

SEQ ID NO: 2637295 - RNA, 19 nt, Artificial Sequence
  Description of Artificial Sequence: Synthetic oligonucleotide
caaggacaaccucuccauu

SEQ ID NO: 2637296 - RNA, 19 nt, Artificial Sequence
  Description of Artificial Sequence: Synthetic oligonucleotide
agccugcuucacacgcaga

SEQ ID NO: 2637297 - RNA, 19 nt, Artificial Sequence
  Description of Artificial Sequence: Synthetic oligonucleotide
gacccugcucauagccgua

SEQ ID NO: 2637298 - RNA, 19 nt, Artificial Sequence
  Description of Artificial Sequence: Synthetic oligonucleotide
gaacugccacuggcuuguc

SEQ ID NO: 2637299 - RNA, 19 nt, Artificial Sequence
  Description of Artificial Sequence: Synthetic oligonucleotide
ggccggcaucgcuuucccc

SEQ ID NO: 2637300 - RNA, 19 nt, Artificial Sequence
  Description of Artificial Sequence: Synthetic oligonucleotide
cgcagacguggcacugggc

SEQ ID NO: 2637301 - RNA, 19 nt, Artificial Sequence
  Description of Artificial Sequence: Synthetic oligonucleotide
ccccaaacgcuagcuacga

SEQ ID NO: 2637302 - RNA, 19 nt, Artificial Sequence
  Description of Artificial Sequence: Synthetic oligonucleotide
gcacugggcgcagggugac

SEQ ID NO: 2637303 - RNA, 19 nt, Artificial Sequence
  Description of Artificial Sequence: Synthetic oligonucleotide
ccaacaugucaugauucau

SEQ ID NO: 2637304 - RNA, 19 nt, Artificial Sequence
  Description of Artificial Sequence: Synthetic oligonucleotide
ggcgcagggugaccaacau

SEQ ID NO: 2637305 - RNA, 19 nt, Artificial Sequence
  Description of Artificial Sequence: Synthetic oligonucleotide
gcugagcagaaggucccgu

SEQ ID NO: 2637306 - RNA, 19 nt, Artificial Sequence
  Description of Artificial Sequence: Synthetic oligonucleotide
cccuuauugcugguaauuu

SEQ ID NO: 2637307 - RNA, 19 nt, Artificial Sequence
  Description of Artificial Sequence: Synthetic oligonucleotide
ccucuccauuguaucgaua

SEQ ID NO: 2637308 - RNA, 19 nt, Artificial Sequence
  Description of Artificial Sequence: Synthetic oligonucleotide
cccaaacgcuagcuacgaa

SEQ ID NO: 2637309 - RNA, 19 nt, Artificial Sequence
  Description of Artificial Sequence: Synthetic oligonucleotide
cggccggcaucgcuuuccc

SEQ ID NO: 2637310 - RNA, 19 nt, Artificial Sequence
  Description of Artificial Sequence: Synthetic oligonucleotide
ccacaccuggaugaagggu

SEQ ID NO: 2637311 - RNA, 19 nt, Artificial Sequence
  Description of Artificial Sequence: Synthetic oligonucleotide
aggucccgucugagaugcu

SEQ ID NO: 2637312 - RNA, 19 nt, Artificial Sequence
  Description of Artificial Sequence: Synthetic oligonucleotide
cgcuagcuacgaacaucga

SEQ ID NO: 2637313 - RNA, 19 nt, Artificial Sequence
  Description of Artificial Sequence: Synthetic oligonucleotide
cgcuugucaucacacccau

SEQ ID NO: 2637314 - RNA, 19 nt, Artificial Sequence
  Description of Artificial Sequence: Synthetic oligonucleotide
ccguaaggccgcugcugcu

SEQ ID NO: 2637315 - RNA, 19 nt, Artificial Sequence
  Description of Artificial Sequence: Synthetic oligonucleotide
ccgcugcugcugagcagaa

SEQ ID NO: 2637316 - RNA, 19 nt, Artificial Sequence
  Description of Artificial Sequence: Synthetic oligonucleotide
auuaguaaaguccagaacc

SEQ ID NO: 2637317 - RNA, 19 nt, Artificial Sequence
  Description of Artificial Sequence: Synthetic oligonucleotide
aauacagcaacuuuguuga

SEQ ID NO: 2637318 - RNA, 19 nt, Artificial Sequence
  Description of Artificial Sequence: Synthetic oligonucleotide
aaacguuuuaaauagacau

SEQ ID NO: 2637319 - RNA, 19 nt, Artificial Sequence
  Description of Artificial Sequence: Synthetic oligonucleotide
cuauuuuaaucucagaugc

SEQ ID NO: 2637320 - RNA, 19 nt, Artificial Sequence
  Description of Artificial Sequence: Synthetic oligonucleotide
aauaauucaagcauuuuag

SEQ ID NO: 2637321 - RNA, 19 nt, Artificial Sequence
  Description of Artificial Sequence: Synthetic oligonucleotide
guauaaacguuuuaaauag

SEQ ID NO: 2637322 - RNA, 19 nt, Artificial Sequence
  Description of Artificial Sequence: Synthetic oligonucleotide
ugucaaaucaagauaaaug

SEQ ID NO: 2637323 - RNA, 19 nt, Artificial Sequence
  Description of Artificial Sequence: Synthetic oligonucleotide
aacacuggcaaauggcucc

SEQ ID NO: 2637324 - RNA, 19 nt, Artificial Sequence
  Description of Artificial Sequence: Synthetic oligonucleotide
auaaaaguccacaacaacc

SEQ ID NO: 2637325 - RNA, 19 nt, Artificial Sequence
  Description of Artificial Sequence: Synthetic oligonucleotide
aacagcuacauaaaagucc

SEQ ID NO: 2637326 - RNA, 19 nt, Artificial Sequence
  Description of Artificial Sequence: Synthetic oligonucleotide
gucaaaucaagauaaaugc

SEQ ID NO: 2637327 - RNA, 19 nt, Artificial Sequence
  Description of Artificial Sequence: Synthetic oligonucleotide
auagacaucaucuucaggu

SEQ ID NO: 2637328 - RNA, 19 nt, Artificial Sequence
  Description of Artificial Sequence: Synthetic oligonucleotide
aaaauuguugcuauuuugg

SEQ ID NO: 2637329 - RNA, 19 nt, Artificial Sequence
  Description of Artificial Sequence: Synthetic oligonucleotide
ugguaaacuaauaacacug

SEQ ID NO: 2637330 - RNA, 19 nt, Artificial Sequence
  Description of Artificial Sequence: Synthetic oligonucleotide
uaaugucaaaucaagauaa

SEQ ID NO: 2637331 - RNA, 19 nt, Artificial Sequence
  Description of Artificial Sequence: Synthetic oligonucleotide
uuuggauuaguaaagucca

SEQ ID NO: 2637332 - RNA, 19 nt, Artificial Sequence
  Description of Artificial Sequence: Synthetic oligonucleotide
auuguugcuauuuugguug

SEQ ID NO: 2637333 - RNA, 19 nt, Artificial Sequence
  Description of Artificial Sequence: Synthetic oligonucleotide
ucuucugaaauaaauaaau

SEQ ID NO: 2637334 - RNA, 19 nt, Artificial Sequence
  Description of Artificial Sequence: Synthetic oligonucleotide
uaucuaaugucaaaucaag

SEQ ID NO: 2637335 - RNA, 19 nt, Artificial Sequence
  Description of Artificial Sequence: Synthetic oligonucleotide
ugacuucugaagcaaaagg

SEQ ID NO: 2637336 - RNA, 19 nt, Artificial Sequence
  Description of Artificial Sequence: Synthetic oligonucleotide
ucuaaugucaaaucaagau

SEQ ID NO: 2637337 - RNA, 19 nt, Artificial Sequence
  Description of Artificial Sequence: Synthetic oligonucleotide
uaugguaaacuaauaacac

SEQ ID NO: 2637338 - RNA, 19 nt, Artificial Sequence
  Description of Artificial Sequence: Synthetic oligonucleotide
uuaaauagacaucaucuuc

SEQ ID NO: 2637339 - RNA, 19 nt, Artificial Sequence
  Description of Artificial Sequence: Synthetic oligonucleotide
uccaguuuuaaauaauuca

SEQ ID NO: 2637340 - RNA, 19 nt, Artificial Sequence
  Description of Artificial Sequence: Synthetic oligonucleotide
uccgucuuggguauaaacg

SEQ ID NO: 2637341 - RNA, 19 nt, Artificial Sequence
  Description of Artificial Sequence: Synthetic oligonucleotide
ucaaaucaagauaaaugcc

SEQ ID NO: 2637342 - RNA, 19 nt, Artificial Sequence
  Description of Artificial Sequence: Synthetic oligonucleotide
uaagugaauagccuucucc

SEQ ID NO: 2637343 - RNA, 19 nt, Artificial Sequence
  Description of Artificial Sequence: Synthetic oligonucleotide
ugcuauuuuaaucucagau

SEQ ID NO: 2637344 - RNA, 19 nt, Artificial Sequence
  Description of Artificial Sequence: Synthetic oligonucleotide
uuuaguaagugaauagccu

SEQ ID NO: 2637345 - RNA, 19 nt, Artificial Sequence
  Description of Artificial Sequence: Synthetic oligonucleotide
auaauucaagcauuuuagg

SEQ ID NO: 2637346 - RNA, 19 nt, Artificial Sequence
  Description of Artificial Sequence: Synthetic oligonucleotide
aauggguuaagcucaguca

SEQ ID NO: 2637347 - RNA, 19 nt, Artificial Sequence
  Description of Artificial Sequence: Synthetic oligonucleotide
auaaacguuuuaaauagac

SEQ ID NO: 2637348 - RNA, 19 nt, Artificial Sequence
  Description of Artificial Sequence: Synthetic oligonucleotide
ucugcuauuuuaaucucag

SEQ ID NO: 2637349 - RNA, 19 nt, Artificial Sequence
  Description of Artificial Sequence: Synthetic oligonucleotide
aagauaaaugccuugcuuu

SEQ ID NO: 2637350 - RNA, 19 nt, Artificial Sequence
  Description of Artificial Sequence: Synthetic oligonucleotide
ugucuucugaaauaaauaa

SEQ ID NO: 2637351 - RNA, 19 nt, Artificial Sequence
  Description of Artificial Sequence: Synthetic oligonucleotide
aucaagauaaaugccuugc

SEQ ID NO: 2637352 - RNA, 19 nt, Artificial Sequence
  Description of Artificial Sequence: Synthetic oligonucleotide
aauggaauuucuaguaguc

SEQ ID NO: 2637353 - RNA, 19 nt, Artificial Sequence
  Description of Artificial Sequence: Synthetic oligonucleotide
cacaacaaccucaucaucc

SEQ ID NO: 2637354 - RNA, 19 nt, Artificial Sequence
  Description of Artificial Sequence: Synthetic oligonucleotide
aaauagacaucaucuucag

SEQ ID NO: 2637355 - RNA, 19 nt, Artificial Sequence
  Description of Artificial Sequence: Synthetic oligonucleotide
aauagccuucuccaccucg

SEQ ID NO: 2637356 - RNA, 19 nt, Artificial Sequence
  Description of Artificial Sequence: Synthetic oligonucleotide
aaaguccagaaccugaaau

SEQ ID NO: 2637357 - RNA, 19 nt, Artificial Sequence
  Description of Artificial Sequence: Synthetic oligonucleotide
aauuucuaguagucuuugg

SEQ ID NO: 2637358 - RNA, 19 nt, Artificial Sequence
  Description of Artificial Sequence: Synthetic oligonucleotide
uucuccaccucguaaaucc

SEQ ID NO: 2637359 - RNA, 19 nt, Artificial Sequence
  Description of Artificial Sequence: Synthetic oligonucleotide
aaauuguugcuauuuuggu

SEQ ID NO: 2637360 - RNA, 19 nt, Artificial Sequence
  Description of Artificial Sequence: Synthetic oligonucleotide
uucauguccaguuuuaaau

SEQ ID NO: 2637361 - RNA, 19 nt, Artificial Sequence
  Description of Artificial Sequence: Synthetic oligonucleotide
uuuaaucucagaugcaguc

SEQ ID NO: 2637362 - RNA, 19 nt, Artificial Sequence
  Description of Artificial Sequence: Synthetic oligonucleotide
ucuuaaccaggucagcucc

SEQ ID NO: 2637363 - RNA, 19 nt, Artificial Sequence
  Description of Artificial Sequence: Synthetic oligonucleotide
uuaaauaauucaagcauuu

SEQ ID NO: 2637364 - RNA, 19 nt, Artificial Sequence
  Description of Artificial Sequence: Synthetic oligonucleotide
uuaagcucagucauuauuu

SEQ ID NO: 2637365 - RNA, 19 nt, Artificial Sequence
  Description of Artificial Sequence: Synthetic oligonucleotide
uuaguaaaguccagaaccu

SEQ ID NO: 2637366 - RNA, 19 nt, Artificial Sequence
  Description of Artificial Sequence: Synthetic oligonucleotide
auuucuaguagucuuugga

SEQ ID NO: 2637367 - RNA, 19 nt, Artificial Sequence
  Description of Artificial Sequence: Synthetic oligonucleotide
uuuagggaugucacgacca

SEQ ID NO: 2637368 - RNA, 19 nt, Artificial Sequence
  Description of Artificial Sequence: Synthetic oligonucleotide
aacguuuuaaauagacauc

SEQ ID NO: 2637369 - RNA, 19 nt, Artificial Sequence
  Description of Artificial Sequence: Synthetic oligonucleotide
caguuuuaaauaauucaag

SEQ ID NO: 2637370 - RNA, 19 nt, Artificial Sequence
  Description of Artificial Sequence: Synthetic oligonucleotide
uuauuuccggaacagcuac

SEQ ID NO: 2637371 - RNA, 19 nt, Artificial Sequence
  Description of Artificial Sequence: Synthetic oligonucleotide
aaugccuugcuuuggauua

SEQ ID NO: 2637372 - RNA, 19 nt, Artificial Sequence
  Description of Artificial Sequence: Synthetic oligonucleotide
gaaauuucuuuaguaagug

SEQ ID NO: 2637373 - RNA, 19 nt, Artificial Sequence
  Description of Artificial Sequence: Synthetic oligonucleotide
uugcuuuggauuaguaaag

SEQ ID NO: 2637374 - RNA, 19 nt, Artificial Sequence
  Description of Artificial Sequence: Synthetic oligonucleotide
aaaaggguaugguaaacua

SEQ ID NO: 2637375 - RNA, 19 nt, Artificial Sequence
  Description of Artificial Sequence: Synthetic oligonucleotide
uuccggaacagcuacauaa

SEQ ID NO: 2637376 - RNA, 19 nt, Artificial Sequence
  Description of Artificial Sequence: Synthetic oligonucleotide
uuuuagggaugucacgacc

SEQ ID NO: 2637377 - RNA, 19 nt, Artificial Sequence
  Description of Artificial Sequence: Synthetic oligonucleotide
uuuguugacuucugaagca

SEQ ID NO: 2637378 - RNA, 19 nt, Artificial Sequence
  Description of Artificial Sequence: Synthetic oligonucleotide
gaaaguucugccuuucuuc

SEQ ID NO: 2637379 - RNA, 19 nt, Artificial Sequence
  Description of Artificial Sequence: Synthetic oligonucleotide
uccuuaauggguuaagcuc

SEQ ID NO: 2637380 - RNA, 19 nt, Artificial Sequence
  Description of Artificial Sequence: Synthetic oligonucleotide
aauuguugcuauuuugguu

SEQ ID NO: 2637381 - RNA, 19 nt, Artificial Sequence
  Description of Artificial Sequence: Synthetic oligonucleotide
guaaacuaauaacacuggc

SEQ ID NO: 2637382 - RNA, 19 nt, Artificial Sequence
  Description of Artificial Sequence: Synthetic oligonucleotide
gaugccauaucuaauguca

SEQ ID NO: 2637383 - RNA, 19 nt, Artificial Sequence
  Description of Artificial Sequence: Synthetic oligonucleotide
guaugguaaacuaauaaca

SEQ ID NO: 2637384 - RNA, 19 nt, Artificial Sequence
  Description of Artificial Sequence: Synthetic oligonucleotide
acguuuuaaauagacauca

SEQ ID NO: 2637385 - RNA, 19 nt, Artificial Sequence
  Description of Artificial Sequence: Synthetic oligonucleotide
gauuaguaaaguccagaac

SEQ ID NO: 2637386 - RNA, 19 nt, Artificial Sequence
  Description of Artificial Sequence: Synthetic oligonucleotide
ucuucaucuaccacaauuu

SEQ ID NO: 2637387 - RNA, 19 nt, Artificial Sequence
  Description of Artificial Sequence: Synthetic oligonucleotide
cuugcuuuggauuaguaaa

SEQ ID NO: 2637388 - RNA, 19 nt, Artificial Sequence
  Description of Artificial Sequence: Synthetic oligonucleotide
uuucuaguagucuuuggaa

SEQ ID NO: 2637389 - RNA, 19 nt, Artificial Sequence
  Description of Artificial Sequence: Synthetic oligonucleotide
aacuuuguugacuucugaa

SEQ ID NO: 2637390 - RNA, 19 nt, Artificial Sequence
  Description of Artificial Sequence: Synthetic oligonucleotide
ucagguuugcuuuccaugu

SEQ ID NO: 2637391 - RNA, 19 nt, Artificial Sequence
  Description of Artificial Sequence: Synthetic oligonucleotide
agucccuguaaauacagca

SEQ ID NO: 2637392 - RNA, 19 nt, Artificial Sequence
  Description of Artificial Sequence: Synthetic oligonucleotide
augcagucccuguaaauac

SEQ ID NO: 2637393 - RNA, 19 nt, Artificial Sequence
  Description of Artificial Sequence: Synthetic oligonucleotide
uaauggguuaagcucaguc

SEQ ID NO: 2637394 - RNA, 19 nt, Artificial Sequence
  Description of Artificial Sequence: Synthetic oligonucleotide
uuaguaagugaauagccuu

SEQ ID NO: 2637395 - RNA, 19 nt, Artificial Sequence
  Description of Artificial Sequence: Synthetic oligonucleotide
uguaguauaugacuuuauu

SEQ ID NO: 2637396 - RNA, 19 nt, Artificial Sequence
  Description of Artificial Sequence: Synthetic oligonucleotide
acuaauaacacuggcaaau

SEQ ID NO: 2637397 - RNA, 19 nt, Artificial Sequence
  Description of Artificial Sequence: Synthetic oligonucleotide
gguaugguaaacuaauaac

SEQ ID NO: 2637398 - RNA, 19 nt, Artificial Sequence
  Description of Artificial Sequence: Synthetic oligonucleotide
uauuuuaaucucagaugca

SEQ ID NO: 2637399 - RNA, 19 nt, Artificial Sequence
  Description of Artificial Sequence: Synthetic oligonucleotide
uauaaacguuuuaaauaga

SEQ ID NO: 2637400 - RNA, 19 nt, Artificial Sequence
  Description of Artificial Sequence: Synthetic oligonucleotide
uucagguuugcuuuccaug

SEQ ID NO: 2637401 - RNA, 19 nt, Artificial Sequence
  Description of Artificial Sequence: Synthetic oligonucleotide
ucagucauuauuuccggaa

SEQ ID NO: 2637402 - RNA, 19 nt, Artificial Sequence
  Description of Artificial Sequence: Synthetic oligonucleotide
augguaaacuaauaacacu

SEQ ID NO: 2637403 - RNA, 19 nt, Artificial Sequence
  Description of Artificial Sequence: Synthetic oligonucleotide
uuccuuaauggguuaagcu

SEQ ID NO: 2637404 - RNA, 19 nt, Artificial Sequence
  Description of Artificial Sequence: Synthetic oligonucleotide
agcauuuuagggaugucac

SEQ ID NO: 2637405 - RNA, 19 nt, Artificial Sequence
  Description of Artificial Sequence: Synthetic oligonucleotide
cauaaaaguccacaacaac

SEQ ID NO: 2637406 - RNA, 19 nt, Artificial Sequence
  Description of Artificial Sequence: Synthetic oligonucleotide
ucguaaauccgucuugggu

SEQ ID NO: 2637407 - RNA, 19 nt, Artificial Sequence
  Description of Artificial Sequence: Synthetic oligonucleotide
ucuaguagucuuuggaaau

SEQ ID NO: 2637408 - RNA, 19 nt, Artificial Sequence
  Description of Artificial Sequence: Synthetic oligonucleotide
aacaaccucaucauccaag

SEQ ID NO: 2637409 - RNA, 19 nt, Artificial Sequence
  Description of Artificial Sequence: Synthetic oligonucleotide
ugaauagccuucuccaccu

SEQ ID NO: 2637410 - RNA, 19 nt, Artificial Sequence
  Description of Artificial Sequence: Synthetic oligonucleotide
uucucuucugcuauuuuaa

SEQ ID NO: 2637411 - RNA, 19 nt, Artificial Sequence
  Description of Artificial Sequence: Synthetic oligonucleotide
ucaagauaaaugccuugcu

SEQ ID NO: 2637412 - RNA, 19 nt, Artificial Sequence
  Description of Artificial Sequence: Synthetic oligonucleotide
agcucagucauuauuuccg

SEQ ID NO: 2637413 - RNA, 19 nt, Artificial Sequence
  Description of Artificial Sequence: Synthetic oligonucleotide
gguauaaacguuuuaaaua

SEQ ID NO: 2637414 - RNA, 19 nt, Artificial Sequence
  Description of Artificial Sequence: Synthetic oligonucleotide
ucccuguaaauacagcaac

SEQ ID NO: 2637415 - RNA, 19 nt, Artificial Sequence
  Description of Artificial Sequence: Synthetic oligonucleotide
agaaccugaaauuucuuua

SEQ ID NO: 2637416 - RNA, 19 nt, Artificial Sequence
  Description of Artificial Sequence: Synthetic oligonucleotide
ugguugcugagaaaguucu

SEQ ID NO: 2637417 - RNA, 19 nt, Artificial Sequence
  Description of Artificial Sequence: Synthetic oligonucleotide
gaugucacgaccaauggaa

SEQ ID NO: 2637418 - RNA, 19 nt, Artificial Sequence
  Description of Artificial Sequence: Synthetic oligonucleotide
aaaguccacaacaaccuca

SEQ ID NO: 2637419 - RNA, 19 nt, Artificial Sequence
  Description of Artificial Sequence: Synthetic oligonucleotide
caaaucaagauaaaugccu

SEQ ID NO: 2637420 - RNA, 19 nt, Artificial Sequence
  Description of Artificial Sequence: Synthetic oligonucleotide
ugcuauuuugguugcugag

SEQ ID NO: 2637421 - RNA, 19 nt, Artificial Sequence
  Description of Artificial Sequence: Synthetic oligonucleotide
aaaugccuugcuuuggauu

SEQ ID NO: 2637422 - RNA, 19 nt, Artificial Sequence
  Description of Artificial Sequence: Synthetic oligonucleotide
uaguaagugaauagccuuc

SEQ ID NO: 2637423 - RNA, 19 nt, Artificial Sequence
  Description of Artificial Sequence: Synthetic oligonucleotide
auccgucuuggguauaaac

SEQ ID NO: 2637424 - RNA, 19 nt, Artificial Sequence
  Description of Artificial Sequence: Synthetic oligonucleotide
uugacuucugaagcaaaag

SEQ ID NO: 2637425 - RNA, 19 nt, Artificial Sequence
  Description of Artificial Sequence: Synthetic oligonucleotide
gugaauagccuucuccacc

SEQ ID NO: 2637426 - RNA, 19 nt, Artificial Sequence
  Description of Artificial Sequence: Synthetic oligonucleotide
uuuccuuaauggguuaagc

SEQ ID NO: 2637427 - RNA, 19 nt, Artificial Sequence
  Description of Artificial Sequence: Synthetic oligonucleotide
aaggguaugguaaacuaau

SEQ ID NO: 2637428 - RNA, 19 nt, Artificial Sequence
  Description of Artificial Sequence: Synthetic oligonucleotide
aacuaauaacacuggcaaa

SEQ ID NO: 2637429 - RNA, 19 nt, Artificial Sequence
  Description of Artificial Sequence: Synthetic oligonucleotide
agucauuauuuccggaaca

SEQ ID NO: 2637430 - RNA, 19 nt, Artificial Sequence
  Description of Artificial Sequence: Synthetic oligonucleotide
gaagcaaaaggguauggua

SEQ ID NO: 2637431 - RNA, 19 nt, Artificial Sequence
  Description of Artificial Sequence: Synthetic oligonucleotide
auggguuaagcucagucau

SEQ ID NO: 2637432 - RNA, 19 nt, Artificial Sequence
  Description of Artificial Sequence: Synthetic oligonucleotide
uaccacaauuucaugucca

SEQ ID NO: 2637433 - RNA, 19 nt, Artificial Sequence
  Description of Artificial Sequence: Synthetic oligonucleotide
uuggauuaguaaaguccag

SEQ ID NO: 2637434 - RNA, 19 nt, Artificial Sequence
  Description of Artificial Sequence: Synthetic oligonucleotide
ucauguccaguuuuaaaua

SEQ ID NO: 2637435 - RNA, 19 nt, Artificial Sequence
  Description of Artificial Sequence: Synthetic oligonucleotide
acaacaaccucaucaucca

SEQ ID NO: 2637436 - RNA, 19 nt, Artificial Sequence
  Description of Artificial Sequence: Synthetic oligonucleotide
aagaucuucuuaaccaggu

SEQ ID NO: 2637437 - RNA, 19 nt, Artificial Sequence
  Description of Artificial Sequence: Synthetic oligonucleotide
acagcuacauaaaagucca

SEQ ID NO: 2637438 - RNA, 19 nt, Artificial Sequence
  Description of Artificial Sequence: Synthetic oligonucleotide
uggauuaguaaaguccaga

SEQ ID NO: 2637439 - RNA, 19 nt, Artificial Sequence
  Description of Artificial Sequence: Synthetic oligonucleotide
uuucauguccaguuuuaaa

SEQ ID NO: 2637440 - RNA, 19 nt, Artificial Sequence
  Description of Artificial Sequence: Synthetic oligonucleotide
ucagaugcagucccuguaa

SEQ ID NO: 2637441 - RNA, 19 nt, Artificial Sequence
  Description of Artificial Sequence: Synthetic oligonucleotide
aaaucaagauaaaugccuu

SEQ ID NO: 2637442 - RNA, 19 nt, Artificial Sequence
  Description of Artificial Sequence: Synthetic oligonucleotide
uugguugcugagaaaguuc

SEQ ID NO: 2637443 - RNA, 19 nt, Artificial Sequence
  Description of Artificial Sequence: Synthetic oligonucleotide
uuuuccuuaauggguuaag

SEQ ID NO: 2637444 - RNA, 19 nt, Artificial Sequence
  Description of Artificial Sequence: Synthetic oligonucleotide
gucauuauuuccggaacag

SEQ ID NO: 2637445 - RNA, 19 nt, Artificial Sequence
  Description of Artificial Sequence: Synthetic oligonucleotide
gguaaacuaauaacacugg

SEQ ID NO: 2637446 - RNA, 19 nt, Artificial Sequence
  Description of Artificial Sequence: Synthetic oligonucleotide
cucuucugcuauuuuaauc

SEQ ID NO: 2637447 - RNA, 19 nt, Artificial Sequence
  Description of Artificial Sequence: Synthetic oligonucleotide
auaucuaaugucaaaucaa

SEQ ID NO: 2637448 - RNA, 19 nt, Artificial Sequence
  Description of Artificial Sequence: Synthetic oligonucleotide
cuaccacaauuucaugucc

SEQ ID NO: 2637449 - RNA, 19 nt, Artificial Sequence
  Description of Artificial Sequence: Synthetic oligonucleotide
uucuuaaccaggucagcuc

SEQ ID NO: 2637450 - RNA, 19 nt, Artificial Sequence
  Description of Artificial Sequence: Synthetic oligonucleotide
aaccaggucagcuccuccu

SEQ ID NO: 2637451 - RNA, 19 nt, Artificial Sequence
  Description of Artificial Sequence: Synthetic oligonucleotide
cuuaauggguuaagcucag

SEQ ID NO: 2637452 - RNA, 19 nt, Artificial Sequence
  Description of Artificial Sequence: Synthetic oligonucleotide
agcuacauaaaaguccaca

SEQ ID NO: 2637453 - RNA, 19 nt, Artificial Sequence
  Description of Artificial Sequence: Synthetic oligonucleotide
uugcuauuuugguugcuga

SEQ ID NO: 2637454 - RNA, 19 nt, Artificial Sequence
  Description of Artificial Sequence: Synthetic oligonucleotide
aaaggguaugguaaacuaa

SEQ ID NO: 2637455 - RNA, 19 nt, Artificial Sequence
  Description of Artificial Sequence: Synthetic oligonucleotide
aucuucuuaaccaggucag

SEQ ID NO: 2637456 - RNA, 19 nt, Artificial Sequence
  Description of Artificial Sequence: Synthetic oligonucleotide
ugcaaacgcagcuccauuc

SEQ ID NO: 2637457 - RNA, 19 nt, Artificial Sequence
  Description of Artificial Sequence: Synthetic oligonucleotide
uaagcucagucauuauuuc

SEQ ID NO: 2637458 - RNA, 19 nt, Artificial Sequence
  Description of Artificial Sequence: Synthetic oligonucleotide
ggaacagcuacauaaaagu

SEQ ID NO: 2637459 - RNA, 19 nt, Artificial Sequence
  Description of Artificial Sequence: Synthetic oligonucleotide
uuuccccgaugccauaucu

SEQ ID NO: 2637460 - RNA, 19 nt, Artificial Sequence
  Description of Artificial Sequence: Synthetic oligonucleotide
cuaauaacacuggcaaaug

SEQ ID NO: 2637461 - RNA, 19 nt, Artificial Sequence
  Description of Artificial Sequence: Synthetic oligonucleotide
ugcagucccuguaaauaca

SEQ ID NO: 2637462 - RNA, 19 nt, Artificial Sequence
  Description of Artificial Sequence: Synthetic oligonucleotide
agaaaguucugccuuucuu

SEQ ID NO: 2637463 - RNA, 19 nt, Artificial Sequence
  Description of Artificial Sequence: Synthetic oligonucleotide
uccuccugcaaacgcagcu

SEQ ID NO: 2637464 - RNA, 19 nt, Artificial Sequence
  Description of Artificial Sequence: Synthetic oligonucleotide
uacagcaacuuuguugacu

SEQ ID NO: 2637465 - RNA, 19 nt, Artificial Sequence
  Description of Artificial Sequence: Synthetic oligonucleotide
gaacagcuacauaaaaguc

SEQ ID NO: 2637466 - RNA, 19 nt, Artificial Sequence
  Description of Artificial Sequence: Synthetic oligonucleotide
guaguauaugacuuuauuu

SEQ ID NO: 2637467 - RNA, 19 nt, Artificial Sequence
  Description of Artificial Sequence: Synthetic oligonucleotide
cagucauuauuuccggaac

SEQ ID NO: 2637468 - RNA, 19 nt, Artificial Sequence
  Description of Artificial Sequence: Synthetic oligonucleotide
ugccuuucuucaucuacca

SEQ ID NO: 2637469 - RNA, 19 nt, Artificial Sequence
  Description of Artificial Sequence: Synthetic oligonucleotide
agcuccauucucuucugcu

SEQ ID NO: 2637470 - RNA, 19 nt, Artificial Sequence
  Description of Artificial Sequence: Synthetic oligonucleotide
acaauuucauguccaguuu

SEQ ID NO: 2637471 - RNA, 19 nt, Artificial Sequence
  Description of Artificial Sequence: Synthetic oligonucleotide
uuguugcuauuuugguugc

SEQ ID NO: 2637472 - RNA, 19 nt, Artificial Sequence
  Description of Artificial Sequence: Synthetic oligonucleotide
aguaagugaauagccuucu

SEQ ID NO: 2637473 - RNA, 19 nt, Artificial Sequence
  Description of Artificial Sequence: Synthetic oligonucleotide
uaguagucuuuggaaaucu

SEQ ID NO: 2637474 - RNA, 19 nt, Artificial Sequence
  Description of Artificial Sequence: Synthetic oligonucleotide
uguugacuucugaagcaaa

SEQ ID NO: 2637475 - RNA, 19 nt, Artificial Sequence
  Description of Artificial Sequence: Synthetic oligonucleotide
agggaugucacgaccaaug

SEQ ID NO: 2637476 - RNA, 19 nt, Artificial Sequence
  Description of Artificial Sequence: Synthetic oligonucleotide
cucguaaauccgucuuggg

SEQ ID NO: 2637477 - RNA, 19 nt, Artificial Sequence
  Description of Artificial Sequence: Synthetic oligonucleotide
cauccaagaucuucuuaac

SEQ ID NO: 2637478 - RNA, 19 nt, Artificial Sequence
  Description of Artificial Sequence: Synthetic oligonucleotide
aaacgcagcuccauucucu

SEQ ID NO: 2637479 - RNA, 19 nt, Artificial Sequence
  Description of Artificial Sequence: Synthetic oligonucleotide
uccccgaugccauaucuaa

SEQ ID NO: 2637480 - RNA, 19 nt, Artificial Sequence
  Description of Artificial Sequence: Synthetic oligonucleotide
uccggaacagcuacauaaa

SEQ ID NO: 2637481 - RNA, 19 nt, Artificial Sequence
  Description of Artificial Sequence: Synthetic oligonucleotide
acauaaaaguccacaacaa

SEQ ID NO: 2637482 - RNA, 19 nt, Artificial Sequence
  Description of Artificial Sequence: Synthetic oligonucleotide
augucaaaucaagauaaau

SEQ ID NO: 2637483 - RNA, 19 nt, Artificial Sequence
  Description of Artificial Sequence: Synthetic oligonucleotide
gaugcagucccuguaaaua

SEQ ID NO: 2637484 - RNA, 19 nt, Artificial Sequence
  Description of Artificial Sequence: Synthetic oligonucleotide
uuagggaugucacgaccaa

SEQ ID NO: 2637485 - RNA, 19 nt, Artificial Sequence
  Description of Artificial Sequence: Synthetic oligonucleotide
ugcuuuggauuaguaaagu

SEQ ID NO: 2637486 - RNA, 19 nt, Artificial Sequence
  Description of Artificial Sequence: Synthetic oligonucleotide
ucuuggguauaaacguuuu

SEQ ID NO: 2637487 - RNA, 19 nt, Artificial Sequence
  Description of Artificial Sequence: Synthetic oligonucleotide
uggugcugucuucugaaau

SEQ ID NO: 2637488 - RNA, 19 nt, Artificial Sequence
  Description of Artificial Sequence: Synthetic oligonucleotide
auuucuuuaguaagugaau

SEQ ID NO: 2637489 - RNA, 19 nt, Artificial Sequence
  Description of Artificial Sequence: Synthetic oligonucleotide
uagacaucaucuucagguu

SEQ ID NO: 2637490 - RNA, 19 nt, Artificial Sequence
  Description of Artificial Sequence: Synthetic oligonucleotide
ggauuaguaaaguccagaa

SEQ ID NO: 2637491 - RNA, 19 nt, Artificial Sequence
  Description of Artificial Sequence: Synthetic oligonucleotide
accucguaaauccgucuug

SEQ ID NO: 2637492 - RNA, 19 nt, Artificial Sequence
  Description of Artificial Sequence: Synthetic oligonucleotide
aucuaaugucaaaucaaga

SEQ ID NO: 2637493 - RNA, 19 nt, Artificial Sequence
  Description of Artificial Sequence: Synthetic oligonucleotide
ugccauaucuaaugucaaa

SEQ ID NO: 2637494 - RNA, 19 nt, Artificial Sequence
  Description of Artificial Sequence: Synthetic oligonucleotide
cuucugaagcaaaagggua

SEQ ID NO: 2637495 - RNA, 19 nt, Artificial Sequence
  Description of Artificial Sequence: Synthetic oligonucleotide
uccaccucguaaauccguc

SEQ ID NO: 2637496 - RNA, 19 nt, Artificial Sequence
  Description of Artificial Sequence: Synthetic oligonucleotide
gaccaauggaauuucuagu

SEQ ID NO: 2637497 - RNA, 19 nt, Artificial Sequence
  Description of Artificial Sequence: Synthetic oligonucleotide
auacagcaacuuuguugac

SEQ ID NO: 2637498 - RNA, 19 nt, Artificial Sequence
  Description of Artificial Sequence: Synthetic oligonucleotide
uaaccaggucagcuccucc

SEQ ID NO: 2637499 - RNA, 19 nt, Artificial Sequence
  Description of Artificial Sequence: Synthetic oligonucleotide
uggcaaauggcuccacuuu

SEQ ID NO: 2637500 - RNA, 19 nt, Artificial Sequence
  Description of Artificial Sequence: Synthetic oligonucleotide
ccuuaauggguuaagcuca

SEQ ID NO: 2637501 - RNA, 19 nt, Artificial Sequence
  Description of Artificial Sequence: Synthetic oligonucleotide
ucuucuuaaccaggucagc

SEQ ID NO: 2637502 - RNA, 19 nt, Artificial Sequence
  Description of Artificial Sequence: Synthetic oligonucleotide
gcuacauaaaaguccacaa

SEQ ID NO: 2637503 - RNA, 19 nt, Artificial Sequence
  Description of Artificial Sequence: Synthetic oligonucleotide
cuaguagucuuuggaaauc

SEQ ID NO: 2637504 - RNA, 19 nt, Artificial Sequence
  Description of Artificial Sequence: Synthetic oligonucleotide
uuguugacuucugaagcaa

SEQ ID NO: 2637505 - RNA, 19 nt, Artificial Sequence
  Description of Artificial Sequence: Synthetic oligonucleotide
uaaaugccuugcuuuggau

SEQ ID NO: 2637506 - RNA, 19 nt, Artificial Sequence
  Description of Artificial Sequence: Synthetic oligonucleotide
aaauccgucuuggguauaa

SEQ ID NO: 2637507 - RNA, 19 nt, Artificial Sequence
  Description of Artificial Sequence: Synthetic oligonucleotide
aaguccacaacaaccucau

SEQ ID NO: 2637508 - RNA, 19 nt, Artificial Sequence
  Description of Artificial Sequence: Synthetic oligonucleotide
aacgcagcuccauucucuu

SEQ ID NO: 2637509 - RNA, 19 nt, Artificial Sequence
  Description of Artificial Sequence: Synthetic oligonucleotide
ugucacgaccaauggaauu

SEQ ID NO: 2637510 - RNA, 19 nt, Artificial Sequence
  Description of Artificial Sequence: Synthetic oligonucleotide
ggguaugguaaacuaauaa

SEQ ID NO: 2637511 - RNA, 19 nt, Artificial Sequence
  Description of Artificial Sequence: Synthetic oligonucleotide
gcucagucauuauuuccgg

SEQ ID NO: 2637512 - RNA, 19 nt, Artificial Sequence
  Description of Artificial Sequence: Synthetic oligonucleotide
ugcuuuccauguaguauau

SEQ ID NO: 2637513 - RNA, 19 nt, Artificial Sequence
  Description of Artificial Sequence: Synthetic oligonucleotide
auuauuuccggaacagcua

SEQ ID NO: 2637514 - RNA, 19 nt, Artificial Sequence
  Description of Artificial Sequence: Synthetic oligonucleotide
agaugcagucccuguaaau

SEQ ID NO: 2637515 - RNA, 19 nt, Artificial Sequence
  Description of Artificial Sequence: Synthetic oligonucleotide
auuuccggaacagcuacau

SEQ ID NO: 2637516 - RNA, 19 nt, Artificial Sequence
  Description of Artificial Sequence: Synthetic oligonucleotide
caauggaauuucuaguagu

SEQ ID NO: 2637517 - RNA, 19 nt, Artificial Sequence
  Description of Artificial Sequence: Synthetic oligonucleotide
cgaccaauggaauuucuag

SEQ ID NO: 2637518 - RNA, 19 nt, Artificial Sequence
  Description of Artificial Sequence: Synthetic oligonucleotide
cccgaugccauaucuaaug

SEQ ID NO: 2637519 - RNA, 19 nt, Artificial Sequence
  Description of Artificial Sequence: Synthetic oligonucleotide
aucauccaagaucuucuua

SEQ ID NO: 2637520 - RNA, 19 nt, Artificial Sequence
  Description of Artificial Sequence: Synthetic oligonucleotide
guuaagcucagucauuauu

SEQ ID NO: 2637521 - RNA, 19 nt, Artificial Sequence
  Description of Artificial Sequence: Synthetic oligonucleotide
guaaaguccagaaccugaa

SEQ ID NO: 2637522 - RNA, 19 nt, Artificial Sequence
  Description of Artificial Sequence: Synthetic oligonucleotide
uuuuccccgaugccauauc

SEQ ID NO: 2637523 - RNA, 19 nt, Artificial Sequence
  Description of Artificial Sequence: Synthetic oligonucleotide
cggaacagcuacauaaaag

SEQ ID NO: 2637524 - RNA, 19 nt, Artificial Sequence
  Description of Artificial Sequence: Synthetic oligonucleotide
gcuuuggauuaguaaaguc

SEQ ID NO: 2637525 - RNA, 19 nt, Artificial Sequence
  Description of Artificial Sequence: Synthetic oligonucleotide
guuugcuuuccauguagua

SEQ ID NO: 2637526 - RNA, 19 nt, Artificial Sequence
  Description of Artificial Sequence: Synthetic oligonucleotide
guaagugaauagccuucuc

SEQ ID NO: 2637527 - RNA, 19 nt, Artificial Sequence
  Description of Artificial Sequence: Synthetic oligonucleotide
ggguauaaacguuuuaaau

SEQ ID NO: 2637528 - RNA, 19 nt, Artificial Sequence
  Description of Artificial Sequence: Synthetic oligonucleotide
uggguuaagcucagucauu

SEQ ID NO: 2637529 - RNA, 19 nt, Artificial Sequence
  Description of Artificial Sequence: Synthetic oligonucleotide
cauguaguauaugacuuua

SEQ ID NO: 2637530 - RNA, 19 nt, Artificial Sequence
  Description of Artificial Sequence: Synthetic oligonucleotide
guugacuucugaagcaaaa

SEQ ID NO: 2637531 - RNA, 19 nt, Artificial Sequence
  Description of Artificial Sequence: Synthetic oligonucleotide
aaucucagaugcagucccu

SEQ ID NO: 2637532 - RNA, 19 nt, Artificial Sequence
  Description of Artificial Sequence: Synthetic oligonucleotide
caaacgcagcuccauucuc

SEQ ID NO: 2637533 - RNA, 19 nt, Artificial Sequence
  Description of Artificial Sequence: Synthetic oligonucleotide
uuaaccaggucagcuccuc

SEQ ID NO: 2637534 - RNA, 19 nt, Artificial Sequence
  Description of Artificial Sequence: Synthetic oligonucleotide
uuuccggaacagcuacaua

SEQ ID NO: 2637535 - RNA, 19 nt, Artificial Sequence
  Description of Artificial Sequence: Synthetic oligonucleotide
gcuauuuugguugcugaga

SEQ ID NO: 2637536 - RNA, 19 nt, Artificial Sequence
  Description of Artificial Sequence: Synthetic oligonucleotide
auagccuucuccaccucgu

SEQ ID NO: 2637537 - RNA, 19 nt, Artificial Sequence
  Description of Artificial Sequence: Synthetic oligonucleotide
cucagucauuauuuccgga

SEQ ID NO: 2637538 - RNA, 19 nt, Artificial Sequence
  Description of Artificial Sequence: Synthetic oligonucleotide
guaaauccgucuuggguau

SEQ ID NO: 2637539 - RNA, 19 nt, Artificial Sequence
  Description of Artificial Sequence: Synthetic oligonucleotide
ccucguaaauccgucuugg

SEQ ID NO: 2637540 - RNA, 19 nt, Artificial Sequence
  Description of Artificial Sequence: Synthetic oligonucleotide
uuaauggguuaagcucagu

SEQ ID NO: 2637541 - RNA, 19 nt, Artificial Sequence
  Description of Artificial Sequence: Synthetic oligonucleotide
ggugcugucuucugaaaua

SEQ ID NO: 2637542 - RNA, 19 nt, Artificial Sequence
  Description of Artificial Sequence: Synthetic oligonucleotide
caagauaaaugccuugcuu

SEQ ID NO: 2637543 - RNA, 19 nt, Artificial Sequence
  Description of Artificial Sequence: Synthetic oligonucleotide
ggaugucacgaccaaugga

SEQ ID NO: 2637544 - RNA, 19 nt, Artificial Sequence
  Description of Artificial Sequence: Synthetic oligonucleotide
cuucuuaaccaggucagcu

SEQ ID NO: 2637545 - RNA, 19 nt, Artificial Sequence
  Description of Artificial Sequence: Synthetic oligonucleotide
auguaguauaugacuuuau

SEQ ID NO: 2637546 - RNA, 19 nt, Artificial Sequence
  Description of Artificial Sequence: Synthetic oligonucleotide
aauccgucuuggguauaaa

SEQ ID NO: 2637547 - RNA, 19 nt, Artificial Sequence
  Description of Artificial Sequence: Synthetic oligonucleotide
cuucuccaccucguaaauc

SEQ ID NO: 2637548 - RNA, 19 nt, Artificial Sequence
  Description of Artificial Sequence: Synthetic oligonucleotide
cugcuauuuuaaucucaga

SEQ ID NO: 2637549 - RNA, 19 nt, Artificial Sequence
  Description of Artificial Sequence: Synthetic oligonucleotide
gcaacuuuguugacuucug

SEQ ID NO: 2637550 - RNA, 19 nt, Artificial Sequence
  Description of Artificial Sequence: Synthetic oligonucleotide
augccuugcuuuggauuag

SEQ ID NO: 2637551 - RNA, 19 nt, Artificial Sequence
  Description of Artificial Sequence: Synthetic oligonucleotide
cagcuacauaaaaguccac

SEQ ID NO: 2637552 - RNA, 19 nt, Artificial Sequence
  Description of Artificial Sequence: Synthetic oligonucleotide
cagcuccauucucuucugc

SEQ ID NO: 2637553 - RNA, 19 nt, Artificial Sequence
  Description of Artificial Sequence: Synthetic oligonucleotide
gucacgaccaauggaauuu

SEQ ID NO: 2637554 - RNA, 19 nt, Artificial Sequence
  Description of Artificial Sequence: Synthetic oligonucleotide
augccauaucuaaugucaa

SEQ ID NO: 2637555 - RNA, 19 nt, Artificial Sequence
  Description of Artificial Sequence: Synthetic oligonucleotide
acgaccaauggaauuucua

SEQ ID NO: 2637556 - RNA, 19 nt, Artificial Sequence
  Description of Artificial Sequence: Synthetic oligonucleotide
uagggaugucacgaccaau

SEQ ID NO: 2637557 - RNA, 19 nt, Artificial Sequence
  Description of Artificial Sequence: Synthetic oligonucleotide
cagaaccugaaauuucuuu

SEQ ID NO: 2637558 - RNA, 19 nt, Artificial Sequence
  Description of Artificial Sequence: Synthetic oligonucleotide
ugccuugcuuuggauuagu

SEQ ID NO: 2637559 - RNA, 19 nt, Artificial Sequence
  Description of Artificial Sequence: Synthetic oligonucleotide
uagccuucuccaccucgua

SEQ ID NO: 2637560 - RNA, 19 nt, Artificial Sequence
  Description of Artificial Sequence: Synthetic oligonucleotide
ccuugcuuuggauuaguaa

SEQ ID NO: 2637561 - RNA, 19 nt, Artificial Sequence
  Description of Artificial Sequence: Synthetic oligonucleotide
ccuuaugagaucuggugcu

SEQ ID NO: 2637562 - RNA, 19 nt, Artificial Sequence
  Description of Artificial Sequence: Synthetic oligonucleotide
aggguaugguaaacuaaua

SEQ ID NO: 2637563 - RNA, 19 nt, Artificial Sequence
  Description of Artificial Sequence: Synthetic oligonucleotide
augucacgaccaauggaau

SEQ ID NO: 2637564 - RNA, 19 nt, Artificial Sequence
  Description of Artificial Sequence: Synthetic oligonucleotide
ggguuaagcucagucauua

SEQ ID NO: 2637565 - RNA, 19 nt, Artificial Sequence
  Description of Artificial Sequence: Synthetic oligonucleotide
gccauaucuaaugucaaau

SEQ ID NO: 2637566 - RNA, 19 nt, Artificial Sequence
  Description of Artificial Sequence: Synthetic oligonucleotide
cagaugcagucccuguaaa

SEQ ID NO: 2637567 - RNA, 19 nt, Artificial Sequence
  Description of Artificial Sequence: Synthetic oligonucleotide
cuccauucucuucugcuau

SEQ ID NO: 2637568 - RNA, 19 nt, Artificial Sequence
  Description of Artificial Sequence: Synthetic oligonucleotide
caacaaccucaucauccaa

SEQ ID NO: 2637569 - RNA, 19 nt, Artificial Sequence
  Description of Artificial Sequence: Synthetic oligonucleotide
cuuaaccaggucagcuccu

SEQ ID NO: 2637570 - RNA, 19 nt, Artificial Sequence
  Description of Artificial Sequence: Synthetic oligonucleotide
gcagcuccauucucuucug

SEQ ID NO: 2637571 - RNA, 19 nt, Artificial Sequence
  Description of Artificial Sequence: Synthetic oligonucleotide
ccgucuuggguauaaacgu

SEQ ID NO: 2637572 - RNA, 19 nt, Artificial Sequence
  Description of Artificial Sequence: Synthetic oligonucleotide
cuucagguuugcuuuccau

SEQ ID NO: 2637573 - RNA, 19 nt, Artificial Sequence
  Description of Artificial Sequence: Synthetic oligonucleotide
gcaaacgcagcuccauucu

SEQ ID NO: 2637574 - RNA, 19 nt, Artificial Sequence
  Description of Artificial Sequence: Synthetic oligonucleotide
cgaugccauaucuaauguc

SEQ ID NO: 2637575 - RNA, 19 nt, Artificial Sequence
  Description of Artificial Sequence: Synthetic oligonucleotide
uaaauccgucuuggguaua

SEQ ID NO: 2637576 - RNA, 19 nt, Artificial Sequence
  Description of Artificial Sequence: Synthetic oligonucleotide
gucuuggguauaaacguuu

SEQ ID NO: 2637577 - RNA, 19 nt, Artificial Sequence
  Description of Artificial Sequence: Synthetic oligonucleotide
cuggugcugucuucugaaa

SEQ ID NO: 2637578 - RNA, 19 nt, Artificial Sequence
  Description of Artificial Sequence: Synthetic oligonucleotide
cuccaccucguaaauccgu

SEQ ID NO: 2637579 - RNA, 19 nt, Artificial Sequence
  Description of Artificial Sequence: Synthetic oligonucleotide
ggcaaauggcuccacuuuu

SEQ ID NO: 2637580 - RNA, 19 nt, Artificial Sequence
  Description of Artificial Sequence: Synthetic oligonucleotide
gcuuuccauguaguauaug

SEQ ID NO: 2637581 - RNA, 19 nt, Artificial Sequence
  Description of Artificial Sequence: Synthetic oligonucleotide
cccuguaaauacagcaacu

SEQ ID NO: 2637582 - RNA, 19 nt, Artificial Sequence
  Description of Artificial Sequence: Synthetic oligonucleotide
caccucguaaauccgucuu

SEQ ID NO: 2637583 - RNA, 19 nt, Artificial Sequence
  Description of Artificial Sequence: Synthetic oligonucleotide
ccggaacagcuacauaaaa

SEQ ID NO: 2637584 - RNA, 19 nt, Artificial Sequence
  Description of Artificial Sequence: Synthetic oligonucleotide
gguuaagcucagucauuau

SEQ ID NO: 2637585 - RNA, 19 nt, Artificial Sequence
  Description of Artificial Sequence: Synthetic oligonucleotide
cugcaaacgcagcuccauu

SEQ ID NO: 2637586 - RNA, 19 nt, Artificial Sequence
  Description of Artificial Sequence: Synthetic oligonucleotide
ccgaugccauaucuaaugu

SEQ ID NO: 2637587 - RNA, 19 nt, Artificial Sequence
  Description of Artificial Sequence: Synthetic oligonucleotide
cguuuuaaauagacaucau

SEQ ID NO: 2637588 - RNA, 19 nt, Artificial Sequence
  Description of Artificial Sequence: Synthetic oligonucleotide
ccacaauuucauguccagu

SEQ ID NO: 2637589 - RNA, 19 nt, Artificial Sequence
  Description of Artificial Sequence: Synthetic oligonucleotide
ccaccucguaaauccgucu

SEQ ID NO: 2637590 - RNA, 19 nt, Artificial Sequence
  Description of Artificial Sequence: Synthetic oligonucleotide
gccuugcuuuggauuagua

SEQ ID NO: 2637591 - RNA, 19 nt, Artificial Sequence
  Description of Artificial Sequence: Synthetic oligonucleotide
cgucuuggguauaaacguu

SEQ ID NO: 2637592 - RNA, 19 nt, Artificial Sequence
  Description of Artificial Sequence: Synthetic oligonucleotide
ccccgaugccauaucuaau

SEQ ID NO: 2637593 - RNA, 19 nt, Artificial Sequence
  Description of Artificial Sequence: Synthetic oligonucleotide
aauuuauggagacauuacc

SEQ ID NO: 2637594 - RNA, 19 nt, Artificial Sequence
  Description of Artificial Sequence: Synthetic oligonucleotide
aauaauggggccuucgggc

SEQ ID NO: 2637595 - RNA, 19 nt, Artificial Sequence
  Description of Artificial Sequence: Synthetic oligonucleotide
  modified_base (7)..(7): a, c, u, g, unknown or other
  modified_base (16)..(16): a, c, u, g, unknown or other
aggaucngcagccagngcc

SEQ ID NO: 2637596 - RNA, 19 nt, Artificial Sequence
  Description of Artificial Sequence: Synthetic oligonucleotide
uguaaaaucaauuguaaca

SEQ ID NO: 2637597 - RNA, 19 nt, Artificial Sequence
  Description of Artificial Sequence: Synthetic oligonucleotide
uacacaguaaacuuaauag

SEQ ID NO: 2637598 - RNA, 19 nt, Artificial Sequence
  Description of Artificial Sequence: Synthetic oligonucleotide
aaauaugguccauacacac

SEQ ID NO: 2637599 - RNA, 19 nt, Artificial Sequence
  Description of Artificial Sequence: Synthetic oligonucleotide
uuuacuuuauuguacaacc

SEQ ID NO: 2637600 - RNA, 19 nt, Artificial Sequence
  Description of Artificial Sequence: Synthetic oligonucleotide
aauguuaauaauuuaugga

SEQ ID NO: 2637601 - RNA, 19 nt, Artificial Sequence
  Description of Artificial Sequence: Synthetic oligonucleotide
aaugcgcugaauccgaacc

SEQ ID NO: 2637602 - RNA, 19 nt, Artificial Sequence
  Description of Artificial Sequence: Synthetic oligonucleotide
auguuaauaauuuauggag

SEQ ID NO: 2637603 - RNA, 19 nt, Artificial Sequence
  Description of Artificial Sequence: Synthetic oligonucleotide
aauuguaacaaucuuuaca

SEQ ID NO: 2637604 - RNA, 19 nt, Artificial Sequence
  Description of Artificial Sequence: Synthetic oligonucleotide
auauagaccaaauaugguc

SEQ ID NO: 2637605 - RNA, 19 nt, Artificial Sequence
  Description of Artificial Sequence: Synthetic oligonucleotide
uucacaaaggcaauggccg

SEQ ID NO: 2637606 - RNA, 19 nt, Artificial Sequence
  Description of Artificial Sequence: Synthetic oligonucleotide
uauagaccaaauauggucc

SEQ ID NO: 2637607 - RNA, 19 nt, Artificial Sequence
  Description of Artificial Sequence: Synthetic oligonucleotide
uccauauacauauauagac

SEQ ID NO: 2637608 - RNA, 19 nt, Artificial Sequence
  Description of Artificial Sequence: Synthetic oligonucleotide
uuaauguaaacaaggcagg

SEQ ID NO: 2637609 - RNA, 19 nt, Artificial Sequence
  Description of Artificial Sequence: Synthetic oligonucleotide
aggguuuugguccauauac

SEQ ID NO: 2637610 - RNA, 19 nt, Artificial Sequence
  Description of Artificial Sequence: Synthetic oligonucleotide
acauauauagaccaaauau

SEQ ID NO: 2637611 - RNA, 19 nt, Artificial Sequence
  Description of Artificial Sequence: Synthetic oligonucleotide
aguguaagcaagcuaaggg

SEQ ID NO: 2637612 - RNA, 19 nt, Artificial Sequence
  Description of Artificial Sequence: Synthetic oligonucleotide
uccucuaagacaaucacgc

SEQ ID NO: 2637613 - RNA, 19 nt, Artificial Sequence
  Description of Artificial Sequence: Synthetic oligonucleotide
ucuacaauuaccaucuagu

SEQ ID NO: 2637614 - RNA, 19 nt, Artificial Sequence
  Description of Artificial Sequence: Synthetic oligonucleotide
auauauagaccaaauaugg

SEQ ID NO: 2637615 - RNA, 19 nt, Artificial Sequence
  Description of Artificial Sequence: Synthetic oligonucleotide
auguaaacaaggcaggagg

SEQ ID NO: 2637616 - RNA, 19 nt, Artificial Sequence
  Description of Artificial Sequence: Synthetic oligonucleotide
uguagaguaauguuaauaa

SEQ ID NO: 2637617 - RNA, 19 nt, Artificial Sequence
  Description of Artificial Sequence: Synthetic oligonucleotide
cuuuacacuagcaacagug

SEQ ID NO: 2637618 - RNA, 19 nt, Artificial Sequence
  Description of Artificial Sequence: Synthetic oligonucleotide
auuuauauacacuccauga

SEQ ID NO: 2637619 - RNA, 19 nt, Artificial Sequence
  Description of Artificial Sequence: Synthetic oligonucleotide
uguuaauaauuuauggaga

SEQ ID NO: 2637620 - RNA, 19 nt, Artificial Sequence
  Description of Artificial Sequence: Synthetic oligonucleotide
ugcauauuuuacuuuauug

SEQ ID NO: 2637621 - RNA, 19 nt, Artificial Sequence
  Description of Artificial Sequence: Synthetic oligonucleotide
uaccaugaaaguaugaagu

SEQ ID NO: 2637622 - RNA, 19 nt, Artificial Sequence
  Description of Artificial Sequence: Synthetic oligonucleotide
uauuguacaaccccaaauc

SEQ ID NO: 2637623 - RNA, 19 nt, Artificial Sequence
  Description of Artificial Sequence: Synthetic oligonucleotide
aauccgaaccaucaggucu

SEQ ID NO: 2637624 - RNA, 19 nt, Artificial Sequence
  Description of Artificial Sequence: Synthetic oligonucleotide
uacuuuauuguacaacccc

SEQ ID NO: 2637625 - RNA, 19 nt, Artificial Sequence
  Description of Artificial Sequence: Synthetic oligonucleotide
uuagugacaauauuuuaca

SEQ ID NO: 2637626 - RNA, 19 nt, Artificial Sequence
  Description of Artificial Sequence: Synthetic oligonucleotide
aguaggauuaucaaguguc

SEQ ID NO: 2637627 - RNA, 19 nt, Artificial Sequence
  Description of Artificial Sequence: Synthetic oligonucleotide
uauuuuacuuuauuguaca

SEQ ID NO: 2637628 - RNA, 19 nt, Artificial Sequence
  Description of Artificial Sequence: Synthetic oligonucleotide
uauggagacauuaccauga

SEQ ID NO: 2637629 - RNA, 19 nt, Artificial Sequence
  Description of Artificial Sequence: Synthetic oligonucleotide
uguacaaccccaaaucuac

SEQ ID NO: 2637630 - RNA, 19 nt, Artificial Sequence
  Description of Artificial Sequence: Synthetic oligonucleotide
aauagcuaaaugguaacug

SEQ ID NO: 2637631 - RNA, 19 nt, Artificial Sequence
  Description of Artificial Sequence: Synthetic oligonucleotide
guuaauaauuuauggagac

SEQ ID NO: 2637632 - RNA, 19 nt, Artificial Sequence
  Description of Artificial Sequence: Synthetic oligonucleotide
ucuaagacaaucacgcccu

SEQ ID NO: 2637633 - RNA, 19 nt, Artificial Sequence
  Description of Artificial Sequence: Synthetic oligonucleotide
cauucuacaauuugugccc

SEQ ID NO: 2637634 - RNA, 19 nt, Artificial Sequence
  Description of Artificial Sequence: Synthetic oligonucleotide
cuaaaugguaacuguagag

SEQ ID NO: 2637635 - RNA, 19 nt, Artificial Sequence
  Description of Artificial Sequence: Synthetic oligonucleotide
uuaccaugaaaguaugaag

SEQ ID NO: 2637636 - RNA, 19 nt, Artificial Sequence
  Description of Artificial Sequence: Synthetic oligonucleotide
auuucacaaaggcaauggc

SEQ ID NO: 2637637 - RNA, 19 nt, Artificial Sequence
  Description of Artificial Sequence: Synthetic oligonucleotide
uuaucaagugucacuauga

SEQ ID NO: 2637638 - RNA, 19 nt, Artificial Sequence
  Description of Artificial Sequence: Synthetic oligonucleotide
auauuuuacuuuauuguac

SEQ ID NO: 2637639 - RNA, 19 nt, Artificial Sequence
  Description of Artificial Sequence: Synthetic oligonucleotide
uacaauuaccaucuagucu

SEQ ID NO: 2637640 - RNA, 19 nt, Artificial Sequence
  Description of Artificial Sequence: Synthetic oligonucleotide
aagugucacuaugacaugc

SEQ ID NO: 2637641 - RNA, 19 nt, Artificial Sequence
  Description of Artificial Sequence: Synthetic oligonucleotide
caaucuuuacacuagcaac

SEQ ID NO: 2637642 - RNA, 19 nt, Artificial Sequence
  Description of Artificial Sequence: Synthetic oligonucleotide
ucaauaauggggccuucgg

SEQ ID NO: 2637643 - RNA, 19 nt, Artificial Sequence
  Description of Artificial Sequence: Synthetic oligonucleotide
ucuugaaugcgcugaaucc

SEQ ID NO: 2637644 - RNA, 19 nt, Artificial Sequence
  Description of Artificial Sequence: Synthetic oligonucleotide
auuaucaagugucacuaug

SEQ ID NO: 2637645 - RNA, 19 nt, Artificial Sequence
  Description of Artificial Sequence: Synthetic oligonucleotide
gacguggucaauaaugggg

SEQ ID NO: 2637646 - RNA, 19 nt, Artificial Sequence
  Description of Artificial Sequence: Synthetic oligonucleotide
aauguaaacaaggcaggag

SEQ ID NO: 2637647 - RNA, 19 nt, Artificial Sequence
  Description of Artificial Sequence: Synthetic oligonucleotide
aacaguguaagcaagcuaa

SEQ ID NO: 2637648 - RNA, 19 nt, Artificial Sequence
  Description of Artificial Sequence: Synthetic oligonucleotide
aaaugguaacuguagagua

SEQ ID NO: 2637649 - RNA, 19 nt, Artificial Sequence
  Description of Artificial Sequence: Synthetic oligonucleotide
aaucuuuacacuagcaaca

SEQ ID NO: 2637650 - RNA, 19 nt, Artificial Sequence
  Description of Artificial Sequence: Synthetic oligonucleotide
agaaguaggauuaucaagu

SEQ ID NO: 2637651 - RNA, 19 nt, Artificial Sequence
  Description of Artificial Sequence: Synthetic oligonucleotide
cucuaagacaaucacgccc

SEQ ID NO: 2637652 - RNA, 19 nt, Artificial Sequence
  Description of Artificial Sequence: Synthetic oligonucleotide
acauauuuauauacacucc

SEQ ID NO: 2637653 - RNA, 19 nt, Artificial Sequence
  Description of Artificial Sequence: Synthetic oligonucleotide
uauauagaccaaauauggu

SEQ ID NO: 2637654 - RNA, 19 nt, Artificial Sequence
  Description of Artificial Sequence: Synthetic oligonucleotide
uagcauuucacuguuaacu

SEQ ID NO: 2637655 - RNA, 19 nt, Artificial Sequence
  Description of Artificial Sequence: Synthetic oligonucleotide
uuacuuuauuguacaaccc

SEQ ID NO: 2637656 - RNA, 19 nt, Artificial Sequence
  Description of Artificial Sequence: Synthetic oligonucleotide
uuauuguacaaccccaaau

SEQ ID NO: 2637657 - RNA, 19 nt, Artificial Sequence
  Description of Artificial Sequence: Synthetic oligonucleotide
guaauguuaauaauuuaug

SEQ ID NO: 2637658 - RNA, 19 nt, Artificial Sequence
  Description of Artificial Sequence: Synthetic oligonucleotide
ugaauccgaaccaucaggu

SEQ ID NO: 2637659 - RNA, 19 nt, Artificial Sequence
  Description of Artificial Sequence: Synthetic oligonucleotide
auaugguccauacacacau

SEQ ID NO: 2637660 - RNA, 19 nt, Artificial Sequence
  Description of Artificial Sequence: Synthetic oligonucleotide
uggguuuagcauuucacug

SEQ ID NO: 2637661 - RNA, 19 nt, Artificial Sequence
  Description of Artificial Sequence: Synthetic oligonucleotide
ugugguggaagcaugguau

SEQ ID NO: 2637662 - RNA, 19 nt, Artificial Sequence
  Description of Artificial Sequence: Synthetic oligonucleotide
aacccugacgaucaccgag

SEQ ID NO: 2637663 - RNA, 19 nt, Artificial Sequence
  Description of Artificial Sequence: Synthetic oligonucleotide
auagcuaaaugguaacugu

SEQ ID NO: 2637664 - RNA, 19 nt, Artificial Sequence
  Description of Artificial Sequence: Synthetic oligonucleotide
ugcagaacuccucuaagac

SEQ ID NO: 2637665 - RNA, 19 nt, Artificial Sequence
  Description of Artificial Sequence: Synthetic oligonucleotide
acuagcaacaguguaagca

SEQ ID NO: 2637666 - RNA, 19 nt, Artificial Sequence
  Description of Artificial Sequence: Synthetic oligonucleotide
uacacuagcaacaguguaa

SEQ ID NO: 2637667 - RNA, 19 nt, Artificial Sequence
  Description of Artificial Sequence: Synthetic oligonucleotide
cagaaguaggauuaucaag

SEQ ID NO: 2637668 - RNA, 19 nt, Artificial Sequence
  Description of Artificial Sequence: Synthetic oligonucleotide
uuuacacuagcaacagugu

SEQ ID NO: 2637669 - RNA, 19 nt, Artificial Sequence
  Description of Artificial Sequence: Synthetic oligonucleotide
caagcuaaggguuuugguc

SEQ ID NO: 2637670 - RNA, 19 nt, Artificial Sequence
  Description of Artificial Sequence: Synthetic oligonucleotide
uaacaaucuuuacacuagc

SEQ ID NO: 2637671 - RNA, 19 nt, Artificial Sequence
  Description of Artificial Sequence: Synthetic oligonucleotide
aaguaggauuaucaagugu

SEQ ID NO: 2637672 - RNA, 19 nt, Artificial Sequence
  Description of Artificial Sequence: Synthetic oligonucleotide
acaaucuuuacacuagcaa

SEQ ID NO: 2637673 - RNA, 19 nt, Artificial Sequence
  Description of Artificial Sequence: Synthetic oligonucleotide
aguauuagugacaauauuu

SEQ ID NO: 2637674 - RNA, 19 nt, Artificial Sequence
  Description of Artificial Sequence: Synthetic oligonucleotide
cuugaaugcgcugaauccg

SEQ ID NO: 2637675 - RNA, 19 nt, Artificial Sequence
  Description of Artificial Sequence: Synthetic oligonucleotide
uguuaacuucuucuguuac

SEQ ID NO: 2637676 - RNA, 19 nt, Artificial Sequence
  Description of Artificial Sequence: Synthetic oligonucleotide
aaugugacguggucaauaa

SEQ ID NO: 2637677 - RNA, 19 nt, Artificial Sequence
  Description of Artificial Sequence: Synthetic oligonucleotide
guaacaaucuuuacacuag

SEQ ID NO: 2637678 - RNA, 19 nt, Artificial Sequence
  Description of Artificial Sequence: Synthetic oligonucleotide
cugacgaucaccgagaaga

SEQ ID NO: 2637679 - RNA, 19 nt, Artificial Sequence
  Description of Artificial Sequence: Synthetic oligonucleotide
uguaagcaagcuaaggguu

SEQ ID NO: 2637680 - RNA, 19 nt, Artificial Sequence
  Description of Artificial Sequence: Synthetic oligonucleotide
aacagaguauuagugacaa

SEQ ID NO: 2637681 - RNA, 19 nt, Artificial Sequence
  Description of Artificial Sequence: Synthetic oligonucleotide
gaaguaggauuaucaagug

SEQ ID NO: 2637682 - RNA, 19 nt, Artificial Sequence
  Description of Artificial Sequence: Synthetic oligonucleotide
uaucaagugucacuaugac

SEQ ID NO: 2637683 - RNA, 19 nt, Artificial Sequence
  Description of Artificial Sequence: Synthetic oligonucleotide
ucacuguuaacuucuucug

SEQ ID NO: 2637684 - RNA, 19 nt, Artificial Sequence
  Description of Artificial Sequence: Synthetic oligonucleotide
cuguaaaaucaauuguaac

SEQ ID NO: 2637685 - RNA, 19 nt, Artificial Sequence
  Description of Artificial Sequence: Synthetic oligonucleotide
cuuucugaccaggagaagc

SEQ ID NO: 2637686 - RNA, 19 nt, Artificial Sequence
  Description of Artificial Sequence: Synthetic oligonucleotide
aacaacccugacgaucacc

SEQ ID NO: 2637687 - RNA, 19 nt, Artificial Sequence
  Description of Artificial Sequence: Synthetic oligonucleotide
uuaauaauuuauggagaca

SEQ ID NO: 2637688 - RNA, 19 nt, Artificial Sequence
  Description of Artificial Sequence: Synthetic oligonucleotide
aggauuaucaagugucacu

SEQ ID NO: 2637689 - RNA, 19 nt, Artificial Sequence
  Description of Artificial Sequence: Synthetic oligonucleotide
auuaccaugaaaguaugaa

SEQ ID NO: 2637690 - RNA, 19 nt, Artificial Sequence
  Description of Artificial Sequence: Synthetic oligonucleotide
uuuauuguacaaccccaaa

SEQ ID NO: 2637691 - RNA, 19 nt, Artificial Sequence
  Description of Artificial Sequence: Synthetic oligonucleotide
acguggucaauaauggggc

SEQ ID NO: 2637692 - RNA, 19 nt, Artificial Sequence
  Description of Artificial Sequence: Synthetic oligonucleotide
caauaauggggccuucggg

SEQ ID NO: 2637693 - RNA, 19 nt, Artificial Sequence
  Description of Artificial Sequence: Synthetic oligonucleotide
uccauacacacauauuuau

SEQ ID NO: 2637694 - RNA, 19 nt, Artificial Sequence
  Description of Artificial Sequence: Synthetic oligonucleotide
augaagucauucuacaauu

SEQ ID NO: 2637695 - RNA, 19 nt, Artificial Sequence
  Description of Artificial Sequence: Synthetic oligonucleotide
cuacaauuaccaucuaguc

SEQ ID NO: 2637696 - RNA, 19 nt, Artificial Sequence
  Description of Artificial Sequence: Synthetic oligonucleotide
gucauucuacaauuugugc

SEQ ID NO: 2637697 - RNA, 19 nt, Artificial Sequence
  Description of Artificial Sequence: Synthetic oligonucleotide
accccaaaucuacaauuac

SEQ ID NO: 2637698 - RNA, 19 nt, Artificial Sequence
  Description of Artificial Sequence: Synthetic oligonucleotide
aacuguagaguaauguuaa

SEQ ID NO: 2637699 - RNA, 19 nt, Artificial Sequence
  Description of Artificial Sequence: Synthetic oligonucleotide
ucgcuuucugaccaggaga

SEQ ID NO: 2637700 - RNA, 19 nt, Artificial Sequence
  Description of Artificial Sequence: Synthetic oligonucleotide
ugacaauauuuuacagggc

SEQ ID NO: 2637701 - RNA, 19 nt, Artificial Sequence
  Description of Artificial Sequence: Synthetic oligonucleotide
ugugcugacucuaggucug

SEQ ID NO: 2637702 - RNA, 19 nt, Artificial Sequence
  Description of Artificial Sequence: Synthetic oligonucleotide
uugguccauauacauauau

SEQ ID NO: 2637703 - RNA, 19 nt, Artificial Sequence
  Description of Artificial Sequence: Synthetic oligonucleotide
gaccaaauaugguccauac

SEQ ID NO: 2637704 - RNA, 19 nt, Artificial Sequence
  Description of Artificial Sequence: Synthetic oligonucleotide
acaugcauauuuuacuuua

SEQ ID NO: 2637705 - RNA, 19 nt, Artificial Sequence
  Description of Artificial Sequence: Synthetic oligonucleotide
  modified_base (11)..(11): a, c, u, g, unknown or other
gaagaggaucngcagccag

SEQ ID NO: 2637706 - RNA, 19 nt, Artificial Sequence
  Description of Artificial Sequence: Synthetic oligonucleotide
ugacguggucaauaauggg

SEQ ID NO: 2637707 - RNA, 19 nt, Artificial Sequence
  Description of Artificial Sequence: Synthetic oligonucleotide
ugacaugcauauuuuacuu

SEQ ID NO: 2637708 - RNA, 19 nt, Artificial Sequence
  Description of Artificial Sequence: Synthetic oligonucleotide
uugaaugcgcugaauccga

SEQ ID NO: 2637709 - RNA, 19 nt, Artificial Sequence
  Description of Artificial Sequence: Synthetic oligonucleotide
uuacagggcagaaguagga

SEQ ID NO: 2637710 - RNA, 19 nt, Artificial Sequence
  Description of Artificial Sequence: Synthetic oligonucleotide
uugugcugacucuaggucu

SEQ ID NO: 2637711 - RNA, 19 nt, Artificial Sequence
  Description of Artificial Sequence: Synthetic oligonucleotide
gugacguggucaauaaugg

SEQ ID NO: 2637712 - RNA, 19 nt, Artificial Sequence
  Description of Artificial Sequence: Synthetic oligonucleotide
agaguaauguuaauaauuu

SEQ ID NO: 2637713 - RNA, 19 nt, Artificial Sequence
  Description of Artificial Sequence: Synthetic oligonucleotide
aaucacgcccuccagcaau

SEQ ID NO: 2637714 - RNA, 19 nt, Artificial Sequence
  Description of Artificial Sequence: Synthetic oligonucleotide
acuguuaacuucuucuguu

SEQ ID NO: 2637715 - RNA, 19 nt, Artificial Sequence
  Description of Artificial Sequence: Synthetic oligonucleotide
gaccaggagaagcuugggg

SEQ ID NO: 2637716 - RNA, 19 nt, Artificial Sequence
  Description of Artificial Sequence: Synthetic oligonucleotide
gaggccaacagaguauuag

SEQ ID NO: 2637717 - RNA, 19 nt, Artificial Sequence
  Description of Artificial Sequence: Synthetic oligonucleotide
aucaagugucacuaugaca

SEQ ID NO: 2637718 - RNA, 19 nt, Artificial Sequence
  Description of Artificial Sequence: Synthetic oligonucleotide
  modified_base (3)..(3): a, c, u, g, unknown or other
  modified_base (12)..(12): a, c, u, g, unknown or other
ucngcagccagngccaagc

SEQ ID NO: 2637719 - RNA, 19 nt, Artificial Sequence
  Description of Artificial Sequence: Synthetic oligonucleotide
aaccaucaggucuccaaca

SEQ ID NO: 2637720 - RNA, 19 nt, Artificial Sequence
  Description of Artificial Sequence: Synthetic oligonucleotide
uaauguaaacaaggcagga

SEQ ID NO: 2637721 - RNA, 19 nt, Artificial Sequence
  Description of Artificial Sequence: Synthetic oligonucleotide
uuacacuagcaacagugua

SEQ ID NO: 2637722 - RNA, 19 nt, Artificial Sequence
  Description of Artificial Sequence: Synthetic oligonucleotide
agcuaaaugguaacuguag

SEQ ID NO: 2637723 - RNA, 19 nt, Artificial Sequence
  Description of Artificial Sequence: Synthetic oligonucleotide
agucauucuacaauuugug

SEQ ID NO: 2637724 - RNA, 19 nt, Artificial Sequence
  Description of Artificial Sequence: Synthetic oligonucleotide
uuguacaaccccaaaucua

SEQ ID NO: 2637725 - RNA, 19 nt, Artificial Sequence
  Description of Artificial Sequence: Synthetic oligonucleotide
uugcagaacuccucuaaga

SEQ ID NO: 2637726 - RNA, 19 nt, Artificial Sequence
  Description of Artificial Sequence: Synthetic oligonucleotide
cuccaaaccgagcagucgc

SEQ ID NO: 2637727 - RNA, 19 nt, Artificial Sequence
  Description of Artificial Sequence: Synthetic oligonucleotide
gucacuaugacaugcauau

SEQ ID NO: 2637728 - RNA, 19 nt, Artificial Sequence
  Description of Artificial Sequence: Synthetic oligonucleotide
cugaccaggagaagcuugg

SEQ ID NO: 2637729 - RNA, 19 nt, Artificial Sequence
  Description of Artificial Sequence: Synthetic oligonucleotide
uaauagcuaaaugguaacu

SEQ ID NO: 2637730 - RNA, 19 nt, Artificial Sequence
  Description of Artificial Sequence: Synthetic oligonucleotide
uauacacuccaugacuugu

SEQ ID NO: 2637731 - RNA, 19 nt, Artificial Sequence
  Description of Artificial Sequence: Synthetic oligonucleotide
  modified_base (2)..(2): a, c, u, g, unknown or other
gngccaagcucacguaggg

SEQ ID NO: 2637732 - RNA, 19 nt, Artificial Sequence
  Description of Artificial Sequence: Synthetic oligonucleotide
cacaguaaacuuaauagcu

SEQ ID NO: 2637733 - RNA, 19 nt, Artificial Sequence
  Description of Artificial Sequence: Synthetic oligonucleotide
aauaugguccauacacaca

SEQ ID NO: 2637734 - RNA, 19 nt, Artificial Sequence
  Description of Artificial Sequence: Synthetic oligonucleotide
gaagucuugaaugcgcuga

SEQ ID NO: 2637735 - RNA, 19 nt, Artificial Sequence
  Description of Artificial Sequence: Synthetic oligonucleotide
uuagcauuucacuguuaac

SEQ ID NO: 2637736 - RNA, 19 nt, Artificial Sequence
  Description of Artificial Sequence: Synthetic oligonucleotide
acgaucaccgagaagagga

SEQ ID NO: 2637737 - RNA, 19 nt, Artificial Sequence
  Description of Artificial Sequence: Synthetic oligonucleotide
  modified_base (10)..(10): a, c, u, g, unknown or other
  modified_base (19)..(19): a, c, u, g, unknown or other
aagaggaucngcagccagn

SEQ ID NO: 2637738 - RNA, 19 nt, Artificial Sequence
  Description of Artificial Sequence: Synthetic oligonucleotide
cuugugcugacucuagguc

SEQ ID NO: 2637739 - RNA, 19 nt, Artificial Sequence
  Description of Artificial Sequence: Synthetic oligonucleotide
agcaaugugacguggucaa

SEQ ID NO: 2637740 - RNA, 19 nt, Artificial Sequence
  Description of Artificial Sequence: Synthetic oligonucleotide
  modified_base (9)..(9): a, c, u, g, unknown or other
  modified_base (18)..(18): a, c, u, g, unknown or other
agaggaucngcagccagng

SEQ ID NO: 2637741 - RNA, 19 nt, Artificial Sequence
  Description of Artificial Sequence: Synthetic oligonucleotide
gacauuaccaugaaaguau

SEQ ID NO: 2637742 - RNA, 19 nt, Artificial Sequence
  Description of Artificial Sequence: Synthetic oligonucleotide
ugacgaucaccgagaagag

SEQ ID NO: 2637743 - RNA, 19 nt, Artificial Sequence
  Description of Artificial Sequence: Synthetic oligonucleotide
ugacuugugcugacucuag

SEQ ID NO: 2637744 - RNA, 19 nt, Artificial Sequence
  Description of Artificial Sequence: Synthetic oligonucleotide
guuaacuucuucuguuaca

SEQ ID NO: 2637745 - RNA, 19 nt, Artificial Sequence
  Description of Artificial Sequence: Synthetic oligonucleotide
caaauaugguccauacaca

SEQ ID NO: 2637746 - RNA, 19 nt, Artificial Sequence
  Description of Artificial Sequence: Synthetic oligonucleotide
ugaagucuugaaugcgcug

SEQ ID NO: 2637747 - RNA, 19 nt, Artificial Sequence
  Description of Artificial Sequence: Synthetic oligonucleotide
ucuacaauuugugcccugu

SEQ ID NO: 2637748 - RNA, 19 nt, Artificial Sequence
  Description of Artificial Sequence: Synthetic oligonucleotide
caguaaacuuaauagcuaa

SEQ ID NO: 2637749 - RNA, 19 nt, Artificial Sequence
  Description of Artificial Sequence: Synthetic oligonucleotide
cagaguauuagugacaaua

SEQ ID NO: 2637750 - RNA, 19 nt, Artificial Sequence
  Description of Artificial Sequence: Synthetic oligonucleotide
auuuuacuuuauuguacaa

SEQ ID NO: 2637751 - RNA, 19 nt, Artificial Sequence
  Description of Artificial Sequence: Synthetic oligonucleotide
guaaacaaggcaggaggcc

SEQ ID NO: 2637752 - RNA, 19 nt, Artificial Sequence
  Description of Artificial Sequence: Synthetic oligonucleotide
ccaacagaguauuagugac

SEQ ID NO: 2637753 - RNA, 19 nt, Artificial Sequence
  Description of Artificial Sequence: Synthetic oligonucleotide
gcauauuuuacuuuauugu

SEQ ID NO: 2637754 - RNA, 19 nt, Artificial Sequence
  Description of Artificial Sequence: Synthetic oligonucleotide
uccaacaacccugacgauc

SEQ ID NO: 2637755 - RNA, 19 nt, Artificial Sequence
  Description of Artificial Sequence: Synthetic oligonucleotide
gucaauaauggggccuucg

SEQ ID NO: 2637756 - RNA, 19 nt, Artificial Sequence
  Description of Artificial Sequence: Synthetic oligonucleotide
  modified_base (3)..(3): a, c, u, g, unknown or other
agngccaagcucacguagg

SEQ ID NO: 2637757 - RNA, 19 nt, Artificial Sequence
  Description of Artificial Sequence: Synthetic oligonucleotide
  modified_base (4)..(4): a, c, u, g, unknown or other
cagngccaagcucacguag

SEQ ID NO: 2637758 - RNA, 19 nt, Artificial Sequence
  Description of Artificial Sequence: Synthetic oligonucleotide
aacaaggcaggaggccaac

SEQ ID NO: 2637759 - RNA, 19 nt, Artificial Sequence
  Description of Artificial Sequence: Synthetic oligonucleotide
gagacauuaccaugaaagu

SEQ ID NO: 2637760 - RNA, 19 nt, Artificial Sequence
  Description of Artificial Sequence: Synthetic oligonucleotide
aggccaacagaguauuagu

SEQ ID NO: 2637761 - RNA, 19 nt, Artificial Sequence
  Description of Artificial Sequence: Synthetic oligonucleotide
agaguauuagugacaauau

SEQ ID NO: 2637762 - RNA, 19 nt, Artificial Sequence
  Description of Artificial Sequence: Synthetic oligonucleotide
agucuguggguuuagcauu

SEQ ID NO: 2637763 - RNA, 19 nt, Artificial Sequence
  Description of Artificial Sequence: Synthetic oligonucleotide
caguguaagcaagcuaagg

SEQ ID NO: 2637764 - RNA, 19 nt, Artificial Sequence
  Description of Artificial Sequence: Synthetic oligonucleotide
ucugucaggguguggugga

SEQ ID NO: 2637765 - RNA, 19 nt, Artificial Sequence
  Description of Artificial Sequence: Synthetic oligonucleotide
uaggauuaucaagugucac

SEQ ID NO: 2637766 - RNA, 19 nt, Artificial Sequence
  Description of Artificial Sequence: Synthetic oligonucleotide
guauuucacaaaggcaaug

SEQ ID NO: 2637767 - RNA, 19 nt, Artificial Sequence
  Description of Artificial Sequence: Synthetic oligonucleotide
caagcucacguagggaucc

SEQ ID NO: 2637768 - RNA, 19 nt, Artificial Sequence
  Description of Artificial Sequence: Synthetic oligonucleotide
augguauuucacaaaggca

SEQ ID NO: 2637769 - RNA, 19 nt, Artificial Sequence
  Description of Artificial Sequence: Synthetic oligonucleotide
gacgaucaccgagaagagg

SEQ ID NO: 2637770 - RNA, 19 nt, Artificial Sequence
  Description of Artificial Sequence: Synthetic oligonucleotide
acaaccccaaaucuacaau

SEQ ID NO: 2637771 - RNA, 19 nt, Artificial Sequence
  Description of Artificial Sequence: Synthetic oligonucleotide
uaaggguuuugguccauau

SEQ ID NO: 2637772 - RNA, 19 nt, Artificial Sequence
  Description of Artificial Sequence: Synthetic oligonucleotide
guguaagcaagcuaagggu

SEQ ID NO: 2637773 - RNA, 19 nt, Artificial Sequence
  Description of Artificial Sequence: Synthetic oligonucleotide
aaggguuuugguccauaua

SEQ ID NO: 2637774 - RNA, 19 nt, Artificial Sequence
  Description of Artificial Sequence: Synthetic oligonucleotide
ugguaacuguagaguaaug

SEQ ID NO: 2637775 - RNA, 19 nt, Artificial Sequence
  Description of Artificial Sequence: Synthetic oligonucleotide
gucgcuuucugaccaggag

SEQ ID NO: 2637776 - RNA, 19 nt, Artificial Sequence
  Description of Artificial Sequence: Synthetic oligonucleotide
caugaaaguaugaagucau

SEQ ID NO: 2637777 - RNA, 19 nt, Artificial Sequence
  Description of Artificial Sequence: Synthetic oligonucleotide
caauauuuuacagggcaga

SEQ ID NO: 2637778 - RNA, 19 nt, Artificial Sequence
  Description of Artificial Sequence: Synthetic oligonucleotide
auccgaaccaucaggucuc

SEQ ID NO: 2637779 - RNA, 19 nt, Artificial Sequence
  Description of Artificial Sequence: Synthetic oligonucleotide
gaaugcgcugaauccgaac

SEQ ID NO: 2637780 - RNA, 19 nt, Artificial Sequence
  Description of Artificial Sequence: Synthetic oligonucleotide
uggaagcaugguauuucac

SEQ ID NO: 2637781 - RNA, 19 nt, Artificial Sequence
  Description of Artificial Sequence: Synthetic oligonucleotide
acuuaauagcuaaauggua

SEQ ID NO: 2637782 - RNA, 19 nt, Artificial Sequence
  Description of Artificial Sequence: Synthetic oligonucleotide
gaauccgaaccaucagguc

SEQ ID NO: 2637783 - RNA, 19 nt, Artificial Sequence
  Description of Artificial Sequence: Synthetic oligonucleotide
uccaaaccgagcagucgcu

SEQ ID NO: 2637784 - RNA, 19 nt, Artificial Sequence
  Description of Artificial Sequence: Synthetic oligonucleotide
gagcagucgcuuucugacc

SEQ ID NO: 2637785 - RNA, 19 nt, Artificial Sequence
  Description of Artificial Sequence: Synthetic oligonucleotide
acauuaccaugaaaguaug

SEQ ID NO: 2637786 - RNA, 19 nt, Artificial Sequence
  Description of Artificial Sequence: Synthetic oligonucleotide
gcuaaaugguaacuguaga

SEQ ID NO: 2637787 - RNA, 19 nt, Artificial Sequence
  Description of Artificial Sequence: Synthetic oligonucleotide
ucuagucuguggguuuagc

SEQ ID NO: 2637788 - RNA, 19 nt, Artificial Sequence
  Description of Artificial Sequence: Synthetic oligonucleotide
acaguaaacuuaauagcua

SEQ ID NO: 2637789 - RNA, 19 nt, Artificial Sequence
  Description of Artificial Sequence: Synthetic oligonucleotide
guggaagcaugguauuuca

SEQ ID NO: 2637790 - RNA, 19 nt, Artificial Sequence
  Description of Artificial Sequence: Synthetic oligonucleotide
caacagaguauuagugaca

SEQ ID NO: 2637791 - RNA, 19 nt, Artificial Sequence
  Description of Artificial Sequence: Synthetic oligonucleotide
acuaugacaugcauauuuu

SEQ ID NO: 2637792 - RNA, 19 nt, Artificial Sequence
  Description of Artificial Sequence: Synthetic oligonucleotide
uaccaucuagucugugggu

SEQ ID NO: 2637793 - RNA, 19 nt, Artificial Sequence
  Description of Artificial Sequence: Synthetic oligonucleotide
guggguuuagcauuucacu

SEQ ID NO: 2637794 - RNA, 19 nt, Artificial Sequence
  Description of Artificial Sequence: Synthetic oligonucleotide
cuucgggcuccaaaccgag

SEQ ID NO: 2637795 - RNA, 19 nt, Artificial Sequence
  Description of Artificial Sequence: Synthetic oligonucleotide
gaacuccucuaagacaauc

SEQ ID NO: 2637796 - RNA, 19 nt, Artificial Sequence
  Description of Artificial Sequence: Synthetic oligonucleotide
guaggauuaucaaguguca

SEQ ID NO: 2637797 - RNA, 19 nt, Artificial Sequence
  Description of Artificial Sequence: Synthetic oligonucleotide
ggcagaaguaggauuauca

SEQ ID NO: 2637798 - RNA, 19 nt, Artificial Sequence
  Description of Artificial Sequence: Synthetic oligonucleotide
agcuaaggguuuuggucca

SEQ ID NO: 2637799 - RNA, 19 nt, Artificial Sequence
  Description of Artificial Sequence: Synthetic oligonucleotide
gccaacagaguauuaguga

SEQ ID NO: 2637800 - RNA, 19 nt, Artificial Sequence
  Description of Artificial Sequence: Synthetic oligonucleotide
  modified_base (18)..(18): a, c, u, g, unknown or other
ucaccgagaagaggaucng

SEQ ID NO: 2637801 - RNA, 19 nt, Artificial Sequence
  Description of Artificial Sequence: Synthetic oligonucleotide
augcgcugaauccgaacca

SEQ ID NO: 2637802 - RNA, 19 nt, Artificial Sequence
  Description of Artificial Sequence: Synthetic oligonucleotide
ugaccaggagaagcuuggg

SEQ ID NO: 2637803 - RNA, 19 nt, Artificial Sequence
  Description of Artificial Sequence: Synthetic oligonucleotide
cauuaccaugaaaguauga

SEQ ID NO: 2637804 - RNA, 19 nt, Artificial Sequence
  Description of Artificial Sequence: Synthetic oligonucleotide
cacuaugacaugcauauuu

SEQ ID NO: 2637805 - RNA, 19 nt, Artificial Sequence
  Description of Artificial Sequence: Synthetic oligonucleotide
guagaguaauguuaauaau

SEQ ID NO: 2637806 - RNA, 19 nt, Artificial Sequence
  Description of Artificial Sequence: Synthetic oligonucleotide
acuguagaguaauguuaau

SEQ ID NO: 2637807 - RNA, 19 nt, Artificial Sequence
  Description of Artificial Sequence: Synthetic oligonucleotide
cuguuacacaguaaacuua

SEQ ID NO: 2637808 - RNA, 19 nt, Artificial Sequence
  Description of Artificial Sequence: Synthetic oligonucleotide
gcugaauccgaaccaucag

SEQ ID NO: 2637809 - RNA, 19 nt, Artificial Sequence
  Description of Artificial Sequence: Synthetic oligonucleotide
ggauuaucaagugucacua

SEQ ID NO: 2637810 - RNA, 19 nt, Artificial Sequence
  Description of Artificial Sequence: Synthetic oligonucleotide
agugucacuaugacaugca

SEQ ID NO: 2637811 - RNA, 19 nt, Artificial Sequence
  Description of Artificial Sequence: Synthetic oligonucleotide
aagcaagcuaaggguuuug

SEQ ID NO: 2637812 - RNA, 19 nt, Artificial Sequence
  Description of Artificial Sequence: Synthetic oligonucleotide
auacacuccaugacuugug

SEQ ID NO: 2637813 - RNA, 19 nt, Artificial Sequence
  Description of Artificial Sequence: Synthetic oligonucleotide
cuguagaguaauguuaaua

SEQ ID NO: 2637814 - RNA, 19 nt, Artificial Sequence
  Description of Artificial Sequence: Synthetic oligonucleotide
cuaugacaugcauauuuua

SEQ ID NO: 2637815 - RNA, 19 nt, Artificial Sequence
  Description of Artificial Sequence: Synthetic oligonucleotide
gccuucgggcuccaaaccg

SEQ ID NO: 2637816 - RNA, 19 nt, Artificial Sequence
  Description of Artificial Sequence: Synthetic oligonucleotide
aaucuacaauuaccaucua

SEQ ID NO: 2637817 - RNA, 19 nt, Artificial Sequence
  Description of Artificial Sequence: Synthetic oligonucleotide
uaauggggccuucgggcuc

SEQ ID NO: 2637818 - RNA, 19 nt, Artificial Sequence
  Description of Artificial Sequence: Synthetic oligonucleotide
ccaacaacccugacgauca

SEQ ID NO: 2637819 - RNA, 19 nt, Artificial Sequence
  Description of Artificial Sequence: Synthetic oligonucleotide
aaacaaggcaggaggccaa

SEQ ID NO: 2637820 - RNA, 19 nt, Artificial Sequence
  Description of Artificial Sequence: Synthetic oligonucleotide
ccuguaaaaucaauuguaa

SEQ ID NO: 2637821 - RNA, 19 nt, Artificial Sequence
  Description of Artificial Sequence: Synthetic oligonucleotide
  modified_base (8)..(8): a, c, u, g, unknown or other
  modified_base (17)..(17): a, c, u, g, unknown or other
gaggaucngcagccagngc

SEQ ID NO: 2637822 - RNA, 19 nt, Artificial Sequence
  Description of Artificial Sequence: Synthetic oligonucleotide
uaugguccauacacacaua

SEQ ID NO: 2637823 - RNA, 19 nt, Artificial Sequence
  Description of Artificial Sequence: Synthetic oligonucleotide
uggucaauaauggggccuu

SEQ ID NO: 2637824 - RNA, 19 nt, Artificial Sequence
  Description of Artificial Sequence: Synthetic oligonucleotide
uucgggcuccaaaccgagc

SEQ ID NO: 2637825 - RNA, 19 nt, Artificial Sequence
  Description of Artificial Sequence: Synthetic oligonucleotide
  modified_base (9)..(9): a, c, u, g, unknown or other
gcagccagngccaagcuca

SEQ ID NO: 2637826 - RNA, 19 nt, Artificial Sequence
  Description of Artificial Sequence: Synthetic oligonucleotide
cacuagcaacaguguaagc

SEQ ID NO: 2637827 - RNA, 19 nt, Artificial Sequence
  Description of Artificial Sequence: Synthetic oligonucleotide
gcagaaguaggauuaucaa

SEQ ID NO: 2637828 - RNA, 19 nt, Artificial Sequence
  Description of Artificial Sequence: Synthetic oligonucleotide
ucagggugugguggaagca

SEQ ID NO: 2637829 - RNA, 19 nt, Artificial Sequence
  Description of Artificial Sequence: Synthetic oligonucleotide
ggccaacagaguauuagug

SEQ ID NO: 2637830 - RNA, 19 nt, Artificial Sequence
  Description of Artificial Sequence: Synthetic oligonucleotide
gaguauuagugacaauauu

SEQ ID NO: 2637831 - RNA, 19 nt, Artificial Sequence
  Description of Artificial Sequence: Synthetic oligonucleotide
gguaacuguagaguaaugu

SEQ ID NO: 2637832 - RNA, 19 nt, Artificial Sequence
  Description of Artificial Sequence: Synthetic oligonucleotide
acgcccuccagcaauguga

SEQ ID NO: 2637833 - RNA, 19 nt, Artificial Sequence
  Description of Artificial Sequence: Synthetic oligonucleotide
cuguuaacuucuucuguua

SEQ ID NO: 2637834 - RNA, 19 nt, Artificial Sequence
  Description of Artificial Sequence: Synthetic oligonucleotide
uccaugacuugugcugacu

SEQ ID NO: 2637835 - RNA, 19 nt, Artificial Sequence
  Description of Artificial Sequence: Synthetic oligonucleotide
accaucuagucuguggguu

SEQ ID NO: 2637836 - RNA, 19 nt, Artificial Sequence
  Description of Artificial Sequence: Synthetic oligonucleotide
ugcgcugaauccgaaccau

SEQ ID NO: 2637837 - RNA, 19 nt, Artificial Sequence
  Description of Artificial Sequence: Synthetic oligonucleotide
gacaugcauauuuuacuuu

SEQ ID NO: 2637838 - RNA, 19 nt, Artificial Sequence
  Description of Artificial Sequence: Synthetic oligonucleotide
gggugaagucuugaaugcg

SEQ ID NO: 2637839 - RNA, 19 nt, Artificial Sequence
  Description of Artificial Sequence: Synthetic oligonucleotide
  modified_base (12)..(12): a, c, u, g, unknown or other
agaagaggaucngcagcca

SEQ ID NO: 2637840 - RNA, 19 nt, Artificial Sequence
  Description of Artificial Sequence: Synthetic oligonucleotide
agaccaaauaugguccaua

SEQ ID NO: 2637841 - RNA, 19 nt, Artificial Sequence
  Description of Artificial Sequence: Synthetic oligonucleotide
gguuuugguccauauacau

SEQ ID NO: 2637842 - RNA, 19 nt, Artificial Sequence
  Description of Artificial Sequence: Synthetic oligonucleotide
uagaccaaauaugguccau

SEQ ID NO: 2637843 - RNA, 19 nt, Artificial Sequence
  Description of Artificial Sequence: Synthetic oligonucleotide
ggguuuagcauuucacugu

SEQ ID NO: 2637844 - RNA, 19 nt, Artificial Sequence
  Description of Artificial Sequence: Synthetic oligonucleotide
augugacguggucaauaau

SEQ ID NO: 2637845 - RNA, 19 nt, Artificial Sequence
  Description of Artificial Sequence: Synthetic oligonucleotide
cagucgcuuucugaccagg

SEQ ID NO: 2637846 - RNA, 19 nt, Artificial Sequence
  Description of Artificial Sequence: Synthetic oligonucleotide
acagaguauuagugacaau

SEQ ID NO: 2637847 - RNA, 19 nt, Artificial Sequence
  Description of Artificial Sequence: Synthetic oligonucleotide
ccucuaagacaaucacgcc

SEQ ID NO: 2637848 - RNA, 19 nt, Artificial Sequence
  Description of Artificial Sequence: Synthetic oligonucleotide
caaugugacguggucaaua

SEQ ID NO: 2637849 - RNA, 19 nt, Artificial Sequence
  Description of Artificial Sequence: Synthetic oligonucleotide
gcugacucuaggucuguca

SEQ ID NO: 2637850 - RNA, 19 nt, Artificial Sequence
  Description of Artificial Sequence: Synthetic oligonucleotide
caacaguguaagcaagcua

SEQ ID NO: 2637851 - RNA, 19 nt, Artificial Sequence
  Description of Artificial Sequence: Synthetic oligonucleotide
gugugguggaagcauggua

SEQ ID NO: 2637852 - RNA, 19 nt, Artificial Sequence
  Description of Artificial Sequence: Synthetic oligonucleotide
cagcaaugugacgugguca

SEQ ID NO: 2637853 - RNA, 19 nt, Artificial Sequence
  Description of Artificial Sequence: Synthetic oligonucleotide
ccaugaaaguaugaaguca

SEQ ID NO: 2637854 - RNA, 19 nt, Artificial Sequence
  Description of Artificial Sequence: Synthetic oligonucleotide
caugacuugugcugacucu

SEQ ID NO: 2637855 - RNA, 19 nt, Artificial Sequence
  Description of Artificial Sequence: Synthetic oligonucleotide
  modified_base (7)..(7): a, c, u, g, unknown or other
agccagngccaagcucacg

SEQ ID NO: 2637856 - RNA, 19 nt, Artificial Sequence
  Description of Artificial Sequence: Synthetic oligonucleotide
cacuguuaacuucuucugu

SEQ ID NO: 2637857 - RNA, 19 nt, Artificial Sequence
  Description of Artificial Sequence: Synthetic oligonucleotide
aggaggccaacagaguauu

SEQ ID NO: 2637858 - RNA, 19 nt, Artificial Sequence
  Description of Artificial Sequence: Synthetic oligonucleotide
  modified_base (5)..(5): a, c, u, g, unknown or other
  modified_base (14)..(14): a, c, u, g, unknown or other
gaucngcagccagngccaa

SEQ ID NO: 2637859 - RNA, 19 nt, Artificial Sequence
  Description of Artificial Sequence: Synthetic oligonucleotide
gggccuucgggcuccaaac

SEQ ID NO: 2637860 - RNA, 19 nt, Artificial Sequence
  Description of Artificial Sequence: Synthetic oligonucleotide
acccugacgaucaccgaga

SEQ ID NO: 2637861 - RNA, 19 nt, Artificial Sequence
  Description of Artificial Sequence: Synthetic oligonucleotide
gggugugguggaagcaugg

SEQ ID NO: 2637862 - RNA, 19 nt, Artificial Sequence
  Description of Artificial Sequence: Synthetic oligonucleotide
gcaggaggccaacagagua

SEQ ID NO: 2637863 - RNA, 19 nt, Artificial Sequence
  Description of Artificial Sequence: Synthetic oligonucleotide
ccaugacuugugcugacuc

SEQ ID NO: 2637864 - RNA, 19 nt, Artificial Sequence
  Description of Artificial Sequence: Synthetic oligonucleotide
  modified_base (4)..(4): a, c, u, g, unknown or other
  modified_base (13)..(13): a, c, u, g, unknown or other
aucngcagccagngccaag

SEQ ID NO: 2637865 - RNA, 19 nt, Artificial Sequence
  Description of Artificial Sequence: Synthetic oligonucleotide
caugcauauuuuacuuuau

SEQ ID NO: 2637866 - RNA, 19 nt, Artificial Sequence
  Description of Artificial Sequence: Synthetic oligonucleotide
accgagcagucgcuuucug

SEQ ID NO: 2637867 - RNA, 19 nt, Artificial Sequence
  Description of Artificial Sequence: Synthetic oligonucleotide
augaaaguaugaagucauu

SEQ ID NO: 2637868 - RNA, 19 nt, Artificial Sequence
  Description of Artificial Sequence: Synthetic oligonucleotide
uccgaaccaucaggucucc

SEQ ID NO: 2637869 - RNA, 19 nt, Artificial Sequence
  Description of Artificial Sequence: Synthetic oligonucleotide
aucacgcccuccagcaaug

SEQ ID NO: 2637870 - RNA, 19 nt, Artificial Sequence
  Description of Artificial Sequence: Synthetic oligonucleotide
agucgcuuucugaccagga

SEQ ID NO: 2637871 - RNA, 19 nt, Artificial Sequence
  Description of Artificial Sequence: Synthetic oligonucleotide
agucuugaaugcgcugaau

SEQ ID NO: 2637872 - RNA, 19 nt, Artificial Sequence
  Description of Artificial Sequence: Synthetic oligonucleotide
cacgcccuccagcaaugug

SEQ ID NO: 2637873 - RNA, 19 nt, Artificial Sequence
  Description of Artificial Sequence: Synthetic oligonucleotide
  modified_base (6)..(6): a, c, u, g, unknown or other
gccagngccaagcucacgu

SEQ ID NO: 2637874 - RNA, 19 nt, Artificial Sequence
  Description of Artificial Sequence: Synthetic oligonucleotide
  modified_base (6)..(6): a, c, u, g, unknown or other
  modified_base (15)..(15): a, c, u, g, unknown or other
ggaucngcagccagngcca

SEQ ID NO: 2637875 - RNA, 19 nt, Artificial Sequence
  Description of Artificial Sequence: Synthetic oligonucleotide
guggucaauaauggggccu

SEQ ID NO: 2637876 - RNA, 19 nt, Artificial Sequence
  Description of Artificial Sequence: Synthetic oligonucleotide
ggguuuugguccauauaca

SEQ ID NO: 2637877 - RNA, 19 nt, Artificial Sequence
  Description of Artificial Sequence: Synthetic oligonucleotide
ggucugucaggguguggug

SEQ ID NO: 2637878 - RNA, 19 nt, Artificial Sequence
  Description of Artificial Sequence: Synthetic oligonucleotide
ggccuucgggcuccaaacc

SEQ ID NO: 2637879 - RNA, 19 nt, Artificial Sequence
  Description of Artificial Sequence: Synthetic oligonucleotide
  modified_base (8)..(8): a, c, u, g, unknown or other
cagccagngccaagcucac

SEQ ID NO: 2637880 - RNA, 19 nt, Artificial Sequence
  Description of Artificial Sequence: Synthetic oligonucleotide
aagcucacguagggaucca

SEQ ID NO: 2637881 - RNA, 19 nt, Artificial Sequence
  Description of Artificial Sequence: Synthetic oligonucleotide
cuccuugcagaacuccucu

SEQ ID NO: 2637882 - RNA, 19 nt, Artificial Sequence
  Description of Artificial Sequence: Synthetic oligonucleotide
ucacuaugacaugcauauu

SEQ ID NO: 2637883 - RNA, 19 nt, Artificial Sequence
  Description of Artificial Sequence: Synthetic oligonucleotide
ccaagcucacguagggauc

SEQ ID NO: 2637884 - RNA, 19 nt, Artificial Sequence
  Description of Artificial Sequence: Synthetic oligonucleotide
uggccgccagcuccuugca

SEQ ID NO: 2637885 - RNA, 19 nt, Artificial Sequence
  Description of Artificial Sequence: Synthetic oligonucleotide
ccagcaaugugacgugguc

SEQ ID NO: 2637886 - RNA, 19 nt, Artificial Sequence
  Description of Artificial Sequence: Synthetic oligonucleotide
gccaagcucacguagggau

SEQ ID NO: 2637887 - RNA, 19 nt, Artificial Sequence
  Description of Artificial Sequence: Synthetic oligonucleotide
caacaacccugacgaucac

SEQ ID NO: 2637888 - RNA, 19 nt, Artificial Sequence
  Description of Artificial Sequence: Synthetic oligonucleotide
gcaagcuaaggguuuuggu

SEQ ID NO: 2637889 - RNA, 19 nt, Artificial Sequence
  Description of Artificial Sequence: Synthetic oligonucleotide
ccuccagcaaugugacgug

SEQ ID NO: 2637890 - RNA, 19 nt, Artificial Sequence
  Description of Artificial Sequence: Synthetic oligonucleotide
cgcugaauccgaaccauca

SEQ ID NO: 2637891 - RNA, 19 nt, Artificial Sequence
  Description of Artificial Sequence: Synthetic oligonucleotide
caucuagucuguggguuua

SEQ ID NO: 2637892 - RNA, 19 nt, Artificial Sequence
  Description of Artificial Sequence: Synthetic oligonucleotide
ucacgcccuccagcaaugu

SEQ ID NO: 2637893 - RNA, 19 nt, Artificial Sequence
  Description of Artificial Sequence: Synthetic oligonucleotide
caggaggccaacagaguau

SEQ ID NO: 2637894 - RNA, 19 nt, Artificial Sequence
  Description of Artificial Sequence: Synthetic oligonucleotide
gguauuucacaaaggcaau

SEQ ID NO: 2637895 - RNA, 19 nt, Artificial Sequence
  Description of Artificial Sequence: Synthetic oligonucleotide
ccugacgaucaccgagaag

SEQ ID NO: 2637896 - RNA, 19 nt, Artificial Sequence
  Description of Artificial Sequence: Synthetic oligonucleotide
ccuucgggcuccaaaccga

SEQ ID NO: 2637897 - RNA, 19 nt, Artificial Sequence
  Description of Artificial Sequence: Synthetic oligonucleotide
caaucacgcccuccagcaa

SEQ ID NO: 2637898 - RNA, 19 nt, Artificial Sequence
  Description of Artificial Sequence: Synthetic oligonucleotide
caaaccgagcagucgcuuu

SEQ ID NO: 2637899 - RNA, 19 nt, Artificial Sequence
  Description of Artificial Sequence: Synthetic oligonucleotide
gggcagaaguaggauuauc

SEQ ID NO: 2637900 - RNA, 19 nt, Artificial Sequence
  Description of Artificial Sequence: Synthetic oligonucleotide
ggggccuucgggcuccaaa

SEQ ID NO: 2637901 - RNA, 19 nt, Artificial Sequence
  Description of Artificial Sequence: Synthetic oligonucleotide
gcgcugaauccgaaccauc

SEQ ID NO: 2637902 - RNA, 19 nt, Artificial Sequence
  Description of Artificial Sequence: Synthetic oligonucleotide
  modified_base (2)..(2): a, c, u, g, unknown or other
  modified_base (11)..(11): a, c, u, g, unknown or other
cngcagccagngccaagcu

SEQ ID NO: 2637903 - RNA, 19 nt, Artificial Sequence
  Description of Artificial Sequence: Synthetic oligonucleotide
cugucagggugugguggaa

SEQ ID NO: 2637904 - RNA, 19 nt, Artificial Sequence
  Description of Artificial Sequence: Synthetic oligonucleotide
  modified_base (5)..(5): a, c, u, g, unknown or other
ccagngccaagcucacgua

SEQ ID NO: 2637905 - RNA, 19 nt, Artificial Sequence
  Description of Artificial Sequence: Synthetic oligonucleotide
cuccaacaacccugacgau

SEQ ID NO: 2637906 - RNA, 19 nt, Artificial Sequence
  Description of Artificial Sequence: Synthetic oligonucleotide
cccugacgaucaccgagaa

SEQ ID NO: 2637907 - RNA, 19 nt, Artificial Sequence
  Description of Artificial Sequence: Synthetic oligonucleotide
gcaaugugacguggucaau

SEQ ID NO: 2637908 - RNA, 19 nt, Artificial Sequence
  Description of Artificial Sequence: Synthetic oligonucleotide
gcuaaggguuuugguccau

SEQ ID NO: 2637909 - RNA, 19 nt, Artificial Sequence
  Description of Artificial Sequence: Synthetic oligonucleotide
cgaucaccgagaagaggau

SEQ ID NO: 2637910 - RNA, 19 nt, Artificial Sequence
  Description of Artificial Sequence: Synthetic oligonucleotide
ccgaaccaucaggucucca

SEQ ID NO: 2637911 - RNA, 19 nt, Artificial Sequence
  Description of Artificial Sequence: Synthetic oligonucleotide
ccaaaccgagcagucgcuu

SEQ ID NO: 2637912 - RNA, 19 nt, Artificial Sequence
  Description of Artificial Sequence: Synthetic oligonucleotide
caauggccgccagcuccuu

SEQ ID NO: 2637913 - RNA, 19 nt, Artificial Sequence
  Description of Artificial Sequence: Synthetic oligonucleotide
  modified_base (1)..(1): a, c, u, g, unknown or other
ngccaagcucacguaggga

SEQ ID NO: 2637914 - RNA, 19 nt, Artificial Sequence
  Description of Artificial Sequence: Synthetic oligonucleotide
cuuauggccaucuacaacg

SEQ ID NO: 2637915 - RNA, 19 nt, Artificial Sequence
  Description of Artificial Sequence: Synthetic oligonucleotide
ucuuguauuccacaaaccc

SEQ ID NO: 2637916 - RNA, 19 nt, Artificial Sequence
  Description of Artificial Sequence: Synthetic oligonucleotide
aaaggugcugaaaagcucc

SEQ ID NO: 2637917 - RNA, 19 nt, Artificial Sequence
  Description of Artificial Sequence: Synthetic oligonucleotide
uacaacgugacccuggagc

SEQ ID NO: 2637918 - RNA, 19 nt, Artificial Sequence
  Description of Artificial Sequence: Synthetic oligonucleotide
uugaaaguagcacuccugc

SEQ ID NO: 2637919 - RNA, 19 nt, Artificial Sequence
  Description of Artificial Sequence: Synthetic oligonucleotide
ugugcuagaucacagcuga

SEQ ID NO: 2637920 - RNA, 19 nt, Artificial Sequence
  Description of Artificial Sequence: Synthetic oligonucleotide
cucgaugucgucaucgucg

SEQ ID NO: 2637921 - RNA, 19 nt, Artificial Sequence
  Description of Artificial Sequence: Synthetic oligonucleotide
gacaaaguccacaaagccg

SEQ ID NO: 2637922 - RNA, 19 nt, Artificial Sequence
  Description of Artificial Sequence: Synthetic oligonucleotide
cauccaacacugcagaccg

SEQ ID NO: 2637923 - RNA, 19 nt, Artificial Sequence
  Description of Artificial Sequence: Synthetic oligonucleotide
ugucaaggaggcuuagugg

SEQ ID NO: 2637924 - RNA, 19 nt, Artificial Sequence
  Description of Artificial Sequence: Synthetic oligonucleotide
acccaaaccccauugaaag

SEQ ID NO: 2637925 - RNA, 19 nt, Artificial Sequence
  Description of Artificial Sequence: Synthetic oligonucleotide
gauauuccgcaccagaauc

SEQ ID NO: 2637926 - RNA, 19 nt, Artificial Sequence
  Description of Artificial Sequence: Synthetic oligonucleotide
gagguugucugcuucuugg

SEQ ID NO: 2637927 - RNA, 19 nt, Artificial Sequence
  Description of Artificial Sequence: Synthetic oligonucleotide
uuccgcaccagaaucuugg

SEQ ID NO: 2637928 - RNA, 19 nt, Artificial Sequence
  Description of Artificial Sequence: Synthetic oligonucleotide
aacgugacccuggagcugc

SEQ ID NO: 2637929 - RNA, 19 nt, Artificial Sequence
  Description of Artificial Sequence: Synthetic oligonucleotide
ucuccggccguacaagugg

SEQ ID NO: 2637930 - RNA, 19 nt, Artificial Sequence
  Description of Artificial Sequence: Synthetic oligonucleotide
cuagaucacagcugaagag

SEQ ID NO: 2637931 - RNA, 19 nt, Artificial Sequence
  Description of Artificial Sequence: Synthetic oligonucleotide
gguacugugacacagugca

SEQ ID NO: 2637932 - RNA, 19 nt, Artificial Sequence
  Description of Artificial Sequence: Synthetic oligonucleotide
uagaucacagcugaagagc

SEQ ID NO: 2637933 - RNA, 19 nt, Artificial Sequence
  Description of Artificial Sequence: Synthetic oligonucleotide
aguccacaaagccgaagcc

SEQ ID NO: 2637934 - RNA, 19 nt, Artificial Sequence
  Description of Artificial Sequence: Synthetic oligonucleotide
uuugucucugacccauggg

SEQ ID NO: 2637935 - RNA, 19 nt, Artificial Sequence
  Description of Artificial Sequence: Synthetic oligonucleotide
ucugagucugcccauucca

SEQ ID NO: 2637936 - RNA, 19 nt, Artificial Sequence
  Description of Artificial Sequence: Synthetic oligonucleotide
aaaguagcacuccugcuuu

SEQ ID NO: 2637937 - RNA, 19 nt, Artificial Sequence
  Description of Artificial Sequence: Synthetic oligonucleotide
ugucucugacccaugggag

SEQ ID NO: 2637938 - RNA, 19 nt, Artificial Sequence
  Description of Artificial Sequence: Synthetic oligonucleotide
uacaaguggguacugugac

SEQ ID NO: 2637939 - RNA, 19 nt, Artificial Sequence
  Description of Artificial Sequence: Synthetic oligonucleotide
ugugacacagugcauugaa

SEQ ID NO: 2637940 - RNA, 19 nt, Artificial Sequence
  Description of Artificial Sequence: Synthetic oligonucleotide
aacgucaccucugagucug

SEQ ID NO: 2637941 - RNA, 19 nt, Artificial Sequence
  Description of Artificial Sequence: Synthetic oligonucleotide
ugcaacgucaccucugagu

SEQ ID NO: 2637942 - RNA, 19 nt, Artificial Sequence
  Description of Artificial Sequence: Synthetic oligonucleotide
gugucaaggaggcuuagug

SEQ ID NO: 2637943 - RNA, 19 nt, Artificial Sequence
  Description of Artificial Sequence: Synthetic oligonucleotide
ugcuagaucacagcugaag

SEQ ID NO: 2637944 - RNA, 19 nt, Artificial Sequence
  Description of Artificial Sequence: Synthetic oligonucleotide
cuuguauuccacaaaccca

SEQ ID NO: 2637945 - RNA, 19 nt, Artificial Sequence
  Description of Artificial Sequence: Synthetic oligonucleotide
aaggggauauuccgcacca

SEQ ID NO: 2637946 - RNA, 19 nt, Artificial Sequence
  Description of Artificial Sequence: Synthetic oligonucleotide
uuccgagugggugucaagg

SEQ ID NO: 2637947 - RNA, 19 nt, Artificial Sequence
  Description of Artificial Sequence: Synthetic oligonucleotide
uccugcuuuacucuucuuc

SEQ ID NO: 2637948 - RNA, 19 nt, Artificial Sequence
  Description of Artificial Sequence: Synthetic oligonucleotide
gaaggggauauuccgcacc

SEQ ID NO: 2637949 - RNA, 19 nt, Artificial Sequence
  Description of Artificial Sequence: Synthetic oligonucleotide
cauugaaggcuuucuuugc

SEQ ID NO: 2637950 - RNA, 19 nt, Artificial Sequence
  Description of Artificial Sequence: Synthetic oligonucleotide
ucuacaacgugacccugga

SEQ ID NO: 2637951 - RNA, 19 nt, Artificial Sequence
  Description of Artificial Sequence: Synthetic oligonucleotide
aagccgaagccccugugug

SEQ ID NO: 2637952 - RNA, 19 nt, Artificial Sequence
  Description of Artificial Sequence: Synthetic oligonucleotide
uggaaggggauauuccgca

SEQ ID NO: 2637953 - RNA, 19 nt, Artificial Sequence
  Description of Artificial Sequence: Synthetic oligonucleotide
aaaccccauugaaaguagc

SEQ ID NO: 2637954 - RNA, 19 nt, Artificial Sequence
  Description of Artificial Sequence: Synthetic oligonucleotide
cuccguagagccugcaacg

SEQ ID NO: 2637955 - RNA, 19 nt, Artificial Sequence
  Description of Artificial Sequence: Synthetic oligonucleotide
accagaaucuuggagguug

SEQ ID NO: 2637956 - RNA, 19 nt, Artificial Sequence
  Description of Artificial Sequence: Synthetic oligonucleotide
cuuaguggcccguucggag

SEQ ID NO: 2637957 - RNA, 19 nt, Artificial Sequence
  Description of Artificial Sequence: Synthetic oligonucleotide
acaacgugacccuggagcu

SEQ ID NO: 2637958 - RNA, 19 nt, Artificial Sequence
  Description of Artificial Sequence: Synthetic oligonucleotide
gaucccauccaacacugca

SEQ ID NO: 2637959 - RNA, 19 nt, Artificial Sequence
  Description of Artificial Sequence: Synthetic oligonucleotide
uugcucgaugucgucaucg

SEQ ID NO: 2637960 - RNA, 19 nt, Artificial Sequence
  Description of Artificial Sequence: Synthetic oligonucleotide
accccauugaaaguagcac

SEQ ID NO: 2637961 - RNA, 19 nt, Artificial Sequence
  Description of Artificial Sequence: Synthetic oligonucleotide
ucuuccuccguagagccug

SEQ ID NO: 2637962 - RNA, 19 nt, Artificial Sequence
  Description of Artificial Sequence: Synthetic oligonucleotide
acugugacacagugcauug

SEQ ID NO: 2637963 - RNA, 19 nt, Artificial Sequence
  Description of Artificial Sequence: Synthetic oligonucleotide
ugucuucaguuccccaaag

SEQ ID NO: 2637964 - RNA, 19 nt, Artificial Sequence
  Description of Artificial Sequence: Synthetic oligonucleotide
ugaaaguagcacuccugcu

SEQ ID NO: 2637965 - RNA, 19 nt, Artificial Sequence
  Description of Artificial Sequence: Synthetic oligonucleotide
ugacccaugggagaccucc

SEQ ID NO: 2637966 - RNA, 19 nt, Artificial Sequence
  Description of Artificial Sequence: Synthetic oligonucleotide
ugcauugaaggcuuucuuu

SEQ ID NO: 2637967 - RNA, 19 nt, Artificial Sequence
  Description of Artificial Sequence: Synthetic oligonucleotide
uucggagauucgcacuucc

SEQ ID NO: 2637968 - RNA, 19 nt, Artificial Sequence
  Description of Artificial Sequence: Synthetic oligonucleotide
ggugcugaaaagcucccgg

SEQ ID NO: 2637969 - RNA, 19 nt, Artificial Sequence
  Description of Artificial Sequence: Synthetic oligonucleotide
aaggugcugaaaagcuccc

SEQ ID NO: 2637970 - RNA, 19 nt, Artificial Sequence
  Description of Artificial Sequence: Synthetic oligonucleotide
gagaccuguuucuuccgag

SEQ ID NO: 2637971 - RNA, 19 nt, Artificial Sequence
  Description of Artificial Sequence: Synthetic oligonucleotide
gcauugaaggcuuucuuug

SEQ ID NO: 2637972 - RNA, 19 nt, Artificial Sequence
  Description of Artificial Sequence: Synthetic oligonucleotide
aucacagcugaagagcuug

SEQ ID NO: 2637973 - RNA, 19 nt, Artificial Sequence
  Description of Artificial Sequence: Synthetic oligonucleotide
cuggaaggggauauuccgc

SEQ ID NO: 2637974 - RNA, 19 nt, Artificial Sequence
  Description of Artificial Sequence: Synthetic oligonucleotide
caaaccccauugaaaguag

SEQ ID NO: 2637975 - RNA, 19 nt, Artificial Sequence
  Description of Artificial Sequence: Synthetic oligonucleotide
aggcuuaguggcccguucg

SEQ ID NO: 2637976 - RNA, 19 nt, Artificial Sequence
  Description of Artificial Sequence: Synthetic oligonucleotide
gaccuguuucuuccgagug

SEQ ID NO: 2637977 - RNA, 19 nt, Artificial Sequence
  Description of Artificial Sequence: Synthetic oligonucleotide
acugucuucaguuccccaa

SEQ ID NO: 2637978 - RNA, 19 nt, Artificial Sequence
  Description of Artificial Sequence: Synthetic oligonucleotide
aaggaggcuuaguggcccg

SEQ ID NO: 2637979 - RNA, 19 nt, Artificial Sequence
  Description of Artificial Sequence: Synthetic oligonucleotide
uuaguggcccguucggaga

SEQ ID NO: 2637980 - RNA, 19 nt, Artificial Sequence
  Description of Artificial Sequence: Synthetic oligonucleotide
auugaaaguagcacuccug

SEQ ID NO: 2637981 - RNA, 19 nt, Artificial Sequence
  Description of Artificial Sequence: Synthetic oligonucleotide
ugagucugcccauuccaga

SEQ ID NO: 2637982 - RNA, 19 nt, Artificial Sequence
  Description of Artificial Sequence: Synthetic oligonucleotide
gccaucuacaacgugaccc

SEQ ID NO: 2637983 - RNA, 19 nt, Artificial Sequence
  Description of Artificial Sequence: Synthetic oligonucleotide
agccgaagccccugugugc

SEQ ID NO: 2637984 - RNA, 19 nt, Artificial Sequence
  Description of Artificial Sequence: Synthetic oligonucleotide
aguagcacuccugcuuuac

SEQ ID NO: 2637985 - RNA, 19 nt, Artificial Sequence
  Description of Artificial Sequence: Synthetic oligonucleotide
agcacuccugcuuuacucu

SEQ ID NO: 2637986 - RNA, 19 nt, Artificial Sequence
  Description of Artificial Sequence: Synthetic oligonucleotide
gaaaagcucccggaucucc

SEQ ID NO: 2637987 - RNA, 19 nt, Artificial Sequence
  Description of Artificial Sequence: Synthetic oligonucleotide
aacacugcagaccgcuuuu

SEQ ID NO: 2637988 - RNA, 19 nt, Artificial Sequence
  Description of Artificial Sequence: Synthetic oligonucleotide
ugcugaaaagcucccggau

SEQ ID NO: 2637989 - RNA, 19 nt, Artificial Sequence
  Description of Artificial Sequence: Synthetic oligonucleotide
uggccaucuacaacgugac

SEQ ID NO: 2637990 - RNA, 19 nt, Artificial Sequence
  Description of Artificial Sequence: Synthetic oligonucleotide
ggagauucgcacuuccagc

SEQ ID NO: 2637991 - RNA, 19 nt, Artificial Sequence
  Description of Artificial Sequence: Synthetic oligonucleotide
uuauggccaucuacaacgu

SEQ ID NO: 2637992 - RNA, 19 nt, Artificial Sequence
  Description of Artificial Sequence: Synthetic oligonucleotide
uccugcuuggugacaaagu

SEQ ID NO: 2637993 - RNA, 19 nt, Artificial Sequence
  Description of Artificial Sequence: Synthetic oligonucleotide
uggcugugcuagaucacag

SEQ ID NO: 2637994 - RNA, 19 nt, Artificial Sequence
  Description of Artificial Sequence: Synthetic oligonucleotide
uccaacacugcagaccgcu

SEQ ID NO: 2637995 - RNA, 19 nt, Artificial Sequence
  Description of Artificial Sequence: Synthetic oligonucleotide
aaccccauugaaaguagca

SEQ ID NO: 2637996 - RNA, 19 nt, Artificial Sequence
  Description of Artificial Sequence: Synthetic oligonucleotide
uagcacuccugcuuuacuc

SEQ ID NO: 2637997 - RNA, 19 nt, Artificial Sequence
  Description of Artificial Sequence: Synthetic oligonucleotide
cagcuuauggccaucuaca

SEQ ID NO: 2637998 - RNA, 19 nt, Artificial Sequence
  Description of Artificial Sequence: Synthetic oligonucleotide
cgcaccagaaucuuggagg

SEQ ID NO: 2637999 - RNA, 19 nt, Artificial Sequence
  Description of Artificial Sequence: Synthetic oligonucleotide
uuccagaaccagucuccgg

SEQ ID NO: 2638000 - RNA, 19 nt, Artificial Sequence
  Description of Artificial Sequence: Synthetic oligonucleotide
uugaaggcuuucuuugcau

SEQ ID NO: 2638001 - RNA, 19 nt, Artificial Sequence
  Description of Artificial Sequence: Synthetic oligonucleotide
uggagaccuguuucuuccg

SEQ ID NO: 2638002 - RNA, 19 nt, Artificial Sequence
  Description of Artificial Sequence: Synthetic oligonucleotide
agugcauugaaggcuuucu

SEQ ID NO: 2638003 - RNA, 19 nt, Artificial Sequence
  Description of Artificial Sequence: Synthetic oligonucleotide
gaaaguagcacuccugcuu

SEQ ID NO: 2638004 - RNA, 19 nt, Artificial Sequence
  Description of Artificial Sequence: Synthetic oligonucleotide
gagauucgcacuuccagcu

SEQ ID NO: 2638005 - RNA, 19 nt, Artificial Sequence
  Description of Artificial Sequence: Synthetic oligonucleotide
aagcucccggaucucccuc

SEQ ID NO: 2638006 - RNA, 19 nt, Artificial Sequence
  Description of Artificial Sequence: Synthetic oligonucleotide
cugugcuagaucacagcug

SEQ ID NO: 2638007 - RNA, 19 nt, Artificial Sequence
  Description of Artificial Sequence: Synthetic oligonucleotide
gcaacgucaccucugaguc

SEQ ID NO: 2638008 - RNA, 19 nt, Artificial Sequence
  Description of Artificial Sequence: Synthetic oligonucleotide
aacccaaaccccauugaaa

SEQ ID NO: 2638009 - RNA, 19 nt, Artificial Sequence
  Description of Artificial Sequence: Synthetic oligonucleotide
aucuacaacgugacccugg

SEQ ID NO: 2638010 - RNA, 19 nt, Artificial Sequence
  Description of Artificial Sequence: Synthetic oligonucleotide
acaaguggguacugugaca

SEQ ID NO: 2638011 - RNA, 19 nt, Artificial Sequence
  Description of Artificial Sequence: Synthetic oligonucleotide
agaucacagcugaagagcu

SEQ ID NO: 2638012 - RNA, 19 nt, Artificial Sequence
  Description of Artificial Sequence: Synthetic oligonucleotide
uccugacaugcccugccug

SEQ ID NO: 2638013 - RNA, 19 nt, Artificial Sequence
  Description of Artificial Sequence: Synthetic oligonucleotide
gagugggugucaaggaggc

SEQ ID NO: 2638014 - RNA, 19 nt, Artificial Sequence
  Description of Artificial Sequence: Synthetic oligonucleotide
ucgaugucgucaucgucgu

SEQ ID NO: 2638015 - RNA, 19 nt, Artificial Sequence
  Description of Artificial Sequence: Synthetic oligonucleotide
ucucugacccaugggagac

SEQ ID NO: 2638016 - RNA, 19 nt, Artificial Sequence
  Description of Artificial Sequence: Synthetic oligonucleotide
uccgagugggugucaagga

SEQ ID NO: 2638017 - RNA, 19 nt, Artificial Sequence
  Description of Artificial Sequence: Synthetic oligonucleotide
cuuggagguugucugcuuc

SEQ ID NO: 2638018 - RNA, 19 nt, Artificial Sequence
  Description of Artificial Sequence: Synthetic oligonucleotide
ucggagauucgcacuucca

SEQ ID NO: 2638019 - RNA, 19 nt, Artificial Sequence
  Description of Artificial Sequence: Synthetic oligonucleotide
gcuagaucacagcugaaga

SEQ ID NO: 2638020 - RNA, 19 nt, Artificial Sequence
  Description of Artificial Sequence: Synthetic oligonucleotide
cuuggugacaaaguccaca

SEQ ID NO: 2638021 - RNA, 19 nt, Artificial Sequence
  Description of Artificial Sequence: Synthetic oligonucleotide
ucccggaucucccucuggu

SEQ ID NO: 2638022 - RNA, 19 nt, Artificial Sequence
  Description of Artificial Sequence: Synthetic oligonucleotide
uuggcaggcgcacugucuu

SEQ ID NO: 2638023 - RNA, 19 nt, Artificial Sequence
  Description of Artificial Sequence: Synthetic oligonucleotide
ugacccuggagcugcuuga

SEQ ID NO: 2638024 - RNA, 19 nt, Artificial Sequence
  Description of Artificial Sequence: Synthetic oligonucleotide
ucugcccauuccagaacca

SEQ ID NO: 2638025 - RNA, 19 nt, Artificial Sequence
  Description of Artificial Sequence: Synthetic oligonucleotide
agcuuauggccaucuacaa

SEQ ID NO: 2638026 - RNA, 19 nt, Artificial Sequence
  Description of Artificial Sequence: Synthetic oligonucleotide
cucugagucugcccauucc

SEQ ID NO: 2638027 - RNA, 19 nt, Artificial Sequence
  Description of Artificial Sequence: Synthetic oligonucleotide
auauuccgcaccagaaucu

SEQ ID NO: 2638028 - RNA, 19 nt, Artificial Sequence
  Description of Artificial Sequence: Synthetic oligonucleotide
aucccauccaacacugcag

SEQ ID NO: 2638029 - RNA, 19 nt, Artificial Sequence
  Description of Artificial Sequence: Synthetic oligonucleotide
gauucgcacuuccagcuua

SEQ ID NO: 2638030 - RNA, 19 nt, Artificial Sequence
  Description of Artificial Sequence: Synthetic oligonucleotide
uggagccacacacccuggc

SEQ ID NO: 2638031 - RNA, 19 nt, Artificial Sequence
  Description of Artificial Sequence: Synthetic oligonucleotide
cuuuacucuucuucuugga

SEQ ID NO: 2638032 - RNA, 19 nt, Artificial Sequence
  Description of Artificial Sequence: Synthetic oligonucleotide
cugaaaagcucccggaucu

SEQ ID NO: 2638033 - RNA, 19 nt, Artificial Sequence
  Description of Artificial Sequence: Synthetic oligonucleotide
gugacccuggagcugcuug

SEQ ID NO: 2638034 - RNA, 19 nt, Artificial Sequence
  Description of Artificial Sequence: Synthetic oligonucleotide
aaguggguacugugacaca

SEQ ID NO: 2638035 - RNA, 19 nt, Artificial Sequence
  Description of Artificial Sequence: Synthetic oligonucleotide
gucaccucugagucugccc

SEQ ID NO: 2638036 - RNA, 19 nt, Artificial Sequence
  Description of Artificial Sequence: Synthetic oligonucleotide
ugcucgaugucgucaucgu

SEQ ID NO: 2638037 - RNA, 19 nt, Artificial Sequence
  Description of Artificial Sequence: Synthetic oligonucleotide
agguugucugcuucuugga

SEQ ID NO: 2638038 - RNA, 19 nt, Artificial Sequence
  Description of Artificial Sequence: Synthetic oligonucleotide
agagcuugcucgaugucgu

SEQ ID NO: 2638039 - RNA, 19 nt, Artificial Sequence
  Description of Artificial Sequence: Synthetic oligonucleotide
cccauugaaaguagcacuc

SEQ ID NO: 2638040 - RNA, 19 nt, Artificial Sequence
  Description of Artificial Sequence: Synthetic oligonucleotide
ugugcgccugucccuguca

SEQ ID NO: 2638041 - RNA, 19 nt, Artificial Sequence
  Description of Artificial Sequence: Synthetic oligonucleotide
aucucccucugguuggccu

SEQ ID NO: 2638042 - RNA, 19 nt, Artificial Sequence
  Description of Artificial Sequence: Synthetic oligonucleotide
acaaagccgaagccccugu

SEQ ID NO: 2638043 - RNA, 19 nt, Artificial Sequence
  Description of Artificial Sequence: Synthetic oligonucleotide
ugggugucaaggaggcuua

SEQ ID NO: 2638044 - RNA, 19 nt, Artificial Sequence
  Description of Artificial Sequence: Synthetic oligonucleotide
gugacacagugcauugaag

SEQ ID NO: 2638045 - RNA, 19 nt, Artificial Sequence
  Description of Artificial Sequence: Synthetic oligonucleotide
ccagcuuauggccaucuac

SEQ ID NO: 2638046 - RNA, 19 nt, Artificial Sequence
  Description of Artificial Sequence: Synthetic oligonucleotide
uugcauccugcuuggugac

SEQ ID NO: 2638047 - RNA, 19 nt, Artificial Sequence
  Description of Artificial Sequence: Synthetic oligonucleotide
cccaaaggugcugaaaagc

SEQ ID NO: 2638048 - RNA, 19 nt, Artificial Sequence
  Description of Artificial Sequence: Synthetic oligonucleotide
cuccggccguacaaguggg

SEQ ID NO: 2638049 - RNA, 19 nt, Artificial Sequence
  Description of Artificial Sequence: Synthetic oligonucleotide
aguuccccaaaggugcuga

SEQ ID NO: 2638050 - RNA, 19 nt, Artificial Sequence
  Description of Artificial Sequence: Synthetic oligonucleotide
agucuccggccguacaagu

SEQ ID NO: 2638051 - RNA, 19 nt, Artificial Sequence
  Description of Artificial Sequence: Synthetic oligonucleotide
gaagagcuugcucgauguc

SEQ ID NO: 2638052 - RNA, 19 nt, Artificial Sequence
  Description of Artificial Sequence: Synthetic oligonucleotide
uuggccuggaaggggauau

SEQ ID NO: 2638053 - RNA, 19 nt, Artificial Sequence
  Description of Artificial Sequence: Synthetic oligonucleotide
gucucugacccaugggaga

SEQ ID NO: 2638054 - RNA, 19 nt, Artificial Sequence
  Description of Artificial Sequence: Synthetic oligonucleotide
cuuuugucucugacccaug

SEQ ID NO: 2638055 - RNA, 19 nt, Artificial Sequence
  Description of Artificial Sequence: Synthetic oligonucleotide
ggcuuaguggcccguucgg

SEQ ID NO: 2638056 - RNA, 19 nt, Artificial Sequence
  Description of Artificial Sequence: Synthetic oligonucleotide
aggugcugaaaagcucccg

SEQ ID NO: 2638057 - RNA, 19 nt, Artificial Sequence
  Description of Artificial Sequence: Synthetic oligonucleotide
gcugaaaagcucccggauc

SEQ ID NO: 2638058 - RNA, 19 nt, Artificial Sequence
  Description of Artificial Sequence: Synthetic oligonucleotide
acccuggagcugcuugagg

SEQ ID NO: 2638059 - RNA, 19 nt, Artificial Sequence
  Description of Artificial Sequence: Synthetic oligonucleotide
uccguagagccugcaacgu

SEQ ID NO: 2638060 - RNA, 19 nt, Artificial Sequence
  Description of Artificial Sequence: Synthetic oligonucleotide
gugcugaaaagcucccgga

SEQ ID NO: 2638061 - RNA, 19 nt, Artificial Sequence
  Description of Artificial Sequence: Synthetic oligonucleotide
gcuuauggccaucuacaac

SEQ ID NO: 2638062 - RNA, 19 nt, Artificial Sequence
  Description of Artificial Sequence: Synthetic oligonucleotide
uuucuuccgaguggguguc

SEQ ID NO: 2638063 - RNA, 19 nt, Artificial Sequence
  Description of Artificial Sequence: Synthetic oligonucleotide
uaguggcccguucggagau

SEQ ID NO: 2638064 - RNA, 19 nt, Artificial Sequence
  Description of Artificial Sequence: Synthetic oligonucleotide
uauuccgcaccagaaucuu

SEQ ID NO: 2638065 - RNA, 19 nt, Artificial Sequence
  Description of Artificial Sequence: Synthetic oligonucleotide
gaccuccugacaugcccug

SEQ ID NO: 2638066 - RNA, 19 nt, Artificial Sequence
  Description of Artificial Sequence: Synthetic oligonucleotide
gagccugcaacgucaccuc

SEQ ID NO: 2638067 - RNA, 19 nt, Artificial Sequence
  Description of Artificial Sequence: Synthetic oligonucleotide
uagagccugcaacgucacc

SEQ ID NO: 2638068 - RNA, 19 nt, Artificial Sequence
  Description of Artificial Sequence: Synthetic oligonucleotide
gucguccccgucuuccagc

SEQ ID NO: 2638069 - RNA, 19 nt, Artificial Sequence
  Description of Artificial Sequence: Synthetic oligonucleotide
uccgcaccagaaucuugga

SEQ ID NO: 2638070 - RNA, 19 nt, Artificial Sequence
  Description of Artificial Sequence: Synthetic oligonucleotide
acccaugggagaccuccug

SEQ ID NO: 2638071 - RNA, 19 nt, Artificial Sequence
  Description of Artificial Sequence: Synthetic oligonucleotide
cauugaaaguagcacuccu

SEQ ID NO: 2638072 - RNA, 19 nt, Artificial Sequence
  Description of Artificial Sequence: Synthetic oligonucleotide
uccuccguagagccugcaa

SEQ ID NO: 2638073 - RNA, 19 nt, Artificial Sequence
  Description of Artificial Sequence: Synthetic oligonucleotide
agugucuggcugucuuccu

SEQ ID NO: 2638074 - RNA, 19 nt, Artificial Sequence
  Description of Artificial Sequence: Synthetic oligonucleotide
aaguagcacuccugcuuua

SEQ ID NO: 2638075 - RNA, 19 nt, Artificial Sequence
  Description of Artificial Sequence: Synthetic oligonucleotide
agcuugcucgaugucguca

SEQ ID NO: 2638076 - RNA, 19 nt, Artificial Sequence
  Description of Artificial Sequence: Synthetic oligonucleotide
cugcccauuccagaaccag

SEQ ID NO: 2638077 - RNA, 19 nt, Artificial Sequence
  Description of Artificial Sequence: Synthetic oligonucleotide
gaggcuuaguggcccguuc

SEQ ID NO: 2638078 - RNA, 19 nt, Artificial Sequence
  Description of Artificial Sequence: Synthetic oligonucleotide
ucguccccgucuuccagcu

SEQ ID NO: 2638079 - RNA, 19 nt, Artificial Sequence
  Description of Artificial Sequence: Synthetic oligonucleotide
cuuccgagugggugucaag

SEQ ID NO: 2638080 - RNA, 19 nt, Artificial Sequence
  Description of Artificial Sequence: Synthetic oligonucleotide
cuuggaagugucuggcugu

SEQ ID NO: 2638081 - RNA, 19 nt, Artificial Sequence
  Description of Artificial Sequence: Synthetic oligonucleotide
cuacaacgugacccuggag

SEQ ID NO: 2638082 - RNA, 19 nt, Artificial Sequence
  Description of Artificial Sequence: Synthetic oligonucleotide
cguacaaguggguacugug

SEQ ID NO: 2638083 - RNA, 19 nt, Artificial Sequence
  Description of Artificial Sequence: Synthetic oligonucleotide
ggggauauuccgcaccaga

SEQ ID NO: 2638084 - RNA, 19 nt, Artificial Sequence
  Description of Artificial Sequence: Synthetic oligonucleotide
uggcccguucggagauucg

SEQ ID NO: 2638085 - RNA, 19 nt, Artificial Sequence
  Description of Artificial Sequence: Synthetic oligonucleotide
cuggagccacacacccugg

SEQ ID NO: 2638086 - RNA, 19 nt, Artificial Sequence
  Description of Artificial Sequence: Synthetic oligonucleotide
caaagccgaagccccugug

SEQ ID NO: 2638087 - RNA, 19 nt, Artificial Sequence
  Description of Artificial Sequence: Synthetic oligonucleotide
ccugccuggccccagggcc

SEQ ID NO: 2638088 - RNA, 19 nt, Artificial Sequence
  Description of Artificial Sequence: Synthetic oligonucleotide
cacuccugcuuuacucuuc

SEQ ID NO: 2638089 - RNA, 19 nt, Artificial Sequence
  Description of Artificial Sequence: Synthetic oligonucleotide
ucuuggagguugucugcuu

SEQ ID NO: 2638090 - RNA, 19 nt, Artificial Sequence
  Description of Artificial Sequence: Synthetic oligonucleotide
ucuuccgagugggugucaa

SEQ ID NO: 2638091 - RNA, 19 nt, Artificial Sequence
  Description of Artificial Sequence: Synthetic oligonucleotide
gggcccuggagccacacac

SEQ ID NO: 2638092 - RNA, 19 nt, Artificial Sequence
  Description of Artificial Sequence: Synthetic oligonucleotide
uuggaagugucuggcuguc

SEQ ID NO: 2638093 - RNA, 19 nt, Artificial Sequence
  Description of Artificial Sequence: Synthetic oligonucleotide
cugacaugcccugccuggc

SEQ ID NO: 2638094 - RNA, 19 nt, Artificial Sequence
  Description of Artificial Sequence: Synthetic oligonucleotide
cugccuggccccagggccc

SEQ ID NO: 2638095 - RNA, 19 nt, Artificial Sequence
  Description of Artificial Sequence: Synthetic oligonucleotide
ccuccguagagccugcaac

SEQ ID NO: 2638096 - RNA, 19 nt, Artificial Sequence
  Description of Artificial Sequence: Synthetic oligonucleotide
ucgucaucgucguccccgu

SEQ ID NO: 2638097 - RNA, 19 nt, Artificial Sequence
  Description of Artificial Sequence: Synthetic oligonucleotide
agauucgcacuuccagcuu

SEQ ID NO: 2638098 - RNA, 19 nt, Artificial Sequence
  Description of Artificial Sequence: Synthetic oligonucleotide
gugucuggcugucuuccuc

SEQ ID NO: 2638099 - RNA, 19 nt, Artificial Sequence
  Description of Artificial Sequence: Synthetic oligonucleotide
caugggagaccuccugaca

SEQ ID NO: 2638100 - RNA, 19 nt, Artificial Sequence
  Description of Artificial Sequence: Synthetic oligonucleotide
cacaaagccgaagccccug

SEQ ID NO: 2638101 - RNA, 19 nt, Artificial Sequence
  Description of Artificial Sequence: Synthetic oligonucleotide
agcucccggaucucccucu

SEQ ID NO: 2638102 - RNA, 19 nt, Artificial Sequence
  Description of Artificial Sequence: Synthetic oligonucleotide
gcugugcuagaucacagcu

SEQ ID NO: 2638103 - RNA, 19 nt, Artificial Sequence
  Description of Artificial Sequence: Synthetic oligonucleotide
agaccuccugacaugcccu

SEQ ID NO: 2638104 - RNA, 19 nt, Artificial Sequence
  Description of Artificial Sequence: Synthetic oligonucleotide
uccagcuuauggccaucua

SEQ ID NO: 2638105 - RNA, 19 nt, Artificial Sequence
  Description of Artificial Sequence: Synthetic oligonucleotide
cuuccuccguagagccugc

SEQ ID NO: 2638106 - RNA, 19 nt, Artificial Sequence
  Description of Artificial Sequence: Synthetic oligonucleotide
ccauugaaaguagcacucc

SEQ ID NO: 2638107 - RNA, 19 nt, Artificial Sequence
  Description of Artificial Sequence: Synthetic oligonucleotide
cuggcugugcuagaucaca

SEQ ID NO: 2638108 - RNA, 19 nt, Artificial Sequence
  Description of Artificial Sequence: Synthetic oligonucleotide
ggaaggggauauuccgcac

SEQ ID NO: 2638109 - RNA, 19 nt, Artificial Sequence
  Description of Artificial Sequence: Synthetic oligonucleotide
caucuacaacgugacccug

SEQ ID NO: 2638110 - RNA, 19 nt, Artificial Sequence
  Description of Artificial Sequence: Synthetic oligonucleotide
cggagauucgcacuuccag

SEQ ID NO: 2638111 - RNA, 19 nt, Artificial Sequence
  Description of Artificial Sequence: Synthetic oligonucleotide
agccugcaacgucaccucu

SEQ ID NO: 2638112 - RNA, 19 nt, Artificial Sequence
  Description of Artificial Sequence: Synthetic oligonucleotide
gcgcacugucuucaguucc

SEQ ID NO: 2638113 - RNA, 19 nt, Artificial Sequence
  Description of Artificial Sequence: Synthetic oligonucleotide
cagucuccggccguacaag

SEQ ID NO: 2638114 - RNA, 19 nt, Artificial Sequence
  Description of Artificial Sequence: Synthetic oligonucleotide
ccaggaucccauccaacac

SEQ ID NO: 2638115 - RNA, 19 nt, Artificial Sequence
  Description of Artificial Sequence: Synthetic oligonucleotide
ccggaucucccucugguug

SEQ ID NO: 2638116 - RNA, 19 nt, Artificial Sequence
  Description of Artificial Sequence: Synthetic oligonucleotide
accagucuccggccguaca

SEQ ID NO: 2638117 - RNA, 19 nt, Artificial Sequence
  Description of Artificial Sequence: Synthetic oligonucleotide
cugucuucaguuccccaaa

SEQ ID NO: 2638118 - RNA, 19 nt, Artificial Sequence
  Description of Artificial Sequence: Synthetic oligonucleotide
auuccgcaccagaaucuug

SEQ ID NO: 2638119 - RNA, 19 nt, Artificial Sequence
  Description of Artificial Sequence: Synthetic oligonucleotide
auccaacacugcagaccgc

SEQ ID NO: 2638120 - RNA, 19 nt, Artificial Sequence
  Description of Artificial Sequence: Synthetic oligonucleotide
ccgagugggugucaaggag

SEQ ID NO: 2638121 - RNA, 19 nt, Artificial Sequence
  Description of Artificial Sequence: Synthetic oligonucleotide
gucuccggccguacaagug

SEQ ID NO: 2638122 - RNA, 19 nt, Artificial Sequence
  Description of Artificial Sequence: Synthetic oligonucleotide
cccugugugcgccuguccc

SEQ ID NO: 2638123 - RNA, 19 nt, Artificial Sequence
  Description of Artificial Sequence: Synthetic oligonucleotide
cugugugcgccugucccug

SEQ ID NO: 2638124 - RNA, 19 nt, Artificial Sequence
  Description of Artificial Sequence: Synthetic oligonucleotide
ccccaaaggugcugaaaag

SEQ ID NO: 2638125 - RNA, 19 nt, Artificial Sequence
  Description of Artificial Sequence: Synthetic oligonucleotide
guagagccugcaacgucac

SEQ ID NO: 2638126 - RNA, 19 nt, Artificial Sequence
  Description of Artificial Sequence: Synthetic oligonucleotide
uucgcacuuccagcuuaug

SEQ ID NO: 2638127 - RNA, 19 nt, Artificial Sequence
  Description of Artificial Sequence: Synthetic oligonucleotide
uccggccguacaagugggu

SEQ ID NO: 2638128 - RNA, 19 nt, Artificial Sequence
  Description of Artificial Sequence: Synthetic oligonucleotide
ccugcuuuacucuucuucu

SEQ ID NO: 2638129 - RNA, 19 nt, Artificial Sequence
  Description of Artificial Sequence: Synthetic oligonucleotide
aggggauauuccgcaccag

SEQ ID NO: 2638130 - RNA, 19 nt, Artificial Sequence
  Description of Artificial Sequence: Synthetic oligonucleotide
cucccucugguuggccugg

SEQ ID NO: 2638131 - RNA, 19 nt, Artificial Sequence
  Description of Artificial Sequence: Synthetic oligonucleotide
gggauauuccgcaccagaa

SEQ ID NO: 2638132 - RNA, 19 nt, Artificial Sequence
  Description of Artificial Sequence: Synthetic oligonucleotide
ggagaccuguuucuuccga

SEQ ID NO: 2638133 - RNA, 19 nt, Artificial Sequence
  Description of Artificial Sequence: Synthetic oligonucleotide
cuugcucgaugucgucauc

SEQ ID NO: 2638134 - RNA, 19 nt, Artificial Sequence
  Description of Artificial Sequence: Synthetic oligonucleotide
cugcaacgucaccucugag

SEQ ID NO: 2638135 - RNA, 19 nt, Artificial Sequence
  Description of Artificial Sequence: Synthetic oligonucleotide
uccccgucuuccagcugcu

SEQ ID NO: 2638136 - RNA, 19 nt, Artificial Sequence
  Description of Artificial Sequence: Synthetic oligonucleotide
ccuccugacaugcccugcc

SEQ ID NO: 2638137 - RNA, 19 nt, Artificial Sequence
  Description of Artificial Sequence: Synthetic oligonucleotide
gaucucccucugguuggcc

SEQ ID NO: 2638138 - RNA, 19 nt, Artificial Sequence
  Description of Artificial Sequence: Synthetic oligonucleotide
ggauauuccgcaccagaau

SEQ ID NO: 2638139 - RNA, 19 nt, Artificial Sequence
  Description of Artificial Sequence: Synthetic oligonucleotide
ugugugcgccugucccugu

SEQ ID NO: 2638140 - RNA, 19 nt, Artificial Sequence
  Description of Artificial Sequence: Synthetic oligonucleotide
gccuggaaggggauauucc

SEQ ID NO: 2638141 - RNA, 19 nt, Artificial Sequence
  Description of Artificial Sequence: Synthetic oligonucleotide
cucugacccaugggagacc

SEQ ID NO: 2638142 - RNA, 19 nt, Artificial Sequence
  Description of Artificial Sequence: Synthetic oligonucleotide
guagcacuccugcuuuacu

SEQ ID NO: 2638143 - RNA, 19 nt, Artificial Sequence
  Description of Artificial Sequence: Synthetic oligonucleotide
caacgugacccuggagcug

SEQ ID NO: 2638144 - RNA, 19 nt, Artificial Sequence
  Description of Artificial Sequence: Synthetic oligonucleotide
ggguacugugacacagugc

SEQ ID NO: 2638145 - RNA, 19 nt, Artificial Sequence
  Description of Artificial Sequence: Synthetic oligonucleotide
gugggugucaaggaggcuu

SEQ ID NO: 2638146 - RNA, 19 nt, Artificial Sequence
  Description of Artificial Sequence: Synthetic oligonucleotide
cccguucggagauucgcac

SEQ ID NO: 2638147 - RNA, 19 nt, Artificial Sequence
  Description of Artificial Sequence: Synthetic oligonucleotide
aagccccugugugcgccug

SEQ ID NO: 2638148 - RNA, 19 nt, Artificial Sequence
  Description of Artificial Sequence: Synthetic oligonucleotide
gcaccagaaucuuggaggu

SEQ ID NO: 2638149 - RNA, 19 nt, Artificial Sequence
  Description of Artificial Sequence: Synthetic oligonucleotide
auucgcacuuccagcuuau

SEQ ID NO: 2638150 - RNA, 19 nt, Artificial Sequence
  Description of Artificial Sequence: Synthetic oligonucleotide
ggcccguucggagauucgc

SEQ ID NO: 2638151 - RNA, 19 nt, Artificial Sequence
  Description of Artificial Sequence: Synthetic oligonucleotide
ccaaaccccauugaaagua

SEQ ID NO: 2638152 - RNA, 19 nt, Artificial Sequence
  Description of Artificial Sequence: Synthetic oligonucleotide
ggcgcacugucuucaguuc

SEQ ID NO: 2638153 - RNA, 19 nt, Artificial Sequence
  Description of Artificial Sequence: Synthetic oligonucleotide
cuucucuggcuucuuguau

SEQ ID NO: 2638154 - RNA, 19 nt, Artificial Sequence
  Description of Artificial Sequence: Synthetic oligonucleotide
guucggagauucgcacuuc

SEQ ID NO: 2638155 - RNA, 19 nt, Artificial Sequence
  Description of Artificial Sequence: Synthetic oligonucleotide
uucuuccgaguggguguca

SEQ ID NO: 2638156 - RNA, 19 nt, Artificial Sequence
  Description of Artificial Sequence: Synthetic oligonucleotide
gccccagggcccuggagcc

SEQ ID NO: 2638157 - RNA, 19 nt, Artificial Sequence
  Description of Artificial Sequence: Synthetic oligonucleotide
acgucaccucugagucugc

SEQ ID NO: 2638158 - RNA, 19 nt, Artificial Sequence
  Description of Artificial Sequence: Synthetic oligonucleotide
gcucgaugucgucaucguc

SEQ ID NO: 2638159 - RNA, 19 nt, Artificial Sequence
  Description of Artificial Sequence: Synthetic oligonucleotide
agugggugucaaggaggcu

SEQ ID NO: 2638160 - RNA, 19 nt, Artificial Sequence
  Description of Artificial Sequence: Synthetic oligonucleotide
guggcccguucggagauuc

SEQ ID NO: 2638161 - RNA, 19 nt, Artificial Sequence
  Description of Artificial Sequence: Synthetic oligonucleotide
ccccauugaaaguagcacu

SEQ ID NO: 2638162 - RNA, 19 nt, Artificial Sequence
  Description of Artificial Sequence: Synthetic oligonucleotide
cugugacacagugcauuga

SEQ ID NO: 2638163 - RNA, 19 nt, Artificial Sequence
  Description of Artificial Sequence: Synthetic oligonucleotide
cucuuggaagugucuggcu

SEQ ID NO: 2638164 - RNA, 19 nt, Artificial Sequence
  Description of Artificial Sequence: Synthetic oligonucleotide
ggccuggaaggggauauuc

SEQ ID NO: 2638165 - RNA, 19 nt, Artificial Sequence
  Description of Artificial Sequence: Synthetic oligonucleotide
agggcccuggagccacaca

SEQ ID NO: 2638166 - RNA, 19 nt, Artificial Sequence
  Description of Artificial Sequence: Synthetic oligonucleotide
ccaucuacaacgugacccu

SEQ ID NO: 2638167 - RNA, 19 nt, Artificial Sequence
  Description of Artificial Sequence: Synthetic oligonucleotide
gaaccagucuccggccgua

SEQ ID NO: 2638168 - RNA, 19 nt, Artificial Sequence
  Description of Artificial Sequence: Synthetic oligonucleotide
caacacugcagaccgcuuu

SEQ ID NO: 2638169 - RNA, 19 nt, Artificial Sequence
  Description of Artificial Sequence: Synthetic oligonucleotide
gccugucccugucaucuuc

SEQ ID NO: 2638170 - RNA, 19 nt, Artificial Sequence
  Description of Artificial Sequence: Synthetic oligonucleotide
gugugcgccugucccuguc

SEQ ID NO: 2638171 - RNA, 19 nt, Artificial Sequence
  Description of Artificial Sequence: Synthetic oligonucleotide
uuccuccguagagccugca

SEQ ID NO: 2638172 - RNA, 19 nt, Artificial Sequence
  Description of Artificial Sequence: Synthetic oligonucleotide
gccugcaacgucaccucug

SEQ ID NO: 2638173 - RNA, 19 nt, Artificial Sequence
  Description of Artificial Sequence: Synthetic oligonucleotide
aggaggcuuaguggcccgu

SEQ ID NO: 2638174 - RNA, 19 nt, Artificial Sequence
  Description of Artificial Sequence: Synthetic oligonucleotide
ggaucucccucugguuggc

SEQ ID NO: 2638175 - RNA, 19 nt, Artificial Sequence
  Description of Artificial Sequence: Synthetic oligonucleotide
ggcugucuuccuccguaga

SEQ ID NO: 2638176 - RNA, 19 nt, Artificial Sequence
  Description of Artificial Sequence: Synthetic oligonucleotide
ggcaggcgcacugucuuca

SEQ ID NO: 2638177 - RNA, 19 nt, Artificial Sequence
  Description of Artificial Sequence: Synthetic oligonucleotide
cuggagcugcuugagggcu

SEQ ID NO: 2638178 - RNA, 19 nt, Artificial Sequence
  Description of Artificial Sequence: Synthetic oligonucleotide
ggagaccuccugacaugcc

SEQ ID NO: 2638179 - RNA, 19 nt, Artificial Sequence
  Description of Artificial Sequence: Synthetic oligonucleotide
accucugagucugcccauu

SEQ ID NO: 2638180 - RNA, 19 nt, Artificial Sequence
  Description of Artificial Sequence: Synthetic oligonucleotide
gcuuaguggcccguucgga

SEQ ID NO: 2638181 - RNA, 19 nt, Artificial Sequence
  Description of Artificial Sequence: Synthetic oligonucleotide
cugacccaugggagaccuc

SEQ ID NO: 2638182 - RNA, 19 nt, Artificial Sequence
  Description of Artificial Sequence: Synthetic oligonucleotide
caucgucguccccgucuuc

SEQ ID NO: 2638183 - RNA, 19 nt, Artificial Sequence
  Description of Artificial Sequence: Synthetic oligonucleotide
agccccugugugcgccugu

SEQ ID NO: 2638184 - RNA, 19 nt, Artificial Sequence
  Description of Artificial Sequence: Synthetic oligonucleotide
ccguagagccugcaacguc

SEQ ID NO: 2638185 - RNA, 19 nt, Artificial Sequence
  Description of Artificial Sequence: Synthetic oligonucleotide
cugcuuuacucuucuucuu

SEQ ID NO: 2638186 - RNA, 19 nt, Artificial Sequence
  Description of Artificial Sequence: Synthetic oligonucleotide
gcuugcucgaugucgucau

SEQ ID NO: 2638187 - RNA, 19 nt, Artificial Sequence
  Description of Artificial Sequence: Synthetic oligonucleotide
gaagccccugugugcgccu

SEQ ID NO: 2638188 - RNA, 19 nt, Artificial Sequence
  Description of Artificial Sequence: Synthetic oligonucleotide
cggccguacaaguggguac

SEQ ID NO: 2638189 - RNA, 19 nt, Artificial Sequence
  Description of Artificial Sequence: Synthetic oligonucleotide
caacgucaccucugagucu

SEQ ID NO: 2638190 - RNA, 19 nt, Artificial Sequence
  Description of Artificial Sequence: Synthetic oligonucleotide
guuggccuggaaggggaua

SEQ ID NO: 2638191 - RNA, 19 nt, Artificial Sequence
  Description of Artificial Sequence: Synthetic oligonucleotide
cacacacccuggcugugcu

SEQ ID NO: 2638192 - RNA, 19 nt, Artificial Sequence
  Description of Artificial Sequence: Synthetic oligonucleotide
ugccuggccccagggcccu

SEQ ID NO: 2638193 - RNA, 19 nt, Artificial Sequence
  Description of Artificial Sequence: Synthetic oligonucleotide
guggguacugugacacagu

SEQ ID NO: 2638194 - RNA, 19 nt, Artificial Sequence
  Description of Artificial Sequence: Synthetic oligonucleotide
gggugucaaggaggcuuag

SEQ ID NO: 2638195 - RNA, 19 nt, Artificial Sequence
  Description of Artificial Sequence: Synthetic oligonucleotide
ccacacacccuggcugugc

SEQ ID NO: 2638196 - RNA, 19 nt, Artificial Sequence
  Description of Artificial Sequence: Synthetic oligonucleotide
cacagcugaagagcuugcu

SEQ ID NO: 2638197 - RNA, 19 nt, Artificial Sequence
  Description of Artificial Sequence: Synthetic oligonucleotide
gcgccugucccugucaucu

SEQ ID NO: 2638198 - RNA, 19 nt, Artificial Sequence
  Description of Artificial Sequence: Synthetic oligonucleotide
ccagucuccggccguacaa

SEQ ID NO: 2638199 - RNA, 19 nt, Artificial Sequence
  Description of Artificial Sequence: Synthetic oligonucleotide
cuccugacaugcccugccu

SEQ ID NO: 2638200 - RNA, 19 nt, Artificial Sequence
  Description of Artificial Sequence: Synthetic oligonucleotide
ggccguacaaguggguacu

SEQ ID NO: 2638201 - RNA, 19 nt, Artificial Sequence
  Description of Artificial Sequence: Synthetic oligonucleotide
uggccuggaaggggauauu

SEQ ID NO: 2638202 - RNA, 19 nt, Artificial Sequence
  Description of Artificial Sequence: Synthetic oligonucleotide
acagugcauugaaggcuuu

SEQ ID NO: 2638203 - RNA, 19 nt, Artificial Sequence
  Description of Artificial Sequence: Synthetic oligonucleotide
gcuuggugacaaaguccac

SEQ ID NO: 2638204 - RNA, 19 nt, Artificial Sequence
  Description of Artificial Sequence: Synthetic oligonucleotide
cuguuucuuccgagugggu

SEQ ID NO: 2638205 - RNA, 19 nt, Artificial Sequence
  Description of Artificial Sequence: Synthetic oligonucleotide
gacccaugggagaccuccu

SEQ ID NO: 2638206 - RNA, 19 nt, Artificial Sequence
  Description of Artificial Sequence: Synthetic oligonucleotide
gcccguucggagauucgca

SEQ ID NO: 2638207 - RNA, 19 nt, Artificial Sequence
  Description of Artificial Sequence: Synthetic oligonucleotide
cuucuuuggcaggcgcacu

SEQ ID NO: 2638208 - RNA, 19 nt, Artificial Sequence
  Description of Artificial Sequence: Synthetic oligonucleotide
gccguacaaguggguacug

SEQ ID NO: 2638209 - RNA, 19 nt, Artificial Sequence
  Description of Artificial Sequence: Synthetic oligonucleotide
cgaagccccugugugcgcc

SEQ ID NO: 2638210 - RNA, 19 nt, Artificial Sequence
  Description of Artificial Sequence: Synthetic oligonucleotide
ggugucaaggaggcuuagu

SEQ ID NO: 2638211 - RNA, 19 nt, Artificial Sequence
  Description of Artificial Sequence: Synthetic oligonucleotide
gugcuagaucacagcugaa

SEQ ID NO: 2638212 - RNA, 19 nt, Artificial Sequence
  Description of Artificial Sequence: Synthetic oligonucleotide
ccccugugugcgccugucc

SEQ ID NO: 2638213 - RNA, 19 nt, Artificial Sequence
  Description of Artificial Sequence: Synthetic oligonucleotide
caugcccugccuggcccca

SEQ ID NO: 2638214 - RNA, 19 nt, Artificial Sequence
  Description of Artificial Sequence: Synthetic oligonucleotide
cgucguccccgucuuccag

SEQ ID NO: 2638215 - RNA, 19 nt, Artificial Sequence
  Description of Artificial Sequence: Synthetic oligonucleotide
cccaaaccccauugaaagu

SEQ ID NO: 2638216 - RNA, 19 nt, Artificial Sequence
  Description of Artificial Sequence: Synthetic oligonucleotide
ccgaagccccugugugcgc

SEQ ID NO: 2638217 - RNA, 19 nt, Artificial Sequence
  Description of Artificial Sequence: Synthetic oligonucleotide
gugcgccugucccugucau

SEQ ID NO: 2638218 - RNA, 19 nt, Artificial Sequence
  Description of Artificial Sequence: Synthetic oligonucleotide
ccagaaucuuggagguugu

SEQ ID NO: 2638219 - RNA, 19 nt, Artificial Sequence
  Description of Artificial Sequence: Synthetic oligonucleotide
guacugugacacagugcau

SEQ ID NO: 2638220 - RNA, 19 nt, Artificial Sequence
  Description of Artificial Sequence: Synthetic oligonucleotide
aguggcccguucggagauu

SEQ ID NO: 2638221 - RNA, 19 nt, Artificial Sequence
  Description of Artificial Sequence: Synthetic oligonucleotide
ccuggccccagggcccugg

SEQ ID NO: 2638222 - RNA, 19 nt, Artificial Sequence
  Description of Artificial Sequence: Synthetic oligonucleotide
gcacuccugcuuuacucuu

SEQ ID NO: 2638223 - RNA, 19 nt, Artificial Sequence
  Description of Artificial Sequence: Synthetic oligonucleotide
caccucugagucugcccau

SEQ ID NO: 2638224 - RNA, 19 nt, Artificial Sequence
  Description of Artificial Sequence: Synthetic oligonucleotide
ccugugugcgccugucccu

SEQ ID NO: 2638225 - RNA, 19 nt, Artificial Sequence
  Description of Artificial Sequence: Synthetic oligonucleotide
acgugacccuggagcugcu

SEQ ID NO: 2638226 - RNA, 19 nt, Artificial Sequence
  Description of Artificial Sequence: Synthetic oligonucleotide
ccguucggagauucgcacu

SEQ ID NO: 2638227 - RNA, 19 nt, Artificial Sequence
  Description of Artificial Sequence: Synthetic oligonucleotide
ggggcucuuggaagugucu

SEQ ID NO: 2638228 - RNA, 19 nt, Artificial Sequence
  Description of Artificial Sequence: Synthetic oligonucleotide
gcugaagagcuugcucgau

SEQ ID NO: 2638229 - RNA, 19 nt, Artificial Sequence
  Description of Artificial Sequence: Synthetic oligonucleotide
cguucggagauucgcacuu

SEQ ID NO: 2638230 - RNA, 19 nt, Artificial Sequence
  Description of Artificial Sequence: Synthetic oligonucleotide
ccggccguacaagugggua

SEQ ID NO: 2638231 - RNA, 19 nt, Artificial Sequence
  Description of Artificial Sequence: Synthetic oligonucleotide
gccccugugugcgccuguc

SEQ ID NO: 2638232 - RNA, 19 nt, Artificial Sequence
  Description of Artificial Sequence: Synthetic oligonucleotide
cuccugcuuuacucuucuu

SEQ ID NO: 2638233 - RNA, 19 nt, Artificial Sequence
  Description of Artificial Sequence: Synthetic oligonucleotide
caccagaaucuuggagguu

SEQ ID NO: 2638234 - RNA, 19 nt, Artificial Sequence
  Description of Artificial Sequence: Synthetic oligonucleotide
ggaggcuuaguggcccguu

SEQ ID NO: 2638235 - RNA, 19 nt, Artificial Sequence
  Description of Artificial Sequence: Synthetic oligonucleotide
ccguacaaguggguacugu

SEQ ID NO: 2638236 - RNA, 19 nt, Artificial Sequence
  Description of Artificial Sequence: Synthetic oligonucleotide
cccuggagccacacacccu

SEQ ID NO: 2638237 - RNA, 19 nt, Artificial Sequence
  Description of Artificial Sequence: Synthetic oligonucleotide
ccaacacugcagaccgcuu

SEQ ID NO: 2638238 - RNA, 19 nt, Artificial Sequence
  Description of Artificial Sequence: Synthetic oligonucleotide
cccucugguuggccuggaa

SEQ ID NO: 2638239 - RNA, 19 nt, Artificial Sequence
  Description of Artificial Sequence: Synthetic oligonucleotide
cccggaucucccucugguu

SEQ ID NO: 2638240 - RNA, 19 nt, Artificial Sequence
  Description of Artificial Sequence: Synthetic oligonucleotide
cgccugucccugucaucuu

SEQ ID NO: 2638241 - RNA, 19 nt, Artificial Sequence
  Description of Artificial Sequence: Synthetic oligonucleotide
cgugacccuggagcugcuu

SEQ ID NO: 2638242 - RNA, 19 nt, Artificial Sequence
  Description of Artificial Sequence: Synthetic oligonucleotide
uucucgaucucccugagcg

SEQ ID NO: 2638243 - RNA, 19 nt, Artificial Sequence
  Description of Artificial Sequence: Synthetic oligonucleotide
ugugucuucaggcagagug

SEQ ID NO: 2638244 - RNA, 19 nt, Artificial Sequence
  Description of Artificial Sequence: Synthetic oligonucleotide
aaggagaucauaggcaggc

SEQ ID NO: 2638245 - RNA, 19 nt, Artificial Sequence
  Description of Artificial Sequence: Synthetic oligonucleotide
uugcugauggccuuuaggg

SEQ ID NO: 2638246 - RNA, 19 nt, Artificial Sequence
  Description of Artificial Sequence: Synthetic oligonucleotide
uguuucaccagcuugcuga

SEQ ID NO: 2638247 - RNA, 19 nt, Artificial Sequence
  Description of Artificial Sequence: Synthetic oligonucleotide
caagaugucacugaugucc

SEQ ID NO: 2638248 - RNA, 19 nt, Artificial Sequence
  Description of Artificial Sequence: Synthetic oligonucleotide
ucaagaaggagaucauagg

SEQ ID NO: 2638249 - RNA, 19 nt, Artificial Sequence
  Description of Artificial Sequence: Synthetic oligonucleotide
agaaggagaucauaggcag

SEQ ID NO: 2638250 - RNA, 19 nt, Artificial Sequence
  Description of Artificial Sequence: Synthetic oligonucleotide
aacguaaggguggaagugc

SEQ ID NO: 2638251 - RNA, 19 nt, Artificial Sequence
  Description of Artificial Sequence: Synthetic oligonucleotide
caagaaggagaucauaggc

SEQ ID NO: 2638252 - RNA, 19 nt, Artificial Sequence
  Description of Artificial Sequence: Synthetic oligonucleotide
ugauagagcgagcaaagcu

SEQ ID NO: 2638253 - RNA, 19 nt, Artificial Sequence
  Description of Artificial Sequence: Synthetic oligonucleotide
acuccuuggagucaggcag

SEQ ID NO: 2638254 - RNA, 19 nt, Artificial Sequence
  Description of Artificial Sequence: Synthetic oligonucleotide
augacaaaccccuuguacu

SEQ ID NO: 2638255 - RNA, 19 nt, Artificial Sequence
  Description of Artificial Sequence: Synthetic oligonucleotide
aggaucaagaaggagauca

SEQ ID NO: 2638256 - RNA, 19 nt, Artificial Sequence
  Description of Artificial Sequence: Synthetic oligonucleotide
uguuccuccaagaugucac

SEQ ID NO: 2638257 - RNA, 19 nt, Artificial Sequence
  Description of Artificial Sequence: Synthetic oligonucleotide
guugaccuuacugaaaucc

SEQ ID NO: 2638258 - RNA, 19 nt, Artificial Sequence
  Description of Artificial Sequence: Synthetic oligonucleotide
uacauugccuuccaccgcc

SEQ ID NO: 2638259 - RNA, 19 nt, Artificial Sequence
  Description of Artificial Sequence: Synthetic oligonucleotide
uguucgacagcuucugcag

SEQ ID NO: 2638260 - RNA, 19 nt, Artificial Sequence
  Description of Artificial Sequence: Synthetic oligonucleotide
ugaccuuacugaaauccag

SEQ ID NO: 2638261 - RNA, 19 nt, Artificial Sequence
  Description of Artificial Sequence: Synthetic oligonucleotide
acggcuggcagcuuuguac

SEQ ID NO: 2638262 - RNA, 19 nt, Artificial Sequence
  Description of Artificial Sequence: Synthetic oligonucleotide
aucaagaaggagaucauag

SEQ ID NO: 2638263 - RNA, 19 nt, Artificial Sequence
  Description of Artificial Sequence: Synthetic oligonucleotide
gacuuguugaccuuacuga

SEQ ID NO: 2638264 - RNA, 19 nt, Artificial Sequence
  Description of Artificial Sequence: Synthetic oligonucleotide
gaaaccagccaguuucucc

SEQ ID NO: 2638265 - RNA, 19 nt, Artificial Sequence
  Description of Artificial Sequence: Synthetic oligonucleotide
uuguugaccuuacugaaau

SEQ ID NO: 2638266 - RNA, 19 nt, Artificial Sequence
  Description of Artificial Sequence: Synthetic oligonucleotide
ugugcgcuccauuuugugg

SEQ ID NO: 2638267 - RNA, 19 nt, Artificial Sequence
  Description of Artificial Sequence: Synthetic oligonucleotide
caggaaaccagccaguuuc

SEQ ID NO: 2638268 - RNA, 19 nt, Artificial Sequence
  Description of Artificial Sequence: Synthetic oligonucleotide
uuacugaaauccagcugcg

SEQ ID NO: 2638269 - RNA, 19 nt, Artificial Sequence
  Description of Artificial Sequence: Synthetic oligonucleotide
uucgacagcuucugcaggg

SEQ ID NO: 2638270 - RNA, 19 nt, Artificial Sequence
  Description of Artificial Sequence: Synthetic oligonucleotide
aagaaggagaucauaggca

SEQ ID NO: 2638271 - RNA, 19 nt, Artificial Sequence
  Description of Artificial Sequence: Synthetic oligonucleotide
aguguaucugucaggagcg

SEQ ID NO: 2638272 - RNA, 19 nt, Artificial Sequence
  Description of Artificial Sequence: Synthetic oligonucleotide
uguccagcuacacaucugu

SEQ ID NO: 2638273 - RNA, 19 nt, Artificial Sequence
  Description of Artificial Sequence: Synthetic oligonucleotide
gaagcugcguccaccaugg

SEQ ID NO: 2638274 - RNA, 19 nt, Artificial Sequence
  Description of Artificial Sequence: Synthetic oligonucleotide
auagagcgagcaaagcucc

SEQ ID NO: 2638275 - RNA, 19 nt, Artificial Sequence
  Description of Artificial Sequence: Synthetic oligonucleotide
gauagagcgagcaaagcuc

SEQ ID NO: 2638276 - RNA, 19 nt, Artificial Sequence
  Description of Artificial Sequence: Synthetic oligonucleotide
ugaagcugcguccaccaug

SEQ ID NO: 2638277 - RNA, 19 nt, Artificial Sequence
  Description of Artificial Sequence: Synthetic oligonucleotide
aaccccuuguacuccuugg

SEQ ID NO: 2638278 - RNA, 19 nt, Artificial Sequence
  Description of Artificial Sequence: Synthetic oligonucleotide
uuuagggcacggcuggcag

SEQ ID NO: 2638279 - RNA, 19 nt, Artificial Sequence
  Description of Artificial Sequence: Synthetic oligonucleotide
cugcuugaaggacugaagc

SEQ ID NO: 2638280 - RNA, 19 nt, Artificial Sequence
  Description of Artificial Sequence: Synthetic oligonucleotide
uugaccuuacugaaaucca

SEQ ID NO: 2638281 - RNA, 19 nt, Artificial Sequence
  Description of Artificial Sequence: Synthetic oligonucleotide
cacuguuucaccagcuugc

SEQ ID NO: 2638282 - RNA, 19 nt, Artificial Sequence
  Description of Artificial Sequence: Synthetic oligonucleotide
agcaguaggcaacguaagg

SEQ ID NO: 2638283 - RNA, 19 nt, Artificial Sequence
  Description of Artificial Sequence: Synthetic oligonucleotide
gugcgcuccauuuuguggg

SEQ ID NO: 2638284 - RNA, 19 nt, Artificial Sequence
  Description of Artificial Sequence: Synthetic oligonucleotide
ugguagaccucguuggagc

SEQ ID NO: 2638285 - RNA, 19 nt, Artificial Sequence
  Description of Artificial Sequence: Synthetic oligonucleotide
aaccacuugcugcuugaag

SEQ ID NO: 2638286 - RNA, 19 nt, Artificial Sequence
  Description of Artificial Sequence: Synthetic oligonucleotide
ugcaguguguacaucugcu

SEQ ID NO: 2638287 - RNA, 19 nt, Artificial Sequence
  Description of Artificial Sequence: Synthetic oligonucleotide
cuacacaucugucuccacc

SEQ ID NO: 2638288 - RNA, 19 nt, Artificial Sequence
  Description of Artificial Sequence: Synthetic oligonucleotide
uccagcuacacaucugucu

SEQ ID NO: 2638289 - RNA, 19 nt, Artificial Sequence
  Description of Artificial Sequence: Synthetic oligonucleotide
uucgggauggcccuguguc

SEQ ID NO: 2638290 - RNA, 19 nt, Artificial Sequence
  Description of Artificial Sequence: Synthetic oligonucleotide
acccguagccgcuccaucc

SEQ ID NO: 2638291 - RNA, 19 nt, Artificial Sequence
  Description of Artificial Sequence: Synthetic oligonucleotide
ucucccugagcgcuucucg

SEQ ID NO: 2638292 - RNA, 19 nt, Artificial Sequence
  Description of Artificial Sequence: Synthetic oligonucleotide
cuuuguaccuuucgggaug

SEQ ID NO: 2638293 - RNA, 19 nt, Artificial Sequence
  Description of Artificial Sequence: Synthetic oligonucleotide
aguguguacaucugcucug

SEQ ID NO: 2638294 - RNA, 19 nt, Artificial Sequence
  Description of Artificial Sequence: Synthetic oligonucleotide
uuuguaccuuucgggaugg

SEQ ID NO: 2638295 - RNA, 19 nt, Artificial Sequence
  Description of Artificial Sequence: Synthetic oligonucleotide
cauggggaggaucaagaag

SEQ ID NO: 2638296 - RNA, 19 nt, Artificial Sequence
  Description of Artificial Sequence: Synthetic oligonucleotide
ugacaaaccccuuguacuc

SEQ ID NO: 2638297 - RNA, 19 nt, Artificial Sequence
  Description of Artificial Sequence: Synthetic oligonucleotide
guaggcaacguaagggugg

SEQ ID NO: 2638298 - RNA, 19 nt, Artificial Sequence
  Description of Artificial Sequence: Synthetic oligonucleotide
ucaggcagaguguaucugu

SEQ ID NO: 2638299 - RNA, 19 nt, Artificial Sequence
  Description of Artificial Sequence: Synthetic oligonucleotide
aaauccagcugcgugugca

SEQ ID NO: 2638300 - RNA, 19 nt, Artificial Sequence
  Description of Artificial Sequence: Synthetic oligonucleotide
cuguguugcuguucgacag

SEQ ID NO: 2638301 - RNA, 19 nt, Artificial Sequence
  Description of Artificial Sequence: Synthetic oligonucleotide
ugugcaguguguacaucug

SEQ ID NO: 2638302 - RNA, 19 nt, Artificial Sequence
  Description of Artificial Sequence: Synthetic oligonucleotide
accuuacugaaauccagcu

SEQ ID NO: 2638303 - RNA, 19 nt, Artificial Sequence
  Description of Artificial Sequence: Synthetic oligonucleotide
ugucaggagcggcagccgg

SEQ ID NO: 2638304 - RNA, 19 nt, Artificial Sequence
  Description of Artificial Sequence: Synthetic oligonucleotide
auugccuuccaccgccacg

SEQ ID NO: 2638305 - RNA, 19 nt, Artificial Sequence
  Description of Artificial Sequence: Synthetic oligonucleotide
guugcuguucgacagcuuc

SEQ ID NO: 2638306 - RNA, 19 nt, Artificial Sequence
  Description of Artificial Sequence: Synthetic oligonucleotide
uguguugcuguucgacagc

SEQ ID NO: 2638307 - RNA, 19 nt, Artificial Sequence
  Description of Artificial Sequence: Synthetic oligonucleotide
ugcugauggccuuuagggc

SEQ ID NO: 2638308 - RNA, 19 nt, Artificial Sequence
  Description of Artificial Sequence: Synthetic oligonucleotide
gagaucauaggcaggcccc

SEQ ID NO: 2638309 - RNA, 19 nt, Artificial Sequence
  Description of Artificial Sequence: Synthetic oligonucleotide
agcaaagcuccucaggaaa

SEQ ID NO: 2638310 - RNA, 19 nt, Artificial Sequence
  Description of Artificial Sequence: Synthetic oligonucleotide
ucccaugacaaaccccuug

SEQ ID NO: 2638311 - RNA, 19 nt, Artificial Sequence
  Description of Artificial Sequence: Synthetic oligonucleotide
guaccuuucgggauggccc

SEQ ID NO: 2638312 - RNA, 19 nt, Artificial Sequence
  Description of Artificial Sequence: Synthetic oligonucleotide
gaaggacugaagcugcguc

SEQ ID NO: 2638313 - RNA, 19 nt, Artificial Sequence
  Description of Artificial Sequence: Synthetic oligonucleotide
uccaucccgaagcuccccg

SEQ ID NO: 2638314 - RNA, 19 nt, Artificial Sequence
  Description of Artificial Sequence: Synthetic oligonucleotide
gaacuguccagcuacacau

SEQ ID NO: 2638315 - RNA, 19 nt, Artificial Sequence
  Description of Artificial Sequence: Synthetic oligonucleotide
uguaccuuucgggauggcc

SEQ ID NO: 2638316 - RNA, 19 nt, Artificial Sequence
  Description of Artificial Sequence: Synthetic oligonucleotide
guugcacuguuucaccagc

SEQ ID NO: 2638317 - RNA, 19 nt, Artificial Sequence
  Description of Artificial Sequence: Synthetic oligonucleotide
ggacuuguugaccuuacug

SEQ ID NO: 2638318 - RNA, 19 nt, Artificial Sequence
  Description of Artificial Sequence: Synthetic oligonucleotide
ugaaauccagcugcgugug

SEQ ID NO: 2638319 - RNA, 19 nt, Artificial Sequence
  Description of Artificial Sequence: Synthetic oligonucleotide
uggccuuuagggcacggcu

SEQ ID NO: 2638320 - RNA, 19 nt, Artificial Sequence
  Description of Artificial Sequence: Synthetic oligonucleotide
gaccuuacugaaauccagc

SEQ ID NO: 2638321 - RNA, 19 nt, Artificial Sequence
  Description of Artificial Sequence: Synthetic oligonucleotide
uccaccgccacgcgacugg

SEQ ID NO: 2638322 - RNA, 19 nt, Artificial Sequence
  Description of Artificial Sequence: Synthetic oligonucleotide
acugaagcugcguccacca

SEQ ID NO: 2638323 - RNA, 19 nt, Artificial Sequence
  Description of Artificial Sequence: Synthetic oligonucleotide
gcaguaggcaacguaaggg

SEQ ID NO: 2638324 - RNA, 19 nt, Artificial Sequence
  Description of Artificial Sequence: Synthetic oligonucleotide
gccagcgugaggcagagag

SEQ ID NO: 2638325 - RNA, 19 nt, Artificial Sequence
  Description of Artificial Sequence: Synthetic oligonucleotide
ucuucaggcagaguguauc

SEQ ID NO: 2638326 - RNA, 19 nt, Artificial Sequence
  Description of Artificial Sequence: Synthetic oligonucleotide
acuggugauagagcgagca

SEQ ID NO: 2638327 - RNA, 19 nt, Artificial Sequence
  Description of Artificial Sequence: Synthetic oligonucleotide
gaaggagaucauaggcagg

SEQ ID NO: 2638328 - RNA, 19 nt, Artificial Sequence
  Description of Artificial Sequence: Synthetic oligonucleotide
uggugauagagcgagcaaa

SEQ ID NO: 2638329 - RNA, 19 nt, Artificial Sequence
  Description of Artificial Sequence: Synthetic oligonucleotide
uugccuuccaccgccacgc

SEQ ID NO: 2638330 - RNA, 19 nt, Artificial Sequence
  Description of Artificial Sequence: Synthetic oligonucleotide
guuggagcaguaggcaacg

SEQ ID NO: 2638331 - RNA, 19 nt, Artificial Sequence
  Description of Artificial Sequence: Synthetic oligonucleotide
cguacauugccuuccaccg

SEQ ID NO: 2638332 - RNA, 19 nt, Artificial Sequence
  Description of Artificial Sequence: Synthetic oligonucleotide
ucacccucugcauggggag

SEQ ID NO: 2638333 - RNA, 19 nt, Artificial Sequence
  Description of Artificial Sequence: Synthetic oligonucleotide
uguaucugucaggagcggc

SEQ ID NO: 2638334 - RNA, 19 nt, Artificial Sequence
  Description of Artificial Sequence: Synthetic oligonucleotide
aaagcuccucaggaaacca

SEQ ID NO: 2638335 - RNA, 19 nt, Artificial Sequence
  Description of Artificial Sequence: Synthetic oligonucleotide
acacgcaggccguuucucg

SEQ ID NO: 2638336 - RNA, 19 nt, Artificial Sequence
  Description of Artificial Sequence: Synthetic oligonucleotide
cacgcgacuggugauagag

SEQ ID NO: 2638337 - RNA, 19 nt, Artificial Sequence
  Description of Artificial Sequence: Synthetic oligonucleotide
uggcccugugucuucaggc

SEQ ID NO: 2638338 - RNA, 19 nt, Artificial Sequence
  Description of Artificial Sequence: Synthetic oligonucleotide
cucguugcacuguuucacc

SEQ ID NO: 2638339 - RNA, 19 nt, Artificial Sequence
  Description of Artificial Sequence: Synthetic oligonucleotide
cuccauccugcguacauug

SEQ ID NO: 2638340 - RNA, 19 nt, Artificial Sequence
  Description of Artificial Sequence: Synthetic oligonucleotide
uacuccuuggagucaggca

SEQ ID NO: 2638341 - RNA, 19 nt, Artificial Sequence
  Description of Artificial Sequence: Synthetic oligonucleotide
agugcuucuccgcguguuc

SEQ ID NO: 2638342 - RNA, 19 nt, Artificial Sequence
  Description of Artificial Sequence: Synthetic oligonucleotide
ugcgugugcaguguguaca

SEQ ID NO: 2638343 - RNA, 19 nt, Artificial Sequence
  Description of Artificial Sequence: Synthetic oligonucleotide
cugagcgcuucucggaagg

SEQ ID NO: 2638344 - RNA, 19 nt, Artificial Sequence
  Description of Artificial Sequence: Synthetic oligonucleotide
acacaucugucuccacccg

SEQ ID NO: 2638345 - RNA, 19 nt, Artificial Sequence
  Description of Artificial Sequence: Synthetic oligonucleotide
uuucagaacuguccagcua

SEQ ID NO: 2638346 - RNA, 19 nt, Artificial Sequence
  Description of Artificial Sequence: Synthetic oligonucleotide
ucguugcacuguuucacca

SEQ ID NO: 2638347 - RNA, 19 nt, Artificial Sequence
  Description of Artificial Sequence: Synthetic oligonucleotide
uaaggguggaagugcuucu

SEQ ID NO: 2638348 - RNA, 19 nt, Artificial Sequence
  Description of Artificial Sequence: Synthetic oligonucleotide
ucagaacuguccagcuaca

SEQ ID NO: 2638349 - RNA, 19 nt, Artificial Sequence
  Description of Artificial Sequence: Synthetic oligonucleotide
agcugcguccaccauggug

SEQ ID NO: 2638350 - RNA, 19 nt, Artificial Sequence
  Description of Artificial Sequence: Synthetic oligonucleotide
agaaccacuugcugcuuga

SEQ ID NO: 2638351 - RNA, 19 nt, Artificial Sequence
  Description of Artificial Sequence: Synthetic oligonucleotide
aucccgaagcuccccgcgc

SEQ ID NO: 2638352 - RNA, 19 nt, Artificial Sequence
  Description of Artificial Sequence: Synthetic oligonucleotide
uaucugucaggagcggcag

SEQ ID NO: 2638353 - RNA, 19 nt, Artificial Sequence
  Description of Artificial Sequence: Synthetic oligonucleotide
gguuucagaacuguccagc

SEQ ID NO: 2638354 - RNA, 19 nt, Artificial Sequence
  Description of Artificial Sequence: Synthetic oligonucleotide
uugcuguucgacagcuucu

SEQ ID NO: 2638355 - RNA, 19 nt, Artificial Sequence
  Description of Artificial Sequence: Synthetic oligonucleotide
uuucucgaucucccugagc

SEQ ID NO: 2638356 - RNA, 19 nt, Artificial Sequence
  Description of Artificial Sequence: Synthetic oligonucleotide
ggugauagagcgagcaaag

SEQ ID NO: 2638357 - RNA, 19 nt, Artificial Sequence
  Description of Artificial Sequence: Synthetic oligonucleotide
aucugucaggagcggcagc

SEQ ID NO: 2638358 - RNA, 19 nt, Artificial Sequence
  Description of Artificial Sequence: Synthetic oligonucleotide
caaagcuccucaggaaacc

SEQ ID NO: 2638359 - RNA, 19 nt, Artificial Sequence
  Description of Artificial Sequence: Synthetic oligonucleotide
aggccguuucucgaucucc

SEQ ID NO: 2638360 - RNA, 19 nt, Artificial Sequence
  Description of Artificial Sequence: Synthetic oligonucleotide
agagcgagcaaagcuccuc

SEQ ID NO: 2638361 - RNA, 19 nt, Artificial Sequence
  Description of Artificial Sequence: Synthetic oligonucleotide
cucugcauggggaggauca

SEQ ID NO: 2638362 - RNA, 19 nt, Artificial Sequence
  Description of Artificial Sequence: Synthetic oligonucleotide
cagcgugaggcagagagug

SEQ ID NO: 2638363 - RNA, 19 nt, Artificial Sequence
  Description of Artificial Sequence: Synthetic oligonucleotide
uggagcaguaggcaacgua

SEQ ID NO: 2638364 - RNA, 19 nt, Artificial Sequence
  Description of Artificial Sequence: Synthetic oligonucleotide
aguaggcaacguaagggug

SEQ ID NO: 2638365 - RNA, 19 nt, Artificial Sequence
  Description of Artificial Sequence: Synthetic oligonucleotide
acaaaccccuuguacuccu

SEQ ID NO: 2638366 - RNA, 19 nt, Artificial Sequence
  Description of Artificial Sequence: Synthetic oligonucleotide
caugguggguuucagaacu

SEQ ID NO: 2638367 - RNA, 19 nt, Artificial Sequence
  Description of Artificial Sequence: Synthetic oligonucleotide
uccagcugcgugugcagug

SEQ ID NO: 2638368 - RNA, 19 nt, Artificial Sequence
  Description of Artificial Sequence: Synthetic oligonucleotide
cucccugagcgcuucucgg

SEQ ID NO: 2638369 - RNA, 19 nt, Artificial Sequence
  Description of Artificial Sequence: Synthetic oligonucleotide
cuguucgacagcuucugca

SEQ ID NO: 2638370 - RNA, 19 nt, Artificial Sequence
  Description of Artificial Sequence: Synthetic oligonucleotide
gggaggaucaagaaggaga

SEQ ID NO: 2638371 - RNA, 19 nt, Artificial Sequence
  Description of Artificial Sequence: Synthetic oligonucleotide
gcguacauugccuuccacc

SEQ ID NO: 2638372 - RNA, 19 nt, Artificial Sequence
  Description of Artificial Sequence: Synthetic oligonucleotide
aggagaucauaggcaggcc

SEQ ID NO: 2638373 - RNA, 19 nt, Artificial Sequence
  Description of Artificial Sequence: Synthetic oligonucleotide
accgccacgcgacugguga

SEQ ID NO: 2638374 - RNA, 19 nt, Artificial Sequence
  Description of Artificial Sequence: Synthetic oligonucleotide
uaccuuucgggauggcccu

SEQ ID NO: 2638375 - RNA, 19 nt, Artificial Sequence
  Description of Artificial Sequence: Synthetic oligonucleotide
uccauccugcguacauugc

SEQ ID NO: 2638376 - RNA, 19 nt, Artificial Sequence
  Description of Artificial Sequence: Synthetic oligonucleotide
ucguuggagcaguaggcaa

SEQ ID NO: 2638377 - RNA, 19 nt, Artificial Sequence
  Description of Artificial Sequence: Synthetic oligonucleotide
caacguaaggguggaagug

SEQ ID NO: 2638378 - RNA, 19 nt, Artificial Sequence
  Description of Artificial Sequence: Synthetic oligonucleotide
agucaggcagaaccacuug

SEQ ID NO: 2638379 - RNA, 19 nt, Artificial Sequence
  Description of Artificial Sequence: Synthetic oligonucleotide
gagcaguaggcaacguaag

SEQ ID NO: 2638380 - RNA, 19 nt, Artificial Sequence
  Description of Artificial Sequence: Synthetic oligonucleotide
ggcaacguaaggguggaag

SEQ ID NO: 2638381 - RNA, 19 nt, Artificial Sequence
  Description of Artificial Sequence: Synthetic oligonucleotide
ugcuguucgacagcuucug

SEQ ID NO: 2638382 - RNA, 19 nt, Artificial Sequence
  Description of Artificial Sequence: Synthetic oligonucleotide
ucuccaucccgaagcuccc

SEQ ID NO: 2638383 - RNA, 19 nt, Artificial Sequence
  Description of Artificial Sequence: Synthetic oligonucleotide
cagaguguaucugucagga

SEQ ID NO: 2638384 - RNA, 19 nt, Artificial Sequence
  Description of Artificial Sequence: Synthetic oligonucleotide
ggcagcuuuguaccuuucg

SEQ ID NO: 2638385 - RNA, 19 nt, Artificial Sequence
  Description of Artificial Sequence: Synthetic oligonucleotide
ucaggaaaccagccaguuu

SEQ ID NO: 2638386 - RNA, 19 nt, Artificial Sequence
  Description of Artificial Sequence: Synthetic oligonucleotide
gugcaguguguacaucugc

SEQ ID NO: 2638387 - RNA, 19 nt, Artificial Sequence
  Description of Artificial Sequence: Synthetic oligonucleotide
uucaggcagaguguaucug

SEQ ID NO: 2638388 - RNA, 19 nt, Artificial Sequence
  Description of Artificial Sequence: Synthetic oligonucleotide
ucucgaucucccugagcgc

SEQ ID NO: 2638389 - RNA, 19 nt, Artificial Sequence
  Description of Artificial Sequence: Synthetic oligonucleotide
guacauugccuuccaccgc

SEQ ID NO: 2638390 - RNA, 19 nt, Artificial Sequence
  Description of Artificial Sequence: Synthetic oligonucleotide
auggccuuuagggcacggc

SEQ ID NO: 2638391 - RNA, 19 nt, Artificial Sequence
  Description of Artificial Sequence: Synthetic oligonucleotide
gacugaagcugcguccacc

SEQ ID NO: 2638392 - RNA, 19 nt, Artificial Sequence
  Description of Artificial Sequence: Synthetic oligonucleotide
uuagggcacggcuggcagc

SEQ ID NO: 2638393 - RNA, 19 nt, Artificial Sequence
  Description of Artificial Sequence: Synthetic oligonucleotide
caucccgaagcuccccgcg

SEQ ID NO: 2638394 - RNA, 19 nt, Artificial Sequence
  Description of Artificial Sequence: Synthetic oligonucleotide
agccgggucacccucugca

SEQ ID NO: 2638395 - RNA, 19 nt, Artificial Sequence
  Description of Artificial Sequence: Synthetic oligonucleotide
ugaaggacugaagcugcgu

SEQ ID NO: 2638396 - RNA, 19 nt, Artificial Sequence
  Description of Artificial Sequence: Synthetic oligonucleotide
uuucgggauggcccugugu

SEQ ID NO: 2638397 - RNA, 19 nt, Artificial Sequence
  Description of Artificial Sequence: Synthetic oligonucleotide
uguugaccuuacugaaauc

SEQ ID NO: 2638398 - RNA, 19 nt, Artificial Sequence
  Description of Artificial Sequence: Synthetic oligonucleotide
uggaagugcuucuccgcgu

SEQ ID NO: 2638399 - RNA, 19 nt, Artificial Sequence
  Description of Artificial Sequence: Synthetic oligonucleotide
cagcuacacaucugucucc

SEQ ID NO: 2638400 - RNA, 19 nt, Artificial Sequence
  Description of Artificial Sequence: Synthetic oligonucleotide
gcagaguguaucugucagg

SEQ ID NO: 2638401 - RNA, 19 nt, Artificial Sequence
  Description of Artificial Sequence: Synthetic oligonucleotide
gccuuuagggcacggcugg

SEQ ID NO: 2638402 - RNA, 19 nt, Artificial Sequence
  Description of Artificial Sequence: Synthetic oligonucleotide
guuucucgaucucccugag

SEQ ID NO: 2638403 - RNA, 19 nt, Artificial Sequence
  Description of Artificial Sequence: Synthetic oligonucleotide
ugcacuguuucaccagcuu

SEQ ID NO: 2638404 - RNA, 19 nt, Artificial Sequence
  Description of Artificial Sequence: Synthetic oligonucleotide
gaaauccagcugcgugugc

SEQ ID NO: 2638405 - RNA, 19 nt, Artificial Sequence
  Description of Artificial Sequence: Synthetic oligonucleotide
uagaccucguuggagcagu

SEQ ID NO: 2638406 - RNA, 19 nt, Artificial Sequence
  Description of Artificial Sequence: Synthetic oligonucleotide
gagcgagcaaagcuccuca

SEQ ID NO: 2638407 - RNA, 19 nt, Artificial Sequence
  Description of Artificial Sequence: Synthetic oligonucleotide
uccgcguguuccuccaaga

SEQ ID NO: 2638408 - RNA, 19 nt, Artificial Sequence
  Description of Artificial Sequence: Synthetic oligonucleotide
agcggcagccgggucaccc

SEQ ID NO: 2638409 - RNA, 19 nt, Artificial Sequence
  Description of Artificial Sequence: Synthetic oligonucleotide
gguggaagugcuucuccgc

SEQ ID NO: 2638410 - RNA, 19 nt, Artificial Sequence
  Description of Artificial Sequence: Synthetic oligonucleotide
guacaucugcucugugcgc

SEQ ID NO: 2638411 - RNA, 19 nt, Artificial Sequence
  Description of Artificial Sequence: Synthetic oligonucleotide
caggcagaaccacuugcug

SEQ ID NO: 2638412 - RNA, 19 nt, Artificial Sequence
  Description of Artificial Sequence: Synthetic oligonucleotide
aggagcggcagccggguca

SEQ ID NO: 2638413 - RNA, 19 nt, Artificial Sequence
  Description of Artificial Sequence: Synthetic oligonucleotide
ugucuucaggcagagugua

SEQ ID NO: 2638414 - RNA, 19 nt, Artificial Sequence
  Description of Artificial Sequence: Synthetic oligonucleotide
gcacuguuucaccagcuug

SEQ ID NO: 2638415 - RNA, 19 nt, Artificial Sequence
  Description of Artificial Sequence: Synthetic oligonucleotide
agcuacacaucugucucca

SEQ ID NO: 2638416 - RNA, 19 nt, Artificial Sequence
  Description of Artificial Sequence: Synthetic oligonucleotide
aggcagaguguaucuguca

SEQ ID NO: 2638417 - RNA, 19 nt, Artificial Sequence
  Description of Artificial Sequence: Synthetic oligonucleotide
guaucugucaggagcggca

SEQ ID NO: 2638418 - RNA, 19 nt, Artificial Sequence
  Description of Artificial Sequence: Synthetic oligonucleotide
cuucuccgcguguuccucc

SEQ ID NO: 2638419 - RNA, 19 nt, Artificial Sequence
  Description of Artificial Sequence: Synthetic oligonucleotide
gugauagagcgagcaaagc

SEQ ID NO: 2638420 - RNA, 19 nt, Artificial Sequence
  Description of Artificial Sequence: Synthetic oligonucleotide
cugaaauccagcugcgugu

SEQ ID NO: 2638421 - RNA, 19 nt, Artificial Sequence
  Description of Artificial Sequence: Synthetic oligonucleotide
gugugcaguguguacaucu

SEQ ID NO: 2638422 - RNA, 19 nt, Artificial Sequence
  Description of Artificial Sequence: Synthetic oligonucleotide
ucccugagcgcuucucgga

SEQ ID NO: 2638423 - RNA, 19 nt, Artificial Sequence
  Description of Artificial Sequence: Synthetic oligonucleotide
caggcagaguguaucuguc

SEQ ID NO: 2638424 - RNA, 19 nt, Artificial Sequence
  Description of Artificial Sequence: Synthetic oligonucleotide
ugcgcuccauuuugugggc

SEQ ID NO: 2638425 - RNA, 19 nt, Artificial Sequence
  Description of Artificial Sequence: Synthetic oligonucleotide
uaggcaacguaagggugga

SEQ ID NO: 2638426 - RNA, 19 nt, Artificial Sequence
  Description of Artificial Sequence: Synthetic oligonucleotide
uagggcacggcuggcagcu

SEQ ID NO: 2638427 - RNA, 19 nt, Artificial Sequence
  Description of Artificial Sequence: Synthetic oligonucleotide
cuccccgcgcuucagcagc

SEQ ID NO: 2638428 - RNA, 19 nt, Artificial Sequence
  Description of Artificial Sequence: Synthetic oligonucleotide
accccuuguacuccuugga

SEQ ID NO: 2638429 - RNA, 19 nt, Artificial Sequence
  Description of Artificial Sequence: Synthetic oligonucleotide
ggaagugcuucuccgcgug

SEQ ID NO: 2638430 - RNA, 19 nt, Artificial Sequence
  Description of Artificial Sequence: Synthetic oligonucleotide
gcgagcaaagcuccucagg

SEQ ID NO: 2638431 - RNA, 19 nt, Artificial Sequence
  Description of Artificial Sequence: Synthetic oligonucleotide
ccagcuacacaucugucuc

SEQ ID NO: 2638432 - RNA, 19 nt, Artificial Sequence
  Description of Artificial Sequence: Synthetic oligonucleotide
agggacuuguugaccuuac

SEQ ID NO: 2638433 - RNA, 19 nt, Artificial Sequence
  Description of Artificial Sequence: Synthetic oligonucleotide
caucugucuccacccguag

SEQ ID NO: 2638434 - RNA, 19 nt, Artificial Sequence
  Description of Artificial Sequence: Synthetic oligonucleotide
guacuccuuggagucaggc

SEQ ID NO: 2638435 - RNA, 19 nt, Artificial Sequence
  Description of Artificial Sequence: Synthetic oligonucleotide
cagaaccacuugcugcuug

SEQ ID NO: 2638436 - RNA, 19 nt, Artificial Sequence
  Description of Artificial Sequence: Synthetic oligonucleotide
uucuccgcguguuccucca

SEQ ID NO: 2638437 - RNA, 19 nt, Artificial Sequence
  Description of Artificial Sequence: Synthetic oligonucleotide
guuucagaacuguccagcu

SEQ ID NO: 2638438 - RNA, 19 nt, Artificial Sequence
  Description of Artificial Sequence: Synthetic oligonucleotide
cuguccagcuacacaucug

SEQ ID NO: 2638439 - RNA, 19 nt, Artificial Sequence
  Description of Artificial Sequence: Synthetic oligonucleotide
ccauccugcguacauugcc

SEQ ID NO: 2638440 - RNA, 19 nt, Artificial Sequence
  Description of Artificial Sequence: Synthetic oligonucleotide
uagagcgagcaaagcuccu

SEQ ID NO: 2638441 - RNA, 19 nt, Artificial Sequence
  Description of Artificial Sequence: Synthetic oligonucleotide
ggagcaguaggcaacguaa

SEQ ID NO: 2638442 - RNA, 19 nt, Artificial Sequence
  Description of Artificial Sequence: Synthetic oligonucleotide
ucgggauggcccugugucu

SEQ ID NO: 2638443 - RNA, 19 nt, Artificial Sequence
  Description of Artificial Sequence: Synthetic oligonucleotide
ugcguacauugccuuccac

SEQ ID NO: 2638444 - RNA, 19 nt, Artificial Sequence
  Description of Artificial Sequence: Synthetic oligonucleotide
uacugaaauccagcugcgu

SEQ ID NO: 2638445 - RNA, 19 nt, Artificial Sequence
  Description of Artificial Sequence: Synthetic oligonucleotide
gauggcccugugucuucag

SEQ ID NO: 2638446 - RNA, 19 nt, Artificial Sequence
  Description of Artificial Sequence: Synthetic oligonucleotide
ccuuacugaaauccagcug

SEQ ID NO: 2638447 - RNA, 19 nt, Artificial Sequence
  Description of Artificial Sequence: Synthetic oligonucleotide
cugucuccacccguagccg

SEQ ID NO: 2638448 - RNA, 19 nt, Artificial Sequence
  Description of Artificial Sequence: Synthetic oligonucleotide
acgcgacuggugauagagc

SEQ ID NO: 2638449 - RNA, 19 nt, Artificial Sequence
  Description of Artificial Sequence: Synthetic oligonucleotide
caguaggcaacguaagggu

SEQ ID NO: 2638450 - RNA, 19 nt, Artificial Sequence
  Description of Artificial Sequence: Synthetic oligonucleotide
aaccagccaguuucuccau

SEQ ID NO: 2638451 - RNA, 19 nt, Artificial Sequence
  Description of Artificial Sequence: Synthetic oligonucleotide
guagaccucguuggagcag

SEQ ID NO: 2638452 - RNA, 19 nt, Artificial Sequence
  Description of Artificial Sequence: Synthetic oligonucleotide
uccugcguacauugccuuc

SEQ ID NO: 2638453 - RNA, 19 nt, Artificial Sequence
  Description of Artificial Sequence: Synthetic oligonucleotide
cuguuucaccagcuugcug

SEQ ID NO: 2638454 - RNA, 19 nt, Artificial Sequence
  Description of Artificial Sequence: Synthetic oligonucleotide
aagugcuucuccgcguguu

SEQ ID NO: 2638455 - RNA, 19 nt, Artificial Sequence
  Description of Artificial Sequence: Synthetic oligonucleotide
gucaggagcggcagccggg

SEQ ID NO: 2638456 - RNA, 19 nt, Artificial Sequence
  Description of Artificial Sequence: Synthetic oligonucleotide
caguguguacaucugcucu

SEQ ID NO: 2638457 - RNA, 19 nt, Artificial Sequence
  Description of Artificial Sequence: Synthetic oligonucleotide
cuccgcguguuccuccaag

SEQ ID NO: 2638458 - RNA, 19 nt, Artificial Sequence
  Description of Artificial Sequence: Synthetic oligonucleotide
gaccucguuggagcaguag

SEQ ID NO: 2638459 - RNA, 19 nt, Artificial Sequence
  Description of Artificial Sequence: Synthetic oligonucleotide
ccuuccaccgccacgcgac

SEQ ID NO: 2638460 - RNA, 19 nt, Artificial Sequence
  Description of Artificial Sequence: Synthetic oligonucleotide
ugagcgcuucucggaaggc

SEQ ID NO: 2638461 - RNA, 19 nt, Artificial Sequence
  Description of Artificial Sequence: Synthetic oligonucleotide
gcuguguugcuguucgaca

SEQ ID NO: 2638462 - RNA, 19 nt, Artificial Sequence
  Description of Artificial Sequence: Synthetic oligonucleotide
gguagaccucguuggagca

SEQ ID NO: 2638463 - RNA, 19 nt, Artificial Sequence
  Description of Artificial Sequence: Synthetic oligonucleotide
ugccuuccaccgccacgcg

SEQ ID NO: 2638464 - RNA, 19 nt, Artificial Sequence
  Description of Artificial Sequence: Synthetic oligonucleotide
cagaacuguccagcuacac

SEQ ID NO: 2638465 - RNA, 19 nt, Artificial Sequence
  Description of Artificial Sequence: Synthetic oligonucleotide
acguaaggguggaagugcu

SEQ ID NO: 2638466 - RNA, 19 nt, Artificial Sequence
  Description of Artificial Sequence: Synthetic oligonucleotide
cugcgugugcaguguguac

SEQ ID NO: 2638467 - RNA, 19 nt, Artificial Sequence
  Description of Artificial Sequence: Synthetic oligonucleotide
cucguuggagcaguaggca

SEQ ID NO: 2638468 - RNA, 19 nt, Artificial Sequence
  Description of Artificial Sequence: Synthetic oligonucleotide
ugauggccuuuagggcacg

SEQ ID NO: 2638469 - RNA, 19 nt, Artificial Sequence
  Description of Artificial Sequence: Synthetic oligonucleotide
ucgacagcuucugcagggu

SEQ ID NO: 2638470 - RNA, 19 nt, Artificial Sequence
  Description of Artificial Sequence: Synthetic oligonucleotide
ccugcguacauugccuucc

SEQ ID NO: 2638471 - RNA, 19 nt, Artificial Sequence
  Description of Artificial Sequence: Synthetic oligonucleotide
cauccugcguacauugccu

SEQ ID NO: 2638472 - RNA, 19 nt, Artificial Sequence
  Description of Artificial Sequence: Synthetic oligonucleotide
auccugcguacauugccuu

SEQ ID NO: 2638473 - RNA, 19 nt, Artificial Sequence
  Description of Artificial Sequence: Synthetic oligonucleotide
ucugcauggggaggaucaa

SEQ ID NO: 2638474 - RNA, 19 nt, Artificial Sequence
  Description of Artificial Sequence: Synthetic oligonucleotide
uguugcuguucgacagcuu

SEQ ID NO: 2638475 - RNA, 19 nt, Artificial Sequence
  Description of Artificial Sequence: Synthetic oligonucleotide
cauugccuuccaccgccac

SEQ ID NO: 2638476 - RNA, 19 nt, Artificial Sequence
  Description of Artificial Sequence: Synthetic oligonucleotide
gaagcuccccgcgcuucag

SEQ ID NO: 2638477 - RNA, 19 nt, Artificial Sequence
  Description of Artificial Sequence: Synthetic oligonucleotide
cugucaggagcggcagccg

SEQ ID NO: 2638478 - RNA, 19 nt, Artificial Sequence
  Description of Artificial Sequence: Synthetic oligonucleotide
gcaaagcuccucaggaaac

SEQ ID NO: 2638479 - RNA, 19 nt, Artificial Sequence
  Description of Artificial Sequence: Synthetic oligonucleotide
uccacccguagccgcucca

SEQ ID NO: 2638480 - RNA, 19 nt, Artificial Sequence
  Description of Artificial Sequence: Synthetic oligonucleotide
cgcuucagcagccagcgug

SEQ ID NO: 2638481 - RNA, 19 nt, Artificial Sequence
  Description of Artificial Sequence: Synthetic oligonucleotide
uccuuggagucaggcagaa

SEQ ID NO: 2638482 - RNA, 19 nt, Artificial Sequence
  Description of Artificial Sequence: Synthetic oligonucleotide
acaucugucuccacccgua

SEQ ID NO: 2638483 - RNA, 19 nt, Artificial Sequence
  Description of Artificial Sequence: Synthetic oligonucleotide
ggucacccucugcaugggg

SEQ ID NO: 2638484 - RNA, 19 nt, Artificial Sequence
  Description of Artificial Sequence: Synthetic oligonucleotide
cguuggagcaguaggcaac

SEQ ID NO: 2638485 - RNA, 19 nt, Artificial Sequence
  Description of Artificial Sequence: Synthetic oligonucleotide
gaggaucaagaaggagauc

SEQ ID NO: 2638486 - RNA, 19 nt, Artificial Sequence
  Description of Artificial Sequence: Synthetic oligonucleotide
cacgcaggccguuucucga

SEQ ID NO: 2638487 - RNA, 19 nt, Artificial Sequence
  Description of Artificial Sequence: Synthetic oligonucleotide
ccccuuguacuccuuggag

SEQ ID NO: 2638488 - RNA, 19 nt, Artificial Sequence
  Description of Artificial Sequence: Synthetic oligonucleotide
gcccugugucuucaggcag

SEQ ID NO: 2638489 - RNA, 19 nt, Artificial Sequence
  Description of Artificial Sequence: Synthetic oligonucleotide
uccccgcgcuucagcagcc

SEQ ID NO: 2638490 - RNA, 19 nt, Artificial Sequence
  Description of Artificial Sequence: Synthetic oligonucleotide
cgacuggugauagagcgag

SEQ ID NO: 2638491 - RNA, 19 nt, Artificial Sequence
  Description of Artificial Sequence: Synthetic oligonucleotide
ccucguugcacuguuucac

SEQ ID NO: 2638492 - RNA, 19 nt, Artificial Sequence
  Description of Artificial Sequence: Synthetic oligonucleotide
ggcuguguugcuguucgac

SEQ ID NO: 2638493 - RNA, 19 nt, Artificial Sequence
  Description of Artificial Sequence: Synthetic oligonucleotide
gacuggugauagagcgagc

SEQ ID NO: 2638494 - RNA, 19 nt, Artificial Sequence
  Description of Artificial Sequence: Synthetic oligonucleotide
gcaacguaaggguggaagu

SEQ ID NO: 2638495 - RNA, 19 nt, Artificial Sequence
  Description of Artificial Sequence: Synthetic oligonucleotide
cgagcaaagcuccucagga

SEQ ID NO: 2638496 - RNA, 19 nt, Artificial Sequence
  Description of Artificial Sequence: Synthetic oligonucleotide
ucgaucucccugagcgcuu

SEQ ID NO: 2638497 - RNA, 19 nt, Artificial Sequence
  Description of Artificial Sequence: Synthetic oligonucleotide
cuuucgggauggcccugug

SEQ ID NO: 2638498 - RNA, 19 nt, Artificial Sequence
  Description of Artificial Sequence: Synthetic oligonucleotide
ccaugguggguuucagaac

SEQ ID NO: 2638499 - RNA, 19 nt, Artificial Sequence
  Description of Artificial Sequence: Synthetic oligonucleotide
cacccucugcauggggagg

SEQ ID NO: 2638500 - RNA, 19 nt, Artificial Sequence
  Description of Artificial Sequence: Synthetic oligonucleotide
ggaggaucaagaaggagau

SEQ ID NO: 2638501 - RNA, 19 nt, Artificial Sequence
  Description of Artificial Sequence: Synthetic oligonucleotide
uagccgcuccauccugcgu

SEQ ID NO: 2638502 - RNA, 19 nt, Artificial Sequence
  Description of Artificial Sequence: Synthetic oligonucleotide
gagggacuuguugaccuua

SEQ ID NO: 2638503 - RNA, 19 nt, Artificial Sequence
  Description of Artificial Sequence: Synthetic oligonucleotide
uuccaccgccacgcgacug

SEQ ID NO: 2638504 - RNA, 19 nt, Artificial Sequence
  Description of Artificial Sequence: Synthetic oligonucleotide
cuggugauagagcgagcaa

SEQ ID NO: 2638505 - RNA, 19 nt, Artificial Sequence
  Description of Artificial Sequence: Synthetic oligonucleotide
ggccuuuagggcacggcug

SEQ ID NO: 2638506 - RNA, 19 nt, Artificial Sequence
  Description of Artificial Sequence: Synthetic oligonucleotide
acgcaggccguuucucgau

SEQ ID NO: 2638507 - RNA, 19 nt, Artificial Sequence
  Description of Artificial Sequence: Synthetic oligonucleotide
guuccuccaagaugucacu

SEQ ID NO: 2638508 - RNA, 19 nt, Artificial Sequence
  Description of Artificial Sequence: Synthetic oligonucleotide
ggccguuucucgaucuccc

SEQ ID NO: 2638509 - RNA, 19 nt, Artificial Sequence
  Description of Artificial Sequence: Synthetic oligonucleotide
ggcccugugucuucaggca

SEQ ID NO: 2638510 - RNA, 19 nt, Artificial Sequence
  Description of Artificial Sequence: Synthetic oligonucleotide
uuggagcaguaggcaacgu

SEQ ID NO: 2638511 - RNA, 19 nt, Artificial Sequence
  Description of Artificial Sequence: Synthetic oligonucleotide
gagucaggcagaaccacuu

SEQ ID NO: 2638512 - RNA, 19 nt, Artificial Sequence
  Description of Artificial Sequence: Synthetic oligonucleotide
auccagcugcgugugcagu

SEQ ID NO: 2638513 - RNA, 19 nt, Artificial Sequence
  Description of Artificial Sequence: Synthetic oligonucleotide
cucgaucucccugagcgcu

SEQ ID NO: 2638514 - RNA, 19 nt, Artificial Sequence
  Description of Artificial Sequence: Synthetic oligonucleotide
cacacgcaggccguuucuc

SEQ ID NO: 2638515 - RNA, 19 nt, Artificial Sequence
  Description of Artificial Sequence: Synthetic oligonucleotide
gaaccacuugcugcuugaa

SEQ ID NO: 2638516 - RNA, 19 nt, Artificial Sequence
  Description of Artificial Sequence: Synthetic oligonucleotide
guguugcuguucgacagcu

SEQ ID NO: 2638517 - RNA, 19 nt, Artificial Sequence
  Description of Artificial Sequence: Synthetic oligonucleotide
cuccaucccgaagcucccc

SEQ ID NO: 2638518 - RNA, 19 nt, Artificial Sequence
  Description of Artificial Sequence: Synthetic oligonucleotide
caggccguuucucgaucuc

SEQ ID NO: 2638519 - RNA, 19 nt, Artificial Sequence
  Description of Artificial Sequence: Synthetic oligonucleotide
uuguaccuuucgggauggc

SEQ ID NO: 2638520 - RNA, 19 nt, Artificial Sequence
  Description of Artificial Sequence: Synthetic oligonucleotide
ccugagcgcuucucggaag

SEQ ID NO: 2638521 - RNA, 19 nt, Artificial Sequence
  Description of Artificial Sequence: Synthetic oligonucleotide
aagcugcguccaccauggu

SEQ ID NO: 2638522 - RNA, 19 nt, Artificial Sequence
  Description of Artificial Sequence: Synthetic oligonucleotide
ucuccgcguguuccuccaa

SEQ ID NO: 2638523 - RNA, 19 nt, Artificial Sequence
  Description of Artificial Sequence: Synthetic oligonucleotide
cuccacccguagccgcucc

SEQ ID NO: 2638524 - RNA, 19 nt, Artificial Sequence
  Description of Artificial Sequence: Synthetic oligonucleotide
cgcgcuucagcagccagcg

SEQ ID NO: 2638525 - RNA, 19 nt, Artificial Sequence
  Description of Artificial Sequence: Synthetic oligonucleotide
gcauggggaggaucaagaa

SEQ ID NO: 2638526 - RNA, 19 nt, Artificial Sequence
  Description of Artificial Sequence: Synthetic oligonucleotide
gcuucagcagccagcguga

SEQ ID NO: 2638527 - RNA, 19 nt, Artificial Sequence
  Description of Artificial Sequence: Synthetic oligonucleotide
cagcugcgugugcagugug

SEQ ID NO: 2638528 - RNA, 19 nt, Artificial Sequence
  Description of Artificial Sequence: Synthetic oligonucleotide
ggggagggacuuguugacc

SEQ ID NO: 2638529 - RNA, 19 nt, Artificial Sequence
  Description of Artificial Sequence: Synthetic oligonucleotide
ccaagaugucacugauguc

SEQ ID NO: 2638530 - RNA, 19 nt, Artificial Sequence
  Description of Artificial Sequence: Synthetic oligonucleotide
cugcguacauugccuucca

SEQ ID NO: 2638531 - RNA, 19 nt, Artificial Sequence
  Description of Artificial Sequence: Synthetic oligonucleotide
cacccguagccgcuccauc

SEQ ID NO: 2638532 - RNA, 19 nt, Artificial Sequence
  Description of Artificial Sequence: Synthetic oligonucleotide
ucuccacccguagccgcuc

SEQ ID NO: 2638533 - RNA, 19 nt, Artificial Sequence
  Description of Artificial Sequence: Synthetic oligonucleotide
aggcuguguugcuguucga

SEQ ID NO: 2638534 - RNA, 19 nt, Artificial Sequence
  Description of Artificial Sequence: Synthetic oligonucleotide
gccacgcgacuggugauag

SEQ ID NO: 2638535 - RNA, 19 nt, Artificial Sequence
  Description of Artificial Sequence: Synthetic oligonucleotide
cguagccgcuccauccugc

SEQ ID NO: 2638536 - RNA, 19 nt, Artificial Sequence
  Description of Artificial Sequence: Synthetic oligonucleotide
gagcgcuucucggaaggcu

SEQ ID NO: 2638537 - RNA, 19 nt, Artificial Sequence
  Description of Artificial Sequence: Synthetic oligonucleotide
gcgcugcugguagaccucg

SEQ ID NO: 2638538 - RNA, 19 nt, Artificial Sequence
  Description of Artificial Sequence: Synthetic oligonucleotide
ggaaaccagccaguuucuc

SEQ ID NO: 2638539 - RNA, 19 nt, Artificial Sequence
  Description of Artificial Sequence: Synthetic oligonucleotide
acauugccuuccaccgcca

SEQ ID NO: 2638540 - RNA, 19 nt, Artificial Sequence
  Description of Artificial Sequence: Synthetic oligonucleotide
ggugcgcugcugguagacc

SEQ ID NO: 2638541 - RNA, 19 nt, Artificial Sequence
  Description of Artificial Sequence: Synthetic oligonucleotide
cuucucggaaggcuguguu

SEQ ID NO: 2638542 - RNA, 19 nt, Artificial Sequence
  Description of Artificial Sequence: Synthetic oligonucleotide
gcuacacaucugucuccac

SEQ ID NO: 2638543 - RNA, 19 nt, Artificial Sequence
  Description of Artificial Sequence: Synthetic oligonucleotide
ccgcgcuucagcagccagc

SEQ ID NO: 2638544 - RNA, 19 nt, Artificial Sequence
  Description of Artificial Sequence: Synthetic oligonucleotide
accuuucgggauggcccug

SEQ ID NO: 2638545 - RNA, 19 nt, Artificial Sequence
  Description of Artificial Sequence: Synthetic oligonucleotide
ugcguccaccauggugggu

SEQ ID NO: 2638546 - RNA, 19 nt, Artificial Sequence
  Description of Artificial Sequence: Synthetic oligonucleotide
caccgccacgcgacuggug

SEQ ID NO: 2638547 - RNA, 19 nt, Artificial Sequence
  Description of Artificial Sequence: Synthetic oligonucleotide
ccgggucacccucugcaug

SEQ ID NO: 2638548 - RNA, 19 nt, Artificial Sequence
  Description of Artificial Sequence: Synthetic oligonucleotide
ggagcggcagccgggucac

SEQ ID NO: 2638549 - RNA, 19 nt, Artificial Sequence
  Description of Artificial Sequence: Synthetic oligonucleotide
ggcacggcuggcagcuuug

SEQ ID NO: 2638550 - RNA, 19 nt, Artificial Sequence
  Description of Artificial Sequence: Synthetic oligonucleotide
gccgcuccauccugcguac

SEQ ID NO: 2638551 - RNA, 19 nt, Artificial Sequence
  Description of Artificial Sequence: Synthetic oligonucleotide
ggagucaggcagaaccacu

SEQ ID NO: 2638552 - RNA, 19 nt, Artificial Sequence
  Description of Artificial Sequence: Synthetic oligonucleotide
gggauggcccugugucuuc

SEQ ID NO: 2638553 - RNA, 19 nt, Artificial Sequence
  Description of Artificial Sequence: Synthetic oligonucleotide
gggugcgcugcugguagac

SEQ ID NO: 2638554 - RNA, 19 nt, Artificial Sequence
  Description of Artificial Sequence: Synthetic oligonucleotide
cccucguugcacuguuuca

SEQ ID NO: 2638555 - RNA, 19 nt, Artificial Sequence
  Description of Artificial Sequence: Synthetic oligonucleotide
ggaucaagaaggagaucau

SEQ ID NO: 2638556 - RNA, 19 nt, Artificial Sequence
  Description of Artificial Sequence: Synthetic oligonucleotide
gcugcgugugcagugugua

SEQ ID NO: 2638557 - RNA, 19 nt, Artificial Sequence
  Description of Artificial Sequence: Synthetic oligonucleotide
gcgacuggugauagagcga

SEQ ID NO: 2638558 - RNA, 19 nt, Artificial Sequence
  Description of Artificial Sequence: Synthetic oligonucleotide
gcagccagcgugaggcaga

SEQ ID NO: 2638559 - RNA, 19 nt, Artificial Sequence
  Description of Artificial Sequence: Synthetic oligonucleotide
ccuuuagggcacggcuggc

SEQ ID NO: 2638560 - RNA, 19 nt, Artificial Sequence
  Description of Artificial Sequence: Synthetic oligonucleotide
caggagcggcagccggguc

SEQ ID NO: 2638561 - RNA, 19 nt, Artificial Sequence
  Description of Artificial Sequence: Synthetic oligonucleotide
cccgcgcuucagcagccag

SEQ ID NO: 2638562 - RNA, 19 nt, Artificial Sequence
  Description of Artificial Sequence: Synthetic oligonucleotide
guccaccaugguggguuuc

SEQ ID NO: 2638563 - RNA, 19 nt, Artificial Sequence
  Description of Artificial Sequence: Synthetic oligonucleotide
gcgcuccauuuugugggcc

SEQ ID NO: 2638564 - RNA, 19 nt, Artificial Sequence
  Description of Artificial Sequence: Synthetic oligonucleotide
cacggcuggcagcuuugua

SEQ ID NO: 2638565 - RNA, 19 nt, Artificial Sequence
  Description of Artificial Sequence: Synthetic oligonucleotide
ccguagccgcuccauccug

SEQ ID NO: 2638566 - RNA, 19 nt, Artificial Sequence
  Description of Artificial Sequence: Synthetic oligonucleotide
ccuccaagaugucacugau

SEQ ID NO: 2638567 - RNA, 19 nt, Artificial Sequence
  Description of Artificial Sequence: Synthetic oligonucleotide
ccucaggaaaccagccagu

SEQ ID NO: 2638568 - RNA, 19 nt, Artificial Sequence
  Description of Artificial Sequence: Synthetic oligonucleotide
gucuucaggcagaguguau

SEQ ID NO: 2638569 - RNA, 19 nt, Artificial Sequence
  Description of Artificial Sequence: Synthetic oligonucleotide
aggcaacguaaggguggaa

SEQ ID NO: 2638570 - RNA, 19 nt, Artificial Sequence
  Description of Artificial Sequence: Synthetic oligonucleotide
gcgugugcaguguguacau

SEQ ID NO: 2638571 - RNA, 19 nt, Artificial Sequence
  Description of Artificial Sequence: Synthetic oligonucleotide
gccguuucucgaucucccu

SEQ ID NO: 2638572 - RNA, 19 nt, Artificial Sequence
  Description of Artificial Sequence: Synthetic oligonucleotide
agaccucguuggagcagua

SEQ ID NO: 2638573 - RNA, 19 nt, Artificial Sequence
  Description of Artificial Sequence: Synthetic oligonucleotide
gcguccaccaugguggguu

SEQ ID NO: 2638574 - RNA, 19 nt, Artificial Sequence
  Description of Artificial Sequence: Synthetic oligonucleotide
cuuccaccgccacgcgacu

SEQ ID NO: 2638575 - RNA, 19 nt, Artificial Sequence
  Description of Artificial Sequence: Synthetic oligonucleotide
ccucugcauggggaggauc

SEQ ID NO: 2638576 - RNA, 19 nt, Artificial Sequence
  Description of Artificial Sequence: Synthetic oligonucleotide
cugaagcugcguccaccau

SEQ ID NO: 2638577 - RNA, 19 nt, Artificial Sequence
  Description of Artificial Sequence: Synthetic oligonucleotide
caaaccccuuguacuccuu

SEQ ID NO: 2638578 - RNA, 19 nt, Artificial Sequence
  Description of Artificial Sequence: Synthetic oligonucleotide
gcuucucggaaggcugugu

SEQ ID NO: 2638579 - RNA, 19 nt, Artificial Sequence
  Description of Artificial Sequence: Synthetic oligonucleotide
cgcaggccguuucucgauc

SEQ ID NO: 2638580 - RNA, 19 nt, Artificial Sequence
  Description of Artificial Sequence: Synthetic oligonucleotide
gagcggcagccgggucacc

SEQ ID NO: 2638581 - RNA, 19 nt, Artificial Sequence
  Description of Artificial Sequence: Synthetic oligonucleotide
agccagcgugaggcagaga

SEQ ID NO: 2638582 - RNA, 19 nt, Artificial Sequence
  Description of Artificial Sequence: Synthetic oligonucleotide
ccagcgugaggcagagagu

SEQ ID NO: 2638583 - RNA, 19 nt, Artificial Sequence
  Description of Artificial Sequence: Synthetic oligonucleotide
cugcucugugcgcuccauu

SEQ ID NO: 2638584 - RNA, 19 nt, Artificial Sequence
  Description of Artificial Sequence: Synthetic oligonucleotide
cccguagccgcuccauccu

SEQ ID NO: 2638585 - RNA, 19 nt, Artificial Sequence
  Description of Artificial Sequence: Synthetic oligonucleotide
cgcuucucggaaggcugug

SEQ ID NO: 2638586 - RNA, 19 nt, Artificial Sequence
  Description of Artificial Sequence: Synthetic oligonucleotide
gccgggucacccucugcau

SEQ ID NO: 2638587 - RNA, 19 nt, Artificial Sequence
  Description of Artificial Sequence: Synthetic oligonucleotide
gcggcagccgggucacccu

SEQ ID NO: 2638588 - RNA, 19 nt, Artificial Sequence
  Description of Artificial Sequence: Synthetic oligonucleotide
gggcacggcuggcagcuuu

SEQ ID NO: 2638589 - RNA, 19 nt, Artificial Sequence
  Description of Artificial Sequence: Synthetic oligonucleotide
cugugucuucaggcagagu

SEQ ID NO: 2638590 - RNA, 19 nt, Artificial Sequence
  Description of Artificial Sequence: Synthetic oligonucleotide
ccacgcgacuggugauaga

SEQ ID NO: 2638591 - RNA, 19 nt, Artificial Sequence
  Description of Artificial Sequence: Synthetic oligonucleotide
ccagcugcgugugcagugu

SEQ ID NO: 2638592 - RNA, 19 nt, Artificial Sequence
  Description of Artificial Sequence: Synthetic oligonucleotide
gcgcuucucggaaggcugu

SEQ ID NO: 2638593 - RNA, 19 nt, Artificial Sequence
  Description of Artificial Sequence: Synthetic oligonucleotide
ccacacgcaggccguuucu

SEQ ID NO: 2638594 - RNA, 19 nt, Artificial Sequence
  Description of Artificial Sequence: Synthetic oligonucleotide
agggcacggcuggcagcuu

SEQ ID NO: 2638595 - RNA, 19 nt, Artificial Sequence
  Description of Artificial Sequence: Synthetic oligonucleotide
cggcagccgggucacccuc

SEQ ID NO: 2638596 - RNA, 19 nt, Artificial Sequence
  Description of Artificial Sequence: Synthetic oligonucleotide
ccgcguguuccuccaagau

SEQ ID NO: 2638597 - RNA, 19 nt, Artificial Sequence
  Description of Artificial Sequence: Synthetic oligonucleotide
ccuuucgggauggcccugu

SEQ ID NO: 2638598 - RNA, 19 nt, Artificial Sequence
  Description of Artificial Sequence: Synthetic oligonucleotide
ggcagccgggucacccucu

SEQ ID NO: 2638599 - RNA, 19 nt, Artificial Sequence
  Description of Artificial Sequence: Synthetic oligonucleotide
cguaaggguggaagugcuu

SEQ ID NO: 2638600 - RNA, 19 nt, Artificial Sequence
  Description of Artificial Sequence: Synthetic oligonucleotide
gcacggcuggcagcuuugu

SEQ ID NO: 2638601 - RNA, 19 nt, Artificial Sequence
  Description of Artificial Sequence: Synthetic oligonucleotide
gcgcuucagcagccagcgu

SEQ ID NO: 2638602 - RNA, 19 nt, Artificial Sequence
  Description of Artificial Sequence: Synthetic oligonucleotide
cgccacgcgacuggugaua

SEQ ID NO: 2638603 - RNA, 19 nt, Artificial Sequence
  Description of Artificial Sequence: Synthetic oligonucleotide
ccacccguagccgcuccau

SEQ ID NO: 2638604 - RNA, 19 nt, Artificial Sequence
  Description of Artificial Sequence: Synthetic oligonucleotide
cgggauggcccugugucuu

SEQ ID NO: 2638605 - RNA, 19 nt, Artificial Sequence
  Description of Artificial Sequence: Synthetic oligonucleotide
ccgccacgcgacuggugau

SEQ ID NO: 2638606 - RNA, 19 nt, Artificial Sequence
  Description of Artificial Sequence: Synthetic oligonucleotide
ccccgcgcuucagcagcca

SEQ ID NO: 2638607 - RNA, 19 nt, Artificial Sequence
  Description of Artificial Sequence: Synthetic oligonucleotide
cccgaagcuccccgcgcuu

SEQ ID NO: 2638608 - RNA, 19 nt, Artificial Sequence
  Description of Artificial Sequence: Synthetic oligonucleotide
ccaccgccacgcgacuggu

SEQ ID NO: 2638609 - RNA, 19 nt, Artificial Sequence
  Description of Artificial Sequence: Synthetic oligonucleotide
cgcugcugguagaccucgu

SEQ ID NO: 2638610 - RNA, 19 nt, Artificial Sequence
  Description of Artificial Sequence: Synthetic oligonucleotide
ccccacacgcaggccguuu

SEQ ID NO: 2638611 - RNA, 19 nt, Artificial Sequence
  Description of Artificial Sequence: Synthetic oligonucleotide
aauacaaaggucucagccc

SEQ ID NO: 2638612 - RNA, 19 nt, Artificial Sequence
  Description of Artificial Sequence: Synthetic oligonucleotide
ucagguggcacauacaugg

SEQ ID NO: 2638613 - RNA, 19 nt, Artificial Sequence
  Description of Artificial Sequence: Synthetic oligonucleotide
auugaaaccagccuuccgg

SEQ ID NO: 2638614 - RNA, 19 nt, Artificial Sequence
  Description of Artificial Sequence: Synthetic oligonucleotide
gaauacaaaggucucagcc

SEQ ID NO: 2638615 - RNA, 19 nt, Artificial Sequence
  Description of Artificial Sequence: Synthetic oligonucleotide
augacacuggcauucaggc

SEQ ID NO: 2638616 - RNA, 19 nt, Artificial Sequence
  Description of Artificial Sequence: Synthetic oligonucleotide
aacaguggggccuaaagcu

SEQ ID NO: 2638617 - RNA, 19 nt, Artificial Sequence
  Description of Artificial Sequence: Synthetic oligonucleotide
uccaggaauacaaaggucu

SEQ ID NO: 2638618 - RNA, 19 nt, Artificial Sequence
  Description of Artificial Sequence: Synthetic oligonucleotide
augaaugaaugacacuggc

SEQ ID NO: 2638619 - RNA, 19 nt, Artificial Sequence
  Description of Artificial Sequence: Synthetic oligonucleotide
auacaaaggucucagcccg

SEQ ID NO: 2638620 - RNA, 19 nt, Artificial Sequence
  Description of Artificial Sequence: Synthetic oligonucleotide
accacagcaccauugaaac

SEQ ID NO: 2638621 - RNA, 19 nt, Artificial Sequence
  Description of Artificial Sequence: Synthetic oligonucleotide
aguaaaggggcgcucaggg

SEQ ID NO: 2638622 - RNA, 19 nt, Artificial Sequence
  Description of Artificial Sequence: Synthetic oligonucleotide
agagcaccagaauuguccc

SEQ ID NO: 2638623 - RNA, 19 nt, Artificial Sequence
  Description of Artificial Sequence: Synthetic oligonucleotide
aaucucaggauccauguuu

SEQ ID NO: 2638624 - RNA, 19 nt, Artificial Sequence
  Description of Artificial Sequence: Synthetic oligonucleotide
ucugggauccuauauucag

SEQ ID NO: 2638625 - RNA, 19 nt, Artificial Sequence
  Description of Artificial Sequence: Synthetic oligonucleotide
uaaaggggcgcucagggca

SEQ ID NO: 2638626 - RNA, 19 nt, Artificial Sequence
  Description of Artificial Sequence: Synthetic oligonucleotide
acauacaugggcucaaugu

SEQ ID NO: 2638627 - RNA, 19 nt, Artificial Sequence
  Description of Artificial Sequence: Synthetic oligonucleotide
  modified_base (5)..(5): a, c, u, g, unknown or other
aaacnugucucagagccug

SEQ ID NO: 2638628 - RNA, 19 nt, Artificial Sequence
  Description of Artificial Sequence: Synthetic oligonucleotide
cagagcaccagaauugucc

SEQ ID NO: 2638629 - RNA, 19 nt, Artificial Sequence
  Description of Artificial Sequence: Synthetic oligonucleotide
agaauugucccgcucuggg

SEQ ID NO: 2638630 - RNA, 19 nt, Artificial Sequence
  Description of Artificial Sequence: Synthetic oligonucleotide
gaagaucagaagcagcgug

SEQ ID NO: 2638631 - RNA, 19 nt, Artificial Sequence
  Description of Artificial Sequence: Synthetic oligonucleotide
aaccacguaaucccucgac

SEQ ID NO: 2638632 - RNA, 19 nt, Artificial Sequence
  Description of Artificial Sequence: Synthetic oligonucleotide
aggcaagcagcucagcagc

SEQ ID NO: 2638633 - RNA, 19 nt, Artificial Sequence
  Description of Artificial Sequence: Synthetic oligonucleotide
augaaugacacuggcauuc

SEQ ID NO: 2638634 - RNA, 19 nt, Artificial Sequence
  Description of Artificial Sequence: Synthetic oligonucleotide
ggauccuauauucagguag

SEQ ID NO: 2638635 - RNA, 19 nt, Artificial Sequence
  Description of Artificial Sequence: Synthetic oligonucleotide
uguuugggagcccaguggc

SEQ ID NO: 2638636 - RNA, 19 nt, Artificial Sequence
  Description of Artificial Sequence: Synthetic oligonucleotide
aucagaagcagcgugugcg

SEQ ID NO: 2638637 - RNA, 19 nt, Artificial Sequence
  Description of Artificial Sequence: Synthetic oligonucleotide
ugaaugaaugacacuggca

SEQ ID NO: 2638638 - RNA, 19 nt, Artificial Sequence
  Description of Artificial Sequence: Synthetic oligonucleotide
gaugaaugaaugacacugg

SEQ ID NO: 2638639 - RNA, 19 nt, Artificial Sequence
  Description of Artificial Sequence: Synthetic oligonucleotide
gauccuauauucagguagg

SEQ ID NO: 2638640 - RNA, 19 nt, Artificial Sequence
  Description of Artificial Sequence: Synthetic oligonucleotide
ggaugaaugaaugacacug

SEQ ID NO: 2638641 - RNA, 19 nt, Artificial Sequence
  Description of Artificial Sequence: Synthetic oligonucleotide
ucaggauccauguuuggga

SEQ ID NO: 2638642 - RNA, 19 nt, Artificial Sequence
  Description of Artificial Sequence: Synthetic oligonucleotide
gauaucuccgcaaucucag

SEQ ID NO: 2638643 - RNA, 19 nt, Artificial Sequence
  Description of Artificial Sequence: Synthetic oligonucleotide
cuggaugaaugaaugacac

SEQ ID NO: 2638644 - RNA, 19 nt, Artificial Sequence
  Description of Artificial Sequence: Synthetic oligonucleotide
aaugugagcccagcuacgg

SEQ ID NO: 2638645 - RNA, 19 nt, Artificial Sequence
  Description of Artificial Sequence: Synthetic oligonucleotide
agagaaggcucugggaucc

SEQ ID NO: 2638646 - RNA, 19 nt, Artificial Sequence
  Description of Artificial Sequence: Synthetic oligonucleotide
cuauauucagguaggccag

SEQ ID NO: 2638647 - RNA, 19 nt, Artificial Sequence
  Description of Artificial Sequence: Synthetic oligonucleotide
cauacaugggcucaaugug

SEQ ID NO: 2638648 - RNA, 19 nt, Artificial Sequence
  Description of Artificial Sequence: Synthetic oligonucleotide
ugucucagagccuggauga

SEQ ID NO: 2638649 - RNA, 19 nt, Artificial Sequence
  Description of Artificial Sequence: Synthetic oligonucleotide
gaaugaaugacacuggcau

SEQ ID NO: 2638650 - RNA, 19 nt, Artificial Sequence
  Description of Artificial Sequence: Synthetic oligonucleotide
ugcucaaaccacguaaucc

SEQ ID NO: 2638651 - RNA, 19 nt, Artificial Sequence
  Description of Artificial Sequence: Synthetic oligonucleotide
uacaugggcucaaugugag

SEQ ID NO: 2638652 - RNA, 19 nt, Artificial Sequence
  Description of Artificial Sequence: Synthetic oligonucleotide
uggucucacaggaacagug

SEQ ID NO: 2638653 - RNA, 19 nt, Artificial Sequence
  Description of Artificial Sequence: Synthetic oligonucleotide
aaagggauaucuccgcaau

SEQ ID NO: 2638654 - RNA, 19 nt, Artificial Sequence
  Description of Artificial Sequence: Synthetic oligonucleotide
caaaccacguaaucccucg

SEQ ID NO: 2638655 - RNA, 19 nt, Artificial Sequence
  Description of Artificial Sequence: Synthetic oligonucleotide
aaaagggauaucuccgcaa

SEQ ID NO: 2638656 - RNA, 19 nt, Artificial Sequence
  Description of Artificial Sequence: Synthetic oligonucleotide
gaacaguggggccuaaagc

SEQ ID NO: 2638657 - RNA, 19 nt, Artificial Sequence
  Description of Artificial Sequence: Synthetic oligonucleotide
agcaccagaauugucccgc

SEQ ID NO: 2638658 - RNA, 19 nt, Artificial Sequence
  Description of Artificial Sequence: Synthetic oligonucleotide
ugugagcccagcuacgggc

SEQ ID NO: 2638659 - RNA, 19 nt, Artificial Sequence
  Description of Artificial Sequence: Synthetic oligonucleotide
aagggauaucuccgcaauc

SEQ ID NO: 2638660 - RNA, 19 nt, Artificial Sequence
  Description of Artificial Sequence: Synthetic oligonucleotide
ugugagcuuguccagcaca

SEQ ID NO: 2638661 - RNA, 19 nt, Artificial Sequence
  Description of Artificial Sequence: Synthetic oligonucleotide
aauugucccgcucuggguu

SEQ ID NO: 2638662 - RNA, 19 nt, Artificial Sequence
  Description of Artificial Sequence: Synthetic oligonucleotide
ugcaguguccgcaccacag

SEQ ID NO: 2638663 - RNA, 19 nt, Artificial Sequence
  Description of Artificial Sequence: Synthetic oligonucleotide
uggccuuggcaguaaaggg

SEQ ID NO: 2638664 - RNA, 19 nt, Artificial Sequence
  Description of Artificial Sequence: Synthetic oligonucleotide
agcagcacggugcaggaag

SEQ ID NO: 2638665 - RNA, 19 nt, Artificial Sequence
  Description of Artificial Sequence: Synthetic oligonucleotide
auguuugggagcccagugg

SEQ ID NO: 2638666 - RNA, 19 nt, Artificial Sequence
  Description of Artificial Sequence: Synthetic oligonucleotide
aggaauacaaaggucucag

SEQ ID NO: 2638667 - RNA, 19 nt, Artificial Sequence
  Description of Artificial Sequence: Synthetic oligonucleotide
agguggggaacagagaagg

SEQ ID NO: 2638668 - RNA, 19 nt, Artificial Sequence
  Description of Artificial Sequence: Synthetic oligonucleotide
ugggauccuauauucaggu

SEQ ID NO: 2638669 - RNA, 19 nt, Artificial Sequence
  Description of Artificial Sequence: Synthetic oligonucleotide
uugaaaccagccuuccggc

SEQ ID NO: 2638670 - RNA, 19 nt, Artificial Sequence
  Description of Artificial Sequence: Synthetic oligonucleotide
uuguccagcacacggggca

SEQ ID NO: 2638671 - RNA, 19 nt, Artificial Sequence
  Description of Artificial Sequence: Synthetic oligonucleotide
uggggaacagagaaggcuc

SEQ ID NO: 2638672 - RNA, 19 nt, Artificial Sequence
  Description of Artificial Sequence: Synthetic oligonucleotide
gauggucucacaggaacag

SEQ ID NO: 2638673 - RNA, 19 nt, Artificial Sequence
  Description of Artificial Sequence: Synthetic oligonucleotide
aagaacgguggacagcaaa

SEQ ID NO: 2638674 - RNA, 19 nt, Artificial Sequence
  Description of Artificial Sequence: Synthetic oligonucleotide
cugggauccuauauucagg

SEQ ID NO: 2638675 - RNA, 19 nt, Artificial Sequence
  Description of Artificial Sequence: Synthetic oligonucleotide
aggguguccaacuggaggu

SEQ ID NO: 2638676 - RNA, 19 nt, Artificial Sequence
  Description of Artificial Sequence: Synthetic oligonucleotide
ugauggucucacaggaaca

SEQ ID NO: 2638677 - RNA, 19 nt, Artificial Sequence
  Description of Artificial Sequence: Synthetic oligonucleotide
accagaauugucccgcucu

SEQ ID NO: 2638678 - RNA, 19 nt, Artificial Sequence
  Description of Artificial Sequence: Synthetic oligonucleotide
gcucaaaccacguaauccc

SEQ ID NO: 2638679 - RNA, 19 nt, Artificial Sequence
  Description of Artificial Sequence: Synthetic oligonucleotide
gucucacaggaacaguggg

SEQ ID NO: 2638680 - RNA, 19 nt, Artificial Sequence
  Description of Artificial Sequence: Synthetic oligonucleotide
cucagagccuggaugaaug

SEQ ID NO: 2638681 - RNA, 19 nt, Artificial Sequence
  Description of Artificial Sequence: Synthetic oligonucleotide
agugcaucaggccuucacu

SEQ ID NO: 2638682 - RNA, 19 nt, Artificial Sequence
  Description of Artificial Sequence: Synthetic oligonucleotide
augcugauggucucacagg

SEQ ID NO: 2638683 - RNA, 19 nt, Artificial Sequence
  Description of Artificial Sequence: Synthetic oligonucleotide
aaagcuggggcaggcuucg

SEQ ID NO: 2638684 - RNA, 19 nt, Artificial Sequence
  Description of Artificial Sequence: Synthetic oligonucleotide
aggccuucacugcucaaac

SEQ ID NO: 2638685 - RNA, 19 nt, Artificial Sequence
  Description of Artificial Sequence: Synthetic oligonucleotide
aggauccauguuugggagc

SEQ ID NO: 2638686 - RNA, 19 nt, Artificial Sequence
  Description of Artificial Sequence: Synthetic oligonucleotide
agcgugugcggcuuggaag

SEQ ID NO: 2638687 - RNA, 19 nt, Artificial Sequence
  Description of Artificial Sequence: Synthetic oligonucleotide
uucacugcucaaaccacgu

SEQ ID NO: 2638688 - RNA, 19 nt, Artificial Sequence
  Description of Artificial Sequence: Synthetic oligonucleotide
ccuauauucagguaggcca

SEQ ID NO: 2638689 - RNA, 19 nt, Artificial Sequence
  Description of Artificial Sequence: Synthetic oligonucleotide
aacaccagagcaccagaau

SEQ ID NO: 2638690 - RNA, 19 nt, Artificial Sequence
  Description of Artificial Sequence: Synthetic oligonucleotide
uccuauauucagguaggcc

SEQ ID NO: 2638691 - RNA, 19 nt, Artificial Sequence
  Description of Artificial Sequence: Synthetic oligonucleotide
ugcccaggcaagcagcuca

SEQ ID NO: 2638692 - RNA, 19 nt, Artificial Sequence
  Description of Artificial Sequence: Synthetic oligonucleotide
acguaaucccucgacuggc

SEQ ID NO: 2638693 - RNA, 19 nt, Artificial Sequence
  Description of Artificial Sequence: Synthetic oligonucleotide
aagaucagaagcagcgugu

SEQ ID NO: 2638694 - RNA, 19 nt, Artificial Sequence
  Description of Artificial Sequence: Synthetic oligonucleotide
cacguaaucccucgacugg

SEQ ID NO: 2638695 - RNA, 19 nt, Artificial Sequence
  Description of Artificial Sequence: Synthetic oligonucleotide
caccagagcaccagaauug

SEQ ID NO: 2638696 - RNA, 19 nt, Artificial Sequence
  Description of Artificial Sequence: Synthetic oligonucleotide
cucaggauccauguuuggg

SEQ ID NO: 2638697 - RNA, 19 nt, Artificial Sequence
  Description of Artificial Sequence: Synthetic oligonucleotide
gguucuccagggaagaacg

SEQ ID NO: 2638698 - RNA, 19 nt, Artificial Sequence
  Description of Artificial Sequence: Synthetic oligonucleotide
agggauaucuccgcaaucu

SEQ ID NO: 2638699 - RNA, 19 nt, Artificial Sequence
  Description of Artificial Sequence: Synthetic oligonucleotide
aaggucucagcccgaggug

SEQ ID NO: 2638700 - RNA, 19 nt, Artificial Sequence
  Description of Artificial Sequence: Synthetic oligonucleotide
ugcaucaggccuucacugc

SEQ ID NO: 2638701 - RNA, 19 nt, Artificial Sequence
  Description of Artificial Sequence: Synthetic oligonucleotide
accauugaaaccagccuuc

SEQ ID NO: 2638702 - RNA, 19 nt, Artificial Sequence
  Description of Artificial Sequence: Synthetic oligonucleotide
caggcaagcagcucagcag

SEQ ID NO: 2638703 - RNA, 19 nt, Artificial Sequence
  Description of Artificial Sequence: Synthetic oligonucleotide
caggauccauguuugggag

SEQ ID NO: 2638704 - RNA, 19 nt, Artificial Sequence
  Description of Artificial Sequence: Synthetic oligonucleotide
auaucuccgcaaucucagg

SEQ ID NO: 2638705 - RNA, 19 nt, Artificial Sequence
  Description of Artificial Sequence: Synthetic oligonucleotide
cauugaaaccagccuuccg

SEQ ID NO: 2638706 - RNA, 19 nt, Artificial Sequence
  Description of Artificial Sequence: Synthetic oligonucleotide
ucaaaccacguaaucccuc

SEQ ID NO: 2638707 - RNA, 19 nt, Artificial Sequence
  Description of Artificial Sequence: Synthetic oligonucleotide
uggggccuaaagcuggggc

SEQ ID NO: 2638708 - RNA, 19 nt, Artificial Sequence
  Description of Artificial Sequence: Synthetic oligonucleotide
ucucaggauccauguuugg

SEQ ID NO: 2638709 - RNA, 19 nt, Artificial Sequence
  Description of Artificial Sequence: Synthetic oligonucleotide
uaaagcuggggcaggcuuc

SEQ ID NO: 2638710 - RNA, 19 nt, Artificial Sequence
  Description of Artificial Sequence: Synthetic oligonucleotide
cauguuugggagcccagug

SEQ ID NO: 2638711 - RNA, 19 nt, Artificial Sequence
  Description of Artificial Sequence: Synthetic oligonucleotide
cuccgcaaucucaggaucc

SEQ ID NO: 2638712 - RNA, 19 nt, Artificial Sequence
  Description of Artificial Sequence: Synthetic oligonucleotide
auccuauauucagguaggc

SEQ ID NO: 2638713 - RNA, 19 nt, Artificial Sequence
  Description of Artificial Sequence: Synthetic oligonucleotide
uuggaagcccugcaguguc

SEQ ID NO: 2638714 - RNA, 19 nt, Artificial Sequence
  Description of Artificial Sequence: Synthetic oligonucleotide
aaucccucgacuggccuug

SEQ ID NO: 2638715 - RNA, 19 nt, Artificial Sequence
  Description of Artificial Sequence: Synthetic oligonucleotide
gaaugacacuggcauucag

SEQ ID NO: 2638716 - RNA, 19 nt, Artificial Sequence
  Description of Artificial Sequence: Synthetic oligonucleotide
agggaagaacgguggacag

SEQ ID NO: 2638717 - RNA, 19 nt, Artificial Sequence
  Description of Artificial Sequence: Synthetic oligonucleotide
acaugggcucaaugugagc

SEQ ID NO: 2638718 - RNA, 19 nt, Artificial Sequence
  Description of Artificial Sequence: Synthetic oligonucleotide
auugucccgcucuggguuc

SEQ ID NO: 2638719 - RNA, 19 nt, Artificial Sequence
  Description of Artificial Sequence: Synthetic oligonucleotide
  modified_base (6)..(6): a, c, u, g, unknown or other
aaaacnugucucagagccu

SEQ ID NO: 2638720 - RNA, 19 nt, Artificial Sequence
  Description of Artificial Sequence: Synthetic oligonucleotide
caguggggccuaaagcugg

SEQ ID NO: 2638721 - RNA, 19 nt, Artificial Sequence
  Description of Artificial Sequence: Synthetic oligonucleotide
uggaugaaugaaugacacu

SEQ ID NO: 2638722 - RNA, 19 nt, Artificial Sequence
  Description of Artificial Sequence: Synthetic oligonucleotide
gugcaucaggccuucacug

SEQ ID NO: 2638723 - RNA, 19 nt, Artificial Sequence
  Description of Artificial Sequence: Synthetic oligonucleotide
aaaccagccuuccggcagu

SEQ ID NO: 2638724 - RNA, 19 nt, Artificial Sequence
  Description of Artificial Sequence: Synthetic oligonucleotide
accacguaaucccucgacu

SEQ ID NO: 2638725 - RNA, 19 nt, Artificial Sequence
  Description of Artificial Sequence: Synthetic oligonucleotide
gagccuggaugaaugaaug

SEQ ID NO: 2638726 - RNA, 19 nt, Artificial Sequence
  Description of Artificial Sequence: Synthetic oligonucleotide
ugacacuggcauucaggcc

SEQ ID NO: 2638727 - RNA, 19 nt, Artificial Sequence
  Description of Artificial Sequence: Synthetic oligonucleotide
ugaaaccagccuuccggca

SEQ ID NO: 2638728 - RNA, 19 nt, Artificial Sequence
  Description of Artificial Sequence: Synthetic oligonucleotide
cuuccggcagugcaucagg

SEQ ID NO: 2638729 - RNA, 19 nt, Artificial Sequence
  Description of Artificial Sequence: Synthetic oligonucleotide
ucuccgcaaucucaggauc

SEQ ID NO: 2638730 - RNA, 19 nt, Artificial Sequence
  Description of Artificial Sequence: Synthetic oligonucleotide
ugugcggcuuggaagcccu

SEQ ID NO: 2638731 - RNA, 19 nt, Artificial Sequence
  Description of Artificial Sequence: Synthetic oligonucleotide
gagcaccagaauugucccg

SEQ ID NO: 2638732 - RNA, 19 nt, Artificial Sequence
  Description of Artificial Sequence: Synthetic oligonucleotide
aaaccacguaaucccucga

SEQ ID NO: 2638733 - RNA, 19 nt, Artificial Sequence
  Description of Artificial Sequence: Synthetic oligonucleotide
caggccucaaggcuuggcc

SEQ ID NO: 2638734 - RNA, 19 nt, Artificial Sequence
  Description of Artificial Sequence: Synthetic oligonucleotide
augugagcccagcuacggg

SEQ ID NO: 2638735 - RNA, 19 nt, Artificial Sequence
  Description of Artificial Sequence: Synthetic oligonucleotide
ggcacaugcacagugugag

SEQ ID NO: 2638736 - RNA, 19 nt, Artificial Sequence
  Description of Artificial Sequence: Synthetic oligonucleotide
aggucucagcccgaggugg

SEQ ID NO: 2638737 - RNA, 19 nt, Artificial Sequence
  Description of Artificial Sequence: Synthetic oligonucleotide
uccauguuugggagcccag

SEQ ID NO: 2638738 - RNA, 19 nt, Artificial Sequence
  Description of Artificial Sequence: Synthetic oligonucleotide
auacaugggcucaauguga

SEQ ID NO: 2638739 - RNA, 19 nt, Artificial Sequence
  Description of Artificial Sequence: Synthetic oligonucleotide
  modified_base (4)..(4): a, c, u, g, unknown or other
aacnugucucagagccugg

SEQ ID NO: 2638740 - RNA, 19 nt, Artificial Sequence
  Description of Artificial Sequence: Synthetic oligonucleotide
aucugcccaggcaagcagc

SEQ ID NO: 2638741 - RNA, 19 nt, Artificial Sequence
  Description of Artificial Sequence: Synthetic oligonucleotide
cuggcauucaggccucaag

SEQ ID NO: 2638742 - RNA, 19 nt, Artificial Sequence
  Description of Artificial Sequence: Synthetic oligonucleotide
cuuggcaguaaaggggcgc

SEQ ID NO: 2638743 - RNA, 19 nt, Artificial Sequence
  Description of Artificial Sequence: Synthetic oligonucleotide
ucugcccaggcaagcagcu

SEQ ID NO: 2638744 - RNA, 19 nt, Artificial Sequence
  Description of Artificial Sequence: Synthetic oligonucleotide
ucaaggcuuggcccaucag

SEQ ID NO: 2638745 - RNA, 19 nt, Artificial Sequence
  Description of Artificial Sequence: Synthetic oligonucleotide
aucucaggauccauguuug

SEQ ID NO: 2638746 - RNA, 19 nt, Artificial Sequence
  Description of Artificial Sequence: Synthetic oligonucleotide
ggauccauguuugggagcc

SEQ ID NO: 2638747 - RNA, 19 nt, Artificial Sequence
  Description of Artificial Sequence: Synthetic oligonucleotide
guguccgcaccacagcacc

SEQ ID NO: 2638748 - RNA, 19 nt, Artificial Sequence
  Description of Artificial Sequence: Synthetic oligonucleotide
uggcccaucagguggcaca

SEQ ID NO: 2638749 - RNA, 19 nt, Artificial Sequence
  Description of Artificial Sequence: Synthetic oligonucleotide
agaagcagcgugugcggcu

SEQ ID NO: 2638750 - RNA, 19 nt, Artificial Sequence
  Description of Artificial Sequence: Synthetic oligonucleotide
guaaaggggcgcucagggc

SEQ ID NO: 2638751 - RNA, 19 nt, Artificial Sequence
  Description of Artificial Sequence: Synthetic oligonucleotide
ugaaugacacuggcauuca

SEQ ID NO: 2638752 - RNA, 19 nt, Artificial Sequence
  Description of Artificial Sequence: Synthetic oligonucleotide
ggaagaacgguggacagca

SEQ ID NO: 2638753 - RNA, 19 nt, Artificial Sequence
  Description of Artificial Sequence: Synthetic oligonucleotide
aucuccgcaaucucaggau

SEQ ID NO: 2638754 - RNA, 19 nt, Artificial Sequence
  Description of Artificial Sequence: Synthetic oligonucleotide
ggagguggggaacagagaa

SEQ ID NO: 2638755 - RNA, 19 nt, Artificial Sequence
  Description of Artificial Sequence: Synthetic oligonucleotide
ggccuuggcaguaaagggg

SEQ ID NO: 2638756 - RNA, 19 nt, Artificial Sequence
  Description of Artificial Sequence: Synthetic oligonucleotide
uccggcagugcaucaggcc

SEQ ID NO: 2638757 - RNA, 19 nt, Artificial Sequence
  Description of Artificial Sequence: Synthetic oligonucleotide
uuccggcagugcaucaggc

SEQ ID NO: 2638758 - RNA, 19 nt, Artificial Sequence
  Description of Artificial Sequence: Synthetic oligonucleotide
cacugcucaaaccacguaa

SEQ ID NO: 2638759 - RNA, 19 nt, Artificial Sequence
  Description of Artificial Sequence: Synthetic oligonucleotide
acggggcaacaccagagca

SEQ ID NO: 2638760 - RNA, 19 nt, Artificial Sequence
  Description of Artificial Sequence: Synthetic oligonucleotide
agcccugcaguguccgcac

SEQ ID NO: 2638761 - RNA, 19 nt, Artificial Sequence
  Description of Artificial Sequence: Synthetic oligonucleotide
acaaaggucucagcccgag

SEQ ID NO: 2638762 - RNA, 19 nt, Artificial Sequence
  Description of Artificial Sequence: Synthetic oligonucleotide
caugcacagugugagcuug

SEQ ID NO: 2638763 - RNA, 19 nt, Artificial Sequence
  Description of Artificial Sequence: Synthetic oligonucleotide
uacaaaggucucagcccga

SEQ ID NO: 2638764 - RNA, 19 nt, Artificial Sequence
  Description of Artificial Sequence: Synthetic oligonucleotide
cuucggcuggcuuccuggg

SEQ ID NO: 2638765 - RNA, 19 nt, Artificial Sequence
  Description of Artificial Sequence: Synthetic oligonucleotide
agcacggugcaggaagauc

SEQ ID NO: 2638766 - RNA, 19 nt, Artificial Sequence
  Description of Artificial Sequence: Synthetic oligonucleotide
uuggcaguaaaggggcgcu

SEQ ID NO: 2638767 - RNA, 19 nt, Artificial Sequence
  Description of Artificial Sequence: Synthetic oligonucleotide
caucugcccaggcaagcag

SEQ ID NO: 2638768 - RNA, 19 nt, Artificial Sequence
  Description of Artificial Sequence: Synthetic oligonucleotide
agaacgguggacagcaaaa

SEQ ID NO: 2638769 - RNA, 19 nt, Artificial Sequence
  Description of Artificial Sequence: Synthetic oligonucleotide
caccacagcaccauugaaa

SEQ ID NO: 2638770 - RNA, 19 nt, Artificial Sequence
  Description of Artificial Sequence: Synthetic oligonucleotide
cagcacacggggcaacacc

SEQ ID NO: 2638771 - RNA, 19 nt, Artificial Sequence
  Description of Artificial Sequence: Synthetic oligonucleotide
aguguccgcaccacagcac

SEQ ID NO: 2638772 - RNA, 19 nt, Artificial Sequence
  Description of Artificial Sequence: Synthetic oligonucleotide
aagcccugcaguguccgca

SEQ ID NO: 2638773 - RNA, 19 nt, Artificial Sequence
  Description of Artificial Sequence: Synthetic oligonucleotide
agccuggaugaaugaauga

SEQ ID NO: 2638774 - RNA, 19 nt, Artificial Sequence
  Description of Artificial Sequence: Synthetic oligonucleotide
agagccuggaugaaugaau

SEQ ID NO: 2638775 - RNA, 19 nt, Artificial Sequence
  Description of Artificial Sequence: Synthetic oligonucleotide
uuugggagcccaguggcuu

SEQ ID NO: 2638776 - RNA, 19 nt, Artificial Sequence
  Description of Artificial Sequence: Synthetic oligonucleotide
uggaagcccugcagugucc

SEQ ID NO: 2638777 - RNA, 19 nt, Artificial Sequence
  Description of Artificial Sequence: Synthetic oligonucleotide
cagaauugucccgcucugg

SEQ ID NO: 2638778 - RNA, 19 nt, Artificial Sequence
  Description of Artificial Sequence: Synthetic oligonucleotide
cucaaugugagcccagcua

SEQ ID NO: 2638779 - RNA, 19 nt, Artificial Sequence
  Description of Artificial Sequence: Synthetic oligonucleotide
aucaggccuucacugcuca

SEQ ID NO: 2638780 - RNA, 19 nt, Artificial Sequence
  Description of Artificial Sequence: Synthetic oligonucleotide
ggucucacaggaacagugg

SEQ ID NO: 2638781 - RNA, 19 nt, Artificial Sequence
  Description of Artificial Sequence: Synthetic oligonucleotide
cacggggcaacaccagagc

SEQ ID NO: 2638782 - RNA, 19 nt, Artificial Sequence
  Description of Artificial Sequence: Synthetic oligonucleotide
aacuggagguggggaacag

SEQ ID NO: 2638783 - RNA, 19 nt, Artificial Sequence
  Description of Artificial Sequence: Synthetic oligonucleotide
cagaggguguccaacugga

SEQ ID NO: 2638784 - RNA, 19 nt, Artificial Sequence
  Description of Artificial Sequence: Synthetic oligonucleotide
gcucagggcacaugcacag

SEQ ID NO: 2638785 - RNA, 19 nt, Artificial Sequence
  Description of Artificial Sequence: Synthetic oligonucleotide
uggcacauacaugggcuca

SEQ ID NO: 2638786 - RNA, 19 nt, Artificial Sequence
  Description of Artificial Sequence: Synthetic oligonucleotide
gguccaggaauacaaaggu

SEQ ID NO: 2638787 - RNA, 19 nt, Artificial Sequence
  Description of Artificial Sequence: Synthetic oligonucleotide
caguaaaggggcgcucagg

SEQ ID NO: 2638788 - RNA, 19 nt, Artificial Sequence
  Description of Artificial Sequence: Synthetic oligonucleotide
uccgcaaucucaggaucca

SEQ ID NO: 2638789 - RNA, 19 nt, Artificial Sequence
  Description of Artificial Sequence: Synthetic oligonucleotide
acacggggcaacaccagag

SEQ ID NO: 2638790 - RNA, 19 nt, Artificial Sequence
  Description of Artificial Sequence: Synthetic oligonucleotide
acaguggggccuaaagcug

SEQ ID NO: 2638791 - RNA, 19 nt, Artificial Sequence
  Description of Artificial Sequence: Synthetic oligonucleotide
gcgugugcggcuuggaagc

SEQ ID NO: 2638792 - RNA, 19 nt, Artificial Sequence
  Description of Artificial Sequence: Synthetic oligonucleotide
gcuuggaagcccugcagug

SEQ ID NO: 2638793 - RNA, 19 nt, Artificial Sequence
  Description of Artificial Sequence: Synthetic oligonucleotide
agcacacggggcaacacca

SEQ ID NO: 2638794 - RNA, 19 nt, Artificial Sequence
  Description of Artificial Sequence: Synthetic oligonucleotide
uaaucccucgacuggccuu

SEQ ID NO: 2638795 - RNA, 19 nt, Artificial Sequence
  Description of Artificial Sequence: Synthetic oligonucleotide
acugcucaaaccacguaau

SEQ ID NO: 2638796 - RNA, 19 nt, Artificial Sequence
  Description of Artificial Sequence: Synthetic oligonucleotide
ccacguaaucccucgacug

SEQ ID NO: 2638797 - RNA, 19 nt, Artificial Sequence
  Description of Artificial Sequence: Synthetic oligonucleotide
uguccgcaccacagcacca

SEQ ID NO: 2638798 - RNA, 19 nt, Artificial Sequence
  Description of Artificial Sequence: Synthetic oligonucleotide
gugagcuuguccagcacac

SEQ ID NO: 2638799 - RNA, 19 nt, Artificial Sequence
  Description of Artificial Sequence: Synthetic oligonucleotide
cacggugcaggaagaucag

SEQ ID NO: 2638800 - RNA, 19 nt, Artificial Sequence
  Description of Artificial Sequence: Synthetic oligonucleotide
cagggaagaacgguggaca

SEQ ID NO: 2638801 - RNA, 19 nt, Artificial Sequence
  Description of Artificial Sequence: Synthetic oligonucleotide
caucagguggcacauacau

SEQ ID NO: 2638802 - RNA, 19 nt, Artificial Sequence
  Description of Artificial Sequence: Synthetic oligonucleotide
cucaucugcccaggcaagc

SEQ ID NO: 2638803 - RNA, 19 nt, Artificial Sequence
  Description of Artificial Sequence: Synthetic oligonucleotide
ucacugcucaaaccacgua

SEQ ID NO: 2638804 - RNA, 19 nt, Artificial Sequence
  Description of Artificial Sequence: Synthetic oligonucleotide
cugcucaaaccacguaauc

SEQ ID NO: 2638805 - RNA, 19 nt, Artificial Sequence
  Description of Artificial Sequence: Synthetic oligonucleotide
aggcucugggauccuauau

SEQ ID NO: 2638806 - RNA, 19 nt, Artificial Sequence
  Description of Artificial Sequence: Synthetic oligonucleotide
ggggcaacaccagagcacc

SEQ ID NO: 2638807 - RNA, 19 nt, Artificial Sequence
  Description of Artificial Sequence: Synthetic oligonucleotide
ccagaggguguccaacugg

SEQ ID NO: 2638808 - RNA, 19 nt, Artificial Sequence
  Description of Artificial Sequence: Synthetic oligonucleotide
cucugggauccuauauuca

SEQ ID NO: 2638809 - RNA, 19 nt, Artificial Sequence
  Description of Artificial Sequence: Synthetic oligonucleotide
auucaggccucaaggcuug

SEQ ID NO: 2638810 - RNA, 19 nt, Artificial Sequence
  Description of Artificial Sequence: Synthetic oligonucleotide
caggcuucggcuggcuucc

SEQ ID NO: 2638811 - RNA, 19 nt, Artificial Sequence
  Description of Artificial Sequence: Synthetic oligonucleotide
ugcggcuuggaagcccugc

SEQ ID NO: 2638812 - RNA, 19 nt, Artificial Sequence
  Description of Artificial Sequence: Synthetic oligonucleotide
gaauugucccgcucugggu

SEQ ID NO: 2638813 - RNA, 19 nt, Artificial Sequence
  Description of Artificial Sequence: Synthetic oligonucleotide
  modified_base (3)..(3): a, c, u, g, unknown or other
acnugucucagagccugga

SEQ ID NO: 2638814 - RNA, 19 nt, Artificial Sequence
  Description of Artificial Sequence: Synthetic oligonucleotide
gguggcucagacaugcuga

SEQ ID NO: 2638815 - RNA, 19 nt, Artificial Sequence
  Description of Artificial Sequence: Synthetic oligonucleotide
caucaggccuucacugcuc

SEQ ID NO: 2638816 - RNA, 19 nt, Artificial Sequence
  Description of Artificial Sequence: Synthetic oligonucleotide
ggauaucuccgcaaucuca

SEQ ID NO: 2638817 - RNA, 19 nt, Artificial Sequence
  Description of Artificial Sequence: Synthetic oligonucleotide
ccucgacuggccuuggcag

SEQ ID NO: 2638818 - RNA, 19 nt, Artificial Sequence
  Description of Artificial Sequence: Synthetic oligonucleotide
agccuuccggcagugcauc

SEQ ID NO: 2638819 - RNA, 19 nt, Artificial Sequence
  Description of Artificial Sequence: Synthetic oligonucleotide
gccuuggcaguaaaggggc

SEQ ID NO: 2638820 - RNA, 19 nt, Artificial Sequence
  Description of Artificial Sequence: Synthetic oligonucleotide
ggcaacaccagagcaccag

SEQ ID NO: 2638821 - RNA, 19 nt, Artificial Sequence
  Description of Artificial Sequence: Synthetic oligonucleotide
cccaucagguggcacauac

SEQ ID NO: 2638822 - RNA, 19 nt, Artificial Sequence
  Description of Artificial Sequence: Synthetic oligonucleotide
caggaauacaaaggucuca

SEQ ID NO: 2638823 - RNA, 19 nt, Artificial Sequence
  Description of Artificial Sequence: Synthetic oligonucleotide
gcacggugcaggaagauca

SEQ ID NO: 2638824 - RNA, 19 nt, Artificial Sequence
  Description of Artificial Sequence: Synthetic oligonucleotide
ccagcuacgggccugcuca

SEQ ID NO: 2638825 - RNA, 19 nt, Artificial Sequence
  Description of Artificial Sequence: Synthetic oligonucleotide
gaagcccugcaguguccgc

SEQ ID NO: 2638826 - RNA, 19 nt, Artificial Sequence
  Description of Artificial Sequence: Synthetic oligonucleotide
ucaggccucaaggcuuggc

SEQ ID NO: 2638827 - RNA, 19 nt, Artificial Sequence
  Description of Artificial Sequence: Synthetic oligonucleotide
caguguccgcaccacagca

SEQ ID NO: 2638828 - RNA, 19 nt, Artificial Sequence
  Description of Artificial Sequence: Synthetic oligonucleotide
guccaggaauacaaagguc

SEQ ID NO: 2638829 - RNA, 19 nt, Artificial Sequence
  Description of Artificial Sequence: Synthetic oligonucleotide
ccaggaauacaaaggucuc

SEQ ID NO: 2638830 - RNA, 19 nt, Artificial Sequence
  Description of Artificial Sequence: Synthetic oligonucleotide
uugggagcccaguggcuuc

SEQ ID NO: 2638831 - RNA, 19 nt, Artificial Sequence
  Description of Artificial Sequence: Synthetic oligonucleotide
acaugcugauggucucaca

SEQ ID NO: 2638832 - RNA, 19 nt, Artificial Sequence
  Description of Artificial Sequence: Synthetic oligonucleotide
cucuggguucuccagggaa

SEQ ID NO: 2638833 - RNA, 19 nt, Artificial Sequence
  Description of Artificial Sequence: Synthetic oligonucleotide
gggcgcucagggcacaugc

SEQ ID NO: 2638834 - RNA, 19 nt, Artificial Sequence
  Description of Artificial Sequence: Synthetic oligonucleotide
ggaagcccugcaguguccg

SEQ ID NO: 2638835 - RNA, 19 nt, Artificial Sequence
  Description of Artificial Sequence: Synthetic oligonucleotide
aguggggccuaaagcuggg

SEQ ID NO: 2638836 - RNA, 19 nt, Artificial Sequence
  Description of Artificial Sequence: Synthetic oligonucleotide
cagaagcagcgugugcggc

SEQ ID NO: 2638837 - RNA, 19 nt, Artificial Sequence
  Description of Artificial Sequence: Synthetic oligonucleotide
cacaugcacagugugagcu

SEQ ID NO: 2638838 - RNA, 19 nt, Artificial Sequence
  Description of Artificial Sequence: Synthetic oligonucleotide
cuuccagguccaggaauac

SEQ ID NO: 2638839 - RNA, 19 nt, Artificial Sequence
  Description of Artificial Sequence: Synthetic oligonucleotide
agcccagcuacgggccugc

SEQ ID NO: 2638840 - RNA, 19 nt, Artificial Sequence
  Description of Artificial Sequence: Synthetic oligonucleotide
gugagcccagcuacgggcc

SEQ ID NO: 2638841 - RNA, 19 nt, Artificial Sequence
  Description of Artificial Sequence: Synthetic oligonucleotide
agcagcgugugcggcuugg

SEQ ID NO: 2638842 - RNA, 19 nt, Artificial Sequence
  Description of Artificial Sequence: Synthetic oligonucleotide
gcaguaaaggggcgcucag

SEQ ID NO: 2638843 - RNA, 19 nt, Artificial Sequence
  Description of Artificial Sequence: Synthetic oligonucleotide
ggggccuaaagcuggggca

SEQ ID NO: 2638844 - RNA, 19 nt, Artificial Sequence
  Description of Artificial Sequence: Synthetic oligonucleotide
guggggaacagagaaggcu

SEQ ID NO: 2638845 - RNA, 19 nt, Artificial Sequence
  Description of Artificial Sequence: Synthetic oligonucleotide
ucccgcucuggguucucca

SEQ ID NO: 2638846 - RNA, 19 nt, Artificial Sequence
  Description of Artificial Sequence: Synthetic oligonucleotide
cauucaggccucaaggcuu

SEQ ID NO: 2638847 - RNA, 19 nt, Artificial Sequence
  Description of Artificial Sequence: Synthetic oligonucleotide
uggccagaggguguccaac

SEQ ID NO: 2638848 - RNA, 19 nt, Artificial Sequence
  Description of Artificial Sequence: Synthetic oligonucleotide
auggucucacaggaacagu

SEQ ID NO: 2638849 - RNA, 19 nt, Artificial Sequence
  Description of Artificial Sequence: Synthetic oligonucleotide
caccauugaaaccagccuu

SEQ ID NO: 2638850 - RNA, 19 nt, Artificial Sequence
  Description of Artificial Sequence: Synthetic oligonucleotide
cucaaaccacguaaucccu

SEQ ID NO: 2638851 - RNA, 19 nt, Artificial Sequence
  Description of Artificial Sequence: Synthetic oligonucleotide
agaggguguccaacuggag

SEQ ID NO: 2638852 - RNA, 19 nt, Artificial Sequence
  Description of Artificial Sequence: Synthetic oligonucleotide
gggccuaaagcuggggcag

SEQ ID NO: 2638853 - RNA, 19 nt, Artificial Sequence
  Description of Artificial Sequence: Synthetic oligonucleotide
gauccauguuugggagccc

SEQ ID NO: 2638854 - RNA, 19 nt, Artificial Sequence
  Description of Artificial Sequence: Synthetic oligonucleotide
gggauaucuccgcaaucuc

SEQ ID NO: 2638855 - RNA, 19 nt, Artificial Sequence
  Description of Artificial Sequence: Synthetic oligonucleotide
ggccuucacugcucaaacc

SEQ ID NO: 2638856 - RNA, 19 nt, Artificial Sequence
  Description of Artificial Sequence: Synthetic oligonucleotide
ucgacuggccuuggcagua

SEQ ID NO: 2638857 - RNA, 19 nt, Artificial Sequence
  Description of Artificial Sequence: Synthetic oligonucleotide
gcaguguccgcaccacagc

SEQ ID NO: 2638858 - RNA, 19 nt, Artificial Sequence
  Description of Artificial Sequence: Synthetic oligonucleotide
cuacgggccugcucaucug

SEQ ID NO: 2638859 - RNA, 19 nt, Artificial Sequence
  Description of Artificial Sequence: Synthetic oligonucleotide
gcaggcuucggcuggcuuc

SEQ ID NO: 2638860 - RNA, 19 nt, Artificial Sequence
  Description of Artificial Sequence: Synthetic oligonucleotide
uguccagcacacggggcaa

SEQ ID NO: 2638861 - RNA, 19 nt, Artificial Sequence
  Description of Artificial Sequence: Synthetic oligonucleotide
uucaggccucaaggcuugg

SEQ ID NO: 2638862 - RNA, 19 nt, Artificial Sequence
  Description of Artificial Sequence: Synthetic oligonucleotide
gugugagcuuguccagcac

SEQ ID NO: 2638863 - RNA, 19 nt, Artificial Sequence
  Description of Artificial Sequence: Synthetic oligonucleotide
ggguucuccagggaagaac

SEQ ID NO: 2638864 - RNA, 19 nt, Artificial Sequence
  Description of Artificial Sequence: Synthetic oligonucleotide
guaaucccucgacuggccu

SEQ ID NO: 2638865 - RNA, 19 nt, Artificial Sequence
  Description of Artificial Sequence: Synthetic oligonucleotide
caccagaauugucccgcuc

SEQ ID NO: 2638866 - RNA, 19 nt, Artificial Sequence
  Description of Artificial Sequence: Synthetic oligonucleotide
ccagaauugucccgcucug

SEQ ID NO: 2638867 - RNA, 19 nt, Artificial Sequence
  Description of Artificial Sequence: Synthetic oligonucleotide
ucucagcccgagguggcuc

SEQ ID NO: 2638868 - RNA, 19 nt, Artificial Sequence
  Description of Artificial Sequence: Synthetic oligonucleotide
aaccagccuuccggcagug

SEQ ID NO: 2638869 - RNA, 19 nt, Artificial Sequence
  Description of Artificial Sequence: Synthetic oligonucleotide
gguggcacauacaugggcu

SEQ ID NO: 2638870 - RNA, 19 nt, Artificial Sequence
  Description of Artificial Sequence: Synthetic oligonucleotide
ucccucgacuggccuuggc

SEQ ID NO: 2638871 - RNA, 19 nt, Artificial Sequence
  Description of Artificial Sequence: Synthetic oligonucleotide
cacacggggcaacaccaga

SEQ ID NO: 2638872 - RNA, 19 nt, Artificial Sequence
  Description of Artificial Sequence: Synthetic oligonucleotide
ccauugaaaccagccuucc

SEQ ID NO: 2638873 - RNA, 19 nt, Artificial Sequence
  Description of Artificial Sequence: Synthetic oligonucleotide
gccagaggguguccaacug

SEQ ID NO: 2638874 - RNA, 19 nt, Artificial Sequence
  Description of Artificial Sequence: Synthetic oligonucleotide
cuaaagcuggggcaggcuu

SEQ ID NO: 2638875 - RNA, 19 nt, Artificial Sequence
  Description of Artificial Sequence: Synthetic oligonucleotide
agcuacgggccugcucauc

SEQ ID NO: 2638876 - RNA, 19 nt, Artificial Sequence
  Description of Artificial Sequence: Synthetic oligonucleotide
gcacaugcacagugugagc

SEQ ID NO: 2638877 - RNA, 19 nt, Artificial Sequence
  Description of Artificial Sequence: Synthetic oligonucleotide
ccuuggcaguaaaggggcg

SEQ ID NO: 2638878 - RNA, 19 nt, Artificial Sequence
  Description of Artificial Sequence: Synthetic oligonucleotide
ucaggccuucacugcucaa

SEQ ID NO: 2638879 - RNA, 19 nt, Artificial Sequence
  Description of Artificial Sequence: Synthetic oligonucleotide
gcgcucagggcacaugcac

SEQ ID NO: 2638880 - RNA, 19 nt, Artificial Sequence
  Description of Artificial Sequence: Synthetic oligonucleotide
uccgcaccacagcaccauu

SEQ ID NO: 2638881 - RNA, 19 nt, Artificial Sequence
  Description of Artificial Sequence: Synthetic oligonucleotide
cgcucuggguucuccaggg

SEQ ID NO: 2638882 - RNA, 19 nt, Artificial Sequence
  Description of Artificial Sequence: Synthetic oligonucleotide
uggguucuccagggaagaa

SEQ ID NO: 2638883 - RNA, 19 nt, Artificial Sequence
  Description of Artificial Sequence: Synthetic oligonucleotide
ggcucaaugugagcccagc

SEQ ID NO: 2638884 - RNA, 19 nt, Artificial Sequence
  Description of Artificial Sequence: Synthetic oligonucleotide
gugugcggcuuggaagccc

SEQ ID NO: 2638885 - RNA, 19 nt, Artificial Sequence
  Description of Artificial Sequence: Synthetic oligonucleotide
acaggaacaguggggccua

SEQ ID NO: 2638886 - RNA, 19 nt, Artificial Sequence
  Description of Artificial Sequence: Synthetic oligonucleotide
gguggggaacagagaaggc

SEQ ID NO: 2638887 - RNA, 19 nt, Artificial Sequence
  Description of Artificial Sequence: Synthetic oligonucleotide
cguaaucccucgacuggcc

SEQ ID NO: 2638888 - RNA, 19 nt, Artificial Sequence
  Description of Artificial Sequence: Synthetic oligonucleotide
acggugcaggaagaucaga

SEQ ID NO: 2638889 - RNA, 19 nt, Artificial Sequence
  Description of Artificial Sequence: Synthetic oligonucleotide
caggccuucacugcucaaa

SEQ ID NO: 2638890 - RNA, 19 nt, Artificial Sequence
  Description of Artificial Sequence: Synthetic oligonucleotide
ccaacuggagguggggaac

SEQ ID NO: 2638891 - RNA, 19 nt, Artificial Sequence
  Description of Artificial Sequence: Synthetic oligonucleotide
uuggcccaucagguggcac

SEQ ID NO: 2638892 - RNA, 19 nt, Artificial Sequence
  Description of Artificial Sequence: Synthetic oligonucleotide
gagcccagcuacgggccug

SEQ ID NO: 2638893 - RNA, 19 nt, Artificial Sequence
  Description of Artificial Sequence: Synthetic oligonucleotide
ggugcugcagagagcaaaa

SEQ ID NO: 2638894 - RNA, 19 nt, Artificial Sequence
  Description of Artificial Sequence: Synthetic oligonucleotide
uugucccgcucuggguucu

SEQ ID NO: 2638895 - RNA, 19 nt, Artificial Sequence
  Description of Artificial Sequence: Synthetic oligonucleotide
ccagggaagaacgguggac

SEQ ID NO: 2638896 - RNA, 19 nt, Artificial Sequence
  Description of Artificial Sequence: Synthetic oligonucleotide
cuuggaagcccugcagugu

SEQ ID NO: 2638897 - RNA, 19 nt, Artificial Sequence
  Description of Artificial Sequence: Synthetic oligonucleotide
gcucaucugcccaggcaag

SEQ ID NO: 2638898 - RNA, 19 nt, Artificial Sequence
  Description of Artificial Sequence: Synthetic oligonucleotide
ggcuuggaagcccugcagu

SEQ ID NO: 2638899 - RNA, 19 nt, Artificial Sequence
  Description of Artificial Sequence: Synthetic oligonucleotide
cagagccuggaugaaugaa

SEQ ID NO: 2638900 - RNA, 19 nt, Artificial Sequence
  Description of Artificial Sequence: Synthetic oligonucleotide
gcuacgggccugcucaucu

SEQ ID NO: 2638901 - RNA, 19 nt, Artificial Sequence
  Description of Artificial Sequence: Synthetic oligonucleotide
ccagccuuccggcagugca

SEQ ID NO: 2638902 - RNA, 19 nt, Artificial Sequence
  Description of Artificial Sequence: Synthetic oligonucleotide
ccgcucuggguucuccagg

SEQ ID NO: 2638903 - RNA, 19 nt, Artificial Sequence
  Description of Artificial Sequence: Synthetic oligonucleotide
ccgcaccacagcaccauug

SEQ ID NO: 2638904 - RNA, 19 nt, Artificial Sequence
  Description of Artificial Sequence: Synthetic oligonucleotide
guaggccagggcugaggaa

SEQ ID NO: 2638905 - RNA, 19 nt, Artificial Sequence
  Description of Artificial Sequence: Synthetic oligonucleotide
ggccuaaagcuggggcagg

SEQ ID NO: 2638906 - RNA, 19 nt, Artificial Sequence
  Description of Artificial Sequence: Synthetic oligonucleotide
acuggcauucaggccucaa

SEQ ID NO: 2638907 - RNA, 19 nt, Artificial Sequence
  Description of Artificial Sequence: Synthetic oligonucleotide
  modified_base (2)..(2): a, c, u, g, unknown or other
cnugucucagagccuggau

SEQ ID NO: 2638908 - RNA, 19 nt, Artificial Sequence
  Description of Artificial Sequence: Synthetic oligonucleotide
ccugcucaucugcccaggc

SEQ ID NO: 2638909 - RNA, 19 nt, Artificial Sequence
  Description of Artificial Sequence: Synthetic oligonucleotide
cggggcaacaccagagcac

SEQ ID NO: 2638910 - RNA, 19 nt, Artificial Sequence
  Description of Artificial Sequence: Synthetic oligonucleotide
ccagagcaccagaauuguc

SEQ ID NO: 2638911 - RNA, 19 nt, Artificial Sequence
  Description of Artificial Sequence: Synthetic oligonucleotide
cccgagguggcucagacau

SEQ ID NO: 2638912 - RNA, 19 nt, Artificial Sequence
  Description of Artificial Sequence: Synthetic oligonucleotide
gccuaaagcuggggcaggc

SEQ ID NO: 2638913 - RNA, 19 nt, Artificial Sequence
  Description of Artificial Sequence: Synthetic oligonucleotide
cccgcucuggguucuccag

SEQ ID NO: 2638914 - RNA, 19 nt, Artificial Sequence
  Description of Artificial Sequence: Synthetic oligonucleotide
gaagaacgguggacagcaa

SEQ ID NO: 2638915 - RNA, 19 nt, Artificial Sequence
  Description of Artificial Sequence: Synthetic oligonucleotide
gcaagcagcucagcagcac

SEQ ID NO: 2638916 - RNA, 19 nt, Artificial Sequence
  Description of Artificial Sequence: Synthetic oligonucleotide
aggaacaguggggccuaaa

SEQ ID NO: 2638917 - RNA, 19 nt, Artificial Sequence
  Description of Artificial Sequence: Synthetic oligonucleotide
ggaagaucagaagcagcgu

SEQ ID NO: 2638918 - RNA, 19 nt, Artificial Sequence
  Description of Artificial Sequence: Synthetic oligonucleotide
cucgacuggccuuggcagu

SEQ ID NO: 2638919 - RNA, 19 nt, Artificial Sequence
  Description of Artificial Sequence: Synthetic oligonucleotide
guggcucagacaugcugau

SEQ ID NO: 2638920 - RNA, 19 nt, Artificial Sequence
  Description of Artificial Sequence: Synthetic oligonucleotide
aaggggcgcucagggcaca

SEQ ID NO: 2638921 - RNA, 19 nt, Artificial Sequence
  Description of Artificial Sequence: Synthetic oligonucleotide
aucccucgacuggccuugg

SEQ ID NO: 2638922 - RNA, 19 nt, Artificial Sequence
  Description of Artificial Sequence: Synthetic oligonucleotide
ccuuccggcagugcaucag

SEQ ID NO: 2638923 - RNA, 19 nt, Artificial Sequence
  Description of Artificial Sequence: Synthetic oligonucleotide
gaagcagcgugugcggcuu

SEQ ID NO: 2638924 - RNA, 19 nt, Artificial Sequence
  Description of Artificial Sequence: Synthetic oligonucleotide
gggauccuauauucaggua

SEQ ID NO: 2638925 - RNA, 19 nt, Artificial Sequence
  Description of Artificial Sequence: Synthetic oligonucleotide
gcggcuuggaagcccugca

SEQ ID NO: 2638926 - RNA, 19 nt, Artificial Sequence
  Description of Artificial Sequence: Synthetic oligonucleotide
ggcuucggcuggcuuccug

SEQ ID NO: 2638927 - RNA, 19 nt, Artificial Sequence
  Description of Artificial Sequence: Synthetic oligonucleotide
cagcgugugcggcuuggaa

SEQ ID NO: 2638928 - RNA, 19 nt, Artificial Sequence
  Description of Artificial Sequence: Synthetic oligonucleotide
gggcacaugcacaguguga

SEQ ID NO: 2638929 - RNA, 19 nt, Artificial Sequence
  Description of Artificial Sequence: Synthetic oligonucleotide
cggugcaggaagaucagaa

SEQ ID NO: 2638930 - RNA, 19 nt, Artificial Sequence
  Description of Artificial Sequence: Synthetic oligonucleotide
gcucaaugugagcccagcu

SEQ ID NO: 2638931 - RNA, 19 nt, Artificial Sequence
  Description of Artificial Sequence: Synthetic oligonucleotide
guuugggagcccaguggcu

SEQ ID NO: 2638932 - RNA, 19 nt, Artificial Sequence
  Description of Artificial Sequence: Synthetic oligonucleotide
gucccgcucuggguucucc

SEQ ID NO: 2638933 - RNA, 19 nt, Artificial Sequence
  Description of Artificial Sequence: Synthetic oligonucleotide
cccucgacuggccuuggca

SEQ ID NO: 2638934 - RNA, 19 nt, Artificial Sequence
  Description of Artificial Sequence: Synthetic oligonucleotide
ggcacauacaugggcucaa

SEQ ID NO: 2638935 - RNA, 19 nt, Artificial Sequence
  Description of Artificial Sequence: Synthetic oligonucleotide
gcacacggggcaacaccag

SEQ ID NO: 2638936 - RNA, 19 nt, Artificial Sequence
  Description of Artificial Sequence: Synthetic oligonucleotide
caaucucaggauccauguu

SEQ ID NO: 2638937 - RNA, 19 nt, Artificial Sequence
  Description of Artificial Sequence: Synthetic oligonucleotide
ggcaagcagcucagcagca

SEQ ID NO: 2638938 - RNA, 19 nt, Artificial Sequence
  Description of Artificial Sequence: Synthetic oligonucleotide
gcccaggcaagcagcucag

SEQ ID NO: 2638939 - RNA, 19 nt, Artificial Sequence
  Description of Artificial Sequence: Synthetic oligonucleotide
cugcccaggcaagcagcuc

SEQ ID NO: 2638940 - RNA, 19 nt, Artificial Sequence
  Description of Artificial Sequence: Synthetic oligonucleotide
ccggcagugcaucaggccu

SEQ ID NO: 2638941 - RNA, 19 nt, Artificial Sequence
  Description of Artificial Sequence: Synthetic oligonucleotide
gcugauggucucacaggaa

SEQ ID NO: 2638942 - RNA, 19 nt, Artificial Sequence
  Description of Artificial Sequence: Synthetic oligonucleotide
gggcucaaugugagcccag

SEQ ID NO: 2638943 - RNA, 19 nt, Artificial Sequence
  Description of Artificial Sequence: Synthetic oligonucleotide
gcagcacggugcaggaaga

SEQ ID NO: 2638944 - RNA, 19 nt, Artificial Sequence
  Description of Artificial Sequence: Synthetic oligonucleotide
cgcaccacagcaccauuga

SEQ ID NO: 2638945 - RNA, 19 nt, Artificial Sequence
  Description of Artificial Sequence: Synthetic oligonucleotide
gcucuggguucuccaggga

SEQ ID NO: 2638946 - RNA, 19 nt, Artificial Sequence
  Description of Artificial Sequence: Synthetic oligonucleotide
ggggaacagagaaggcucu

SEQ ID NO: 2638947 - RNA, 19 nt, Artificial Sequence
  Description of Artificial Sequence: Synthetic oligonucleotide
cagccuuccggcagugcau

SEQ ID NO: 2638948 - RNA, 19 nt, Artificial Sequence
  Description of Artificial Sequence: Synthetic oligonucleotide
ccgagguggcucagacaug

SEQ ID NO: 2638949 - RNA, 19 nt, Artificial Sequence
  Description of Artificial Sequence: Synthetic oligonucleotide
cccagcuacgggccugcuc

SEQ ID NO: 2638950 - RNA, 19 nt, Artificial Sequence
  Description of Artificial Sequence: Synthetic oligonucleotide
ggcgcucagggcacaugca

SEQ ID NO: 2638951 - RNA, 19 nt, Artificial Sequence
  Description of Artificial Sequence: Synthetic oligonucleotide
caggugcugcagagagcaa

SEQ ID NO: 2638952 - RNA, 19 nt, Artificial Sequence
  Description of Artificial Sequence: Synthetic oligonucleotide
gcccugcaguguccgcacc

SEQ ID NO: 2638953 - RNA, 19 nt, Artificial Sequence
  Description of Artificial Sequence: Synthetic oligonucleotide
gcccgagguggcucagaca

SEQ ID NO: 2638954 - RNA, 19 nt, Artificial Sequence
  Description of Artificial Sequence: Synthetic oligonucleotide
gccuuccggcagugcauca

SEQ ID NO: 2638955 - RNA, 19 nt, Artificial Sequence
  Description of Artificial Sequence: Synthetic oligonucleotide
gugcggcuuggaagcccug

SEQ ID NO: 2638956 - RNA, 19 nt, Artificial Sequence
  Description of Artificial Sequence: Synthetic oligonucleotide
gcaccagaauugucccgcu

SEQ ID NO: 2638957 - RNA, 19 nt, Artificial Sequence
  Description of Artificial Sequence: Synthetic oligonucleotide
ggggcgcucagggcacaug

SEQ ID NO: 2638958 - RNA, 19 nt, Artificial Sequence
  Description of Artificial Sequence: Synthetic oligonucleotide
aggggcgcucagggcacau

SEQ ID NO: 2638959 - RNA, 19 nt, Artificial Sequence
  Description of Artificial Sequence: Synthetic oligonucleotide
cucagggcacaugcacagu

SEQ ID NO: 2638960 - RNA, 19 nt, Artificial Sequence
  Description of Artificial Sequence: Synthetic oligonucleotide
cccaggcaagcagcucagc

SEQ ID NO: 2638961 - RNA, 19 nt, Artificial Sequence
  Description of Artificial Sequence: Synthetic oligonucleotide
cgugugcggcuuggaagcc

SEQ ID NO: 2638962 - RNA, 19 nt, Artificial Sequence
  Description of Artificial Sequence: Synthetic oligonucleotide
gggcaacaccagagcacca

SEQ ID NO: 2638963 - RNA, 19 nt, Artificial Sequence
  Description of Artificial Sequence: Synthetic oligonucleotide
ccauguuugggagcccagu

SEQ ID NO: 2638964 - RNA, 19 nt, Artificial Sequence
  Description of Artificial Sequence: Synthetic oligonucleotide
gcagcgugugcggcuugga

SEQ ID NO: 2638965 - RNA, 19 nt, Artificial Sequence
  Description of Artificial Sequence: Synthetic oligonucleotide
cacuggcauucaggccuca

SEQ ID NO: 2638966 - RNA, 19 nt, Artificial Sequence
  Description of Artificial Sequence: Synthetic oligonucleotide
cagcccgagguggcucaga

SEQ ID NO: 2638967 - RNA, 19 nt, Artificial Sequence
  Description of Artificial Sequence: Synthetic oligonucleotide
ccuaaagcuggggcaggcu

SEQ ID NO: 2638968 - RNA, 19 nt, Artificial Sequence
  Description of Artificial Sequence: Synthetic oligonucleotide
caggaacaguggggccuaa

SEQ ID NO: 2638969 - RNA, 19 nt, Artificial Sequence
  Description of Artificial Sequence: Synthetic oligonucleotide
cagcacggugcaggaagau

SEQ ID NO: 2638970 - RNA, 19 nt, Artificial Sequence
  Description of Artificial Sequence: Synthetic oligonucleotide
cagcuacgggccugcucau

SEQ ID NO: 2638971 - RNA, 19 nt, Artificial Sequence
  Description of Artificial Sequence: Synthetic oligonucleotide
ggcaggcuucggcuggcuu

SEQ ID NO: 2638972 - RNA, 19 nt, Artificial Sequence
  Description of Artificial Sequence: Synthetic oligonucleotide
cggcagugcaucaggccuu

SEQ ID NO: 2638973 - RNA, 19 nt, Artificial Sequence
  Description of Artificial Sequence: Synthetic oligonucleotide
gggcaggcuucggcuggcu

SEQ ID NO: 2638974 - RNA, 19 nt, Artificial Sequence
  Description of Artificial Sequence: Synthetic oligonucleotide
ccgcaaucucaggauccau

SEQ ID NO: 2638975 - RNA, 19 nt, Artificial Sequence
  Description of Artificial Sequence: Synthetic oligonucleotide
cgacuggccuuggcaguaa

SEQ ID NO: 2638976 - RNA, 19 nt, Artificial Sequence
  Description of Artificial Sequence: Synthetic oligonucleotide
gcccagcuacgggccugcu

SEQ ID NO: 2638977 - RNA, 19 nt, Artificial Sequence
  Description of Artificial Sequence: Synthetic oligonucleotide
  modified_base (1)..(1): a, c, u, g, unknown or other
nugucucagagccuggaug

SEQ ID NO: 2638978 - RNA, 19 nt, Artificial Sequence
  Description of Artificial Sequence: Synthetic oligonucleotide
uuugaaacgaucaaaaucu

SEQ ID NO: 2638979 - RNA, 19 nt, Artificial Sequence
  Description of Artificial Sequence: Synthetic oligonucleotide
auugauaucugcuuucucc

SEQ ID NO: 2638980 - RNA, 19 nt, Artificial Sequence
  Description of Artificial Sequence: Synthetic oligonucleotide
aagucaguaagcugcaugc

SEQ ID NO: 2638981 - RNA, 19 nt, Artificial Sequence
  Description of Artificial Sequence: Synthetic oligonucleotide
aucgauuacaucuacaauc

SEQ ID NO: 2638982 - RNA, 19 nt, Artificial Sequence
  Description of Artificial Sequence: Synthetic oligonucleotide
acuuuguacagccucaugc

SEQ ID NO: 2638983 - RNA, 19 nt, Artificial Sequence
  Description of Artificial Sequence: Synthetic oligonucleotide
uuuauuacuuuguacagcc

SEQ ID NO: 2638984 - RNA, 19 nt, Artificial Sequence
  Description of Artificial Sequence: Synthetic oligonucleotide
aagcuuucaggauagcagc

SEQ ID NO: 2638985 - RNA, 19 nt, Artificial Sequence
  Description of Artificial Sequence: Synthetic oligonucleotide
ucgauuacaucuacaaucg

SEQ ID NO: 2638986 - RNA, 19 nt, Artificial Sequence
  Description of Artificial Sequence: Synthetic oligonucleotide
ucaaaaucugucaucuugg

SEQ ID NO: 2638987 - RNA, 19 nt, Artificial Sequence
  Description of Artificial Sequence: Synthetic oligonucleotide
aaaucugucaucuuggcuu

SEQ ID NO: 2638988 - RNA, 19 nt, Artificial Sequence
  Description of Artificial Sequence: Synthetic oligonucleotide
ucuucugaccuuuagcagg

SEQ ID NO: 2638989 - RNA, 19 nt, Artificial Sequence
  Description of Artificial Sequence: Synthetic oligonucleotide
uuuccguacauauuucugg

SEQ ID NO: 2638990 - RNA, 19 nt, Artificial Sequence
  Description of Artificial Sequence: Synthetic oligonucleotide
gauuacaucuacaaucgcg

SEQ ID NO: 2638991 - RNA, 19 nt, Artificial Sequence
  Description of Artificial Sequence: Synthetic oligonucleotide
auuucguauugauaucugc

SEQ ID NO: 2638992 - RNA, 19 nt, Artificial Sequence
  Description of Artificial Sequence: Synthetic oligonucleotide
ucgacuaaagcucuguucu

SEQ ID NO: 2638993 - RNA, 19 nt, Artificial Sequence
  Description of Artificial Sequence: Synthetic oligonucleotide
uugaccucagucuugauga

SEQ ID NO: 2638994 - RNA, 19 nt, Artificial Sequence
  Description of Artificial Sequence: Synthetic oligonucleotide
aucaaaaucugucaucuug

SEQ ID NO: 2638995 - RNA, 19 nt, Artificial Sequence
  Description of Artificial Sequence: Synthetic oligonucleotide
cuuugaaacgaucaaaauc

SEQ ID NO: 2638996 - RNA, 19 nt, Artificial Sequence
  Description of Artificial Sequence: Synthetic oligonucleotide
ucuacaaucgcgaccagcu

SEQ ID NO: 2638997 - RNA, 19 nt, Artificial Sequence
  Description of Artificial Sequence: Synthetic oligonucleotide
ugcaauggcagccuuagca

SEQ ID NO: 2638998 - RNA, 19 nt, Artificial Sequence
  Description of Artificial Sequence: Synthetic oligonucleotide
uuuagcaggagcugcagcc

SEQ ID NO: 2638999 - RNA, 19 nt, Artificial Sequence
  Description of Artificial Sequence: Synthetic oligonucleotide
gcugcaugcacuuaaaagg

SEQ ID NO: 2639000 - RNA, 19 nt, Artificial Sequence
  Description of Artificial Sequence: Synthetic oligonucleotide
aaacgaucaaaaucuguca

SEQ ID NO: 2639001 - RNA, 19 nt, Artificial Sequence
  Description of Artificial Sequence: Synthetic oligonucleotide
uuucguauugauaucugcu

SEQ ID NO: 2639002 - RNA, 19 nt, Artificial Sequence
  Description of Artificial Sequence: Synthetic oligonucleotide
uauuacuuuguacagccuc

SEQ ID NO: 2639003 - RNA, 19 nt, Artificial Sequence
  Description of Artificial Sequence: Synthetic oligonucleotide
gaaccuuagcuuuagcagc

SEQ ID NO: 2639004 - RNA, 19 nt, Artificial Sequence
  Description of Artificial Sequence: Synthetic oligonucleotide
agguccaucgacuaaagcu

SEQ ID NO: 2639005 - RNA, 19 nt, Artificial Sequence
  Description of Artificial Sequence: Synthetic oligonucleotide
uacuuugaaacgaucaaaa

SEQ ID NO: 2639006 - RNA, 19 nt, Artificial Sequence
  Description of Artificial Sequence: Synthetic oligonucleotide
gaagcuuucaggauagcag

SEQ ID NO: 2639007 - RNA, 19 nt, Artificial Sequence
  Description of Artificial Sequence: Synthetic oligonucleotide
ugaucgauuacaucuacaa

SEQ ID NO: 2639008 - RNA, 19 nt, Artificial Sequence
  Description of Artificial Sequence: Synthetic oligonucleotide
uuucauuacuuugaaacga

SEQ ID NO: 2639009 - RNA, 19 nt, Artificial Sequence
  Description of Artificial Sequence: Synthetic oligonucleotide
uugauaucugcuuucuccc

SEQ ID NO: 2639010 - RNA, 19 nt, Artificial Sequence
  Description of Artificial Sequence: Synthetic oligonucleotide
gaaacgaucaaaaucuguc

SEQ ID NO: 2639011 - RNA, 19 nt, Artificial Sequence
  Description of Artificial Sequence: Synthetic oligonucleotide
acucuucugaccuuuagca

SEQ ID NO: 2639012 - RNA, 19 nt, Artificial Sequence
  Description of Artificial Sequence: Synthetic oligonucleotide
aaaaucugucaucuuggcu

SEQ ID NO: 2639013 - RNA, 19 nt, Artificial Sequence
  Description of Artificial Sequence: Synthetic oligonucleotide
ucgggcaucaaucuucuug

SEQ ID NO: 2639014 - RNA, 19 nt, Artificial Sequence
  Description of Artificial Sequence: Synthetic oligonucleotide
aguuucuugaccucagucu

SEQ ID NO: 2639015 - RNA, 19 nt, Artificial Sequence
  Description of Artificial Sequence: Synthetic oligonucleotide
aagcuuuccguacauauuu

SEQ ID NO: 2639016 - RNA, 19 nt, Artificial Sequence
  Description of Artificial Sequence: Synthetic oligonucleotide
ucagucuugaugauucugu

SEQ ID NO: 2639017 - RNA, 19 nt, Artificial Sequence
  Description of Artificial Sequence: Synthetic oligonucleotide
agcugcaugcacuuaaaag

SEQ ID NO: 2639018 - RNA, 19 nt, Artificial Sequence
  Description of Artificial Sequence: Synthetic oligonucleotide
aacgaucaaaaucugucau

SEQ ID NO: 2639019 - RNA, 19 nt, Artificial Sequence
  Description of Artificial Sequence: Synthetic oligonucleotide
uacaucuacaaucgcgacc

SEQ ID NO: 2639020 - RNA, 19 nt, Artificial Sequence
  Description of Artificial Sequence: Synthetic oligonucleotide
uacaaucgcgaccagcuug

SEQ ID NO: 2639021 - RNA, 19 nt, Artificial Sequence
  Description of Artificial Sequence: Synthetic oligonucleotide
aucgacuaaagcucuguuc

SEQ ID NO: 2639022 - RNA, 19 nt, Artificial Sequence
  Description of Artificial Sequence: Synthetic oligonucleotide
cagcuugccagcaugaggc

SEQ ID NO: 2639023 - RNA, 19 nt, Artificial Sequence
  Description of Artificial Sequence: Synthetic oligonucleotide
aucgcgaccagcuugccag

SEQ ID NO: 2639024 - RNA, 19 nt, Artificial Sequence
  Description of Artificial Sequence: Synthetic oligonucleotide
acuuaaaaggcauggccug

SEQ ID NO: 2639025 - RNA, 19 nt, Artificial Sequence
  Description of Artificial Sequence: Synthetic oligonucleotide
aagguccaucgacuaaagc

SEQ ID NO: 2639026 - RNA, 19 nt, Artificial Sequence
  Description of Artificial Sequence: Synthetic oligonucleotide
cuuguggccgaccauuucg

SEQ ID NO: 2639027 - RNA, 19 nt, Artificial Sequence
  Description of Artificial Sequence: Synthetic oligonucleotide
ucaguaagcugcaugcacu

SEQ ID NO: 2639028 - RNA, 19 nt, Artificial Sequence
  Description of Artificial Sequence: Synthetic oligonucleotide
agccuuuauuacuuuguac

SEQ ID NO: 2639029 - RNA, 19 nt, Artificial Sequence
  Description of Artificial Sequence: Synthetic oligonucleotide
gaagucaguaagcugcaug

SEQ ID NO: 2639030 - RNA, 19 nt, Artificial Sequence
  Description of Artificial Sequence: Synthetic oligonucleotide
uuuugggcgaagcuuucag

SEQ ID NO: 2639031 - RNA, 19 nt, Artificial Sequence
  Description of Artificial Sequence: Synthetic oligonucleotide
auuacuuugaaacgaucaa

SEQ ID NO: 2639032 - RNA, 19 nt, Artificial Sequence
  Description of Artificial Sequence: Synthetic oligonucleotide
guucugaucgauuacaucu

SEQ ID NO: 2639033 - RNA, 19 nt, Artificial Sequence
  Description of Artificial Sequence: Synthetic oligonucleotide
ugaaacgaucaaaaucugu

SEQ ID NO: 2639034 - RNA, 19 nt, Artificial Sequence
  Description of Artificial Sequence: Synthetic oligonucleotide
cugcaugcacuuaaaaggc

SEQ ID NO: 2639035 - RNA, 19 nt, Artificial Sequence
  Description of Artificial Sequence: Synthetic oligonucleotide
cauuacuuugaaacgauca

SEQ ID NO: 2639036 - RNA, 19 nt, Artificial Sequence
  Description of Artificial Sequence: Synthetic oligonucleotide
ggaaccuuagcuuuagcag

SEQ ID NO: 2639037 - RNA, 19 nt, Artificial Sequence
  Description of Artificial Sequence: Synthetic oligonucleotide
acaucuacaaucgcgacca

SEQ ID NO: 2639038 - RNA, 19 nt, Artificial Sequence
  Description of Artificial Sequence: Synthetic oligonucleotide
acgaucaaaaucugucauc

SEQ ID NO: 2639039 - RNA, 19 nt, Artificial Sequence
  Description of Artificial Sequence: Synthetic oligonucleotide
acauauuucuggcgggcac

SEQ ID NO: 2639040 - RNA, 19 nt, Artificial Sequence
  Description of Artificial Sequence: Synthetic oligonucleotide
ucuucugacucuucugacc

SEQ ID NO: 2639041 - RNA, 19 nt, Artificial Sequence
  Description of Artificial Sequence: Synthetic oligonucleotide
acugugugggaacuugagg

SEQ ID NO: 2639042 - RNA, 19 nt, Artificial Sequence
  Description of Artificial Sequence: Synthetic oligonucleotide
uuagcuuuagcagcugcag

SEQ ID NO: 2639043 - RNA, 19 nt, Artificial Sequence
  Description of Artificial Sequence: Synthetic oligonucleotide
ugugggaacuugaggauga

SEQ ID NO: 2639044 - RNA, 19 nt, Artificial Sequence
  Description of Artificial Sequence: Synthetic oligonucleotide
agcuuuagcagcugcagcu

SEQ ID NO: 2639045 - RNA, 19 nt, Artificial Sequence
  Description of Artificial Sequence: Synthetic oligonucleotide
uuugggcgaagcuuucagg

SEQ ID NO: 2639046 - RNA, 19 nt, Artificial Sequence
  Description of Artificial Sequence: Synthetic oligonucleotide
cuuuauuacuuuguacagc

SEQ ID NO: 2639047 - RNA, 19 nt, Artificial Sequence
  Description of Artificial Sequence: Synthetic oligonucleotide
agccucaugcuuucuuucc

SEQ ID NO: 2639048 - RNA, 19 nt, Artificial Sequence
  Description of Artificial Sequence: Synthetic oligonucleotide
gcaucaaucuucuuggccc

SEQ ID NO: 2639049 - RNA, 19 nt, Artificial Sequence
  Description of Artificial Sequence: Synthetic oligonucleotide
ucacccgagugcaaggucc

SEQ ID NO: 2639050 - RNA, 19 nt, Artificial Sequence
  Description of Artificial Sequence: Synthetic oligonucleotide
gauagcagcucucugaagu

SEQ ID NO: 2639051 - RNA, 19 nt, Artificial Sequence
  Description of Artificial Sequence: Synthetic oligonucleotide
uuccguacauauuucuggc

SEQ ID NO: 2639052 - RNA, 19 nt, Artificial Sequence
  Description of Artificial Sequence: Synthetic oligonucleotide
gaccauuucguauugauau

SEQ ID NO: 2639053 - RNA, 19 nt, Artificial Sequence
  Description of Artificial Sequence: Synthetic oligonucleotide
ucuucuuggcccaucuugu

SEQ ID NO: 2639054 - RNA, 19 nt, Artificial Sequence
  Description of Artificial Sequence: Synthetic oligonucleotide
uucauuacuuugaaacgau

SEQ ID NO: 2639055 - RNA, 19 nt, Artificial Sequence
  Description of Artificial Sequence: Synthetic oligonucleotide
ucuguucugaucgauuaca

SEQ ID NO: 2639056 - RNA, 19 nt, Artificial Sequence
  Description of Artificial Sequence: Synthetic oligonucleotide
aaaggagacguaggccacc

SEQ ID NO: 2639057 - RNA, 19 nt, Artificial Sequence
  Description of Artificial Sequence: Synthetic oligonucleotide
uugaggaugaagucaguaa

SEQ ID NO: 2639058 - RNA, 19 nt, Artificial Sequence
  Description of Artificial Sequence: Synthetic oligonucleotide
auggccugucuccucaccc

SEQ ID NO: 2639059 - RNA, 19 nt, Artificial Sequence
  Description of Artificial Sequence: Synthetic oligonucleotide
aaggagacguaggccaccc

SEQ ID NO: 2639060 - RNA, 19 nt, Artificial Sequence
  Description of Artificial Sequence: Synthetic oligonucleotide
cuuucucccaagcuuuccg

SEQ ID NO: 2639061 - RNA, 19 nt, Artificial Sequence
  Description of Artificial Sequence: Synthetic oligonucleotide
uccguacauauuucuggcg

SEQ ID NO: 2639062 - RNA, 19 nt, Artificial Sequence
  Description of Artificial Sequence: Synthetic oligonucleotide
uugaaacgaucaaaaucug

SEQ ID NO: 2639063 - RNA, 19 nt, Artificial Sequence
  Description of Artificial Sequence: Synthetic oligonucleotide
caaaaucugucaucuuggc

SEQ ID NO: 2639064 - RNA, 19 nt, Artificial Sequence
  Description of Artificial Sequence: Synthetic oligonucleotide
ucugaccuuuagcaggagc

SEQ ID NO: 2639065 - RNA, 19 nt, Artificial Sequence
  Description of Artificial Sequence: Synthetic oligonucleotide
uuacuuugaaacgaucaaa

SEQ ID NO: 2639066 - RNA, 19 nt, Artificial Sequence
  Description of Artificial Sequence: Synthetic oligonucleotide
accucagucuugaugauuc

SEQ ID NO: 2639067 - RNA, 19 nt, Artificial Sequence
  Description of Artificial Sequence: Synthetic oligonucleotide
acaaucgcgaccagcuugc

SEQ ID NO: 2639068 - RNA, 19 nt, Artificial Sequence
  Description of Artificial Sequence: Synthetic oligonucleotide
ucugaucgauuacaucuac

SEQ ID NO: 2639069 - RNA, 19 nt, Artificial Sequence
  Description of Artificial Sequence: Synthetic oligonucleotide
ucaugcuuucuuuccagcu

SEQ ID NO: 2639070 - RNA, 19 nt, Artificial Sequence
  Description of Artificial Sequence: Synthetic oligonucleotide
accauuucguauugauauc

SEQ ID NO: 2639071 - RNA, 19 nt, Artificial Sequence
  Description of Artificial Sequence: Synthetic oligonucleotide
uucguauugauaucugcuu

SEQ ID NO: 2639072 - RNA, 19 nt, Artificial Sequence
  Description of Artificial Sequence: Synthetic oligonucleotide
agcucucugaaguuucuug

SEQ ID NO: 2639073 - RNA, 19 nt, Artificial Sequence
  Description of Artificial Sequence: Synthetic oligonucleotide
auuucuggcgggcacugug

SEQ ID NO: 2639074 - RNA, 19 nt, Artificial Sequence
  Description of Artificial Sequence: Synthetic oligonucleotide
uccucauuuucuuugcuuu

SEQ ID NO: 2639075 - RNA, 19 nt, Artificial Sequence
  Description of Artificial Sequence: Synthetic oligonucleotide
agacguaggccacccggcc

SEQ ID NO: 2639076 - RNA, 19 nt, Artificial Sequence
  Description of Artificial Sequence: Synthetic oligonucleotide
uuucuugaccucagucuug

SEQ ID NO: 2639077 - RNA, 19 nt, Artificial Sequence
  Description of Artificial Sequence: Synthetic oligonucleotide
gagugcaagguccaucgac

SEQ ID NO: 2639078 - RNA, 19 nt, Artificial Sequence
  Description of Artificial Sequence: Synthetic oligonucleotide
ucguauugauaucugcuuu

SEQ ID NO: 2639079 - RNA, 19 nt, Artificial Sequence
  Description of Artificial Sequence: Synthetic oligonucleotide
ucauuacuuugaaacgauc

SEQ ID NO: 2639080 - RNA, 19 nt, Artificial Sequence
  Description of Artificial Sequence: Synthetic oligonucleotide
caugcuuucuuuccagcug

SEQ ID NO: 2639081 - RNA, 19 nt, Artificial Sequence
  Description of Artificial Sequence: Synthetic oligonucleotide
aaagcucuguucugaucga

SEQ ID NO: 2639082 - RNA, 19 nt, Artificial Sequence
  Description of Artificial Sequence: Synthetic oligonucleotide
ugcaugcacuuaaaaggca

SEQ ID NO: 2639083 - RNA, 19 nt, Artificial Sequence
  Description of Artificial Sequence: Synthetic oligonucleotide
uuggcuggaaccuuagcuu

SEQ ID NO: 2639084 - RNA, 19 nt, Artificial Sequence
  Description of Artificial Sequence: Synthetic oligonucleotide
cucuucugaccuuuagcag

SEQ ID NO: 2639085 - RNA, 19 nt, Artificial Sequence
  Description of Artificial Sequence: Synthetic oligonucleotide
ccaaccuccacgaagcgcc

SEQ ID NO: 2639086 - RNA, 19 nt, Artificial Sequence
  Description of Artificial Sequence: Synthetic oligonucleotide
caugaggcccaaaggagac

SEQ ID NO: 2639087 - RNA, 19 nt, Artificial Sequence
  Description of Artificial Sequence: Synthetic oligonucleotide
cagccuuagcaacaggagc

SEQ ID NO: 2639088 - RNA, 19 nt, Artificial Sequence
  Description of Artificial Sequence: Synthetic oligonucleotide
uuauuacuuuguacagccu

SEQ ID NO: 2639089 - RNA, 19 nt, Artificial Sequence
  Description of Artificial Sequence: Synthetic oligonucleotide
gucaguaagcugcaugcac

SEQ ID NO: 2639090 - RNA, 19 nt, Artificial Sequence
  Description of Artificial Sequence: Synthetic oligonucleotide
cauuucguauugauaucug

SEQ ID NO: 2639091 - RNA, 19 nt, Artificial Sequence
  Description of Artificial Sequence: Synthetic oligonucleotide
uuacaucuacaaucgcgac

SEQ ID NO: 2639092 - RNA, 19 nt, Artificial Sequence
  Description of Artificial Sequence: Synthetic oligonucleotide
uaucugcuuucucccaagc

SEQ ID NO: 2639093 - RNA, 19 nt, Artificial Sequence
  Description of Artificial Sequence: Synthetic oligonucleotide
uaaaaggcauggccugucu

SEQ ID NO: 2639094 - RNA, 19 nt, Artificial Sequence
  Description of Artificial Sequence: Synthetic oligonucleotide
ugauaucugcuuucuccca

SEQ ID NO: 2639095 - RNA, 19 nt, Artificial Sequence
  Description of Artificial Sequence: Synthetic oligonucleotide
aauggcagccuuagcaaca

SEQ ID NO: 2639096 - RNA, 19 nt, Artificial Sequence
  Description of Artificial Sequence: Synthetic oligonucleotide
uguucugaucgauuacauc

SEQ ID NO: 2639097 - RNA, 19 nt, Artificial Sequence
  Description of Artificial Sequence: Synthetic oligonucleotide
caugcacuuaaaaggcaug

SEQ ID NO: 2639098 - RNA, 19 nt, Artificial Sequence
  Description of Artificial Sequence: Synthetic oligonucleotide
uucugaucgauuacaucua

SEQ ID NO: 2639099 - RNA, 19 nt, Artificial Sequence
  Description of Artificial Sequence: Synthetic oligonucleotide
uauugauaucugcuuucuc

SEQ ID NO: 2639100 - RNA, 19 nt, Artificial Sequence
  Description of Artificial Sequence: Synthetic oligonucleotide
ugcacuuaaaaggcauggc

SEQ ID NO: 2639101 - RNA, 19 nt, Artificial Sequence
  Description of Artificial Sequence: Synthetic oligonucleotide
ggagacguaggccacccgg

SEQ ID NO: 2639102 - RNA, 19 nt, Artificial Sequence
  Description of Artificial Sequence: Synthetic oligonucleotide
ccuuuauuacuuuguacag

SEQ ID NO: 2639103 - RNA, 19 nt, Artificial Sequence
  Description of Artificial Sequence: Synthetic oligonucleotide
cucucugaaguuucuugac

SEQ ID NO: 2639104 - RNA, 19 nt, Artificial Sequence
  Description of Artificial Sequence: Synthetic oligonucleotide
aaccuuagcuuuagcagcu

SEQ ID NO: 2639105 - RNA, 19 nt, Artificial Sequence
  Description of Artificial Sequence: Synthetic oligonucleotide
uguacagccucaugcuuuc

SEQ ID NO: 2639106 - RNA, 19 nt, Artificial Sequence
  Description of Artificial Sequence: Synthetic oligonucleotide
uugcuuucauuacuuugaa

SEQ ID NO: 2639107 - RNA, 19 nt, Artificial Sequence
  Description of Artificial Sequence: Synthetic oligonucleotide
uuucucccaagcuuuccgu

SEQ ID NO: 2639108 - RNA, 19 nt, Artificial Sequence
  Description of Artificial Sequence: Synthetic oligonucleotide
cucaugcuuucuuuccagc

SEQ ID NO: 2639109 - RNA, 19 nt, Artificial Sequence
  Description of Artificial Sequence: Synthetic oligonucleotide
cuuuagcaggagcugcagc

SEQ ID NO: 2639110 - RNA, 19 nt, Artificial Sequence
  Description of Artificial Sequence: Synthetic oligonucleotide
uucaggauagcagcucucu

SEQ ID NO: 2639111 - RNA, 19 nt, Artificial Sequence
  Description of Artificial Sequence: Synthetic oligonucleotide
ugugugggaacuugaggau

SEQ ID NO: 2639112 - RNA, 19 nt, Artificial Sequence
  Description of Artificial Sequence: Synthetic oligonucleotide
uacuuuguacagccucaug

SEQ ID NO: 2639113 - RNA, 19 nt, Artificial Sequence
  Description of Artificial Sequence: Synthetic oligonucleotide
agccuuagcaacaggagcu

SEQ ID NO: 2639114 - RNA, 19 nt, Artificial Sequence
  Description of Artificial Sequence: Synthetic oligonucleotide
aggauagcagcucucugaa

SEQ ID NO: 2639115 - RNA, 19 nt, Artificial Sequence
  Description of Artificial Sequence: Synthetic oligonucleotide
guaagcugcaugcacuuaa

SEQ ID NO: 2639116 - RNA, 19 nt, Artificial Sequence
  Description of Artificial Sequence: Synthetic oligonucleotide
aaucgcgaccagcuugcca

SEQ ID NO: 2639117 - RNA, 19 nt, Artificial Sequence
  Description of Artificial Sequence: Synthetic oligonucleotide
cuuagcuuuagcagcugca

SEQ ID NO: 2639118 - RNA, 19 nt, Artificial Sequence
  Description of Artificial Sequence: Synthetic oligonucleotide
ugaggcccaaaggagacgu

SEQ ID NO: 2639119 - RNA, 19 nt, Artificial Sequence
  Description of Artificial Sequence: Synthetic oligonucleotide
uuugcagcagggguuuucu

SEQ ID NO: 2639120 - RNA, 19 nt, Artificial Sequence
  Description of Artificial Sequence: Synthetic oligonucleotide
acuaaagcucuguucugau

SEQ ID NO: 2639121 - RNA, 19 nt, Artificial Sequence
  Description of Artificial Sequence: Synthetic oligonucleotide
gacuaaagcucuguucuga

SEQ ID NO: 2639122 - RNA, 19 nt, Artificial Sequence
  Description of Artificial Sequence: Synthetic oligonucleotide
uuucuggcgggcacugugu

SEQ ID NO: 2639123 - RNA, 19 nt, Artificial Sequence
  Description of Artificial Sequence: Synthetic oligonucleotide
ucuggcgggcacugugugg

SEQ ID NO: 2639124 - RNA, 19 nt, Artificial Sequence
  Description of Artificial Sequence: Synthetic oligonucleotide
ucuugaugauucuguuccu

SEQ ID NO: 2639125 - RNA, 19 nt, Artificial Sequence
  Description of Artificial Sequence: Synthetic oligonucleotide
agugcaagguccaucgacu

SEQ ID NO: 2639126 - RNA, 19 nt, Artificial Sequence
  Description of Artificial Sequence: Synthetic oligonucleotide
agagccuuuauuacuuugu

SEQ ID NO: 2639127 - RNA, 19 nt, Artificial Sequence
  Description of Artificial Sequence: Synthetic oligonucleotide
cagcaugaggcccaaagga

SEQ ID NO: 2639128 - RNA, 19 nt, Artificial Sequence
  Description of Artificial Sequence: Synthetic oligonucleotide
cuaaagcucuguucugauc

SEQ ID NO: 2639129 - RNA, 19 nt, Artificial Sequence
  Description of Artificial Sequence: Synthetic oligonucleotide
cagccuucuugccuggugc

SEQ ID NO: 2639130 - RNA, 19 nt, Artificial Sequence
  Description of Artificial Sequence: Synthetic oligonucleotide
cacugugugggaacuugag

SEQ ID NO: 2639131 - RNA, 19 nt, Artificial Sequence
  Description of Artificial Sequence: Synthetic oligonucleotide
aagcugcaugcacuuaaaa

SEQ ID NO: 2639132 - RNA, 19 nt, Artificial Sequence
  Description of Artificial Sequence: Synthetic oligonucleotide
cacuuaaaaggcauggccu

SEQ ID NO: 2639133 - RNA, 19 nt, Artificial Sequence
  Description of Artificial Sequence: Synthetic oligonucleotide
uuaaaaggcauggccuguc

SEQ ID NO: 2639134 - RNA, 19 nt, Artificial Sequence
  Description of Artificial Sequence: Synthetic oligonucleotide
caaaggagacguaggccac

SEQ ID NO: 2639135 - RNA, 19 nt, Artificial Sequence
  Description of Artificial Sequence: Synthetic oligonucleotide
guacauauuucuggcgggc

SEQ ID NO: 2639136 - RNA, 19 nt, Artificial Sequence
  Description of Artificial Sequence: Synthetic oligonucleotide
uuguggccgaccauuucgu

SEQ ID NO: 2639137 - RNA, 19 nt, Artificial Sequence
  Description of Artificial Sequence: Synthetic oligonucleotide
gaagcgccugaacaccaug

SEQ ID NO: 2639138 - RNA, 19 nt, Artificial Sequence
  Description of Artificial Sequence: Synthetic oligonucleotide
cuggcgggcacuguguggg

SEQ ID NO: 2639139 - RNA, 19 nt, Artificial Sequence
  Description of Artificial Sequence: Synthetic oligonucleotide
caagguccaucgacuaaag

SEQ ID NO: 2639140 - RNA, 19 nt, Artificial Sequence
  Description of Artificial Sequence: Synthetic oligonucleotide
cuucugaccuuuagcagga

SEQ ID NO: 2639141 - RNA, 19 nt, Artificial Sequence
  Description of Artificial Sequence: Synthetic oligonucleotide
ugcaagguccaucgacuaa

SEQ ID NO: 2639142 - RNA, 19 nt, Artificial Sequence
  Description of Artificial Sequence: Synthetic oligonucleotide
cuuggcuggaaccuuagcu

SEQ ID NO: 2639143 - RNA, 19 nt, Artificial Sequence
  Description of Artificial Sequence: Synthetic oligonucleotide
ggaugaagucaguaagcug

SEQ ID NO: 2639144 - RNA, 19 nt, Artificial Sequence
  Description of Artificial Sequence: Synthetic oligonucleotide
uccaucgacuaaagcucug

SEQ ID NO: 2639145 - RNA, 19 nt, Artificial Sequence
  Description of Artificial Sequence: Synthetic oligonucleotide
cugaccuuuagcaggagcu

SEQ ID NO: 2639146 - RNA, 19 nt, Artificial Sequence
  Description of Artificial Sequence: Synthetic oligonucleotide
cacccggccaaccuccacg

SEQ ID NO: 2639147 - RNA, 19 nt, Artificial Sequence
  Description of Artificial Sequence: Synthetic oligonucleotide
uucuggcgggcacugugug

SEQ ID NO: 2639148 - RNA, 19 nt, Artificial Sequence
  Description of Artificial Sequence: Synthetic oligonucleotide
gguccaucgacuaaagcuc

SEQ ID NO: 2639149 - RNA, 19 nt, Artificial Sequence
  Description of Artificial Sequence: Synthetic oligonucleotide
cuuuguacagccucaugcu

SEQ ID NO: 2639150 - RNA, 19 nt, Artificial Sequence
  Description of Artificial Sequence: Synthetic oligonucleotide
ugucaucuuggcuuuccuu

SEQ ID NO: 2639151 - RNA, 19 nt, Artificial Sequence
  Description of Artificial Sequence: Synthetic oligonucleotide
cucagucuugaugauucug

SEQ ID NO: 2639152 - RNA, 19 nt, Artificial Sequence
  Description of Artificial Sequence: Synthetic oligonucleotide
uggccgaccauuucguauu

SEQ ID NO: 2639153 - RNA, 19 nt, Artificial Sequence
  Description of Artificial Sequence: Synthetic oligonucleotide
cacgaagcgccugaacacc

SEQ ID NO: 2639154 - RNA, 19 nt, Artificial Sequence
  Description of Artificial Sequence: Synthetic oligonucleotide
cuugccagcaugaggccca

SEQ ID NO: 2639155 - RNA, 19 nt, Artificial Sequence
  Description of Artificial Sequence: Synthetic oligonucleotide
uuucucgggcaucaaucuu

SEQ ID NO: 2639156 - RNA, 19 nt, Artificial Sequence
  Description of Artificial Sequence: Synthetic oligonucleotide
auauuucuggcgggcacug

SEQ ID NO: 2639157 - RNA, 19 nt, Artificial Sequence
  Description of Artificial Sequence: Synthetic oligonucleotide
uggcuggaaccuuagcuuu

SEQ ID NO: 2639158 - RNA, 19 nt, Artificial Sequence
  Description of Artificial Sequence: Synthetic oligonucleotide
aagcgccugaacaccaugu

SEQ ID NO: 2639159 - RNA, 19 nt, Artificial Sequence
  Description of Artificial Sequence: Synthetic oligonucleotide
ucugacucuucugaccuuu

SEQ ID NO: 2639160 - RNA, 19 nt, Artificial Sequence
  Description of Artificial Sequence: Synthetic oligonucleotide
gagacguaggccacccggc

SEQ ID NO: 2639161 - RNA, 19 nt, Artificial Sequence
  Description of Artificial Sequence: Synthetic oligonucleotide
uuggcccaucuuguggccg

SEQ ID NO: 2639162 - RNA, 19 nt, Artificial Sequence
  Description of Artificial Sequence: Synthetic oligonucleotide
cuucugacucuucugaccu

SEQ ID NO: 2639163 - RNA, 19 nt, Artificial Sequence
  Description of Artificial Sequence: Synthetic oligonucleotide
ucuuguggccgaccauuuc

SEQ ID NO: 2639164 - RNA, 19 nt, Artificial Sequence
  Description of Artificial Sequence: Synthetic oligonucleotide
ccuuucucgggcaucaauc

SEQ ID NO: 2639165 - RNA, 19 nt, Artificial Sequence
  Description of Artificial Sequence: Synthetic oligonucleotide
ugggucggggucuucugac

SEQ ID NO: 2639166 - RNA, 19 nt, Artificial Sequence
  Description of Artificial Sequence: Synthetic oligonucleotide
agcuuuccguacauauuuc

SEQ ID NO: 2639167 - RNA, 19 nt, Artificial Sequence
  Description of Artificial Sequence: Synthetic oligonucleotide
uaggccacccggccaaccu

SEQ ID NO: 2639168 - RNA, 19 nt, Artificial Sequence
  Description of Artificial Sequence: Synthetic oligonucleotide
ucugggucggggucuucug

SEQ ID NO: 2639169 - RNA, 19 nt, Artificial Sequence
  Description of Artificial Sequence: Synthetic oligonucleotide
cuugccuggugcugucccc

SEQ ID NO: 2639170 - RNA, 19 nt, Artificial Sequence
  Description of Artificial Sequence: Synthetic oligonucleotide
gaucgauuacaucuacaau

SEQ ID NO: 2639171 - RNA, 19 nt, Artificial Sequence
  Description of Artificial Sequence: Synthetic oligonucleotide
gcagggguuuucugggucg

SEQ ID NO: 2639172 - RNA, 19 nt, Artificial Sequence
  Description of Artificial Sequence: Synthetic oligonucleotide
caucaaucuucuuggccca

SEQ ID NO: 2639173 - RNA, 19 nt, Artificial Sequence
  Description of Artificial Sequence: Synthetic oligonucleotide
uuacuuuguacagccucau

SEQ ID NO: 2639174 - RNA, 19 nt, Artificial Sequence
  Description of Artificial Sequence: Synthetic oligonucleotide
cugaucgauuacaucuaca

SEQ ID NO: 2639175 - RNA, 19 nt, Artificial Sequence
  Description of Artificial Sequence: Synthetic oligonucleotide
auggcagccuuagcaacag

SEQ ID NO: 2639176 - RNA, 19 nt, Artificial Sequence
  Description of Artificial Sequence: Synthetic oligonucleotide
ccagcaugaggcccaaagg

SEQ ID NO: 2639177 - RNA, 19 nt, Artificial Sequence
  Description of Artificial Sequence: Synthetic oligonucleotide
gugugggaacuugaggaug

SEQ ID NO: 2639178 - RNA, 19 nt, Artificial Sequence
  Description of Artificial Sequence: Synthetic oligonucleotide
ugauucuguuccucauuuu

SEQ ID NO: 2639179 - RNA, 19 nt, Artificial Sequence
  Description of Artificial Sequence: Synthetic oligonucleotide
ugcuuucucccaagcuuuc

SEQ ID NO: 2639180 - RNA, 19 nt, Artificial Sequence
  Description of Artificial Sequence: Synthetic oligonucleotide
ugccgcugcaauggcagcc

SEQ ID NO: 2639181 - RNA, 19 nt, Artificial Sequence
  Description of Artificial Sequence: Synthetic oligonucleotide
cguacauauuucuggcggg

SEQ ID NO: 2639182 - RNA, 19 nt, Artificial Sequence
  Description of Artificial Sequence: Synthetic oligonucleotide
agucaguaagcugcaugca

SEQ ID NO: 2639183 - RNA, 19 nt, Artificial Sequence
  Description of Artificial Sequence: Synthetic oligonucleotide
gcccaaaggagacguaggc

SEQ ID NO: 2639184 - RNA, 19 nt, Artificial Sequence
  Description of Artificial Sequence: Synthetic oligonucleotide
augaggcccaaaggagacg

SEQ ID NO: 2639185 - RNA, 19 nt, Artificial Sequence
  Description of Artificial Sequence: Synthetic oligonucleotide
ggcgaagcuuucaggauag

SEQ ID NO: 2639186 - RNA, 19 nt, Artificial Sequence
  Description of Artificial Sequence: Synthetic oligonucleotide
cuuucucgggcaucaaucu

SEQ ID NO: 2639187 - RNA, 19 nt, Artificial Sequence
  Description of Artificial Sequence: Synthetic oligonucleotide
cugucuccucacccgagug

SEQ ID NO: 2639188 - RNA, 19 nt, Artificial Sequence
  Description of Artificial Sequence: Synthetic oligonucleotide
cuuucaggauagcagcucu

SEQ ID NO: 2639189 - RNA, 19 nt, Artificial Sequence
  Description of Artificial Sequence: Synthetic oligonucleotide
aggccacccggccaaccuc

SEQ ID NO: 2639190 - RNA, 19 nt, Artificial Sequence
  Description of Artificial Sequence: Synthetic oligonucleotide
augaagucaguaagcugca

SEQ ID NO: 2639191 - RNA, 19 nt, Artificial Sequence
  Description of Artificial Sequence: Synthetic oligonucleotide
ucaaucuucuuggcccauc

SEQ ID NO: 2639192 - RNA, 19 nt, Artificial Sequence
  Description of Artificial Sequence: Synthetic oligonucleotide
agccuucuugccuggugcu

SEQ ID NO: 2639193 - RNA, 19 nt, Artificial Sequence
  Description of Artificial Sequence: Synthetic oligonucleotide
cauggccugucuccucacc

SEQ ID NO: 2639194 - RNA, 19 nt, Artificial Sequence
  Description of Artificial Sequence: Synthetic oligonucleotide
gacguaggccacccggcca

SEQ ID NO: 2639195 - RNA, 19 nt, Artificial Sequence
  Description of Artificial Sequence: Synthetic oligonucleotide
ucccaagcuuuccguacau

SEQ ID NO: 2639196 - RNA, 19 nt, Artificial Sequence
  Description of Artificial Sequence: Synthetic oligonucleotide
cguauugauaucugcuuuc

SEQ ID NO: 2639197 - RNA, 19 nt, Artificial Sequence
  Description of Artificial Sequence: Synthetic oligonucleotide
aggagacguaggccacccg

SEQ ID NO: 2639198 - RNA, 19 nt, Artificial Sequence
  Description of Artificial Sequence: Synthetic oligonucleotide
gcagccuuagcaacaggag

SEQ ID NO: 2639199 - RNA, 19 nt, Artificial Sequence
  Description of Artificial Sequence: Synthetic oligonucleotide
acguaggccacccggccaa

SEQ ID NO: 2639200 - RNA, 19 nt, Artificial Sequence
  Description of Artificial Sequence: Synthetic oligonucleotide
gaaguuucuugaccucagu

SEQ ID NO: 2639201 - RNA, 19 nt, Artificial Sequence
  Description of Artificial Sequence: Synthetic oligonucleotide
guauugauaucugcuuucu

SEQ ID NO: 2639202 - RNA, 19 nt, Artificial Sequence
  Description of Artificial Sequence: Synthetic oligonucleotide
cuggaaccuuagcuuuagc

SEQ ID NO: 2639203 - RNA, 19 nt, Artificial Sequence
  Description of Artificial Sequence: Synthetic oligonucleotide
cuccucacccgagugcaag

SEQ ID NO: 2639204 - RNA, 19 nt, Artificial Sequence
  Description of Artificial Sequence: Synthetic oligonucleotide
aagcucuguucugaucgau

SEQ ID NO: 2639205 - RNA, 19 nt, Artificial Sequence
  Description of Artificial Sequence: Synthetic oligonucleotide
gccgcugccgcugcaaugg

SEQ ID NO: 2639206 - RNA, 19 nt, Artificial Sequence
  Description of Artificial Sequence: Synthetic oligonucleotide
ccuuagcuuuagcagcugc

SEQ ID NO: 2639207 - RNA, 19 nt, Artificial Sequence
  Description of Artificial Sequence: Synthetic oligonucleotide
gcugccgcugcaauggcag

SEQ ID NO: 2639208 - RNA, 19 nt, Artificial Sequence
  Description of Artificial Sequence: Synthetic oligonucleotide
ggcagccuuagcaacagga

SEQ ID NO: 2639209 - RNA, 19 nt, Artificial Sequence
  Description of Artificial Sequence: Synthetic oligonucleotide
ggauagcagcucucugaag

SEQ ID NO: 2639210 - RNA, 19 nt, Artificial Sequence
  Description of Artificial Sequence: Synthetic oligonucleotide
ugaccucagucuugaugau

SEQ ID NO: 2639211 - RNA, 19 nt, Artificial Sequence
  Description of Artificial Sequence: Synthetic oligonucleotide
cagggguuuucugggucgg

SEQ ID NO: 2639212 - RNA, 19 nt, Artificial Sequence
  Description of Artificial Sequence: Synthetic oligonucleotide
cucacccgagugcaagguc

SEQ ID NO: 2639213 - RNA, 19 nt, Artificial Sequence
  Description of Artificial Sequence: Synthetic oligonucleotide
acccggccaaccuccacga

SEQ ID NO: 2639214 - RNA, 19 nt, Artificial Sequence
  Description of Artificial Sequence: Synthetic oligonucleotide
ggcccaaaggagacguagg

SEQ ID NO: 2639215 - RNA, 19 nt, Artificial Sequence
  Description of Artificial Sequence: Synthetic oligonucleotide
ggcacugugugggaacuug

SEQ ID NO: 2639216 - RNA, 19 nt, Artificial Sequence
  Description of Artificial Sequence: Synthetic oligonucleotide
gcugccuuugcagcagggg

SEQ ID NO: 2639217 - RNA, 19 nt, Artificial Sequence
  Description of Artificial Sequence: Synthetic oligonucleotide
ugaagucaguaagcugcau

SEQ ID NO: 2639218 - RNA, 19 nt, Artificial Sequence
  Description of Artificial Sequence: Synthetic oligonucleotide
cucccaagcuuuccguaca

SEQ ID NO: 2639219 - RNA, 19 nt, Artificial Sequence
  Description of Artificial Sequence: Synthetic oligonucleotide
cuucuuggcuggaaccuua

SEQ ID NO: 2639220 - RNA, 19 nt, Artificial Sequence
  Description of Artificial Sequence: Synthetic oligonucleotide
uguggccgaccauuucgua

SEQ ID NO: 2639221 - RNA, 19 nt, Artificial Sequence
  Description of Artificial Sequence: Synthetic oligonucleotide
uucugaccuuuagcaggag

SEQ ID NO: 2639222 - RNA, 19 nt, Artificial Sequence
  Description of Artificial Sequence: Synthetic oligonucleotide
uauuucuggcgggcacugu

SEQ ID NO: 2639223 - RNA, 19 nt, Artificial Sequence
  Description of Artificial Sequence: Synthetic oligonucleotide
aaccuccacgaagcgccug

SEQ ID NO: 2639224 - RNA, 19 nt, Artificial Sequence
  Description of Artificial Sequence: Synthetic oligonucleotide
caaucuucuuggcccaucu

SEQ ID NO: 2639225 - RNA, 19 nt, Artificial Sequence
  Description of Artificial Sequence: Synthetic oligonucleotide
cugcaauggcagccuuagc

SEQ ID NO: 2639226 - RNA, 19 nt, Artificial Sequence
  Description of Artificial Sequence: Synthetic oligonucleotide
cuccacgaagcgccugaac

SEQ ID NO: 2639227 - RNA, 19 nt, Artificial Sequence
  Description of Artificial Sequence: Synthetic oligonucleotide
gcaagguccaucgacuaaa

SEQ ID NO: 2639228 - RNA, 19 nt, Artificial Sequence
  Description of Artificial Sequence: Synthetic oligonucleotide
ccggccaaccuccacgaag

SEQ ID NO: 2639229 - RNA, 19 nt, Artificial Sequence
  Description of Artificial Sequence: Synthetic oligonucleotide
gcuuuagcagcugcagcug

SEQ ID NO: 2639230 - RNA, 19 nt, Artificial Sequence
  Description of Artificial Sequence: Synthetic oligonucleotide
ggucggggucuucugacuc

SEQ ID NO: 2639231 - RNA, 19 nt, Artificial Sequence
  Description of Artificial Sequence: Synthetic oligonucleotide
ucuccucacccgagugcaa

SEQ ID NO: 2639232 - RNA, 19 nt, Artificial Sequence
  Description of Artificial Sequence: Synthetic oligonucleotide
uucugacucuucugaccuu

SEQ ID NO: 2639233 - RNA, 19 nt, Artificial Sequence
  Description of Artificial Sequence: Synthetic oligonucleotide
agggguuuucugggucggg

SEQ ID NO: 2639234 - RNA, 19 nt, Artificial Sequence
  Description of Artificial Sequence: Synthetic oligonucleotide
cggccaaccuccacgaagc

SEQ ID NO: 2639235 - RNA, 19 nt, Artificial Sequence
  Description of Artificial Sequence: Synthetic oligonucleotide
ucgcgaccagcuugccagc

SEQ ID NO: 2639236 - RNA, 19 nt, Artificial Sequence
  Description of Artificial Sequence: Synthetic oligonucleotide
ccccuucuuggcuggaacc

SEQ ID NO: 2639237 - RNA, 19 nt, Artificial Sequence
  Description of Artificial Sequence: Synthetic oligonucleotide
cuuaaaaggcauggccugu

SEQ ID NO: 2639238 - RNA, 19 nt, Artificial Sequence
  Description of Artificial Sequence: Synthetic oligonucleotide
caucuacaaucgcgaccag

SEQ ID NO: 2639239 - RNA, 19 nt, Artificial Sequence
  Description of Artificial Sequence: Synthetic oligonucleotide
gugcaagguccaucgacua

SEQ ID NO: 2639240 - RNA, 19 nt, Artificial Sequence
  Description of Artificial Sequence: Synthetic oligonucleotide
gcuuuccguacauauuucu

SEQ ID NO: 2639241 - RNA, 19 nt, Artificial Sequence
  Description of Artificial Sequence: Synthetic oligonucleotide
cugccgcugcaauggcagc

SEQ ID NO: 2639242 - RNA, 19 nt, Artificial Sequence
  Description of Artificial Sequence: Synthetic oligonucleotide
aguaagcugcaugcacuua

SEQ ID NO: 2639243 - RNA, 19 nt, Artificial Sequence
  Description of Artificial Sequence: Synthetic oligonucleotide
accuuagcuuuagcagcug

SEQ ID NO: 2639244 - RNA, 19 nt, Artificial Sequence
  Description of Artificial Sequence: Synthetic oligonucleotide
cauauuucuggcgggcacu

SEQ ID NO: 2639245 - RNA, 19 nt, Artificial Sequence
  Description of Artificial Sequence: Synthetic oligonucleotide
guuuucugggucggggucu

SEQ ID NO: 2639246 - RNA, 19 nt, Artificial Sequence
  Description of Artificial Sequence: Synthetic oligonucleotide
cuguucugaucgauuacau

SEQ ID NO: 2639247 - RNA, 19 nt, Artificial Sequence
  Description of Artificial Sequence: Synthetic oligonucleotide
gcuuucaggauagcagcuc

SEQ ID NO: 2639248 - RNA, 19 nt, Artificial Sequence
  Description of Artificial Sequence: Synthetic oligonucleotide
caagcuuuccguacauauu

SEQ ID NO: 2639249 - RNA, 19 nt, Artificial Sequence
  Description of Artificial Sequence: Synthetic oligonucleotide
ggccaaccuccacgaagcg

SEQ ID NO: 2639250 - RNA, 19 nt, Artificial Sequence
  Description of Artificial Sequence: Synthetic oligonucleotide
guggccgaccauuucguau

SEQ ID NO: 2639251 - RNA, 19 nt, Artificial Sequence
  Description of Artificial Sequence: Synthetic oligonucleotide
cugggucggggucuucuga

SEQ ID NO: 2639252 - RNA, 19 nt, Artificial Sequence
  Description of Artificial Sequence: Synthetic oligonucleotide
cacccgagugcaaggucca

SEQ ID NO: 2639253 - RNA, 19 nt, Artificial Sequence
  Description of Artificial Sequence: Synthetic oligonucleotide
ccaagcuuuccguacauau

SEQ ID NO: 2639254 - RNA, 19 nt, Artificial Sequence
  Description of Artificial Sequence: Synthetic oligonucleotide
cgauuacaucuacaaucgc

SEQ ID NO: 2639255 - RNA, 19 nt, Artificial Sequence
  Description of Artificial Sequence: Synthetic oligonucleotide
ucggggucuucugacucuu

SEQ ID NO: 2639256 - RNA, 19 nt, Artificial Sequence
  Description of Artificial Sequence: Synthetic oligonucleotide
aucaaucuucuuggcccau

SEQ ID NO: 2639257 - RNA, 19 nt, Artificial Sequence
  Description of Artificial Sequence: Synthetic oligonucleotide
gccaaccuccacgaagcgc

SEQ ID NO: 2639258 - RNA, 19 nt, Artificial Sequence
  Description of Artificial Sequence: Synthetic oligonucleotide
aucuuguggccgaccauuu

SEQ ID NO: 2639259 - RNA, 19 nt, Artificial Sequence
  Description of Artificial Sequence: Synthetic oligonucleotide
ccuuuagcaggagcugcag

SEQ ID NO: 2639260 - RNA, 19 nt, Artificial Sequence
  Description of Artificial Sequence: Synthetic oligonucleotide
guaggccacccggccaacc

SEQ ID NO: 2639261 - RNA, 19 nt, Artificial Sequence
  Description of Artificial Sequence: Synthetic oligonucleotide
caucuuggcuuuccuuucu

SEQ ID NO: 2639262 - RNA, 19 nt, Artificial Sequence
  Description of Artificial Sequence: Synthetic oligonucleotide
ccauuucguauugauaucu

SEQ ID NO: 2639263 - RNA, 19 nt, Artificial Sequence
  Description of Artificial Sequence: Synthetic oligonucleotide
caaucgcgaccagcuugcc

SEQ ID NO: 2639264 - RNA, 19 nt, Artificial Sequence
  Description of Artificial Sequence: Synthetic oligonucleotide
ggccgaccauuucguauug

SEQ ID NO: 2639265 - RNA, 19 nt, Artificial Sequence
  Description of Artificial Sequence: Synthetic oligonucleotide
guccaucgacuaaagcucu

SEQ ID NO: 2639266 - RNA, 19 nt, Artificial Sequence
  Description of Artificial Sequence: Synthetic oligonucleotide
caucuuguggccgaccauu

SEQ ID NO: 2639267 - RNA, 19 nt, Artificial Sequence
  Description of Artificial Sequence: Synthetic oligonucleotide
uucuggccugcagccuucu

SEQ ID NO: 2639268 - RNA, 19 nt, Artificial Sequence
  Description of Artificial Sequence: Synthetic oligonucleotide
caguaagcugcaugcacuu

SEQ ID NO: 2639269 - RNA, 19 nt, Artificial Sequence
  Description of Artificial Sequence: Synthetic oligonucleotide
cgacuaaagcucuguucug

SEQ ID NO: 2639270 - RNA, 19 nt, Artificial Sequence
  Description of Artificial Sequence: Synthetic oligonucleotide
gucggggucuucugacucu

SEQ ID NO: 2639271 - RNA, 19 nt, Artificial Sequence
  Description of Artificial Sequence: Synthetic oligonucleotide
cagucuugaugauucuguu

SEQ ID NO: 2639272 - RNA, 19 nt, Artificial Sequence
  Description of Artificial Sequence: Synthetic oligonucleotide
uggcgggcacuguguggga

SEQ ID NO: 2639273 - RNA, 19 nt, Artificial Sequence
  Description of Artificial Sequence: Synthetic oligonucleotide
ggccacccggccaaccucc

SEQ ID NO: 2639274 - RNA, 19 nt, Artificial Sequence
  Description of Artificial Sequence: Synthetic oligonucleotide
gcaugcacuuaaaaggcau

SEQ ID NO: 2639275 - RNA, 19 nt, Artificial Sequence
  Description of Artificial Sequence: Synthetic oligonucleotide
cgaagcuuucaggauagca

SEQ ID NO: 2639276 - RNA, 19 nt, Artificial Sequence
  Description of Artificial Sequence: Synthetic oligonucleotide
ggguuuucugggucggggu

SEQ ID NO: 2639277 - RNA, 19 nt, Artificial Sequence
  Description of Artificial Sequence: Synthetic oligonucleotide
ggccugucuccucacccga

SEQ ID NO: 2639278 - RNA, 19 nt, Artificial Sequence
  Description of Artificial Sequence: Synthetic oligonucleotide
cgaccagcuugccagcaug

SEQ ID NO: 2639279 - RNA, 19 nt, Artificial Sequence
  Description of Artificial Sequence: Synthetic oligonucleotide
caucgacuaaagcucuguu

SEQ ID NO: 2639280 - RNA, 19 nt, Artificial Sequence
  Description of Artificial Sequence: Synthetic oligonucleotide
ugccuggugcuguccccuu

SEQ ID NO: 2639281 - RNA, 19 nt, Artificial Sequence
  Description of Artificial Sequence: Synthetic oligonucleotide
gaccucagucuugaugauu

SEQ ID NO: 2639282 - RNA, 19 nt, Artificial Sequence
  Description of Artificial Sequence: Synthetic oligonucleotide
uugccagcaugaggcccaa

SEQ ID NO: 2639283 - RNA, 19 nt, Artificial Sequence
  Description of Artificial Sequence: Synthetic oligonucleotide
ggccugcagccuucuugcc

SEQ ID NO: 2639284 - RNA, 19 nt, Artificial Sequence
  Description of Artificial Sequence: Synthetic oligonucleotide
gcacugugugggaacuuga

SEQ ID NO: 2639285 - RNA, 19 nt, Artificial Sequence
  Description of Artificial Sequence: Synthetic oligonucleotide
uuucugggucggggucuuc

SEQ ID NO: 2639286 - RNA, 19 nt, Artificial Sequence
  Description of Artificial Sequence: Synthetic oligonucleotide
gugggaacuugaggaugaa

SEQ ID NO: 2639287 - RNA, 19 nt, Artificial Sequence
  Description of Artificial Sequence: Synthetic oligonucleotide
cuacaaucgcgaccagcuu

SEQ ID NO: 2639288 - RNA, 19 nt, Artificial Sequence
  Description of Artificial Sequence: Synthetic oligonucleotide
gccugucuccucacccgag

SEQ ID NO: 2639289 - RNA, 19 nt, Artificial Sequence
  Description of Artificial Sequence: Synthetic oligonucleotide
ccgaccauuucguauugau

SEQ ID NO: 2639290 - RNA, 19 nt, Artificial Sequence
  Description of Artificial Sequence: Synthetic oligonucleotide
cgaccauuucguauugaua

SEQ ID NO: 2639291 - RNA, 19 nt, Artificial Sequence
  Description of Artificial Sequence: Synthetic oligonucleotide
cccgagugcaagguccauc

SEQ ID NO: 2639292 - RNA, 19 nt, Artificial Sequence
  Description of Artificial Sequence: Synthetic oligonucleotide
cagcagggguuuucugggu

SEQ ID NO: 2639293 - RNA, 19 nt, Artificial Sequence
  Description of Artificial Sequence: Synthetic oligonucleotide
gaggcccaaaggagacgua

SEQ ID NO: 2639294 - RNA, 19 nt, Artificial Sequence
  Description of Artificial Sequence: Synthetic oligonucleotide
acccgagugcaagguccau

SEQ ID NO: 2639295 - RNA, 19 nt, Artificial Sequence
  Description of Artificial Sequence: Synthetic oligonucleotide
caaccuccacgaagcgccu

SEQ ID NO: 2639296 - RNA, 19 nt, Artificial Sequence
  Description of Artificial Sequence: Synthetic oligonucleotide
gcgaagcuuucaggauagc

SEQ ID NO: 2639297 - RNA, 19 nt, Artificial Sequence
  Description of Artificial Sequence: Synthetic oligonucleotide
ggcuggaaccuuagcuuua

SEQ ID NO: 2639298 - RNA, 19 nt, Artificial Sequence
  Description of Artificial Sequence: Synthetic oligonucleotide
gccuggugcuguccccuuc

SEQ ID NO: 2639299 - RNA, 19 nt, Artificial Sequence
  Description of Artificial Sequence: Synthetic oligonucleotide
gggucggggucuucugacu

SEQ ID NO: 2639300 - RNA, 19 nt, Artificial Sequence
  Description of Artificial Sequence: Synthetic oligonucleotide
ccaucgacuaaagcucugu

SEQ ID NO: 2639301 - RNA, 19 nt, Artificial Sequence
  Description of Artificial Sequence: Synthetic oligonucleotide
ccuucuugccuggugcugu

SEQ ID NO: 2639302 - RNA, 19 nt, Artificial Sequence
  Description of Artificial Sequence: Synthetic oligonucleotide
gccgaccauuucguauuga

SEQ ID NO: 2639303 - RNA, 19 nt, Artificial Sequence
  Description of Artificial Sequence: Synthetic oligonucleotide
guacagccucaugcuuucu

SEQ ID NO: 2639304 - RNA, 19 nt, Artificial Sequence
  Description of Artificial Sequence: Synthetic oligonucleotide
ggcgggcacugugugggaa

SEQ ID NO: 2639305 - RNA, 19 nt, Artificial Sequence
  Description of Artificial Sequence: Synthetic oligonucleotide
ccacccggccaaccuccac

SEQ ID NO: 2639306 - RNA, 19 nt, Artificial Sequence
  Description of Artificial Sequence: Synthetic oligonucleotide
ccgcugccgcugcaauggc

SEQ ID NO: 2639307 - RNA, 19 nt, Artificial Sequence
  Description of Artificial Sequence: Synthetic oligonucleotide
gccgcugcaauggcagccu

SEQ ID NO: 2639308 - RNA, 19 nt, Artificial Sequence
  Description of Artificial Sequence: Synthetic oligonucleotide
gccuuagcaacaggagcuu

SEQ ID NO: 2639309 - RNA, 19 nt, Artificial Sequence
  Description of Artificial Sequence: Synthetic oligonucleotide
gcgaccagcuugccagcau

SEQ ID NO: 2639310 - RNA, 19 nt, Artificial Sequence
  Description of Artificial Sequence: Synthetic oligonucleotide
cgagugcaagguccaucga

SEQ ID NO: 2639311 - RNA, 19 nt, Artificial Sequence
  Description of Artificial Sequence: Synthetic oligonucleotide
cuggugcuguccccuucuu

SEQ ID NO: 2639312 - RNA, 19 nt, Artificial Sequence
  Description of Artificial Sequence: Synthetic oligonucleotide
ccucacccgagugcaaggu

SEQ ID NO: 2639313 - RNA, 19 nt, Artificial Sequence
  Description of Artificial Sequence: Synthetic oligonucleotide
ccaucuuguggccgaccau

SEQ ID NO: 2639314 - RNA, 19 nt, Artificial Sequence
  Description of Artificial Sequence: Synthetic oligonucleotide
cccaagcuuuccguacaua

SEQ ID NO: 2639315 - RNA, 19 nt, Artificial Sequence
  Description of Artificial Sequence: Synthetic oligonucleotide
gccacccggccaaccucca

SEQ ID NO: 2639316 - RNA, 19 nt, Artificial Sequence
  Description of Artificial Sequence: Synthetic oligonucleotide
ccuuagcaacaggagcuuu

SEQ ID NO: 2639317 - RNA, 19 nt, Artificial Sequence
  Description of Artificial Sequence: Synthetic oligonucleotide
cguaggccacccggccaac

SEQ ID NO: 2639318 - RNA, 19 nt, Artificial Sequence
  Description of Artificial Sequence: Synthetic oligonucleotide
cgcgaccagcuugccagca

SEQ ID NO: 2639319 - RNA, 19 nt, Artificial Sequence
  Description of Artificial Sequence: Synthetic oligonucleotide
cgaagcgccugaacaccau

SEQ ID NO: 2639320 - RNA, 19 nt, Artificial Sequence
  Description of Artificial Sequence: Synthetic oligonucleotide
cccggccaaccuccacgaa

SEQ ID NO: 2639321 - RNA, 19 nt, Artificial Sequence
  Description of Artificial Sequence: Synthetic oligonucleotide
gggcacugugugggaacuu

SEQ ID NO: 2639322 - RNA, 19 nt, Artificial Sequence
  Description of Artificial Sequence: Synthetic oligonucleotide
ccgcugcaauggcagccuu

SEQ ID NO: 2639323 - RNA, 19 nt, Artificial Sequence
  Description of Artificial Sequence: Synthetic oligonucleotide
aaauucaugagguuggcgg

SEQ ID NO: 2639324 - RNA, 19 nt, Artificial Sequence
  Description of Artificial Sequence: Synthetic oligonucleotide
gacauagggauucagaacg

SEQ ID NO: 2639325 - RNA, 19 nt, Artificial Sequence
  Description of Artificial Sequence: Synthetic oligonucleotide
cuucauuuaaagcagaugc

SEQ ID NO: 2639326 - RNA, 19 nt, Artificial Sequence
  Description of Artificial Sequence: Synthetic oligonucleotide
aggcuuuucacuuugauag

SEQ ID NO: 2639327 - RNA, 19 nt, Artificial Sequence
  Description of Artificial Sequence: Synthetic oligonucleotide
gaugccauauaucugaacc

SEQ ID NO: 2639328 - RNA, 19 nt, Artificial Sequence
  Description of Artificial Sequence: Synthetic oligonucleotide
auaucuacguauuucuccc

SEQ ID NO: 2639329 - RNA, 19 nt, Artificial Sequence
  Description of Artificial Sequence: Synthetic oligonucleotide
uuuucacuuugauagagcg

SEQ ID NO: 2639330 - RNA, 19 nt, Artificial Sequence
  Description of Artificial Sequence: Synthetic oligonucleotide
acaaguuuggcaaagggcc

SEQ ID NO: 2639331 - RNA, 19 nt, Artificial Sequence
  Description of Artificial Sequence: Synthetic oligonucleotide
agcaaguaaauucaugagg

SEQ ID NO: 2639332 - RNA, 19 nt, Artificial Sequence
  Description of Artificial Sequence: Synthetic oligonucleotide
ugaaucuuggucuuuguag

SEQ ID NO: 2639333 - RNA, 19 nt, Artificial Sequence
  Description of Artificial Sequence: Synthetic oligonucleotide
aggaccagagcucagacac

SEQ ID NO: 2639334 - RNA, 19 nt, Artificial Sequence
  Description of Artificial Sequence: Synthetic oligonucleotide
agucuuaaccuucagguuc

SEQ ID NO: 2639335 - RNA, 19 nt, Artificial Sequence
  Description of Artificial Sequence: Synthetic oligonucleotide
aauacuuggccuuugccca

SEQ ID NO: 2639336 - RNA, 19 nt, Artificial Sequence
  Description of Artificial Sequence: Synthetic oligonucleotide
ucagucuuaaccuucaggu

SEQ ID NO: 2639337 - RNA, 19 nt, Artificial Sequence
  Description of Artificial Sequence: Synthetic oligonucleotide
uauuguugcuccaaggacc

SEQ ID NO: 2639338 - RNA, 19 nt, Artificial Sequence
  Description of Artificial Sequence: Synthetic oligonucleotide
agcguuuuauuguugcucc

SEQ ID NO: 2639339 - RNA, 19 nt, Artificial Sequence
  Description of Artificial Sequence: Synthetic oligonucleotide
auucagaacggcaagagac

SEQ ID NO: 2639340 - RNA, 19 nt, Artificial Sequence
  Description of Artificial Sequence: Synthetic oligonucleotide
ucagguucaauacuuggcc

SEQ ID NO: 2639341 - RNA, 19 nt, Artificial Sequence
  Description of Artificial Sequence: Synthetic oligonucleotide
uggacacucaugauggugg

SEQ ID NO: 2639342 - RNA, 19 nt, Artificial Sequence
  Description of Artificial Sequence: Synthetic oligonucleotide
uuuaacucagagagaacag

SEQ ID NO: 2639343 - RNA, 19 nt, Artificial Sequence
  Description of Artificial Sequence: Synthetic oligonucleotide
uuugauagagcgcuugaca

SEQ ID NO: 2639344 - RNA, 19 nt, Artificial Sequence
  Description of Artificial Sequence: Synthetic oligonucleotide
uuuguagacauaucuacgu

SEQ ID NO: 2639345 - RNA, 19 nt, Artificial Sequence
  Description of Artificial Sequence: Synthetic oligonucleotide
cauaucuacguauuucucc

SEQ ID NO: 2639346 - RNA, 19 nt, Artificial Sequence
  Description of Artificial Sequence: Synthetic oligonucleotide
guuuucagcaaguaaauuc

SEQ ID NO: 2639347 - RNA, 19 nt, Artificial Sequence
  Description of Artificial Sequence: Synthetic oligonucleotide
uuaaccuucagguucaaua

SEQ ID NO: 2639348 - RNA, 19 nt, Artificial Sequence
  Description of Artificial Sequence: Synthetic oligonucleotide
accacggauguacugaagc

SEQ ID NO: 2639349 - RNA, 19 nt, Artificial Sequence
  Description of Artificial Sequence: Synthetic oligonucleotide
uguacugaagcuccguacc

SEQ ID NO: 2639350 - RNA, 19 nt, Artificial Sequence
  Description of Artificial Sequence: Synthetic oligonucleotide
uucacuuugauagagcgcu

SEQ ID NO: 2639351 - RNA, 19 nt, Artificial Sequence
  Description of Artificial Sequence: Synthetic oligonucleotide
aguaaauucaugagguugg

SEQ ID NO: 2639352 - RNA, 19 nt, Artificial Sequence
  Description of Artificial Sequence: Synthetic oligonucleotide
aacggcaagagacaccuug

SEQ ID NO: 2639353 - RNA, 19 nt, Artificial Sequence
  Description of Artificial Sequence: Synthetic oligonucleotide
agggcaguagcauagcgac

SEQ ID NO: 2639354 - RNA, 19 nt, Artificial Sequence
  Description of Artificial Sequence: Synthetic oligonucleotide
caauacuuggccuuugccc

SEQ ID NO: 2639355 - RNA, 19 nt, Artificial Sequence
  Description of Artificial Sequence: Synthetic oligonucleotide
ugacgggucagucuuaacc

SEQ ID NO: 2639356 - RNA, 19 nt, Artificial Sequence
  Description of Artificial Sequence: Synthetic oligonucleotide
uucagcaccgucuuuaacu

SEQ ID NO: 2639357 - RNA, 19 nt, Artificial Sequence
  Description of Artificial Sequence: Synthetic oligonucleotide
uuggccuuugcccaggaag

SEQ ID NO: 2639358 - RNA, 19 nt, Artificial Sequence
  Description of Artificial Sequence: Synthetic oligonucleotide
gauagagcgcuugacauag

SEQ ID NO: 2639359 - RNA, 19 nt, Artificial Sequence
  Description of Artificial Sequence: Synthetic oligonucleotide
ccaauuuggacaaucaucc

SEQ ID NO: 2639360 - RNA, 19 nt, Artificial Sequence
  Description of Artificial Sequence: Synthetic oligonucleotide
aaagggcaguagcauagcg

SEQ ID NO: 2639361 - RNA, 19 nt, Artificial Sequence
  Description of Artificial Sequence: Synthetic oligonucleotide
auggguauugucuaggcga

SEQ ID NO: 2639362 - RNA, 19 nt, Artificial Sequence
  Description of Artificial Sequence: Synthetic oligonucleotide
uuauuguugcuccaaggac

SEQ ID NO: 2639363 - RNA, 19 nt, Artificial Sequence
  Description of Artificial Sequence: Synthetic oligonucleotide
uucagguucaauacuuggc

SEQ ID NO: 2639364 - RNA, 19 nt, Artificial Sequence
  Description of Artificial Sequence: Synthetic oligonucleotide
uugacauagggauucagaa

SEQ ID NO: 2639365 - RNA, 19 nt, Artificial Sequence
  Description of Artificial Sequence: Synthetic oligonucleotide
uaacucagagagaacagcu

SEQ ID NO: 2639366 - RNA, 19 nt, Artificial Sequence
  Description of Artificial Sequence: Synthetic oligonucleotide
agucucucauagcaagucc

SEQ ID NO: 2639367 - RNA, 19 nt, Artificial Sequence
  Description of Artificial Sequence: Synthetic oligonucleotide
auuuaaagcagaugcugug

SEQ ID NO: 2639368 - RNA, 19 nt, Artificial Sequence
  Description of Artificial Sequence: Synthetic oligonucleotide
ucuguuuaacugcagcaga

SEQ ID NO: 2639369 - RNA, 19 nt, Artificial Sequence
  Description of Artificial Sequence: Synthetic oligonucleotide
uuugcugugaugucacuca

SEQ ID NO: 2639370 - RNA, 19 nt, Artificial Sequence
  Description of Artificial Sequence: Synthetic oligonucleotide
uaggcgaccguuuucagca

SEQ ID NO: 2639371 - RNA, 19 nt, Artificial Sequence
  Description of Artificial Sequence: Synthetic oligonucleotide
cucaugaugguggaaaagg

SEQ ID NO: 2639372 - RNA, 19 nt, Artificial Sequence
  Description of Artificial Sequence: Synthetic oligonucleotide
auuuggacaaucaucccac

SEQ ID NO: 2639373 - RNA, 19 nt, Artificial Sequence
  Description of Artificial Sequence: Synthetic oligonucleotide
aauucaugagguuggcggu

SEQ ID NO: 2639374 - RNA, 19 nt, Artificial Sequence
  Description of Artificial Sequence: Synthetic oligonucleotide
uggacaaucaucccaccca

SEQ ID NO: 2639375 - RNA, 19 nt, Artificial Sequence
  Description of Artificial Sequence: Synthetic oligonucleotide
aagcguuuuauuguugcuc

SEQ ID NO: 2639376 - RNA, 19 nt, Artificial Sequence
  Description of Artificial Sequence: Synthetic oligonucleotide
uaaccuucagguucaauac

SEQ ID NO: 2639377 - RNA, 19 nt, Artificial Sequence
  Description of Artificial Sequence: Synthetic oligonucleotide
cacaaguuuggcaaagggc

SEQ ID NO: 2639378 - RNA, 19 nt, Artificial Sequence
  Description of Artificial Sequence: Synthetic oligonucleotide
ucucucauagcaagucccg

SEQ ID NO: 2639379 - RNA, 19 nt, Artificial Sequence
  Description of Artificial Sequence: Synthetic oligonucleotide
augccauauaucugaaccg

SEQ ID NO: 2639380 - RNA, 19 nt, Artificial Sequence
  Description of Artificial Sequence: Synthetic oligonucleotide
uuuaacugcagcagaguaa

SEQ ID NO: 2639381 - RNA, 19 nt, Artificial Sequence
  Description of Artificial Sequence: Synthetic oligonucleotide
ccgucuuuaacucagagag

SEQ ID NO: 2639382 - RNA, 19 nt, Artificial Sequence
  Description of Artificial Sequence: Synthetic oligonucleotide
acaaucaucccacccauga

SEQ ID NO: 2639383 - RNA, 19 nt, Artificial Sequence
  Description of Artificial Sequence: Synthetic oligonucleotide
auguacugaagcuccguac

SEQ ID NO: 2639384 - RNA, 19 nt, Artificial Sequence
  Description of Artificial Sequence: Synthetic oligonucleotide
ugccauauaucugaaccgg

SEQ ID NO: 2639385 - RNA, 19 nt, Artificial Sequence
  Description of Artificial Sequence: Synthetic oligonucleotide
cauagcaagucccgcaugg

SEQ ID NO: 2639386 - RNA, 19 nt, Artificial Sequence
  Description of Artificial Sequence: Synthetic oligonucleotide
uguagacauaucuacguau

SEQ ID NO: 2639387 - RNA, 19 nt, Artificial Sequence
  Description of Artificial Sequence: Synthetic oligonucleotide
uuaaagcagaugcuguggu

SEQ ID NO: 2639388 - RNA, 19 nt, Artificial Sequence
  Description of Artificial Sequence: Synthetic oligonucleotide
uuucuccccaauuuggaca

SEQ ID NO: 2639389 - RNA, 19 nt, Artificial Sequence
  Description of Artificial Sequence: Synthetic oligonucleotide
gaaucuuggucuuuguaga

SEQ ID NO: 2639390 - RNA, 19 nt, Artificial Sequence
  Description of Artificial Sequence: Synthetic oligonucleotide
aaucaucccacccaugauu

SEQ ID NO: 2639391 - RNA, 19 nt, Artificial Sequence
  Description of Artificial Sequence: Synthetic oligonucleotide
agcuuguucuguuuaacug

SEQ ID NO: 2639392 - RNA, 19 nt, Artificial Sequence
  Description of Artificial Sequence: Synthetic oligonucleotide
uucagcaaguaaauucaug

SEQ ID NO: 2639393 - RNA, 19 nt, Artificial Sequence
  Description of Artificial Sequence: Synthetic oligonucleotide
cuucagguucaauacuugg

SEQ ID NO: 2639394 - RNA, 19 nt, Artificial Sequence
  Description of Artificial Sequence: Synthetic oligonucleotide
uuaacugcagcagaguaaa

SEQ ID NO: 2639395 - RNA, 19 nt, Artificial Sequence
  Description of Artificial Sequence: Synthetic oligonucleotide
cuugcugagcuucugaauc

SEQ ID NO: 2639396 - RNA, 19 nt, Artificial Sequence
  Description of Artificial Sequence: Synthetic oligonucleotide
uugauagagcgcuugacau

SEQ ID NO: 2639397 - RNA, 19 nt, Artificial Sequence
  Description of Artificial Sequence: Synthetic oligonucleotide
agacauaucuacguauuuc

SEQ ID NO: 2639398 - RNA, 19 nt, Artificial Sequence
  Description of Artificial Sequence: Synthetic oligonucleotide
uuaacucagagagaacagc

SEQ ID NO: 2639399 - RNA, 19 nt, Artificial Sequence
  Description of Artificial Sequence: Synthetic oligonucleotide
cagaguaaagggcaguagc

SEQ ID NO: 2639400 - RNA, 19 nt, Artificial Sequence
  Description of Artificial Sequence: Synthetic oligonucleotide
uucuguuuaacugcagcag

SEQ ID NO: 2639401 - RNA, 19 nt, Artificial Sequence
  Description of Artificial Sequence: Synthetic oligonucleotide
caggaguuggcccacacgc

SEQ ID NO: 2639402 - RNA, 19 nt, Artificial Sequence
  Description of Artificial Sequence: Synthetic oligonucleotide
agcauagcgacccucgaug

SEQ ID NO: 2639403 - RNA, 19 nt, Artificial Sequence
  Description of Artificial Sequence: Synthetic oligonucleotide
uuucacuuugauagagcgc

SEQ ID NO: 2639404 - RNA, 19 nt, Artificial Sequence
  Description of Artificial Sequence: Synthetic oligonucleotide
guauuucuccccaauuugg

SEQ ID NO: 2639405 - RNA, 19 nt, Artificial Sequence
  Description of Artificial Sequence: Synthetic oligonucleotide
uaccugucgggacagcccg

SEQ ID NO: 2639406 - RNA, 19 nt, Artificial Sequence
  Description of Artificial Sequence: Synthetic oligonucleotide
aagcagaugcuguggucac

SEQ ID NO: 2639407 - RNA, 19 nt, Artificial Sequence
  Description of Artificial Sequence: Synthetic oligonucleotide
guggaaaaggcagagauga

SEQ ID NO: 2639408 - RNA, 19 nt, Artificial Sequence
  Description of Artificial Sequence: Synthetic oligonucleotide
gaacagcuucauuuaaagc

SEQ ID NO: 2639409 - RNA, 19 nt, Artificial Sequence
  Description of Artificial Sequence: Synthetic oligonucleotide
uucagaacggcaagagaca

SEQ ID NO: 2639410 - RNA, 19 nt, Artificial Sequence
  Description of Artificial Sequence: Synthetic oligonucleotide
uuggacaaucaucccaccc

SEQ ID NO: 2639411 - RNA, 19 nt, Artificial Sequence
  Description of Artificial Sequence: Synthetic oligonucleotide
gaagcuccguaccugucgg

SEQ ID NO: 2639412 - RNA, 19 nt, Artificial Sequence
  Description of Artificial Sequence: Synthetic oligonucleotide
ugauugacgggucagucuu

SEQ ID NO: 2639413 - RNA, 19 nt, Artificial Sequence
  Description of Artificial Sequence: Synthetic oligonucleotide
cuguuuaacugcagcagag

SEQ ID NO: 2639414 - RNA, 19 nt, Artificial Sequence
  Description of Artificial Sequence: Synthetic oligonucleotide
uucaauacuuggccuuugc

SEQ ID NO: 2639415 - RNA, 19 nt, Artificial Sequence
  Description of Artificial Sequence: Synthetic oligonucleotide
uagggauucagaacggcaa

SEQ ID NO: 2639416 - RNA, 19 nt, Artificial Sequence
  Description of Artificial Sequence: Synthetic oligonucleotide
ugacauagggauucagaac

SEQ ID NO: 2639417 - RNA, 19 nt, Artificial Sequence
  Description of Artificial Sequence: Synthetic oligonucleotide
gacauaucuacguauuucu

SEQ ID NO: 2639418 - RNA, 19 nt, Artificial Sequence
  Description of Artificial Sequence: Synthetic oligonucleotide
cucgaugccauauaucuga

SEQ ID NO: 2639419 - RNA, 19 nt, Artificial Sequence
  Description of Artificial Sequence: Synthetic oligonucleotide
agaacggcaagagacaccu

SEQ ID NO: 2639420 - RNA, 19 nt, Artificial Sequence
  Description of Artificial Sequence: Synthetic oligonucleotide
gaugguggaaaaggcagag

SEQ ID NO: 2639421 - RNA, 19 nt, Artificial Sequence
  Description of Artificial Sequence: Synthetic oligonucleotide
acgguggacacucaugaug

SEQ ID NO: 2639422 - RNA, 19 nt, Artificial Sequence
  Description of Artificial Sequence: Synthetic oligonucleotide
uuuggcaaagggccugacc

SEQ ID NO: 2639423 - RNA, 19 nt, Artificial Sequence
  Description of Artificial Sequence: Synthetic oligonucleotide
augagguuggcggucagcg

SEQ ID NO: 2639424 - RNA, 19 nt, Artificial Sequence
  Description of Artificial Sequence: Synthetic oligonucleotide
ugucgggacagcccgcacg

SEQ ID NO: 2639425 - RNA, 19 nt, Artificial Sequence
  Description of Artificial Sequence: Synthetic oligonucleotide
aaccuucagguucaauacu

SEQ ID NO: 2639426 - RNA, 19 nt, Artificial Sequence
  Description of Artificial Sequence: Synthetic oligonucleotide
cagcaaguaaauucaugag

SEQ ID NO: 2639427 - RNA, 19 nt, Artificial Sequence
  Description of Artificial Sequence: Synthetic oligonucleotide
aguagcauagcgacccucg

SEQ ID NO: 2639428 - RNA, 19 nt, Artificial Sequence
  Description of Artificial Sequence: Synthetic oligonucleotide
guucuguuuaacugcagca

SEQ ID NO: 2639429 - RNA, 19 nt, Artificial Sequence
  Description of Artificial Sequence: Synthetic oligonucleotide
guggcagucucucauagca

SEQ ID NO: 2639430 - RNA, 19 nt, Artificial Sequence
  Description of Artificial Sequence: Synthetic oligonucleotide
ugaugguggaaaaggcaga

SEQ ID NO: 2639431 - RNA, 19 nt, Artificial Sequence
  Description of Artificial Sequence: Synthetic oligonucleotide
gcuuguucuguuuaacugc

SEQ ID NO: 2639432 - RNA, 19 nt, Artificial Sequence
  Description of Artificial Sequence: Synthetic oligonucleotide
gucuuuaacucagagagaa

SEQ ID NO: 2639433 - RNA, 19 nt, Artificial Sequence
  Description of Artificial Sequence: Synthetic oligonucleotide
ugucacucaggcuuuucac

SEQ ID NO: 2639434 - RNA, 19 nt, Artificial Sequence
  Description of Artificial Sequence: Synthetic oligonucleotide
accguuuucagcaaguaaa

SEQ ID NO: 2639435 - RNA, 19 nt, Artificial Sequence
  Description of Artificial Sequence: Synthetic oligonucleotide
ucccacccaugauugacgg

SEQ ID NO: 2639436 - RNA, 19 nt, Artificial Sequence
  Description of Artificial Sequence: Synthetic oligonucleotide
gguauugucuaggcgaccg

SEQ ID NO: 2639437 - RNA, 19 nt, Artificial Sequence
  Description of Artificial Sequence: Synthetic oligonucleotide
cuugacauagggauucaga

SEQ ID NO: 2639438 - RNA, 19 nt, Artificial Sequence
  Description of Artificial Sequence: Synthetic oligonucleotide
ggaagcguuuuauuguugc

SEQ ID NO: 2639439 - RNA, 19 nt, Artificial Sequence
  Description of Artificial Sequence: Synthetic oligonucleotide
agggauucagaacggcaag

SEQ ID NO: 2639440 - RNA, 19 nt, Artificial Sequence
  Description of Artificial Sequence: Synthetic oligonucleotide
ucagcaccgucuuuaacuc

SEQ ID NO: 2639441 - RNA, 19 nt, Artificial Sequence
  Description of Artificial Sequence: Synthetic oligonucleotide
uuguagacauaucuacgua

SEQ ID NO: 2639442 - RNA, 19 nt, Artificial Sequence
  Description of Artificial Sequence: Synthetic oligonucleotide
uggguauugucuaggcgac

SEQ ID NO: 2639443 - RNA, 19 nt, Artificial Sequence
  Description of Artificial Sequence: Synthetic oligonucleotide
uccuuugcugugaugucac

SEQ ID NO: 2639444 - RNA, 19 nt, Artificial Sequence
  Description of Artificial Sequence: Synthetic oligonucleotide
uccccaauuuggacaauca

SEQ ID NO: 2639445 - RNA, 19 nt, Artificial Sequence
  Description of Artificial Sequence: Synthetic oligonucleotide
agcggagaaagcuucuccu

SEQ ID NO: 2639446 - RNA, 19 nt, Artificial Sequence
  Description of Artificial Sequence: Synthetic oligonucleotide
gauucagaacggcaagaga

SEQ ID NO: 2639447 - RNA, 19 nt, Artificial Sequence
  Description of Artificial Sequence: Synthetic oligonucleotide
caauuuggacaaucauccc

SEQ ID NO: 2639448 - RNA, 19 nt, Artificial Sequence
  Description of Artificial Sequence: Synthetic oligonucleotide
ucuuuaacucagagagaac

SEQ ID NO: 2639449 - RNA, 19 nt, Artificial Sequence
  Description of Artificial Sequence: Synthetic oligonucleotide
augauugacgggucagucu

SEQ ID NO: 2639450 - RNA, 19 nt, Artificial Sequence
  Description of Artificial Sequence: Synthetic oligonucleotide
caagagacaccuugggguc

SEQ ID NO: 2639451 - RNA, 19 nt, Artificial Sequence
  Description of Artificial Sequence: Synthetic oligonucleotide
agaguaaagggcaguagca

SEQ ID NO: 2639452 - RNA, 19 nt, Artificial Sequence
  Description of Artificial Sequence: Synthetic oligonucleotide
ccauauaucugaaccgggg

SEQ ID NO: 2639453 - RNA, 19 nt, Artificial Sequence
  Description of Artificial Sequence: Synthetic oligonucleotide
acugaagcuccguaccugu

SEQ ID NO: 2639454 - RNA, 19 nt, Artificial Sequence
  Description of Artificial Sequence: Synthetic oligonucleotide
accgucuuuaacucagaga

SEQ ID NO: 2639455 - RNA, 19 nt, Artificial Sequence
  Description of Artificial Sequence: Synthetic oligonucleotide
uaucuacguauuucucccc

SEQ ID NO: 2639456 - RNA, 19 nt, Artificial Sequence
  Description of Artificial Sequence: Synthetic oligonucleotide
aaguuuggcaaagggccug

SEQ ID NO: 2639457 - RNA, 19 nt, Artificial Sequence
  Description of Artificial Sequence: Synthetic oligonucleotide
acuuugauagagcgcuuga

SEQ ID NO: 2639458 - RNA, 19 nt, Artificial Sequence
  Description of Artificial Sequence: Synthetic oligonucleotide
cuaggcgaccguuuucagc

SEQ ID NO: 2639459 - RNA, 19 nt, Artificial Sequence
  Description of Artificial Sequence: Synthetic oligonucleotide
auagcaagucccgcauggc

SEQ ID NO: 2639460 - RNA, 19 nt, Artificial Sequence
  Description of Artificial Sequence: Synthetic oligonucleotide
cugcagcagaguaaagggc

SEQ ID NO: 2639461 - RNA, 19 nt, Artificial Sequence
  Description of Artificial Sequence: Synthetic oligonucleotide
uguugcuccaaggaccaga

SEQ ID NO: 2639462 - RNA, 19 nt, Artificial Sequence
  Description of Artificial Sequence: Synthetic oligonucleotide
uguuuaacugcagcagagu

SEQ ID NO: 2639463 - RNA, 19 nt, Artificial Sequence
  Description of Artificial Sequence: Synthetic oligonucleotide
ucagaacggcaagagacac

SEQ ID NO: 2639464 - RNA, 19 nt, Artificial Sequence
  Description of Artificial Sequence: Synthetic oligonucleotide
uccacgguggacacucaug

SEQ ID NO: 2639465 - RNA, 19 nt, Artificial Sequence
  Description of Artificial Sequence: Synthetic oligonucleotide
acauaucuacguauuucuc

SEQ ID NO: 2639466 - RNA, 19 nt, Artificial Sequence
  Description of Artificial Sequence: Synthetic oligonucleotide
agaugcuguggucaccaug

SEQ ID NO: 2639467 - RNA, 19 nt, Artificial Sequence
  Description of Artificial Sequence: Synthetic oligonucleotide
uuuggacaaucaucccacc

SEQ ID NO: 2639468 - RNA, 19 nt, Artificial Sequence
  Description of Artificial Sequence: Synthetic oligonucleotide
ggaaaaggcagagaugaug

SEQ ID NO: 2639469 - RNA, 19 nt, Artificial Sequence
  Description of Artificial Sequence: Synthetic oligonucleotide
gagguuggcggucagcgga

SEQ ID NO: 2639470 - RNA, 19 nt, Artificial Sequence
  Description of Artificial Sequence: Synthetic oligonucleotide
cagagcucagacacguggc

SEQ ID NO: 2639471 - RNA, 19 nt, Artificial Sequence
  Description of Artificial Sequence: Synthetic oligonucleotide
uagacauaucuacguauuu

SEQ ID NO: 2639472 - RNA, 19 nt, Artificial Sequence
  Description of Artificial Sequence: Synthetic oligonucleotide
ggcaagagacaccuugggg

SEQ ID NO: 2639473 - RNA, 19 nt, Artificial Sequence
  Description of Artificial Sequence: Synthetic oligonucleotide
ucaggcuuuucacuuugau

SEQ ID NO: 2639474 - RNA, 19 nt, Artificial Sequence
  Description of Artificial Sequence: Synthetic oligonucleotide
ggcagucucucauagcaag

SEQ ID NO: 2639475 - RNA, 19 nt, Artificial Sequence
  Description of Artificial Sequence: Synthetic oligonucleotide
aucaucccacccaugauug

SEQ ID NO: 2639476 - RNA, 19 nt, Artificial Sequence
  Description of Artificial Sequence: Synthetic oligonucleotide
uuguucuguuuaacugcag

SEQ ID NO: 2639477 - RNA, 19 nt, Artificial Sequence
  Description of Artificial Sequence: Synthetic oligonucleotide
gcagagaugaugccauggg

SEQ ID NO: 2639478 - RNA, 19 nt, Artificial Sequence
  Description of Artificial Sequence: Synthetic oligonucleotide
ggcaguagcauagcgaccc

SEQ ID NO: 2639479 - RNA, 19 nt, Artificial Sequence
  Description of Artificial Sequence: Synthetic oligonucleotide
ugagguuggcggucagcgg

SEQ ID NO: 2639480 - RNA, 19 nt, Artificial Sequence
  Description of Artificial Sequence: Synthetic oligonucleotide
uacguauuucuccccaauu

SEQ ID NO: 2639481 - RNA, 19 nt, Artificial Sequence
  Description of Artificial Sequence: Synthetic oligonucleotide
aaagggccugaccacggau

SEQ ID NO: 2639482 - RNA, 19 nt, Artificial Sequence
  Description of Artificial Sequence: Synthetic oligonucleotide
agcaccgucuuuaacucag

SEQ ID NO: 2639483 - RNA, 19 nt, Artificial Sequence
  Description of Artificial Sequence: Synthetic oligonucleotide
cccaauuuggacaaucauc

SEQ ID NO: 2639484 - RNA, 19 nt, Artificial Sequence
  Description of Artificial Sequence: Synthetic oligonucleotide
ugauagagcgcuugacaua

SEQ ID NO: 2639485 - RNA, 19 nt, Artificial Sequence
  Description of Artificial Sequence: Synthetic oligonucleotide
uggcggucagcggagaaag

SEQ ID NO: 2639486 - RNA, 19 nt, Artificial Sequence
  Description of Artificial Sequence: Synthetic oligonucleotide
uucuccacgguggacacuc

SEQ ID NO: 2639487 - RNA, 19 nt, Artificial Sequence
  Description of Artificial Sequence: Synthetic oligonucleotide
auuguugcuccaaggacca

SEQ ID NO: 2639488 - RNA, 19 nt, Artificial Sequence
  Description of Artificial Sequence: Synthetic oligonucleotide
cuuugauagagcgcuugac

SEQ ID NO: 2639489 - RNA, 19 nt, Artificial Sequence
  Description of Artificial Sequence: Synthetic oligonucleotide
acguggcagucucucauag

SEQ ID NO: 2639490 - RNA, 19 nt, Artificial Sequence
  Description of Artificial Sequence: Synthetic oligonucleotide
acacucaugaugguggaaa

SEQ ID NO: 2639491 - RNA, 19 nt, Artificial Sequence
  Description of Artificial Sequence: Synthetic oligonucleotide
guugcuccaaggaccagag

SEQ ID NO: 2639492 - RNA, 19 nt, Artificial Sequence
  Description of Artificial Sequence: Synthetic oligonucleotide
auagcgacccucgaugcca

SEQ ID NO: 2639493 - RNA, 19 nt, Artificial Sequence
  Description of Artificial Sequence: Synthetic oligonucleotide
agagcucagacacguggca

SEQ ID NO: 2639494 - RNA, 19 nt, Artificial Sequence
  Description of Artificial Sequence: Synthetic oligonucleotide
gagcgcuugacauagggau

SEQ ID NO: 2639495 - RNA, 19 nt, Artificial Sequence
  Description of Artificial Sequence: Synthetic oligonucleotide
gacgggucagucuuaaccu

SEQ ID NO: 2639496 - RNA, 19 nt, Artificial Sequence
  Description of Artificial Sequence: Synthetic oligonucleotide
acucaugaugguggaaaag

SEQ ID NO: 2639497 - RNA, 19 nt, Artificial Sequence
  Description of Artificial Sequence: Synthetic oligonucleotide
cauuuaaagcagaugcugu

SEQ ID NO: 2639498 - RNA, 19 nt, Artificial Sequence
  Description of Artificial Sequence: Synthetic oligonucleotide
cauagggauucagaacggc

SEQ ID NO: 2639499 - RNA, 19 nt, Artificial Sequence
  Description of Artificial Sequence: Synthetic oligonucleotide
agguucaauacuuggccuu

SEQ ID NO: 2639500 - RNA, 19 nt, Artificial Sequence
  Description of Artificial Sequence: Synthetic oligonucleotide
auagggauucagaacggca

SEQ ID NO: 2639501 - RNA, 19 nt, Artificial Sequence
  Description of Artificial Sequence: Synthetic oligonucleotide
ggagaaagcuucuccuuug

SEQ ID NO: 2639502 - RNA, 19 nt, Artificial Sequence
  Description of Artificial Sequence: Synthetic oligonucleotide
agcucagacacguggcagu

SEQ ID NO: 2639503 - RNA, 19 nt, Artificial Sequence
  Description of Artificial Sequence: Synthetic oligonucleotide
aagcuccguaccugucggg

SEQ ID NO: 2639504 - RNA, 19 nt, Artificial Sequence
  Description of Artificial Sequence: Synthetic oligonucleotide
caaggaccagagcucagac

SEQ ID NO: 2639505 - RNA, 19 nt, Artificial Sequence
  Description of Artificial Sequence: Synthetic oligonucleotide
agacacguggcagucucuc

SEQ ID NO: 2639506 - RNA, 19 nt, Artificial Sequence
  Description of Artificial Sequence: Synthetic oligonucleotide
auacuuggccuuugcccag

SEQ ID NO: 2639507 - RNA, 19 nt, Artificial Sequence
  Description of Artificial Sequence: Synthetic oligonucleotide
uacugaagcuccguaccug

SEQ ID NO: 2639508 - RNA, 19 nt, Artificial Sequence
  Description of Artificial Sequence: Synthetic oligonucleotide
cuuugcugugaugucacuc

SEQ ID NO: 2639509 - RNA, 19 nt, Artificial Sequence
  Description of Artificial Sequence: Synthetic oligonucleotide
gcuuuucacuuugauagag

SEQ ID NO: 2639510 - RNA, 19 nt, Artificial Sequence
  Description of Artificial Sequence: Synthetic oligonucleotide
ucuaggcgaccguuuucag

SEQ ID NO: 2639511 - RNA, 19 nt, Artificial Sequence
  Description of Artificial Sequence: Synthetic oligonucleotide
ggaguuggcccacacgcag

SEQ ID NO: 2639512 - RNA, 19 nt, Artificial Sequence
  Description of Artificial Sequence: Synthetic oligonucleotide
cagcggagaaagcuucucc

SEQ ID NO: 2639513 - RNA, 19 nt, Artificial Sequence
  Description of Artificial Sequence: Synthetic oligonucleotide
cauagcgacccucgaugcc

SEQ ID NO: 2639514 - RNA, 19 nt, Artificial Sequence
  Description of Artificial Sequence: Synthetic oligonucleotide
cagaacggcaagagacacc

SEQ ID NO: 2639515 - RNA, 19 nt, Artificial Sequence
  Description of Artificial Sequence: Synthetic oligonucleotide
ggauucagaacggcaagag

SEQ ID NO: 2639516 - RNA, 19 nt, Artificial Sequence
  Description of Artificial Sequence: Synthetic oligonucleotide
uucaggaguuggcccacac

SEQ ID NO: 2639517 - RNA, 19 nt, Artificial Sequence
  Description of Artificial Sequence: Synthetic oligonucleotide
gcaagagacaccuuggggu

SEQ ID NO: 2639518 - RNA, 19 nt, Artificial Sequence
  Description of Artificial Sequence: Synthetic oligonucleotide
uccagcuuguucuguuuaa

SEQ ID NO: 2639519 - RNA, 19 nt, Artificial Sequence
  Description of Artificial Sequence: Synthetic oligonucleotide
gcaaguaaauucaugaggu

SEQ ID NO: 2639520 - RNA, 19 nt, Artificial Sequence
  Description of Artificial Sequence: Synthetic oligonucleotide
uugucuaggcgaccguuuu

SEQ ID NO: 2639521 - RNA, 19 nt, Artificial Sequence
  Description of Artificial Sequence: Synthetic oligonucleotide
ucagagagaacagcuucau

SEQ ID NO: 2639522 - RNA, 19 nt, Artificial Sequence
  Description of Artificial Sequence: Synthetic oligonucleotide
acggcaagagacaccuugg

SEQ ID NO: 2639523 - RNA, 19 nt, Artificial Sequence
  Description of Artificial Sequence: Synthetic oligonucleotide
uagcauagcgacccucgau

SEQ ID NO: 2639524 - RNA, 19 nt, Artificial Sequence
  Description of Artificial Sequence: Synthetic oligonucleotide
ugaccacggauguacugaa

SEQ ID NO: 2639525 - RNA, 19 nt, Artificial Sequence
  Description of Artificial Sequence: Synthetic oligonucleotide
gucgggacagcccgcacgc

SEQ ID NO: 2639526 - RNA, 19 nt, Artificial Sequence
  Description of Artificial Sequence: Synthetic oligonucleotide
aagucccgcauggccuugc

SEQ ID NO: 2639527 - RNA, 19 nt, Artificial Sequence
  Description of Artificial Sequence: Synthetic oligonucleotide
acacguggcagucucucau

SEQ ID NO: 2639528 - RNA, 19 nt, Artificial Sequence
  Description of Artificial Sequence: Synthetic oligonucleotide
gaagcucuucagcaccguc

SEQ ID NO: 2639529 - RNA, 19 nt, Artificial Sequence
  Description of Artificial Sequence: Synthetic oligonucleotide
cgguggacacucaugaugg

SEQ ID NO: 2639530 - RNA, 19 nt, Artificial Sequence
  Description of Artificial Sequence: Synthetic oligonucleotide
gagaacagcuucauuuaaa

SEQ ID NO: 2639531 - RNA, 19 nt, Artificial Sequence
  Description of Artificial Sequence: Synthetic oligonucleotide
uccaaggaccagagcucag

SEQ ID NO: 2639532 - RNA, 19 nt, Artificial Sequence
  Description of Artificial Sequence: Synthetic oligonucleotide
cacuuugauagagcgcuug

SEQ ID NO: 2639533 - RNA, 19 nt, Artificial Sequence
  Description of Artificial Sequence: Synthetic oligonucleotide
ugucuaggcgaccguuuuc

SEQ ID NO: 2639534 - RNA, 19 nt, Artificial Sequence
  Description of Artificial Sequence: Synthetic oligonucleotide
caucccacccaugauugac

SEQ ID NO: 2639535 - RNA, 19 nt, Artificial Sequence
  Description of Artificial Sequence: Synthetic oligonucleotide
ucgaugccauauaucugaa

SEQ ID NO: 2639536 - RNA, 19 nt, Artificial Sequence
  Description of Artificial Sequence: Synthetic oligonucleotide
cacggauguacugaagcuc

SEQ ID NO: 2639537 - RNA, 19 nt, Artificial Sequence
  Description of Artificial Sequence: Synthetic oligonucleotide
gaccguuuucagcaaguaa

SEQ ID NO: 2639538 - RNA, 19 nt, Artificial Sequence
  Description of Artificial Sequence: Synthetic oligonucleotide
uauugucuaggcgaccguu

SEQ ID NO: 2639539 - RNA, 19 nt, Artificial Sequence
  Description of Artificial Sequence: Synthetic oligonucleotide
aacucagagagaacagcuu

SEQ ID NO: 2639540 - RNA, 19 nt, Artificial Sequence
  Description of Artificial Sequence: Synthetic oligonucleotide
agcaagucccgcauggccu

SEQ ID NO: 2639541 - RNA, 19 nt, Artificial Sequence
  Description of Artificial Sequence: Synthetic oligonucleotide
aucccacccaugauugacg

SEQ ID NO: 2639542 - RNA, 19 nt, Artificial Sequence
  Description of Artificial Sequence: Synthetic oligonucleotide
agggcacuucuccacggug

SEQ ID NO: 2639543 - RNA, 19 nt, Artificial Sequence
  Description of Artificial Sequence: Synthetic oligonucleotide
ucaugagguuggcggucag

SEQ ID NO: 2639544 - RNA, 19 nt, Artificial Sequence
  Description of Artificial Sequence: Synthetic oligonucleotide
agggccugaccacggaugu

SEQ ID NO: 2639545 - RNA, 19 nt, Artificial Sequence
  Description of Artificial Sequence: Synthetic oligonucleotide
gucuuaaccuucagguuca

SEQ ID NO: 2639546 - RNA, 19 nt, Artificial Sequence
  Description of Artificial Sequence: Synthetic oligonucleotide
cagucucucauagcaaguc

SEQ ID NO: 2639547 - RNA, 19 nt, Artificial Sequence
  Description of Artificial Sequence: Synthetic oligonucleotide
gucuaggcgaccguuuuca

SEQ ID NO: 2639548 - RNA, 19 nt, Artificial Sequence
  Description of Artificial Sequence: Synthetic oligonucleotide
cguauuucuccccaauuug

SEQ ID NO: 2639549 - RNA, 19 nt, Artificial Sequence
  Description of Artificial Sequence: Synthetic oligonucleotide
ggccucacaaguuuggcaa

SEQ ID NO: 2639550 - RNA, 19 nt, Artificial Sequence
  Description of Artificial Sequence: Synthetic oligonucleotide
gaagcguuuuauuguugcu

SEQ ID NO: 2639551 - RNA, 19 nt, Artificial Sequence
  Description of Artificial Sequence: Synthetic oligonucleotide
uggcagucucucauagcaa

SEQ ID NO: 2639552 - RNA, 19 nt, Artificial Sequence
  Description of Artificial Sequence: Synthetic oligonucleotide
ggcaaagggccugaccacg

SEQ ID NO: 2639553 - RNA, 19 nt, Artificial Sequence
  Description of Artificial Sequence: Synthetic oligonucleotide
uccguaccugucgggacag

SEQ ID NO: 2639554 - RNA, 19 nt, Artificial Sequence
  Description of Artificial Sequence: Synthetic oligonucleotide
ucaucccacccaugauuga

SEQ ID NO: 2639555 - RNA, 19 nt, Artificial Sequence
  Description of Artificial Sequence: Synthetic oligonucleotide
cugaccacggauguacuga

SEQ ID NO: 2639556 - RNA, 19 nt, Artificial Sequence
  Description of Artificial Sequence: Synthetic oligonucleotide
accuucagguucaauacuu

SEQ ID NO: 2639557 - RNA, 19 nt, Artificial Sequence
  Description of Artificial Sequence: Synthetic oligonucleotide
caggcuuuucacuuugaua

SEQ ID NO: 2639558 - RNA, 19 nt, Artificial Sequence
  Description of Artificial Sequence: Synthetic oligonucleotide
gguggaaaaggcagagaug

SEQ ID NO: 2639559 - RNA, 19 nt, Artificial Sequence
  Description of Artificial Sequence: Synthetic oligonucleotide
acccaugauugacggguca

SEQ ID NO: 2639560 - RNA, 19 nt, Artificial Sequence
  Description of Artificial Sequence: Synthetic oligonucleotide
guaccugucgggacagccc

SEQ ID NO: 2639561 - RNA, 19 nt, Artificial Sequence
  Description of Artificial Sequence: Synthetic oligonucleotide
gucacucaggcuuuucacu

SEQ ID NO: 2639562 - RNA, 19 nt, Artificial Sequence
  Description of Artificial Sequence: Synthetic oligonucleotide
gccauauaucugaaccggg

SEQ ID NO: 2639563 - RNA, 19 nt, Artificial Sequence
  Description of Artificial Sequence: Synthetic oligonucleotide
gacaaucaucccacccaug

SEQ ID NO: 2639564 - RNA, 19 nt, Artificial Sequence
  Description of Artificial Sequence: Synthetic oligonucleotide
ucagcggagaaagcuucuc

SEQ ID NO: 2639565 - RNA, 19 nt, Artificial Sequence
  Description of Artificial Sequence: Synthetic oligonucleotide
agcagaguaaagggcagua

SEQ ID NO: 2639566 - RNA, 19 nt, Artificial Sequence
  Description of Artificial Sequence: Synthetic oligonucleotide
agcuucauuuaaagcagau

SEQ ID NO: 2639567 - RNA, 19 nt, Artificial Sequence
  Description of Artificial Sequence: Synthetic oligonucleotide
auugacgggucagucuuaa

SEQ ID NO: 2639568 - RNA, 19 nt, Artificial Sequence
  Description of Artificial Sequence: Synthetic oligonucleotide
gaguuggcccacacgcagc

SEQ ID NO: 2639569 - RNA, 19 nt, Artificial Sequence
  Description of Artificial Sequence: Synthetic oligonucleotide
guucaauacuuggccuuug

SEQ ID NO: 2639570 - RNA, 19 nt, Artificial Sequence
  Description of Artificial Sequence: Synthetic oligonucleotide
agagcgcuugacauaggga

SEQ ID NO: 2639571 - RNA, 19 nt, Artificial Sequence
  Description of Artificial Sequence: Synthetic oligonucleotide
guagcauagcgacccucga

SEQ ID NO: 2639572 - RNA, 19 nt, Artificial Sequence
  Description of Artificial Sequence: Synthetic oligonucleotide
acccucgaugccauauauc

SEQ ID NO: 2639573 - RNA, 19 nt, Artificial Sequence
  Description of Artificial Sequence: Synthetic oligonucleotide
cuccccaauuuggacaauc

SEQ ID NO: 2639574 - RNA, 19 nt, Artificial Sequence
  Description of Artificial Sequence: Synthetic oligonucleotide
cugaaucuuggucuuugua

SEQ ID NO: 2639575 - RNA, 19 nt, Artificial Sequence
  Description of Artificial Sequence: Synthetic oligonucleotide
uuggcggucagcggagaaa

SEQ ID NO: 2639576 - RNA, 19 nt, Artificial Sequence
  Description of Artificial Sequence: Synthetic oligonucleotide
ucacuuugauagagcgcuu

SEQ ID NO: 2639577 - RNA, 19 nt, Artificial Sequence
  Description of Artificial Sequence: Synthetic oligonucleotide
agcuccguaccugucggga

SEQ ID NO: 2639578 - RNA, 19 nt, Artificial Sequence
  Description of Artificial Sequence: Synthetic oligonucleotide
aggaagcguuuuauuguug

SEQ ID NO: 2639579 - RNA, 19 nt, Artificial Sequence
  Description of Artificial Sequence: Synthetic oligonucleotide
gaccacggauguacugaag

SEQ ID NO: 2639580 - RNA, 19 nt, Artificial Sequence
  Description of Artificial Sequence: Synthetic oligonucleotide
gaguaaagggcaguagcau

SEQ ID NO: 2639581 - RNA, 19 nt, Artificial Sequence
  Description of Artificial Sequence: Synthetic oligonucleotide
agagacaccuugggguccu

SEQ ID NO: 2639582 - RNA, 19 nt, Artificial Sequence
  Description of Artificial Sequence: Synthetic oligonucleotide
acgggucagucuuaaccuu

SEQ ID NO: 2639583 - RNA, 19 nt, Artificial Sequence
  Description of Artificial Sequence: Synthetic oligonucleotide
cugaagcuccguaccuguc

SEQ ID NO: 2639584 - RNA, 19 nt, Artificial Sequence
  Description of Artificial Sequence: Synthetic oligonucleotide
cacucaugaugguggaaaa

SEQ ID NO: 2639585 - RNA, 19 nt, Artificial Sequence
  Description of Artificial Sequence: Synthetic oligonucleotide
auugucuaggcgaccguuu

SEQ ID NO: 2639586 - RNA, 19 nt, Artificial Sequence
  Description of Artificial Sequence: Synthetic oligonucleotide
agacaccuugggguccuuc

SEQ ID NO: 2639587 - RNA, 19 nt, Artificial Sequence
  Description of Artificial Sequence: Synthetic oligonucleotide
gcagggcacuucuccacgg

SEQ ID NO: 2639588 - RNA, 19 nt, Artificial Sequence
  Description of Artificial Sequence: Synthetic oligonucleotide
ggccugaccacggauguac

SEQ ID NO: 2639589 - RNA, 19 nt, Artificial Sequence
  Description of Artificial Sequence: Synthetic oligonucleotide
cacccaugauugacggguc

SEQ ID NO: 2639590 - RNA, 19 nt, Artificial Sequence
  Description of Artificial Sequence: Synthetic oligonucleotide
cuccguaccugucgggaca

SEQ ID NO: 2639591 - RNA, 19 nt, Artificial Sequence
  Description of Artificial Sequence: Synthetic oligonucleotide
gcaaagggccugaccacgg

SEQ ID NO: 2639592 - RNA, 19 nt, Artificial Sequence
  Description of Artificial Sequence: Synthetic oligonucleotide
cccucgaugccauauaucu

SEQ ID NO: 2639593 - RNA, 19 nt, Artificial Sequence
  Description of Artificial Sequence: Synthetic oligonucleotide
auagagcgcuugacauagg

SEQ ID NO: 2639594 - RNA, 19 nt, Artificial Sequence
  Description of Artificial Sequence: Synthetic oligonucleotide
ggcgaccguuuucagcaag

SEQ ID NO: 2639595 - RNA, 19 nt, Artificial Sequence
  Description of Artificial Sequence: Synthetic oligonucleotide
gacccucgaugccauauau

SEQ ID NO: 2639596 - RNA, 19 nt, Artificial Sequence
  Description of Artificial Sequence: Synthetic oligonucleotide
ccucgaugccauauaucug

SEQ ID NO: 2639597 - RNA, 19 nt, Artificial Sequence
  Description of Artificial Sequence: Synthetic oligonucleotide
uagcgacccucgaugccau

SEQ ID NO: 2639598 - RNA, 19 nt, Artificial Sequence
  Description of Artificial Sequence: Synthetic oligonucleotide
ccacgguggacacucauga

SEQ ID NO: 2639599 - RNA, 19 nt, Artificial Sequence
  Description of Artificial Sequence: Synthetic oligonucleotide
ggucagcggagaaagcuuc

SEQ ID NO: 2639600 - RNA, 19 nt, Artificial Sequence
  Description of Artificial Sequence: Synthetic oligonucleotide
agguuggcggucagcggag

SEQ ID NO: 2639601 - RNA, 19 nt, Artificial Sequence
  Description of Artificial Sequence: Synthetic oligonucleotide
gcuugacauagggauucag

SEQ ID NO: 2639602 - RNA, 19 nt, Artificial Sequence
  Description of Artificial Sequence: Synthetic oligonucleotide
caaguaaauucaugagguu

SEQ ID NO: 2639603 - RNA, 19 nt, Artificial Sequence
  Description of Artificial Sequence: Synthetic oligonucleotide
aggaguuggcccacacgca

SEQ ID NO: 2639604 - RNA, 19 nt, Artificial Sequence
  Description of Artificial Sequence: Synthetic oligonucleotide
caguagcauagcgacccuc

SEQ ID NO: 2639605 - RNA, 19 nt, Artificial Sequence
  Description of Artificial Sequence: Synthetic oligonucleotide
ccucacaaguuuggcaaag

SEQ ID NO: 2639606 - RNA, 19 nt, Artificial Sequence
  Description of Artificial Sequence: Synthetic oligonucleotide
gggccucacaaguuuggca

SEQ ID NO: 2639607 - RNA, 19 nt, Artificial Sequence
  Description of Artificial Sequence: Synthetic oligonucleotide
gcgcuugacauagggauuc

SEQ ID NO: 2639608 - RNA, 19 nt, Artificial Sequence
  Description of Artificial Sequence: Synthetic oligonucleotide
ccugaccacggauguacug

SEQ ID NO: 2639609 - RNA, 19 nt, Artificial Sequence
  Description of Artificial Sequence: Synthetic oligonucleotide
ucuuaaccuucagguucaa

SEQ ID NO: 2639610 - RNA, 19 nt, Artificial Sequence
  Description of Artificial Sequence: Synthetic oligonucleotide
ggaccagagcucagacacg

SEQ ID NO: 2639611 - RNA, 19 nt, Artificial Sequence
  Description of Artificial Sequence: Synthetic oligonucleotide
caggaagcguuuuauuguu

SEQ ID NO: 2639612 - RNA, 19 nt, Artificial Sequence
  Description of Artificial Sequence: Synthetic oligonucleotide
gacacucaugaugguggaa

SEQ ID NO: 2639613 - RNA, 19 nt, Artificial Sequence
  Description of Artificial Sequence: Synthetic oligonucleotide
ucgggacagcccgcacgcg

SEQ ID NO: 2639614 - RNA, 19 nt, Artificial Sequence
  Description of Artificial Sequence: Synthetic oligonucleotide
caaagggccugaccacgga

SEQ ID NO: 2639615 - RNA, 19 nt, Artificial Sequence
  Description of Artificial Sequence: Synthetic oligonucleotide
cccaugauugacgggucag

SEQ ID NO: 2639616 - RNA, 19 nt, Artificial Sequence
  Description of Artificial Sequence: Synthetic oligonucleotide
agcgcuugacauagggauu

SEQ ID NO: 2639617 - RNA, 19 nt, Artificial Sequence
  Description of Artificial Sequence: Synthetic oligonucleotide
uggccuugcugagcuucug

SEQ ID NO: 2639618 - RNA, 19 nt, Artificial Sequence
  Description of Artificial Sequence: Synthetic oligonucleotide
guuggcggucagcggagaa

SEQ ID NO: 2639619 - RNA, 19 nt, Artificial Sequence
  Description of Artificial Sequence: Synthetic oligonucleotide
cuacguauuucuccccaau

SEQ ID NO: 2639620 - RNA, 19 nt, Artificial Sequence
  Description of Artificial Sequence: Synthetic oligonucleotide
auggccuugcugagcuucu

SEQ ID NO: 2639621 - RNA, 19 nt, Artificial Sequence
  Description of Artificial Sequence: Synthetic oligonucleotide
caccaugcagggcacuucu

SEQ ID NO: 2639622 - RNA, 19 nt, Artificial Sequence
  Description of Artificial Sequence: Synthetic oligonucleotide
ggacaaucaucccacccau

SEQ ID NO: 2639623 - RNA, 19 nt, Artificial Sequence
  Description of Artificial Sequence: Synthetic oligonucleotide
cagcaccgucuuuaacuca

SEQ ID NO: 2639624 - RNA, 19 nt, Artificial Sequence
  Description of Artificial Sequence: Synthetic oligonucleotide
guuuggcaaagggccugac

SEQ ID NO: 2639625 - RNA, 19 nt, Artificial Sequence
  Description of Artificial Sequence: Synthetic oligonucleotide
gcuccguaccugucgggac

SEQ ID NO: 2639626 - RNA, 19 nt, Artificial Sequence
  Description of Artificial Sequence: Synthetic oligonucleotide
gauugacgggucagucuua

SEQ ID NO: 2639627 - RNA, 19 nt, Artificial Sequence
  Description of Artificial Sequence: Synthetic oligonucleotide
guuggcccacacgcagcag

SEQ ID NO: 2639628 - RNA, 19 nt, Artificial Sequence
  Description of Artificial Sequence: Synthetic oligonucleotide
cagucuuaaccuucagguu

SEQ ID NO: 2639629 - RNA, 19 nt, Artificial Sequence
  Description of Artificial Sequence: Synthetic oligonucleotide
cggcaagagacaccuuggg

SEQ ID NO: 2639630 - RNA, 19 nt, Artificial Sequence
  Description of Artificial Sequence: Synthetic oligonucleotide
gcguuuuauuguugcucca

SEQ ID NO: 2639631 - RNA, 19 nt, Artificial Sequence
  Description of Artificial Sequence: Synthetic oligonucleotide
cguaccugucgggacagcc

SEQ ID NO: 2639632 - RNA, 19 nt, Artificial Sequence
  Description of Artificial Sequence: Synthetic oligonucleotide
gggucagucuuaaccuuca

SEQ ID NO: 2639633 - RNA, 19 nt, Artificial Sequence
  Description of Artificial Sequence: Synthetic oligonucleotide
ggggccucacaaguuuggc

SEQ ID NO: 2639634 - RNA, 19 nt, Artificial Sequence
  Description of Artificial Sequence: Synthetic oligonucleotide
gggacagcccgcacgcggc

SEQ ID NO: 2639635 - RNA, 19 nt, Artificial Sequence
  Description of Artificial Sequence: Synthetic oligonucleotide
caaucaucccacccaugau

SEQ ID NO: 2639636 - RNA, 19 nt, Artificial Sequence
  Description of Artificial Sequence: Synthetic oligonucleotide
cacguggcagucucucaua

SEQ ID NO: 2639637 - RNA, 19 nt, Artificial Sequence
  Description of Artificial Sequence: Synthetic oligonucleotide
cccacccaugauugacggg

SEQ ID NO: 2639638 - RNA, 19 nt, Artificial Sequence
  Description of Artificial Sequence: Synthetic oligonucleotide
ggguauugucuaggcgacc

SEQ ID NO: 2639639 - RNA, 19 nt, Artificial Sequence
  Description of Artificial Sequence: Synthetic oligonucleotide
aggcgaccguuuucagcaa

SEQ ID NO: 2639640 - RNA, 19 nt, Artificial Sequence
  Description of Artificial Sequence: Synthetic oligonucleotide
cguggcagucucucauagc

SEQ ID NO: 2639641 - RNA, 19 nt, Artificial Sequence
  Description of Artificial Sequence: Synthetic oligonucleotide
cgaugccauauaucugaac

SEQ ID NO: 2639642 - RNA, 19 nt, Artificial Sequence
  Description of Artificial Sequence: Synthetic oligonucleotide
cgggacagcccgcacgcgg

SEQ ID NO: 2639643 - RNA, 19 nt, Artificial Sequence
  Description of Artificial Sequence: Synthetic oligonucleotide
ccacccaugauugacgggu

SEQ ID NO: 2639644 - RNA, 19 nt, Artificial Sequence
  Description of Artificial Sequence: Synthetic oligonucleotide
caagucccgcauggccuug

SEQ ID NO: 2639645 - RNA, 19 nt, Artificial Sequence
  Description of Artificial Sequence: Synthetic oligonucleotide
ccuuugcccaggaagcucu

SEQ ID NO: 2639646 - RNA, 19 nt, Artificial Sequence
  Description of Artificial Sequence: Synthetic oligonucleotide
gggcaguagcauagcgacc

SEQ ID NO: 2639647 - RNA, 19 nt, Artificial Sequence
  Description of Artificial Sequence: Synthetic oligonucleotide
gcucagacacguggcaguc

SEQ ID NO: 2639648 - RNA, 19 nt, Artificial Sequence
  Description of Artificial Sequence: Synthetic oligonucleotide
cuuggccuuugcccaggaa

SEQ ID NO: 2639649 - RNA, 19 nt, Artificial Sequence
  Description of Artificial Sequence: Synthetic oligonucleotide
gcggucagcggagaaagcu

SEQ ID NO: 2639650 - RNA, 19 nt, Artificial Sequence
  Description of Artificial Sequence: Synthetic oligonucleotide
ucuccccaauuuggacaau

SEQ ID NO: 2639651 - RNA, 19 nt, Artificial Sequence
  Description of Artificial Sequence: Synthetic oligonucleotide
ccacggauguacugaagcu

SEQ ID NO: 2639652 - RNA, 19 nt, Artificial Sequence
  Description of Artificial Sequence: Synthetic oligonucleotide
gccuuugcccaggaagcuc

SEQ ID NO: 2639653 - RNA, 19 nt, Artificial Sequence
  Description of Artificial Sequence: Synthetic oligonucleotide
cgucuuuaacucagagaga

SEQ ID NO: 2639654 - RNA, 19 nt, Artificial Sequence
  Description of Artificial Sequence: Synthetic oligonucleotide
gucagcggagaaagcuucu

SEQ ID NO: 2639655 - RNA, 19 nt, Artificial Sequence
  Description of Artificial Sequence: Synthetic oligonucleotide
gugaugucacucaggcuuu

SEQ ID NO: 2639656 - RNA, 19 nt, Artificial Sequence
  Description of Artificial Sequence: Synthetic oligonucleotide
ccguuuucagcaaguaaau

SEQ ID NO: 2639657 - RNA, 19 nt, Artificial Sequence
  Description of Artificial Sequence: Synthetic oligonucleotide
gguucaauacuuggccuuu

SEQ ID NO: 2639658 - RNA, 19 nt, Artificial Sequence
  Description of Artificial Sequence: Synthetic oligonucleotide
cuucaggaguuggcccaca

SEQ ID NO: 2639659 - RNA, 19 nt, Artificial Sequence
  Description of Artificial Sequence: Synthetic oligonucleotide
cguuuuauuguugcuccaa

SEQ ID NO: 2639660 - RNA, 19 nt, Artificial Sequence
  Description of Artificial Sequence: Synthetic oligonucleotide
gucaccaugcagggcacuu

SEQ ID NO: 2639661 - RNA, 19 nt, Artificial Sequence
  Description of Artificial Sequence: Synthetic oligonucleotide
cuuaaccuucagguucaau

SEQ ID NO: 2639662 - RNA, 19 nt, Artificial Sequence
  Description of Artificial Sequence: Synthetic oligonucleotide
ggcggucagcggagaaagc

SEQ ID NO: 2639663 - RNA, 19 nt, Artificial Sequence
  Description of Artificial Sequence: Synthetic oligonucleotide
gguggacacucaugauggu

SEQ ID NO: 2639664 - RNA, 19 nt, Artificial Sequence
  Description of Artificial Sequence: Synthetic oligonucleotide
gcagucucucauagcaagu

SEQ ID NO: 2639665 - RNA, 19 nt, Artificial Sequence
  Description of Artificial Sequence: Synthetic oligonucleotide
cacgguggacacucaugau

SEQ ID NO: 2639666 - RNA, 19 nt, Artificial Sequence
  Description of Artificial Sequence: Synthetic oligonucleotide
ggacagcccgcacgcggca

SEQ ID NO: 2639667 - RNA, 19 nt, Artificial Sequence
  Description of Artificial Sequence: Synthetic oligonucleotide
gcggagaaagcuucuccuu

SEQ ID NO: 2639668 - RNA, 19 nt, Artificial Sequence
  Description of Artificial Sequence: Synthetic oligonucleotide
cagggcacuucuccacggu

SEQ ID NO: 2639669 - RNA, 19 nt, Artificial Sequence
  Description of Artificial Sequence: Synthetic oligonucleotide
agcgacccucgaugccaua

SEQ ID NO: 2639670 - RNA, 19 nt, Artificial Sequence
  Description of Artificial Sequence: Synthetic oligonucleotide
gcuucuccuuugcugugau

SEQ ID NO: 2639671 - RNA, 19 nt, Artificial Sequence
  Description of Artificial Sequence: Synthetic oligonucleotide
gcgaccguuuucagcaagu

SEQ ID NO: 2639672 - RNA, 19 nt, Artificial Sequence
  Description of Artificial Sequence: Synthetic oligonucleotide
ccccaauuuggacaaucau

SEQ ID NO: 2639673 - RNA, 19 nt, Artificial Sequence
  Description of Artificial Sequence: Synthetic oligonucleotide
gcaccgucuuuaacucaga

SEQ ID NO: 2639674 - RNA, 19 nt, Artificial Sequence
  Description of Artificial Sequence: Synthetic oligonucleotide
gcaguagcauagcgacccu

SEQ ID NO: 2639675 - RNA, 19 nt, Artificial Sequence
  Description of Artificial Sequence: Synthetic oligonucleotide
gguuggcggucagcggaga

SEQ ID NO: 2639676 - RNA, 19 nt, Artificial Sequence
  Description of Artificial Sequence: Synthetic oligonucleotide
ccugucgggacagcccgca

SEQ ID NO: 2639677 - RNA, 19 nt, Artificial Sequence
  Description of Artificial Sequence: Synthetic oligonucleotide
ggaagcucuucagcaccgu

SEQ ID NO: 2639678 - RNA, 19 nt, Artificial Sequence
  Description of Artificial Sequence: Synthetic oligonucleotide
ccaugauugacgggucagu

SEQ ID NO: 2639679 - RNA, 19 nt, Artificial Sequence
  Description of Artificial Sequence: Synthetic oligonucleotide
gcgacccucgaugccauau

SEQ ID NO: 2639680 - RNA, 19 nt, Artificial Sequence
  Description of Artificial Sequence: Synthetic oligonucleotide
cuucuccacgguggacacu

SEQ ID NO: 2639681 - RNA, 19 nt, Artificial Sequence
  Description of Artificial Sequence: Synthetic oligonucleotide
gaacggcaagagacaccuu

SEQ ID NO: 2639682 - RNA, 19 nt, Artificial Sequence
  Description of Artificial Sequence: Synthetic oligonucleotide
ccguaccugucgggacagc

SEQ ID NO: 2639683 - RNA, 19 nt, Artificial Sequence
  Description of Artificial Sequence: Synthetic oligonucleotide
gccugaccacggauguacu

SEQ ID NO: 2639684 - RNA, 19 nt, Artificial Sequence
  Description of Artificial Sequence: Synthetic oligonucleotide
cgaccguuuucagcaagua

SEQ ID NO: 2639685 - RNA, 19 nt, Artificial Sequence
  Description of Artificial Sequence: Synthetic oligonucleotide
cgacccucgaugccauaua

SEQ ID NO: 2639686 - RNA, 19 nt, Artificial Sequence
  Description of Artificial Sequence: Synthetic oligonucleotide
cggucagcggagaaagcuu

SEQ ID NO: 2639687 - RNA, 19 nt, Artificial Sequence
  Description of Artificial Sequence: Synthetic oligonucleotide
cgcuugacauagggauuca

SEQ ID NO: 2639688 - RNA, 19 nt, Artificial Sequence
  Description of Artificial Sequence: Synthetic oligonucleotide
gggccugaccacggaugua

SEQ ID NO: 2639689 - RNA, 19 nt, Artificial Sequence
  Description of Artificial Sequence: Synthetic oligonucleotide
gagacaccuugggguccuu

SEQ ID NO: 2639690 - RNA, 19 nt, Artificial Sequence
  Description of Artificial Sequence: Synthetic oligonucleotide
aaaauaaaccuucuguacg

SEQ ID NO: 2639691 - RNA, 19 nt, Artificial Sequence
  Description of Artificial Sequence: Synthetic oligonucleotide
agaaauucgguucucaucc

SEQ ID NO: 2639692 - RNA, 19 nt, Artificial Sequence
  Description of Artificial Sequence: Synthetic oligonucleotide
aauguuugaaguuaaagcu

SEQ ID NO: 2639693 - RNA, 19 nt, Artificial Sequence
  Description of Artificial Sequence: Synthetic oligonucleotide
auaaaguaacaauugaagc

SEQ ID NO: 2639694 - RNA, 19 nt, Artificial Sequence
  Description of Artificial Sequence: Synthetic oligonucleotide
uauaaaguaacaauugaag

SEQ ID NO: 2639695 - RNA, 19 nt, Artificial Sequence
  Description of Artificial Sequence: Synthetic oligonucleotide
aaauaaaccuucuguacgc

SEQ ID NO: 2639696 - RNA, 19 nt, Artificial Sequence
  Description of Artificial Sequence: Synthetic oligonucleotide
aacuccuugucauugagac

SEQ ID NO: 2639697 - RNA, 19 nt, Artificial Sequence
  Description of Artificial Sequence: Synthetic oligonucleotide
uuuauauuagcacaugcca

SEQ ID NO: 2639698 - RNA, 19 nt, Artificial Sequence
  Description of Artificial Sequence: Synthetic oligonucleotide
accaauguaauugugaggc

SEQ ID NO: 2639699 - RNA, 19 nt, Artificial Sequence
  Description of Artificial Sequence: Synthetic oligonucleotide
aauauaaaguaacaauuga

SEQ ID NO: 2639700 - RNA, 19 nt, Artificial Sequence
  Description of Artificial Sequence: Synthetic oligonucleotide
uguacuauuaucuggugcc

SEQ ID NO: 2639701 - RNA, 19 nt, Artificial Sequence
  Description of Artificial Sequence: Synthetic oligonucleotide
aacuacauuccuuugaggu

SEQ ID NO: 2639702 - RNA, 19 nt, Artificial Sequence
  Description of Artificial Sequence: Synthetic oligonucleotide
uuaaaagaaaugaacugca

SEQ ID NO: 2639703 - RNA, 19 nt, Artificial Sequence
  Description of Artificial Sequence: Synthetic oligonucleotide
uuaacuacauuccuuugag

SEQ ID NO: 2639704 - RNA, 19 nt, Artificial Sequence
  Description of Artificial Sequence: Synthetic oligonucleotide
cuuuucaugaaguaccucc

SEQ ID NO: 2639705 - RNA, 19 nt, Artificial Sequence
  Description of Artificial Sequence: Synthetic oligonucleotide
aaaagaaaugaacugcaga

SEQ ID NO: 2639706 - RNA, 19 nt, Artificial Sequence
  Description of Artificial Sequence: Synthetic oligonucleotide
ugagguacuguacaaauca

SEQ ID NO: 2639707 - RNA, 19 nt, Artificial Sequence
  Description of Artificial Sequence: Synthetic oligonucleotide
uguucuuagcuuaacacug

SEQ ID NO: 2639708 - RNA, 19 nt, Artificial Sequence
  Description of Artificial Sequence: Synthetic oligonucleotide
uuuaguccaauaauguuug

SEQ ID NO: 2639709 - RNA, 19 nt, Artificial Sequence
  Description of Artificial Sequence: Synthetic oligonucleotide
uacgauuugguccucagcc

SEQ ID NO: 2639710 - RNA, 19 nt, Artificial Sequence
  Description of Artificial Sequence: Synthetic oligonucleotide
aacacaaccguucaucucu

SEQ ID NO: 2639711 - RNA, 19 nt, Artificial Sequence
  Description of Artificial Sequence: Synthetic oligonucleotide
aucacaaucacuuuccuga

SEQ ID NO: 2639712 - RNA, 19 nt, Artificial Sequence
  Description of Artificial Sequence: Synthetic oligonucleotide
agaacauuaaaagaaauga

SEQ ID NO: 2639713 - RNA, 19 nt, Artificial Sequence
  Description of Artificial Sequence: Synthetic oligonucleotide
aagcucuuuauauuagcac

SEQ ID NO: 2639714 - RNA, 19 nt, Artificial Sequence
  Description of Artificial Sequence: Synthetic oligonucleotide
aacaauugaagccuagccu

SEQ ID NO: 2639715 - RNA, 19 nt, Artificial Sequence
  Description of Artificial Sequence: Synthetic oligonucleotide
uagccuauuacucucagca

SEQ ID NO: 2639716 - RNA, 19 nt, Artificial Sequence
  Description of Artificial Sequence: Synthetic oligonucleotide
ucucuuuaguccaauaaug

SEQ ID NO: 2639717 - RNA, 19 nt, Artificial Sequence
  Description of Artificial Sequence: Synthetic oligonucleotide
uaaaccuucuguacgcugg

SEQ ID NO: 2639718 - RNA, 19 nt, Artificial Sequence
  Description of Artificial Sequence: Synthetic oligonucleotide
ucuuuauauuagcacaugc

SEQ ID NO: 2639719 - RNA, 19 nt, Artificial Sequence
  Description of Artificial Sequence: Synthetic oligonucleotide
uuuaacuacauuccuuuga

SEQ ID NO: 2639720 - RNA, 19 nt, Artificial Sequence
  Description of Artificial Sequence: Synthetic oligonucleotide
uaacaauugaagccuagcc

SEQ ID NO: 2639721 - RNA, 19 nt, Artificial Sequence
  Description of Artificial Sequence: Synthetic oligonucleotide
aaauuacuacgauuugguc

SEQ ID NO: 2639722 - RNA, 19 nt, Artificial Sequence
  Description of Artificial Sequence: Synthetic oligonucleotide
uguaguaacacaaccguuc

SEQ ID NO: 2639723 - RNA, 19 nt, Artificial Sequence
  Description of Artificial Sequence: Synthetic oligonucleotide
aguacauagugcuuuuaac

SEQ ID NO: 2639724 - RNA, 19 nt, Artificial Sequence
  Description of Artificial Sequence: Synthetic oligonucleotide
aguaccuccgaagagauuc

SEQ ID NO: 2639725 - RNA, 19 nt, Artificial Sequence
  Description of Artificial Sequence: Synthetic oligonucleotide
ucuguaguaacacaaccgu

SEQ ID NO: 2639726 - RNA, 19 nt, Artificial Sequence
  Description of Artificial Sequence: Synthetic oligonucleotide
uuucuguaguaacacaacc

SEQ ID NO: 2639727 - RNA, 19 nt, Artificial Sequence
  Description of Artificial Sequence: Synthetic oligonucleotide
uuauauuagcacaugccac

SEQ ID NO: 2639728 - RNA, 19 nt, Artificial Sequence
  Description of Artificial Sequence: Synthetic oligonucleotide
gaugagaagcuuuucauga

SEQ ID NO: 2639729 - RNA, 19 nt, Artificial Sequence
  Description of Artificial Sequence: Synthetic oligonucleotide
aauuaagguccagauuacc

SEQ ID NO: 2639730 - RNA, 19 nt, Artificial Sequence
  Description of Artificial Sequence: Synthetic oligonucleotide
ugcagaacagacaggauug

SEQ ID NO: 2639731 - RNA, 19 nt, Artificial Sequence
  Description of Artificial Sequence: Synthetic oligonucleotide
uguacaaaucacaaucacu

SEQ ID NO: 2639732 - RNA, 19 nt, Artificial Sequence
  Description of Artificial Sequence: Synthetic oligonucleotide
acauagugcuuuuaacuac

SEQ ID NO: 2639733 - RNA, 19 nt, Artificial Sequence
  Description of Artificial Sequence: Synthetic oligonucleotide
acaaauuacuacgauuugg

SEQ ID NO: 2639734 - RNA, 19 nt, Artificial Sequence
  Description of Artificial Sequence: Synthetic oligonucleotide
aguaacacaaccguucauc

SEQ ID NO: 2639735 - RNA, 19 nt, Artificial Sequence
  Description of Artificial Sequence: Synthetic oligonucleotide
ugagaagcuuuucaugaag

SEQ ID NO: 2639736 - RNA, 19 nt, Artificial Sequence
  Description of Artificial Sequence: Synthetic oligonucleotide
uugucauugagacaguaau

SEQ ID NO: 2639737 - RNA, 19 nt, Artificial Sequence
  Description of Artificial Sequence: Synthetic oligonucleotide
agaaaugaacugcagaaau

SEQ ID NO: 2639738 - RNA, 19 nt, Artificial Sequence
  Description of Artificial Sequence: Synthetic oligonucleotide
gguggcacaaauuacuacg

SEQ ID NO: 2639739 - RNA, 19 nt, Artificial Sequence
  Description of Artificial Sequence: Synthetic oligonucleotide
aguuaguacaguguccagc

SEQ ID NO: 2639740 - RNA, 19 nt, Artificial Sequence
  Description of Artificial Sequence: Synthetic oligonucleotide
uuguacuauuaucuggugc

SEQ ID NO: 2639741 - RNA, 19 nt, Artificial Sequence
  Description of Artificial Sequence: Synthetic oligonucleotide
aaucacaaucacuuuccug

SEQ ID NO: 2639742 - RNA, 19 nt, Artificial Sequence
  Description of Artificial Sequence: Synthetic oligonucleotide
agcucuuuauauuagcaca

SEQ ID NO: 2639743 - RNA, 19 nt, Artificial Sequence
  Description of Artificial Sequence: Synthetic oligonucleotide
auuaagguccagauuaccg

SEQ ID NO: 2639744 - RNA, 19 nt, Artificial Sequence
  Description of Artificial Sequence: Synthetic oligonucleotide
agacaagaacauuaaaaga

SEQ ID NO: 2639745 - RNA, 19 nt, Artificial Sequence
  Description of Artificial Sequence: Synthetic oligonucleotide
aaaucugguuuucuguagu

SEQ ID NO: 2639746 - RNA, 19 nt, Artificial Sequence
  Description of Artificial Sequence: Synthetic oligonucleotide
ucaugaaguaccuccgaag

SEQ ID NO: 2639747 - RNA, 19 nt, Artificial Sequence
  Description of Artificial Sequence: Synthetic oligonucleotide
gucaaugucacuaacaaaa

SEQ ID NO: 2639748 - RNA, 19 nt, Artificial Sequence
  Description of Artificial Sequence: Synthetic oligonucleotide
uuaagguccagauuaccgu

SEQ ID NO: 2639749 - RNA, 19 nt, Artificial Sequence
  Description of Artificial Sequence: Synthetic oligonucleotide
aaauuaagguccagauuac

SEQ ID NO: 2639750 - RNA, 19 nt, Artificial Sequence
  Description of Artificial Sequence: Synthetic oligonucleotide
caugccaccaauguaauug

SEQ ID NO: 2639751 - RNA, 19 nt, Artificial Sequence
  Description of Artificial Sequence: Synthetic oligonucleotide
accguuacccuguuuuacc

SEQ ID NO: 2639752 - RNA, 19 nt, Artificial Sequence
  Description of Artificial Sequence: Synthetic oligonucleotide
auuaccguuacccuguuuu

SEQ ID NO: 2639753 - RNA, 19 nt, Artificial Sequence
  Description of Artificial Sequence: Synthetic oligonucleotide
agagaagcaugucaauguc

SEQ ID NO: 2639754 - RNA, 19 nt, Artificial Sequence
  Description of Artificial Sequence: Synthetic oligonucleotide
agcuuaacacugcagaaca

SEQ ID NO: 2639755 - RNA, 19 nt, Artificial Sequence
  Description of Artificial Sequence: Synthetic oligonucleotide
acaauugaagccuagccua

SEQ ID NO: 2639756 - RNA, 19 nt, Artificial Sequence
  Description of Artificial Sequence: Synthetic oligonucleotide
uacauagugcuuuuaacua

SEQ ID NO: 2639757 - RNA, 19 nt, Artificial Sequence
  Description of Artificial Sequence: Synthetic oligonucleotide
uuuaccuguucuuagcuua

SEQ ID NO: 2639758 - RNA, 19 nt, Artificial Sequence
  Description of Artificial Sequence: Synthetic oligonucleotide
uaauugugcugugagagca

SEQ ID NO: 2639759 - RNA, 19 nt, Artificial Sequence
  Description of Artificial Sequence: Synthetic oligonucleotide
caguuguacuauuaucugg

SEQ ID NO: 2639760 - RNA, 19 nt, Artificial Sequence
  Description of Artificial Sequence: Synthetic oligonucleotide
uauuacucucagcaguaca

SEQ ID NO: 2639761 - RNA, 19 nt, Artificial Sequence
  Description of Artificial Sequence: Synthetic oligonucleotide
cuuagcuuaacacugcaga

SEQ ID NO: 2639762 - RNA, 19 nt, Artificial Sequence
  Description of Artificial Sequence: Synthetic oligonucleotide
uccgaagagauucaucuau

SEQ ID NO: 2639763 - RNA, 19 nt, Artificial Sequence
  Description of Artificial Sequence: Synthetic oligonucleotide
aaagcucuuuauauuagca

SEQ ID NO: 2639764 - RNA, 19 nt, Artificial Sequence
  Description of Artificial Sequence: Synthetic oligonucleotide
ucagccgaaguuaguacag

SEQ ID NO: 2639765 - RNA, 19 nt, Artificial Sequence
  Description of Artificial Sequence: Synthetic oligonucleotide
aauucgguucucauccgac

SEQ ID NO: 2639766 - RNA, 19 nt, Artificial Sequence
  Description of Artificial Sequence: Synthetic oligonucleotide
uucucauccgacugacugg

SEQ ID NO: 2639767 - RNA, 19 nt, Artificial Sequence
  Description of Artificial Sequence: Synthetic oligonucleotide
uacucucagcaguacauag

SEQ ID NO: 2639768 - RNA, 19 nt, Artificial Sequence
  Description of Artificial Sequence: Synthetic oligonucleotide
augucaaugucacuaacaa

SEQ ID NO: 2639769 - RNA, 19 nt, Artificial Sequence
  Description of Artificial Sequence: Synthetic oligonucleotide
ucuuagcuuaacacugcag

SEQ ID NO: 2639770 - RNA, 19 nt, Artificial Sequence
  Description of Artificial Sequence: Synthetic oligonucleotide
gaaguuaguacagugucca

SEQ ID NO: 2639771 - RNA, 19 nt, Artificial Sequence
  Description of Artificial Sequence: Synthetic oligonucleotide
uggacuguguuccucacuc

SEQ ID NO: 2639772 - RNA, 19 nt, Artificial Sequence
  Description of Artificial Sequence: Synthetic oligonucleotide
uuagcuuaacacugcagaa

SEQ ID NO: 2639773 - RNA, 19 nt, Artificial Sequence
  Description of Artificial Sequence: Synthetic oligonucleotide
uccaauaauguuugaaguu

SEQ ID NO: 2639774 - RNA, 19 nt, Artificial Sequence
  Description of Artificial Sequence: Synthetic oligonucleotide
aagccuagccuauuacucu

SEQ ID NO: 2639775 - RNA, 19 nt, Artificial Sequence
  Description of Artificial Sequence: Synthetic oligonucleotide
aucucuuuaguccaauaau

SEQ ID NO: 2639776 - RNA, 19 nt, Artificial Sequence
  Description of Artificial Sequence: Synthetic oligonucleotide
ugugagagcaguuguacua

SEQ ID NO: 2639777 - RNA, 19 nt, Artificial Sequence
  Description of Artificial Sequence: Synthetic oligonucleotide
aaauucgguucucauccga

SEQ ID NO: 2639778 - RNA, 19 nt, Artificial Sequence
  Description of Artificial Sequence: Synthetic oligonucleotide
auauaaaguaacaauugaa

SEQ ID NO: 2639779 - RNA, 19 nt, Artificial Sequence
  Description of Artificial Sequence: Synthetic oligonucleotide
ugaagccuagccuauuacu

SEQ ID NO: 2639780 - RNA, 19 nt, Artificial Sequence
  Description of Artificial Sequence: Synthetic oligonucleotide
cucucagcaguacauagug

SEQ ID NO: 2639781 - RNA, 19 nt, Artificial Sequence
  Description of Artificial Sequence: Synthetic oligonucleotide
uucgguucucauccgacug

SEQ ID NO: 2639782 - RNA, 19 nt, Artificial Sequence
  Description of Artificial Sequence: Synthetic oligonucleotide
gaaauucgguucucauccg

SEQ ID NO: 2639783 - RNA, 19 nt, Artificial Sequence
  Description of Artificial Sequence: Synthetic oligonucleotide
uuagcacaugccaccaaug

SEQ ID NO: 2639784 - RNA, 19 nt, Artificial Sequence
  Description of Artificial Sequence: Synthetic oligonucleotide
aguuaaagcucuuuauauu

SEQ ID NO: 2639785 - RNA, 19 nt, Artificial Sequence
  Description of Artificial Sequence: Synthetic oligonucleotide
aguuguacuauuaucuggu

SEQ ID NO: 2639786 - RNA, 19 nt, Artificial Sequence
  Description of Artificial Sequence: Synthetic oligonucleotide
augaacugcagaaauuaag

SEQ ID NO: 2639787 - RNA, 19 nt, Artificial Sequence
  Description of Artificial Sequence: Synthetic oligonucleotide
guccagauuaccguuaccc

SEQ ID NO: 2639788 - RNA, 19 nt, Artificial Sequence
  Description of Artificial Sequence: Synthetic oligonucleotide
uucaugaaguaccuccgaa

SEQ ID NO: 2639789 - RNA, 19 nt, Artificial Sequence
  Description of Artificial Sequence: Synthetic oligonucleotide
uaacacugcagaacagaca

SEQ ID NO: 2639790 - RNA, 19 nt, Artificial Sequence
  Description of Artificial Sequence: Synthetic oligonucleotide
acgauuugguccucagccg

SEQ ID NO: 2639791 - RNA, 19 nt, Artificial Sequence
  Description of Artificial Sequence: Synthetic oligonucleotide
uucuuagcuuaacacugca

SEQ ID NO: 2639792 - RNA, 19 nt, Artificial Sequence
  Description of Artificial Sequence: Synthetic oligonucleotide
uuucaugaaguaccuccga

SEQ ID NO: 2639793 - RNA, 19 nt, Artificial Sequence
  Description of Artificial Sequence: Synthetic oligonucleotide
aaccguucaucucuuuagu

SEQ ID NO: 2639794 - RNA, 19 nt, Artificial Sequence
  Description of Artificial Sequence: Synthetic oligonucleotide
aagaaaugaacugcagaaa

SEQ ID NO: 2639795 - RNA, 19 nt, Artificial Sequence
  Description of Artificial Sequence: Synthetic oligonucleotide
ucauccgacugacuggacu

SEQ ID NO: 2639796 - RNA, 19 nt, Artificial Sequence
  Description of Artificial Sequence: Synthetic oligonucleotide
uugggaggagagaagcaug

SEQ ID NO: 2639797 - RNA, 19 nt, Artificial Sequence
  Description of Artificial Sequence: Synthetic oligonucleotide
auuagcacaugccaccaau

SEQ ID NO: 2639798 - RNA, 19 nt, Artificial Sequence
  Description of Artificial Sequence: Synthetic oligonucleotide
ucacaaucacuuuccugag

SEQ ID NO: 2639799 - RNA, 19 nt, Artificial Sequence
  Description of Artificial Sequence: Synthetic oligonucleotide
accguucaucucuuuaguc

SEQ ID NO: 2639800 - RNA, 19 nt, Artificial Sequence
  Description of Artificial Sequence: Synthetic oligonucleotide
caugaaguaccuccgaaga

SEQ ID NO: 2639801 - RNA, 19 nt, Artificial Sequence
  Description of Artificial Sequence: Synthetic oligonucleotide
agcagugcaaacuccuugu

SEQ ID NO: 2639802 - RNA, 19 nt, Artificial Sequence
  Description of Artificial Sequence: Synthetic oligonucleotide
auguaauugugaggcaaac

SEQ ID NO: 2639803 - RNA, 19 nt, Artificial Sequence
  Description of Artificial Sequence: Synthetic oligonucleotide
auuaucuggugccucccug

SEQ ID NO: 2639804 - RNA, 19 nt, Artificial Sequence
  Description of Artificial Sequence: Synthetic oligonucleotide
gugcuuuuaacuacauucc

SEQ ID NO: 2639805 - RNA, 19 nt, Artificial Sequence
  Description of Artificial Sequence: Synthetic oligonucleotide
gaagccuagccuauuacuc

SEQ ID NO: 2639806 - RNA, 19 nt, Artificial Sequence
  Description of Artificial Sequence: Synthetic oligonucleotide
uugaagccuagccuauuac

SEQ ID NO: 2639807 - RNA, 19 nt, Artificial Sequence
  Description of Artificial Sequence: Synthetic oligonucleotide
aauguaauugugaggcaaa

SEQ ID NO: 2639808 - RNA, 19 nt, Artificial Sequence
  Description of Artificial Sequence: Synthetic oligonucleotide
agccuagccuauuacucuc

SEQ ID NO: 2639809 - RNA, 19 nt, Artificial Sequence
  Description of Artificial Sequence: Synthetic oligonucleotide
ugucauugagacaguaauu

SEQ ID NO: 2639810 - RNA, 19 nt, Artificial Sequence
  Description of Artificial Sequence: Synthetic oligonucleotide
guaacaauugaagccuagc

SEQ ID NO: 2639811 - RNA, 19 nt, Artificial Sequence
  Description of Artificial Sequence: Synthetic oligonucleotide
ucagaaauucgguucucau

SEQ ID NO: 2639812 - RNA, 19 nt, Artificial Sequence
  Description of Artificial Sequence: Synthetic oligonucleotide
agguccagauuaccguuac

SEQ ID NO: 2639813 - RNA, 19 nt, Artificial Sequence
  Description of Artificial Sequence: Synthetic oligonucleotide
uccagauuaccguuacccu

SEQ ID NO: 2639814 - RNA, 19 nt, Artificial Sequence
  Description of Artificial Sequence: Synthetic oligonucleotide
cagaaauucgguucucauc

SEQ ID NO: 2639815 - RNA, 19 nt, Artificial Sequence
  Description of Artificial Sequence: Synthetic oligonucleotide
ugguuuucuguaguaacac

SEQ ID NO: 2639816 - RNA, 19 nt, Artificial Sequence
  Description of Artificial Sequence: Synthetic oligonucleotide
cauagugcuuuuaacuaca

SEQ ID NO: 2639817 - RNA, 19 nt, Artificial Sequence
  Description of Artificial Sequence: Synthetic oligonucleotide
cauccgacugacuggacug

SEQ ID NO: 2639818 - RNA, 19 nt, Artificial Sequence
  Description of Artificial Sequence: Synthetic oligonucleotide
acuacgauuugguccucag

SEQ ID NO: 2639819 - RNA, 19 nt, Artificial Sequence
  Description of Artificial Sequence: Synthetic oligonucleotide
uuccuuugagguacuguac

SEQ ID NO: 2639820 - RNA, 19 nt, Artificial Sequence
  Description of Artificial Sequence: Synthetic oligonucleotide
guaguaacacaaccguuca

SEQ ID NO: 2639821 - RNA, 19 nt, Artificial Sequence
  Description of Artificial Sequence: Synthetic oligonucleotide
ugcucuuaaaauggcaaaa

SEQ ID NO: 2639822 - RNA, 19 nt, Artificial Sequence
  Description of Artificial Sequence: Synthetic oligonucleotide
aaaccuucuguacgcugga

SEQ ID NO: 2639823 - RNA, 19 nt, Artificial Sequence
  Description of Artificial Sequence: Synthetic oligonucleotide
uuaucuggugccucccugu

SEQ ID NO: 2639824 - RNA, 19 nt, Artificial Sequence
  Description of Artificial Sequence: Synthetic oligonucleotide
ugucaaugucacuaacaaa

SEQ ID NO: 2639825 - RNA, 19 nt, Artificial Sequence
  Description of Artificial Sequence: Synthetic oligonucleotide
ucugguuuacugguggcac

SEQ ID NO: 2639826 - RNA, 19 nt, Artificial Sequence
  Description of Artificial Sequence: Synthetic oligonucleotide
uugcucuuaaaauggcaaa

SEQ ID NO: 2639827 - RNA, 19 nt, Artificial Sequence
  Description of Artificial Sequence: Synthetic oligonucleotide
uagcuuaacacugcagaac

SEQ ID NO: 2639828 - RNA, 19 nt, Artificial Sequence
  Description of Artificial Sequence: Synthetic oligonucleotide
gagcaguuguacuauuauc

SEQ ID NO: 2639829 - RNA, 19 nt, Artificial Sequence
  Description of Artificial Sequence: Synthetic oligonucleotide
acugguggcacaaauuacu

SEQ ID NO: 2639830 - RNA, 19 nt, Artificial Sequence
  Description of Artificial Sequence: Synthetic oligonucleotide
acuacauuccuuugaggua

SEQ ID NO: 2639831 - RNA, 19 nt, Artificial Sequence
  Description of Artificial Sequence: Synthetic oligonucleotide
agccgaaguuaguacagug

SEQ ID NO: 2639832 - RNA, 19 nt, Artificial Sequence
  Description of Artificial Sequence: Synthetic oligonucleotide
uauuaucuggugccucccu

SEQ ID NO: 2639833 - RNA, 19 nt, Artificial Sequence
  Description of Artificial Sequence: Synthetic oligonucleotide
aaugaacugcagaaauuaa

SEQ ID NO: 2639834 - RNA, 19 nt, Artificial Sequence
  Description of Artificial Sequence: Synthetic oligonucleotide
uggacgagcagugcaaacu

SEQ ID NO: 2639835 - RNA, 19 nt, Artificial Sequence
  Description of Artificial Sequence: Synthetic oligonucleotide
uucuucugguuuacuggug

SEQ ID NO: 2639836 - RNA, 19 nt, Artificial Sequence
  Description of Artificial Sequence: Synthetic oligonucleotide
auuacucucagcaguacau

SEQ ID NO: 2639837 - RNA, 19 nt, Artificial Sequence
  Description of Artificial Sequence: Synthetic oligonucleotide
uaguccaauaauguuugaa

SEQ ID NO: 2639838 - RNA, 19 nt, Artificial Sequence
  Description of Artificial Sequence: Synthetic oligonucleotide
uguacgcuggacgagcagu

SEQ ID NO: 2639839 - RNA, 19 nt, Artificial Sequence
  Description of Artificial Sequence: Synthetic oligonucleotide
guacaaaucacaaucacuu

SEQ ID NO: 2639840 - RNA, 19 nt, Artificial Sequence
  Description of Artificial Sequence: Synthetic oligonucleotide
uuugaaguuaaagcucuuu

SEQ ID NO: 2639841 - RNA, 19 nt, Artificial Sequence
  Description of Artificial Sequence: Synthetic oligonucleotide
guuguacuauuaucuggug

SEQ ID NO: 2639842 - RNA, 19 nt, Artificial Sequence
  Description of Artificial Sequence: Synthetic oligonucleotide
agccuauuacucucagcag

SEQ ID NO: 2639843 - RNA, 19 nt, Artificial Sequence
  Description of Artificial Sequence: Synthetic oligonucleotide
uuuuaccuguucuuagcuu

SEQ ID NO: 2639844 - RNA, 19 nt, Artificial Sequence
  Description of Artificial Sequence: Synthetic oligonucleotide
agaagcuuuucaugaagua

SEQ ID NO: 2639845 - RNA, 19 nt, Artificial Sequence
  Description of Artificial Sequence: Synthetic oligonucleotide
uucuguacgcuggacgagc

SEQ ID NO: 2639846 - RNA, 19 nt, Artificial Sequence
  Description of Artificial Sequence: Synthetic oligonucleotide
uaagguccagauuaccguu

SEQ ID NO: 2639847 - RNA, 19 nt, Artificial Sequence
  Description of Artificial Sequence: Synthetic oligonucleotide
aauugugcugugagagcag

SEQ ID NO: 2639848 - RNA, 19 nt, Artificial Sequence
  Description of Artificial Sequence: Synthetic oligonucleotide
cugguuuucuguaguaaca

SEQ ID NO: 2639849 - RNA, 19 nt, Artificial Sequence
  Description of Artificial Sequence: Synthetic oligonucleotide
cuagccuauuacucucagc

SEQ ID NO: 2639850 - RNA, 19 nt, Artificial Sequence
  Description of Artificial Sequence: Synthetic oligonucleotide
ccguucaucucuuuagucc

SEQ ID NO: 2639851 - RNA, 19 nt, Artificial Sequence
  Description of Artificial Sequence: Synthetic oligonucleotide
uacaaaucacaaucacuuu

SEQ ID NO: 2639852 - RNA, 19 nt, Artificial Sequence
  Description of Artificial Sequence: Synthetic oligonucleotide
cuucugguuuacugguggc

SEQ ID NO: 2639853 - RNA, 19 nt, Artificial Sequence
  Description of Artificial Sequence: Synthetic oligonucleotide
aguaacaauugaagccuag

SEQ ID NO: 2639854 - RNA, 19 nt, Artificial Sequence
  Description of Artificial Sequence: Synthetic oligonucleotide
uuaccuguucuuagcuuaa

SEQ ID NO: 2639855 - RNA, 19 nt, Artificial Sequence
  Description of Artificial Sequence: Synthetic oligonucleotide
auucgguucucauccgacu

SEQ ID NO: 2639856 - RNA, 19 nt, Artificial Sequence
  Description of Artificial Sequence: Synthetic oligonucleotide
ugguggcacaaauuacuac

SEQ ID NO: 2639857 - RNA, 19 nt, Artificial Sequence
  Description of Artificial Sequence: Synthetic oligonucleotide
guugcucuuaaaauggcaa

SEQ ID NO: 2639858 - RNA, 19 nt, Artificial Sequence
  Description of Artificial Sequence: Synthetic oligonucleotide
uuugguccucagccgaagu

SEQ ID NO: 2639859 - RNA, 19 nt, Artificial Sequence
  Description of Artificial Sequence: Synthetic oligonucleotide
cuacgauuugguccucagc

SEQ ID NO: 2639860 - RNA, 19 nt, Artificial Sequence
  Description of Artificial Sequence: Synthetic oligonucleotide
auauuagcacaugccacca

SEQ ID NO: 2639861 - RNA, 19 nt, Artificial Sequence
  Description of Artificial Sequence: Synthetic oligonucleotide
uaacacaaccguucaucuc

SEQ ID NO: 2639862 - RNA, 19 nt, Artificial Sequence
  Description of Artificial Sequence: Synthetic oligonucleotide
augccaccaauguaauugu

SEQ ID NO: 2639863 - RNA, 19 nt, Artificial Sequence
  Description of Artificial Sequence: Synthetic oligonucleotide
augagaagcuuuucaugaa

SEQ ID NO: 2639864 - RNA, 19 nt, Artificial Sequence
  Description of Artificial Sequence: Synthetic oligonucleotide
cucuuuaguccaauaaugu

SEQ ID NO: 2639865 - RNA, 19 nt, Artificial Sequence
  Description of Artificial Sequence: Synthetic oligonucleotide
guucuuagcuuaacacugc

SEQ ID NO: 2639866 - RNA, 19 nt, Artificial Sequence
  Description of Artificial Sequence: Synthetic oligonucleotide
aaccuucuguacgcuggac

SEQ ID NO: 2639867 - RNA, 19 nt, Artificial Sequence
  Description of Artificial Sequence: Synthetic oligonucleotide
aaacuccuugucauugaga

SEQ ID NO: 2639868 - RNA, 19 nt, Artificial Sequence
  Description of Artificial Sequence: Synthetic oligonucleotide
uguguuccucacucacuug

SEQ ID NO: 2639869 - RNA, 19 nt, Artificial Sequence
  Description of Artificial Sequence: Synthetic oligonucleotide
cucagccgaaguuaguaca

SEQ ID NO: 2639870 - RNA, 19 nt, Artificial Sequence
  Description of Artificial Sequence: Synthetic oligonucleotide
uuaguccaauaauguuuga

SEQ ID NO: 2639871 - RNA, 19 nt, Artificial Sequence
  Description of Artificial Sequence: Synthetic oligonucleotide
guaacacaaccguucaucu

SEQ ID NO: 2639872 - RNA, 19 nt, Artificial Sequence
  Description of Artificial Sequence: Synthetic oligonucleotide
gguacuguacaaaucacaa

SEQ ID NO: 2639873 - RNA, 19 nt, Artificial Sequence
  Description of Artificial Sequence: Synthetic oligonucleotide
uauuagcacaugccaccaa

SEQ ID NO: 2639874 - RNA, 19 nt, Artificial Sequence
  Description of Artificial Sequence: Synthetic oligonucleotide
uggcacaaauuacuacgau

SEQ ID NO: 2639875 - RNA, 19 nt, Artificial Sequence
  Description of Artificial Sequence: Synthetic oligonucleotide
cuguucuuagcuuaacacu

SEQ ID NO: 2639876 - RNA, 19 nt, Artificial Sequence
  Description of Artificial Sequence: Synthetic oligonucleotide
ugccaccaauguaauugug

SEQ ID NO: 2639877 - RNA, 19 nt, Artificial Sequence
  Description of Artificial Sequence: Synthetic oligonucleotide
caauguaauugugaggcaa

SEQ ID NO: 2639878 - RNA, 19 nt, Artificial Sequence
  Description of Artificial Sequence: Synthetic oligonucleotide
ccagauuaccguuacccug

SEQ ID NO: 2639879 - RNA, 19 nt, Artificial Sequence
  Description of Artificial Sequence: Synthetic oligonucleotide
cacucacuugggaggagag

SEQ ID NO: 2639880 - RNA, 19 nt, Artificial Sequence
  Description of Artificial Sequence: Synthetic oligonucleotide
uuaccguuacccuguuuua

SEQ ID NO: 2639881 - RNA, 19 nt, Artificial Sequence
  Description of Artificial Sequence: Synthetic oligonucleotide
uccucagccgaaguuagua

SEQ ID NO: 2639882 - RNA, 19 nt, Artificial Sequence
  Description of Artificial Sequence: Synthetic oligonucleotide
uaccguuacccuguuuuac

SEQ ID NO: 2639883 - RNA, 19 nt, Artificial Sequence
  Description of Artificial Sequence: Synthetic oligonucleotide
agacaggauugaggaauac

SEQ ID NO: 2639884 - RNA, 19 nt, Artificial Sequence
  Description of Artificial Sequence: Synthetic oligonucleotide
guuacccuguuuuaccugu

SEQ ID NO: 2639885 - RNA, 19 nt, Artificial Sequence
  Description of Artificial Sequence: Synthetic oligonucleotide
uacccuguuuuaccuguuc

SEQ ID NO: 2639886 - RNA, 19 nt, Artificial Sequence
  Description of Artificial Sequence: Synthetic oligonucleotide
cagaacagacaggauugag

SEQ ID NO: 2639887 - RNA, 19 nt, Artificial Sequence
  Description of Artificial Sequence: Synthetic oligonucleotide
ugguuuacugguggcacaa

SEQ ID NO: 2639888 - RNA, 19 nt, Artificial Sequence
  Description of Artificial Sequence: Synthetic oligonucleotide
uugguccucagccgaaguu

SEQ ID NO: 2639889 - RNA, 19 nt, Artificial Sequence
  Description of Artificial Sequence: Synthetic oligonucleotide
gacgagcagugcaaacucc

SEQ ID NO: 2639890 - RNA, 19 nt, Artificial Sequence
  Description of Artificial Sequence: Synthetic oligonucleotide
ccgaaguuaguacaguguc

SEQ ID NO: 2639891 - RNA, 19 nt, Artificial Sequence
  Description of Artificial Sequence: Synthetic oligonucleotide
gacugacuggacuguguuc

SEQ ID NO: 2639892 - RNA, 19 nt, Artificial Sequence
  Description of Artificial Sequence: Synthetic oligonucleotide
ugguccucagccgaaguua

SEQ ID NO: 2639893 - RNA, 19 nt, Artificial Sequence
  Description of Artificial Sequence: Synthetic oligonucleotide
agacaguaauugugcugug

SEQ ID NO: 2639894 - RNA, 19 nt, Artificial Sequence
  Description of Artificial Sequence: Synthetic oligonucleotide
cuauuacucucagcaguac

SEQ ID NO: 2639895 - RNA, 19 nt, Artificial Sequence
  Description of Artificial Sequence: Synthetic oligonucleotide
aagugggaugagaagcuuu

SEQ ID NO: 2639896 - RNA, 19 nt, Artificial Sequence
  Description of Artificial Sequence: Synthetic oligonucleotide
aaguaacaauugaagccua

SEQ ID NO: 2639897 - RNA, 19 nt, Artificial Sequence
  Description of Artificial Sequence: Synthetic oligonucleotide
cagauuaccguuacccugu

SEQ ID NO: 2639898 - RNA, 19 nt, Artificial Sequence
  Description of Artificial Sequence: Synthetic oligonucleotide
cugucaggaagugggauga

SEQ ID NO: 2639899 - RNA, 19 nt, Artificial Sequence
  Description of Artificial Sequence: Synthetic oligonucleotide
aucugguuuucuguaguaa

SEQ ID NO: 2639900 - RNA, 19 nt, Artificial Sequence
  Description of Artificial Sequence: Synthetic oligonucleotide
cgaaguuaguacagugucc

SEQ ID NO: 2639901 - RNA, 19 nt, Artificial Sequence
  Description of Artificial Sequence: Synthetic oligonucleotide
acucucagcaguacauagu

SEQ ID NO: 2639902 - RNA, 19 nt, Artificial Sequence
  Description of Artificial Sequence: Synthetic oligonucleotide
uucaucucuuuaguccaau

SEQ ID NO: 2639903 - RNA, 19 nt, Artificial Sequence
  Description of Artificial Sequence: Synthetic oligonucleotide
guggcacaaauuacuacga

SEQ ID NO: 2639904 - RNA, 19 nt, Artificial Sequence
  Description of Artificial Sequence: Synthetic oligonucleotide
cuggacgagcagugcaaac

SEQ ID NO: 2639905 - RNA, 19 nt, Artificial Sequence
  Description of Artificial Sequence: Synthetic oligonucleotide
agugggaugagaagcuuuu

SEQ ID NO: 2639906 - RNA, 19 nt, Artificial Sequence
  Description of Artificial Sequence: Synthetic oligonucleotide
gcacaugccaccaauguaa

SEQ ID NO: 2639907 - RNA, 19 nt, Artificial Sequence
  Description of Artificial Sequence: Synthetic oligonucleotide
gaaaugaacugcagaaauu

SEQ ID NO: 2639908 - RNA, 19 nt, Artificial Sequence
  Description of Artificial Sequence: Synthetic oligonucleotide
uacuacgauuugguccuca

SEQ ID NO: 2639909 - RNA, 19 nt, Artificial Sequence
  Description of Artificial Sequence: Synthetic oligonucleotide
cuucuguacgcuggacgag

SEQ ID NO: 2639910 - RNA, 19 nt, Artificial Sequence
  Description of Artificial Sequence: Synthetic oligonucleotide
ggacgagcagugcaaacuc

SEQ ID NO: 2639911 - RNA, 19 nt, Artificial Sequence
  Description of Artificial Sequence: Synthetic oligonucleotide
guuuacugguggcacaaau

SEQ ID NO: 2639912 - RNA, 19 nt, Artificial Sequence
  Description of Artificial Sequence: Synthetic oligonucleotide
cagcugcaucagaaauucg

SEQ ID NO: 2639913 - RNA, 19 nt, Artificial Sequence
  Description of Artificial Sequence: Synthetic oligonucleotide
cuuugagguacuguacaaa

SEQ ID NO: 2639914 - RNA, 19 nt, Artificial Sequence
  Description of Artificial Sequence: Synthetic oligonucleotide
ugucaggaagugggaugag

SEQ ID NO: 2639915 - RNA, 19 nt, Artificial Sequence
  Description of Artificial Sequence: Synthetic oligonucleotide
uacgcuggacgagcagugc

SEQ ID NO: 2639916 - RNA, 19 nt, Artificial Sequence
  Description of Artificial Sequence: Synthetic oligonucleotide
aagguccagauuaccguua

SEQ ID NO: 2639917 - RNA, 19 nt, Artificial Sequence
  Description of Artificial Sequence: Synthetic oligonucleotide
cugcagaaauuaaggucca

SEQ ID NO: 2639918 - RNA, 19 nt, Artificial Sequence
  Description of Artificial Sequence: Synthetic oligonucleotide
uccgacugacuggacugug

SEQ ID NO: 2639919 - RNA, 19 nt, Artificial Sequence
  Description of Artificial Sequence: Synthetic oligonucleotide
gaaguaccuccgaagagau

SEQ ID NO: 2639920 - RNA, 19 nt, Artificial Sequence
  Description of Artificial Sequence: Synthetic oligonucleotide
ccaauaauguuugaaguua

SEQ ID NO: 2639921 - RNA, 19 nt, Artificial Sequence
  Description of Artificial Sequence: Synthetic oligonucleotide
acuugggaggagagaagca

SEQ ID NO: 2639922 - RNA, 19 nt, Artificial Sequence
  Description of Artificial Sequence: Synthetic oligonucleotide
cugguggcacaaauuacua

SEQ ID NO: 2639923 - RNA, 19 nt, Artificial Sequence
  Description of Artificial Sequence: Synthetic oligonucleotide
cugguuuacugguggcaca

SEQ ID NO: 2639924 - RNA, 19 nt, Artificial Sequence
  Description of Artificial Sequence: Synthetic oligonucleotide
uuacccuguuuuaccuguu

SEQ ID NO: 2639925 - RNA, 19 nt, Artificial Sequence
  Description of Artificial Sequence: Synthetic oligonucleotide
uugugcugugagagcaguu

SEQ ID NO: 2639926 - RNA, 19 nt, Artificial Sequence
  Description of Artificial Sequence: Synthetic oligonucleotide
ccuucuguacgcuggacga

SEQ ID NO: 2639927 - RNA, 19 nt, Artificial Sequence
  Description of Artificial Sequence: Synthetic oligonucleotide
gccuauuacucucagcagu

SEQ ID NO: 2639928 - RNA, 19 nt, Artificial Sequence
  Description of Artificial Sequence: Synthetic oligonucleotide
gguccucagccgaaguuag

SEQ ID NO: 2639929 - RNA, 19 nt, Artificial Sequence
  Description of Artificial Sequence: Synthetic oligonucleotide
cuguacgcuggacgagcag

SEQ ID NO: 2639930 - RNA, 19 nt, Artificial Sequence
  Description of Artificial Sequence: Synthetic oligonucleotide
gucaggaagugggaugaga

SEQ ID NO: 2639931 - RNA, 19 nt, Artificial Sequence
  Description of Artificial Sequence: Synthetic oligonucleotide
gcaugucaaugucacuaac

SEQ ID NO: 2639932 - RNA, 19 nt, Artificial Sequence
  Description of Artificial Sequence: Synthetic oligonucleotide
acucacuugggaggagaga

SEQ ID NO: 2639933 - RNA, 19 nt, Artificial Sequence
  Description of Artificial Sequence: Synthetic oligonucleotide
uaccuguucuuagcuuaac

SEQ ID NO: 2639934 - RNA, 19 nt, Artificial Sequence
  Description of Artificial Sequence: Synthetic oligonucleotide
gccaccaauguaauuguga

SEQ ID NO: 2639935 - RNA, 19 nt, Artificial Sequence
  Description of Artificial Sequence: Synthetic oligonucleotide
gauuugguccucagccgaa

SEQ ID NO: 2639936 - RNA, 19 nt, Artificial Sequence
  Description of Artificial Sequence: Synthetic oligonucleotide
uggugccucccugugcugu

SEQ ID NO: 2639937 - RNA, 19 nt, Artificial Sequence
  Description of Artificial Sequence: Synthetic oligonucleotide
auagugcuuuuaacuacau

SEQ ID NO: 2639938 - RNA, 19 nt, Artificial Sequence
  Description of Artificial Sequence: Synthetic oligonucleotide
gcuuaacacugcagaacag

SEQ ID NO: 2639939 - RNA, 19 nt, Artificial Sequence
  Description of Artificial Sequence: Synthetic oligonucleotide
ggaauacuguugcucuuaa

SEQ ID NO: 2639940 - RNA, 19 nt, Artificial Sequence
  Description of Artificial Sequence: Synthetic oligonucleotide
caucagaaauucgguucuc

SEQ ID NO: 2639941 - RNA, 19 nt, Artificial Sequence
  Description of Artificial Sequence: Synthetic oligonucleotide
acauuccuuugagguacug

SEQ ID NO: 2639942 - RNA, 19 nt, Artificial Sequence
  Description of Artificial Sequence: Synthetic oligonucleotide
ggcacaaauuacuacgauu

SEQ ID NO: 2639943 - RNA, 19 nt, Artificial Sequence
  Description of Artificial Sequence: Synthetic oligonucleotide
ccucagccgaaguuaguac

SEQ ID NO: 2639944 - RNA, 19 nt, Artificial Sequence
  Description of Artificial Sequence: Synthetic oligonucleotide
cagacaggauugaggaaua

SEQ ID NO: 2639945 - RNA, 19 nt, Artificial Sequence
  Description of Artificial Sequence: Synthetic oligonucleotide
ccuauuacucucagcagua

SEQ ID NO: 2639946 - RNA, 19 nt, Artificial Sequence
  Description of Artificial Sequence: Synthetic oligonucleotide
ccuagccuauuacucucag

SEQ ID NO: 2639947 - RNA, 19 nt, Artificial Sequence
  Description of Artificial Sequence: Synthetic oligonucleotide
gguccagauuaccguuacc

SEQ ID NO: 2639948 - RNA, 19 nt, Artificial Sequence
  Description of Artificial Sequence: Synthetic oligonucleotide
agauuaccguuacccuguu

SEQ ID NO: 2639949 - RNA, 19 nt, Artificial Sequence
  Description of Artificial Sequence: Synthetic oligonucleotide
cugugagagcaguuguacu

SEQ ID NO: 2639950 - RNA, 19 nt, Artificial Sequence
  Description of Artificial Sequence: Synthetic oligonucleotide
caauugaagccuagccuau

SEQ ID NO: 2639951 - RNA, 19 nt, Artificial Sequence
  Description of Artificial Sequence: Synthetic oligonucleotide
auccgacugacuggacugu

SEQ ID NO: 2639952 - RNA, 19 nt, Artificial Sequence
  Description of Artificial Sequence: Synthetic oligonucleotide
cucauccgacugacuggac

SEQ ID NO: 2639953 - RNA, 19 nt, Artificial Sequence
  Description of Artificial Sequence: Synthetic oligonucleotide
uaccuccgaagagauucau

SEQ ID NO: 2639954 - RNA, 19 nt, Artificial Sequence
  Description of Artificial Sequence: Synthetic oligonucleotide
cuccgaagagauucaucua

SEQ ID NO: 2639955 - RNA, 19 nt, Artificial Sequence
  Description of Artificial Sequence: Synthetic oligonucleotide
guacuauuaucuggugccu

SEQ ID NO: 2639956 - RNA, 19 nt, Artificial Sequence
  Description of Artificial Sequence: Synthetic oligonucleotide
cuguaguaacacaaccguu

SEQ ID NO: 2639957 - RNA, 19 nt, Artificial Sequence
  Description of Artificial Sequence: Synthetic oligonucleotide
gaggaauacuguugcucuu

SEQ ID NO: 2639958 - RNA, 19 nt, Artificial Sequence
  Description of Artificial Sequence: Synthetic oligonucleotide
cucacucacuugggaggag

SEQ ID NO: 2639959 - RNA, 19 nt, Artificial Sequence
  Description of Artificial Sequence: Synthetic oligonucleotide
gugggaugagaagcuuuuc

SEQ ID NO: 2639960 - RNA, 19 nt, Artificial Sequence
  Description of Artificial Sequence: Synthetic oligonucleotide
gcagugcaaacuccuuguc

SEQ ID NO: 2639961 - RNA, 19 nt, Artificial Sequence
  Description of Artificial Sequence: Synthetic oligonucleotide
cugcaucagaaauucgguu

SEQ ID NO: 2639962 - RNA, 19 nt, Artificial Sequence
  Description of Artificial Sequence: Synthetic oligonucleotide
gugagagcaguuguacuau

SEQ ID NO: 2639963 - RNA, 19 nt, Artificial Sequence
  Description of Artificial Sequence: Synthetic oligonucleotide
aaguaccuccgaagagauu

SEQ ID NO: 2639964 - RNA, 19 nt, Artificial Sequence
  Description of Artificial Sequence: Synthetic oligonucleotide
ccaauguaauugugaggca

SEQ ID NO: 2639965 - RNA, 19 nt, Artificial Sequence
  Description of Artificial Sequence: Synthetic oligonucleotide
cguuacccuguuuuaccug

SEQ ID NO: 2639966 - RNA, 19 nt, Artificial Sequence
  Description of Artificial Sequence: Synthetic oligonucleotide
gcucuuuauauuagcacau

SEQ ID NO: 2639967 - RNA, 19 nt, Artificial Sequence
  Description of Artificial Sequence: Synthetic oligonucleotide
ccuguuuuaccuguucuua

SEQ ID NO: 2639968 - RNA, 19 nt, Artificial Sequence
  Description of Artificial Sequence: Synthetic oligonucleotide
gaagugggaugagaagcuu

SEQ ID NO: 2639969 - RNA, 19 nt, Artificial Sequence
  Description of Artificial Sequence: Synthetic oligonucleotide
cacaugccaccaauguaau

SEQ ID NO: 2639970 - RNA, 19 nt, Artificial Sequence
  Description of Artificial Sequence: Synthetic oligonucleotide
acacaaccguucaucucuu

SEQ ID NO: 2639971 - RNA, 19 nt, Artificial Sequence
  Description of Artificial Sequence: Synthetic oligonucleotide
cgauuugguccucagccga

SEQ ID NO: 2639972 - RNA, 19 nt, Artificial Sequence
  Description of Artificial Sequence: Synthetic oligonucleotide
gauuaccguuacccuguuu

SEQ ID NO: 2639973 - RNA, 19 nt, Artificial Sequence
  Description of Artificial Sequence: Synthetic oligonucleotide
gccgaaguuaguacagugu

SEQ ID NO: 2639974 - RNA, 19 nt, Artificial Sequence
  Description of Artificial Sequence: Synthetic oligonucleotide
cagcaguacauagugcuuu

SEQ ID NO: 2639975 - RNA, 19 nt, Artificial Sequence
  Description of Artificial Sequence: Synthetic oligonucleotide
caaucacuuuccugaguuu

SEQ ID NO: 2639976 - RNA, 19 nt, Artificial Sequence
  Description of Artificial Sequence: Synthetic oligonucleotide
ggugccucccugugcuguc

SEQ ID NO: 2639977 - RNA, 19 nt, Artificial Sequence
  Description of Artificial Sequence: Synthetic oligonucleotide
gccucccugugcugucagg

SEQ ID NO: 2639978 - RNA, 19 nt, Artificial Sequence
  Description of Artificial Sequence: Synthetic oligonucleotide
gugcaaacuccuugucauu

SEQ ID NO: 2639979 - RNA, 19 nt, Artificial Sequence
  Description of Artificial Sequence: Synthetic oligonucleotide
ccucacucacuugggagga

SEQ ID NO: 2639980 - RNA, 19 nt, Artificial Sequence
  Description of Artificial Sequence: Synthetic oligonucleotide
gccuagccuauuacucuca

SEQ ID NO: 2639981 - RNA, 19 nt, Artificial Sequence
  Description of Artificial Sequence: Synthetic oligonucleotide
ccguuacccuguuuuaccu

SEQ ID NO: 2639982 - RNA, 19 nt, Artificial Sequence
  Description of Artificial Sequence: Synthetic oligonucleotide
gcuggacgagcagugcaaa

SEQ ID NO: 2639983 - RNA, 19 nt, Artificial Sequence
  Description of Artificial Sequence: Synthetic oligonucleotide
cgguucucauccgacugac

SEQ ID NO: 2639984 - RNA, 19 nt, Artificial Sequence
  Description of Artificial Sequence: Synthetic oligonucleotide
gguuuacugguggcacaaa

SEQ ID NO: 2639985 - RNA, 19 nt, Artificial Sequence
  Description of Artificial Sequence: Synthetic oligonucleotide
cagccgaaguuaguacagu

SEQ ID NO: 2639986 - RNA, 19 nt, Artificial Sequence
  Description of Artificial Sequence: Synthetic oligonucleotide
cgaagagauucaucuauuu

SEQ ID NO: 2639987 - RNA, 19 nt, Artificial Sequence
  Description of Artificial Sequence: Synthetic oligonucleotide
ccgaagagauucaucuauu

SEQ ID NO: 2639988 - RNA, 19 nt, Artificial Sequence
  Description of Artificial Sequence: Synthetic oligonucleotide
cacaaccguucaucucuuu

SEQ ID NO: 2639989 - RNA, 19 nt, Artificial Sequence
  Description of Artificial Sequence: Synthetic oligonucleotide
cgcuggacgagcagugcaa

SEQ ID NO: 2639990 - RNA, 19 nt, Artificial Sequence
  Description of Artificial Sequence: Synthetic oligonucleotide
guccucagccgaaguuagu

SEQ ID NO: 2639991 - RNA, 19 nt, Artificial Sequence
  Description of Artificial Sequence: Synthetic oligonucleotide
ccgacugacuggacugugu

SEQ ID NO: 2639992 - RNA, 19 nt, Artificial Sequence
  Description of Artificial Sequence: Synthetic oligonucleotide
cgacugacuggacuguguu

SEQ ID NO: 2639993 - RNA, 19 nt, Artificial Sequence
  Description of Artificial Sequence: Synthetic oligonucleotide
uuagacauguugaugaagg

SEQ ID NO: 2639994 - RNA, 19 nt, Artificial Sequence
  Description of Artificial Sequence: Synthetic oligonucleotide
aaagaugacaaccuucccu

SEQ ID NO: 2639995 - RNA, 19 nt, Artificial Sequence
  Description of Artificial Sequence: Synthetic oligonucleotide
gacauguugaugaaggugg

SEQ ID NO: 2639996 - RNA, 19 nt, Artificial Sequence
  Description of Artificial Sequence: Synthetic oligonucleotide
aagaugacaaccuucccug

SEQ ID NO: 2639997 - RNA, 19 nt, Artificial Sequence
  Description of Artificial Sequence: Synthetic oligonucleotide
uccuuagacauguugauga

SEQ ID NO: 2639998 - RNA, 19 nt, Artificial Sequence
  Description of Artificial Sequence: Synthetic oligonucleotide
aggaccaggcuguagaccc

SEQ ID NO: 2639999 - RNA, 19 nt, Artificial Sequence
  Description of Artificial Sequence: Synthetic oligonucleotide
uauuggaggguauaagaag

SEQ ID NO: 2640000 - RNA, 19 nt, Artificial Sequence
  Description of Artificial Sequence: Synthetic oligonucleotide
guaagcaucccucaugucc

SEQ ID NO: 2640001 - RNA, 19 nt, Artificial Sequence
  Description of Artificial Sequence: Synthetic oligonucleotide
cuuccaaaaggccagugcg

SEQ ID NO: 2640002 - RNA, 19 nt, Artificial Sequence
  Description of Artificial Sequence: Synthetic oligonucleotide
uauaagaaggcaccuccag

SEQ ID NO: 2640003 - RNA, 19 nt, Artificial Sequence
  Description of Artificial Sequence: Synthetic oligonucleotide
aagaaggcaccuccagacc

SEQ ID NO: 2640004 - RNA, 19 nt, Artificial Sequence
  Description of Artificial Sequence: Synthetic oligonucleotide
uucuccuuagacauguuga

SEQ ID NO: 2640005 - RNA, 19 nt, Artificial Sequence
  Description of Artificial Sequence: Synthetic oligonucleotide
acgccuuugaaucuggguc

SEQ ID NO: 2640006 - RNA, 19 nt, Artificial Sequence
  Description of Artificial Sequence: Synthetic oligonucleotide
uaagaaggcaccuccagac

SEQ ID NO: 2640007 - RNA, 19 nt, Artificial Sequence
  Description of Artificial Sequence: Synthetic oligonucleotide
uugaaucugggucaggcac

SEQ ID NO: 2640008 - RNA, 19 nt, Artificial Sequence
  Description of Artificial Sequence: Synthetic oligonucleotide
guaaagaugacaaccuucc

SEQ ID NO: 2640009 - RNA, 19 nt, Artificial Sequence
  Description of Artificial Sequence: Synthetic oligonucleotide
gauuucuggguaaagauga

SEQ ID NO: 2640010 - RNA, 19 nt, Artificial Sequence
  Description of Artificial Sequence: Synthetic oligonucleotide
uucuggguaaagaugacaa

SEQ ID NO: 2640011 - RNA, 19 nt, Artificial Sequence
  Description of Artificial Sequence: Synthetic oligonucleotide
uccacauucuccuuagaca

SEQ ID NO: 2640012 - RNA, 19 nt, Artificial Sequence
  Description of Artificial Sequence: Synthetic oligonucleotide
cacagaacgccuuugaauc

SEQ ID NO: 2640013 - RNA, 19 nt, Artificial Sequence
  Description of Artificial Sequence: Synthetic oligonucleotide
uaagcaucccucaugucca

SEQ ID NO: 2640014 - RNA, 19 nt, Artificial Sequence
  Description of Artificial Sequence: Synthetic oligonucleotide
cuggguaaagaugacaacc

SEQ ID NO: 2640015 - RNA, 19 nt, Artificial Sequence
  Description of Artificial Sequence: Synthetic oligonucleotide
uuccaaaaggccagugcgg

SEQ ID NO: 2640016 - RNA, 19 nt, Artificial Sequence
  Description of Artificial Sequence: Synthetic oligonucleotide
uggguaaagaugacaaccu

SEQ ID NO: 2640017 - RNA, 19 nt, Artificial Sequence
  Description of Artificial Sequence: Synthetic oligonucleotide
gucuugggaauacacagag

SEQ ID NO: 2640018 - RNA, 19 nt, Artificial Sequence
  Description of Artificial Sequence: Synthetic oligonucleotide
gguauaagaaggcaccucc

SEQ ID NO: 2640019 - RNA, 19 nt, Artificial Sequence
  Description of Artificial Sequence: Synthetic oligonucleotide
aggcacacuggauaccugc

SEQ ID NO: 2640020 - RNA, 19 nt, Artificial Sequence
  Description of Artificial Sequence: Synthetic oligonucleotide
ugugugcuggugucgaggg

SEQ ID NO: 2640021 - RNA, 19 nt, Artificial Sequence
  Description of Artificial Sequence: Synthetic oligonucleotide
auuucugggauuucugggu

SEQ ID NO: 2640022 - RNA, 19 nt, Artificial Sequence
  Description of Artificial Sequence: Synthetic oligonucleotide
cuuugaaucugggucaggc

SEQ ID NO: 2640023 - RNA, 19 nt, Artificial Sequence
  Description of Artificial Sequence: Synthetic oligonucleotide
ugaagguggucucguauug

SEQ ID NO: 2640024 - RNA, 19 nt, Artificial Sequence
  Description of Artificial Sequence: Synthetic oligonucleotide
aucugggucaggcacacug

SEQ ID NO: 2640025 - RNA, 19 nt, Artificial Sequence
  Description of Artificial Sequence: Synthetic oligonucleotide
gaggguauaagaaggcacc

SEQ ID NO: 2640026 - RNA, 19 nt, Artificial Sequence
  Description of Artificial Sequence: Synthetic oligonucleotide
ucuugggaauacacagagg

SEQ ID NO: 2640027 - RNA, 19 nt, Artificial Sequence
  Description of Artificial Sequence: Synthetic oligonucleotide
caaaaggccagugcggugg

SEQ ID NO: 2640028 - RNA, 19 nt, Artificial Sequence
  Description of Artificial Sequence: Synthetic oligonucleotide
aucccucauguccacauuc

SEQ ID NO: 2640029 - RNA, 19 nt, Artificial Sequence
  Description of Artificial Sequence: Synthetic oligonucleotide
aggccccaaaaguaggagc

SEQ ID NO: 2640030 - RNA, 19 nt, Artificial Sequence
  Description of Artificial Sequence: Synthetic oligonucleotide
uggauaccugcccuccucg

SEQ ID NO: 2640031 - RNA, 19 nt, Artificial Sequence
  Description of Artificial Sequence: Synthetic oligonucleotide
ucugggucaggcacacugg

SEQ ID NO: 2640032 - RNA, 19 nt, Artificial Sequence
  Description of Artificial Sequence: Synthetic oligonucleotide
cuccagaccagcugaagcc

SEQ ID NO: 2640033 - RNA, 19 nt, Artificial Sequence
  Description of Artificial Sequence: Synthetic oligonucleotide
gguggucucguauuggagg

SEQ ID NO: 2640034 - RNA, 19 nt, Artificial Sequence
  Description of Artificial Sequence: Synthetic oligonucleotide
aagguggucucguauugga

SEQ ID NO: 2640035 - RNA, 19 nt, Artificial Sequence
  Description of Artificial Sequence: Synthetic oligonucleotide
agguaagcaucccucaugu

SEQ ID NO: 2640036 - RNA, 19 nt, Artificial Sequence
  Description of Artificial Sequence: Synthetic oligonucleotide
auaagaaggcaccuccaga

SEQ ID NO: 2640037 - RNA, 19 nt, Artificial Sequence
  Description of Artificial Sequence: Synthetic oligonucleotide
uccauuucugggauuucug

SEQ ID NO: 2640038 - RNA, 19 nt, Artificial Sequence
  Description of Artificial Sequence: Synthetic oligonucleotide
cuugggaauacacagaggu

SEQ ID NO: 2640039 - RNA, 19 nt, Artificial Sequence
  Description of Artificial Sequence: Synthetic oligonucleotide
gaagccuucccacagccuc

SEQ ID NO: 2640040 - RNA, 19 nt, Artificial Sequence
  Description of Artificial Sequence: Synthetic oligonucleotide
guggucucguauuggaggg

SEQ ID NO: 2640041 - RNA, 19 nt, Artificial Sequence
  Description of Artificial Sequence: Synthetic oligonucleotide
uuugaaucugggucaggca

SEQ ID NO: 2640042 - RNA, 19 nt, Artificial Sequence
  Description of Artificial Sequence: Synthetic oligonucleotide
ugaaucugggucaggcaca

SEQ ID NO: 2640043 - RNA, 19 nt, Artificial Sequence
  Description of Artificial Sequence: Synthetic oligonucleotide
aacgccuuugaaucugggu

SEQ ID NO: 2640044 - RNA, 19 nt, Artificial Sequence
  Description of Artificial Sequence: Synthetic oligonucleotide
ugugcuggugucgaggggc

SEQ ID NO: 2640045 - RNA, 19 nt, Artificial Sequence
  Description of Artificial Sequence: Synthetic oligonucleotide
gguggaguaacccagguaa

SEQ ID NO: 2640046 - RNA, 19 nt, Artificial Sequence
  Description of Artificial Sequence: Synthetic oligonucleotide
agacauguugaugaaggug

SEQ ID NO: 2640047 - RNA, 19 nt, Artificial Sequence
  Description of Artificial Sequence: Synthetic oligonucleotide
ugucccggcagucuuggga

SEQ ID NO: 2640048 - RNA, 19 nt, Artificial Sequence
  Description of Artificial Sequence: Synthetic oligonucleotide
agaggggaggccccaaaag

SEQ ID NO: 2640049 - RNA, 19 nt, Artificial Sequence
  Description of Artificial Sequence: Synthetic oligonucleotide
acauucuccuuagacaugu

SEQ ID NO: 2640050 - RNA, 19 nt, Artificial Sequence
  Description of Artificial Sequence: Synthetic oligonucleotide
agugcgguggaguaaccca

SEQ ID NO: 2640051 - RNA, 19 nt, Artificial Sequence
  Description of Artificial Sequence: Synthetic oligonucleotide
uuucuggguaaagaugaca

SEQ ID NO: 2640052 - RNA, 19 nt, Artificial Sequence
  Description of Artificial Sequence: Synthetic oligonucleotide
cuuagacauguugaugaag

SEQ ID NO: 2640053 - RNA, 19 nt, Artificial Sequence
  Description of Artificial Sequence: Synthetic oligonucleotide
aacccagguaagcaucccu

SEQ ID NO: 2640054 - RNA, 19 nt, Artificial Sequence
  Description of Artificial Sequence: Synthetic oligonucleotide
ucuccuuagacauguugau

SEQ ID NO: 2640055 - RNA, 19 nt, Artificial Sequence
  Description of Artificial Sequence: Synthetic oligonucleotide
ucuggguaaagaugacaac

SEQ ID NO: 2640056 - RNA, 19 nt, Artificial Sequence
  Description of Artificial Sequence: Synthetic oligonucleotide
uggaguaacccagguaagc

SEQ ID NO: 2640057 - RNA, 19 nt, Artificial Sequence
  Description of Artificial Sequence: Synthetic oligonucleotide
agcugaagccuucccacag

SEQ ID NO: 2640058 - RNA, 19 nt, Artificial Sequence
  Description of Artificial Sequence: Synthetic oligonucleotide
guccacauucuccuuagac

SEQ ID NO: 2640059 - RNA, 19 nt, Artificial Sequence
  Description of Artificial Sequence: Synthetic oligonucleotide
acaaccuucccugugugcu

SEQ ID NO: 2640060 - RNA, 19 nt, Artificial Sequence
  Description of Artificial Sequence: Synthetic oligonucleotide
cugaagccuucccacagcc

SEQ ID NO: 2640061 - RNA, 19 nt, Artificial Sequence
  Description of Artificial Sequence: Synthetic oligonucleotide
ucguauuggaggguauaag

SEQ ID NO: 2640062 - RNA, 19 nt, Artificial Sequence
  Description of Artificial Sequence: Synthetic oligonucleotide
uugggccuccauuucuggg

SEQ ID NO: 2640063 - RNA, 19 nt, Artificial Sequence
  Description of Artificial Sequence: Synthetic oligonucleotide
gaagguggucucguauugg

SEQ ID NO: 2640064 - RNA, 19 nt, Artificial Sequence
  Description of Artificial Sequence: Synthetic oligonucleotide
aaccuucccugugugcugg

SEQ ID NO: 2640065 - RNA, 19 nt, Artificial Sequence
  Description of Artificial Sequence: Synthetic oligonucleotide
aagccuucccacagccucc

SEQ ID NO: 2640066 - RNA, 19 nt, Artificial Sequence
  Description of Artificial Sequence: Synthetic oligonucleotide
ugggccuccauuucuggga

SEQ ID NO: 2640067 - RNA, 19 nt, Artificial Sequence
  Description of Artificial Sequence: Synthetic oligonucleotide
ugacaaccuucccugugug

SEQ ID NO: 2640068 - RNA, 19 nt, Artificial Sequence
  Description of Artificial Sequence: Synthetic oligonucleotide
uccacagagcagaggggag

SEQ ID NO: 2640069 - RNA, 19 nt, Artificial Sequence
  Description of Artificial Sequence: Synthetic oligonucleotide
ugcgguggaguaacccagg

SEQ ID NO: 2640070 - RNA, 19 nt, Artificial Sequence
  Description of Artificial Sequence: Synthetic oligonucleotide
uccaaaaggccagugcggu

SEQ ID NO: 2640071 - RNA, 19 nt, Artificial Sequence
  Description of Artificial Sequence: Synthetic oligonucleotide
ucaggcacacuggauaccu

SEQ ID NO: 2640072 - RNA, 19 nt, Artificial Sequence
  Description of Artificial Sequence: Synthetic oligonucleotide
caguccagcacagaacgcc

SEQ ID NO: 2640073 - RNA, 19 nt, Artificial Sequence
  Description of Artificial Sequence: Synthetic oligonucleotide
aaggcaccuccagaccagc

SEQ ID NO: 2640074 - RNA, 19 nt, Artificial Sequence
  Description of Artificial Sequence: Synthetic oligonucleotide
agacuugggccuccauuuc

SEQ ID NO: 2640075 - RNA, 19 nt, Artificial Sequence
  Description of Artificial Sequence: Synthetic oligonucleotide
acagaacgccuuugaaucu

SEQ ID NO: 2640076 - RNA, 19 nt, Artificial Sequence
  Description of Artificial Sequence: Synthetic oligonucleotide
uggaggguauaagaaggca

SEQ ID NO: 2640077 - RNA, 19 nt, Artificial Sequence
  Description of Artificial Sequence: Synthetic oligonucleotide
ucccucauguccacauucu

SEQ ID NO: 2640078 - RNA, 19 nt, Artificial Sequence
  Description of Artificial Sequence: Synthetic oligonucleotide
augaagguggucucguauu

SEQ ID NO: 2640079 - RNA, 19 nt, Artificial Sequence
  Description of Artificial Sequence: Synthetic oligonucleotide
auuucuggguaaagaugac

SEQ ID NO: 2640080 - RNA, 19 nt, Artificial Sequence
  Description of Artificial Sequence: Synthetic oligonucleotide
gguaaagaugacaaccuuc

SEQ ID NO: 2640081 - RNA, 19 nt, Artificial Sequence
  Description of Artificial Sequence: Synthetic oligonucleotide
cagguaagcaucccucaug

SEQ ID NO: 2640082 - RNA, 19 nt, Artificial Sequence
  Description of Artificial Sequence: Synthetic oligonucleotide
cuugggccuccauuucugg

SEQ ID NO: 2640083 - RNA, 19 nt, Artificial Sequence
  Description of Artificial Sequence: Synthetic oligonucleotide
guauuggaggguauaagaa

SEQ ID NO: 2640084 - RNA, 19 nt, Artificial Sequence
  Description of Artificial Sequence: Synthetic oligonucleotide
ccucauguccacauucucc

SEQ ID NO: 2640085 - RNA, 19 nt, Artificial Sequence
  Description of Artificial Sequence: Synthetic oligonucleotide
ggauuucuggguaaagaug

SEQ ID NO: 2640086 - RNA, 19 nt, Artificial Sequence
  Description of Artificial Sequence: Synthetic oligonucleotide
caaaaguaggagccgaucu

SEQ ID NO: 2640087 - RNA, 19 nt, Artificial Sequence
  Description of Artificial Sequence: Synthetic oligonucleotide
agagcagaggggaggcccc

SEQ ID NO: 2640088 - RNA, 19 nt, Artificial Sequence
  Description of Artificial Sequence: Synthetic oligonucleotide
aaggccagugcgguggagu

SEQ ID NO: 2640089 - RNA, 19 nt, Artificial Sequence
  Description of Artificial Sequence: Synthetic oligonucleotide
cagagcagaggggaggccc

SEQ ID NO: 2640090 - RNA, 19 nt, Artificial Sequence
  Description of Artificial Sequence: Synthetic oligonucleotide
gaaggcaccuccagaccag

SEQ ID NO: 2640091 - RNA, 19 nt, Artificial Sequence
  Description of Artificial Sequence: Synthetic oligonucleotide
cucauguccacauucuccu

SEQ ID NO: 2640092 - RNA, 19 nt, Artificial Sequence
  Description of Artificial Sequence: Synthetic oligonucleotide
acccagguaagcaucccuc

SEQ ID NO: 2640093 - RNA, 19 nt, Artificial Sequence
  Description of Artificial Sequence: Synthetic oligonucleotide
gaugaagguggucucguau

SEQ ID NO: 2640094 - RNA, 19 nt, Artificial Sequence
  Description of Artificial Sequence: Synthetic oligonucleotide
cugugugcuggugucgagg

SEQ ID NO: 2640095 - RNA, 19 nt, Artificial Sequence
  Description of Artificial Sequence: Synthetic oligonucleotide
uccagaccagcugaagccu

SEQ ID NO: 2640096 - RNA, 19 nt, Artificial Sequence
  Description of Artificial Sequence: Synthetic oligonucleotide
gaggccccaaaaguaggag

SEQ ID NO: 2640097 - RNA, 19 nt, Artificial Sequence
  Description of Artificial Sequence: Synthetic oligonucleotide
ugaagccuucccacagccu

SEQ ID NO: 2640098 - RNA, 19 nt, Artificial Sequence
  Description of Artificial Sequence: Synthetic oligonucleotide
agaacgccuuugaaucugg

SEQ ID NO: 2640099 - RNA, 19 nt, Artificial Sequence
  Description of Artificial Sequence: Synthetic oligonucleotide
ggaggguauaagaaggcac

SEQ ID NO: 2640100 - RNA, 19 nt, Artificial Sequence
  Description of Artificial Sequence: Synthetic oligonucleotide
gaaucugggucaggcacac

SEQ ID NO: 2640101 - RNA, 19 nt, Artificial Sequence
  Description of Artificial Sequence: Synthetic oligonucleotide
cacauucuccuuagacaug

SEQ ID NO: 2640102 - RNA, 19 nt, Artificial Sequence
  Description of Artificial Sequence: Synthetic oligonucleotide
cuccuuagacauguugaug

SEQ ID NO: 2640103 - RNA, 19 nt, Artificial Sequence
  Description of Artificial Sequence: Synthetic oligonucleotide
uucugggauuucuggguaa

SEQ ID NO: 2640104 - RNA, 19 nt, Artificial Sequence
  Description of Artificial Sequence: Synthetic oligonucleotide
cacagagcagaggggaggc

SEQ ID NO: 2640105 - RNA, 19 nt, Artificial Sequence
  Description of Artificial Sequence: Synthetic oligonucleotide
ucugggauuucuggguaaa

SEQ ID NO: 2640106 - RNA, 19 nt, Artificial Sequence
  Description of Artificial Sequence: Synthetic oligonucleotide
aggguauaagaaggcaccu

SEQ ID NO: 2640107 - RNA, 19 nt, Artificial Sequence
  Description of Artificial Sequence: Synthetic oligonucleotide
uucccugugugcugguguc

SEQ ID NO: 2640108 - RNA, 19 nt, Artificial Sequence
  Description of Artificial Sequence: Synthetic oligonucleotide
gaacgccuuugaaucuggg

SEQ ID NO: 2640109 - RNA, 19 nt, Artificial Sequence
  Description of Artificial Sequence: Synthetic oligonucleotide
ggucaggcacacuggauac

SEQ ID NO: 2640110 - RNA, 19 nt, Artificial Sequence
  Description of Artificial Sequence: Synthetic oligonucleotide
ccuuccaaaaggccagugc

SEQ ID NO: 2640111 - RNA, 19 nt, Artificial Sequence
  Description of Artificial Sequence: Synthetic oligonucleotide
gaggggaggccccaaaagu

SEQ ID NO: 2640112 - RNA, 19 nt, Artificial Sequence
  Description of Artificial Sequence: Synthetic oligonucleotide
cagaacgccuuugaaucug

SEQ ID NO: 2640113 - RNA, 19 nt, Artificial Sequence
  Description of Artificial Sequence: Synthetic oligonucleotide
agucuugggaauacacaga

SEQ ID NO: 2640114 - RNA, 19 nt, Artificial Sequence
  Description of Artificial Sequence: Synthetic oligonucleotide
guauaagaaggcaccucca

SEQ ID NO: 2640115 - RNA, 19 nt, Artificial Sequence
  Description of Artificial Sequence: Synthetic oligonucleotide
ccagcugaagccuucccac

SEQ ID NO: 2640116 - RNA, 19 nt, Artificial Sequence
  Description of Artificial Sequence: Synthetic oligonucleotide
uguccacauucuccuuaga

SEQ ID NO: 2640117 - RNA, 19 nt, Artificial Sequence
  Description of Artificial Sequence: Synthetic oligonucleotide
cacuggauaccugcccucc

SEQ ID NO: 2640118 - RNA, 19 nt, Artificial Sequence
  Description of Artificial Sequence: Synthetic oligonucleotide
ucucguauuggaggguaua

SEQ ID NO: 2640119 - RNA, 19 nt, Artificial Sequence
  Description of Artificial Sequence: Synthetic oligonucleotide
agccuucccacagccuccc

SEQ ID NO: 2640120 - RNA, 19 nt, Artificial Sequence
  Description of Artificial Sequence: Synthetic oligonucleotide
gugcgguggaguaacccag

SEQ ID NO: 2640121 - RNA, 19 nt, Artificial Sequence
  Description of Artificial Sequence: Synthetic oligonucleotide
cuggauaccugcccuccuc

SEQ ID NO: 2640122 - RNA, 19 nt, Artificial Sequence
  Description of Artificial Sequence: Synthetic oligonucleotide
cuucccacagccucccaga

SEQ ID NO: 2640123 - RNA, 19 nt, Artificial Sequence
  Description of Artificial Sequence: Synthetic oligonucleotide
ggaguaacccagguaagca

SEQ ID NO: 2640124 - RNA, 19 nt, Artificial Sequence
  Description of Artificial Sequence: Synthetic oligonucleotide
gaccagcugaagccuuccc

SEQ ID NO: 2640125 - RNA, 19 nt, Artificial Sequence
  Description of Artificial Sequence: Synthetic oligonucleotide
uaacccagguaagcauccc

SEQ ID NO: 2640126 - RNA, 19 nt, Artificial Sequence
  Description of Artificial Sequence: Synthetic oligonucleotide
acuggauaccugcccuccu

SEQ ID NO: 2640127 - RNA, 19 nt, Artificial Sequence
  Description of Artificial Sequence: Synthetic oligonucleotide
ccuccagaccagcugaagc

SEQ ID NO: 2640128 - RNA, 19 nt, Artificial Sequence
  Description of Artificial Sequence: Synthetic oligonucleotide
ugaugaagguggucucgua

SEQ ID NO: 2640129 - RNA, 19 nt, Artificial Sequence
  Description of Artificial Sequence: Synthetic oligonucleotide
caaccuucccugugugcug

SEQ ID NO: 2640130 - RNA, 19 nt, Artificial Sequence
  Description of Artificial Sequence: Synthetic oligonucleotide
ucccacagccucccagaac

SEQ ID NO: 2640131 - RNA, 19 nt, Artificial Sequence
  Description of Artificial Sequence: Synthetic oligonucleotide
gaguaacccagguaagcau

SEQ ID NO: 2640132 - RNA, 19 nt, Artificial Sequence
  Description of Artificial Sequence: Synthetic oligonucleotide
cguauuggaggguauaaga

SEQ ID NO: 2640133 - RNA, 19 nt, Artificial Sequence
  Description of Artificial Sequence: Synthetic oligonucleotide
ucccugugugcuggugucg

SEQ ID NO: 2640134 - RNA, 19 nt, Artificial Sequence
  Description of Artificial Sequence: Synthetic oligonucleotide
uucccacagccucccagaa

SEQ ID NO: 2640135 - RNA, 19 nt, Artificial Sequence
  Description of Artificial Sequence: Synthetic oligonucleotide
ugggucaggcacacuggau

SEQ ID NO: 2640136 - RNA, 19 nt, Artificial Sequence
  Description of Artificial Sequence: Synthetic oligonucleotide
cauguugaugaaggugguc

SEQ ID NO: 2640137 - RNA, 19 nt, Artificial Sequence
  Description of Artificial Sequence: Synthetic oligonucleotide
ggcaccuccagaccagcug

SEQ ID NO: 2640138 - RNA, 19 nt, Artificial Sequence
  Description of Artificial Sequence: Synthetic oligonucleotide
caggaccaggcuguagacc

SEQ ID NO: 2640139 - RNA, 19 nt, Artificial Sequence
  Description of Artificial Sequence: Synthetic oligonucleotide
cagugcgguggaguaaccc

SEQ ID NO: 2640140 - RNA, 19 nt, Artificial Sequence
  Description of Artificial Sequence: Synthetic oligonucleotide
ccacaaugccuccuguccc

SEQ ID NO: 2640141 - RNA, 19 nt, Artificial Sequence
  Description of Artificial Sequence: Synthetic oligonucleotide
ugcccacaaugccuccugu

SEQ ID NO: 2640142 - RNA, 19 nt, Artificial Sequence
  Description of Artificial Sequence: Synthetic oligonucleotide
aguccagcacagaacgccu

SEQ ID NO: 2640143 - RNA, 19 nt, Artificial Sequence
  Description of Artificial Sequence: Synthetic oligonucleotide
gugugcuggugucgagggg

SEQ ID NO: 2640144 - RNA, 19 nt, Artificial Sequence
  Description of Artificial Sequence: Synthetic oligonucleotide
agguggucucguauuggag

SEQ ID NO: 2640145 - RNA, 19 nt, Artificial Sequence
  Description of Artificial Sequence: Synthetic oligonucleotide
cugggauuucuggguaaag

SEQ ID NO: 2640146 - RNA, 19 nt, Artificial Sequence
  Description of Artificial Sequence: Synthetic oligonucleotide
gucccggcagucuugggaa

SEQ ID NO: 2640147 - RNA, 19 nt, Artificial Sequence
  Description of Artificial Sequence: Synthetic oligonucleotide
ggggaggccccaaaaguag

SEQ ID NO: 2640148 - RNA, 19 nt, Artificial Sequence
  Description of Artificial Sequence: Synthetic oligonucleotide
gcacacuggauaccugccc

SEQ ID NO: 2640149 - RNA, 19 nt, Artificial Sequence
  Description of Artificial Sequence: Synthetic oligonucleotide
ggcagucuugggaauacac

SEQ ID NO: 2640150 - RNA, 19 nt, Artificial Sequence
  Description of Artificial Sequence: Synthetic oligonucleotide
cugcccacaaugccuccug

SEQ ID NO: 2640151 - RNA, 19 nt, Artificial Sequence
  Description of Artificial Sequence: Synthetic oligonucleotide
acagccucccagaacuggu

SEQ ID NO: 2640152 - RNA, 19 nt, Artificial Sequence
  Description of Artificial Sequence: Synthetic oligonucleotide
gcugaagccuucccacagc

SEQ ID NO: 2640153 - RNA, 19 nt, Artificial Sequence
  Description of Artificial Sequence: Synthetic oligonucleotide
cagacuugggccuccauuu

SEQ ID NO: 2640154 - RNA, 19 nt, Artificial Sequence
  Description of Artificial Sequence: Synthetic oligonucleotide
cucguauuggaggguauaa

SEQ ID NO: 2640155 - RNA, 19 nt, Artificial Sequence
  Description of Artificial Sequence: Synthetic oligonucleotide
gggucaggcacacuggaua

SEQ ID NO: 2640156 - RNA, 19 nt, Artificial Sequence
  Description of Artificial Sequence: Synthetic oligonucleotide
cugggucaggcacacugga

SEQ ID NO: 2640157 - RNA, 19 nt, Artificial Sequence
  Description of Artificial Sequence: Synthetic oligonucleotide
gucaggcacacuggauacc

SEQ ID NO: 2640158 - RNA, 19 nt, Artificial Sequence
  Description of Artificial Sequence: Synthetic oligonucleotide
gggaggccccaaaaguagg

SEQ ID NO: 2640159 - RNA, 19 nt, Artificial Sequence
  Description of Artificial Sequence: Synthetic oligonucleotide
aggggaggccccaaaagua

SEQ ID NO: 2640160 - RNA, 19 nt, Artificial Sequence
  Description of Artificial Sequence: Synthetic oligonucleotide
gcagucuugggaauacaca

SEQ ID NO: 2640161 - RNA, 19 nt, Artificial Sequence
  Description of Artificial Sequence: Synthetic oligonucleotide
gcaccuccagaccagcuga

SEQ ID NO: 2640162 - RNA, 19 nt, Artificial Sequence
  Description of Artificial Sequence: Synthetic oligonucleotide
cagccucccagaacugguc

SEQ ID NO: 2640163 - RNA, 19 nt, Artificial Sequence
  Description of Artificial Sequence: Synthetic oligonucleotide
cagcacagaacgccuuuga

SEQ ID NO: 2640164 - RNA, 19 nt, Artificial Sequence
  Description of Artificial Sequence: Synthetic oligonucleotide
aggccagugcgguggagua

SEQ ID NO: 2640165 - RNA, 19 nt, Artificial Sequence
  Description of Artificial Sequence: Synthetic oligonucleotide
ccacauucuccuuagacau

SEQ ID NO: 2640166 - RNA, 19 nt, Artificial Sequence
  Description of Artificial Sequence: Synthetic oligonucleotide
ggcacacuggauaccugcc

SEQ ID NO: 2640167 - RNA, 19 nt, Artificial Sequence
  Description of Artificial Sequence: Synthetic oligonucleotide
uggucucguauuggagggu

SEQ ID NO: 2640168 - RNA, 19 nt, Artificial Sequence
  Description of Artificial Sequence: Synthetic oligonucleotide
cagcugaagccuucccaca

SEQ ID NO: 2640169 - RNA, 19 nt, Artificial Sequence
  Description of Artificial Sequence: Synthetic oligonucleotide
ccuucccacagccucccag

SEQ ID NO: 2640170 - RNA, 19 nt, Artificial Sequence
  Description of Artificial Sequence: Synthetic oligonucleotide
ggguauaagaaggcaccuc

SEQ ID NO: 2640171 - RNA, 19 nt, Artificial Sequence
  Description of Artificial Sequence: Synthetic oligonucleotide
gcacagaacgccuuugaau

SEQ ID NO: 2640172 - RNA, 19 nt, Artificial Sequence
  Description of Artificial Sequence: Synthetic oligonucleotide
ccaaaaguaggagccgauc

SEQ ID NO: 2640173 - RNA, 19 nt, Artificial Sequence
  Description of Artificial Sequence: Synthetic oligonucleotide
cuucccugugugcuggugu

SEQ ID NO: 2640174 - RNA, 19 nt, Artificial Sequence
  Description of Artificial Sequence: Synthetic oligonucleotide
gguaagcaucccucauguc

SEQ ID NO: 2640175 - RNA, 19 nt, Artificial Sequence
  Description of Artificial Sequence: Synthetic oligonucleotide
gccccaaaaguaggagccg

SEQ ID NO: 2640176 - RNA, 19 nt, Artificial Sequence
  Description of Artificial Sequence: Synthetic oligonucleotide
aaucugggucaggcacacu

SEQ ID NO: 2640177 - RNA, 19 nt, Artificial Sequence
  Description of Artificial Sequence: Synthetic oligonucleotide
gccagugcgguggaguaac

SEQ ID NO: 2640178 - RNA, 19 nt, Artificial Sequence
  Description of Artificial Sequence: Synthetic oligonucleotide
gccuuugaaucugggucag

SEQ ID NO: 2640179 - RNA, 19 nt, Artificial Sequence
  Description of Artificial Sequence: Synthetic oligonucleotide
ccaggaccaggcuguagac

SEQ ID NO: 2640180 - RNA, 19 nt, Artificial Sequence
  Description of Artificial Sequence: Synthetic oligonucleotide
ccaaaaggccagugcggug

SEQ ID NO: 2640181 - RNA, 19 nt, Artificial Sequence
  Description of Artificial Sequence: Synthetic oligonucleotide
cccaggaccaggcuguaga

SEQ ID NO: 2640182 - RNA, 19 nt, Artificial Sequence
  Description of Artificial Sequence: Synthetic oligonucleotide
cugucccggcagucuuggg

SEQ ID NO: 2640183 - RNA, 19 nt, Artificial Sequence
  Description of Artificial Sequence: Synthetic oligonucleotide
ugcuggugucgaggggccc

SEQ ID NO: 2640184 - RNA, 19 nt, Artificial Sequence
  Description of Artificial Sequence: Synthetic oligonucleotide
cagaggggaggccccaaaa

SEQ ID NO: 2640185 - RNA, 19 nt, Artificial Sequence
  Description of Artificial Sequence: Synthetic oligonucleotide
gcuggugucgaggggcccc

SEQ ID NO: 2640186 - RNA, 19 nt, Artificial Sequence
  Description of Artificial Sequence: Synthetic oligonucleotide
ggaggccccaaaaguagga

SEQ ID NO: 2640187 - RNA, 19 nt, Artificial Sequence
  Description of Artificial Sequence: Synthetic oligonucleotide
ccugucccggcagucuugg

SEQ ID NO: 2640188 - RNA, 19 nt, Artificial Sequence
  Description of Artificial Sequence: Synthetic oligonucleotide
ucccggcagucuugggaau

SEQ ID NO: 2640189 - RNA, 19 nt, Artificial Sequence
  Description of Artificial Sequence: Synthetic oligonucleotide
cgccuuugaaucuggguca

SEQ ID NO: 2640190 - RNA, 19 nt, Artificial Sequence
  Description of Artificial Sequence: Synthetic oligonucleotide
ccuuagacauguugaugaa

SEQ ID NO: 2640191 - RNA, 19 nt, Artificial Sequence
  Description of Artificial Sequence: Synthetic oligonucleotide
cccagguaagcaucccuca

SEQ ID NO: 2640192 - RNA, 19 nt, Artificial Sequence
  Description of Artificial Sequence: Synthetic oligonucleotide
cccucauguccacauucuc

SEQ ID NO: 2640193 - RNA, 19 nt, Artificial Sequence
  Description of Artificial Sequence: Synthetic oligonucleotide
cucccagaacugguccauc

SEQ ID NO: 2640194 - RNA, 19 nt, Artificial Sequence
  Description of Artificial Sequence: Synthetic oligonucleotide
gcccacaaugccuccuguc

SEQ ID NO: 2640195 - RNA, 19 nt, Artificial Sequence
  Description of Artificial Sequence: Synthetic oligonucleotide
ggucucguauuggagggua

SEQ ID NO: 2640196 - RNA, 19 nt, Artificial Sequence
  Description of Artificial Sequence: Synthetic oligonucleotide
ggguaaagaugacaaccuu

SEQ ID NO: 2640197 - RNA, 19 nt, Artificial Sequence
  Description of Artificial Sequence: Synthetic oligonucleotide
gcaguccagcacagaacgc

SEQ ID NO: 2640198 - RNA, 19 nt, Artificial Sequence
  Description of Artificial Sequence: Synthetic oligonucleotide
gccucccagaacuggucca

SEQ ID NO: 2640199 - RNA, 19 nt, Artificial Sequence
  Description of Artificial Sequence: Synthetic oligonucleotide
ccugugugcuggugucgag

SEQ ID NO: 2640200 - RNA, 19 nt, Artificial Sequence
  Description of Artificial Sequence: Synthetic oligonucleotide
aggcaccuccagaccagcu

SEQ ID NO: 2640201 - RNA, 19 nt, Artificial Sequence
  Description of Artificial Sequence: Synthetic oligonucleotide
ccagugcgguggaguaacc

SEQ ID NO: 2640202 - RNA, 19 nt, Artificial Sequence
  Description of Artificial Sequence: Synthetic oligonucleotide
caccuccagaccagcugaa

SEQ ID NO: 2640203 - RNA, 19 nt, Artificial Sequence
  Description of Artificial Sequence: Synthetic oligonucleotide
ccggcagucuugggaauac

SEQ ID NO: 2640204 - RNA, 19 nt, Artificial Sequence
  Description of Artificial Sequence: Synthetic oligonucleotide
ccccaaaaguaggagccga

SEQ ID NO: 2640205 - RNA, 19 nt, Artificial Sequence
  Description of Artificial Sequence: Synthetic oligonucleotide
cccuuccaaaaggccagug

SEQ ID NO: 2640206 - RNA, 19 nt, Artificial Sequence
  Description of Artificial Sequence: Synthetic oligonucleotide
gcagaggggaggccccaaa

SEQ ID NO: 2640207 - RNA, 19 nt, Artificial Sequence
  Description of Artificial Sequence: Synthetic oligonucleotide
gccuccauuucugggauuu

SEQ ID NO: 2640208 - RNA, 19 nt, Artificial Sequence
  Description of Artificial Sequence: Synthetic oligonucleotide
gucucguauuggaggguau

SEQ ID NO: 2640209 - RNA, 19 nt, Artificial Sequence
  Description of Artificial Sequence: Synthetic oligonucleotide
gcgguggaguaacccaggu

SEQ ID NO: 2640210 - RNA, 19 nt, Artificial Sequence
  Description of Artificial Sequence: Synthetic oligonucleotide
gggccuccauuucugggau

SEQ ID NO: 2640211 - RNA, 19 nt, Artificial Sequence
  Description of Artificial Sequence: Synthetic oligonucleotide
caucccucauguccacauu

SEQ ID NO: 2640212 - RNA, 19 nt, Artificial Sequence
  Description of Artificial Sequence: Synthetic oligonucleotide
cuccugucccggcagucuu

SEQ ID NO: 2640213 - RNA, 19 nt, Artificial Sequence
  Description of Artificial Sequence: Synthetic oligonucleotide
cccugugugcuggugucga

SEQ ID NO: 2640214 - RNA, 19 nt, Artificial Sequence
  Description of Artificial Sequence: Synthetic oligonucleotide
cccaaaaguaggagccgau

SEQ ID NO: 2640215 - RNA, 19 nt, Artificial Sequence
  Description of Artificial Sequence: Synthetic oligonucleotide
ccagguaagcaucccucau

SEQ ID NO: 2640216 - RNA, 19 nt, Artificial Sequence
  Description of Artificial Sequence: Synthetic oligonucleotide
ggccagugcgguggaguaa

SEQ ID NO: 2640217 - RNA, 19 nt, Artificial Sequence
  Description of Artificial Sequence: Synthetic oligonucleotide
gcugcccacaaugccuccu

SEQ ID NO: 2640218 - RNA, 19 nt, Artificial Sequence
  Description of Artificial Sequence: Synthetic oligonucleotide
ccccaggaccaggcuguag

SEQ ID NO: 2640219 - RNA, 19 nt, Artificial Sequence
  Description of Artificial Sequence: Synthetic oligonucleotide
cgguggaguaacccaggua

SEQ ID NO: 2640220 - RNA, 19 nt, Artificial Sequence
  Description of Artificial Sequence: Synthetic oligonucleotide
ccagaccagcugaagccuu

SEQ ID NO: 2640221 - RNA, 19 nt, Artificial Sequence
  Description of Artificial Sequence: Synthetic oligonucleotide
gccuucccacagccuccca

SEQ ID NO: 2640222 - RNA, 19 nt, Artificial Sequence
  Description of Artificial Sequence: Synthetic oligonucleotide
cccggcagucuugggaaua

SEQ ID NO: 2640223 - RNA, 19 nt, Artificial Sequence
  Description of Artificial Sequence: Synthetic oligonucleotide
ccuccugucccggcagucu

SEQ ID NO: 2640224 - RNA, 19 nt, Artificial Sequence
  Description of Artificial Sequence: Synthetic oligonucleotide
ccucccagaacugguccau

SEQ ID NO: 2640225 - RNA, 19 nt, Artificial Sequence
  Description of Artificial Sequence: Synthetic oligonucleotide
ggccuccauuucugggauu

SEQ ID NO: 2640226 - RNA, 19 nt, Artificial Sequence
  Description of Artificial Sequence: Synthetic oligonucleotide
cggcagucuugggaauaca

SEQ ID NO: 2640227 - RNA, 19 nt, Artificial Sequence
  Description of Artificial Sequence: Synthetic oligonucleotide
ccccuuccaaaaggccagu

SEQ ID NO: 2640228 - RNA, 19 nt, Artificial Sequence
  Description of Artificial Sequence: Synthetic oligonucleotide
aacuuuuaauaaucgaggc

SEQ ID NO: 2640229 - RNA, 19 nt, Artificial Sequence
  Description of Artificial Sequence: Synthetic oligonucleotide
uuagauauagagaaaacug

SEQ ID NO: 2640230 - RNA, 19 nt, Artificial Sequence
  Description of Artificial Sequence: Synthetic oligonucleotide
aacaaucuuagauauagag

SEQ ID NO: 2640231 - RNA, 19 nt, Artificial Sequence
  Description of Artificial Sequence: Synthetic oligonucleotide
uaacuuuuaauaaucgagg

SEQ ID NO: 2640232 - RNA, 19 nt, Artificial Sequence
  Description of Artificial Sequence: Synthetic oligonucleotide
aaaaguucaguauugucug

SEQ ID NO: 2640233 - RNA, 19 nt, Artificial Sequence
  Description of Artificial Sequence: Synthetic oligonucleotide
ugcaggagaaugaagaccg

SEQ ID NO: 2640234 - RNA, 19 nt, Artificial Sequence
  Description of Artificial Sequence: Synthetic oligonucleotide
ugaguaacaggaaauaacu

SEQ ID NO: 2640235 - RNA, 19 nt, Artificial Sequence
  Description of Artificial Sequence: Synthetic oligonucleotide
aauaacuuuuaauaaucga

SEQ ID NO: 2640236 - RNA, 19 nt, Artificial Sequence
  Description of Artificial Sequence: Synthetic oligonucleotide
gaaaacuggacaguaaacg

SEQ ID NO: 2640237 - RNA, 19 nt, Artificial Sequence
  Description of Artificial Sequence: Synthetic oligonucleotide
ugaggaaacaaucuuagau

SEQ ID NO: 2640238 - RNA, 19 nt, Artificial Sequence
  Description of Artificial Sequence: Synthetic oligonucleotide
auaacuuuuaauaaucgag

SEQ ID NO: 2640239 - RNA, 19 nt, Artificial Sequence
  Description of Artificial Sequence: Synthetic oligonucleotide
aaauaacuuuuaauaaucg

SEQ ID NO: 2640240 - RNA, 19 nt, Artificial Sequence
  Description of Artificial Sequence: Synthetic oligonucleotide
acugugagaacccagaaga

SEQ ID NO: 2640241 - RNA, 19 nt, Artificial Sequence
  Description of Artificial Sequence: Synthetic oligonucleotide
ugucuggcaacucagagca

SEQ ID NO: 2640242 - RNA, 19 nt, Artificial Sequence
  Description of Artificial Sequence: Synthetic oligonucleotide
uuuuaaguuuugcugagga

SEQ ID NO: 2640243 - RNA, 19 nt, Artificial Sequence
  Description of Artificial Sequence: Synthetic oligonucleotide
aaaaguacggagaacacca

SEQ ID NO: 2640244 - RNA, 19 nt, Artificial Sequence
  Description of Artificial Sequence: Synthetic oligonucleotide
auauagagaaaacuggaca

SEQ ID NO: 2640245 - RNA, 19 nt, Artificial Sequence
  Description of Artificial Sequence: Synthetic oligonucleotide
ucauaaaaguucaguauug

SEQ ID NO: 2640246 - RNA, 19 nt, Artificial Sequence
  Description of Artificial Sequence: Synthetic oligonucleotide
caaucuuagauauagagaa

SEQ ID NO: 2640247 - RNA, 19 nt, Artificial Sequence
  Description of Artificial Sequence: Synthetic oligonucleotide
aacacauuccaccaggaaa

SEQ ID NO: 2640248 - RNA, 19 nt, Artificial Sequence
  Description of Artificial Sequence: Synthetic oligonucleotide
aaagcuucuccaguguggc

SEQ ID NO: 2640249 - RNA, 19 nt, Artificial Sequence
  Description of Artificial Sequence: Synthetic oligonucleotide
aaguucaguauugucuggc

SEQ ID NO: 2640250 - RNA, 19 nt, Artificial Sequence
  Description of Artificial Sequence: Synthetic oligonucleotide
aagguggcgaagcccagcc

SEQ ID NO: 2640251 - RNA, 19 nt, Artificial Sequence
  Description of Artificial Sequence: Synthetic oligonucleotide
acgaagaucucaaaggugg

SEQ ID NO: 2640252 - RNA, 19 nt, Artificial Sequence
  Description of Artificial Sequence: Synthetic oligonucleotide
aaccggcacaaacacauuc

SEQ ID NO: 2640253 - RNA, 19 nt, Artificial Sequence
  Description of Artificial Sequence: Synthetic oligonucleotide
aaguacggagaacaccaac

SEQ ID NO: 2640254 - RNA, 19 nt, Artificial Sequence
  Description of Artificial Sequence: Synthetic oligonucleotide
aauaaucgaggcuucacuu

SEQ ID NO: 2640255 - RNA, 19 nt, Artificial Sequence
  Description of Artificial Sequence: Synthetic oligonucleotide
aguaacaggaaauaacuuu

SEQ ID NO: 2640256 - RNA, 19 nt, Artificial Sequence
  Description of Artificial Sequence: Synthetic oligonucleotide
aaacuggacaguaaacggg

SEQ ID NO: 2640257 - RNA, 19 nt, Artificial Sequence
  Description of Artificial Sequence: Synthetic oligonucleotide
acggauuucugaccaaagc

SEQ ID NO: 2640258 - RNA, 19 nt, Artificial Sequence
  Description of Artificial Sequence: Synthetic oligonucleotide
augaguaacaggaaauaac

SEQ ID NO: 2640259 - RNA, 19 nt, Artificial Sequence
  Description of Artificial Sequence: Synthetic oligonucleotide
uaauaaucgaggcuucacu

SEQ ID NO: 2640260 - RNA, 19 nt, Artificial Sequence
  Description of Artificial Sequence: Synthetic oligonucleotide
ugaggcuaagcacugugag

SEQ ID NO: 2640261 - RNA, 19 nt, Artificial Sequence
  Description of Artificial Sequence: Synthetic oligonucleotide
uaaguuuugcugaggaaac

SEQ ID NO: 2640262 - RNA, 19 nt, Artificial Sequence
  Description of Artificial Sequence: Synthetic oligonucleotide
gacgugaucaggccgaacc

SEQ ID NO: 2640263 - RNA, 19 nt, Artificial Sequence
  Description of Artificial Sequence: Synthetic oligonucleotide
ugucauaaaaguucaguau

SEQ ID NO: 2640264 - RNA, 19 nt, Artificial Sequence
  Description of Artificial Sequence: Synthetic oligonucleotide
aaaaccggcacaaacacau

SEQ ID NO: 2640265 - RNA, 19 nt, Artificial Sequence
  Description of Artificial Sequence: Synthetic oligonucleotide
aacucagagcaugaguaac

SEQ ID NO: 2640266 - RNA, 19 nt, Artificial Sequence
  Description of Artificial Sequence: Synthetic oligonucleotide
ugugagaacccagaagagg

SEQ ID NO: 2640267 - RNA, 19 nt, Artificial Sequence
  Description of Artificial Sequence: Synthetic oligonucleotide
aacuggacaguaaacgggg

SEQ ID NO: 2640268 - RNA, 19 nt, Artificial Sequence
  Description of Artificial Sequence: Synthetic oligonucleotide
acagcuagucgcuucuccc

SEQ ID NO: 2640269 - RNA, 19 nt, Artificial Sequence
  Description of Artificial Sequence: Synthetic oligonucleotide
uuggaagaggcgaacagac

SEQ ID NO: 2640270 - RNA, 19 nt, Artificial Sequence
  Description of Artificial Sequence: Synthetic oligonucleotide
caggaaauaacuuuuaaua

SEQ ID NO: 2640271 - RNA, 19 nt, Artificial Sequence
  Description of Artificial Sequence: Synthetic oligonucleotide
aggaaacaaucuuagauau

SEQ ID NO: 2640272 - RNA, 19 nt, Artificial Sequence
  Description of Artificial Sequence: Synthetic oligonucleotide
ucuuggaagaggcgaacag

SEQ ID NO: 2640273 - RNA, 19 nt, Artificial Sequence
  Description of Artificial Sequence: Synthetic oligonucleotide
auaugcaguuuccaaaugu

SEQ ID NO: 2640274 - RNA, 19 nt, Artificial Sequence
  Description of Artificial Sequence: Synthetic oligonucleotide
auugucuggcaacucagag

SEQ ID NO: 2640275 - RNA, 19 nt, Artificial Sequence
  Description of Artificial Sequence: Synthetic oligonucleotide
gugaaguaggugcugagcc

SEQ ID NO: 2640276 - RNA, 19 nt, Artificial Sequence
  Description of Artificial Sequence: Synthetic oligonucleotide
acuuuuaaguuuugcugag

SEQ ID NO: 2640277 - RNA, 19 nt, Artificial Sequence
  Description of Artificial Sequence: Synthetic oligonucleotide
aguauugucuggcaacuca

SEQ ID NO: 2640278 - RNA, 19 nt, Artificial Sequence
  Description of Artificial Sequence: Synthetic oligonucleotide
uucaguauugucuggcaac

SEQ ID NO: 2640279 - RNA, 19 nt, Artificial Sequence
  Description of Artificial Sequence: Synthetic oligonucleotide
cuaguugacgcgacaagcc

SEQ ID NO: 2640280 - RNA, 19 nt, Artificial Sequence
  Description of Artificial Sequence: Synthetic oligonucleotide
gauauagagaaaacuggac

SEQ ID NO: 2640281 - RNA, 19 nt, Artificial Sequence
  Description of Artificial Sequence: Synthetic oligonucleotide
aucucaaagguggcgaagc

SEQ ID NO: 2640282 - RNA, 19 nt, Artificial Sequence
  Description of Artificial Sequence: Synthetic oligonucleotide
gaggcgaacagacacgaug

SEQ ID NO: 2640283 - RNA, 19 nt, Artificial Sequence
  Description of Artificial Sequence: Synthetic oligonucleotide
aacaggaaauaacuuuuaa

SEQ ID NO: 2640284 - RNA, 19 nt, Artificial Sequence
  Description of Artificial Sequence: Synthetic oligonucleotide
gaaguaggugcugagcccg

SEQ ID NO: 2640285 - RNA, 19 nt, Artificial Sequence
  Description of Artificial Sequence: Synthetic oligonucleotide
agaaugaagaccggagacg

SEQ ID NO: 2640286 - RNA, 19 nt, Artificial Sequence
  Description of Artificial Sequence: Synthetic oligonucleotide
uacggagaacaccaacagg

SEQ ID NO: 2640287 - RNA, 19 nt, Artificial Sequence
  Description of Artificial Sequence: Synthetic oligonucleotide
ugagaacccagaagaggcg

SEQ ID NO: 2640288 - RNA, 19 nt, Artificial Sequence
  Description of Artificial Sequence: Synthetic oligonucleotide
caguaaacggggcacaagc

SEQ ID NO: 2640289 - RNA, 19 nt, Artificial Sequence
  Description of Artificial Sequence: Synthetic oligonucleotide
uaaacggggcacaagcaga

SEQ ID NO: 2640290 - RNA, 19 nt, Artificial Sequence
  Description of Artificial Sequence: Synthetic oligonucleotide
ggcacaaacacauuccacc

SEQ ID NO: 2640291 - RNA, 19 nt, Artificial Sequence
  Description of Artificial Sequence: Synthetic oligonucleotide
aagaccggagacgugauca

SEQ ID NO: 2640292 - RNA, 19 nt, Artificial Sequence
  Description of Artificial Sequence: Synthetic oligonucleotide
aucaggccgaaccagagcu

SEQ ID NO: 2640293 - RNA, 19 nt, Artificial Sequence
  Description of Artificial Sequence: Synthetic oligonucleotide
caaagcuucuccagugugg

SEQ ID NO: 2640294 - RNA, 19 nt, Artificial Sequence
  Description of Artificial Sequence: Synthetic oligonucleotide
guaaacggggcacaagcag

SEQ ID NO: 2640295 - RNA, 19 nt, Artificial Sequence
  Description of Artificial Sequence: Synthetic oligonucleotide
gaggaaacaaucuuagaua

SEQ ID NO: 2640296 - RNA, 19 nt, Artificial Sequence
  Description of Artificial Sequence: Synthetic oligonucleotide
agaggcgcagcacagcuag

SEQ ID NO: 2640297 - RNA, 19 nt, Artificial Sequence
  Description of Artificial Sequence: Synthetic oligonucleotide
uauaugcaguuuccaaaug

SEQ ID NO: 2640298 - RNA, 19 nt, Artificial Sequence
  Description of Artificial Sequence: Synthetic oligonucleotide
gagaaaacuggacaguaaa

SEQ ID NO: 2640299 - RNA, 19 nt, Artificial Sequence
  Description of Artificial Sequence: Synthetic oligonucleotide
gaagaucucaaagguggcg

SEQ ID NO: 2640300 - RNA, 19 nt, Artificial Sequence
  Description of Artificial Sequence: Synthetic oligonucleotide
ugcaguuuccaaaugucau

SEQ ID NO: 2640301 - RNA, 19 nt, Artificial Sequence
  Description of Artificial Sequence: Synthetic oligonucleotide
ucgcagugccaaaaguacg

SEQ ID NO: 2640302 - RNA, 19 nt, Artificial Sequence
  Description of Artificial Sequence: Synthetic oligonucleotide
uaguugacgcgacaagccc

SEQ ID NO: 2640303 - RNA, 19 nt, Artificial Sequence
  Description of Artificial Sequence: Synthetic oligonucleotide
cuaagcacugugagaaccc

SEQ ID NO: 2640304 - RNA, 19 nt, Artificial Sequence
  Description of Artificial Sequence: Synthetic oligonucleotide
uugucuggcaacucagagc

SEQ ID NO: 2640305 - RNA, 19 nt, Artificial Sequence
  Description of Artificial Sequence: Synthetic oligonucleotide
aagccguccacucgcagug

SEQ ID NO: 2640306 - RNA, 19 nt, Artificial Sequence
  Description of Artificial Sequence: Synthetic oligonucleotide
uguggcgccaaguaggguc

SEQ ID NO: 2640307 - RNA, 19 nt, Artificial Sequence
  Description of Artificial Sequence: Synthetic oligonucleotide
ugaaguaggugcugagccc

SEQ ID NO: 2640308 - RNA, 19 nt, Artificial Sequence
  Description of Artificial Sequence: Synthetic oligonucleotide
caaaaguacggagaacacc

SEQ ID NO: 2640309 - RNA, 19 nt, Artificial Sequence
  Description of Artificial Sequence: Synthetic oligonucleotide
acaaucuuagauauagaga

SEQ ID NO: 2640310 - RNA, 19 nt, Artificial Sequence
  Description of Artificial Sequence: Synthetic oligonucleotide
acggggcacaagcagacac

SEQ ID NO: 2640311 - RNA, 19 nt, Artificial Sequence
  Description of Artificial Sequence: Synthetic oligonucleotide
aaacggggcacaagcagac

SEQ ID NO: 2640312 - RNA, 19 nt, Artificial Sequence
  Description of Artificial Sequence: Synthetic oligonucleotide
ugaucaggccgaaccagag

SEQ ID NO: 2640313 - RNA, 19 nt, Artificial Sequence
  Description of Artificial Sequence: Synthetic oligonucleotide
uuuaaguuuugcugaggaa

SEQ ID NO: 2640314 - RNA, 19 nt, Artificial Sequence
  Description of Artificial Sequence: Synthetic oligonucleotide
guacggagaacaccaacag

SEQ ID NO: 2640315 - RNA, 19 nt, Artificial Sequence
  Description of Artificial Sequence: Synthetic oligonucleotide
cucgcagugccaaaaguac

SEQ ID NO: 2640316 - RNA, 19 nt, Artificial Sequence
  Description of Artificial Sequence: Synthetic oligonucleotide
uuuaauaaucgaggcuuca

SEQ ID NO: 2640317 - RNA, 19 nt, Artificial Sequence
  Description of Artificial Sequence: Synthetic oligonucleotide
ggaagaggcgaacagacac

SEQ ID NO: 2640318 - RNA, 19 nt, Artificial Sequence
  Description of Artificial Sequence: Synthetic oligonucleotide
ucuggcaacucagagcaug

SEQ ID NO: 2640319 - RNA, 19 nt, Artificial Sequence
  Description of Artificial Sequence: Synthetic oligonucleotide
gaccaaagcuucuccagug

SEQ ID NO: 2640320 - RNA, 19 nt, Artificial Sequence
  Description of Artificial Sequence: Synthetic oligonucleotide
ugcgcagugcuccauuccc

SEQ ID NO: 2640321 - RNA, 19 nt, Artificial Sequence
  Description of Artificial Sequence: Synthetic oligonucleotide
gaagaggcgaacagacacg

SEQ ID NO: 2640322 - RNA, 19 nt, Artificial Sequence
  Description of Artificial Sequence: Synthetic oligonucleotide
gacuggaugacccagcacu

SEQ ID NO: 2640323 - RNA, 19 nt, Artificial Sequence
  Description of Artificial Sequence: Synthetic oligonucleotide
agacacggauuucugacca

SEQ ID NO: 2640324 - RNA, 19 nt, Artificial Sequence
  Description of Artificial Sequence: Synthetic oligonucleotide
agcagcaucucaaagacaa

SEQ ID NO: 2640325 - RNA, 19 nt, Artificial Sequence
  Description of Artificial Sequence: Synthetic oligonucleotide
cugaccaaagcuucuccag

SEQ ID NO: 2640326 - RNA, 19 nt, Artificial Sequence
  Description of Artificial Sequence: Synthetic oligonucleotide
ugcugaggaaacaaucuua

SEQ ID NO: 2640327 - RNA, 19 nt, Artificial Sequence
  Description of Artificial Sequence: Synthetic oligonucleotide
ugacccagcacuccagcug

SEQ ID NO: 2640328 - RNA, 19 nt, Artificial Sequence
  Description of Artificial Sequence: Synthetic oligonucleotide
aaacacauuccaccaggaa

SEQ ID NO: 2640329 - RNA, 19 nt, Artificial Sequence
  Description of Artificial Sequence: Synthetic oligonucleotide
gugcacgaagaucucaaag

SEQ ID NO: 2640330 - RNA, 19 nt, Artificial Sequence
  Description of Artificial Sequence: Synthetic oligonucleotide
acagacacgauggugguga

SEQ ID NO: 2640331 - RNA, 19 nt, Artificial Sequence
  Description of Artificial Sequence: Synthetic oligonucleotide
ucucaaagguggcgaagcc

SEQ ID NO: 2640332 - RNA, 19 nt, Artificial Sequence
  Description of Artificial Sequence: Synthetic oligonucleotide
uaaucgaggcuucacuuuu

SEQ ID NO: 2640333 - RNA, 19 nt, Artificial Sequence
  Description of Artificial Sequence: Synthetic oligonucleotide
cgaacagacacgauggugg

SEQ ID NO: 2640334 - RNA, 19 nt, Artificial Sequence
  Description of Artificial Sequence: Synthetic oligonucleotide
uauugucuggcaacucaga

SEQ ID NO: 2640335 - RNA, 19 nt, Artificial Sequence
  Description of Artificial Sequence: Synthetic oligonucleotide
aggcgaacagacacgaugg

SEQ ID NO: 2640336 - RNA, 19 nt, Artificial Sequence
  Description of Artificial Sequence: Synthetic oligonucleotide
accggcacaaacacauucc

SEQ ID NO: 2640337 - RNA, 19 nt, Artificial Sequence
  Description of Artificial Sequence: Synthetic oligonucleotide
uaggugcugagcccgucgg

SEQ ID NO: 2640338 - RNA, 19 nt, Artificial Sequence
  Description of Artificial Sequence: Synthetic oligonucleotide
ucaguauugucuggcaacu

SEQ ID NO: 2640339 - RNA, 19 nt, Artificial Sequence
  Description of Artificial Sequence: Synthetic oligonucleotide
aguacggagaacaccaaca

SEQ ID NO: 2640340 - RNA, 19 nt, Artificial Sequence
  Description of Artificial Sequence: Synthetic oligonucleotide
cagugcuccauucccagcc

SEQ ID NO: 2640341 - RNA, 19 nt, Artificial Sequence
  Description of Artificial Sequence: Synthetic oligonucleotide
agugccaaaaguacggaga

SEQ ID NO: 2640342 - RNA, 19 nt, Artificial Sequence
  Description of Artificial Sequence: Synthetic oligonucleotide
agcuagucgcuucuccccg

SEQ ID NO: 2640343 - RNA, 19 nt, Artificial Sequence
  Description of Artificial Sequence: Synthetic oligonucleotide
aagaggcgaacagacacga

SEQ ID NO: 2640344 - RNA, 19 nt, Artificial Sequence
  Description of Artificial Sequence: Synthetic oligonucleotide
uggaugacccagcacucca

SEQ ID NO: 2640345 - RNA, 19 nt, Artificial Sequence
  Description of Artificial Sequence: Synthetic oligonucleotide
ucgagucugcuccacuagc

SEQ ID NO: 2640346 - RNA, 19 nt, Artificial Sequence
  Description of Artificial Sequence: Synthetic oligonucleotide
accggagacgugaucaggc

SEQ ID NO: 2640347 - RNA, 19 nt, Artificial Sequence
  Description of Artificial Sequence: Synthetic oligonucleotide
cuuuuaaguuuugcugagg

SEQ ID NO: 2640348 - RNA, 19 nt, Artificial Sequence
  Description of Artificial Sequence: Synthetic oligonucleotide
ugcacgaggcuaguugacg

SEQ ID NO: 2640349 - RNA, 19 nt, Artificial Sequence
  Description of Artificial Sequence: Synthetic oligonucleotide
gacccagcacuccagcugc

SEQ ID NO: 2640350 - RNA, 19 nt, Artificial Sequence
  Description of Artificial Sequence: Synthetic oligonucleotide
aggcuaagcacugugagaa

SEQ ID NO: 2640351 - RNA, 19 nt, Artificial Sequence
  Description of Artificial Sequence: Synthetic oligonucleotide
augaagaccggagacguga

SEQ ID NO: 2640352 - RNA, 19 nt, Artificial Sequence
  Description of Artificial Sequence: Synthetic oligonucleotide
ucccgcagcagaauaacau

SEQ ID NO: 2640353 - RNA, 19 nt, Artificial Sequence
  Description of Artificial Sequence: Synthetic oligonucleotide
cuuagauauagagaaaacu

SEQ ID NO: 2640354 - RNA, 19 nt, Artificial Sequence
  Description of Artificial Sequence: Synthetic oligonucleotide
uccccgucuuggaagaggc

SEQ ID NO: 2640355 - RNA, 19 nt, Artificial Sequence
  Description of Artificial Sequence: Synthetic oligonucleotide
gaugacccagcacuccagc

SEQ ID NO: 2640356 - RNA, 19 nt, Artificial Sequence
  Description of Artificial Sequence: Synthetic oligonucleotide
aggagaaugaagaccggag

SEQ ID NO: 2640357 - RNA, 19 nt, Artificial Sequence
  Description of Artificial Sequence: Synthetic oligonucleotide
aguucaguauugucuggca

SEQ ID NO: 2640358 - RNA, 19 nt, Artificial Sequence
  Description of Artificial Sequence: Synthetic oligonucleotide
uggacuggaugacccagca

SEQ ID NO: 2640359 - RNA, 19 nt, Artificial Sequence
  Description of Artificial Sequence: Synthetic oligonucleotide
guauugucuggcaacucag

SEQ ID NO: 2640360 - RNA, 19 nt, Artificial Sequence
  Description of Artificial Sequence: Synthetic oligonucleotide
agagcucucgagucugcuc

SEQ ID NO: 2640361 - RNA, 19 nt, Artificial Sequence
  Description of Artificial Sequence: Synthetic oligonucleotide
ucuggacuggaugacccag

SEQ ID NO: 2640362 - RNA, 19 nt, Artificial Sequence
  Description of Artificial Sequence: Synthetic oligonucleotide
aacggcccggggccaagcc

SEQ ID NO: 2640363 - RNA, 19 nt, Artificial Sequence
  Description of Artificial Sequence: Synthetic oligonucleotide
aguugacgcgacaagcccg

SEQ ID NO: 2640364 - RNA, 19 nt, Artificial Sequence
  Description of Artificial Sequence: Synthetic oligonucleotide
cuuuuaauaaucgaggcuu

SEQ ID NO: 2640365 - RNA, 19 nt, Artificial Sequence
  Description of Artificial Sequence: Synthetic oligonucleotide
guagggucuggacuggaug

SEQ ID NO: 2640366 - RNA, 19 nt, Artificial Sequence
  Description of Artificial Sequence: Synthetic oligonucleotide
uggacaguaaacggggcac

SEQ ID NO: 2640367 - RNA, 19 nt, Artificial Sequence
  Description of Artificial Sequence: Synthetic oligonucleotide
auaaucgaggcuucacuuu

SEQ ID NO: 2640368 - RNA, 19 nt, Artificial Sequence
  Description of Artificial Sequence: Synthetic oligonucleotide
aaccagagcucucgagucu

SEQ ID NO: 2640369 - RNA, 19 nt, Artificial Sequence
  Description of Artificial Sequence: Synthetic oligonucleotide
caagcccggaucaugagca

SEQ ID NO: 2640370 - RNA, 19 nt, Artificial Sequence
  Description of Artificial Sequence: Synthetic oligonucleotide
cagacacggauuucugacc

SEQ ID NO: 2640371 - RNA, 19 nt, Artificial Sequence
  Description of Artificial Sequence: Synthetic oligonucleotide
cacugugagaacccagaag

SEQ ID NO: 2640372 - RNA, 19 nt, Artificial Sequence
  Description of Artificial Sequence: Synthetic oligonucleotide
gacgcgacaagcccggauc

SEQ ID NO: 2640373 - RNA, 19 nt, Artificial Sequence
  Description of Artificial Sequence: Synthetic oligonucleotide
cugugagaacccagaagag

SEQ ID NO: 2640374 - RNA, 19 nt, Artificial Sequence
  Description of Artificial Sequence: Synthetic oligonucleotide
aaacaaucuuagauauaga

SEQ ID NO: 2640375 - RNA, 19 nt, Artificial Sequence
  Description of Artificial Sequence: Synthetic oligonucleotide
gagaacccagaagaggcgc

SEQ ID NO: 2640376 - RNA, 19 nt, Artificial Sequence
  Description of Artificial Sequence: Synthetic oligonucleotide
gaucaggccgaaccagagc

SEQ ID NO: 2640377 - RNA, 19 nt, Artificial Sequence
  Description of Artificial Sequence: Synthetic oligonucleotide
guaggugcugagcccgucg

SEQ ID NO: 2640378 - RNA, 19 nt, Artificial Sequence
  Description of Artificial Sequence: Synthetic oligonucleotide
aaucuuagauauagagaaa

SEQ ID NO: 2640379 - RNA, 19 nt, Artificial Sequence
  Description of Artificial Sequence: Synthetic oligonucleotide
ggaaauaacuuuuaauaau

SEQ ID NO: 2640380 - RNA, 19 nt, Artificial Sequence
  Description of Artificial Sequence: Synthetic oligonucleotide
uggaagaggcgaacagaca

SEQ ID NO: 2640381 - RNA, 19 nt, Artificial Sequence
  Description of Artificial Sequence: Synthetic oligonucleotide
uccagcugcgcagugcucc

SEQ ID NO: 2640382 - RNA, 19 nt, Artificial Sequence
  Description of Artificial Sequence: Synthetic oligonucleotide
uggcacagcagcaucucaa

SEQ ID NO: 2640383 - RNA, 19 nt, Artificial Sequence
  Description of Artificial Sequence: Synthetic oligonucleotide
cucagagcaugaguaacag

SEQ ID NO: 2640384 - RNA, 19 nt, Artificial Sequence
  Description of Artificial Sequence: Synthetic oligonucleotide
aaguuuugcugaggaaaca

SEQ ID NO: 2640385 - RNA, 19 nt, Artificial Sequence
  Description of Artificial Sequence: Synthetic oligonucleotide
cauucccagccccugcacg

SEQ ID NO: 2640386 - RNA, 19 nt, Artificial Sequence
  Description of Artificial Sequence: Synthetic oligonucleotide
gcugaggaaacaaucuuag

SEQ ID NO: 2640387 - RNA, 19 nt, Artificial Sequence
  Description of Artificial Sequence: Synthetic oligonucleotide
ggagaacaccaacagggcc

SEQ ID NO: 2640388 - RNA, 19 nt, Artificial Sequence
  Description of Artificial Sequence: Synthetic oligonucleotide
gaucucaaagguggcgaag

SEQ ID NO: 2640389 - RNA, 19 nt, Artificial Sequence
  Description of Artificial Sequence: Synthetic oligonucleotide
aacuugaggcuaagcacug

SEQ ID NO: 2640390 - RNA, 19 nt, Artificial Sequence
  Description of Artificial Sequence: Synthetic oligonucleotide
guugacgcgacaagcccgg

SEQ ID NO: 2640391 - RNA, 19 nt, Artificial Sequence
  Description of Artificial Sequence: Synthetic oligonucleotide
gacacgaugguggugaagu

SEQ ID NO: 2640392 - RNA, 19 nt, Artificial Sequence
  Description of Artificial Sequence: Synthetic oligonucleotide
cagugccaaaaguacggag

SEQ ID NO: 2640393 - RNA, 19 nt, Artificial Sequence
  Description of Artificial Sequence: Synthetic oligonucleotide
cacgaggcuaguugacgcg

SEQ ID NO: 2640394 - RNA, 19 nt, Artificial Sequence
  Description of Artificial Sequence: Synthetic oligonucleotide
agcaucucaaagacaaacu

SEQ ID NO: 2640395 - RNA, 19 nt, Artificial Sequence
  Description of Artificial Sequence: Synthetic oligonucleotide
aagacaaacuugaggcuaa

SEQ ID NO: 2640396 - RNA, 19 nt, Artificial Sequence
  Description of Artificial Sequence: Synthetic oligonucleotide
cacggauuucugaccaaag

SEQ ID NO: 2640397 - RNA, 19 nt, Artificial Sequence
  Description of Artificial Sequence: Synthetic oligonucleotide
gccaaaaguacggagaaca

SEQ ID NO: 2640398 - RNA, 19 nt, Artificial Sequence
  Description of Artificial Sequence: Synthetic oligonucleotide
agcagacacggauuucuga

SEQ ID NO: 2640399 - RNA, 19 nt, Artificial Sequence
  Description of Artificial Sequence: Synthetic oligonucleotide
agcacagcuagucgcuucu

SEQ ID NO: 2640400 - RNA, 19 nt, Artificial Sequence
  Description of Artificial Sequence: Synthetic oligonucleotide
cagcuagucgcuucucccc

SEQ ID NO: 2640401 - RNA, 19 nt, Artificial Sequence
  Description of Artificial Sequence: Synthetic oligonucleotide
ucgaggcuucacuuuuaag

SEQ ID NO: 2640402 - RNA, 19 nt, Artificial Sequence
  Description of Artificial Sequence: Synthetic oligonucleotide
gaggcuaagcacugugaga

SEQ ID NO: 2640403 - RNA, 19 nt, Artificial Sequence
  Description of Artificial Sequence: Synthetic oligonucleotide
cacagcuagucgcuucucc

SEQ ID NO: 2640404 - RNA, 19 nt, Artificial Sequence
  Description of Artificial Sequence: Synthetic oligonucleotide
caccaacagggccagcagg

SEQ ID NO: 2640405 - RNA, 19 nt, Artificial Sequence
  Description of Artificial Sequence: Synthetic oligonucleotide
gcagacacggauuucugac

SEQ ID NO: 2640406 - RNA, 19 nt, Artificial Sequence
  Description of Artificial Sequence: Synthetic oligonucleotide
uuucugaccaaagcuucuc

SEQ ID NO: 2640407 - RNA, 19 nt, Artificial Sequence
  Description of Artificial Sequence: Synthetic oligonucleotide
gacaagcccggaucaugag

SEQ ID NO: 2640408 - RNA, 19 nt, Artificial Sequence
  Description of Artificial Sequence: Synthetic oligonucleotide
uaagcacugugagaaccca

SEQ ID NO: 2640409 - RNA, 19 nt, Artificial Sequence
  Description of Artificial Sequence: Synthetic oligonucleotide
aguguggcgccaaguaggg

SEQ ID NO: 2640410 - RNA, 19 nt, Artificial Sequence
  Description of Artificial Sequence: Synthetic oligonucleotide
ucucgagucugcuccacua

SEQ ID NO: 2640411 - RNA, 19 nt, Artificial Sequence
  Description of Artificial Sequence: Synthetic oligonucleotide
gcuaguugacgcgacaagc

SEQ ID NO: 2640412 - RNA, 19 nt, Artificial Sequence
  Description of Artificial Sequence: Synthetic oligonucleotide
aggugcugagcccgucggc

SEQ ID NO: 2640413 - RNA, 19 nt, Artificial Sequence
  Description of Artificial Sequence: Synthetic oligonucleotide
ggagaaugaagaccggaga

SEQ ID NO: 2640414 - RNA, 19 nt, Artificial Sequence
  Description of Artificial Sequence: Synthetic oligonucleotide
acuggaugacccagcacuc

SEQ ID NO: 2640415 - RNA, 19 nt, Artificial Sequence
  Description of Artificial Sequence: Synthetic oligonucleotide
aaugaagaccggagacgug

SEQ ID NO: 2640416 - RNA, 19 nt, Artificial Sequence
  Description of Artificial Sequence: Synthetic oligonucleotide
acgugaucaggccgaacca

SEQ ID NO: 2640417 - RNA, 19 nt, Artificial Sequence
  Description of Artificial Sequence: Synthetic oligonucleotide
agaccggagacgugaucag

SEQ ID NO: 2640418 - RNA, 19 nt, Artificial Sequence
  Description of Artificial Sequence: Synthetic oligonucleotide
cucgagucugcuccacuag

SEQ ID NO: 2640419 - RNA, 19 nt, Artificial Sequence
  Description of Artificial Sequence: Synthetic oligonucleotide
aagcacugugagaacccag

SEQ ID NO: 2640420 - RNA, 19 nt, Artificial Sequence
  Description of Artificial Sequence: Synthetic oligonucleotide
gaacccagaagaggcgcag

SEQ ID NO: 2640421 - RNA, 19 nt, Artificial Sequence
  Description of Artificial Sequence: Synthetic oligonucleotide
acccagaagaggcgcagca

SEQ ID NO: 2640422 - RNA, 19 nt, Artificial Sequence
  Description of Artificial Sequence: Synthetic oligonucleotide
aguaaacggggcacaagca

SEQ ID NO: 2640423 - RNA, 19 nt, Artificial Sequence
  Description of Artificial Sequence: Synthetic oligonucleotide
augcaguuuccaaauguca

SEQ ID NO: 2640424 - RNA, 19 nt, Artificial Sequence
  Description of Artificial Sequence: Synthetic oligonucleotide
cuggacuggaugacccagc

SEQ ID NO: 2640425 - RNA, 19 nt, Artificial Sequence
  Description of Artificial Sequence: Synthetic oligonucleotide
agaucucaaagguggcgaa

SEQ ID NO: 2640426 - RNA, 19 nt, Artificial Sequence
  Description of Artificial Sequence: Synthetic oligonucleotide
accaggaaacggcccgggg

SEQ ID NO: 2640427 - RNA, 19 nt, Artificial Sequence
  Description of Artificial Sequence: Synthetic oligonucleotide
guaacaggaaauaacuuuu

SEQ ID NO: 2640428 - RNA, 19 nt, Artificial Sequence
  Description of Artificial Sequence: Synthetic oligonucleotide
gugccaaaaguacggagaa

SEQ ID NO: 2640429 - RNA, 19 nt, Artificial Sequence
  Description of Artificial Sequence: Synthetic oligonucleotide
acaguaaacggggcacaag

SEQ ID NO: 2640430 - RNA, 19 nt, Artificial Sequence
  Description of Artificial Sequence: Synthetic oligonucleotide
aaacggcccggggccaagc

SEQ ID NO: 2640431 - RNA, 19 nt, Artificial Sequence
  Description of Artificial Sequence: Synthetic oligonucleotide
guucaguauugucuggcaa

SEQ ID NO: 2640432 - RNA, 19 nt, Artificial Sequence
  Description of Artificial Sequence: Synthetic oligonucleotide
caugaguaacaggaaauaa

SEQ ID NO: 2640433 - RNA, 19 nt, Artificial Sequence
  Description of Artificial Sequence: Synthetic oligonucleotide
aggcgcagcacagcuaguc

SEQ ID NO: 2640434 - RNA, 19 nt, Artificial Sequence
  Description of Artificial Sequence: Synthetic oligonucleotide
ugaagaccggagacgugau

SEQ ID NO: 2640435 - RNA, 19 nt, Artificial Sequence
  Description of Artificial Sequence: Synthetic oligonucleotide
gaccggagacgugaucagg

SEQ ID NO: 2640436 - RNA, 19 nt, Artificial Sequence
  Description of Artificial Sequence: Synthetic oligonucleotide
cuuggaagaggcgaacaga

SEQ ID NO: 2640437 - RNA, 19 nt, Artificial Sequence
  Description of Artificial Sequence: Synthetic oligonucleotide
augacccagcacuccagcu

SEQ ID NO: 2640438 - RNA, 19 nt, Artificial Sequence
  Description of Artificial Sequence: Synthetic oligonucleotide
ugcuccauucccagccccu

SEQ ID NO: 2640439 - RNA, 19 nt, Artificial Sequence
  Description of Artificial Sequence: Synthetic oligonucleotide
gguggcgaagcccagccac

SEQ ID NO: 2640440 - RNA, 19 nt, Artificial Sequence
  Description of Artificial Sequence: Synthetic oligonucleotide
aagcagacacggauuucug

SEQ ID NO: 2640441 - RNA, 19 nt, Artificial Sequence
  Description of Artificial Sequence: Synthetic oligonucleotide
cagcacuccagcugcgcag

SEQ ID NO: 2640442 - RNA, 19 nt, Artificial Sequence
  Description of Artificial Sequence: Synthetic oligonucleotide
aucgaggcuucacuuuuaa

SEQ ID NO: 2640443 - RNA, 19 nt, Artificial Sequence
  Description of Artificial Sequence: Synthetic oligonucleotide
ggugcugagcccgucggcg

SEQ ID NO: 2640444 - RNA, 19 nt, Artificial Sequence
  Description of Artificial Sequence: Synthetic oligonucleotide
cgcagugccaaaaguacgg

SEQ ID NO: 2640445 - RNA, 19 nt, Artificial Sequence
  Description of Artificial Sequence: Synthetic oligonucleotide
cuggacaguaaacggggca

SEQ ID NO: 2640446 - RNA, 19 nt, Artificial Sequence
  Description of Artificial Sequence: Synthetic oligonucleotide
aggcuucacuuuuaaguuu

SEQ ID NO: 2640447 - RNA, 19 nt, Artificial Sequence
  Description of Artificial Sequence: Synthetic oligonucleotide
ggugaaguaggugcugagc

SEQ ID NO: 2640448 - RNA, 19 nt, Artificial Sequence
  Description of Artificial Sequence: Synthetic oligonucleotide
caaguagggucuggacugg

SEQ ID NO: 2640449 - RNA, 19 nt, Artificial Sequence
  Description of Artificial Sequence: Synthetic oligonucleotide
gagcagcugcaggagaaug

SEQ ID NO: 2640450 - RNA, 19 nt, Artificial Sequence
  Description of Artificial Sequence: Synthetic oligonucleotide
ugcugagcccgucggcggc

SEQ ID NO: 2640451 - RNA, 19 nt, Artificial Sequence
  Description of Artificial Sequence: Synthetic oligonucleotide
uccacucgcagugccaaaa

SEQ ID NO: 2640452 - RNA, 19 nt, Artificial Sequence
  Description of Artificial Sequence: Synthetic oligonucleotide
agagaaaacuggacaguaa

SEQ ID NO: 2640453 - RNA, 19 nt, Artificial Sequence
  Description of Artificial Sequence: Synthetic oligonucleotide
acucgcagugccaaaagua

SEQ ID NO: 2640454 - RNA, 19 nt, Artificial Sequence
  Description of Artificial Sequence: Synthetic oligonucleotide
ccaaaaguacggagaacac

SEQ ID NO: 2640455 - RNA, 19 nt, Artificial Sequence
  Description of Artificial Sequence: Synthetic oligonucleotide
aaaguacggagaacaccaa

SEQ ID NO: 2640456 - RNA, 19 nt, Artificial Sequence
  Description of Artificial Sequence: Synthetic oligonucleotide
cugaggaaacaaucuuaga

SEQ ID NO: 2640457 - RNA, 19 nt, Artificial Sequence
  Description of Artificial Sequence: Synthetic oligonucleotide
caaagacaaacuugaggcu

SEQ ID NO: 2640458 - RNA, 19 nt, Artificial Sequence
  Description of Artificial Sequence: Synthetic oligonucleotide
gcacgaggcuaguugacgc

SEQ ID NO: 2640459 - RNA, 19 nt, Artificial Sequence
  Description of Artificial Sequence: Synthetic oligonucleotide
gcaacucagagcaugagua

SEQ ID NO: 2640460 - RNA, 19 nt, Artificial Sequence
  Description of Artificial Sequence: Synthetic oligonucleotide
caaagguggcgaagcccag

SEQ ID NO: 2640461 - RNA, 19 nt, Artificial Sequence
  Description of Artificial Sequence: Synthetic oligonucleotide
ggcuaguugacgcgacaag

SEQ ID NO: 2640462 - RNA, 19 nt, Artificial Sequence
  Description of Artificial Sequence: Synthetic oligonucleotide
cuggaugacccagcacucc

SEQ ID NO: 2640463 - RNA, 19 nt, Artificial Sequence
  Description of Artificial Sequence: Synthetic oligonucleotide
uggcaacucagagcaugag

SEQ ID NO: 2640464 - RNA, 19 nt, Artificial Sequence
  Description of Artificial Sequence: Synthetic oligonucleotide
cauaaaaguucaguauugu

SEQ ID NO: 2640465 - RNA, 19 nt, Artificial Sequence
  Description of Artificial Sequence: Synthetic oligonucleotide
gaagaccggagacgugauc

SEQ ID NO: 2640466 - RNA, 19 nt, Artificial Sequence
  Description of Artificial Sequence: Synthetic oligonucleotide
acgcgacaagcccggauca

SEQ ID NO: 2640467 - RNA, 19 nt, Artificial Sequence
  Description of Artificial Sequence: Synthetic oligonucleotide
ccaggaaacggcccggggc

SEQ ID NO: 2640468 - RNA, 19 nt, Artificial Sequence
  Description of Artificial Sequence: Synthetic oligonucleotide
ucaggccgaaccagagcuc

SEQ ID NO: 2640469 - RNA, 19 nt, Artificial Sequence
  Description of Artificial Sequence: Synthetic oligonucleotide
agacaaacuugaggcuaag

SEQ ID NO: 2640470 - RNA, 19 nt, Artificial Sequence
  Description of Artificial Sequence: Synthetic oligonucleotide
ugacgcgacaagcccggau

SEQ ID NO: 2640471 - RNA, 19 nt, Artificial Sequence
  Description of Artificial Sequence: Synthetic oligonucleotide
cuggcaacucagagcauga

SEQ ID NO: 2640472 - RNA, 19 nt, Artificial Sequence
  Description of Artificial Sequence: Synthetic oligonucleotide
cugcgcagugcuccauucc

SEQ ID NO: 2640473 - RNA, 19 nt, Artificial Sequence
  Description of Artificial Sequence: Synthetic oligonucleotide
ugccaaaaguacggagaac

SEQ ID NO: 2640474 - RNA, 19 nt, Artificial Sequence
  Description of Artificial Sequence: Synthetic oligonucleotide
gaggcuaguugacgcgaca

SEQ ID NO: 2640475 - RNA, 19 nt, Artificial Sequence
  Description of Artificial Sequence: Synthetic oligonucleotide
agagcaugaguaacaggaa

SEQ ID NO: 2640476 - RNA, 19 nt, Artificial Sequence
  Description of Artificial Sequence: Synthetic oligonucleotide
aguaggugcugagcccguc

SEQ ID NO: 2640477 - RNA, 19 nt, Artificial Sequence
  Description of Artificial Sequence: Synthetic oligonucleotide
acacggauuucugaccaaa

SEQ ID NO: 2640478 - RNA, 19 nt, Artificial Sequence
  Description of Artificial Sequence: Synthetic oligonucleotide
cugcacgaggcuaguugac

SEQ ID NO: 2640479 - RNA, 19 nt, Artificial Sequence
  Description of Artificial Sequence: Synthetic oligonucleotide
ggccaagccguccacucgc

SEQ ID NO: 2640480 - RNA, 19 nt, Artificial Sequence
  Description of Artificial Sequence: Synthetic oligonucleotide
caagcagacacggauuucu

SEQ ID NO: 2640481 - RNA, 19 nt, Artificial Sequence
  Description of Artificial Sequence: Synthetic oligonucleotide
aaguagggucuggacugga

SEQ ID NO: 2640482 - RNA, 19 nt, Artificial Sequence
  Description of Artificial Sequence: Synthetic oligonucleotide
ccaaagcuucuccagugug

SEQ ID NO: 2640483 - RNA, 19 nt, Artificial Sequence
  Description of Artificial Sequence: Synthetic oligonucleotide
ggcacaagcagacacggau

SEQ ID NO: 2640484 - RNA, 19 nt, Artificial Sequence
  Description of Artificial Sequence: Synthetic oligonucleotide
gacaguaaacggggcacaa

SEQ ID NO: 2640485 - RNA, 19 nt, Artificial Sequence
  Description of Artificial Sequence: Synthetic oligonucleotide
acgaggcuaguugacgcga

SEQ ID NO: 2640486 - RNA, 19 nt, Artificial Sequence
  Description of Artificial Sequence: Synthetic oligonucleotide
uggcgaagcccagccacug

SEQ ID NO: 2640487 - RNA, 19 nt, Artificial Sequence
  Description of Artificial Sequence: Synthetic oligonucleotide
aggcuaguugacgcgacaa

SEQ ID NO: 2640488 - RNA, 19 nt, Artificial Sequence
  Description of Artificial Sequence: Synthetic oligonucleotide
gucuuggaagaggcgaaca

SEQ ID NO: 2640489 - RNA, 19 nt, Artificial Sequence
  Description of Artificial Sequence: Synthetic oligonucleotide
agcccagccacugcaccag

SEQ ID NO: 2640490 - RNA, 19 nt, Artificial Sequence
  Description of Artificial Sequence: Synthetic oligonucleotide
aaucgaggcuucacuuuua

SEQ ID NO: 2640491 - RNA, 19 nt, Artificial Sequence
  Description of Artificial Sequence: Synthetic oligonucleotide
agacacgaugguggugaag

SEQ ID NO: 2640492 - RNA, 19 nt, Artificial Sequence
  Description of Artificial Sequence: Synthetic oligonucleotide
gugaucaggccgaaccaga

SEQ ID NO: 2640493 - RNA, 19 nt, Artificial Sequence
  Description of Artificial Sequence: Synthetic oligonucleotide
gcgcagcacagcuagucgc

SEQ ID NO: 2640494 - RNA, 19 nt, Artificial Sequence
  Description of Artificial Sequence: Synthetic oligonucleotide
cagcacagcuagucgcuuc

SEQ ID NO: 2640495 - RNA, 19 nt, Artificial Sequence
  Description of Artificial Sequence: Synthetic oligonucleotide
ggccgaaccagagcucucg

SEQ ID NO: 2640496 - RNA, 19 nt, Artificial Sequence
  Description of Artificial Sequence: Synthetic oligonucleotide
aggugcacgaagaucucaa

SEQ ID NO: 2640497 - RNA, 19 nt, Artificial Sequence
  Description of Artificial Sequence: Synthetic oligonucleotide
cuagucgcuucuccccguc

SEQ ID NO: 2640498 - RNA, 19 nt, Artificial Sequence
  Description of Artificial Sequence: Synthetic oligonucleotide
ggagacgugaucaggccga

SEQ ID NO: 2640499 - RNA, 19 nt, Artificial Sequence
  Description of Artificial Sequence: Synthetic oligonucleotide
aacggggcacaagcagaca

SEQ ID NO: 2640500 - RNA, 19 nt, Artificial Sequence
  Description of Artificial Sequence: Synthetic oligonucleotide
gcaguuuccaaaugucaua

SEQ ID NO: 2640501 - RNA, 19 nt, Artificial Sequence
  Description of Artificial Sequence: Synthetic oligonucleotide
cgaggcuucacuuuuaagu

SEQ ID NO: 2640502 - RNA, 19 nt, Artificial Sequence
  Description of Artificial Sequence: Synthetic oligonucleotide
gcgaacagacacgauggug

SEQ ID NO: 2640503 - RNA, 19 nt, Artificial Sequence
  Description of Artificial Sequence: Synthetic oligonucleotide
agacgugaucaggccgaac

SEQ ID NO: 2640504 - RNA, 19 nt, Artificial Sequence
  Description of Artificial Sequence: Synthetic oligonucleotide
ugagcagcugcaggagaau

SEQ ID NO: 2640505 - RNA, 19 nt, Artificial Sequence
  Description of Artificial Sequence: Synthetic oligonucleotide
gaguaacaggaaauaacuu

SEQ ID NO: 2640506 - RNA, 19 nt, Artificial Sequence
  Description of Artificial Sequence: Synthetic oligonucleotide
agcucucgagucugcucca

SEQ ID NO: 2640507 - RNA, 19 nt, Artificial Sequence
  Description of Artificial Sequence: Synthetic oligonucleotide
agcacuccagcugcgcagu

SEQ ID NO: 2640508 - RNA, 19 nt, Artificial Sequence
  Description of Artificial Sequence: Synthetic oligonucleotide
gacacggauuucugaccaa

SEQ ID NO: 2640509 - RNA, 19 nt, Artificial Sequence
  Description of Artificial Sequence: Synthetic oligonucleotide
cccgcagcagaauaacauc

SEQ ID NO: 2640510 - RNA, 19 nt, Artificial Sequence
  Description of Artificial Sequence: Synthetic oligonucleotide
ccagaagaggcgcagcaca

SEQ ID NO: 2640511 - RNA, 19 nt, Artificial Sequence
  Description of Artificial Sequence: Synthetic oligonucleotide
gccaaguagggucuggacu

SEQ ID NO: 2640512 - RNA, 19 nt, Artificial Sequence
  Description of Artificial Sequence: Synthetic oligonucleotide
acuugaggcuaagcacugu

SEQ ID NO: 2640513 - RNA, 19 nt, Artificial Sequence
  Description of Artificial Sequence: Synthetic oligonucleotide
gggccaagccguccacucg

SEQ ID NO: 2640514 - RNA, 19 nt, Artificial Sequence
  Description of Artificial Sequence: Synthetic oligonucleotide
aaguaggugcugagcccgu

SEQ ID NO: 2640515 - RNA, 19 nt, Artificial Sequence
  Description of Artificial Sequence: Synthetic oligonucleotide
cgcagcagaauaacaucgc

SEQ ID NO: 2640516 - RNA, 19 nt, Artificial Sequence
  Description of Artificial Sequence: Synthetic oligonucleotide
ccggaucaugagcagcugc

SEQ ID NO: 2640517 - RNA, 19 nt, Artificial Sequence
  Description of Artificial Sequence: Synthetic oligonucleotide
agccccugcacgaggcuag

SEQ ID NO: 2640518 - RNA, 19 nt, Artificial Sequence
  Description of Artificial Sequence: Synthetic oligonucleotide
caccaggaaacggcccggg

SEQ ID NO: 2640519 - RNA, 19 nt, Artificial Sequence
  Description of Artificial Sequence: Synthetic oligonucleotide
cccugcacgaggcuaguug

SEQ ID NO: 2640520 - RNA, 19 nt, Artificial Sequence
  Description of Artificial Sequence: Synthetic oligonucleotide
agccguccacucgcagugc

SEQ ID NO: 2640521 - RNA, 19 nt, Artificial Sequence
  Description of Artificial Sequence: Synthetic oligonucleotide
ggcaacucagagcaugagu

SEQ ID NO: 2640522 - RNA, 19 nt, Artificial Sequence
  Description of Artificial Sequence: Synthetic oligonucleotide
gaaacggcccggggccaag

SEQ ID NO: 2640523 - RNA, 19 nt, Artificial Sequence
  Description of Artificial Sequence: Synthetic oligonucleotide
cucccgcagcagaauaaca

SEQ ID NO: 2640524 - RNA, 19 nt, Artificial Sequence
  Description of Artificial Sequence: Synthetic oligonucleotide
ggauuucugaccaaagcuu

SEQ ID NO: 2640525 - RNA, 19 nt, Artificial Sequence
  Description of Artificial Sequence: Synthetic oligonucleotide
ccugcacgaggcuaguuga

SEQ ID NO: 2640526 - RNA, 19 nt, Artificial Sequence
  Description of Artificial Sequence: Synthetic oligonucleotide
ggaugacccagcacuccag

SEQ ID NO: 2640527 - RNA, 19 nt, Artificial Sequence
  Description of Artificial Sequence: Synthetic oligonucleotide
aguagggucuggacuggau

SEQ ID NO: 2640528 - RNA, 19 nt, Artificial Sequence
  Description of Artificial Sequence: Synthetic oligonucleotide
gcaugaguaacaggaaaua

SEQ ID NO: 2640529 - RNA, 19 nt, Artificial Sequence
  Description of Artificial Sequence: Synthetic oligonucleotide
ccggagacgugaucaggcc

SEQ ID NO: 2640530 - RNA, 19 nt, Artificial Sequence
  Description of Artificial Sequence: Synthetic oligonucleotide
caagccguccacucgcagu

SEQ ID NO: 2640531 - RNA, 19 nt, Artificial Sequence
  Description of Artificial Sequence: Synthetic oligonucleotide
cggagacgugaucaggccg

SEQ ID NO: 2640532 - RNA, 19 nt, Artificial Sequence
  Description of Artificial Sequence: Synthetic oligonucleotide
agguggcgaagcccagcca

SEQ ID NO: 2640533 - RNA, 19 nt, Artificial Sequence
  Description of Artificial Sequence: Synthetic oligonucleotide
aagaggcgcagcacagcua

SEQ ID NO: 2640534 - RNA, 19 nt, Artificial Sequence
  Description of Artificial Sequence: Synthetic oligonucleotide
agcugcgcagugcuccauu

SEQ ID NO: 2640535 - RNA, 19 nt, Artificial Sequence
  Description of Artificial Sequence: Synthetic oligonucleotide
gagucugcuccacuagcuu

SEQ ID NO: 2640536 - RNA, 19 nt, Artificial Sequence
  Description of Artificial Sequence: Synthetic oligonucleotide
gcagugcuccauucccagc

SEQ ID NO: 2640537 - RNA, 19 nt, Artificial Sequence
  Description of Artificial Sequence: Synthetic oligonucleotide
gcaggagaaugaagaccgg

SEQ ID NO: 2640538 - RNA, 19 nt, Artificial Sequence
  Description of Artificial Sequence: Synthetic oligonucleotide
ggcuaagcacugugagaac

SEQ ID NO: 2640539 - RNA, 19 nt, Artificial Sequence
  Description of Artificial Sequence: Synthetic oligonucleotide
ccgaaccagagcucucgag

SEQ ID NO: 2640540 - RNA, 19 nt, Artificial Sequence
  Description of Artificial Sequence: Synthetic oligonucleotide
gggucuggacuggaugacc

SEQ ID NO: 2640541 - RNA, 19 nt, Artificial Sequence
  Description of Artificial Sequence: Synthetic oligonucleotide
gcgacaagcccggaucaug

SEQ ID NO: 2640542 - RNA, 19 nt, Artificial Sequence
  Description of Artificial Sequence: Synthetic oligonucleotide
ccacucgcagugccaaaag

SEQ ID NO: 2640543 - RNA, 19 nt, Artificial Sequence
  Description of Artificial Sequence: Synthetic oligonucleotide
ggugcacgaagaucucaaa

SEQ ID NO: 2640544 - RNA, 19 nt, Artificial Sequence
  Description of Artificial Sequence: Synthetic oligonucleotide
ggggccaagccguccacuc

SEQ ID NO: 2640545 - RNA, 19 nt, Artificial Sequence
  Description of Artificial Sequence: Synthetic oligonucleotide
caggugcacgaagaucuca

SEQ ID NO: 2640546 - RNA, 19 nt, Artificial Sequence
  Description of Artificial Sequence: Synthetic oligonucleotide
ggcgaagcccagccacugc

SEQ ID NO: 2640547 - RNA, 19 nt, Artificial Sequence
  Description of Artificial Sequence: Synthetic oligonucleotide
cggauuucugaccaaagcu

SEQ ID NO: 2640548 - RNA, 19 nt, Artificial Sequence
  Description of Artificial Sequence: Synthetic oligonucleotide
ggaaacaaucuuagauaua

SEQ ID NO: 2640549 - RNA, 19 nt, Artificial Sequence
  Description of Artificial Sequence: Synthetic oligonucleotide
gccguccacucgcagugcc

SEQ ID NO: 2640550 - RNA, 19 nt, Artificial Sequence
  Description of Artificial Sequence: Synthetic oligonucleotide
ggacaguaaacggggcaca

SEQ ID NO: 2640551 - RNA, 19 nt, Artificial Sequence
  Description of Artificial Sequence: Synthetic oligonucleotide
cgugaucaggccgaaccag

SEQ ID NO: 2640552 - RNA, 19 nt, Artificial Sequence
  Description of Artificial Sequence: Synthetic oligonucleotide
cagggccagcaggugcacg

SEQ ID NO: 2640553 - RNA, 19 nt, Artificial Sequence
  Description of Artificial Sequence: Synthetic oligonucleotide
gcacugugagaacccagaa

SEQ ID NO: 2640554 - RNA, 19 nt, Artificial Sequence
  Description of Artificial Sequence: Synthetic oligonucleotide
gcuucacuuuuaaguuuug

SEQ ID NO: 2640555 - RNA, 19 nt, Artificial Sequence
  Description of Artificial Sequence: Synthetic oligonucleotide
gcucccgcagcagaauaac

SEQ ID NO: 2640556 - RNA, 19 nt, Artificial Sequence
  Description of Artificial Sequence: Synthetic oligonucleotide
cacucgcagugccaaaagu

SEQ ID NO: 2640557 - RNA, 19 nt, Artificial Sequence
  Description of Artificial Sequence: Synthetic oligonucleotide
agcccgucggcggcgaaaa

SEQ ID NO: 2640558 - RNA, 19 nt, Artificial Sequence
  Description of Artificial Sequence: Synthetic oligonucleotide
aggaaacggcccggggcca

SEQ ID NO: 2640559 - RNA, 19 nt, Artificial Sequence
  Description of Artificial Sequence: Synthetic oligonucleotide
ccggcacaaacacauucca

SEQ ID NO: 2640560 - RNA, 19 nt, Artificial Sequence
  Description of Artificial Sequence: Synthetic oligonucleotide
cccgucuuggaagaggcga

SEQ ID NO: 2640561 - RNA, 19 nt, Artificial Sequence
  Description of Artificial Sequence: Synthetic oligonucleotide
aggccgaaccagagcucuc

SEQ ID NO: 2640562 - RNA, 19 nt, Artificial Sequence
  Description of Artificial Sequence: Synthetic oligonucleotide
ggcgccaaguagggucugg

SEQ ID NO: 2640563 - RNA, 19 nt, Artificial Sequence
  Description of Artificial Sequence: Synthetic oligonucleotide
ccagagcucucgagucugc

SEQ ID NO: 2640564 - RNA, 19 nt, Artificial Sequence
  Description of Artificial Sequence: Synthetic oligonucleotide
cggcacaaacacauuccac

SEQ ID NO: 2640565 - RNA, 19 nt, Artificial Sequence
  Description of Artificial Sequence: Synthetic oligonucleotide
uugacgcgacaagcccgga

SEQ ID NO: 2640566 - RNA, 19 nt, Artificial Sequence
  Description of Artificial Sequence: Synthetic oligonucleotide
ggcuucacuuuuaaguuuu

SEQ ID NO: 2640567 - RNA, 19 nt, Artificial Sequence
  Description of Artificial Sequence: Synthetic oligonucleotide
gagacgugaucaggccgaa

SEQ ID NO: 2640568 - RNA, 19 nt, Artificial Sequence
  Description of Artificial Sequence: Synthetic oligonucleotide
cuccagcugcgcagugcuc

SEQ ID NO: 2640569 - RNA, 19 nt, Artificial Sequence
  Description of Artificial Sequence: Synthetic oligonucleotide
gcagugccaaaaguacgga

SEQ ID NO: 2640570 - RNA, 19 nt, Artificial Sequence
  Description of Artificial Sequence: Synthetic oligonucleotide
cgacaagcccggaucauga

SEQ ID NO: 2640571 - RNA, 19 nt, Artificial Sequence
  Description of Artificial Sequence: Synthetic oligonucleotide
caggccgaaccagagcucu

SEQ ID NO: 2640572 - RNA, 19 nt, Artificial Sequence
  Description of Artificial Sequence: Synthetic oligonucleotide
agaggcgaacagacacgau

SEQ ID NO: 2640573 - RNA, 19 nt, Artificial Sequence
  Description of Artificial Sequence: Synthetic oligonucleotide
gcugagcccgucggcggcg

SEQ ID NO: 2640574 - RNA, 19 nt, Artificial Sequence
  Description of Artificial Sequence: Synthetic oligonucleotide
uggcgccaaguagggucug

SEQ ID NO: 2640575 - RNA, 19 nt, Artificial Sequence
  Description of Artificial Sequence: Synthetic oligonucleotide
guggcgccaaguagggucu

SEQ ID NO: 2640576 - RNA, 19 nt, Artificial Sequence
  Description of Artificial Sequence: Synthetic oligonucleotide
ccccgucuuggaagaggcg

SEQ ID NO: 2640577 - RNA, 19 nt, Artificial Sequence
  Description of Artificial Sequence: Synthetic oligonucleotide
cccagaagaggcgcagcac

SEQ ID NO: 2640578 - RNA, 19 nt, Artificial Sequence
  Description of Artificial Sequence: Synthetic oligonucleotide
ugagcccgucggcggcgaa

SEQ ID NO: 2640579 - RNA, 19 nt, Artificial Sequence
  Description of Artificial Sequence: Synthetic oligonucleotide
cgaaccagagcucucgagu

SEQ ID NO: 2640580 - RNA, 19 nt, Artificial Sequence
  Description of Artificial Sequence: Synthetic oligonucleotide
cagacacgaugguggugaa

SEQ ID NO: 2640581 - RNA, 19 nt, Artificial Sequence
  Description of Artificial Sequence: Synthetic oligonucleotide
cgaggcuaguugacgcgac

SEQ ID NO: 2640582 - RNA, 19 nt, Artificial Sequence
  Description of Artificial Sequence: Synthetic oligonucleotide
ccaacagggccagcaggug

SEQ ID NO: 2640583 - RNA, 19 nt, Artificial Sequence
  Description of Artificial Sequence: Synthetic oligonucleotide
ccagcacuccagcugcgca

SEQ ID NO: 2640584 - RNA, 19 nt, Artificial Sequence
  Description of Artificial Sequence: Synthetic oligonucleotide
gccgaaccagagcucucga

SEQ ID NO: 2640585 - RNA, 19 nt, Artificial Sequence
  Description of Artificial Sequence: Synthetic oligonucleotide
cgccaaguagggucuggac

SEQ ID NO: 2640586 - RNA, 19 nt, Artificial Sequence
  Description of Artificial Sequence: Synthetic oligonucleotide
guccacucgcagugccaaa

SEQ ID NO: 2640587 - RNA, 19 nt, Artificial Sequence
  Description of Artificial Sequence: Synthetic oligonucleotide
ccgucuuggaagaggcgaa

SEQ ID NO: 2640588 - RNA, 19 nt, Artificial Sequence
  Description of Artificial Sequence: Synthetic oligonucleotide
ggcgaacagacacgauggu

SEQ ID NO: 2640589 - RNA, 19 nt, Artificial Sequence
  Description of Artificial Sequence: Synthetic oligonucleotide
gagcccgucggcggcgaaa

SEQ ID NO: 2640590 - RNA, 19 nt, Artificial Sequence
  Description of Artificial Sequence: Synthetic oligonucleotide
guggcgaagcccagccacu

SEQ ID NO: 2640591 - RNA, 19 nt, Artificial Sequence
  Description of Artificial Sequence: Synthetic oligonucleotide
cgucuuggaagaggcgaac

SEQ ID NO: 2640592 - RNA, 19 nt, Artificial Sequence
  Description of Artificial Sequence: Synthetic oligonucleotide
gcaggugcacgaagaucuc

SEQ ID NO: 2640593 - RNA, 19 nt, Artificial Sequence
  Description of Artificial Sequence: Synthetic oligonucleotide
gcuucuggcacagcagcau

SEQ ID NO: 2640594 - RNA, 19 nt, Artificial Sequence
  Description of Artificial Sequence: Synthetic oligonucleotide
gcgccaaguagggucugga

SEQ ID NO: 2640595 - RNA, 19 nt, Artificial Sequence
  Description of Artificial Sequence: Synthetic oligonucleotide
gcucucgagucugcuccac

SEQ ID NO: 2640596 - RNA, 19 nt, Artificial Sequence
  Description of Artificial Sequence: Synthetic oligonucleotide
gcuagucgcuucuccccgu

SEQ ID NO: 2640597 - RNA, 19 nt, Artificial Sequence
  Description of Artificial Sequence: Synthetic oligonucleotide
cgagucugcuccacuagcu

SEQ ID NO: 2640598 - RNA, 19 nt, Artificial Sequence
  Description of Artificial Sequence: Synthetic oligonucleotide
gcacaagcagacacggauu

SEQ ID NO: 2640599 - RNA, 19 nt, Artificial Sequence
  Description of Artificial Sequence: Synthetic oligonucleotide
cuccaguguggcgccaagu

SEQ ID NO: 2640600 - RNA, 19 nt, Artificial Sequence
  Description of Artificial Sequence: Synthetic oligonucleotide
cagccccugcacgaggcua

SEQ ID NO: 2640601 - RNA, 19 nt, Artificial Sequence
  Description of Artificial Sequence: Synthetic oligonucleotide
cccggaucaugagcagcug

SEQ ID NO: 2640602 - RNA, 19 nt, Artificial Sequence
  Description of Artificial Sequence: Synthetic oligonucleotide
gggcacaagcagacacgga

SEQ ID NO: 2640603 - RNA, 19 nt, Artificial Sequence
  Description of Artificial Sequence: Synthetic oligonucleotide
gcacagcuagucgcuucuc

SEQ ID NO: 2640604 - RNA, 19 nt, Artificial Sequence
  Description of Artificial Sequence: Synthetic oligonucleotide
ggaaacggcccggggccaa

SEQ ID NO: 2640605 - RNA, 19 nt, Artificial Sequence
  Description of Artificial Sequence: Synthetic oligonucleotide
ccguccacucgcagugcca

SEQ ID NO: 2640606 - RNA, 19 nt, Artificial Sequence
  Description of Artificial Sequence: Synthetic oligonucleotide
gaggcgcagcacagcuagu

SEQ ID NO: 2640607 - RNA, 19 nt, Artificial Sequence
  Description of Artificial Sequence: Synthetic oligonucleotide
guguggcgccaaguagggu

SEQ ID NO: 2640608 - RNA, 19 nt, Artificial Sequence
  Description of Artificial Sequence: Synthetic oligonucleotide
cguccacucgcagugccaa

SEQ ID NO: 2640609 - RNA, 19 nt, Artificial Sequence
  Description of Artificial Sequence: Synthetic oligonucleotide
ggcccggggccaagccguc

SEQ ID NO: 2640610 - RNA, 19 nt, Artificial Sequence
  Description of Artificial Sequence: Synthetic oligonucleotide
cggcccggggccaagccgu

SEQ ID NO: 2640611 - RNA, 19 nt, Artificial Sequence
  Description of Artificial Sequence: Synthetic oligonucleotide
cagcugcgcagugcuccau

SEQ ID NO: 2640612 - RNA, 19 nt, Artificial Sequence
  Description of Artificial Sequence: Synthetic oligonucleotide
cggggccaagccguccacu

SEQ ID NO: 2640613 - RNA, 19 nt, Artificial Sequence
  Description of Artificial Sequence: Synthetic oligonucleotide
ccccugcacgaggcuaguu

SEQ ID NO: 2640614 - RNA, 19 nt, Artificial Sequence
  Description of Artificial Sequence: Synthetic oligonucleotide
aauaucuacacauagaggu

SEQ ID NO: 2640615 - RNA, 19 nt, Artificial Sequence
  Description of Artificial Sequence: Synthetic oligonucleotide
uuaauaucuacacauagag

SEQ ID NO: 2640616 - RNA, 19 nt, Artificial Sequence
  Description of Artificial Sequence: Synthetic oligonucleotide
uauauaaauaguauuaaca

SEQ ID NO: 2640617 - RNA, 19 nt, Artificial Sequence
  Description of Artificial Sequence: Synthetic oligonucleotide
aaaaguacaggaaaugucc

SEQ ID NO: 2640618 - RNA, 19 nt, Artificial Sequence
  Description of Artificial Sequence: Synthetic oligonucleotide
auauaaauaguauuaacag

SEQ ID NO: 2640619 - RNA, 19 nt, Artificial Sequence
  Description of Artificial Sequence: Synthetic oligonucleotide
uaaaagauaccaaaugcgg

SEQ ID NO: 2640620 - RNA, 19 nt, Artificial Sequence
  Description of Artificial Sequence: Synthetic oligonucleotide
uguaaaagauaccaaaugc

SEQ ID NO: 2640621 - RNA, 19 nt, Artificial Sequence
  Description of Artificial Sequence: Synthetic oligonucleotide
uuuggaaagaguaacucgg

SEQ ID NO: 2640622 - RNA, 19 nt, Artificial Sequence
  Description of Artificial Sequence: Synthetic oligonucleotide
uacagaaacaggaagggcg

SEQ ID NO: 2640623 - RNA, 19 nt, Artificial Sequence
  Description of Artificial Sequence: Synthetic oligonucleotide
uuugcaaagauacaugaca

SEQ ID NO: 2640624 - RNA, 19 nt, Artificial Sequence
  Description of Artificial Sequence: Synthetic oligonucleotide
uauauuacaauguuugugu

SEQ ID NO: 2640625 - RNA, 19 nt, Artificial Sequence
  Description of Artificial Sequence: Synthetic oligonucleotide
aaagugauauugcaugagg

SEQ ID NO: 2640626 - RNA, 19 nt, Artificial Sequence
  Description of Artificial Sequence: Synthetic oligonucleotide
aaaauuggugccuaggaca

SEQ ID NO: 2640627 - RNA, 19 nt, Artificial Sequence
  Description of Artificial Sequence: Synthetic oligonucleotide
auaaauuucaaagugauau

SEQ ID NO: 2640628 - RNA, 19 nt, Artificial Sequence
  Description of Artificial Sequence: Synthetic oligonucleotide
agauacaugacacucaugu

SEQ ID NO: 2640629 - RNA, 19 nt, Artificial Sequence
  Description of Artificial Sequence: Synthetic oligonucleotide
auaccuuucaaauauauaa

SEQ ID NO: 2640630 - RNA, 19 nt, Artificial Sequence
  Description of Artificial Sequence: Synthetic oligonucleotide
ucuuauaccuuucaaauau

SEQ ID NO: 2640631 - RNA, 19 nt, Artificial Sequence
  Description of Artificial Sequence: Synthetic oligonucleotide
ugaguuaauaucuacacau

SEQ ID NO: 2640632 - RNA, 19 nt, Artificial Sequence
  Description of Artificial Sequence: Synthetic oligonucleotide
uucaaagugauauugcaug

SEQ ID NO: 2640633 - RNA, 19 nt, Artificial Sequence
  Description of Artificial Sequence: Synthetic oligonucleotide
cauuauuugaaaaguacag

SEQ ID NO: 2640634 - RNA, 19 nt, Artificial Sequence
  Description of Artificial Sequence: Synthetic oligonucleotide
ucauuauuugaaaaguaca

SEQ ID NO: 2640635 - RNA, 19 nt, Artificial Sequence
  Description of Artificial Sequence: Synthetic oligonucleotide
cauccuuuugcaaagauac

SEQ ID NO: 2640636 - RNA, 19 nt, Artificial Sequence
  Description of Artificial Sequence: Synthetic oligonucleotide
aguuaauaucuacacauag

SEQ ID NO: 2640637 - RNA, 19 nt, Artificial Sequence
  Description of Artificial Sequence: Synthetic oligonucleotide
aauuuggaaagaguaacuc

SEQ ID NO: 2640638 - RNA, 19 nt, Artificial Sequence
  Description of Artificial Sequence: Synthetic oligonucleotide
aguuauauuacaauguuug

SEQ ID NO: 2640639 - RNA, 19 nt, Artificial Sequence
  Description of Artificial Sequence: Synthetic oligonucleotide
auuuggaaagaguaacucg

SEQ ID NO: 2640640 - RNA, 19 nt, Artificial Sequence
  Description of Artificial Sequence: Synthetic oligonucleotide
uucaacaucauuauuugaa

SEQ ID NO: 2640641 - RNA, 19 nt, Artificial Sequence
  Description of Artificial Sequence: Synthetic oligonucleotide
uuguguaguaaacagaaaa

SEQ ID NO: 2640642 - RNA, 19 nt, Artificial Sequence
  Description of Artificial Sequence: Synthetic oligonucleotide
aauaaaaggcaagacuuag

SEQ ID NO: 2640643 - RNA, 19 nt, Artificial Sequence
  Description of Artificial Sequence: Synthetic oligonucleotide
guaaaagauaccaaaugcg

SEQ ID NO: 2640644 - RNA, 19 nt, Artificial Sequence
  Description of Artificial Sequence: Synthetic oligonucleotide
aacuccuaccucuuauacc

SEQ ID NO: 2640645 - RNA, 19 nt, Artificial Sequence
  Description of Artificial Sequence: Synthetic oligonucleotide
acaauuuggaaagaguaac

SEQ ID NO: 2640646 - RNA, 19 nt, Artificial Sequence
  Description of Artificial Sequence: Synthetic oligonucleotide
uuuucaacaucauuauuug

SEQ ID NO: 2640647 - RNA, 19 nt, Artificial Sequence
  Description of Artificial Sequence: Synthetic oligonucleotide
aacaaaauccaaccgugug

SEQ ID NO: 2640648 - RNA, 19 nt, Artificial Sequence
  Description of Artificial Sequence: Synthetic oligonucleotide
aaagauaccaaaugcggau

SEQ ID NO: 2640649 - RNA, 19 nt, Artificial Sequence
  Description of Artificial Sequence: Synthetic oligonucleotide
aaaacaaaauccaaccgug

SEQ ID NO: 2640650 - RNA, 19 nt, Artificial Sequence
  Description of Artificial Sequence: Synthetic oligonucleotide
uuauauuacaauguuugug

SEQ ID NO: 2640651 - RNA, 19 nt, Artificial Sequence
  Description of Artificial Sequence: Synthetic oligonucleotide
cagaagacaauuuggaaag

SEQ ID NO: 2640652 - RNA, 19 nt, Artificial Sequence
  Description of Artificial Sequence: Synthetic oligonucleotide
aaguguaaaagauaccaaa

SEQ ID NO: 2640653 - RNA, 19 nt, Artificial Sequence
  Description of Artificial Sequence: Synthetic oligonucleotide
auuauuugaaaaguacagg

SEQ ID NO: 2640654 - RNA, 19 nt, Artificial Sequence
  Description of Artificial Sequence: Synthetic oligonucleotide
ucugaguuaauaucuacac

SEQ ID NO: 2640655 - RNA, 19 nt, Artificial Sequence
  Description of Artificial Sequence: Synthetic oligonucleotide
aagaguaacucggagauca

SEQ ID NO: 2640656 - RNA, 19 nt, Artificial Sequence
  Description of Artificial Sequence: Synthetic oligonucleotide
uuucugauuaagcugcagc

SEQ ID NO: 2640657 - RNA, 19 nt, Artificial Sequence
  Description of Artificial Sequence: Synthetic oligonucleotide
aaauccaaccgugugggac

SEQ ID NO: 2640658 - RNA, 19 nt, Artificial Sequence
  Description of Artificial Sequence: Synthetic oligonucleotide
aucauuauuugaaaaguac

SEQ ID NO: 2640659 - RNA, 19 nt, Artificial Sequence
  Description of Artificial Sequence: Synthetic oligonucleotide
aaaguacaggaaauguccc

SEQ ID NO: 2640660 - RNA, 19 nt, Artificial Sequence
  Description of Artificial Sequence: Synthetic oligonucleotide
agugauauugcaugagguc

SEQ ID NO: 2640661 - RNA, 19 nt, Artificial Sequence
  Description of Artificial Sequence: Synthetic oligonucleotide
aaauaaauuucaaagugau

SEQ ID NO: 2640662 - RNA, 19 nt, Artificial Sequence
  Description of Artificial Sequence: Synthetic oligonucleotide
ucuacagaaacaggaaggg

SEQ ID NO: 2640663 - RNA, 19 nt, Artificial Sequence
  Description of Artificial Sequence: Synthetic oligonucleotide
uauuacaauguuuguguag

SEQ ID NO: 2640664 - RNA, 19 nt, Artificial Sequence
  Description of Artificial Sequence: Synthetic oligonucleotide
uuugaaaaguacaggaaau

SEQ ID NO: 2640665 - RNA, 19 nt, Artificial Sequence
  Description of Artificial Sequence: Synthetic oligonucleotide
aaauaguauuaacaguuau

SEQ ID NO: 2640666 - RNA, 19 nt, Artificial Sequence
  Description of Artificial Sequence: Synthetic oligonucleotide
aaagauacaugacacucau

SEQ ID NO: 2640667 - RNA, 19 nt, Artificial Sequence
  Description of Artificial Sequence: Synthetic oligonucleotide
aacucggagaucaggaagc

SEQ ID NO: 2640668 - RNA, 19 nt, Artificial Sequence
  Description of Artificial Sequence: Synthetic oligonucleotide
auaaauaguauuaacaguu

SEQ ID NO: 2640669 - RNA, 19 nt, Artificial Sequence
  Description of Artificial Sequence: Synthetic oligonucleotide
guugaaguguaaaagauac

SEQ ID NO: 2640670 - RNA, 19 nt, Artificial Sequence
  Description of Artificial Sequence: Synthetic oligonucleotide
ucuuugacaagguugcaug

SEQ ID NO: 2640671 - RNA, 19 nt, Artificial Sequence
  Description of Artificial Sequence: Synthetic oligonucleotide
ucggagaucaggaagcagc

SEQ ID NO: 2640672 - RNA, 19 nt, Artificial Sequence
  Description of Artificial Sequence: Synthetic oligonucleotide
uuaacaguuauauuacaau

SEQ ID NO: 2640673 - RNA, 19 nt, Artificial Sequence
  Description of Artificial Sequence: Synthetic oligonucleotide
acuccuaccucuuauaccu

SEQ ID NO: 2640674 - RNA, 19 nt, Artificial Sequence
  Description of Artificial Sequence: Synthetic oligonucleotide
uugacaagguugcaugagg

SEQ ID NO: 2640675 - RNA, 19 nt, Artificial Sequence
  Description of Artificial Sequence: Synthetic oligonucleotide
auguuuguguaguaaacag

SEQ ID NO: 2640676 - RNA, 19 nt, Artificial Sequence
  Description of Artificial Sequence: Synthetic oligonucleotide
agauaccaaaugcggaugc

SEQ ID NO: 2640677 - RNA, 19 nt, Artificial Sequence
  Description of Artificial Sequence: Synthetic oligonucleotide
ugucagaagacaauuugga

SEQ ID NO: 2640678 - RNA, 19 nt, Artificial Sequence
  Description of Artificial Sequence: Synthetic oligonucleotide
ugcaugaggauacaacuca

SEQ ID NO: 2640679 - RNA, 19 nt, Artificial Sequence
  Description of Artificial Sequence: Synthetic oligonucleotide
auugcaugaggucuuugac

SEQ ID NO: 2640680 - RNA, 19 nt, Artificial Sequence
  Description of Artificial Sequence: Synthetic oligonucleotide
uugagaacuccagacaacg

SEQ ID NO: 2640681 - RNA, 19 nt, Artificial Sequence
  Description of Artificial Sequence: Synthetic oligonucleotide
auaguauuaacaguuauau

SEQ ID NO: 2640682 - RNA, 19 nt, Artificial Sequence
  Description of Artificial Sequence: Synthetic oligonucleotide
aacaguuauauuacaaugu

SEQ ID NO: 2640683 - RNA, 19 nt, Artificial Sequence
  Description of Artificial Sequence: Synthetic oligonucleotide
uguguaguaaacagaaaau

SEQ ID NO: 2640684 - RNA, 19 nt, Artificial Sequence
  Description of Artificial Sequence: Synthetic oligonucleotide
uugcaaagauacaugacac

SEQ ID NO: 2640685 - RNA, 19 nt, Artificial Sequence
  Description of Artificial Sequence: Synthetic oligonucleotide
aauguuuguguaguaaaca

SEQ ID NO: 2640686 - RNA, 19 nt, Artificial Sequence
  Description of Artificial Sequence: Synthetic oligonucleotide
uuaagcugcagcaucuaca

SEQ ID NO: 2640687 - RNA, 19 nt, Artificial Sequence
  Description of Artificial Sequence: Synthetic oligonucleotide
uugguugaaguguaaaaga

SEQ ID NO: 2640688 - RNA, 19 nt, Artificial Sequence
  Description of Artificial Sequence: Synthetic oligonucleotide
uucugauuaagcugcagca

SEQ ID NO: 2640689 - RNA, 19 nt, Artificial Sequence
  Description of Artificial Sequence: Synthetic oligonucleotide
uucugaguuaauaucuaca

SEQ ID NO: 2640690 - RNA, 19 nt, Artificial Sequence
  Description of Artificial Sequence: Synthetic oligonucleotide
uaacucggagaucaggaag

SEQ ID NO: 2640691 - RNA, 19 nt, Artificial Sequence
  Description of Artificial Sequence: Synthetic oligonucleotide
accuguaagagcuugggca

SEQ ID NO: 2640692 - RNA, 19 nt, Artificial Sequence
  Description of Artificial Sequence: Synthetic oligonucleotide
uguuuguguaguaaacaga

SEQ ID NO: 2640693 - RNA, 19 nt, Artificial Sequence
  Description of Artificial Sequence: Synthetic oligonucleotide
ucgaugaaccaccuguaag

SEQ ID NO: 2640694 - RNA, 19 nt, Artificial Sequence
  Description of Artificial Sequence: Synthetic oligonucleotide
auuacaauguuuguguagu

SEQ ID NO: 2640695 - RNA, 19 nt, Artificial Sequence
  Description of Artificial Sequence: Synthetic oligonucleotide
uuauaccuuucaaauauau

SEQ ID NO: 2640696 - RNA, 19 nt, Artificial Sequence
  Description of Artificial Sequence: Synthetic oligonucleotide
ugcaugaggucuuugacaa

SEQ ID NO: 2640697 - RNA, 19 nt, Artificial Sequence
  Description of Artificial Sequence: Synthetic oligonucleotide
aaaagauaccaaaugcgga

SEQ ID NO: 2640698 - RNA, 19 nt, Artificial Sequence
  Description of Artificial Sequence: Synthetic oligonucleotide
aggucuuugacaagguugc

SEQ ID NO: 2640699 - RNA, 19 nt, Artificial Sequence
  Description of Artificial Sequence: Synthetic oligonucleotide
aaaugucccuuugagaacu

SEQ ID NO: 2640700 - RNA, 19 nt, Artificial Sequence
  Description of Artificial Sequence: Synthetic oligonucleotide
caaaauccaaccguguggg

SEQ ID NO: 2640701 - RNA, 19 nt, Artificial Sequence
  Description of Artificial Sequence: Synthetic oligonucleotide
guaaccauuuucaacauca

SEQ ID NO: 2640702 - RNA, 19 nt, Artificial Sequence
  Description of Artificial Sequence: Synthetic oligonucleotide
ucaaagugauauugcauga

SEQ ID NO: 2640703 - RNA, 19 nt, Artificial Sequence
  Description of Artificial Sequence: Synthetic oligonucleotide
augcggaugccaucgaucg

SEQ ID NO: 2640704 - RNA, 19 nt, Artificial Sequence
  Description of Artificial Sequence: Synthetic oligonucleotide
caagacuuagcauugaaaa

SEQ ID NO: 2640705 - RNA, 19 nt, Artificial Sequence
  Description of Artificial Sequence: Synthetic oligonucleotide
uuuaacuccuaccucuuau

SEQ ID NO: 2640706 - RNA, 19 nt, Artificial Sequence
  Description of Artificial Sequence: Synthetic oligonucleotide
uauugcaugaggucuuuga

SEQ ID NO: 2640707 - RNA, 19 nt, Artificial Sequence
  Description of Artificial Sequence: Synthetic oligonucleotide
uuuugcaaagauacaugac

SEQ ID NO: 2640708 - RNA, 19 nt, Artificial Sequence
  Description of Artificial Sequence: Synthetic oligonucleotide
acacauagagguuuuauuu

SEQ ID NO: 2640709 - RNA, 19 nt, Artificial Sequence
  Description of Artificial Sequence: Synthetic oligonucleotide
uuucaaagugauauugcau

SEQ ID NO: 2640710 - RNA, 19 nt, Artificial Sequence
  Description of Artificial Sequence: Synthetic oligonucleotide
aauccaaccgugugggacu

SEQ ID NO: 2640711 - RNA, 19 nt, Artificial Sequence
  Description of Artificial Sequence: Synthetic oligonucleotide
ugauuaagcugcagcaucu

SEQ ID NO: 2640712 - RNA, 19 nt, Artificial Sequence
  Description of Artificial Sequence: Synthetic oligonucleotide
uauuaacaguuauauuaca

SEQ ID NO: 2640713 - RNA, 19 nt, Artificial Sequence
  Description of Artificial Sequence: Synthetic oligonucleotide
gagaucaggaagcagcaac

SEQ ID NO: 2640714 - RNA, 19 nt, Artificial Sequence
  Description of Artificial Sequence: Synthetic oligonucleotide
caagguugcaugaggauac

SEQ ID NO: 2640715 - RNA, 19 nt, Artificial Sequence
  Description of Artificial Sequence: Synthetic oligonucleotide
uugaaaaguacaggaaaug

SEQ ID NO: 2640716 - RNA, 19 nt, Artificial Sequence
  Description of Artificial Sequence: Synthetic oligonucleotide
uaccuuucaaauauauaaa

SEQ ID NO: 2640717 - RNA, 19 nt, Artificial Sequence
  Description of Artificial Sequence: Synthetic oligonucleotide
agaguguaaguucugaguu

SEQ ID NO: 2640718 - RNA, 19 nt, Artificial Sequence
  Description of Artificial Sequence: Synthetic oligonucleotide
uaaauaguauuaacaguua

SEQ ID NO: 2640719 - RNA, 19 nt, Artificial Sequence
  Description of Artificial Sequence: Synthetic oligonucleotide
ugguugaaguguaaaagau

SEQ ID NO: 2640720 - RNA, 19 nt, Artificial Sequence
  Description of Artificial Sequence: Synthetic oligonucleotide
aauaguauuaacaguuaua

SEQ ID NO: 2640721 - RNA, 19 nt, Artificial Sequence
  Description of Artificial Sequence: Synthetic oligonucleotide
ggaaaugucccuuugagaa

SEQ ID NO: 2640722 - RNA, 19 nt, Artificial Sequence
  Description of Artificial Sequence: Synthetic oligonucleotide
cuuuugcaaagauacauga

SEQ ID NO: 2640723 - RNA, 19 nt, Artificial Sequence
  Description of Artificial Sequence: Synthetic oligonucleotide
ugacaagguugcaugagga

SEQ ID NO: 2640724 - RNA, 19 nt, Artificial Sequence
  Description of Artificial Sequence: Synthetic oligonucleotide
ugcagcaucuacagaaaca

SEQ ID NO: 2640725 - RNA, 19 nt, Artificial Sequence
  Description of Artificial Sequence: Synthetic oligonucleotide
accuuucaaauauauaaau

SEQ ID NO: 2640726 - RNA, 19 nt, Artificial Sequence
  Description of Artificial Sequence: Synthetic oligonucleotide
ugucaagguaaccauuuuc

SEQ ID NO: 2640727 - RNA, 19 nt, Artificial Sequence
  Description of Artificial Sequence: Synthetic oligonucleotide
acaauguuuguguaguaaa

SEQ ID NO: 2640728 - RNA, 19 nt, Artificial Sequence
  Description of Artificial Sequence: Synthetic oligonucleotide
agcugcagcaucuacagaa

SEQ ID NO: 2640729 - RNA, 19 nt, Artificial Sequence
  Description of Artificial Sequence: Synthetic oligonucleotide
aaugcggaugccaucgauc

SEQ ID NO: 2640730 - RNA, 19 nt, Artificial Sequence
  Description of Artificial Sequence: Synthetic oligonucleotide
aaguacaggaaaugucccu

SEQ ID NO: 2640731 - RNA, 19 nt, Artificial Sequence
  Description of Artificial Sequence: Synthetic oligonucleotide
caucgaucgaugaaccacc

SEQ ID NO: 2640732 - RNA, 19 nt, Artificial Sequence
  Description of Artificial Sequence: Synthetic oligonucleotide
caugacacucaugucaagg

SEQ ID NO: 2640733 - RNA, 19 nt, Artificial Sequence
  Description of Artificial Sequence: Synthetic oligonucleotide
acaguuauauuacaauguu

SEQ ID NO: 2640734 - RNA, 19 nt, Artificial Sequence
  Description of Artificial Sequence: Synthetic oligonucleotide
uaggacauguacaggguga

SEQ ID NO: 2640735 - RNA, 19 nt, Artificial Sequence
  Description of Artificial Sequence: Synthetic oligonucleotide
aaaauaccuaauaaauuuu

SEQ ID NO: 2640736 - RNA, 19 nt, Artificial Sequence
  Description of Artificial Sequence: Synthetic oligonucleotide
uugaaguguaaaagauacc

SEQ ID NO: 2640737 - RNA, 19 nt, Artificial Sequence
  Description of Artificial Sequence: Synthetic oligonucleotide
aaccgugugggacugcuga

SEQ ID NO: 2640738 - RNA, 19 nt, Artificial Sequence
  Description of Artificial Sequence: Synthetic oligonucleotide
uaacuccuaccucuuauac

SEQ ID NO: 2640739 - RNA, 19 nt, Artificial Sequence
  Description of Artificial Sequence: Synthetic oligonucleotide
ugaguggccgucucaagcc

SEQ ID NO: 2640740 - RNA, 19 nt, Artificial Sequence
  Description of Artificial Sequence: Synthetic oligonucleotide
ucagcaacggugucagaag

SEQ ID NO: 2640741 - RNA, 19 nt, Artificial Sequence
  Description of Artificial Sequence: Synthetic oligonucleotide
aagacaauuuggaaagagu

SEQ ID NO: 2640742 - RNA, 19 nt, Artificial Sequence
  Description of Artificial Sequence: Synthetic oligonucleotide
aagugauauugcaugaggu

SEQ ID NO: 2640743 - RNA, 19 nt, Artificial Sequence
  Description of Artificial Sequence: Synthetic oligonucleotide
uauaccuuucaaauauaua

SEQ ID NO: 2640744 - RNA, 19 nt, Artificial Sequence
  Description of Artificial Sequence: Synthetic oligonucleotide
uugcaugaggucuuugaca

SEQ ID NO: 2640745 - RNA, 19 nt, Artificial Sequence
  Description of Artificial Sequence: Synthetic oligonucleotide
uuugacaagguugcaugag

SEQ ID NO: 2640746 - RNA, 19 nt, Artificial Sequence
  Description of Artificial Sequence: Synthetic oligonucleotide
guagaguguaaguucugag

SEQ ID NO: 2640747 - RNA, 19 nt, Artificial Sequence
  Description of Artificial Sequence: Synthetic oligonucleotide
uuugagaacuccagacaac

SEQ ID NO: 2640748 - RNA, 19 nt, Artificial Sequence
  Description of Artificial Sequence: Synthetic oligonucleotide
uccuuuugcaaagauacau

SEQ ID NO: 2640749 - RNA, 19 nt, Artificial Sequence
  Description of Artificial Sequence: Synthetic oligonucleotide
gugucagaagacaauuugg

SEQ ID NO: 2640750 - RNA, 19 nt, Artificial Sequence
  Description of Artificial Sequence: Synthetic oligonucleotide
uuucaacaucauuauuuga

SEQ ID NO: 2640751 - RNA, 19 nt, Artificial Sequence
  Description of Artificial Sequence: Synthetic oligonucleotide
ugugggacugcugaguggc

SEQ ID NO: 2640752 - RNA, 19 nt, Artificial Sequence
  Description of Artificial Sequence: Synthetic oligonucleotide
cagacaacgugucuucucc

SEQ ID NO: 2640753 - RNA, 19 nt, Artificial Sequence
  Description of Artificial Sequence: Synthetic oligonucleotide
uguaaguucugaguuaaua

SEQ ID NO: 2640754 - RNA, 19 nt, Artificial Sequence
  Description of Artificial Sequence: Synthetic oligonucleotide
guuuguguaguaaacagaa

SEQ ID NO: 2640755 - RNA, 19 nt, Artificial Sequence
  Description of Artificial Sequence: Synthetic oligonucleotide
acagccauccuuuugcaaa

SEQ ID NO: 2640756 - RNA, 19 nt, Artificial Sequence
  Description of Artificial Sequence: Synthetic oligonucleotide
augccaucgaucgaugaac

SEQ ID NO: 2640757 - RNA, 19 nt, Artificial Sequence
  Description of Artificial Sequence: Synthetic oligonucleotide
acucaugucaagguaacca

SEQ ID NO: 2640758 - RNA, 19 nt, Artificial Sequence
  Description of Artificial Sequence: Synthetic oligonucleotide
aagauaccaaaugcggaug

SEQ ID NO: 2640759 - RNA, 19 nt, Artificial Sequence
  Description of Artificial Sequence: Synthetic oligonucleotide
gucucaagccugcaguagg

SEQ ID NO: 2640760 - RNA, 19 nt, Artificial Sequence
  Description of Artificial Sequence: Synthetic oligonucleotide
agacaacgugucuucuccc

SEQ ID NO: 2640761 - RNA, 19 nt, Artificial Sequence
  Description of Artificial Sequence: Synthetic oligonucleotide
ggugucagaagacaauuug

SEQ ID NO: 2640762 - RNA, 19 nt, Artificial Sequence
  Description of Artificial Sequence: Synthetic oligonucleotide
uuggaaagaguaacucgga

SEQ ID NO: 2640763 - RNA, 19 nt, Artificial Sequence
  Description of Artificial Sequence: Synthetic oligonucleotide
acagaaacaggaagggcgg

SEQ ID NO: 2640764 - RNA, 19 nt, Artificial Sequence
  Description of Artificial Sequence: Synthetic oligonucleotide
gccuaggacauguacaggg

SEQ ID NO: 2640765 - RNA, 19 nt, Artificial Sequence
  Description of Artificial Sequence: Synthetic oligonucleotide
augacacucaugucaaggu

SEQ ID NO: 2640766 - RNA, 19 nt, Artificial Sequence
  Description of Artificial Sequence: Synthetic oligonucleotide
guuaauaucuacacauaga

SEQ ID NO: 2640767 - RNA, 19 nt, Artificial Sequence
  Description of Artificial Sequence: Synthetic oligonucleotide
gaaaugucccuuugagaac

SEQ ID NO: 2640768 - RNA, 19 nt, Artificial Sequence
  Description of Artificial Sequence: Synthetic oligonucleotide
cugauuaagcugcagcauc

SEQ ID NO: 2640769 - RNA, 19 nt, Artificial Sequence
  Description of Artificial Sequence: Synthetic oligonucleotide
ugucccuuugagaacucca

SEQ ID NO: 2640770 - RNA, 19 nt, Artificial Sequence
  Description of Artificial Sequence: Synthetic oligonucleotide
uucagcaacggugucagaa

SEQ ID NO: 2640771 - RNA, 19 nt, Artificial Sequence
  Description of Artificial Sequence: Synthetic oligonucleotide
aaagaguaacucggagauc

SEQ ID NO: 2640772 - RNA, 19 nt, Artificial Sequence
  Description of Artificial Sequence: Synthetic oligonucleotide
uacacauagagguuuuauu

SEQ ID NO: 2640773 - RNA, 19 nt, Artificial Sequence
  Description of Artificial Sequence: Synthetic oligonucleotide
uugcaugaggauacaacuc

SEQ ID NO: 2640774 - RNA, 19 nt, Artificial Sequence
  Description of Artificial Sequence: Synthetic oligonucleotide
gucaagguaaccauuuuca

SEQ ID NO: 2640775 - RNA, 19 nt, Artificial Sequence
  Description of Artificial Sequence: Synthetic oligonucleotide
agacaauuuggaaagagua

SEQ ID NO: 2640776 - RNA, 19 nt, Artificial Sequence
  Description of Artificial Sequence: Synthetic oligonucleotide
acuucagcaacggugucag

SEQ ID NO: 2640777 - RNA, 19 nt, Artificial Sequence
  Description of Artificial Sequence: Synthetic oligonucleotide
guugcaugaggauacaacu

SEQ ID NO: 2640778 - RNA, 19 nt, Artificial Sequence
  Description of Artificial Sequence: Synthetic oligonucleotide
aguaacucggagaucagga

SEQ ID NO: 2640779 - RNA, 19 nt, Artificial Sequence
  Description of Artificial Sequence: Synthetic oligonucleotide
aguguaaaagauaccaaau

SEQ ID NO: 2640780 - RNA, 19 nt, Artificial Sequence
  Description of Artificial Sequence: Synthetic oligonucleotide
uuuguguaguaaacagaaa

SEQ ID NO: 2640781 - RNA, 19 nt, Artificial Sequence
  Description of Artificial Sequence: Synthetic oligonucleotide
aaacagccauccuuuugca

SEQ ID NO: 2640782 - RNA, 19 nt, Artificial Sequence
  Description of Artificial Sequence: Synthetic oligonucleotide
aaauuggugccuaggacau

SEQ ID NO: 2640783 - RNA, 19 nt, Artificial Sequence
  Description of Artificial Sequence: Synthetic oligonucleotide
ggugacuucagcaacggug

SEQ ID NO: 2640784 - RNA, 19 nt, Artificial Sequence
  Description of Artificial Sequence: Synthetic oligonucleotide
uacaauguuuguguaguaa

SEQ ID NO: 2640785 - RNA, 19 nt, Artificial Sequence
  Description of Artificial Sequence: Synthetic oligonucleotide
aaacaaaauccaaccgugu

SEQ ID NO: 2640786 - RNA, 19 nt, Artificial Sequence
  Description of Artificial Sequence: Synthetic oligonucleotide
ugccaucgaucgaugaacc

SEQ ID NO: 2640787 - RNA, 19 nt, Artificial Sequence
  Description of Artificial Sequence: Synthetic oligonucleotide
ugauauugcaugaggucuu

SEQ ID NO: 2640788 - RNA, 19 nt, Artificial Sequence
  Description of Artificial Sequence: Synthetic oligonucleotide
agguucgggaggccggucc

SEQ ID NO: 2640789 - RNA, 19 nt, Artificial Sequence
  Description of Artificial Sequence: Synthetic oligonucleotide
cugaguggccgucucaagc

SEQ ID NO: 2640790 - RNA, 19 nt, Artificial Sequence
  Description of Artificial Sequence: Synthetic oligonucleotide
aggaaaugucccuuugaga

SEQ ID NO: 2640791 - RNA, 19 nt, Artificial Sequence
  Description of Artificial Sequence: Synthetic oligonucleotide
gaaacaggaagggcgggcc

SEQ ID NO: 2640792 - RNA, 19 nt, Artificial Sequence
  Description of Artificial Sequence: Synthetic oligonucleotide
caaagauacaugacacuca

SEQ ID NO: 2640793 - RNA, 19 nt, Artificial Sequence
  Description of Artificial Sequence: Synthetic oligonucleotide
ucaagccugcaguagguuc

SEQ ID NO: 2640794 - RNA, 19 nt, Artificial Sequence
  Description of Artificial Sequence: Synthetic oligonucleotide
gcagcaucuacagaaacag

SEQ ID NO: 2640795 - RNA, 19 nt, Artificial Sequence
  Description of Artificial Sequence: Synthetic oligonucleotide
aguguaaguucugaguuaa

SEQ ID NO: 2640796 - RNA, 19 nt, Artificial Sequence
  Description of Artificial Sequence: Synthetic oligonucleotide
uuaacuccuaccucuuaua

SEQ ID NO: 2640797 - RNA, 19 nt, Artificial Sequence
  Description of Artificial Sequence: Synthetic oligonucleotide
ugcaguagguucgggaggc

SEQ ID NO: 2640798 - RNA, 19 nt, Artificial Sequence
  Description of Artificial Sequence: Synthetic oligonucleotide
caaagugauauugcaugag

SEQ ID NO: 2640799 - RNA, 19 nt, Artificial Sequence
  Description of Artificial Sequence: Synthetic oligonucleotide
uaucuacacauagagguuu

SEQ ID NO: 2640800 - RNA, 19 nt, Artificial Sequence
  Description of Artificial Sequence: Synthetic oligonucleotide
cuaggacauguacagggug

SEQ ID NO: 2640801 - RNA, 19 nt, Artificial Sequence
  Description of Artificial Sequence: Synthetic oligonucleotide
aaaugcggaugccaucgau

SEQ ID NO: 2640802 - RNA, 19 nt, Artificial Sequence
  Description of Artificial Sequence: Synthetic oligonucleotide
aacuccagacaacgugucu

SEQ ID NO: 2640803 - RNA, 19 nt, Artificial Sequence
  Description of Artificial Sequence: Synthetic oligonucleotide
agcaacugaggacuuucug

SEQ ID NO: 2640804 - RNA, 19 nt, Artificial Sequence
  Description of Artificial Sequence: Synthetic oligonucleotide
aggaagggcgggcccaggc

SEQ ID NO: 2640805 - RNA, 19 nt, Artificial Sequence
  Description of Artificial Sequence: Synthetic oligonucleotide
ucucaagccugcaguaggu

SEQ ID NO: 2640806 - RNA, 19 nt, Artificial Sequence
  Description of Artificial Sequence: Synthetic oligonucleotide
guaaguucugaguuaauau

SEQ ID NO: 2640807 - RNA, 19 nt, Artificial Sequence
  Description of Artificial Sequence: Synthetic oligonucleotide
ugagaacuccagacaacgu

SEQ ID NO: 2640808 - RNA, 19 nt, Artificial Sequence
  Description of Artificial Sequence: Synthetic oligonucleotide
auauuacaauguuugugua

SEQ ID NO: 2640809 - RNA, 19 nt, Artificial Sequence
  Description of Artificial Sequence: Synthetic oligonucleotide
ucucccuguagaguguaag

SEQ ID NO: 2640810 - RNA, 19 nt, Artificial Sequence
  Description of Artificial Sequence: Synthetic oligonucleotide
gacaauuuggaaagaguaa

SEQ ID NO: 2640811 - RNA, 19 nt, Artificial Sequence
  Description of Artificial Sequence: Synthetic oligonucleotide
ucccuuugagaacuccaga

SEQ ID NO: 2640812 - RNA, 19 nt, Artificial Sequence
  Description of Artificial Sequence: Synthetic oligonucleotide
aggacauguacagggugac

SEQ ID NO: 2640813 - RNA, 19 nt, Artificial Sequence
  Description of Artificial Sequence: Synthetic oligonucleotide
gauaccaaaugcggaugcc

SEQ ID NO: 2640814 - RNA, 19 nt, Artificial Sequence
  Description of Artificial Sequence: Synthetic oligonucleotide
aaaauccaaccguguggga

SEQ ID NO: 2640815 - RNA, 19 nt, Artificial Sequence
  Description of Artificial Sequence: Synthetic oligonucleotide
gaugccaucgaucgaugaa

SEQ ID NO: 2640816 - RNA, 19 nt, Artificial Sequence
  Description of Artificial Sequence: Synthetic oligonucleotide
ucaugucaagguaaccauu

SEQ ID NO: 2640817 - RNA, 19 nt, Artificial Sequence
  Description of Artificial Sequence: Synthetic oligonucleotide
acacucaugucaagguaac

SEQ ID NO: 2640818 - RNA, 19 nt, Artificial Sequence
  Description of Artificial Sequence: Synthetic oligonucleotide
cuacagaaacaggaagggc

SEQ ID NO: 2640819 - RNA, 19 nt, Artificial Sequence
  Description of Artificial Sequence: Synthetic oligonucleotide
guacagggugacuucagca

SEQ ID NO: 2640820 - RNA, 19 nt, Artificial Sequence
  Description of Artificial Sequence: Synthetic oligonucleotide
gacacucaugucaagguaa

SEQ ID NO: 2640821 - RNA, 19 nt, Artificial Sequence
  Description of Artificial Sequence: Synthetic oligonucleotide
uaccucuuauaccuuucaa

SEQ ID NO: 2640822 - RNA, 19 nt, Artificial Sequence
  Description of Artificial Sequence: Synthetic oligonucleotide
guuauauuacaauguuugu

SEQ ID NO: 2640823 - RNA, 19 nt, Artificial Sequence
  Description of Artificial Sequence: Synthetic oligonucleotide
uggugccuaggacauguac

SEQ ID NO: 2640824 - RNA, 19 nt, Artificial Sequence
  Description of Artificial Sequence: Synthetic oligonucleotide
ugggacugcugaguggccg

SEQ ID NO: 2640825 - RNA, 19 nt, Artificial Sequence
  Description of Artificial Sequence: Synthetic oligonucleotide
acaacgugucuucucccug

SEQ ID NO: 2640826 - RNA, 19 nt, Artificial Sequence
  Description of Artificial Sequence: Synthetic oligonucleotide
auaccaaaugcggaugcca

SEQ ID NO: 2640827 - RNA, 19 nt, Artificial Sequence
  Description of Artificial Sequence: Synthetic oligonucleotide
guguaguaaacagaaaaua

SEQ ID NO: 2640828 - RNA, 19 nt, Artificial Sequence
  Description of Artificial Sequence: Synthetic oligonucleotide
uaaccauuuucaacaucau

SEQ ID NO: 2640829 - RNA, 19 nt, Artificial Sequence
  Description of Artificial Sequence: Synthetic oligonucleotide
cugaguuaauaucuacaca

SEQ ID NO: 2640830 - RNA, 19 nt, Artificial Sequence
  Description of Artificial Sequence: Synthetic oligonucleotide
aacagccauccuuuugcaa

SEQ ID NO: 2640831 - RNA, 19 nt, Artificial Sequence
  Description of Artificial Sequence: Synthetic oligonucleotide
acugcugaguggccgucuc

SEQ ID NO: 2640832 - RNA, 19 nt, Artificial Sequence
  Description of Artificial Sequence: Synthetic oligonucleotide
gucagaagacaauuuggaa

SEQ ID NO: 2640833 - RNA, 19 nt, Artificial Sequence
  Description of Artificial Sequence: Synthetic oligonucleotide
gccucaacugcaaacagcc

SEQ ID NO: 2640834 - RNA, 19 nt, Artificial Sequence
  Description of Artificial Sequence: Synthetic oligonucleotide
ccaaaugcggaugccaucg

SEQ ID NO: 2640835 - RNA, 19 nt, Artificial Sequence
  Description of Artificial Sequence: Synthetic oligonucleotide
cagccauccuuuugcaaag

SEQ ID NO: 2640836 - RNA, 19 nt, Artificial Sequence
  Description of Artificial Sequence: Synthetic oligonucleotide
gcaacugaggacuuucuga

SEQ ID NO: 2640837 - RNA, 19 nt, Artificial Sequence
  Description of Artificial Sequence: Synthetic oligonucleotide
gugauauugcaugaggucu

SEQ ID NO: 2640838 - RNA, 19 nt, Artificial Sequence
  Description of Artificial Sequence: Synthetic oligonucleotide
acaagguugcaugaggaua

SEQ ID NO: 2640839 - RNA, 19 nt, Artificial Sequence
  Description of Artificial Sequence: Synthetic oligonucleotide
aguagguucgggaggccgg

SEQ ID NO: 2640840 - RNA, 19 nt, Artificial Sequence
  Description of Artificial Sequence: Synthetic oligonucleotide
cuuugacaagguugcauga

SEQ ID NO: 2640841 - RNA, 19 nt, Artificial Sequence
  Description of Artificial Sequence: Synthetic oligonucleotide
agcaacggugucagaagac

SEQ ID NO: 2640842 - RNA, 19 nt, Artificial Sequence
  Description of Artificial Sequence: Synthetic oligonucleotide
augucccuuugagaacucc

SEQ ID NO: 2640843 - RNA, 19 nt, Artificial Sequence
  Description of Artificial Sequence: Synthetic oligonucleotide
ccuuuugcaaagauacaug

SEQ ID NO: 2640844 - RNA, 19 nt, Artificial Sequence
  Description of Artificial Sequence: Synthetic oligonucleotide
ucgaucgaugaaccaccug

SEQ ID NO: 2640845 - RNA, 19 nt, Artificial Sequence
  Description of Artificial Sequence: Synthetic oligonucleotide
aggccucaacugcaaacag

SEQ ID NO: 2640846 - RNA, 19 nt, Artificial Sequence
  Description of Artificial Sequence: Synthetic oligonucleotide
aucgaugaaccaccuguaa

SEQ ID NO: 2640847 - RNA, 19 nt, Artificial Sequence
  Description of Artificial Sequence: Synthetic oligonucleotide
uuacaauguuuguguagua

SEQ ID NO: 2640848 - RNA, 19 nt, Artificial Sequence
  Description of Artificial Sequence: Synthetic oligonucleotide
uguaagagcuugggcaaaa

SEQ ID NO: 2640849 - RNA, 19 nt, Artificial Sequence
  Description of Artificial Sequence: Synthetic oligonucleotide
gucccuuugagaacuccag

SEQ ID NO: 2640850 - RNA, 19 nt, Artificial Sequence
  Description of Artificial Sequence: Synthetic oligonucleotide
aagauacaugacacucaug

SEQ ID NO: 2640851 - RNA, 19 nt, Artificial Sequence
  Description of Artificial Sequence: Synthetic oligonucleotide
cccuuugagaacuccagac

SEQ ID NO: 2640852 - RNA, 19 nt, Artificial Sequence
  Description of Artificial Sequence: Synthetic oligonucleotide
aagccugcaguagguucgg

SEQ ID NO: 2640853 - RNA, 19 nt, Artificial Sequence
  Description of Artificial Sequence: Synthetic oligonucleotide
gaguguaaguucugaguua

SEQ ID NO: 2640854 - RNA, 19 nt, Artificial Sequence
  Description of Artificial Sequence: Synthetic oligonucleotide
caccuguaagagcuugggc

SEQ ID NO: 2640855 - RNA, 19 nt, Artificial Sequence
  Description of Artificial Sequence: Synthetic oligonucleotide
cuuucugauuaagcugcag

SEQ ID NO: 2640856 - RNA, 19 nt, Artificial Sequence
  Description of Artificial Sequence: Synthetic oligonucleotide
ucccuguagaguguaaguu

SEQ ID NO: 2640857 - RNA, 19 nt, Artificial Sequence
  Description of Artificial Sequence: Synthetic oligonucleotide
gguugcaugaggauacaac

SEQ ID NO: 2640858 - RNA, 19 nt, Artificial Sequence
  Description of Artificial Sequence: Synthetic oligonucleotide
caauuuggaaagaguaacu

SEQ ID NO: 2640859 - RNA, 19 nt, Artificial Sequence
  Description of Artificial Sequence: Synthetic oligonucleotide
cuccagacaacgugucuuc

SEQ ID NO: 2640860 - RNA, 19 nt, Artificial Sequence
  Description of Artificial Sequence: Synthetic oligonucleotide
cucuuauaccuuucaaaua

SEQ ID NO: 2640861 - RNA, 19 nt, Artificial Sequence
  Description of Artificial Sequence: Synthetic oligonucleotide
cugcagcaucuacagaaac

SEQ ID NO: 2640862 - RNA, 19 nt, Artificial Sequence
  Description of Artificial Sequence: Synthetic oligonucleotide
guaacucggagaucaggaa

SEQ ID NO: 2640863 - RNA, 19 nt, Artificial Sequence
  Description of Artificial Sequence: Synthetic oligonucleotide
uccuaccucuuauaccuuu

SEQ ID NO: 2640864 - RNA, 19 nt, Artificial Sequence
  Description of Artificial Sequence: Synthetic oligonucleotide
caguagguucgggaggccg

SEQ ID NO: 2640865 - RNA, 19 nt, Artificial Sequence
  Description of Artificial Sequence: Synthetic oligonucleotide
cuguagaguguaaguucug

SEQ ID NO: 2640866 - RNA, 19 nt, Artificial Sequence
  Description of Artificial Sequence: Synthetic oligonucleotide
gaguuaauaucuacacaua

SEQ ID NO: 2640867 - RNA, 19 nt, Artificial Sequence
  Description of Artificial Sequence: Synthetic oligonucleotide
acuccagacaacgugucuu

SEQ ID NO: 2640868 - RNA, 19 nt, Artificial Sequence
  Description of Artificial Sequence: Synthetic oligonucleotide
cuuauaccuuucaaauaua

SEQ ID NO: 2640869 - RNA, 19 nt, Artificial Sequence
  Description of Artificial Sequence: Synthetic oligonucleotide
caugaggauacaacucaaa

SEQ ID NO: 2640870 - RNA, 19 nt, Artificial Sequence
  Description of Artificial Sequence: Synthetic oligonucleotide
auaucuacacauagagguu

SEQ ID NO: 2640871 - RNA, 19 nt, Artificial Sequence
  Description of Artificial Sequence: Synthetic oligonucleotide
aauuggugccuaggacaug

SEQ ID NO: 2640872 - RNA, 19 nt, Artificial Sequence
  Description of Artificial Sequence: Synthetic oligonucleotide
gcaaacagccauccuuuug

SEQ ID NO: 2640873 - RNA, 19 nt, Artificial Sequence
  Description of Artificial Sequence: Synthetic oligonucleotide
cucaacugcaaacagccau

SEQ ID NO: 2640874 - RNA, 19 nt, Artificial Sequence
  Description of Artificial Sequence: Synthetic oligonucleotide
agaagacaauuuggaaaga

SEQ ID NO: 2640875 - RNA, 19 nt, Artificial Sequence
  Description of Artificial Sequence: Synthetic oligonucleotide
accgugugggacugcugag

SEQ ID NO: 2640876 - RNA, 19 nt, Artificial Sequence
  Description of Artificial Sequence: Synthetic oligonucleotide
aacgugucuucucccugua

SEQ ID NO: 2640877 - RNA, 19 nt, Artificial Sequence
  Description of Artificial Sequence: Synthetic oligonucleotide
gacaacgugucuucucccu

SEQ ID NO: 2640878 - RNA, 19 nt, Artificial Sequence
  Description of Artificial Sequence: Synthetic oligonucleotide
ugcugaguggccgucucaa

SEQ ID NO: 2640879 - RNA, 19 nt, Artificial Sequence
  Description of Artificial Sequence: Synthetic oligonucleotide
caugucaagguaaccauuu

SEQ ID NO: 2640880 - RNA, 19 nt, Artificial Sequence
  Description of Artificial Sequence: Synthetic oligonucleotide
cuaccucuuauaccuuuca

SEQ ID NO: 2640881 - RNA, 19 nt, Artificial Sequence
  Description of Artificial Sequence: Synthetic oligonucleotide
acgugucuucucccuguag

SEQ ID NO: 2640882 - RNA, 19 nt, Artificial Sequence
  Description of Artificial Sequence: Synthetic oligonucleotide
ggugccuaggacauguaca

SEQ ID NO: 2640883 - RNA, 19 nt, Artificial Sequence
  Description of Artificial Sequence: Synthetic oligonucleotide
acggugucagaagacaauu

SEQ ID NO: 2640884 - RNA, 19 nt, Artificial Sequence
  Description of Artificial Sequence: Synthetic oligonucleotide
gaacuccagacaacguguc

SEQ ID NO: 2640885 - RNA, 19 nt, Artificial Sequence
  Description of Artificial Sequence: Synthetic oligonucleotide
aagguugcaugaggauaca

SEQ ID NO: 2640886 - RNA, 19 nt, Artificial Sequence
  Description of Artificial Sequence: Synthetic oligonucleotide
cccuguagaguguaaguuc

SEQ ID NO: 2640887 - RNA, 19 nt, Artificial Sequence
  Description of Artificial Sequence: Synthetic oligonucleotide
ccaucgaucgaugaaccac

SEQ ID NO: 2640888 - RNA, 19 nt, Artificial Sequence
  Description of Artificial Sequence: Synthetic oligonucleotide
cauguacagggugacuuca

SEQ ID NO: 2640889 - RNA, 19 nt, Artificial Sequence
  Description of Artificial Sequence: Synthetic oligonucleotide
ugcggaugccaucgaucga

SEQ ID NO: 2640890 - RNA, 19 nt, Artificial Sequence
  Description of Artificial Sequence: Synthetic oligonucleotide
gugacuucagcaacggugu

SEQ ID NO: 2640891 - RNA, 19 nt, Artificial Sequence
  Description of Artificial Sequence: Synthetic oligonucleotide
caacugaggacuuucugau

SEQ ID NO: 2640892 - RNA, 19 nt, Artificial Sequence
  Description of Artificial Sequence: Synthetic oligonucleotide
cacucaugucaagguaacc

SEQ ID NO: 2640893 - RNA, 19 nt, Artificial Sequence
  Description of Artificial Sequence: Synthetic oligonucleotide
gguaaccauuuucaacauc

SEQ ID NO: 2640894 - RNA, 19 nt, Artificial Sequence
  Description of Artificial Sequence: Synthetic oligonucleotide
auauugcaugaggucuuug

SEQ ID NO: 2640895 - RNA, 19 nt, Artificial Sequence
  Description of Artificial Sequence: Synthetic oligonucleotide
ugacuucagcaacgguguc

SEQ ID NO: 2640896 - RNA, 19 nt, Artificial Sequence
  Description of Artificial Sequence: Synthetic oligonucleotide
ucuacacauagagguuuua

SEQ ID NO: 2640897 - RNA, 19 nt, Artificial Sequence
  Description of Artificial Sequence: Synthetic oligonucleotide
caacggugucagaagacaa

SEQ ID NO: 2640898 - RNA, 19 nt, Artificial Sequence
  Description of Artificial Sequence: Synthetic oligonucleotide
uccagacaacgugucuucu

SEQ ID NO: 2640899 - RNA, 19 nt, Artificial Sequence
  Description of Artificial Sequence: Synthetic oligonucleotide
cacauagagguuuuauuuu

SEQ ID NO: 2640900 - RNA, 19 nt, Artificial Sequence
  Description of Artificial Sequence: Synthetic oligonucleotide
cucaugucaagguaaccau

SEQ ID NO: 2640901 - RNA, 19 nt, Artificial Sequence
  Description of Artificial Sequence: Synthetic oligonucleotide
ugcaaacagccauccuuuu

SEQ ID NO: 2640902 - RNA, 19 nt, Artificial Sequence
  Description of Artificial Sequence: Synthetic oligonucleotide
cgaugaaccaccuguaaga

SEQ ID NO: 2640903 - RNA, 19 nt, Artificial Sequence
  Description of Artificial Sequence: Synthetic oligonucleotide
gaucgaugaaccaccugua

SEQ ID NO: 2640904 - RNA, 19 nt, Artificial Sequence
  Description of Artificial Sequence: Synthetic oligonucleotide
gacaagguugcaugaggau

SEQ ID NO: 2640905 - RNA, 19 nt, Artificial Sequence
  Description of Artificial Sequence: Synthetic oligonucleotide
agaguaacucggagaucag

SEQ ID NO: 2640906 - RNA, 19 nt, Artificial Sequence
  Description of Artificial Sequence: Synthetic oligonucleotide
gggaggccggucccgaagg

SEQ ID NO: 2640907 - RNA, 19 nt, Artificial Sequence
  Description of Artificial Sequence: Synthetic oligonucleotide
cagcaacggugucagaaga

SEQ ID NO: 2640908 - RNA, 19 nt, Artificial Sequence
  Description of Artificial Sequence: Synthetic oligonucleotide
gguugaaguguaaaagaua

SEQ ID NO: 2640909 - RNA, 19 nt, Artificial Sequence
  Description of Artificial Sequence: Synthetic oligonucleotide
ccucuuauaccuuucaaau

SEQ ID NO: 2640910 - RNA, 19 nt, Artificial Sequence
  Description of Artificial Sequence: Synthetic oligonucleotide
cucggagaucaggaagcag

SEQ ID NO: 2640911 - RNA, 19 nt, Artificial Sequence
  Description of Artificial Sequence: Synthetic oligonucleotide
uucucccuguagaguguaa

SEQ ID NO: 2640912 - RNA, 19 nt, Artificial Sequence
  Description of Artificial Sequence: Synthetic oligonucleotide
auccuuuugcaaagauaca

SEQ ID NO: 2640913 - RNA, 19 nt, Artificial Sequence
  Description of Artificial Sequence: Synthetic oligonucleotide
caguuauauuacaauguuu

SEQ ID NO: 2640914 - RNA, 19 nt, Artificial Sequence
  Description of Artificial Sequence: Synthetic oligonucleotide
gaagggcgggcccaggccu

SEQ ID NO: 2640915 - RNA, 19 nt, Artificial Sequence
  Description of Artificial Sequence: Synthetic oligonucleotide
ccuuugagaacuccagaca

SEQ ID NO: 2640916 - RNA, 19 nt, Artificial Sequence
  Description of Artificial Sequence: Synthetic oligonucleotide
acucggagaucaggaagca

SEQ ID NO: 2640917 - RNA, 19 nt, Artificial Sequence
  Description of Artificial Sequence: Synthetic oligonucleotide
gauuaagcugcagcaucua

SEQ ID NO: 2640918 - RNA, 19 nt, Artificial Sequence
  Description of Artificial Sequence: Synthetic oligonucleotide
augaggucuuugacaaggu

SEQ ID NO: 2640919 - RNA, 19 nt, Artificial Sequence
  Description of Artificial Sequence: Synthetic oligonucleotide
ggaagggcgggcccaggcc

SEQ ID NO: 2640920 - RNA, 19 nt, Artificial Sequence
  Description of Artificial Sequence: Synthetic oligonucleotide
gcaacggugucagaagaca

SEQ ID NO: 2640921 - RNA, 19 nt, Artificial Sequence
  Description of Artificial Sequence: Synthetic oligonucleotide
ggccucaacugcaaacagc

SEQ ID NO: 2640922 - RNA, 19 nt, Artificial Sequence
  Description of Artificial Sequence: Synthetic oligonucleotide
aucgaucgaugaaccaccu

SEQ ID NO: 2640923 - RNA, 19 nt, Artificial Sequence
  Description of Artificial Sequence: Synthetic oligonucleotide
ccaccuguaagagcuuggg

SEQ ID NO: 2640924 - RNA, 19 nt, Artificial Sequence
  Description of Artificial Sequence: Synthetic oligonucleotide
ccuguaagagcuugggcaa

SEQ ID NO: 2640925 - RNA, 19 nt, Artificial Sequence
  Description of Artificial Sequence: Synthetic oligonucleotide
ccuguagaguguaaguucu

SEQ ID NO: 2640926 - RNA, 19 nt, Artificial Sequence
  Description of Artificial Sequence: Synthetic oligonucleotide
ccuaccucuuauaccuuuc

SEQ ID NO: 2640927 - RNA, 19 nt, Artificial Sequence
  Description of Artificial Sequence: Synthetic oligonucleotide
gguucgggaggccgguccc

SEQ ID NO: 2640928 - RNA, 19 nt, Artificial Sequence
  Description of Artificial Sequence: Synthetic oligonucleotide
gcaagacuuagcauugaaa

SEQ ID NO: 2640929 - RNA, 19 nt, Artificial Sequence
  Description of Artificial Sequence: Synthetic oligonucleotide
auccaaccgugugggacug

SEQ ID NO: 2640930 - RNA, 19 nt, Artificial Sequence
  Description of Artificial Sequence: Synthetic oligonucleotide
aucuacacauagagguuuu

SEQ ID NO: 2640931 - RNA, 19 nt, Artificial Sequence
  Description of Artificial Sequence: Synthetic oligonucleotide
caaccgugugggacugcug

SEQ ID NO: 2640932 - RNA, 19 nt, Artificial Sequence
  Description of Artificial Sequence: Synthetic oligonucleotide
guucgggaggccggucccg

SEQ ID NO: 2640933 - RNA, 19 nt, Artificial Sequence
  Description of Artificial Sequence: Synthetic oligonucleotide
aguggccgucucaagccug

SEQ ID NO: 2640934 - RNA, 19 nt, Artificial Sequence
  Description of Artificial Sequence: Synthetic oligonucleotide
cucccuguagaguguaagu

SEQ ID NO: 2640935 - RNA, 19 nt, Artificial Sequence
  Description of Artificial Sequence: Synthetic oligonucleotide
guggccgucucaagccugc

SEQ ID NO: 2640936 - RNA, 19 nt, Artificial Sequence
  Description of Artificial Sequence: Synthetic oligonucleotide
ccagacaacgugucuucuc

SEQ ID NO: 2640937 - RNA, 19 nt, Artificial Sequence
  Description of Artificial Sequence: Synthetic oligonucleotide
ggaugccaucgaucgauga

SEQ ID NO: 2640938 - RNA, 19 nt, Artificial Sequence
  Description of Artificial Sequence: Synthetic oligonucleotide
uucgggaggccggucccga

SEQ ID NO: 2640939 - RNA, 19 nt, Artificial Sequence
  Description of Artificial Sequence: Synthetic oligonucleotide
gucuuugacaagguugcau

SEQ ID NO: 2640940 - RNA, 19 nt, Artificial Sequence
  Description of Artificial Sequence: Synthetic oligonucleotide
agguugcaugaggauacaa

SEQ ID NO: 2640941 - RNA, 19 nt, Artificial Sequence
  Description of Artificial Sequence: Synthetic oligonucleotide
uuggugccuaggacaugua

SEQ ID NO: 2640942 - RNA, 19 nt, Artificial Sequence
  Description of Artificial Sequence: Synthetic oligonucleotide
caaaugcggaugccaucga

SEQ ID NO: 2640943 - RNA, 19 nt, Artificial Sequence
  Description of Artificial Sequence: Synthetic oligonucleotide
cgaucgaugaaccaccugu

SEQ ID NO: 2640944 - RNA, 19 nt, Artificial Sequence
  Description of Artificial Sequence: Synthetic oligonucleotide
gaguggccgucucaagccu

SEQ ID NO: 2640945 - RNA, 19 nt, Artificial Sequence
  Description of Artificial Sequence: Synthetic oligonucleotide
gauauugcaugaggucuuu

SEQ ID NO: 2640946 - RNA, 19 nt, Artificial Sequence
  Description of Artificial Sequence: Synthetic oligonucleotide
cgugucuucucccuguaga

SEQ ID NO: 2640947 - RNA, 19 nt, Artificial Sequence
  Description of Artificial Sequence: Synthetic oligonucleotide
ggccgucucaagccugcag

SEQ ID NO: 2640948 - RNA, 19 nt, Artificial Sequence
  Description of Artificial Sequence: Synthetic oligonucleotide
cgugugggacugcugagug

SEQ ID NO: 2640949 - RNA, 19 nt, Artificial Sequence
  Description of Artificial Sequence: Synthetic oligonucleotide
gccgucucaagccugcagu

SEQ ID NO: 2640950 - RNA, 19 nt, Artificial Sequence
  Description of Artificial Sequence: Synthetic oligonucleotide
gccaucgaucgaugaacca

SEQ ID NO: 2640951 - RNA, 19 nt, Artificial Sequence
  Description of Artificial Sequence: Synthetic oligonucleotide
aagcagcaacugaggacuu

SEQ ID NO: 2640952 - RNA, 19 nt, Artificial Sequence
  Description of Artificial Sequence: Synthetic oligonucleotide
agcagcaacugaggacuuu

SEQ ID NO: 2640953 - RNA, 19 nt, Artificial Sequence
  Description of Artificial Sequence: Synthetic oligonucleotide
agccugcaguagguucggg

SEQ ID NO: 2640954 - RNA, 19 nt, Artificial Sequence
  Description of Artificial Sequence: Synthetic oligonucleotide
uccaaccgugugggacugc

SEQ ID NO: 2640955 - RNA, 19 nt, Artificial Sequence
  Description of Artificial Sequence: Synthetic oligonucleotide
cuguaagagcuugggcaaa

SEQ ID NO: 2640956 - RNA, 19 nt, Artificial Sequence
  Description of Artificial Sequence: Synthetic oligonucleotide
cuucucccuguagagugua

SEQ ID NO: 2640957 - RNA, 19 nt, Artificial Sequence
  Description of Artificial Sequence: Synthetic oligonucleotide
ucgggaggccggucccgaa

SEQ ID NO: 2640958 - RNA, 19 nt, Artificial Sequence
  Description of Artificial Sequence: Synthetic oligonucleotide
cggagaucaggaagcagca

SEQ ID NO: 2640959 - RNA, 19 nt, Artificial Sequence
  Description of Artificial Sequence: Synthetic oligonucleotide
caggaagggcgggcccagg

SEQ ID NO: 2640960 - RNA, 19 nt, Artificial Sequence
  Description of Artificial Sequence: Synthetic oligonucleotide
gcugcagcaucuacagaaa

SEQ ID NO: 2640961 - RNA, 19 nt, Artificial Sequence
  Description of Artificial Sequence: Synthetic oligonucleotide
uagguucgggaggccgguc

SEQ ID NO: 2640962 - RNA, 19 nt, Artificial Sequence
  Description of Artificial Sequence: Synthetic oligonucleotide
uggccgucucaagccugca

SEQ ID NO: 2640963 - RNA, 19 nt, Artificial Sequence
  Description of Artificial Sequence: Synthetic oligonucleotide
cuucagcaacggugucaga

SEQ ID NO: 2640964 - RNA, 19 nt, Artificial Sequence
  Description of Artificial Sequence: Synthetic oligonucleotide
ccuaggacauguacagggu

SEQ ID NO: 2640965 - RNA, 19 nt, Artificial Sequence
  Description of Artificial Sequence: Synthetic oligonucleotide
cgucucaagccugcaguag

SEQ ID NO: 2640966 - RNA, 19 nt, Artificial Sequence
  Description of Artificial Sequence: Synthetic oligonucleotide
guagguucgggaggccggu

SEQ ID NO: 2640967 - RNA, 19 nt, Artificial Sequence
  Description of Artificial Sequence: Synthetic oligonucleotide
ggagaucaggaagcagcaa

SEQ ID NO: 2640968 - RNA, 19 nt, Artificial Sequence
  Description of Artificial Sequence: Synthetic oligonucleotide
ccucaacugcaaacagcca

SEQ ID NO: 2640969 - RNA, 19 nt, Artificial Sequence
  Description of Artificial Sequence: Synthetic oligonucleotide
gcggaugccaucgaucgau

SEQ ID NO: 2640970 - RNA, 19 nt, Artificial Sequence
  Description of Artificial Sequence: Synthetic oligonucleotide
ggcccaggccucaacugca

SEQ ID NO: 2640971 - RNA, 19 nt, Artificial Sequence
  Description of Artificial Sequence: Synthetic oligonucleotide
gggacugcugaguggccgu

SEQ ID NO: 2640972 - RNA, 19 nt, Artificial Sequence
  Description of Artificial Sequence: Synthetic oligonucleotide
ggaggccggucccgaagga

SEQ ID NO: 2640973 - RNA, 19 nt, Artificial Sequence
  Description of Artificial Sequence: Synthetic oligonucleotide
gcaguagguucgggaggcc

SEQ ID NO: 2640974 - RNA, 19 nt, Artificial Sequence
  Description of Artificial Sequence: Synthetic oligonucleotide
cggaugccaucgaucgaug

SEQ ID NO: 2640975 - RNA, 19 nt, Artificial Sequence
  Description of Artificial Sequence: Synthetic oligonucleotide
guguaaguucugaguuaau

SEQ ID NO: 2640976 - RNA, 19 nt, Artificial Sequence
  Description of Artificial Sequence: Synthetic oligonucleotide
ccgucucaagccugcagua

SEQ ID NO: 2640977 - RNA, 19 nt, Artificial Sequence
  Description of Artificial Sequence: Synthetic oligonucleotide
ggacugcugaguggccguc

SEQ ID NO: 2640978 - RNA, 19 nt, Artificial Sequence
  Description of Artificial Sequence: Synthetic oligonucleotide
cgggaggccggucccgaag

SEQ ID NO: 2640979 - RNA, 19 nt, Artificial Sequence
  Description of Artificial Sequence: Synthetic oligonucleotide
gaaccaccuguaagagcuu

SEQ ID NO: 2640980 - RNA, 19 nt, Artificial Sequence
  Description of Artificial Sequence: Synthetic oligonucleotide
gggugacuucagcaacggu

SEQ ID NO: 2640981 - RNA, 19 nt, Artificial Sequence
  Description of Artificial Sequence: Synthetic oligonucleotide
cuccuaccucuuauaccuu

SEQ ID NO: 2640982 - RNA, 19 nt, Artificial Sequence
  Description of Artificial Sequence: Synthetic oligonucleotide
ccaaccgugugggacugcu

SEQ ID NO: 2640983 - RNA, 19 nt, Artificial Sequence
  Description of Artificial Sequence: Synthetic oligonucleotide
ccgugugggacugcugagu

SEQ ID NO: 2640984 - RNA, 19 nt, Artificial Sequence
  Description of Artificial Sequence: Synthetic oligonucleotide
cggugucagaagacaauuu

SEQ ID NO: 2640985 - RNA, 19 nt, Artificial Sequence
  Description of Artificial Sequence: Synthetic oligonucleotide
gaaaucgucaaccucagcg

SEQ ID NO: 2640986 - RNA, 19 nt, Artificial Sequence
  Description of Artificial Sequence: Synthetic oligonucleotide
aaaucgucaaccucagcgc

SEQ ID NO: 2640987 - RNA, 19 nt, Artificial Sequence
  Description of Artificial Sequence: Synthetic oligonucleotide
aauacuagucuccaaggag

SEQ ID NO: 2640988 - RNA, 19 nt, Artificial Sequence
  Description of Artificial Sequence: Synthetic oligonucleotide
uuaucuuggaggaggaucg

SEQ ID NO: 2640989 - RNA, 19 nt, Artificial Sequence
  Description of Artificial Sequence: Synthetic oligonucleotide
agagaugcgauccugccgc

SEQ ID NO: 2640990 - RNA, 19 nt, Artificial Sequence
  Description of Artificial Sequence: Synthetic oligonucleotide
uauuuagaggugcagcagg

SEQ ID NO: 2640991 - RNA, 19 nt, Artificial Sequence
  Description of Artificial Sequence: Synthetic oligonucleotide
aaucgucaaccucagcgcc

SEQ ID NO: 2640992 - RNA, 19 nt, Artificial Sequence
  Description of Artificial Sequence: Synthetic oligonucleotide
ugaauacuagucuccaagg

SEQ ID NO: 2640993 - RNA, 19 nt, Artificial Sequence
  Description of Artificial Sequence: Synthetic oligonucleotide
uguguaagccaccacaucu

SEQ ID NO: 2640994 - RNA, 19 nt, Artificial Sequence
  Description of Artificial Sequence: Synthetic oligonucleotide
agccggauugucuuuaucc

SEQ ID NO: 2640995 - RNA, 19 nt, Artificial Sequence
  Description of Artificial Sequence: Synthetic oligonucleotide
uguauuuagaggugcagca

SEQ ID NO: 2640996 - RNA, 19 nt, Artificial Sequence
  Description of Artificial Sequence: Synthetic oligonucleotide
acagcugaauacuagucuc

SEQ ID NO: 2640997 - RNA, 19 nt, Artificial Sequence
  Description of Artificial Sequence: Synthetic oligonucleotide
cugaauacuagucuccaag

SEQ ID NO: 2640998 - RNA, 19 nt, Artificial Sequence
  Description of Artificial Sequence: Synthetic oligonucleotide
uucucaggggaacagaggu

SEQ ID NO: 2640999 - RNA, 19 nt, Artificial Sequence
  Description of Artificial Sequence: Synthetic oligonucleotide
uuuuccgcugcuuaucuug

SEQ ID NO: 2641000 - RNA, 19 nt, Artificial Sequence
  Description of Artificial Sequence: Synthetic oligonucleotide
ucuuuauccacaucugagu

SEQ ID NO: 2641001 - RNA, 19 nt, Artificial Sequence
  Description of Artificial Sequence: Synthetic oligonucleotide
gauaagcccacacagcuga

SEQ ID NO: 2641002 - RNA, 19 nt, Artificial Sequence
  Description of Artificial Sequence: Synthetic oligonucleotide
guaaccacgcagcagguag

SEQ ID NO: 2641003 - RNA, 19 nt, Artificial Sequence
  Description of Artificial Sequence: Synthetic oligonucleotide
auacuagucuccaaggagg

SEQ ID NO: 2641004 - RNA, 19 nt, Artificial Sequence
  Description of Artificial Sequence: Synthetic oligonucleotide
uggauucagagccggauug

SEQ ID NO: 2641005 - RNA, 19 nt, Artificial Sequence
  Description of Artificial Sequence: Synthetic oligonucleotide
ugcuucaggcugcacaggg

SEQ ID NO: 2641006 - RNA, 19 nt, Artificial Sequence
  Description of Artificial Sequence: Synthetic oligonucleotide
cucacagugcucuggacgg

SEQ ID NO: 2641007 - RNA, 19 nt, Artificial Sequence
  Description of Artificial Sequence: Synthetic oligonucleotide
agcacaagcccggauaagc

SEQ ID NO: 2641008 - RNA, 19 nt, Artificial Sequence
  Description of Artificial Sequence: Synthetic oligonucleotide
ugucuuuauccacaucuga

SEQ ID NO: 2641009 - RNA, 19 nt, Artificial Sequence
  Description of Artificial Sequence: Synthetic oligonucleotide
uugccguggacacuguuag

SEQ ID NO: 2641010 - RNA, 19 nt, Artificial Sequence
  Description of Artificial Sequence: Synthetic oligonucleotide
caugcgguaaccacgcagc

SEQ ID NO: 2641011 - RNA, 19 nt, Artificial Sequence
  Description of Artificial Sequence: Synthetic oligonucleotide
cuuuauccacaucugaguc

SEQ ID NO: 2641012 - RNA, 19 nt, Artificial Sequence
  Description of Artificial Sequence: Synthetic oligonucleotide
gagacgagagaugcgaucc

SEQ ID NO: 2641013 - RNA, 19 nt, Artificial Sequence
  Description of Artificial Sequence: Synthetic oligonucleotide
ugggacgagagccuguggc

SEQ ID NO: 2641014 - RNA, 19 nt, Artificial Sequence
  Description of Artificial Sequence: Synthetic oligonucleotide
ugagucgagcuccugacaa

SEQ ID NO: 2641015 - RNA, 19 nt, Artificial Sequence
  Description of Artificial Sequence: Synthetic oligonucleotide
gagagaugcgauccugccg

SEQ ID NO: 2641016 - RNA, 19 nt, Artificial Sequence
  Description of Artificial Sequence: Synthetic oligonucleotide
ucgucucugcuucugucgg

SEQ ID NO: 2641017 - RNA, 19 nt, Artificial Sequence
  Description of Artificial Sequence: Synthetic oligonucleotide
guguucccgagcuugagag

SEQ ID NO: 2641018 - RNA, 19 nt, Artificial Sequence
  Description of Artificial Sequence: Synthetic oligonucleotide
cacgcaguagauuuuccgc

SEQ ID NO: 2641019 - RNA, 19 nt, Artificial Sequence
  Description of Artificial Sequence: Synthetic oligonucleotide
aggaucgucccgcaguccg

SEQ ID NO: 2641020 - RNA, 19 nt, Artificial Sequence
  Description of Artificial Sequence: Synthetic oligonucleotide
gaauacuagucuccaagga

SEQ ID NO: 2641021 - RNA, 19 nt, Artificial Sequence
  Description of Artificial Sequence: Synthetic oligonucleotide
ucuguauuuagaggugcag

SEQ ID NO: 2641022 - RNA, 19 nt, Artificial Sequence
  Description of Artificial Sequence: Synthetic oligonucleotide
agguagucgcccaugagac

SEQ ID NO: 2641023 - RNA, 19 nt, Artificial Sequence
  Description of Artificial Sequence: Synthetic oligonucleotide
ucaaccucagcgccguuca

SEQ ID NO: 2641024 - RNA, 19 nt, Artificial Sequence
  Description of Artificial Sequence: Synthetic oligonucleotide
cuuaucuuggaggaggauc

SEQ ID NO: 2641025 - RNA, 19 nt, Artificial Sequence
  Description of Artificial Sequence: Synthetic oligonucleotide
gaugcgauccugccgcucc

SEQ ID NO: 2641026 - RNA, 19 nt, Artificial Sequence
  Description of Artificial Sequence: Synthetic oligonucleotide
ugcacagggccucagcaca

SEQ ID NO: 2641027 - RNA, 19 nt, Artificial Sequence
  Description of Artificial Sequence: Synthetic oligonucleotide
ugucguggaggcgagcugg

SEQ ID NO: 2641028 - RNA, 19 nt, Artificial Sequence
  Description of Artificial Sequence: Synthetic oligonucleotide
accucagcgccguucaagg

SEQ ID NO: 2641029 - RNA, 19 nt, Artificial Sequence
  Description of Artificial Sequence: Synthetic oligonucleotide
agcccagcucagcugaagc

SEQ ID NO: 2641030 - RNA, 19 nt, Artificial Sequence
  Description of Artificial Sequence: Synthetic oligonucleotide
uccgcugcuuaucuuggag

SEQ ID NO: 2641031 - RNA, 19 nt, Artificial Sequence
  Description of Artificial Sequence: Synthetic oligonucleotide
cuguauuuagaggugcagc

SEQ ID NO: 2641032 - RNA, 19 nt, Artificial Sequence
  Description of Artificial Sequence: Synthetic oligonucleotide
gaguagaggucucagagcu

SEQ ID NO: 2641033 - RNA, 19 nt, Artificial Sequence
  Description of Artificial Sequence: Synthetic oligonucleotide
cacaucuguauuuagaggu

SEQ ID NO: 2641034 - RNA, 19 nt, Artificial Sequence
  Description of Artificial Sequence: Synthetic oligonucleotide
ugaagcugcuucaggcugc

SEQ ID NO: 2641035 - RNA, 19 nt, Artificial Sequence
  Description of Artificial Sequence: Synthetic oligonucleotide
ugaagcccagguuagcuuc

SEQ ID NO: 2641036 - RNA, 19 nt, Artificial Sequence
  Description of Artificial Sequence: Synthetic oligonucleotide
ucugagucgagcuccugac

SEQ ID NO: 2641037 - RNA, 19 nt, Artificial Sequence
  Description of Artificial Sequence: Synthetic oligonucleotide
cuccugacaagccacgcag

SEQ ID NO: 2641038 - RNA, 19 nt, Artificial Sequence
  Description of Artificial Sequence: Synthetic oligonucleotide
cucagcgccguucaaggcc

SEQ ID NO: 2641039 - RNA, 19 nt, Artificial Sequence
  Description of Artificial Sequence: Synthetic oligonucleotide
uacuagucuccaaggaggu

SEQ ID NO: 2641040 - RNA, 19 nt, Artificial Sequence
  Description of Artificial Sequence: Synthetic oligonucleotide
ggugcuagagcccagcuca

SEQ ID NO: 2641041 - RNA, 19 nt, Artificial Sequence
  Description of Artificial Sequence: Synthetic oligonucleotide
gcgguaaccacgcagcagg

SEQ ID NO: 2641042 - RNA, 19 nt, Artificial Sequence
  Description of Artificial Sequence: Synthetic oligonucleotide
uuggaggaggaucgucccg

SEQ ID NO: 2641043 - RNA, 19 nt, Artificial Sequence
  Description of Artificial Sequence: Synthetic oligonucleotide
agauuuuccgcugcuuauc

SEQ ID NO: 2641044 - RNA, 19 nt, Artificial Sequence
  Description of Artificial Sequence: Synthetic oligonucleotide
cucuggacgggguacuggg

SEQ ID NO: 2641045 - RNA, 19 nt, Artificial Sequence
  Description of Artificial Sequence: Synthetic oligonucleotide
ucugcuucugucggaggcg

SEQ ID NO: 2641046 - RNA, 19 nt, Artificial Sequence
  Description of Artificial Sequence: Synthetic oligonucleotide
cuuggaggaggaucguccc

SEQ ID NO: 2641047 - RNA, 19 nt, Artificial Sequence
  Description of Artificial Sequence: Synthetic oligonucleotide
guucccgagcuugagagag

SEQ ID NO: 2641048 - RNA, 19 nt, Artificial Sequence
  Description of Artificial Sequence: Synthetic oligonucleotide
caucuguauuuagaggugc

SEQ ID NO: 2641049 - RNA, 19 nt, Artificial Sequence
  Description of Artificial Sequence: Synthetic oligonucleotide
cauguugccguggacacug

SEQ ID NO: 2641050 - RNA, 19 nt, Artificial Sequence
  Description of Artificial Sequence: Synthetic oligonucleotide
ucgagcuccugacaagcca

SEQ ID NO: 2641051 - RNA, 19 nt, Artificial Sequence
  Description of Artificial Sequence: Synthetic oligonucleotide
cuuguggauucagagccgg

SEQ ID NO: 2641052 - RNA, 19 nt, Artificial Sequence
  Description of Artificial Sequence: Synthetic oligonucleotide
cucaggggaacagagguug

SEQ ID NO: 2641053 - RNA, 19 nt, Artificial Sequence
  Description of Artificial Sequence: Synthetic oligonucleotide
cacaagcccggauaagccc

SEQ ID NO: 2641054 - RNA, 19 nt, Artificial Sequence
  Description of Artificial Sequence: Synthetic oligonucleotide
ucagcgccguucaaggcca

SEQ ID NO: 2641055 - RNA, 19 nt, Artificial Sequence
  Description of Artificial Sequence: Synthetic oligonucleotide
acgcaguagauuuuccgcu

SEQ ID NO: 2641056 - RNA, 19 nt, Artificial Sequence
  Description of Artificial Sequence: Synthetic oligonucleotide
guauuuagaggugcagcag

SEQ ID NO: 2641057 - RNA, 19 nt, Artificial Sequence
  Description of Artificial Sequence: Synthetic oligonucleotide
cugccuugagcccugcugc

SEQ ID NO: 2641058 - RNA, 19 nt, Artificial Sequence
  Description of Artificial Sequence: Synthetic oligonucleotide
cagcugaauacuagucucc

SEQ ID NO: 2641059 - RNA, 19 nt, Artificial Sequence
  Description of Artificial Sequence: Synthetic oligonucleotide
cucugcuucugucggaggc

SEQ ID NO: 2641060 - RNA, 19 nt, Artificial Sequence
  Description of Artificial Sequence: Synthetic oligonucleotide
uucagagccggauugucuu

SEQ ID NO: 2641061 - RNA, 19 nt, Artificial Sequence
  Description of Artificial Sequence: Synthetic oligonucleotide
uagauuuuccgcugcuuau

SEQ ID NO: 2641062 - RNA, 19 nt, Artificial Sequence
  Description of Artificial Sequence: Synthetic oligonucleotide
ugcuuaucuuggaggagga

SEQ ID NO: 2641063 - RNA, 19 nt, Artificial Sequence
  Description of Artificial Sequence: Synthetic oligonucleotide
aaggaggugcuagagccca

SEQ ID NO: 2641064 - RNA, 19 nt, Artificial Sequence
  Description of Artificial Sequence: Synthetic oligonucleotide
ucccgagcuugagagaggg

SEQ ID NO: 2641065 - RNA, 19 nt, Artificial Sequence
  Description of Artificial Sequence: Synthetic oligonucleotide
agugcucuggacgggguac

SEQ ID NO: 2641066 - RNA, 19 nt, Artificial Sequence
  Description of Artificial Sequence: Synthetic oligonucleotide
acacagcugaauacuaguc

SEQ ID NO: 2641067 - RNA, 19 nt, Artificial Sequence
  Description of Artificial Sequence: Synthetic oligonucleotide
aaccucagcgccguucaag

SEQ ID NO: 2641068 - RNA, 19 nt, Artificial Sequence
  Description of Artificial Sequence: Synthetic oligonucleotide
agagguuggaguagagguc

SEQ ID NO: 2641069 - RNA, 19 nt, Artificial Sequence
  Description of Artificial Sequence: Synthetic oligonucleotide
ugcagcucccucacagugc

SEQ ID NO: 2641070 - RNA, 19 nt, Artificial Sequence
  Description of Artificial Sequence: Synthetic oligonucleotide
ugagacgagagaugcgauc

SEQ ID NO: 2641071 - RNA, 19 nt, Artificial Sequence
  Description of Artificial Sequence: Synthetic oligonucleotide
aggcgaaaucgucaaccuc

SEQ ID NO: 2641072 - RNA, 19 nt, Artificial Sequence
  Description of Artificial Sequence: Synthetic oligonucleotide
uuagcuucugcaggagggc

SEQ ID NO: 2641073 - RNA, 19 nt, Artificial Sequence
  Description of Artificial Sequence: Synthetic oligonucleotide
aggaggaucgucccgcagu

SEQ ID NO: 2641074 - RNA, 19 nt, Artificial Sequence
  Description of Artificial Sequence: Synthetic oligonucleotide
aucugagucgagcuccuga

SEQ ID NO: 2641075 - RNA, 19 nt, Artificial Sequence
  Description of Artificial Sequence: Synthetic oligonucleotide
uuggaguagaggucucaga

SEQ ID NO: 2641076 - RNA, 19 nt, Artificial Sequence
  Description of Artificial Sequence: Synthetic oligonucleotide
aaccacgcagcagguaguc

SEQ ID NO: 2641077 - RNA, 19 nt, Artificial Sequence
  Description of Artificial Sequence: Synthetic oligonucleotide
uaggggaggccccugggcu

SEQ ID NO: 2641078 - RNA, 19 nt, Artificial Sequence
  Description of Artificial Sequence: Synthetic oligonucleotide
gagcugaagcugcuucagg

SEQ ID NO: 2641079 - RNA, 19 nt, Artificial Sequence
  Description of Artificial Sequence: Synthetic oligonucleotide
caugagacgagagaugcga

SEQ ID NO: 2641080 - RNA, 19 nt, Artificial Sequence
  Description of Artificial Sequence: Synthetic oligonucleotide
aggucucagagcugaagcu

SEQ ID NO: 2641081 - RNA, 19 nt, Artificial Sequence
  Description of Artificial Sequence: Synthetic oligonucleotide
ucugucguggaggcgagcu

SEQ ID NO: 2641082 - RNA, 19 nt, Artificial Sequence
  Description of Artificial Sequence: Synthetic oligonucleotide
uggaggaggaucgucccgc

SEQ ID NO: 2641083 - RNA, 19 nt, Artificial Sequence
  Description of Artificial Sequence: Synthetic oligonucleotide
guagauuuuccgcugcuua

SEQ ID NO: 2641084 - RNA, 19 nt, Artificial Sequence
  Description of Artificial Sequence: Synthetic oligonucleotide
guagaggucucagagcuga

SEQ ID NO: 2641085 - RNA, 19 nt, Artificial Sequence
  Description of Artificial Sequence: Synthetic oligonucleotide
ucgcccaugagacgagaga

SEQ ID NO: 2641086 - RNA, 19 nt, Artificial Sequence
  Description of Artificial Sequence: Synthetic oligonucleotide
cagagguuggaguagaggu

SEQ ID NO: 2641087 - RNA, 19 nt, Artificial Sequence
  Description of Artificial Sequence: Synthetic oligonucleotide
gcugcuucaggcugcacag

SEQ ID NO: 2641088 - RNA, 19 nt, Artificial Sequence
  Description of Artificial Sequence: Synthetic oligonucleotide
guagucgcccaugagacga

SEQ ID NO: 2641089 - RNA, 19 nt, Artificial Sequence
  Description of Artificial Sequence: Synthetic oligonucleotide
guuggaguagaggucucag

SEQ ID NO: 2641090 - RNA, 19 nt, Artificial Sequence
  Description of Artificial Sequence: Synthetic oligonucleotide
cgcuuguggauucagagcc

SEQ ID NO: 2641091 - RNA, 19 nt, Artificial Sequence
  Description of Artificial Sequence: Synthetic oligonucleotide
gguuagcuucugcaggagg

SEQ ID NO: 2641092 - RNA, 19 nt, Artificial Sequence
  Description of Artificial Sequence: Synthetic oligonucleotide
uugagagagggccgcuugu

SEQ ID NO: 2641093 - RNA, 19 nt, Artificial Sequence
  Description of Artificial Sequence: Synthetic oligonucleotide
caaggaggugcuagagccc

SEQ ID NO: 2641094 - RNA, 19 nt, Artificial Sequence
  Description of Artificial Sequence: Synthetic oligonucleotide
gucuccaaggaggugcuag

SEQ ID NO: 2641095 - RNA, 19 nt, Artificial Sequence
  Description of Artificial Sequence: Synthetic oligonucleotide
gagcaugcgguaaccacgc

SEQ ID NO: 2641096 - RNA, 19 nt, Artificial Sequence
  Description of Artificial Sequence: Synthetic oligonucleotide
gagucgagcuccugacaag

SEQ ID NO: 2641097 - RNA, 19 nt, Artificial Sequence
  Description of Artificial Sequence: Synthetic oligonucleotide
agagcugaagcugcuucag

SEQ ID NO: 2641098 - RNA, 19 nt, Artificial Sequence
  Description of Artificial Sequence: Synthetic oligonucleotide
gauuuuccgcugcuuaucu

SEQ ID NO: 2641099 - RNA, 19 nt, Artificial Sequence
  Description of Artificial Sequence: Synthetic oligonucleotide
ugcaggagggcugucugug

SEQ ID NO: 2641100 - RNA, 19 nt, Artificial Sequence
  Description of Artificial Sequence: Synthetic oligonucleotide
ggcgaaaucgucaaccuca

SEQ ID NO: 2641101 - RNA, 19 nt, Artificial Sequence
  Description of Artificial Sequence: Synthetic oligonucleotide
acaucuguauuuagaggug

SEQ ID NO: 2641102 - RNA, 19 nt, Artificial Sequence
  Description of Artificial Sequence: Synthetic oligonucleotide
ugugggacgagagccugug

SEQ ID NO: 2641103 - RNA, 19 nt, Artificial Sequence
  Description of Artificial Sequence: Synthetic oligonucleotide
acgagagccuguggcaggc

SEQ ID NO: 2641104 - RNA, 19 nt, Artificial Sequence
  Description of Artificial Sequence: Synthetic oligonucleotide
ucucugcuucugucggagg

SEQ ID NO: 2641105 - RNA, 19 nt, Artificial Sequence
  Description of Artificial Sequence: Synthetic oligonucleotide
ugucuguguguaagccacc

SEQ ID NO: 2641106 - RNA, 19 nt, Artificial Sequence
  Description of Artificial Sequence: Synthetic oligonucleotide
auuuagaggugcagcaggu

SEQ ID NO: 2641107 - RNA, 19 nt, Artificial Sequence
  Description of Artificial Sequence: Synthetic oligonucleotide
uucccgagcuugagagagg

SEQ ID NO: 2641108 - RNA, 19 nt, Artificial Sequence
  Description of Artificial Sequence: Synthetic oligonucleotide
ccagguuagcuucugcagg

SEQ ID NO: 2641109 - RNA, 19 nt, Artificial Sequence
  Description of Artificial Sequence: Synthetic oligonucleotide
uaaccacgcagcagguagu

SEQ ID NO: 2641110 - RNA, 19 nt, Artificial Sequence
  Description of Artificial Sequence: Synthetic oligonucleotide
aacagagguuggaguagag

SEQ ID NO: 2641111 - RNA, 19 nt, Artificial Sequence
  Description of Artificial Sequence: Synthetic oligonucleotide
aggggaacagagguuggag

SEQ ID NO: 2641112 - RNA, 19 nt, Artificial Sequence
  Description of Artificial Sequence: Synthetic oligonucleotide
gacgagagaugcgauccug

SEQ ID NO: 2641113 - RNA, 19 nt, Artificial Sequence
  Description of Artificial Sequence: Synthetic oligonucleotide
ugcagcaccuucgucucug

SEQ ID NO: 2641114 - RNA, 19 nt, Artificial Sequence
  Description of Artificial Sequence: Synthetic oligonucleotide
ugcgguaaccacgcagcag

SEQ ID NO: 2641115 - RNA, 19 nt, Artificial Sequence
  Description of Artificial Sequence: Synthetic oligonucleotide
agcuccugacaagccacgc

SEQ ID NO: 2641116 - RNA, 19 nt, Artificial Sequence
  Description of Artificial Sequence: Synthetic oligonucleotide
gauucagagccggauuguc

SEQ ID NO: 2641117 - RNA, 19 nt, Artificial Sequence
  Description of Artificial Sequence: Synthetic oligonucleotide
agccacgcaguagauuuuc

SEQ ID NO: 2641118 - RNA, 19 nt, Artificial Sequence
  Description of Artificial Sequence: Synthetic oligonucleotide
agcugaauacuagucucca

SEQ ID NO: 2641119 - RNA, 19 nt, Artificial Sequence
  Description of Artificial Sequence: Synthetic oligonucleotide
agcaccuucgucucugcuu

SEQ ID NO: 2641120 - RNA, 19 nt, Artificial Sequence
  Description of Artificial Sequence: Synthetic oligonucleotide
augcgauccugccgcuccc

SEQ ID NO: 2641121 - RNA, 19 nt, Artificial Sequence
  Description of Artificial Sequence: Synthetic oligonucleotide
aguccgcgcacgugucgcc

SEQ ID NO: 2641122 - RNA, 19 nt, Artificial Sequence
  Description of Artificial Sequence: Synthetic oligonucleotide
cuucgucucugcuucuguc

SEQ ID NO: 2641123 - RNA, 19 nt, Artificial Sequence
  Description of Artificial Sequence: Synthetic oligonucleotide
cacgugucgccgagcaugc

SEQ ID NO: 2641124 - RNA, 19 nt, Artificial Sequence
  Description of Artificial Sequence: Synthetic oligonucleotide
uguucccgagcuugagaga

SEQ ID NO: 2641125 - RNA, 19 nt, Artificial Sequence
  Description of Artificial Sequence: Synthetic oligonucleotide
cacgcagcagguagucgcc

SEQ ID NO: 2641126 - RNA, 19 nt, Artificial Sequence
  Description of Artificial Sequence: Synthetic oligonucleotide
gaacagagguuggaguaga

SEQ ID NO: 2641127 - RNA, 19 nt, Artificial Sequence
  Description of Artificial Sequence: Synthetic oligonucleotide
agcucccucacagugcucu

SEQ ID NO: 2641128 - RNA, 19 nt, Artificial Sequence
  Description of Artificial Sequence: Synthetic oligonucleotide
gcaugcgguaaccacgcag

SEQ ID NO: 2641129 - RNA, 19 nt, Artificial Sequence
  Description of Artificial Sequence: Synthetic oligonucleotide
gagguuggaguagaggucu

SEQ ID NO: 2641130 - RNA, 19 nt, Artificial Sequence
  Description of Artificial Sequence: Synthetic oligonucleotide
gucucugcuucugucggag

SEQ ID NO: 2641131 - RNA, 19 nt, Artificial Sequence
  Description of Artificial Sequence: Synthetic oligonucleotide
acaagcccggauaagccca

SEQ ID NO: 2641132 - RNA, 19 nt, Artificial Sequence
  Description of Artificial Sequence: Synthetic oligonucleotide
agcugaagcccagguuagc

SEQ ID NO: 2641133 - RNA, 19 nt, Artificial Sequence
  Description of Artificial Sequence: Synthetic oligonucleotide
caagccacgcaguagauuu

SEQ ID NO: 2641134 - RNA, 19 nt, Artificial Sequence
  Description of Artificial Sequence: Synthetic oligonucleotide
gucggaggcgcccaggcga

SEQ ID NO: 2641135 - RNA, 19 nt, Artificial Sequence
  Description of Artificial Sequence: Synthetic oligonucleotide
cuggggugugggacgagag

SEQ ID NO: 2641136 - RNA, 19 nt, Artificial Sequence
  Description of Artificial Sequence: Synthetic oligonucleotide
ccacgcaguagauuuuccg

SEQ ID NO: 2641137 - RNA, 19 nt, Artificial Sequence
  Description of Artificial Sequence: Synthetic oligonucleotide
cgagcaugcgguaaccacg

SEQ ID NO: 2641138 - RNA, 19 nt, Artificial Sequence
  Description of Artificial Sequence: Synthetic oligonucleotide
ccgagcuugagagagggcc

SEQ ID NO: 2641139 - RNA, 19 nt, Artificial Sequence
  Description of Artificial Sequence: Synthetic oligonucleotide
ggaacagagguuggaguag

SEQ ID NO: 2641140 - RNA, 19 nt, Artificial Sequence
  Description of Artificial Sequence: Synthetic oligonucleotide
uuguggauucagagccgga

SEQ ID NO: 2641141 - RNA, 19 nt, Artificial Sequence
  Description of Artificial Sequence: Synthetic oligonucleotide
ggggugugggacgagagcc

SEQ ID NO: 2641142 - RNA, 19 nt, Artificial Sequence
  Description of Artificial Sequence: Synthetic oligonucleotide
auucagagccggauugucu

SEQ ID NO: 2641143 - RNA, 19 nt, Artificial Sequence
  Description of Artificial Sequence: Synthetic oligonucleotide
ccaggcgaaaucgucaacc

SEQ ID NO: 2641144 - RNA, 19 nt, Artificial Sequence
  Description of Artificial Sequence: Synthetic oligonucleotide
cacagugcucuggacgggg

SEQ ID NO: 2641145 - RNA, 19 nt, Artificial Sequence
  Description of Artificial Sequence: Synthetic oligonucleotide
uagucgcccaugagacgag

SEQ ID NO: 2641146 - RNA, 19 nt, Artificial Sequence
  Description of Artificial Sequence: Synthetic oligonucleotide
ucugucggaggcgcccagg

SEQ ID NO: 2641147 - RNA, 19 nt, Artificial Sequence
  Description of Artificial Sequence: Synthetic oligonucleotide
ccacgcagcagguagucgc

SEQ ID NO: 2641148 - RNA, 19 nt, Artificial Sequence
  Description of Artificial Sequence: Synthetic oligonucleotide
gguagucgcccaugagacg

SEQ ID NO: 2641149 - RNA, 19 nt, Artificial Sequence
  Description of Artificial Sequence: Synthetic oligonucleotide
aucuguauuuagaggugca

SEQ ID NO: 2641150 - RNA, 19 nt, Artificial Sequence
  Description of Artificial Sequence: Synthetic oligonucleotide
uuuagaggugcagcaggua

SEQ ID NO: 2641151 - RNA, 19 nt, Artificial Sequence
  Description of Artificial Sequence: Synthetic oligonucleotide
cugucggaggcgcccaggc

SEQ ID NO: 2641152 - RNA, 19 nt, Artificial Sequence
  Description of Artificial Sequence: Synthetic oligonucleotide
gaggaggaucgucccgcag

SEQ ID NO: 2641153 - RNA, 19 nt, Artificial Sequence
  Description of Artificial Sequence: Synthetic oligonucleotide
ggucucagagcugaagcug

SEQ ID NO: 2641154 - RNA, 19 nt, Artificial Sequence
  Description of Artificial Sequence: Synthetic oligonucleotide
agacgagagaugcgauccu

SEQ ID NO: 2641155 - RNA, 19 nt, Artificial Sequence
  Description of Artificial Sequence: Synthetic oligonucleotide
gagcuccugacaagccacg

SEQ ID NO: 2641156 - RNA, 19 nt, Artificial Sequence
  Description of Artificial Sequence: Synthetic oligonucleotide
ucgccgagcaugcgguaac

SEQ ID NO: 2641157 - RNA, 19 nt, Artificial Sequence
  Description of Artificial Sequence: Synthetic oligonucleotide
aggcgcccaggcgaaaucg

SEQ ID NO: 2641158 - RNA, 19 nt, Artificial Sequence
  Description of Artificial Sequence: Synthetic oligonucleotide
cacagcugaauacuagucu

SEQ ID NO: 2641159 - RNA, 19 nt, Artificial Sequence
  Description of Artificial Sequence: Synthetic oligonucleotide
ccuguggcaggcucugucg

SEQ ID NO: 2641160 - RNA, 19 nt, Artificial Sequence
  Description of Artificial Sequence: Synthetic oligonucleotide
uauccacaucugagucgag

SEQ ID NO: 2641161 - RNA, 19 nt, Artificial Sequence
  Description of Artificial Sequence: Synthetic oligonucleotide
aucgucccgcaguccgcgc

SEQ ID NO: 2641162 - RNA, 19 nt, Artificial Sequence
  Description of Artificial Sequence: Synthetic oligonucleotide
gcugguguucccgagcuug

SEQ ID NO: 2641163 - RNA, 19 nt, Artificial Sequence
  Description of Artificial Sequence: Synthetic oligonucleotide
guguguaagccaccacauc

SEQ ID NO: 2641164 - RNA, 19 nt, Artificial Sequence
  Description of Artificial Sequence: Synthetic oligonucleotide
gggaacagagguuggagua

SEQ ID NO: 2641165 - RNA, 19 nt, Artificial Sequence
  Description of Artificial Sequence: Synthetic oligonucleotide
uucugucggaggcgcccag

SEQ ID NO: 2641166 - RNA, 19 nt, Artificial Sequence
  Description of Artificial Sequence: Synthetic oligonucleotide
cccagguuagcuucugcag

SEQ ID NO: 2641167 - RNA, 19 nt, Artificial Sequence
  Description of Artificial Sequence: Synthetic oligonucleotide
aguagauuuuccgcugcuu

SEQ ID NO: 2641168 - RNA, 19 nt, Artificial Sequence
  Description of Artificial Sequence: Synthetic oligonucleotide
ucgucccgcaguccgcgca

SEQ ID NO: 2641169 - RNA, 19 nt, Artificial Sequence
  Description of Artificial Sequence: Synthetic oligonucleotide
gcaccuucgucucugcuuc

SEQ ID NO: 2641170 - RNA, 19 nt, Artificial Sequence
  Description of Artificial Sequence: Synthetic oligonucleotide
augcgguaaccacgcagca

SEQ ID NO: 2641171 - RNA, 19 nt, Artificial Sequence
  Description of Artificial Sequence: Synthetic oligonucleotide
auccugccgcucccgucgc

SEQ ID NO: 2641172 - RNA, 19 nt, Artificial Sequence
  Description of Artificial Sequence: Synthetic oligonucleotide
gcaggcucugucguggagg

SEQ ID NO: 2641173 - RNA, 19 nt, Artificial Sequence
  Description of Artificial Sequence: Synthetic oligonucleotide
cucccgucgcgccugcagc

SEQ ID NO: 2641174 - RNA, 19 nt, Artificial Sequence
  Description of Artificial Sequence: Synthetic oligonucleotide
ccgcugcuuaucuuggagg

SEQ ID NO: 2641175 - RNA, 19 nt, Artificial Sequence
  Description of Artificial Sequence: Synthetic oligonucleotide
acuagucuccaaggaggug

SEQ ID NO: 2641176 - RNA, 19 nt, Artificial Sequence
  Description of Artificial Sequence: Synthetic oligonucleotide
auuuuccgcugcuuaucuu

SEQ ID NO: 2641177 - RNA, 19 nt, Artificial Sequence
  Description of Artificial Sequence: Synthetic oligonucleotide
gccguucaaggccauguug

SEQ ID NO: 2641178 - RNA, 19 nt, Artificial Sequence
  Description of Artificial Sequence: Synthetic oligonucleotide
gaggcgagcugguguuccc

SEQ ID NO: 2641179 - RNA, 19 nt, Artificial Sequence
  Description of Artificial Sequence: Synthetic oligonucleotide
ugguguucccgagcuugag

SEQ ID NO: 2641180 - RNA, 19 nt, Artificial Sequence
  Description of Artificial Sequence: Synthetic oligonucleotide
ugcgauccugccgcucccg

SEQ ID NO: 2641181 - RNA, 19 nt, Artificial Sequence
  Description of Artificial Sequence: Synthetic oligonucleotide
uaagcccacacagcugaau

SEQ ID NO: 2641182 - RNA, 19 nt, Artificial Sequence
  Description of Artificial Sequence: Synthetic oligonucleotide
ugcuucugucggaggcgcc

SEQ ID NO: 2641183 - RNA, 19 nt, Artificial Sequence
  Description of Artificial Sequence: Synthetic oligonucleotide
gccauguugccguggacac

SEQ ID NO: 2641184 - RNA, 19 nt, Artificial Sequence
  Description of Artificial Sequence: Synthetic oligonucleotide
gcacgugucgccgagcaug

SEQ ID NO: 2641185 - RNA, 19 nt, Artificial Sequence
  Description of Artificial Sequence: Synthetic oligonucleotide
uuccgcugcuuaucuugga

SEQ ID NO: 2641186 - RNA, 19 nt, Artificial Sequence
  Description of Artificial Sequence: Synthetic oligonucleotide
agguuagcuucugcaggag

SEQ ID NO: 2641187 - RNA, 19 nt, Artificial Sequence
  Description of Artificial Sequence: Synthetic oligonucleotide
gccggauugucuuuaucca

SEQ ID NO: 2641188 - RNA, 19 nt, Artificial Sequence
  Description of Artificial Sequence: Synthetic oligonucleotide
uaucuuggaggaggaucgu

SEQ ID NO: 2641189 - RNA, 19 nt, Artificial Sequence
  Description of Artificial Sequence: Synthetic oligonucleotide
ucccgucgcgccugcagca

SEQ ID NO: 2641190 - RNA, 19 nt, Artificial Sequence
  Description of Artificial Sequence: Synthetic oligonucleotide
ucagagccggauugucuuu

SEQ ID NO: 2641191 - RNA, 19 nt, Artificial Sequence
  Description of Artificial Sequence: Synthetic oligonucleotide
accacgcagcagguagucg

SEQ ID NO: 2641192 - RNA, 19 nt, Artificial Sequence
  Description of Artificial Sequence: Synthetic oligonucleotide
agaugcgauccugccgcuc

SEQ ID NO: 2641193 - RNA, 19 nt, Artificial Sequence
  Description of Artificial Sequence: Synthetic oligonucleotide
uguugccguggacacuguu

SEQ ID NO: 2641194 - RNA, 19 nt, Artificial Sequence
  Description of Artificial Sequence: Synthetic oligonucleotide
ggcugucuguguguaagcc

SEQ ID NO: 2641195 - RNA, 19 nt, Artificial Sequence
  Description of Artificial Sequence: Synthetic oligonucleotide
ccggauaagcccacacagc

SEQ ID NO: 2641196 - RNA, 19 nt, Artificial Sequence
  Description of Artificial Sequence: Synthetic oligonucleotide
ccggauugucuuuauccac

SEQ ID NO: 2641197 - RNA, 19 nt, Artificial Sequence
  Description of Artificial Sequence: Synthetic oligonucleotide
gugggacgagagccugugg

SEQ ID NO: 2641198 - RNA, 19 nt, Artificial Sequence
  Description of Artificial Sequence: Synthetic oligonucleotide
gcugcacagggccucagca

SEQ ID NO: 2641199 - RNA, 19 nt, Artificial Sequence
  Description of Artificial Sequence: Synthetic oligonucleotide
caagcccggauaagcccac

SEQ ID NO: 2641200 - RNA, 19 nt, Artificial Sequence
  Description of Artificial Sequence: Synthetic oligonucleotide
ccaugagacgagagaugcg

SEQ ID NO: 2641201 - RNA, 19 nt, Artificial Sequence
  Description of Artificial Sequence: Synthetic oligonucleotide
ggaggaucgucccgcaguc

SEQ ID NO: 2641202 - RNA, 19 nt, Artificial Sequence
  Description of Artificial Sequence: Synthetic oligonucleotide
gagccggauugucuuuauc

SEQ ID NO: 2641203 - RNA, 19 nt, Artificial Sequence
  Description of Artificial Sequence: Synthetic oligonucleotide
ggauaagcccacacagcug

SEQ ID NO: 2641204 - RNA, 19 nt, Artificial Sequence
  Description of Artificial Sequence: Synthetic oligonucleotide
agagccggauugucuuuau

SEQ ID NO: 2641205 - RNA, 19 nt, Artificial Sequence
  Description of Artificial Sequence: Synthetic oligonucleotide
gucaaccucagcgccguuc

SEQ ID NO: 2641206 - RNA, 19 nt, Artificial Sequence
  Description of Artificial Sequence: Synthetic oligonucleotide
gcacaagcccggauaagcc

SEQ ID NO: 2641207 - RNA, 19 nt, Artificial Sequence
  Description of Artificial Sequence: Synthetic oligonucleotide
ucggaggcgcccaggcgaa

SEQ ID NO: 2641208 - RNA, 19 nt, Artificial Sequence
  Description of Artificial Sequence: Synthetic oligonucleotide
gucgcccaugagacgagag

SEQ ID NO: 2641209 - RNA, 19 nt, Artificial Sequence
  Description of Artificial Sequence: Synthetic oligonucleotide
guugccguggacacuguua

SEQ ID NO: 2641210 - RNA, 19 nt, Artificial Sequence
  Description of Artificial Sequence: Synthetic oligonucleotide
cgagcuugagagagggccg

SEQ ID NO: 2641211 - RNA, 19 nt, Artificial Sequence
  Description of Artificial Sequence: Synthetic oligonucleotide
caguccgcgcacgugucgc

SEQ ID NO: 2641212 - RNA, 19 nt, Artificial Sequence
  Description of Artificial Sequence: Synthetic oligonucleotide
gagcccagcucagcugaag

SEQ ID NO: 2641213 - RNA, 19 nt, Artificial Sequence
  Description of Artificial Sequence: Synthetic oligonucleotide
gcuuguggauucagagccg

SEQ ID NO: 2641214 - RNA, 19 nt, Artificial Sequence
  Description of Artificial Sequence: Synthetic oligonucleotide
gucgagcuccugacaagcc

SEQ ID NO: 2641215 - RNA, 19 nt, Artificial Sequence
  Description of Artificial Sequence: Synthetic oligonucleotide
gguguucccgagcuugaga

SEQ ID NO: 2641216 - RNA, 19 nt, Artificial Sequence
  Description of Artificial Sequence: Synthetic oligonucleotide
gaagcugcuucaggcugca

SEQ ID NO: 2641217 - RNA, 19 nt, Artificial Sequence
  Description of Artificial Sequence: Synthetic oligonucleotide
agagccuguggcaggcucu

SEQ ID NO: 2641218 - RNA, 19 nt, Artificial Sequence
  Description of Artificial Sequence: Synthetic oligonucleotide
ggcucugucguggaggcga

SEQ ID NO: 2641219 - RNA, 19 nt, Artificial Sequence
  Description of Artificial Sequence: Synthetic oligonucleotide
ccuugagcccugcugcagc

SEQ ID NO: 2641220 - RNA, 19 nt, Artificial Sequence
  Description of Artificial Sequence: Synthetic oligonucleotide
cugucguggaggcgagcug

SEQ ID NO: 2641221 - RNA, 19 nt, Artificial Sequence
  Description of Artificial Sequence: Synthetic oligonucleotide
gaggcgcccaggcgaaauc

SEQ ID NO: 2641222 - RNA, 19 nt, Artificial Sequence
  Description of Artificial Sequence: Synthetic oligonucleotide
ugcucuggacgggguacug

SEQ ID NO: 2641223 - RNA, 19 nt, Artificial Sequence
  Description of Artificial Sequence: Synthetic oligonucleotide
ggccauguugccguggaca

SEQ ID NO: 2641224 - RNA, 19 nt, Artificial Sequence
  Description of Artificial Sequence: Synthetic oligonucleotide
gcagguagucgcccaugag

SEQ ID NO: 2641225 - RNA, 19 nt, Artificial Sequence
  Description of Artificial Sequence: Synthetic oligonucleotide
ccgagcaugcgguaaccac

SEQ ID NO: 2641226 - RNA, 19 nt, Artificial Sequence
  Description of Artificial Sequence: Synthetic oligonucleotide
gaggaucgucccgcagucc

SEQ ID NO: 2641227 - RNA, 19 nt, Artificial Sequence
  Description of Artificial Sequence: Synthetic oligonucleotide
gagggccgcuuguggauuc

SEQ ID NO: 2641228 - RNA, 19 nt, Artificial Sequence
  Description of Artificial Sequence: Synthetic oligonucleotide
gcgaaaucgucaaccucag

SEQ ID NO: 2641229 - RNA, 19 nt, Artificial Sequence
  Description of Artificial Sequence: Synthetic oligonucleotide
cugcuucaggcugcacagg

SEQ ID NO: 2641230 - RNA, 19 nt, Artificial Sequence
  Description of Artificial Sequence: Synthetic oligonucleotide
cgugucgccgagcaugcgg

SEQ ID NO: 2641231 - RNA, 19 nt, Artificial Sequence
  Description of Artificial Sequence: Synthetic oligonucleotide
acaagccacgcaguagauu

SEQ ID NO: 2641232 - RNA, 19 nt, Artificial Sequence
  Description of Artificial Sequence: Synthetic oligonucleotide
agguuggaguagaggucuc

SEQ ID NO: 2641233 - RNA, 19 nt, Artificial Sequence
  Description of Artificial Sequence: Synthetic oligonucleotide
gggccucagcacaagcccg

SEQ ID NO: 2641234 - RNA, 19 nt, Artificial Sequence
  Description of Artificial Sequence: Synthetic oligonucleotide
gcugcuuaucuuggaggag

SEQ ID NO: 2641235 - RNA, 19 nt, Artificial Sequence
  Description of Artificial Sequence: Synthetic oligonucleotide
uccgcgcacgugucgccga

SEQ ID NO: 2641236 - RNA, 19 nt, Artificial Sequence
  Description of Artificial Sequence: Synthetic oligonucleotide
augagacgagagaugcgau

SEQ ID NO: 2641237 - RNA, 19 nt, Artificial Sequence
  Description of Artificial Sequence: Synthetic oligonucleotide
caggcgaaaucgucaaccu

SEQ ID NO: 2641238 - RNA, 19 nt, Artificial Sequence
  Description of Artificial Sequence: Synthetic oligonucleotide
ggugugggacgagagccug

SEQ ID NO: 2641239 - RNA, 19 nt, Artificial Sequence
  Description of Artificial Sequence: Synthetic oligonucleotide
gcuucugucggaggcgccc

SEQ ID NO: 2641240 - RNA, 19 nt, Artificial Sequence
  Description of Artificial Sequence: Synthetic oligonucleotide
cgagcuccugacaagccac

SEQ ID NO: 2641241 - RNA, 19 nt, Artificial Sequence
  Description of Artificial Sequence: Synthetic oligonucleotide
ggccucagcacaagcccgg

SEQ ID NO: 2641242 - RNA, 19 nt, Artificial Sequence
  Description of Artificial Sequence: Synthetic oligonucleotide
gggcugucuguguguaagc

SEQ ID NO: 2641243 - RNA, 19 nt, Artificial Sequence
  Description of Artificial Sequence: Synthetic oligonucleotide
guccgcgcacgugucgccg

SEQ ID NO: 2641244 - RNA, 19 nt, Artificial Sequence
  Description of Artificial Sequence: Synthetic oligonucleotide
gcuagagcccagcucagcu

SEQ ID NO: 2641245 - RNA, 19 nt, Artificial Sequence
  Description of Artificial Sequence: Synthetic oligonucleotide
gcaguccgcgcacgugucg

SEQ ID NO: 2641246 - RNA, 19 nt, Artificial Sequence
  Description of Artificial Sequence: Synthetic oligonucleotide
ggaggcgagcugguguucc

SEQ ID NO: 2641247 - RNA, 19 nt, Artificial Sequence
  Description of Artificial Sequence: Synthetic oligonucleotide
gaggugcuagagcccagcu

SEQ ID NO: 2641248 - RNA, 19 nt, Artificial Sequence
  Description of Artificial Sequence: Synthetic oligonucleotide
ggaggugcuagagcccagc

SEQ ID NO: 2641249 - RNA, 19 nt, Artificial Sequence
  Description of Artificial Sequence: Synthetic oligonucleotide
agcaugcgguaaccacgca

SEQ ID NO: 2641250 - RNA, 19 nt, Artificial Sequence
  Description of Artificial Sequence: Synthetic oligonucleotide
cggauugucuuuauccaca

SEQ ID NO: 2641251 - RNA, 19 nt, Artificial Sequence
  Description of Artificial Sequence: Synthetic oligonucleotide
ucguggaggcgagcuggug

SEQ ID NO: 2641252 - RNA, 19 nt, Artificial Sequence
  Description of Artificial Sequence: Synthetic oligonucleotide
cgcaguagauuuuccgcug

SEQ ID NO: 2641253 - RNA, 19 nt, Artificial Sequence
  Description of Artificial Sequence: Synthetic oligonucleotide
ucccgcaguccgcgcacgu

SEQ ID NO: 2641254 - RNA, 19 nt, Artificial Sequence
  Description of Artificial Sequence: Synthetic oligonucleotide
gcugaauacuagucuccaa

SEQ ID NO: 2641255 - RNA, 19 nt, Artificial Sequence
  Description of Artificial Sequence: Synthetic oligonucleotide
gcucuggacgggguacugg

SEQ ID NO: 2641256 - RNA, 19 nt, Artificial Sequence
  Description of Artificial Sequence: Synthetic oligonucleotide
gugcuagagcccagcucag

SEQ ID NO: 2641257 - RNA, 19 nt, Artificial Sequence
  Description of Artificial Sequence: Synthetic oligonucleotide
gcuccugacaagccacgca

SEQ ID NO: 2641258 - RNA, 19 nt, Artificial Sequence
  Description of Artificial Sequence: Synthetic oligonucleotide
ggggaacagagguuggagu

SEQ ID NO: 2641259 - RNA, 19 nt, Artificial Sequence
  Description of Artificial Sequence: Synthetic oligonucleotide
aagccacgcaguagauuuu

SEQ ID NO: 2641260 - RNA, 19 nt, Artificial Sequence
  Description of Artificial Sequence: Synthetic oligonucleotide
ucgcgccugcagcaccuuc

SEQ ID NO: 2641261 - RNA, 19 nt, Artificial Sequence
  Description of Artificial Sequence: Synthetic oligonucleotide
gcucccgucgcgccugcag

SEQ ID NO: 2641262 - RNA, 19 nt, Artificial Sequence
  Description of Artificial Sequence: Synthetic oligonucleotide
cgcgccugcagcaccuucg

SEQ ID NO: 2641263 - RNA, 19 nt, Artificial Sequence
  Description of Artificial Sequence: Synthetic oligonucleotide
ggauugucuuuauccacau

SEQ ID NO: 2641264 - RNA, 19 nt, Artificial Sequence
  Description of Artificial Sequence: Synthetic oligonucleotide
aagcccggauaagcccaca

SEQ ID NO: 2641265 - RNA, 19 nt, Artificial Sequence
  Description of Artificial Sequence: Synthetic oligonucleotide
agucgcccaugagacgaga

SEQ ID NO: 2641266 - RNA, 19 nt, Artificial Sequence
  Description of Artificial Sequence: Synthetic oligonucleotide
gcuucaggcugcacagggc

SEQ ID NO: 2641267 - RNA, 19 nt, Artificial Sequence
  Description of Artificial Sequence: Synthetic oligonucleotide
ggcugcacagggccucagc

SEQ ID NO: 2641268 - RNA, 19 nt, Artificial Sequence
  Description of Artificial Sequence: Synthetic oligonucleotide
ugucgccgagcaugcggua

SEQ ID NO: 2641269 - RNA, 19 nt, Artificial Sequence
  Description of Artificial Sequence: Synthetic oligonucleotide
caggggaacagagguugga

SEQ ID NO: 2641270 - RNA, 19 nt, Artificial Sequence
  Description of Artificial Sequence: Synthetic oligonucleotide
gcgagcugguguucccgag

SEQ ID NO: 2641271 - RNA, 19 nt, Artificial Sequence
  Description of Artificial Sequence: Synthetic oligonucleotide
caucugagucgagcuccug

SEQ ID NO: 2641272 - RNA, 19 nt, Artificial Sequence
  Description of Artificial Sequence: Synthetic oligonucleotide
agagggccgcuuguggauu

SEQ ID NO: 2641273 - RNA, 19 nt, Artificial Sequence
  Description of Artificial Sequence: Synthetic oligonucleotide
cgcugcuuaucuuggagga

SEQ ID NO: 2641274 - RNA, 19 nt, Artificial Sequence
  Description of Artificial Sequence: Synthetic oligonucleotide
ccucagcgccguucaaggc

SEQ ID NO: 2641275 - RNA, 19 nt, Artificial Sequence
  Description of Artificial Sequence: Synthetic oligonucleotide
gcccaugagacgagagaug

SEQ ID NO: 2641276 - RNA, 19 nt, Artificial Sequence
  Description of Artificial Sequence: Synthetic oligonucleotide
uggaggcgagcugguguuc

SEQ ID NO: 2641277 - RNA, 19 nt, Artificial Sequence
  Description of Artificial Sequence: Synthetic oligonucleotide
gcagcaccuucgucucugc

SEQ ID NO: 2641278 - RNA, 19 nt, Artificial Sequence
  Description of Artificial Sequence: Synthetic oligonucleotide
ccagcucagcugaagccca

SEQ ID NO: 2641279 - RNA, 19 nt, Artificial Sequence
  Description of Artificial Sequence: Synthetic oligonucleotide
acgugucgccgagcaugcg

SEQ ID NO: 2641280 - RNA, 19 nt, Artificial Sequence
  Description of Artificial Sequence: Synthetic oligonucleotide
auaagcccacacagcugaa

SEQ ID NO: 2641281 - RNA, 19 nt, Artificial Sequence
  Description of Artificial Sequence: Synthetic oligonucleotide
ggaucgucccgcaguccgc

SEQ ID NO: 2641282 - RNA, 19 nt, Artificial Sequence
  Description of Artificial Sequence: Synthetic oligonucleotide
ggaggaggaucgucccgca

SEQ ID NO: 2641283 - RNA, 19 nt, Artificial Sequence
  Description of Artificial Sequence: Synthetic oligonucleotide
gucgccgagcaugcgguaa

SEQ ID NO: 2641284 - RNA, 19 nt, Artificial Sequence
  Description of Artificial Sequence: Synthetic oligonucleotide
ggcgagcugguguucccga

SEQ ID NO: 2641285 - RNA, 19 nt, Artificial Sequence
  Description of Artificial Sequence: Synthetic oligonucleotide
cggauaagcccacacagcu

SEQ ID NO: 2641286 - RNA, 19 nt, Artificial Sequence
  Description of Artificial Sequence: Synthetic oligonucleotide
gucccgcaguccgcgcacg

SEQ ID NO: 2641287 - RNA, 19 nt, Artificial Sequence
  Description of Artificial Sequence: Synthetic oligonucleotide
gcugaagcccagguuagcu

SEQ ID NO: 2641288 - RNA, 19 nt, Artificial Sequence
  Description of Artificial Sequence: Synthetic oligonucleotide
gccacgcaguagauuuucc

SEQ ID NO: 2641289 - RNA, 19 nt, Artificial Sequence
  Description of Artificial Sequence: Synthetic oligonucleotide
gagaugcgauccugccgcu

SEQ ID NO: 2641290 - RNA, 19 nt, Artificial Sequence
  Description of Artificial Sequence: Synthetic oligonucleotide
gugucgccgagcaugcggu

SEQ ID NO: 2641291 - RNA, 19 nt, Artificial Sequence
  Description of Artificial Sequence: Synthetic oligonucleotide
cucugucguggaggcgagc

SEQ ID NO: 2641292 - RNA, 19 nt, Artificial Sequence
  Description of Artificial Sequence: Synthetic oligonucleotide
agcgccguucaaggccaug

SEQ ID NO: 2641293 - RNA, 19 nt, Artificial Sequence
  Description of Artificial Sequence: Synthetic oligonucleotide
gcccaggcgaaaucgucaa

SEQ ID NO: 2641294 - RNA, 19 nt, Artificial Sequence
  Description of Artificial Sequence: Synthetic oligonucleotide
cuguggcaggcucugucgu

SEQ ID NO: 2641295 - RNA, 19 nt, Artificial Sequence
  Description of Artificial Sequence: Synthetic oligonucleotide
gcgcacgugucgccgagca

SEQ ID NO: 2641296 - RNA, 19 nt, Artificial Sequence
  Description of Artificial Sequence: Synthetic oligonucleotide
cucagcugaagcccagguu

SEQ ID NO: 2641297 - RNA, 19 nt, Artificial Sequence
  Description of Artificial Sequence: Synthetic oligonucleotide
gacaagccacgcaguagau

SEQ ID NO: 2641298 - RNA, 19 nt, Artificial Sequence
  Description of Artificial Sequence: Synthetic oligonucleotide
cagagccggauugucuuua

SEQ ID NO: 2641299 - RNA, 19 nt, Artificial Sequence
  Description of Artificial Sequence: Synthetic oligonucleotide
cgaaaucgucaaccucagc

SEQ ID NO: 2641300 - RNA, 19 nt, Artificial Sequence
  Description of Artificial Sequence: Synthetic oligonucleotide
cagguaggggaggccccug

SEQ ID NO: 2641301 - RNA, 19 nt, Artificial Sequence
  Description of Artificial Sequence: Synthetic oligonucleotide
gcucccucacagugcucug

SEQ ID NO: 2641302 - RNA, 19 nt, Artificial Sequence
  Description of Artificial Sequence: Synthetic oligonucleotide
agggccgcuuguggauuca

SEQ ID NO: 2641303 - RNA, 19 nt, Artificial Sequence
  Description of Artificial Sequence: Synthetic oligonucleotide
gcucugucguggaggcgag

SEQ ID NO: 2641304 - RNA, 19 nt, Artificial Sequence
  Description of Artificial Sequence: Synthetic oligonucleotide
gcccacacagcugaauacu

SEQ ID NO: 2641305 - RNA, 19 nt, Artificial Sequence
  Description of Artificial Sequence: Synthetic oligonucleotide
gcuggggugugggacgaga

SEQ ID NO: 2641306 - RNA, 19 nt, Artificial Sequence
  Description of Artificial Sequence: Synthetic oligonucleotide
cugggcugccuugagcccu

SEQ ID NO: 2641307 - RNA, 19 nt, Artificial Sequence
  Description of Artificial Sequence: Synthetic oligonucleotide
gguaaccacgcagcaggua

SEQ ID NO: 2641308 - RNA, 19 nt, Artificial Sequence
  Description of Artificial Sequence: Synthetic oligonucleotide
cccgagcuugagagagggc

SEQ ID NO: 2641309 - RNA, 19 nt, Artificial Sequence
  Description of Artificial Sequence: Synthetic oligonucleotide
ggagggcugucugugugua

SEQ ID NO: 2641310 - RNA, 19 nt, Artificial Sequence
  Description of Artificial Sequence: Synthetic oligonucleotide
cccaggcgaaaucgucaac

SEQ ID NO: 2641311 - RNA, 19 nt, Artificial Sequence
  Description of Artificial Sequence: Synthetic oligonucleotide
auguugccguggacacugu

SEQ ID NO: 2641312 - RNA, 19 nt, Artificial Sequence
  Description of Artificial Sequence: Synthetic oligonucleotide
cagcucccucacagugcuc

SEQ ID NO: 2641313 - RNA, 19 nt, Artificial Sequence
  Description of Artificial Sequence: Synthetic oligonucleotide
cgcccaggcgaaaucguca

SEQ ID NO: 2641314 - RNA, 19 nt, Artificial Sequence
  Description of Artificial Sequence: Synthetic oligonucleotide
caaccucagcgccguucaa

SEQ ID NO: 2641315 - RNA, 19 nt, Artificial Sequence
  Description of Artificial Sequence: Synthetic oligonucleotide
gccgagcaugcgguaacca

SEQ ID NO: 2641316 - RNA, 19 nt, Artificial Sequence
  Description of Artificial Sequence: Synthetic oligonucleotide
ggccgcuuguggauucaga

SEQ ID NO: 2641317 - RNA, 19 nt, Artificial Sequence
  Description of Artificial Sequence: Synthetic oligonucleotide
gccccugggcugccuugag

SEQ ID NO: 2641318 - RNA, 19 nt, Artificial Sequence
  Description of Artificial Sequence: Synthetic oligonucleotide
gugcucuggacgggguacu

SEQ ID NO: 2641319 - RNA, 19 nt, Artificial Sequence
  Description of Artificial Sequence: Synthetic oligonucleotide
gcgcccaggcgaaaucguc

SEQ ID NO: 2641320 - RNA, 19 nt, Artificial Sequence
  Description of Artificial Sequence: Synthetic oligonucleotide
ccguggacacuguuaggcu

SEQ ID NO: 2641321 - RNA, 19 nt, Artificial Sequence
  Description of Artificial Sequence: Synthetic oligonucleotide
gugugggacgagagccugu

SEQ ID NO: 2641322 - RNA, 19 nt, Artificial Sequence
  Description of Artificial Sequence: Synthetic oligonucleotide
gucguggaggcgagcuggu

SEQ ID NO: 2641323 - RNA, 19 nt, Artificial Sequence
  Description of Artificial Sequence: Synthetic oligonucleotide
cguggaggcgagcuggugu

SEQ ID NO: 2641324 - RNA, 19 nt, Artificial Sequence
  Description of Artificial Sequence: Synthetic oligonucleotide
gcagcagguagucgcccau

SEQ ID NO: 2641325 - RNA, 19 nt, Artificial Sequence
  Description of Artificial Sequence: Synthetic oligonucleotide
gcacagggccucagcacaa

SEQ ID NO: 2641326 - RNA, 19 nt, Artificial Sequence
  Description of Artificial Sequence: Synthetic oligonucleotide
cgucccgcaguccgcgcac

SEQ ID NO: 2641327 - RNA, 19 nt, Artificial Sequence
  Description of Artificial Sequence: Synthetic oligonucleotide
gggugugggacgagagccu

SEQ ID NO: 2641328 - RNA, 19 nt, Artificial Sequence
  Description of Artificial Sequence: Synthetic oligonucleotide
ccuucgucucugcuucugu

SEQ ID NO: 2641329 - RNA, 19 nt, Artificial Sequence
  Description of Artificial Sequence: Synthetic oligonucleotide
cgcaguccgcgcacguguc

SEQ ID NO: 2641330 - RNA, 19 nt, Artificial Sequence
  Description of Artificial Sequence: Synthetic oligonucleotide
caccuucgucucugcuucu

SEQ ID NO: 2641331 - RNA, 19 nt, Artificial Sequence
  Description of Artificial Sequence: Synthetic oligonucleotide
ccgcgcacgugucgccgag

SEQ ID NO: 2641332 - RNA, 19 nt, Artificial Sequence
  Description of Artificial Sequence: Synthetic oligonucleotide
gcuuaucuuggaggaggau

SEQ ID NO: 2641333 - RNA, 19 nt, Artificial Sequence
  Description of Artificial Sequence: Synthetic oligonucleotide
cgccgagcaugcgguaacc

SEQ ID NO: 2641334 - RNA, 19 nt, Artificial Sequence
  Description of Artificial Sequence: Synthetic oligonucleotide
cgucucugcuucugucgga

SEQ ID NO: 2641335 - RNA, 19 nt, Artificial Sequence
  Description of Artificial Sequence: Synthetic oligonucleotide
gcgccugcagcaccuucgu

SEQ ID NO: 2641336 - RNA, 19 nt, Artificial Sequence
  Description of Artificial Sequence: Synthetic oligonucleotide
ggaggcgcccaggcgaaau

SEQ ID NO: 2641337 - RNA, 19 nt, Artificial Sequence
  Description of Artificial Sequence: Synthetic oligonucleotide
cccgucgcgccugcagcac

SEQ ID NO: 2641338 - RNA, 19 nt, Artificial Sequence
  Description of Artificial Sequence: Synthetic oligonucleotide
cgcccaugagacgagagau

SEQ ID NO: 2641339 - RNA, 19 nt, Artificial Sequence
  Description of Artificial Sequence: Synthetic oligonucleotide
gcccugcugcagcucccuc

SEQ ID NO: 2641340 - RNA, 19 nt, Artificial Sequence
  Description of Artificial Sequence: Synthetic oligonucleotide
ggcgcccaggcgaaaucgu

SEQ ID NO: 2641341 - RNA, 19 nt, Artificial Sequence
  Description of Artificial Sequence: Synthetic oligonucleotide
gcgauccugccgcucccgu

SEQ ID NO: 2641342 - RNA, 19 nt, Artificial Sequence
  Description of Artificial Sequence: Synthetic oligonucleotide
ccauguugccguggacacu

SEQ ID NO: 2641343 - RNA, 19 nt, Artificial Sequence
  Description of Artificial Sequence: Synthetic oligonucleotide
cgcgcacgugucgccgagc

SEQ ID NO: 2641344 - RNA, 19 nt, Artificial Sequence
  Description of Artificial Sequence: Synthetic oligonucleotide
cgguaaccacgcagcaggu

SEQ ID NO: 2641345 - RNA, 19 nt, Artificial Sequence
  Description of Artificial Sequence: Synthetic oligonucleotide
cgucgcgccugcagcaccu

SEQ ID NO: 2641346 - RNA, 19 nt, Artificial Sequence
  Description of Artificial Sequence: Synthetic oligonucleotide
cagcgccguucaaggccau

SEQ ID NO: 2641347 - RNA, 19 nt, Artificial Sequence
  Description of Artificial Sequence: Synthetic oligonucleotide
gucgcgccugcagcaccuu

SEQ ID NO: 2641348 - RNA, 19 nt, Artificial Sequence
  Description of Artificial Sequence: Synthetic oligonucleotide
cgccguucaaggccauguu

SEQ ID NO: 2641349 - RNA, 19 nt, Artificial Sequence
  Description of Artificial Sequence: Synthetic oligonucleotide
cgcacgugucgccgagcau

SEQ ID NO: 2641350 - RNA, 19 nt, Artificial Sequence
  Description of Artificial Sequence: Synthetic oligonucleotide
cgagagccuguggcaggcu

SEQ ID NO: 2641351 - RNA, 19 nt, Artificial Sequence
  Description of Artificial Sequence: Synthetic oligonucleotide
cggaggcgcccaggcgaaa

SEQ ID NO: 2641352 - RNA, 19 nt, Artificial Sequence
  Description of Artificial Sequence: Synthetic oligonucleotide
cgcucccgucgcgccugca

SEQ ID NO: 2641353 - RNA, 19 nt, Artificial Sequence
  Description of Artificial Sequence: Synthetic oligonucleotide
ugugaugucacucauguag

SEQ ID NO: 2641354 - RNA, 19 nt, Artificial Sequence
  Description of Artificial Sequence: Synthetic oligonucleotide
aacuaugaaaacuaguuug

SEQ ID NO: 2641355 - RNA, 19 nt, Artificial Sequence
  Description of Artificial Sequence: Synthetic oligonucleotide
aaagugguauuucugaagg

SEQ ID NO: 2641356 - RNA, 19 nt, Artificial Sequence
  Description of Artificial Sequence: Synthetic oligonucleotide
aacuccauugguuaaacag

SEQ ID NO: 2641357 - RNA, 19 nt, Artificial Sequence
  Description of Artificial Sequence: Synthetic oligonucleotide
ucagauaaaaucaucagaa

SEQ ID NO: 2641358 - RNA, 19 nt, Artificial Sequence
  Description of Artificial Sequence: Synthetic oligonucleotide
agauaaaaucaucagaaag

SEQ ID NO: 2641359 - RNA, 19 nt, Artificial Sequence
  Description of Artificial Sequence: Synthetic oligonucleotide
uuaaacagaaaacacugug

SEQ ID NO: 2641360 - RNA, 19 nt, Artificial Sequence
  Description of Artificial Sequence: Synthetic oligonucleotide
uuaacuaugaaaacuaguu

SEQ ID NO: 2641361 - RNA, 19 nt, Artificial Sequence
  Description of Artificial Sequence: Synthetic oligonucleotide
cauaggauggauauagugg

SEQ ID NO: 2641362 - RNA, 19 nt, Artificial Sequence
  Description of Artificial Sequence: Synthetic oligonucleotide
uguaaaagccaaaauuaag

SEQ ID NO: 2641363 - RNA, 19 nt, Artificial Sequence
  Description of Artificial Sequence: Synthetic oligonucleotide
uaauguuaaaagcaguucu

SEQ ID NO: 2641364 - RNA, 19 nt, Artificial Sequence
  Description of Artificial Sequence: Synthetic oligonucleotide
acugauacaacuccauugg

SEQ ID NO: 2641365 - RNA, 19 nt, Artificial Sequence
  Description of Artificial Sequence: Synthetic oligonucleotide
uuaaaagcaguucucuugc

SEQ ID NO: 2641366 - RNA, 19 nt, Artificial Sequence
  Description of Artificial Sequence: Synthetic oligonucleotide
uaaacagaaaacacugugc

SEQ ID NO: 2641367 - RNA, 19 nt, Artificial Sequence
  Description of Artificial Sequence: Synthetic oligonucleotide
agucccuaauguuaaaagc

SEQ ID NO: 2641368 - RNA, 19 nt, Artificial Sequence
  Description of Artificial Sequence: Synthetic oligonucleotide
aaacauuuccccaugauca

SEQ ID NO: 2641369 - RNA, 19 nt, Artificial Sequence
  Description of Artificial Sequence: Synthetic oligonucleotide
aaauguaaacauuucccca

SEQ ID NO: 2641370 - RNA, 19 nt, Artificial Sequence
  Description of Artificial Sequence: Synthetic oligonucleotide
aauggcauaggauggauau

SEQ ID NO: 2641371 - RNA, 19 nt, Artificial Sequence
  Description of Artificial Sequence: Synthetic oligonucleotide
aauguaaacauuuccccau

SEQ ID NO: 2641372 - RNA, 19 nt, Artificial Sequence
  Description of Artificial Sequence: Synthetic oligonucleotide
uuuucaguaaauggcauag

SEQ ID NO: 2641373 - RNA, 19 nt, Artificial Sequence
  Description of Artificial Sequence: Synthetic oligonucleotide
acagaaaacacugugcuag

SEQ ID NO: 2641374 - RNA, 19 nt, Artificial Sequence
  Description of Artificial Sequence: Synthetic oligonucleotide
uuuaacuaugaaaacuagu

SEQ ID NO: 2641375 - RNA, 19 nt, Artificial Sequence
  Description of Artificial Sequence: Synthetic oligonucleotide
uaucagauaaaaucaucag

SEQ ID NO: 2641376 - RNA, 19 nt, Artificial Sequence
  Description of Artificial Sequence: Synthetic oligonucleotide
aauguuaaaagcaguucuc

SEQ ID NO: 2641377 - RNA, 19 nt, Artificial Sequence
  Description of Artificial Sequence: Synthetic oligonucleotide
uucaguaaauggcauagga

SEQ ID NO: 2641378 - RNA, 19 nt, Artificial Sequence
  Description of Artificial Sequence: Synthetic oligonucleotide
aacuagagugcaccguagc

SEQ ID NO: 2641379 - RNA, 19 nt, Artificial Sequence
  Description of Artificial Sequence: Synthetic oligonucleotide
guuaaaagcaguucucuug

SEQ ID NO: 2641380 - RNA, 19 nt, Artificial Sequence
  Description of Artificial Sequence: Synthetic oligonucleotide
uacugauacaacuccauug

SEQ ID NO: 2641381 - RNA, 19 nt, Artificial Sequence
  Description of Artificial Sequence: Synthetic oligonucleotide
  modified_base (14)..(14): a, c, u, g, unknown or other
accuguguucaccngaagg

SEQ ID NO: 2641382 - RNA, 19 nt, Artificial Sequence
  Description of Artificial Sequence: Synthetic oligonucleotide
aaagccaaaauuaaguuuu

SEQ ID NO: 2641383 - RNA, 19 nt, Artificial Sequence
  Description of Artificial Sequence: Synthetic oligonucleotide
aaaagccaaaauuaaguuu

SEQ ID NO: 2641384 - RNA, 19 nt, Artificial Sequence
  Description of Artificial Sequence: Synthetic oligonucleotide
ugguuaaacagaaaacacu

SEQ ID NO: 2641385 - RNA, 19 nt, Artificial Sequence
  Description of Artificial Sequence: Synthetic oligonucleotide
aacauuuccccaugaucac

SEQ ID NO: 2641386 - RNA, 19 nt, Artificial Sequence
  Description of Artificial Sequence: Synthetic oligonucleotide
agacaccuaaauaacaagc

SEQ ID NO: 2641387 - RNA, 19 nt, Artificial Sequence
  Description of Artificial Sequence: Synthetic oligonucleotide
ugaaauguggagcucgcug

SEQ ID NO: 2641388 - RNA, 19 nt, Artificial Sequence
  Description of Artificial Sequence: Synthetic oligonucleotide
uaaacauuuccccaugauc

SEQ ID NO: 2641389 - RNA, 19 nt, Artificial Sequence
  Description of Artificial Sequence: Synthetic oligonucleotide
gaguuuacacaccaugugc

SEQ ID NO: 2641390 - RNA, 19 nt, Artificial Sequence
  Description of Artificial Sequence: Synthetic oligonucleotide
gaaagugguauuucugaag

SEQ ID NO: 2641391 - RNA, 19 nt, Artificial Sequence
  Description of Artificial Sequence: Synthetic oligonucleotide
augaaaacuaguuuguuuu

SEQ ID NO: 2641392 - RNA, 19 nt, Artificial Sequence
  Description of Artificial Sequence: Synthetic oligonucleotide
aaaacacugugcuagugau

SEQ ID NO: 2641393 - RNA, 19 nt, Artificial Sequence
  Description of Artificial Sequence: Synthetic oligonucleotide
uagaacuacugauacaacu

SEQ ID NO: 2641394 - RNA, 19 nt, Artificial Sequence
  Description of Artificial Sequence: Synthetic oligonucleotide
uguagacaccuaaauaaca

SEQ ID NO: 2641395 - RNA, 19 nt, Artificial Sequence
  Description of Artificial Sequence: Synthetic oligonucleotide
gaaauguggagcucgcugc

SEQ ID NO: 2641396 - RNA, 19 nt, Artificial Sequence
  Description of Artificial Sequence: Synthetic oligonucleotide
ucauguagguuucuugacc

SEQ ID NO: 2641397 - RNA, 19 nt, Artificial Sequence
  Description of Artificial Sequence: Synthetic oligonucleotide
ucccuaauguuaaaagcag

SEQ ID NO: 2641398 - RNA, 19 nt, Artificial Sequence
  Description of Artificial Sequence: Synthetic oligonucleotide
auaacaagcuaaguagugg

SEQ ID NO: 2641399 - RNA, 19 nt, Artificial Sequence
  Description of Artificial Sequence: Synthetic oligonucleotide
gaacuacugauacaacucc

SEQ ID NO: 2641400 - RNA, 19 nt, Artificial Sequence
  Description of Artificial Sequence: Synthetic oligonucleotide
aguaaauggcauaggaugg

SEQ ID NO: 2641401 - RNA, 19 nt, Artificial Sequence
  Description of Artificial Sequence: Synthetic oligonucleotide
uuucucgugagaaaacacu

SEQ ID NO: 2641402 - RNA, 19 nt, Artificial Sequence
  Description of Artificial Sequence: Synthetic oligonucleotide
cauguaaaagccaaaauua

SEQ ID NO: 2641403 - RNA, 19 nt, Artificial Sequence
  Description of Artificial Sequence: Synthetic oligonucleotide
cuaaauaacaagcuaagua

SEQ ID NO: 2641404 - RNA, 19 nt, Artificial Sequence
  Description of Artificial Sequence: Synthetic oligonucleotide
gauaaaaucaucagaaagu

SEQ ID NO: 2641405 - RNA, 19 nt, Artificial Sequence
  Description of Artificial Sequence: Synthetic oligonucleotide
ucagaaagugguauuucug

SEQ ID NO: 2641406 - RNA, 19 nt, Artificial Sequence
  Description of Artificial Sequence: Synthetic oligonucleotide
cauugguuaaacagaaaac

SEQ ID NO: 2641407 - RNA, 19 nt, Artificial Sequence
  Description of Artificial Sequence: Synthetic oligonucleotide
auaucagauaaaaucauca

SEQ ID NO: 2641408 - RNA, 19 nt, Artificial Sequence
  Description of Artificial Sequence: Synthetic oligonucleotide
uaacaagcuaaguaguggu

SEQ ID NO: 2641409 - RNA, 19 nt, Artificial Sequence
  Description of Artificial Sequence: Synthetic oligonucleotide
uggcauaggauggauauag

SEQ ID NO: 2641410 - RNA, 19 nt, Artificial Sequence
  Description of Artificial Sequence: Synthetic oligonucleotide
gauacaacuccauugguua

SEQ ID NO: 2641411 - RNA, 19 nt, Artificial Sequence
  Description of Artificial Sequence: Synthetic oligonucleotide
uggauauagugguucaggc

SEQ ID NO: 2641412 - RNA, 19 nt, Artificial Sequence
  Description of Artificial Sequence: Synthetic oligonucleotide
uagacaccuaaauaacaag

SEQ ID NO: 2641413 - RNA, 19 nt, Artificial Sequence
  Description of Artificial Sequence: Synthetic oligonucleotide
aaguuuucaguaaauggca

SEQ ID NO: 2641414 - RNA, 19 nt, Artificial Sequence
  Description of Artificial Sequence: Synthetic oligonucleotide
uuguagacaccuaaauaac

SEQ ID NO: 2641415 - RNA, 19 nt, Artificial Sequence
  Description of Artificial Sequence: Synthetic oligonucleotide
uugcuagaacuacugauac

SEQ ID NO: 2641416 - RNA, 19 nt, Artificial Sequence
  Description of Artificial Sequence: Synthetic oligonucleotide
ucucuugcuagaacuacug

SEQ ID NO: 2641417 - RNA, 19 nt, Artificial Sequence
  Description of Artificial Sequence: Synthetic oligonucleotide
gguuaaacagaaaacacug

SEQ ID NO: 2641418 - RNA, 19 nt, Artificial Sequence
  Description of Artificial Sequence: Synthetic oligonucleotide
uuagcucauggacugcucc

SEQ ID NO: 2641419 - RNA, 19 nt, Artificial Sequence
  Description of Artificial Sequence: Synthetic oligonucleotide
ugagaugggagugagcaug

SEQ ID NO: 2641420 - RNA, 19 nt, Artificial Sequence
  Description of Artificial Sequence: Synthetic oligonucleotide
cacaccaugugcaaacuag

SEQ ID NO: 2641421 - RNA, 19 nt, Artificial Sequence
  Description of Artificial Sequence: Synthetic oligonucleotide
ucuugcuagaacuacugau

SEQ ID NO: 2641422 - RNA, 19 nt, Artificial Sequence
  Description of Artificial Sequence: Synthetic oligonucleotide
ugcaaacuagagugcaccg

SEQ ID NO: 2641423 - RNA, 19 nt, Artificial Sequence
  Description of Artificial Sequence: Synthetic oligonucleotide
uuuucucgugagaaaacac

SEQ ID NO: 2641424 - RNA, 19 nt, Artificial Sequence
  Description of Artificial Sequence: Synthetic oligonucleotide
aagcuaaguagugguaggg

SEQ ID NO: 2641425 - RNA, 19 nt, Artificial Sequence
  Description of Artificial Sequence: Synthetic oligonucleotide
  modified_base (4)..(4): a, c, u, g, unknown or other
accngaagggcuguucugc

SEQ ID NO: 2641426 - RNA, 19 nt, Artificial Sequence
  Description of Artificial Sequence: Synthetic oligonucleotide
ugguauuucugaaggaaaa

SEQ ID NO: 2641427 - RNA, 19 nt, Artificial Sequence
  Description of Artificial Sequence: Synthetic oligonucleotide
aaucaucagaaagugguau

SEQ ID NO: 2641428 - RNA, 19 nt, Artificial Sequence
  Description of Artificial Sequence: Synthetic oligonucleotide
ugacauguuuucucgugag

SEQ ID NO: 2641429 - RNA, 19 nt, Artificial Sequence
  Description of Artificial Sequence: Synthetic oligonucleotide
acaagcuaaguagugguag

SEQ ID NO: 2641430 - RNA, 19 nt, Artificial Sequence
  Description of Artificial Sequence: Synthetic oligonucleotide
agugauggcuguuguauug

SEQ ID NO: 2641431 - RNA, 19 nt, Artificial Sequence
  Description of Artificial Sequence: Synthetic oligonucleotide
uguuguauuggaagucgga

SEQ ID NO: 2641432 - RNA, 19 nt, Artificial Sequence
  Description of Artificial Sequence: Synthetic oligonucleotide
auggauauagugguucagg

SEQ ID NO: 2641433 - RNA, 19 nt, Artificial Sequence
  Description of Artificial Sequence: Synthetic oligonucleotide
ucgugagaaaacacuuucc

SEQ ID NO: 2641434 - RNA, 19 nt, Artificial Sequence
  Description of Artificial Sequence: Synthetic oligonucleotide
guuguauuggaagucggag

SEQ ID NO: 2641435 - RNA, 19 nt, Artificial Sequence
  Description of Artificial Sequence: Synthetic oligonucleotide
caagcuaaguagugguagg

SEQ ID NO: 2641436 - RNA, 19 nt, Artificial Sequence
  Description of Artificial Sequence: Synthetic oligonucleotide
  modified_base (11)..(11): a, c, u, g, unknown or other
uguguucaccngaagggcu

SEQ ID NO: 2641437 - RNA, 19 nt, Artificial Sequence
  Description of Artificial Sequence: Synthetic oligonucleotide
ugauacaacuccauugguu

SEQ ID NO: 2641438 - RNA, 19 nt, Artificial Sequence
  Description of Artificial Sequence: Synthetic oligonucleotide
cucgcugcaggugagaacc

SEQ ID NO: 2641439 - RNA, 19 nt, Artificial Sequence
  Description of Artificial Sequence: Synthetic oligonucleotide
uauuggaagucggagucag

SEQ ID NO: 2641440 - RNA, 19 nt, Artificial Sequence
  Description of Artificial Sequence: Synthetic oligonucleotide
aggauggauauagugguuc

SEQ ID NO: 2641441 - RNA, 19 nt, Artificial Sequence
  Description of Artificial Sequence: Synthetic oligonucleotide
agcuaaguagugguagggc

SEQ ID NO: 2641442 - RNA, 19 nt, Artificial Sequence
  Description of Artificial Sequence: Synthetic oligonucleotide
  modified_base (17)..(17): a, c, u, g, unknown or other
uugaccuguguucaccnga

SEQ ID NO: 2641443 - RNA, 19 nt, Artificial Sequence
  Description of Artificial Sequence: Synthetic oligonucleotide
uguuuucucgugagaaaac

SEQ ID NO: 2641444 - RNA, 19 nt, Artificial Sequence
  Description of Artificial Sequence: Synthetic oligonucleotide
aaauguggagcucgcugca

SEQ ID NO: 2641445 - RNA, 19 nt, Artificial Sequence
  Description of Artificial Sequence: Synthetic oligonucleotide
gaugggagugagcaugcgc

SEQ ID NO: 2641446 - RNA, 19 nt, Artificial Sequence
  Description of Artificial Sequence: Synthetic oligonucleotide
cagucccuaauguuaaaag

SEQ ID NO: 2641447 - RNA, 19 nt, Artificial Sequence
  Description of Artificial Sequence: Synthetic oligonucleotide
uucucgugagaaaacacuu

SEQ ID NO: 2641448 - RNA, 19 nt, Artificial Sequence
  Description of Artificial Sequence: Synthetic oligonucleotide
acuaugaaaacuaguuugu

SEQ ID NO: 2641449 - RNA, 19 nt, Artificial Sequence
  Description of Artificial Sequence: Synthetic oligonucleotide
cucgugagaaaacacuuuc

SEQ ID NO: 2641450 - RNA, 19 nt, Artificial Sequence
  Description of Artificial Sequence: Synthetic oligonucleotide
uuucaguaaauggcauagg

SEQ ID NO: 2641451 - RNA, 19 nt, Artificial Sequence
  Description of Artificial Sequence: Synthetic oligonucleotide
cauuuccccaugaucacug

SEQ ID NO: 2641452 - RNA, 19 nt, Artificial Sequence
  Description of Artificial Sequence: Synthetic oligonucleotide
accuaaauaacaagcuaag

SEQ ID NO: 2641453 - RNA, 19 nt, Artificial Sequence
  Description of Artificial Sequence: Synthetic oligonucleotide
acuagagugcaccguagcu

SEQ ID NO: 2641454 - RNA, 19 nt, Artificial Sequence
  Description of Artificial Sequence: Synthetic oligonucleotide
  modified_base (6)..(6): a, c, u, g, unknown or other
ucaccngaagggcuguucu

SEQ ID NO: 2641455 - RNA, 19 nt, Artificial Sequence
  Description of Artificial Sequence: Synthetic oligonucleotide
gugguagggccacugaugc

SEQ ID NO: 2641456 - RNA, 19 nt, Artificial Sequence
  Description of Artificial Sequence: Synthetic oligonucleotide
  modified_base (16)..(16): a, c, u, g, unknown or other
ugaccuguguucaccngaa

SEQ ID NO: 2641457 - RNA, 19 nt, Artificial Sequence
  Description of Artificial Sequence: Synthetic oligonucleotide
augucacucauguagguuu

SEQ ID NO: 2641458 - RNA, 19 nt, Artificial Sequence
  Description of Artificial Sequence: Synthetic oligonucleotide
ugaugugaugucacucaug

SEQ ID NO: 2641459 - RNA, 19 nt, Artificial Sequence
  Description of Artificial Sequence: Synthetic oligonucleotide
agucggagucagcugugcc

SEQ ID NO: 2641460 - RNA, 19 nt, Artificial Sequence
  Description of Artificial Sequence: Synthetic oligonucleotide
caccuaaauaacaagcuaa

SEQ ID NO: 2641461 - RNA, 19 nt, Artificial Sequence
  Description of Artificial Sequence: Synthetic oligonucleotide
aagugguauuucugaagga

SEQ ID NO: 2641462 - RNA, 19 nt, Artificial Sequence
  Description of Artificial Sequence: Synthetic oligonucleotide
  modified_base (19)..(19): a, c, u, g, unknown or other
ucuugaccuguguucaccn

SEQ ID NO: 2641463 - RNA, 19 nt, Artificial Sequence
  Description of Artificial Sequence: Synthetic oligonucleotide
auuuccccaugaucacugc

SEQ ID NO: 2641464 - RNA, 19 nt, Artificial Sequence
  Description of Artificial Sequence: Synthetic oligonucleotide
cagaaagugguauuucuga

SEQ ID NO: 2641465 - RNA, 19 nt, Artificial Sequence
  Description of Artificial Sequence: Synthetic oligonucleotide
agaaagugguauuucugaa

SEQ ID NO: 2641466 - RNA, 19 nt, Artificial Sequence
  Description of Artificial Sequence: Synthetic oligonucleotide
aguuuacacaccaugugca

SEQ ID NO: 2641467 - RNA, 19 nt, Artificial Sequence
  Description of Artificial Sequence: Synthetic oligonucleotide
uguuaaaagcaguucucuu

SEQ ID NO: 2641468 - RNA, 19 nt, Artificial Sequence
  Description of Artificial Sequence: Synthetic oligonucleotide
cuguuguauuggaagucgg

SEQ ID NO: 2641469 - RNA, 19 nt, Artificial Sequence
  Description of Artificial Sequence: Synthetic oligonucleotide
acaacuccauugguuaaac

SEQ ID NO: 2641470 - RNA, 19 nt, Artificial Sequence
  Description of Artificial Sequence: Synthetic oligonucleotide
ucagcugugcccacgcgcu

SEQ ID NO: 2641471 - RNA, 19 nt, Artificial Sequence
  Description of Artificial Sequence: Synthetic oligonucleotide
agaaccccgaguuuacaca

SEQ ID NO: 2641472 - RNA, 19 nt, Artificial Sequence
  Description of Artificial Sequence: Synthetic oligonucleotide
auguuaaaagcaguucucu

SEQ ID NO: 2641473 - RNA, 19 nt, Artificial Sequence
  Description of Artificial Sequence: Synthetic oligonucleotide
gucccuaauguuaaaagca

SEQ ID NO: 2641474 - RNA, 19 nt, Artificial Sequence
  Description of Artificial Sequence: Synthetic oligonucleotide
gaaccccgaguuuacacac

SEQ ID NO: 2641475 - RNA, 19 nt, Artificial Sequence
  Description of Artificial Sequence: Synthetic oligonucleotide
uguagguuucuugaccugu

SEQ ID NO: 2641476 - RNA, 19 nt, Artificial Sequence
  Description of Artificial Sequence: Synthetic oligonucleotide
gcuaaguagugguagggcc

SEQ ID NO: 2641477 - RNA, 19 nt, Artificial Sequence
  Description of Artificial Sequence: Synthetic oligonucleotide
uuuuagcucauggacugcu

SEQ ID NO: 2641478 - RNA, 19 nt, Artificial Sequence
  Description of Artificial Sequence: Synthetic oligonucleotide
ugugcaaacuagagugcac

SEQ ID NO: 2641479 - RNA, 19 nt, Artificial Sequence
  Description of Artificial Sequence: Synthetic oligonucleotide
ugacuccccucaauugagg

SEQ ID NO: 2641480 - RNA, 19 nt, Artificial Sequence
  Description of Artificial Sequence: Synthetic oligonucleotide
ugguucaggccauuguaga

SEQ ID NO: 2641481 - RNA, 19 nt, Artificial Sequence
  Description of Artificial Sequence: Synthetic oligonucleotide
aagucggagucagcugugc

SEQ ID NO: 2641482 - RNA, 19 nt, Artificial Sequence
  Description of Artificial Sequence: Synthetic oligonucleotide
cucccuguuuuaaauauca

SEQ ID NO: 2641483 - RNA, 19 nt, Artificial Sequence
  Description of Artificial Sequence: Synthetic oligonucleotide
agugguauuucugaaggaa

SEQ ID NO: 2641484 - RNA, 19 nt, Artificial Sequence
  Description of Artificial Sequence: Synthetic oligonucleotide
uggagcucgcugcagguga

SEQ ID NO: 2641485 - RNA, 19 nt, Artificial Sequence
  Description of Artificial Sequence: Synthetic oligonucleotide
gagaaccccgaguuuacac

SEQ ID NO: 2641486 - RNA, 19 nt, Artificial Sequence
  Description of Artificial Sequence: Synthetic oligonucleotide
ggauauagugguucaggcc

SEQ ID NO: 2641487 - RNA, 19 nt, Artificial Sequence
  Description of Artificial Sequence: Synthetic oligonucleotide
gcauaggauggauauagug

SEQ ID NO: 2641488 - RNA, 19 nt, Artificial Sequence
  Description of Artificial Sequence: Synthetic oligonucleotide
gauggauauagugguucag

SEQ ID NO: 2641489 - RNA, 19 nt, Artificial Sequence
  Description of Artificial Sequence: Synthetic oligonucleotide
acaccuaaauaacaagcua

SEQ ID NO: 2641490 - RNA, 19 nt, Artificial Sequence
  Description of Artificial Sequence: Synthetic oligonucleotide
ucuggccauguaaaagcca

SEQ ID NO: 2641491 - RNA, 19 nt, Artificial Sequence
  Description of Artificial Sequence: Synthetic oligonucleotide
cuugcuagaacuacugaua

SEQ ID NO: 2641492 - RNA, 19 nt, Artificial Sequence
  Description of Artificial Sequence: Synthetic oligonucleotide
aaacuagagugcaccguag

SEQ ID NO: 2641493 - RNA, 19 nt, Artificial Sequence
  Description of Artificial Sequence: Synthetic oligonucleotide
cuaaguagugguagggcca

SEQ ID NO: 2641494 - RNA, 19 nt, Artificial Sequence
  Description of Artificial Sequence: Synthetic oligonucleotide
aacuacugauacaacucca

SEQ ID NO: 2641495 - RNA, 19 nt, Artificial Sequence
  Description of Artificial Sequence: Synthetic oligonucleotide
agugguucaggccauugua

SEQ ID NO: 2641496 - RNA, 19 nt, Artificial Sequence
  Description of Artificial Sequence: Synthetic oligonucleotide
agcucccuguuuuaaauau

SEQ ID NO: 2641497 - RNA, 19 nt, Artificial Sequence
  Description of Artificial Sequence: Synthetic oligonucleotide
uggcuguuguauuggaagu

SEQ ID NO: 2641498 - RNA, 19 nt, Artificial Sequence
  Description of Artificial Sequence: Synthetic oligonucleotide
ugcugacuccccucaauug

SEQ ID NO: 2641499 - RNA, 19 nt, Artificial Sequence
  Description of Artificial Sequence: Synthetic oligonucleotide
uccccaugaucacugcuga

SEQ ID NO: 2641500 - RNA, 19 nt, Artificial Sequence
  Description of Artificial Sequence: Synthetic oligonucleotide
cacucauguagguuucuug

SEQ ID NO: 2641501 - RNA, 19 nt, Artificial Sequence
  Description of Artificial Sequence: Synthetic oligonucleotide
acuccauugguuaaacaga

SEQ ID NO: 2641502 - RNA, 19 nt, Artificial Sequence
  Description of Artificial Sequence: Synthetic oligonucleotide
uucuugaccuguguucacc

SEQ ID NO: 2641503 - RNA, 19 nt, Artificial Sequence
  Description of Artificial Sequence: Synthetic oligonucleotide
ugcuagaacuacugauaca

SEQ ID NO: 2641504 - RNA, 19 nt, Artificial Sequence
  Description of Artificial Sequence: Synthetic oligonucleotide
gugcaaacuagagugcacc

SEQ ID NO: 2641505 - RNA, 19 nt, Artificial Sequence
  Description of Artificial Sequence: Synthetic oligonucleotide
guagacaccuaaauaacaa

SEQ ID NO: 2641506 - RNA, 19 nt, Artificial Sequence
  Description of Artificial Sequence: Synthetic oligonucleotide
auguaaaagccaaaauuaa

SEQ ID NO: 2641507 - RNA, 19 nt, Artificial Sequence
  Description of Artificial Sequence: Synthetic oligonucleotide
cuagaacuacugauacaac

SEQ ID NO: 2641508 - RNA, 19 nt, Artificial Sequence
  Description of Artificial Sequence: Synthetic oligonucleotide
gguuucuugaccuguguuc

SEQ ID NO: 2641509 - RNA, 19 nt, Artificial Sequence
  Description of Artificial Sequence: Synthetic oligonucleotide
gucggagucagcugugccc

SEQ ID NO: 2641510 - RNA, 19 nt, Artificial Sequence
  Description of Artificial Sequence: Synthetic oligonucleotide
uuuccccaugaucacugcu

SEQ ID NO: 2641511 - RNA, 19 nt, Artificial Sequence
  Description of Artificial Sequence: Synthetic oligonucleotide
gcuagaacuacugauacaa

SEQ ID NO: 2641512 - RNA, 19 nt, Artificial Sequence
  Description of Artificial Sequence: Synthetic oligonucleotide
guuuucucgugagaaaaca

SEQ ID NO: 2641513 - RNA, 19 nt, Artificial Sequence
  Description of Artificial Sequence: Synthetic oligonucleotide
caugaucacugcugacucc

SEQ ID NO: 2641514 - RNA, 19 nt, Artificial Sequence
  Description of Artificial Sequence: Synthetic oligonucleotide
gcuguuguauuggaagucg

SEQ ID NO: 2641515 - RNA, 19 nt, Artificial Sequence
  Description of Artificial Sequence: Synthetic oligonucleotide
gguagggccacugaugcag

SEQ ID NO: 2641516 - RNA, 19 nt, Artificial Sequence
  Description of Artificial Sequence: Synthetic oligonucleotide
ucucgugagaaaacacuuu

SEQ ID NO: 2641517 - RNA, 19 nt, Artificial Sequence
  Description of Artificial Sequence: Synthetic oligonucleotide
ucacugcugacuccccuca

SEQ ID NO: 2641518 - RNA, 19 nt, Artificial Sequence
  Description of Artificial Sequence: Synthetic oligonucleotide
aauguggagcucgcugcag

SEQ ID NO: 2641519 - RNA, 19 nt, Artificial Sequence
  Description of Artificial Sequence: Synthetic oligonucleotide
augggagugagcaugcgcu

SEQ ID NO: 2641520 - RNA, 19 nt, Artificial Sequence
  Description of Artificial Sequence: Synthetic oligonucleotide
ugcucccagucccuaaugu

SEQ ID NO: 2641521 - RNA, 19 nt, Artificial Sequence
  Description of Artificial Sequence: Synthetic oligonucleotide
ugcaggagcacccgcugcu

SEQ ID NO: 2641522 - RNA, 19 nt, Artificial Sequence
  Description of Artificial Sequence: Synthetic oligonucleotide
ugcuagugauggcuguugu

SEQ ID NO: 2641523 - RNA, 19 nt, Artificial Sequence
  Description of Artificial Sequence: Synthetic oligonucleotide
cuagagugcaccguagcuc

SEQ ID NO: 2641524 - RNA, 19 nt, Artificial Sequence
  Description of Artificial Sequence: Synthetic oligonucleotide
uaaguagugguagggccac

SEQ ID NO: 2641525 - RNA, 19 nt, Artificial Sequence
  Description of Artificial Sequence: Synthetic oligonucleotide
gacaccuaaauaacaagcu

SEQ ID NO: 2641526 - RNA, 19 nt, Artificial Sequence
  Description of Artificial Sequence: Synthetic oligonucleotide
ucccagucccuaauguuaa

SEQ ID NO: 2641527 - RNA, 19 nt, Artificial Sequence
  Description of Artificial Sequence: Synthetic oligonucleotide
uuuagcucauggacugcuc

SEQ ID NO: 2641528 - RNA, 19 nt, Artificial Sequence
  Description of Artificial Sequence: Synthetic oligonucleotide
agugagcaugcgcugggug

SEQ ID NO: 2641529 - RNA, 19 nt, Artificial Sequence
  Description of Artificial Sequence: Synthetic oligonucleotide
ggugaugugaugucacuca

SEQ ID NO: 2641530 - RNA, 19 nt, Artificial Sequence
  Description of Artificial Sequence: Synthetic oligonucleotide
ugcaggugagaaccccgag

SEQ ID NO: 2641531 - RNA, 19 nt, Artificial Sequence
  Description of Artificial Sequence: Synthetic oligonucleotide
aaccccgaguuuacacacc

SEQ ID NO: 2641532 - RNA, 19 nt, Artificial Sequence
  Description of Artificial Sequence: Synthetic oligonucleotide
gucagcugugcccacgcgc

SEQ ID NO: 2641533 - RNA, 19 nt, Artificial Sequence
  Description of Artificial Sequence: Synthetic oligonucleotide
uagugguagggccacugau

SEQ ID NO: 2641534 - RNA, 19 nt, Artificial Sequence
  Description of Artificial Sequence: Synthetic oligonucleotide
agaaaacacugugcuagug

SEQ ID NO: 2641535 - RNA, 19 nt, Artificial Sequence
  Description of Artificial Sequence: Synthetic oligonucleotide
aaacacugugcuagugaug

SEQ ID NO: 2641536 - RNA, 19 nt, Artificial Sequence
  Description of Artificial Sequence: Synthetic oligonucleotide
ucggagucagcugugccca

SEQ ID NO: 2641537 - RNA, 19 nt, Artificial Sequence
  Description of Artificial Sequence: Synthetic oligonucleotide
  modified_base (10)..(10): a, c, u, g, unknown or other
guguucaccngaagggcug

SEQ ID NO: 2641538 - RNA, 19 nt, Artificial Sequence
  Description of Artificial Sequence: Synthetic oligonucleotide
cuccauugguuaaacagaa

SEQ ID NO: 2641539 - RNA, 19 nt, Artificial Sequence
  Description of Artificial Sequence: Synthetic oligonucleotide
gugguucaggccauuguag

SEQ ID NO: 2641540 - RNA, 19 nt, Artificial Sequence
  Description of Artificial Sequence: Synthetic oligonucleotide
  modified_base (18)..(18): a, c, u, g, unknown or other
cuugaccuguguucaccng

SEQ ID NO: 2641541 - RNA, 19 nt, Artificial Sequence
  Description of Artificial Sequence: Synthetic oligonucleotide
augugcaaacuagagugca

SEQ ID NO: 2641542 - RNA, 19 nt, Artificial Sequence
  Description of Artificial Sequence: Synthetic oligonucleotide
acacugugcuagugauggc

SEQ ID NO: 2641543 - RNA, 19 nt, Artificial Sequence
  Description of Artificial Sequence: Synthetic oligonucleotide
cuguuuuaaauaucagaua

SEQ ID NO: 2641544 - RNA, 19 nt, Artificial Sequence
  Description of Artificial Sequence: Synthetic oligonucleotide
agugguagggccacugaug

SEQ ID NO: 2641545 - RNA, 19 nt, Artificial Sequence
  Description of Artificial Sequence: Synthetic oligonucleotide
gcugagaugggagugagca

SEQ ID NO: 2641546 - RNA, 19 nt, Artificial Sequence
  Description of Artificial Sequence: Synthetic oligonucleotide
guuuucaguaaauggcaua

SEQ ID NO: 2641547 - RNA, 19 nt, Artificial Sequence
  Description of Artificial Sequence: Synthetic oligonucleotide
cuggccauguaaaagccaa

SEQ ID NO: 2641548 - RNA, 19 nt, Artificial Sequence
  Description of Artificial Sequence: Synthetic oligonucleotide
uacaacuccauugguuaaa

SEQ ID NO: 2641549 - RNA, 19 nt, Artificial Sequence
  Description of Artificial Sequence: Synthetic oligonucleotide
auacaacuccauugguuaa

SEQ ID NO: 2641550 - RNA, 19 nt, Artificial Sequence
  Description of Artificial Sequence: Synthetic oligonucleotide
aguagugguagggccacug

SEQ ID NO: 2641551 - RNA, 19 nt, Artificial Sequence
  Description of Artificial Sequence: Synthetic oligonucleotide
uccauugguuaaacagaaa

SEQ ID NO: 2641552 - RNA, 19 nt, Artificial Sequence
  Description of Artificial Sequence: Synthetic oligonucleotide
ccuguuuuaaauaucagau

SEQ ID NO: 2641553 - RNA, 19 nt, Artificial Sequence
  Description of Artificial Sequence: Synthetic oligonucleotide
cagauaaaaucaucagaaa

SEQ ID NO: 2641554 - RNA, 19 nt, Artificial Sequence
  Description of Artificial Sequence: Synthetic oligonucleotide
accccgaguuuacacacca

SEQ ID NO: 2641555 - RNA, 19 nt, Artificial Sequence
  Description of Artificial Sequence: Synthetic oligonucleotide
gaugcagacagcuggugau

SEQ ID NO: 2641556 - RNA, 19 nt, Artificial Sequence
  Description of Artificial Sequence: Synthetic oligonucleotide
gagaugggagugagcaugc

SEQ ID NO: 2641557 - RNA, 19 nt, Artificial Sequence
  Description of Artificial Sequence: Synthetic oligonucleotide
ugaucacugcugacucccc

SEQ ID NO: 2641558 - RNA, 19 nt, Artificial Sequence
  Description of Artificial Sequence: Synthetic oligonucleotide
ccauugguuaaacagaaaa

SEQ ID NO: 2641559 - RNA, 19 nt, Artificial Sequence
  Description of Artificial Sequence: Synthetic oligonucleotide
uuucuugaccuguguucac

SEQ ID NO: 2641560 - RNA, 19 nt, Artificial Sequence
  Description of Artificial Sequence: Synthetic oligonucleotide
cauggacugcucccagucc

SEQ ID NO: 2641561 - RNA, 19 nt, Artificial Sequence
  Description of Artificial Sequence: Synthetic oligonucleotide
gugagcaugcgcuggguga

SEQ ID NO: 2641562 - RNA, 19 nt, Artificial Sequence
  Description of Artificial Sequence: Synthetic oligonucleotide
uggugaugugaugucacuc

SEQ ID NO: 2641563 - RNA, 19 nt, Artificial Sequence
  Description of Artificial Sequence: Synthetic oligonucleotide
guucaggccauuguagaca

SEQ ID NO: 2641564 - RNA, 19 nt, Artificial Sequence
  Description of Artificial Sequence: Synthetic oligonucleotide
  modified_base (7)..(7): a, c, u, g, unknown or other
uucaccngaagggcuguuc

SEQ ID NO: 2641565 - RNA, 19 nt, Artificial Sequence
  Description of Artificial Sequence: Synthetic oligonucleotide
acuacugauacaacuccau

SEQ ID NO: 2641566 - RNA, 19 nt, Artificial Sequence
  Description of Artificial Sequence: Synthetic oligonucleotide
  modified_base (2)..(2): a, c, u, g, unknown or other
cngaagggcuguucugcag

SEQ ID NO: 2641567 - RNA, 19 nt, Artificial Sequence
  Description of Artificial Sequence: Synthetic oligonucleotide
ccaaaauuaaguuuucagu

SEQ ID NO: 2641568 - RNA, 19 nt, Artificial Sequence
  Description of Artificial Sequence: Synthetic oligonucleotide
guuuacacaccaugugcaa

SEQ ID NO: 2641569 - RNA, 19 nt, Artificial Sequence
  Description of Artificial Sequence: Synthetic oligonucleotide
guaaauggcauaggaugga

SEQ ID NO: 2641570 - RNA, 19 nt, Artificial Sequence
  Description of Artificial Sequence: Synthetic oligonucleotide
ugggagugagcaugcgcug

SEQ ID NO: 2641571 - RNA, 19 nt, Artificial Sequence
  Description of Artificial Sequence: Synthetic oligonucleotide
cugacauguuuucucguga

SEQ ID NO: 2641572 - RNA, 19 nt, Artificial Sequence
  Description of Artificial Sequence: Synthetic oligonucleotide
aacaagcuaaguaguggua

SEQ ID NO: 2641573 - RNA, 19 nt, Artificial Sequence
  Description of Artificial Sequence: Synthetic oligonucleotide
auuggaagucggagucagc

SEQ ID NO: 2641574 - RNA, 19 nt, Artificial Sequence
  Description of Artificial Sequence: Synthetic oligonucleotide
gacagcuggugaugugaug

SEQ ID NO: 2641575 - RNA, 19 nt, Artificial Sequence
  Description of Artificial Sequence: Synthetic oligonucleotide
agguuucuugaccuguguu

SEQ ID NO: 2641576 - RNA, 19 nt, Artificial Sequence
  Description of Artificial Sequence: Synthetic oligonucleotide
agccaaaauuaaguuuuca

SEQ ID NO: 2641577 - RNA, 19 nt, Artificial Sequence
  Description of Artificial Sequence: Synthetic oligonucleotide
acugugcuagugauggcug

SEQ ID NO: 2641578 - RNA, 19 nt, Artificial Sequence
  Description of Artificial Sequence: Synthetic oligonucleotide
ggagugagcaugcgcuggg

SEQ ID NO: 2641579 - RNA, 19 nt, Artificial Sequence
  Description of Artificial Sequence: Synthetic oligonucleotide
auagugguucaggccauug

SEQ ID NO: 2641580 - RNA, 19 nt, Artificial Sequence
  Description of Artificial Sequence: Synthetic oligonucleotide
caguucucuugcuagaacu

SEQ ID NO: 2641581 - RNA, 19 nt, Artificial Sequence
  Description of Artificial Sequence: Synthetic oligonucleotide
aggagcacccgcugcugag

SEQ ID NO: 2641582 - RNA, 19 nt, Artificial Sequence
  Description of Artificial Sequence: Synthetic oligonucleotide
ugcaccguagcucccuguu

SEQ ID NO: 2641583 - RNA, 19 nt, Artificial Sequence
  Description of Artificial Sequence: Synthetic oligonucleotide
gguucaggccauuguagac

SEQ ID NO: 2641584 - RNA, 19 nt, Artificial Sequence
  Description of Artificial Sequence: Synthetic oligonucleotide
gagaaaacacuuuccuuuu

SEQ ID NO: 2641585 - RNA, 19 nt, Artificial Sequence
  Description of Artificial Sequence: Synthetic oligonucleotide
uaggauggauauagugguu

SEQ ID NO: 2641586 - RNA, 19 nt, Artificial Sequence
  Description of Artificial Sequence: Synthetic oligonucleotide
agucagcugugcccacgcg

SEQ ID NO: 2641587 - RNA, 19 nt, Artificial Sequence
  Description of Artificial Sequence: Synthetic oligonucleotide
ugagcaugcgcugggugaa

SEQ ID NO: 2641588 - RNA, 19 nt, Artificial Sequence
  Description of Artificial Sequence: Synthetic oligonucleotide
uagugauggcuguuguauu

SEQ ID NO: 2641589 - RNA, 19 nt, Artificial Sequence
  Description of Artificial Sequence: Synthetic oligonucleotide
acauuuccccaugaucacu

SEQ ID NO: 2641590 - RNA, 19 nt, Artificial Sequence
  Description of Artificial Sequence: Synthetic oligonucleotide
uagcucccuguuuuaaaua

SEQ ID NO: 2641591 - RNA, 19 nt, Artificial Sequence
  Description of Artificial Sequence: Synthetic oligonucleotide
cccuguuuuaaauaucaga

SEQ ID NO: 2641592 - RNA, 19 nt, Artificial Sequence
  Description of Artificial Sequence: Synthetic oligonucleotide
  modified_base (9)..(9): a, c, u, g, unknown or other
uguucaccngaagggcugu

SEQ ID NO: 2641593 - RNA, 19 nt, Artificial Sequence
  Description of Artificial Sequence: Synthetic oligonucleotide
  modified_base (15)..(15): a, c, u, g, unknown or other
gaccuguguucaccngaag

SEQ ID NO: 2641594 - RNA, 19 nt, Artificial Sequence
  Description of Artificial Sequence: Synthetic oligonucleotide
acugcucccagucccuaau

SEQ ID NO: 2641595 - RNA, 19 nt, Artificial Sequence
  Description of Artificial Sequence: Synthetic oligonucleotide
ccugacauguuuucucgug

SEQ ID NO: 2641596 - RNA, 19 nt, Artificial Sequence
  Description of Artificial Sequence: Synthetic oligonucleotide
ugagaaccccgaguuuaca

SEQ ID NO: 2641597 - RNA, 19 nt, Artificial Sequence
  Description of Artificial Sequence: Synthetic oligonucleotide
gaagucggagucagcugug

SEQ ID NO: 2641598 - RNA, 19 nt, Artificial Sequence
  Description of Artificial Sequence: Synthetic oligonucleotide
ggauggauauagugguuca

SEQ ID NO: 2641599 - RNA, 19 nt, Artificial Sequence
  Description of Artificial Sequence: Synthetic oligonucleotide
  modified_base (5)..(5): a, c, u, g, unknown or other
caccngaagggcuguucug

SEQ ID NO: 2641600 - RNA, 19 nt, Artificial Sequence
  Description of Artificial Sequence: Synthetic oligonucleotide
cucccagucccuaauguua

SEQ ID NO: 2641601 - RNA, 19 nt, Artificial Sequence
  Description of Artificial Sequence: Synthetic oligonucleotide
cugggugaaauguggagcu

SEQ ID NO: 2641602 - RNA, 19 nt, Artificial Sequence
  Description of Artificial Sequence: Synthetic oligonucleotide
gcugacuccccucaauuga

SEQ ID NO: 2641603 - RNA, 19 nt, Artificial Sequence
  Description of Artificial Sequence: Synthetic oligonucleotide
gugguauuucugaaggaaa

SEQ ID NO: 2641604 - RNA, 19 nt, Artificial Sequence
  Description of Artificial Sequence: Synthetic oligonucleotide
cccgaguuuacacaccaug

SEQ ID NO: 2641605 - RNA, 19 nt, Artificial Sequence
  Description of Artificial Sequence: Synthetic oligonucleotide
agugcaccguagcucccug

SEQ ID NO: 2641606 - RNA, 19 nt, Artificial Sequence
  Description of Artificial Sequence: Synthetic oligonucleotide
guagcucccuguuuuaaau

SEQ ID NO: 2641607 - RNA, 19 nt, Artificial Sequence
  Description of Artificial Sequence: Synthetic oligonucleotide
uggccauguaaaagccaaa

SEQ ID NO: 2641608 - RNA, 19 nt, Artificial Sequence
  Description of Artificial Sequence: Synthetic oligonucleotide
cuagugauggcuguuguau

SEQ ID NO: 2641609 - RNA, 19 nt, Artificial Sequence
  Description of Artificial Sequence: Synthetic oligonucleotide
cagacagcuggugauguga

SEQ ID NO: 2641610 - RNA, 19 nt, Artificial Sequence
  Description of Artificial Sequence: Synthetic oligonucleotide
ggaagucggagucagcugu

SEQ ID NO: 2641611 - RNA, 19 nt, Artificial Sequence
  Description of Artificial Sequence: Synthetic oligonucleotide
agaugggagugagcaugcg

SEQ ID NO: 2641612 - RNA, 19 nt, Artificial Sequence
  Description of Artificial Sequence: Synthetic oligonucleotide
ccaugaucacugcugacuc

SEQ ID NO: 2641613 - RNA, 19 nt, Artificial Sequence
  Description of Artificial Sequence: Synthetic oligonucleotide
aguucucuugcuagaacua

SEQ ID NO: 2641614 - RNA, 19 nt, Artificial Sequence
  Description of Artificial Sequence: Synthetic oligonucleotide
cucuugcuagaacuacuga

SEQ ID NO: 2641615 - RNA, 19 nt, Artificial Sequence
  Description of Artificial Sequence: Synthetic oligonucleotide
guagugguagggccacuga

SEQ ID NO: 2641616 - RNA, 19 nt, Artificial Sequence
  Description of Artificial Sequence: Synthetic oligonucleotide
agcucauggacugcuccca

SEQ ID NO: 2641617 - RNA, 19 nt, Artificial Sequence
  Description of Artificial Sequence: Synthetic oligonucleotide
ucaggccauuguagacacc

SEQ ID NO: 2641618 - RNA, 19 nt, Artificial Sequence
  Description of Artificial Sequence: Synthetic oligonucleotide
gacuccccucaauugaggu

SEQ ID NO: 2641619 - RNA, 19 nt, Artificial Sequence
  Description of Artificial Sequence: Synthetic oligonucleotide
acuccccucaauugagguu

SEQ ID NO: 2641620 - RNA, 19 nt, Artificial Sequence
  Description of Artificial Sequence: Synthetic oligonucleotide
ugugcuagugauggcuguu

SEQ ID NO: 2641621 - RNA, 19 nt, Artificial Sequence
  Description of Artificial Sequence: Synthetic oligonucleotide
ugguagggccacugaugca

SEQ ID NO: 2641622 - RNA, 19 nt, Artificial Sequence
  Description of Artificial Sequence: Synthetic oligonucleotide
ccauguaaaagccaaaauu

SEQ ID NO: 2641623 - RNA, 19 nt, Artificial Sequence
  Description of Artificial Sequence: Synthetic oligonucleotide
guauuggaagucggaguca

SEQ ID NO: 2641624 - RNA, 19 nt, Artificial Sequence
  Description of Artificial Sequence: Synthetic oligonucleotide
acgcgcugcaggagcaccc

SEQ ID NO: 2641625 - RNA, 19 nt, Artificial Sequence
  Description of Artificial Sequence: Synthetic oligonucleotide
cgaguuuacacaccaugug

SEQ ID NO: 2641626 - RNA, 19 nt, Artificial Sequence
  Description of Artificial Sequence: Synthetic oligonucleotide
ggugagaaccccgaguuua

SEQ ID NO: 2641627 - RNA, 19 nt, Artificial Sequence
  Description of Artificial Sequence: Synthetic oligonucleotide
agagugcaccguagcuccc

SEQ ID NO: 2641628 - RNA, 19 nt, Artificial Sequence
  Description of Artificial Sequence: Synthetic oligonucleotide
ucgcugcaggugagaaccc

SEQ ID NO: 2641629 - RNA, 19 nt, Artificial Sequence
  Description of Artificial Sequence: Synthetic oligonucleotide
ucacucauguagguuucuu

SEQ ID NO: 2641630 - RNA, 19 nt, Artificial Sequence
  Description of Artificial Sequence: Synthetic oligonucleotide
gggagugagcaugcgcugg

SEQ ID NO: 2641631 - RNA, 19 nt, Artificial Sequence
  Description of Artificial Sequence: Synthetic oligonucleotide
gcugcaggugagaaccccg

SEQ ID NO: 2641632 - RNA, 19 nt, Artificial Sequence
  Description of Artificial Sequence: Synthetic oligonucleotide
uagggccacugaugcagac

SEQ ID NO: 2641633 - RNA, 19 nt, Artificial Sequence
  Description of Artificial Sequence: Synthetic oligonucleotide
gugagaaccccgaguuuac

SEQ ID NO: 2641634 - RNA, 19 nt, Artificial Sequence
  Description of Artificial Sequence: Synthetic oligonucleotide
ggccauuguagacaccuaa

SEQ ID NO: 2641635 - RNA, 19 nt, Artificial Sequence
  Description of Artificial Sequence: Synthetic oligonucleotide
auauagugguucaggccau

SEQ ID NO: 2641636 - RNA, 19 nt, Artificial Sequence
  Description of Artificial Sequence: Synthetic oligonucleotide
gcaguucucuugcuagaac

SEQ ID NO: 2641637 - RNA, 19 nt, Artificial Sequence
  Description of Artificial Sequence: Synthetic oligonucleotide
caugcgcugggugaaaugu

SEQ ID NO: 2641638 - RNA, 19 nt, Artificial Sequence
  Description of Artificial Sequence: Synthetic oligonucleotide
gcuggugaugugaugucac

SEQ ID NO: 2641639 - RNA, 19 nt, Artificial Sequence
  Description of Artificial Sequence: Synthetic oligonucleotide
gaugucacucauguagguu

SEQ ID NO: 2641640 - RNA, 19 nt, Artificial Sequence
  Description of Artificial Sequence: Synthetic oligonucleotide
cugcucccagucccuaaug

SEQ ID NO: 2641641 - RNA, 19 nt, Artificial Sequence
  Description of Artificial Sequence: Synthetic oligonucleotide
agggccacugaugcagaca

SEQ ID NO: 2641642 - RNA, 19 nt, Artificial Sequence
  Description of Artificial Sequence: Synthetic oligonucleotide
ugggugaaauguggagcuc

SEQ ID NO: 2641643 - RNA, 19 nt, Artificial Sequence
  Description of Artificial Sequence: Synthetic oligonucleotide
caggugagaaccccgaguu

SEQ ID NO: 2641644 - RNA, 19 nt, Artificial Sequence
  Description of Artificial Sequence: Synthetic oligonucleotide
ggccauguaaaagccaaaa

SEQ ID NO: 2641645 - RNA, 19 nt, Artificial Sequence
  Description of Artificial Sequence: Synthetic oligonucleotide
aggugagaaccccgaguuu

SEQ ID NO: 2641646 - RNA, 19 nt, Artificial Sequence
  Description of Artificial Sequence: Synthetic oligonucleotide
uauagugguucaggccauu

SEQ ID NO: 2641647 - RNA, 19 nt, Artificial Sequence
  Description of Artificial Sequence: Synthetic oligonucleotide
aaguagugguagggccacu

SEQ ID NO: 2641648 - RNA, 19 nt, Artificial Sequence
  Description of Artificial Sequence: Synthetic oligonucleotide
agacagcuggugaugugau

SEQ ID NO: 2641649 - RNA, 19 nt, Artificial Sequence
  Description of Artificial Sequence: Synthetic oligonucleotide
ggcuguuguauuggaaguc

SEQ ID NO: 2641650 - RNA, 19 nt, Artificial Sequence
  Description of Artificial Sequence: Synthetic oligonucleotide
augcgcugggugaaaugug

SEQ ID NO: 2641651 - RNA, 19 nt, Artificial Sequence
  Description of Artificial Sequence: Synthetic oligonucleotide
gugaugugaugucacucau

SEQ ID NO: 2641652 - RNA, 19 nt, Artificial Sequence
  Description of Artificial Sequence: Synthetic oligonucleotide
agcacccgcugcugagaug

SEQ ID NO: 2641653 - RNA, 19 nt, Artificial Sequence
  Description of Artificial Sequence: Synthetic oligonucleotide
cacugugcuagugauggcu

SEQ ID NO: 2641654 - RNA, 19 nt, Artificial Sequence
  Description of Artificial Sequence: Synthetic oligonucleotide
cacgcgcugcaggagcacc

SEQ ID NO: 2641655 - RNA, 19 nt, Artificial Sequence
  Description of Artificial Sequence: Synthetic oligonucleotide
cugauacaacuccauuggu

SEQ ID NO: 2641656 - RNA, 19 nt, Artificial Sequence
  Description of Artificial Sequence: Synthetic oligonucleotide
accguagcucccuguuuua

SEQ ID NO: 2641657 - RNA, 19 nt, Artificial Sequence
  Description of Artificial Sequence: Synthetic oligonucleotide
gggcuguucugcagagucg

SEQ ID NO: 2641658 - RNA, 19 nt, Artificial Sequence
  Description of Artificial Sequence: Synthetic oligonucleotide
agcucgcugcaggugagaa

SEQ ID NO: 2641659 - RNA, 19 nt, Artificial Sequence
  Description of Artificial Sequence: Synthetic oligonucleotide
guggagcucgcugcaggug

SEQ ID NO: 2641660 - RNA, 19 nt, Artificial Sequence
  Description of Artificial Sequence: Synthetic oligonucleotide
cagaaaacacugugcuagu

SEQ ID NO: 2641661 - RNA, 19 nt, Artificial Sequence
  Description of Artificial Sequence: Synthetic oligonucleotide
auggcauaggauggauaua

SEQ ID NO: 2641662 - RNA, 19 nt, Artificial Sequence
  Description of Artificial Sequence: Synthetic oligonucleotide
gcaugcgcugggugaaaug

SEQ ID NO: 2641663 - RNA, 19 nt, Artificial Sequence
  Description of Artificial Sequence: Synthetic oligonucleotide
cuacugauacaacuccauu

SEQ ID NO: 2641664 - RNA, 19 nt, Artificial Sequence
  Description of Artificial Sequence: Synthetic oligonucleotide
gccacugaugcagacagcu

SEQ ID NO: 2641665 - RNA, 19 nt, Artificial Sequence
  Description of Artificial Sequence: Synthetic oligonucleotide
agcaugcgcugggugaaau

SEQ ID NO: 2641666 - RNA, 19 nt, Artificial Sequence
  Description of Artificial Sequence: Synthetic oligonucleotide
cuccccucaauugagguuu

SEQ ID NO: 2641667 - RNA, 19 nt, Artificial Sequence
  Description of Artificial Sequence: Synthetic oligonucleotide
uccccucaauugagguuuu

SEQ ID NO: 2641668 - RNA, 19 nt, Artificial Sequence
  Description of Artificial Sequence: Synthetic oligonucleotide
ccacugaugcagacagcug

SEQ ID NO: 2641669 - RNA, 19 nt, Artificial Sequence
  Description of Artificial Sequence: Synthetic oligonucleotide
gccauguaaaagccaaaau

SEQ ID NO: 2641670 - RNA, 19 nt, Artificial Sequence
  Description of Artificial Sequence: Synthetic oligonucleotide
ccgaguuuacacaccaugu

SEQ ID NO: 2641671 - RNA, 19 nt, Artificial Sequence
  Description of Artificial Sequence: Synthetic oligonucleotide
gcuagugauggcuguugua

SEQ ID NO: 2641672 - RNA, 19 nt, Artificial Sequence
  Description of Artificial Sequence: Synthetic oligonucleotide
gcugcugagaugggaguga

SEQ ID NO: 2641673 - RNA, 19 nt, Artificial Sequence
  Description of Artificial Sequence: Synthetic oligonucleotide
guagggccacugaugcaga

SEQ ID NO: 2641674 - RNA, 19 nt, Artificial Sequence
  Description of Artificial Sequence: Synthetic oligonucleotide
acccgcugcugagauggga

SEQ ID NO: 2641675 - RNA, 19 nt, Artificial Sequence
  Description of Artificial Sequence: Synthetic oligonucleotide
cacccgcugcugagauggg

SEQ ID NO: 2641676 - RNA, 19 nt, Artificial Sequence
  Description of Artificial Sequence: Synthetic oligonucleotide
  modified_base (3)..(3): a, c, u, g, unknown or other
ccngaagggcuguucugca

SEQ ID NO: 2641677 - RNA, 19 nt, Artificial Sequence
  Description of Artificial Sequence: Synthetic oligonucleotide
cugugcuagugauggcugu

SEQ ID NO: 2641678 - RNA, 19 nt, Artificial Sequence
  Description of Artificial Sequence: Synthetic oligonucleotide
gcucgcugcaggugagaac

SEQ ID NO: 2641679 - RNA, 19 nt, Artificial Sequence
  Description of Artificial Sequence: Synthetic oligonucleotide
cucauggacugcucccagu

SEQ ID NO: 2641680 - RNA, 19 nt, Artificial Sequence
  Description of Artificial Sequence: Synthetic oligonucleotide
gcucccuguuuuaaauauc

SEQ ID NO: 2641681 - RNA, 19 nt, Artificial Sequence
  Description of Artificial Sequence: Synthetic oligonucleotide
caccguagcucccuguuuu

SEQ ID NO: 2641682 - RNA, 19 nt, Artificial Sequence
  Description of Artificial Sequence: Synthetic oligonucleotide
ccuaaauaacaagcuaagu

SEQ ID NO: 2641683 - RNA, 19 nt, Artificial Sequence
  Description of Artificial Sequence: Synthetic oligonucleotide
gagugcaccguagcucccu

SEQ ID NO: 2641684 - RNA, 19 nt, Artificial Sequence
  Description of Artificial Sequence: Synthetic oligonucleotide
gcaaacuagagugcaccgu

SEQ ID NO: 2641685 - RNA, 19 nt, Artificial Sequence
  Description of Artificial Sequence: Synthetic oligonucleotide
cccuaauguuaaaagcagu

SEQ ID NO: 2641686 - RNA, 19 nt, Artificial Sequence
  Description of Artificial Sequence: Synthetic oligonucleotide
gugaaauguggagcucgcu

SEQ ID NO: 2641687 - RNA, 19 nt, Artificial Sequence
  Description of Artificial Sequence: Synthetic oligonucleotide
cugagaugggagugagcau

SEQ ID NO: 2641688 - RNA, 19 nt, Artificial Sequence
  Description of Artificial Sequence: Synthetic oligonucleotide
ccagucccuaauguuaaaa

SEQ ID NO: 2641689 - RNA, 19 nt, Artificial Sequence
  Description of Artificial Sequence: Synthetic oligonucleotide
cccaugaucacugcugacu

SEQ ID NO: 2641690 - RNA, 19 nt, Artificial Sequence
  Description of Artificial Sequence: Synthetic oligonucleotide
gucacucauguagguuucu

SEQ ID NO: 2641691 - RNA, 19 nt, Artificial Sequence
  Description of Artificial Sequence: Synthetic oligonucleotide
ccccaugaucacugcugac

SEQ ID NO: 2641692 - RNA, 19 nt, Artificial Sequence
  Description of Artificial Sequence: Synthetic oligonucleotide
ggagcacccgcugcugaga

SEQ ID NO: 2641693 - RNA, 19 nt, Artificial Sequence
  Description of Artificial Sequence: Synthetic oligonucleotide
aggccauuguagacaccua

SEQ ID NO: 2641694 - RNA, 19 nt, Artificial Sequence
  Description of Artificial Sequence: Synthetic oligonucleotide
gagcaugcgcugggugaaa

SEQ ID NO: 2641695 - RNA, 19 nt, Artificial Sequence
  Description of Artificial Sequence: Synthetic oligonucleotide
cguagcucccuguuuuaaa

SEQ ID NO: 2641696 - RNA, 19 nt, Artificial Sequence
  Description of Artificial Sequence: Synthetic oligonucleotide
cacugcugacuccccucaa

SEQ ID NO: 2641697 - RNA, 19 nt, Artificial Sequence
  Description of Artificial Sequence: Synthetic oligonucleotide
cugugcccacgcgcugcag

SEQ ID NO: 2641698 - RNA, 19 nt, Artificial Sequence
  Description of Artificial Sequence: Synthetic oligonucleotide
ggcauaggauggauauagu

SEQ ID NO: 2641699 - RNA, 19 nt, Artificial Sequence
  Description of Artificial Sequence: Synthetic oligonucleotide
gugcaccguagcucccugu

SEQ ID NO: 2641700 - RNA, 19 nt, Artificial Sequence
  Description of Artificial Sequence: Synthetic oligonucleotide
gcgcugggugaaaugugga

SEQ ID NO: 2641701 - RNA, 19 nt, Artificial Sequence
  Description of Artificial Sequence: Synthetic oligonucleotide
cccagucccuaauguuaaa

SEQ ID NO: 2641702 - RNA, 19 nt, Artificial Sequence
  Description of Artificial Sequence: Synthetic oligonucleotide
ggacugcucccagucccua

SEQ ID NO: 2641703 - RNA, 19 nt, Artificial Sequence
  Description of Artificial Sequence: Synthetic oligonucleotide
  modified_base (8)..(8): a, c, u, g, unknown or other
guucaccngaagggcuguu

SEQ ID NO: 2641704 - RNA, 19 nt, Artificial Sequence
  Description of Artificial Sequence: Synthetic oligonucleotide
ccguagcucccuguuuuaa

SEQ ID NO: 2641705 - RNA, 19 nt, Artificial Sequence
  Description of Artificial Sequence: Synthetic oligonucleotide
gcaccguagcucccuguuu

SEQ ID NO: 2641706 - RNA, 19 nt, Artificial Sequence
  Description of Artificial Sequence: Synthetic oligonucleotide
ccccgaguuuacacaccau

SEQ ID NO: 2641707 - RNA, 19 nt, Artificial Sequence
  Description of Artificial Sequence: Synthetic oligonucleotide
  modified_base (1)..(1): a, c, u, g, unknown or other
ngaagggcuguucugcaga

SEQ ID NO: 2641708 - RNA, 19 nt, Artificial Sequence
  Description of Artificial Sequence: Synthetic oligonucleotide
uguaaaaguacaaagacca

SEQ ID NO: 2641709 - RNA, 19 nt, Artificial Sequence
  Description of Artificial Sequence: Synthetic oligonucleotide
augaucauucaauagaucc

SEQ ID NO: 2641710 - RNA, 19 nt, Artificial Sequence
  Description of Artificial Sequence: Synthetic oligonucleotide
uuaucaacuguuauuacgg

SEQ ID NO: 2641711 - RNA, 19 nt, Artificial Sequence
  Description of Artificial Sequence: Synthetic oligonucleotide
ugagcaaccucuuugaugg

SEQ ID NO: 2641712 - RNA, 19 nt, Artificial Sequence
  Description of Artificial Sequence: Synthetic oligonucleotide
ucuaaaguauauuaggcag

SEQ ID NO: 2641713 - RNA, 19 nt, Artificial Sequence
  Description of Artificial Sequence: Synthetic oligonucleotide
uaaucuucucucaauaugg

SEQ ID NO: 2641714 - RNA, 19 nt, Artificial Sequence
  Description of Artificial Sequence: Synthetic oligonucleotide
aaacaguaggaauaaacuc

SEQ ID NO: 2641715 - RNA, 19 nt, Artificial Sequence
  Description of Artificial Sequence: Synthetic oligonucleotide
uaaauuuuaagcccaacug

SEQ ID NO: 2641716 - RNA, 19 nt, Artificial Sequence
  Description of Artificial Sequence: Synthetic oligonucleotide
aauuugauauucuaguggu

SEQ ID NO: 2641717 - RNA, 19 nt, Artificial Sequence
  Description of Artificial Sequence: Synthetic oligonucleotide
ucuuuugauacuuaugucc

SEQ ID NO: 2641718 - RNA, 19 nt, Artificial Sequence
  Description of Artificial Sequence: Synthetic oligonucleotide
gaauuugauauucuagugg

SEQ ID NO: 2641719 - RNA, 19 nt, Artificial Sequence
  Description of Artificial Sequence: Synthetic oligonucleotide
uucaauagauccaugaugu

SEQ ID NO: 2641720 - RNA, 19 nt, Artificial Sequence
  Description of Artificial Sequence: Synthetic oligonucleotide
uguuauuacggcuuaaagc

SEQ ID NO: 2641721 - RNA, 19 nt, Artificial Sequence
  Description of Artificial Sequence: Synthetic oligonucleotide
aaauuuuaagcccaacuga

SEQ ID NO: 2641722 - RNA, 19 nt, Artificial Sequence
  Description of Artificial Sequence: Synthetic oligonucleotide
aaagcauccuaacuacagc

SEQ ID NO: 2641723 - RNA, 19 nt, Artificial Sequence
  Description of Artificial Sequence: Synthetic oligonucleotide
aauuuuaagcccaacugac

SEQ ID NO: 2641724 - RNA, 19 nt, Artificial Sequence
  Description of Artificial Sequence: Synthetic oligonucleotide
auugacagaauucuaaaug

SEQ ID NO: 2641725 - RNA, 19 nt, Artificial Sequence
  Description of Artificial Sequence: Synthetic oligonucleotide
  modified_base (11)..(11): a, c, u, g, unknown or other
aauuccccuanauuuuccc

SEQ ID NO: 2641726 - RNA, 19 nt, Artificial Sequence
  Description of Artificial Sequence: Synthetic oligonucleotide
auaaccaaauuucacaucu

SEQ ID NO: 2641727 - RNA, 19 nt, Artificial Sequence
  Description of Artificial Sequence: Synthetic oligonucleotide
aauacuggcauuaucaacu

SEQ ID NO: 2641728 - RNA, 19 nt, Artificial Sequence
  Description of Artificial Sequence: Synthetic oligonucleotide
ugauguaaaaguacaaaga

SEQ ID NO: 2641729 - RNA, 19 nt, Artificial Sequence
  Description of Artificial Sequence: Synthetic oligonucleotide
  modified_base (3)..(3): a, c, u, g, unknown or other
uanauuuuccccaaucagu

SEQ ID NO: 2641730 - RNA, 19 nt, Artificial Sequence
  Description of Artificial Sequence: Synthetic oligonucleotide
aauaaacucugauaaauuu

SEQ ID NO: 2641731 - RNA, 19 nt, Artificial Sequence
  Description of Artificial Sequence: Synthetic oligonucleotide
agauccaugauguaaaagu

SEQ ID NO: 2641732 - RNA, 19 nt, Artificial Sequence
  Description of Artificial Sequence: Synthetic oligonucleotide
uggacuauuauaauaauuu

SEQ ID NO: 2641733 - RNA, 19 nt, Artificial Sequence
  Description of Artificial Sequence: Synthetic oligonucleotide
uauuacggcuuaaagcugg

SEQ ID NO: 2641734 - RNA, 19 nt, Artificial Sequence
  Description of Artificial Sequence: Synthetic oligonucleotide
ucuucucucaauauggcug

SEQ ID NO: 2641735 - RNA, 19 nt, Artificial Sequence
  Description of Artificial Sequence: Synthetic oligonucleotide
cuuccuauuccuuuuaccc

SEQ ID NO: 2641736 - RNA, 19 nt, Artificial Sequence
  Description of Artificial Sequence: Synthetic oligonucleotide
cuucuaaaguauauuaggc

SEQ ID NO: 2641737 - RNA, 19 nt, Artificial Sequence
  Description of Artificial Sequence: Synthetic oligonucleotide
uagauaaccaaauuucaca

SEQ ID NO: 2641738 - RNA, 19 nt, Artificial Sequence
  Description of Artificial Sequence: Synthetic oligonucleotide
aaaacaguaggaauaaacu

SEQ ID NO: 2641739 - RNA, 19 nt, Artificial Sequence
  Description of Artificial Sequence: Synthetic oligonucleotide
aguuuucauacauucaaag

SEQ ID NO: 2641740 - RNA, 19 nt, Artificial Sequence
  Description of Artificial Sequence: Synthetic oligonucleotide
caaggagaguucaagaucc

SEQ ID NO: 2641741 - RNA, 19 nt, Artificial Sequence
  Description of Artificial Sequence: Synthetic oligonucleotide
ucagcauugagcaaccucu

SEQ ID NO: 2641742 - RNA, 19 nt, Artificial Sequence
  Description of Artificial Sequence: Synthetic oligonucleotide
aaguauauuaggcagcuua

SEQ ID NO: 2641743 - RNA, 19 nt, Artificial Sequence
  Description of Artificial Sequence: Synthetic oligonucleotide
auuccuuuuacccagaaua

SEQ ID NO: 2641744 - RNA, 19 nt, Artificial Sequence
  Description of Artificial Sequence: Synthetic oligonucleotide
cuaacuacagcacaguuuc

SEQ ID NO: 2641745 - RNA, 19 nt, Artificial Sequence
  Description of Artificial Sequence: Synthetic oligonucleotide
aguauagauaaccaaauuu

SEQ ID NO: 2641746 - RNA, 19 nt, Artificial Sequence
  Description of Artificial Sequence: Synthetic oligonucleotide
caaaacaguaggaauaaac

SEQ ID NO: 2641747 - RNA, 19 nt, Artificial Sequence
  Description of Artificial Sequence: Synthetic oligonucleotide
aauaucuucuucuuuugau

SEQ ID NO: 2641748 - RNA, 19 nt, Artificial Sequence
  Description of Artificial Sequence: Synthetic oligonucleotide
uggugcuaaauuuuaagcc

SEQ ID NO: 2641749 - RNA, 19 nt, Artificial Sequence
  Description of Artificial Sequence: Synthetic oligonucleotide
ucaaacaaugucagcauug

SEQ ID NO: 2641750 - RNA, 19 nt, Artificial Sequence
  Description of Artificial Sequence: Synthetic oligonucleotide
guuauuacggcuuaaagcu

SEQ ID NO: 2641751 - RNA, 19 nt, Artificial Sequence
  Description of Artificial Sequence: Synthetic oligonucleotide
uggaauuugauauucuagu

SEQ ID NO: 2641752 - RNA, 19 nt, Artificial Sequence
  Description of Artificial Sequence: Synthetic oligonucleotide
aaugucaacuggaauuccc

SEQ ID NO: 2641753 - RNA, 19 nt, Artificial Sequence
  Description of Artificial Sequence: Synthetic oligonucleotide
aacaguaggaauaaacucu

SEQ ID NO: 2641754 - RNA, 19 nt, Artificial Sequence
  Description of Artificial Sequence: Synthetic oligonucleotide
  modified_base (10)..(10): a, c, u, g, unknown or other
auuccccuanauuuucccc

SEQ ID NO: 2641755 - RNA, 19 nt, Artificial Sequence
  Description of Artificial Sequence: Synthetic oligonucleotide
uugacagaauucuaaaugu

SEQ ID NO: 2641756 - RNA, 19 nt, Artificial Sequence
  Description of Artificial Sequence: Synthetic oligonucleotide
uucuaaaguauauuaggca

SEQ ID NO: 2641757 - RNA, 19 nt, Artificial Sequence
  Description of Artificial Sequence: Synthetic oligonucleotide
cuuugauggaacaugauca

SEQ ID NO: 2641758 - RNA, 19 nt, Artificial Sequence
  Description of Artificial Sequence: Synthetic oligonucleotide
agaauucuaaaugugguag

SEQ ID NO: 2641759 - RNA, 19 nt, Artificial Sequence
  Description of Artificial Sequence: Synthetic oligonucleotide
gacagaauucuaaaugugg

SEQ ID NO: 2641760 - RNA, 19 nt, Artificial Sequence
  Description of Artificial Sequence: Synthetic oligonucleotide
  modified_base (4)..(4): a, c, u, g, unknown or other
cuanauuuuccccaaucag

SEQ ID NO: 2641761 - RNA, 19 nt, Artificial Sequence
  Description of Artificial Sequence: Synthetic oligonucleotide
uuuaugaugagguuuguuu

SEQ ID NO: 2641762 - RNA, 19 nt, Artificial Sequence
  Description of Artificial Sequence: Synthetic oligonucleotide
ucuucuuuacauuguuugg

SEQ ID NO: 2641763 - RNA, 19 nt, Artificial Sequence
  Description of Artificial Sequence: Synthetic oligonucleotide
ucuuggaaguuuauagucc

SEQ ID NO: 2641764 - RNA, 19 nt, Artificial Sequence
  Description of Artificial Sequence: Synthetic oligonucleotide
auguaaaaguacaaagacc

SEQ ID NO: 2641765 - RNA, 19 nt, Artificial Sequence
  Description of Artificial Sequence: Synthetic oligonucleotide
gaauucuaaaugugguagg

SEQ ID NO: 2641766 - RNA, 19 nt, Artificial Sequence
  Description of Artificial Sequence: Synthetic oligonucleotide
ucauucaauagauccauga

SEQ ID NO: 2641767 - RNA, 19 nt, Artificial Sequence
  Description of Artificial Sequence: Synthetic oligonucleotide
uuaagcccaacugacauag

SEQ ID NO: 2641768 - RNA, 19 nt, Artificial Sequence
  Description of Artificial Sequence: Synthetic oligonucleotide
uauucuagugguaucuucu

SEQ ID NO: 2641769 - RNA, 19 nt, Artificial Sequence
  Description of Artificial Sequence: Synthetic oligonucleotide
ucuuugauggaacaugauc

SEQ ID NO: 2641770 - RNA, 19 nt, Artificial Sequence
  Description of Artificial Sequence: Synthetic oligonucleotide
uuuuaagcccaacugacau

SEQ ID NO: 2641771 - RNA, 19 nt, Artificial Sequence
  Description of Artificial Sequence: Synthetic oligonucleotide
aaaagcauccuaacuacag

SEQ ID NO: 2641772 - RNA, 19 nt, Artificial Sequence
  Description of Artificial Sequence: Synthetic oligonucleotide
aagcauccuaacuacagca

SEQ ID NO: 2641773 - RNA, 19 nt, Artificial Sequence
  Description of Artificial Sequence: Synthetic oligonucleotide
cuaaaguauauuaggcagc

SEQ ID NO: 2641774 - RNA, 19 nt, Artificial Sequence
  Description of Artificial Sequence: Synthetic oligonucleotide
aagggugccaccaugcugg

SEQ ID NO: 2641775 - RNA, 19 nt, Artificial Sequence
  Description of Artificial Sequence: Synthetic oligonucleotide
uuaagaaagagggucuucc

SEQ ID NO: 2641776 - RNA, 19 nt, Artificial Sequence
  Description of Artificial Sequence: Synthetic oligonucleotide
ugaucauucaauagaucca

SEQ ID NO: 2641777 - RNA, 19 nt, Artificial Sequence
  Description of Artificial Sequence: Synthetic oligonucleotide
cauucaaagacuucaaaca

SEQ ID NO: 2641778 - RNA, 19 nt, Artificial Sequence
  Description of Artificial Sequence: Synthetic oligonucleotide
uuaaagggugccaccaugc

SEQ ID NO: 2641779 - RNA, 19 nt, Artificial Sequence
  Description of Artificial Sequence: Synthetic oligonucleotide
uaucuucuucuuuugauac

SEQ ID NO: 2641780 - RNA, 19 nt, Artificial Sequence
  Description of Artificial Sequence: Synthetic oligonucleotide
uuuacccagaauaaucuuc

SEQ ID NO: 2641781 - RNA, 19 nt, Artificial Sequence
  Description of Artificial Sequence: Synthetic oligonucleotide
guauagauaaccaaauuuc

SEQ ID NO: 2641782 - RNA, 19 nt, Artificial Sequence
  Description of Artificial Sequence: Synthetic oligonucleotide
caacugacaguuuucauac

SEQ ID NO: 2641783 - RNA, 19 nt, Artificial Sequence
  Description of Artificial Sequence: Synthetic oligonucleotide
aaucaguauagauaaccaa

SEQ ID NO: 2641784 - RNA, 19 nt, Artificial Sequence
  Description of Artificial Sequence: Synthetic oligonucleotide
gaacaugaucauucaauag

SEQ ID NO: 2641785 - RNA, 19 nt, Artificial Sequence
  Description of Artificial Sequence: Synthetic oligonucleotide
auagauaaccaaauuucac

SEQ ID NO: 2641786 - RNA, 19 nt, Artificial Sequence
  Description of Artificial Sequence: Synthetic oligonucleotide
acaguuuucauacauucaa

SEQ ID NO: 2641787 - RNA, 19 nt, Artificial Sequence
  Description of Artificial Sequence: Synthetic oligonucleotide
ucaguauagauaaccaaau

SEQ ID NO: 2641788 - RNA, 19 nt, Artificial Sequence
  Description of Artificial Sequence: Synthetic oligonucleotide
aguacaaagaccaaguuuu

SEQ ID NO: 2641789 - RNA, 19 nt, Artificial Sequence
  Description of Artificial Sequence: Synthetic oligonucleotide
aaucuucucucaauauggc

SEQ ID NO: 2641790 - RNA, 19 nt, Artificial Sequence
  Description of Artificial Sequence: Synthetic oligonucleotide
uuacccagaauaaucuucu

SEQ ID NO: 2641791 - RNA, 19 nt, Artificial Sequence
  Description of Artificial Sequence: Synthetic oligonucleotide
uccuauuccuuuuacccag

SEQ ID NO: 2641792 - RNA, 19 nt, Artificial Sequence
  Description of Artificial Sequence: Synthetic oligonucleotide
cuggugcuaaauuuuaagc

SEQ ID NO: 2641793 - RNA, 19 nt, Artificial Sequence
  Description of Artificial Sequence: Synthetic oligonucleotide
uucuuggaaguuuauaguc

SEQ ID NO: 2641794 - RNA, 19 nt, Artificial Sequence
  Description of Artificial Sequence: Synthetic oligonucleotide
cuggaauuugauauucuag

SEQ ID NO: 2641795 - RNA, 19 nt, Artificial Sequence
  Description of Artificial Sequence: Synthetic oligonucleotide
uuugauauucuagugguau

SEQ ID NO: 2641796 - RNA, 19 nt, Artificial Sequence
  Description of Artificial Sequence: Synthetic oligonucleotide
auauucuagugguaucuuc

SEQ ID NO: 2641797 - RNA, 19 nt, Artificial Sequence
  Description of Artificial Sequence: Synthetic oligonucleotide
aaugugguaggcauucauc

SEQ ID NO: 2641798 - RNA, 19 nt, Artificial Sequence
  Description of Artificial Sequence: Synthetic oligonucleotide
uuuauaauaucuucuucuu

SEQ ID NO: 2641799 - RNA, 19 nt, Artificial Sequence
  Description of Artificial Sequence: Synthetic oligonucleotide
ugcuuuaagaaagaggguc

SEQ ID NO: 2641800 - RNA, 19 nt, Artificial Sequence
  Description of Artificial Sequence: Synthetic oligonucleotide
ucaacuguuauuacggcuu

SEQ ID NO: 2641801 - RNA, 19 nt, Artificial Sequence
  Description of Artificial Sequence: Synthetic oligonucleotide
ggugcuaaauuuuaagccc

SEQ ID NO: 2641802 - RNA, 19 nt, Artificial Sequence
  Description of Artificial Sequence: Synthetic oligonucleotide
ugacagaauucuaaaugug

SEQ ID NO: 2641803 - RNA, 19 nt, Artificial Sequence
  Description of Artificial Sequence: Synthetic oligonucleotide
uggaauuuuauaauaucuu

SEQ ID NO: 2641804 - RNA, 19 nt, Artificial Sequence
  Description of Artificial Sequence: Synthetic oligonucleotide
uucuaaaugugguaggcau

SEQ ID NO: 2641805 - RNA, 19 nt, Artificial Sequence
  Description of Artificial Sequence: Synthetic oligonucleotide
aagcccaacugacauagcu

SEQ ID NO: 2641806 - RNA, 19 nt, Artificial Sequence
  Description of Artificial Sequence: Synthetic oligonucleotide
cuucucucaauauggcugg

SEQ ID NO: 2641807 - RNA, 19 nt, Artificial Sequence
  Description of Artificial Sequence: Synthetic oligonucleotide
uguuuggacuauuauaaua

SEQ ID NO: 2641808 - RNA, 19 nt, Artificial Sequence
  Description of Artificial Sequence: Synthetic oligonucleotide
aaacaaugucagcauugag

SEQ ID NO: 2641809 - RNA, 19 nt, Artificial Sequence
  Description of Artificial Sequence: Synthetic oligonucleotide
agaguucaagaucccuucc

SEQ ID NO: 2641810 - RNA, 19 nt, Artificial Sequence
  Description of Artificial Sequence: Synthetic oligonucleotide
uaaaguauauuaggcagcu

SEQ ID NO: 2641811 - RNA, 19 nt, Artificial Sequence
  Description of Artificial Sequence: Synthetic oligonucleotide
aagcuggaauuugauauuc

SEQ ID NO: 2641812 - RNA, 19 nt, Artificial Sequence
  Description of Artificial Sequence: Synthetic oligonucleotide
ugauauucuagugguaucu

SEQ ID NO: 2641813 - RNA, 19 nt, Artificial Sequence
  Description of Artificial Sequence: Synthetic oligonucleotide
  modified_base (2)..(2): a, c, u, g, unknown or other
anauuuuccccaaucagua

SEQ ID NO: 2641814 - RNA, 19 nt, Artificial Sequence
  Description of Artificial Sequence: Synthetic oligonucleotide
auuaggcagcuuauggucc

SEQ ID NO: 2641815 - RNA, 19 nt, Artificial Sequence
  Description of Artificial Sequence: Synthetic oligonucleotide
uugagcaaccucuuugaug

SEQ ID NO: 2641816 - RNA, 19 nt, Artificial Sequence
  Description of Artificial Sequence: Synthetic oligonucleotide
cucucaauauggcuggugc

SEQ ID NO: 2641817 - RNA, 19 nt, Artificial Sequence
  Description of Artificial Sequence: Synthetic oligonucleotide
aagaucccuuccuuaaugu

SEQ ID NO: 2641818 - RNA, 19 nt, Artificial Sequence
  Description of Artificial Sequence: Synthetic oligonucleotide
aaagggugccaccaugcug

SEQ ID NO: 2641819 - RNA, 19 nt, Artificial Sequence
  Description of Artificial Sequence: Synthetic oligonucleotide
agcuuaugguccuucuugg

SEQ ID NO: 2641820 - RNA, 19 nt, Artificial Sequence
  Description of Artificial Sequence: Synthetic oligonucleotide
ucuuccuauuccuuuuacc

SEQ ID NO: 2641821 - RNA, 19 nt, Artificial Sequence
  Description of Artificial Sequence: Synthetic oligonucleotide
uuaugaugagguuuguuuu

SEQ ID NO: 2641822 - RNA, 19 nt, Artificial Sequence
  Description of Artificial Sequence: Synthetic oligonucleotide
  modified_base (14)..(14): a, c, u, g, unknown or other
uggaauuccccuanauuuu

SEQ ID NO: 2641823 - RNA, 19 nt, Artificial Sequence
  Description of Artificial Sequence: Synthetic oligonucleotide
uucaaagacuucaaacaau

SEQ ID NO: 2641824 - RNA, 19 nt, Artificial Sequence
  Description of Artificial Sequence: Synthetic oligonucleotide
guaggcauucaucaaaaca

SEQ ID NO: 2641825 - RNA, 19 nt, Artificial Sequence
  Description of Artificial Sequence: Synthetic oligonucleotide
ucuagugguaucuucuuua

SEQ ID NO: 2641826 - RNA, 19 nt, Artificial Sequence
  Description of Artificial Sequence: Synthetic oligonucleotide
uuuauaguccucccagauc

SEQ ID NO: 2641827 - RNA, 19 nt, Artificial Sequence
  Description of Artificial Sequence: Synthetic oligonucleotide
aguaggaauaaacucugau

SEQ ID NO: 2641828 - RNA, 19 nt, Artificial Sequence
  Description of Artificial Sequence: Synthetic oligonucleotide
uuauuacggcuuaaagcug

SEQ ID NO: 2641829 - RNA, 19 nt, Artificial Sequence
  Description of Artificial Sequence: Synthetic oligonucleotide
uccccaaucaguauagaua

SEQ ID NO: 2641830 - RNA, 19 nt, Artificial Sequence
  Description of Artificial Sequence: Synthetic oligonucleotide
uauugacagaauucuaaau

SEQ ID NO: 2641831 - RNA, 19 nt, Artificial Sequence
  Description of Artificial Sequence: Synthetic oligonucleotide
aaaugugguaggcauucau

SEQ ID NO: 2641832 - RNA, 19 nt, Artificial Sequence
  Description of Artificial Sequence: Synthetic oligonucleotide
agaauaaucuucucucaau

SEQ ID NO: 2641833 - RNA, 19 nt, Artificial Sequence
  Description of Artificial Sequence: Synthetic oligonucleotide
acauuuaugaugagguuug

SEQ ID NO: 2641834 - RNA, 19 nt, Artificial Sequence
  Description of Artificial Sequence: Synthetic oligonucleotide
cauccuaacuacagcacag

SEQ ID NO: 2641835 - RNA, 19 nt, Artificial Sequence
  Description of Artificial Sequence: Synthetic oligonucleotide
  modified_base (9)..(9): a, c, u, g, unknown or other
uuccccuanauuuucccca

SEQ ID NO: 2641836 - RNA, 19 nt, Artificial Sequence
  Description of Artificial Sequence: Synthetic oligonucleotide
uuggacuauuauaauaauu

SEQ ID NO: 2641837 - RNA, 19 nt, Artificial Sequence
  Description of Artificial Sequence: Synthetic oligonucleotide
uucaagaucccuuccuuaa

SEQ ID NO: 2641838 - RNA, 19 nt, Artificial Sequence
  Description of Artificial Sequence: Synthetic oligonucleotide
aaagcuggaauuugauauu

SEQ ID NO: 2641839 - RNA, 19 nt, Artificial Sequence
  Description of Artificial Sequence: Synthetic oligonucleotide
acugacaguuuucauacau

SEQ ID NO: 2641840 - RNA, 19 nt, Artificial Sequence
  Description of Artificial Sequence: Synthetic oligonucleotide
ccuucuuggaaguuuauag

SEQ ID NO: 2641841 - RNA, 19 nt, Artificial Sequence
  Description of Artificial Sequence: Synthetic oligonucleotide
  modified_base (16)..(16): a, c, u, g, unknown or other
acuggaauuccccuanauu

SEQ ID NO: 2641842 - RNA, 19 nt, Artificial Sequence
  Description of Artificial Sequence: Synthetic oligonucleotide
ucccagaucaggcuggggu

SEQ ID NO: 2641843 - RNA, 19 nt, Artificial Sequence
  Description of Artificial Sequence: Synthetic oligonucleotide
cuguuauuacggcuuaaag

SEQ ID NO: 2641844 - RNA, 19 nt, Artificial Sequence
  Description of Artificial Sequence: Synthetic oligonucleotide
uaucaacuguuauuacggc

SEQ ID NO: 2641845 - RNA, 19 nt, Artificial Sequence
  Description of Artificial Sequence: Synthetic oligonucleotide
uacggcuuaaagcuggaau

SEQ ID NO: 2641846 - RNA, 19 nt, Artificial Sequence
  Description of Artificial Sequence: Synthetic oligonucleotide
ggaauuugauauucuagug

SEQ ID NO: 2641847 - RNA, 19 nt, Artificial Sequence
  Description of Artificial Sequence: Synthetic oligonucleotide
uuccuuuuacccagaauaa

SEQ ID NO: 2641848 - RNA, 19 nt, Artificial Sequence
  Description of Artificial Sequence: Synthetic oligonucleotide
augucaacuggaauucccc

SEQ ID NO: 2641849 - RNA, 19 nt, Artificial Sequence
  Description of Artificial Sequence: Synthetic oligonucleotide
uuccuauuccuuuuaccca

SEQ ID NO: 2641850 - RNA, 19 nt, Artificial Sequence
  Description of Artificial Sequence: Synthetic oligonucleotide
aagaaagagggucuuccua

SEQ ID NO: 2641851 - RNA, 19 nt, Artificial Sequence
  Description of Artificial Sequence: Synthetic oligonucleotide
uguuuuccaacugacaguu

SEQ ID NO: 2641852 - RNA, 19 nt, Artificial Sequence
  Description of Artificial Sequence: Synthetic oligonucleotide
ucuuuacauuguuuggacu

SEQ ID NO: 2641853 - RNA, 19 nt, Artificial Sequence
  Description of Artificial Sequence: Synthetic oligonucleotide
cuuaaugucaacuggaauu

SEQ ID NO: 2641854 - RNA, 19 nt, Artificial Sequence
  Description of Artificial Sequence: Synthetic oligonucleotide
uuugauggaacaugaucau

SEQ ID NO: 2641855 - RNA, 19 nt, Artificial Sequence
  Description of Artificial Sequence: Synthetic oligonucleotide
uauggcuggugcuaaauuu

SEQ ID NO: 2641856 - RNA, 19 nt, Artificial Sequence
  Description of Artificial Sequence: Synthetic oligonucleotide
cuaaaugugguaggcauuc

SEQ ID NO: 2641857 - RNA, 19 nt, Artificial Sequence
  Description of Artificial Sequence: Synthetic oligonucleotide
caucaaaacaguaggaaua

SEQ ID NO: 2641858 - RNA, 19 nt, Artificial Sequence
  Description of Artificial Sequence: Synthetic oligonucleotide
agaucccuuccuuaauguc

SEQ ID NO: 2641859 - RNA, 19 nt, Artificial Sequence
  Description of Artificial Sequence: Synthetic oligonucleotide
cuuuacauuguuuggacua

SEQ ID NO: 2641860 - RNA, 19 nt, Artificial Sequence
  Description of Artificial Sequence: Synthetic oligonucleotide
uaguccucccagaucaggc

SEQ ID NO: 2641861 - RNA, 19 nt, Artificial Sequence
  Description of Artificial Sequence: Synthetic oligonucleotide
gagaguucaagaucccuuc

SEQ ID NO: 2641862 - RNA, 19 nt, Artificial Sequence
  Description of Artificial Sequence: Synthetic oligonucleotide
caaucaguauagauaacca

SEQ ID NO: 2641863 - RNA, 19 nt, Artificial Sequence
  Description of Artificial Sequence: Synthetic oligonucleotide
acagaauucuaaauguggu

SEQ ID NO: 2641864 - RNA, 19 nt, Artificial Sequence
  Description of Artificial Sequence: Synthetic oligonucleotide
guaggaauaaacucugaua

SEQ ID NO: 2641865 - RNA, 19 nt, Artificial Sequence
  Description of Artificial Sequence: Synthetic oligonucleotide
uccuuaaugucaacuggaa

SEQ ID NO: 2641866 - RNA, 19 nt, Artificial Sequence
  Description of Artificial Sequence: Synthetic oligonucleotide
uuuggacuauuauaauaau

SEQ ID NO: 2641867 - RNA, 19 nt, Artificial Sequence
  Description of Artificial Sequence: Synthetic oligonucleotide
uaagaaagagggucuuccu

SEQ ID NO: 2641868 - RNA, 19 nt, Artificial Sequence
  Description of Artificial Sequence: Synthetic oligonucleotide
uuuugauacuuauguccac

SEQ ID NO: 2641869 - RNA, 19 nt, Artificial Sequence
  Description of Artificial Sequence: Synthetic oligonucleotide
cuagugguaucuucuuuac

SEQ ID NO: 2641870 - RNA, 19 nt, Artificial Sequence
  Description of Artificial Sequence: Synthetic oligonucleotide
cagcuuaugguccuucuug

SEQ ID NO: 2641871 - RNA, 19 nt, Artificial Sequence
  Description of Artificial Sequence: Synthetic oligonucleotide
cauuguuuggacuauuaua

SEQ ID NO: 2641872 - RNA, 19 nt, Artificial Sequence
  Description of Artificial Sequence: Synthetic oligonucleotide
acuuauguccacauuuaug

SEQ ID NO: 2641873 - RNA, 19 nt, Artificial Sequence
  Description of Artificial Sequence: Synthetic oligonucleotide
ugguaggcauucaucaaaa

SEQ ID NO: 2641874 - RNA, 19 nt, Artificial Sequence
  Description of Artificial Sequence: Synthetic oligonucleotide
uacauuguuuggacuauua

SEQ ID NO: 2641875 - RNA, 19 nt, Artificial Sequence
  Description of Artificial Sequence: Synthetic oligonucleotide
ccaaucaguauagauaacc

SEQ ID NO: 2641876 - RNA, 19 nt, Artificial Sequence
  Description of Artificial Sequence: Synthetic oligonucleotide
acggcuuaaagcuggaauu

SEQ ID NO: 2641877 - RNA, 19 nt, Artificial Sequence
  Description of Artificial Sequence: Synthetic oligonucleotide
uucaaacaaugucagcauu

SEQ ID NO: 2641878 - RNA, 19 nt, Artificial Sequence
  Description of Artificial Sequence: Synthetic oligonucleotide
uugauauucuagugguauc

SEQ ID NO: 2641879 - RNA, 19 nt, Artificial Sequence
  Description of Artificial Sequence: Synthetic oligonucleotide
aguuuauaguccucccaga

SEQ ID NO: 2641880 - RNA, 19 nt, Artificial Sequence
  Description of Artificial Sequence: Synthetic oligonucleotide
uccucccagaucaggcugg

SEQ ID NO: 2641881 - RNA, 19 nt, Artificial Sequence
  Description of Artificial Sequence: Synthetic oligonucleotide
ucucaauauggcuggugcu

SEQ ID NO: 2641882 - RNA, 19 nt, Artificial Sequence
  Description of Artificial Sequence: Synthetic oligonucleotide
ugucaacuggaauuccccu

SEQ ID NO: 2641883 - RNA, 19 nt, Artificial Sequence
  Description of Artificial Sequence: Synthetic oligonucleotide
aaggagaguucaagauccc

SEQ ID NO: 2641884 - RNA, 19 nt, Artificial Sequence
  Description of Artificial Sequence: Synthetic oligonucleotide
uugauacuuauguccacau

SEQ ID NO: 2641885 - RNA, 19 nt, Artificial Sequence
  Description of Artificial Sequence: Synthetic oligonucleotide
ucuaaaugugguaggcauu

SEQ ID NO: 2641886 - RNA, 19 nt, Artificial Sequence
  Description of Artificial Sequence: Synthetic oligonucleotide
aauauggcuggugcuaaau

SEQ ID NO: 2641887 - RNA, 19 nt, Artificial Sequence
  Description of Artificial Sequence: Synthetic oligonucleotide
acauuguuuggacuauuau

SEQ ID NO: 2641888 - RNA, 19 nt, Artificial Sequence
  Description of Artificial Sequence: Synthetic oligonucleotide
auacuggcauuaucaacug

SEQ ID NO: 2641889 - RNA, 19 nt, Artificial Sequence
  Description of Artificial Sequence: Synthetic oligonucleotide
acaugaucauucaauagau

SEQ ID NO: 2641890 - RNA, 19 nt, Artificial Sequence
  Description of Artificial Sequence: Synthetic oligonucleotide
gcuggugcuaaauuuuaag

SEQ ID NO: 2641891 - RNA, 19 nt, Artificial Sequence
  Description of Artificial Sequence: Synthetic oligonucleotide
aaacucugauaaauuugug

SEQ ID NO: 2641892 - RNA, 19 nt, Artificial Sequence
  Description of Artificial Sequence: Synthetic oligonucleotide
uaaagggugccaccaugcu

SEQ ID NO: 2641893 - RNA, 19 nt, Artificial Sequence
  Description of Artificial Sequence: Synthetic oligonucleotide
uuuacauuguuuggacuau

SEQ ID NO: 2641894 - RNA, 19 nt, Artificial Sequence
  Description of Artificial Sequence: Synthetic oligonucleotide
cauugagcaaccucuuuga

SEQ ID NO: 2641895 - RNA, 19 nt, Artificial Sequence
  Description of Artificial Sequence: Synthetic oligonucleotide
uggcauuaucaacuguuau

SEQ ID NO: 2641896 - RNA, 19 nt, Artificial Sequence
  Description of Artificial Sequence: Synthetic oligonucleotide
caugaucauucaauagauc

SEQ ID NO: 2641897 - RNA, 19 nt, Artificial Sequence
  Description of Artificial Sequence: Synthetic oligonucleotide
agcauccuaacuacagcac

SEQ ID NO: 2641898 - RNA, 19 nt, Artificial Sequence
  Description of Artificial Sequence: Synthetic oligonucleotide
  modified_base (12)..(12): a, c, u, g, unknown or other
gaauuccccuanauuuucc

SEQ ID NO: 2641899 - RNA, 19 nt, Artificial Sequence
  Description of Artificial Sequence: Synthetic oligonucleotide
uuccccaaucaguauagau

SEQ ID NO: 2641900 - RNA, 19 nt, Artificial Sequence
  Description of Artificial Sequence: Synthetic oligonucleotide
aggaauaaacucugauaaa

SEQ ID NO: 2641901 - RNA, 19 nt, Artificial Sequence
  Description of Artificial Sequence: Synthetic oligonucleotide
gcauugagcaaccucuuug

SEQ ID NO: 2641902 - RNA, 19 nt, Artificial Sequence
  Description of Artificial Sequence: Synthetic oligonucleotide
uuuaagaaagagggucuuc

SEQ ID NO: 2641903 - RNA, 19 nt, Artificial Sequence
  Description of Artificial Sequence: Synthetic oligonucleotide
uuauguccacauuuaugau

SEQ ID NO: 2641904 - RNA, 19 nt, Artificial Sequence
  Description of Artificial Sequence: Synthetic oligonucleotide
ucaagaucccuuccuuaau

SEQ ID NO: 2641905 - RNA, 19 nt, Artificial Sequence
  Description of Artificial Sequence: Synthetic oligonucleotide
ugugguaggcauucaucaa

SEQ ID NO: 2641906 - RNA, 19 nt, Artificial Sequence
  Description of Artificial Sequence: Synthetic oligonucleotide
uuuaagcccaacugacaua

SEQ ID NO: 2641907 - RNA, 19 nt, Artificial Sequence
  Description of Artificial Sequence: Synthetic oligonucleotide
ugcuaaauuuuaagcccaa

SEQ ID NO: 2641908 - RNA, 19 nt, Artificial Sequence
  Description of Artificial Sequence: Synthetic oligonucleotide
uaaugucaacuggaauucc

SEQ ID NO: 2641909 - RNA, 19 nt, Artificial Sequence
  Description of Artificial Sequence: Synthetic oligonucleotide
auucuaaaugugguaggca

SEQ ID NO: 2641910 - RNA, 19 nt, Artificial Sequence
  Description of Artificial Sequence: Synthetic oligonucleotide
uuguuuggacuauuauaau

SEQ ID NO: 2641911 - RNA, 19 nt, Artificial Sequence
  Description of Artificial Sequence: Synthetic oligonucleotide
caauagauccaugauguaa

SEQ ID NO: 2641912 - RNA, 19 nt, Artificial Sequence
  Description of Artificial Sequence: Synthetic oligonucleotide
augucagcauugagcaacc

SEQ ID NO: 2641913 - RNA, 19 nt, Artificial Sequence
  Description of Artificial Sequence: Synthetic oligonucleotide
ucaauauggcuggugcuaa

SEQ ID NO: 2641914 - RNA, 19 nt, Artificial Sequence
  Description of Artificial Sequence: Synthetic oligonucleotide
acuggcauuaucaacuguu

SEQ ID NO: 2641915 - RNA, 19 nt, Artificial Sequence
  Description of Artificial Sequence: Synthetic oligonucleotide
aacugacaguuuucauaca

SEQ ID NO: 2641916 - RNA, 19 nt, Artificial Sequence
  Description of Artificial Sequence: Synthetic oligonucleotide
uccuaacuacagcacaguu

SEQ ID NO: 2641917 - RNA, 19 nt, Artificial Sequence
  Description of Artificial Sequence: Synthetic oligonucleotide
caccaugcuggcuauugac

SEQ ID NO: 2641918 - RNA, 19 nt, Artificial Sequence
  Description of Artificial Sequence: Synthetic oligonucleotide
auagauccaugauguaaaa

SEQ ID NO: 2641919 - RNA, 19 nt, Artificial Sequence
  Description of Artificial Sequence: Synthetic oligonucleotide
cuuaugguccuucuuggaa

SEQ ID NO: 2641920 - RNA, 19 nt, Artificial Sequence
  Description of Artificial Sequence: Synthetic oligonucleotide
auuuuaagcccaacugaca

SEQ ID NO: 2641921 - RNA, 19 nt, Artificial Sequence
  Description of Artificial Sequence: Synthetic oligonucleotide
aguauauuaggcagcuuau

SEQ ID NO: 2641922 - RNA, 19 nt, Artificial Sequence
  Description of Artificial Sequence: Synthetic oligonucleotide
ugauacuuauguccacauu

SEQ ID NO: 2641923 - RNA, 19 nt, Artificial Sequence
  Description of Artificial Sequence: Synthetic oligonucleotide
  modified_base (15)..(15): a, c, u, g, unknown or other
cuggaauuccccuanauuu

SEQ ID NO: 2641924 - RNA, 19 nt, Artificial Sequence
  Description of Artificial Sequence: Synthetic oligonucleotide
gcccaacugacauagcugc

SEQ ID NO: 2641925 - RNA, 19 nt, Artificial Sequence
  Description of Artificial Sequence: Synthetic oligonucleotide
ggaacaugaucauucaaua

SEQ ID NO: 2641926 - RNA, 19 nt, Artificial Sequence
  Description of Artificial Sequence: Synthetic oligonucleotide
uuggaaguuuauaguccuc

SEQ ID NO: 2641927 - RNA, 19 nt, Artificial Sequence
  Description of Artificial Sequence: Synthetic oligonucleotide
ucucucaauauggcuggug

SEQ ID NO: 2641928 - RNA, 19 nt, Artificial Sequence
  Description of Artificial Sequence: Synthetic oligonucleotide
ucaauagauccaugaugua

SEQ ID NO: 2641929 - RNA, 19 nt, Artificial Sequence
  Description of Artificial Sequence: Synthetic oligonucleotide
gugguaggcauucaucaaa

SEQ ID NO: 2641930 - RNA, 19 nt, Artificial Sequence
  Description of Artificial Sequence: Synthetic oligonucleotide
uaaccaaauuucacaucuu

SEQ ID NO: 2641931 - RNA, 19 nt, Artificial Sequence
  Description of Artificial Sequence: Synthetic oligonucleotide
uccuuuuacccagaauaau

SEQ ID NO: 2641932 - RNA, 19 nt, Artificial Sequence
  Description of Artificial Sequence: Synthetic oligonucleotide
gcaaggagaguucaagauc

SEQ ID NO: 2641933 - RNA, 19 nt, Artificial Sequence
  Description of Artificial Sequence: Synthetic oligonucleotide
  modified_base (5)..(5): a, c, u, g, unknown or other
ccuanauuuuccccaauca

SEQ ID NO: 2641934 - RNA, 19 nt, Artificial Sequence
  Description of Artificial Sequence: Synthetic oligonucleotide
auauggcuggugcuaaauu

SEQ ID NO: 2641935 - RNA, 19 nt, Artificial Sequence
  Description of Artificial Sequence: Synthetic oligonucleotide
  modified_base (8)..(8): a, c, u, g, unknown or other
uccccuanauuuuccccaa

SEQ ID NO: 2641936 - RNA, 19 nt, Artificial Sequence
  Description of Artificial Sequence: Synthetic oligonucleotide
gugcuaaauuuuaagccca

SEQ ID NO: 2641937 - RNA, 19 nt, Artificial Sequence
  Description of Artificial Sequence: Synthetic oligonucleotide
uacuggcauuaucaacugu

SEQ ID NO: 2641938 - RNA, 19 nt, Artificial Sequence
  Description of Artificial Sequence: Synthetic oligonucleotide
cagaauucuaaauguggua

SEQ ID NO: 2641939 - RNA, 19 nt, Artificial Sequence
  Description of Artificial Sequence: Synthetic oligonucleotide
ggaauaaacucugauaaau

SEQ ID NO: 2641940 - RNA, 19 nt, Artificial Sequence
  Description of Artificial Sequence: Synthetic oligonucleotide
uccaacugacaguuuucau

SEQ ID NO: 2641941 - RNA, 19 nt, Artificial Sequence
  Description of Artificial Sequence: Synthetic oligonucleotide
uggcuggugcuaaauuuua

SEQ ID NO: 2641942 - RNA, 19 nt, Artificial Sequence
  Description of Artificial Sequence: Synthetic oligonucleotide
aaccucuuugauggaacau

SEQ ID NO: 2641943 - RNA, 19 nt, Artificial Sequence
  Description of Artificial Sequence: Synthetic oligonucleotide
gcuauugacagaauucuaa

SEQ ID NO: 2641944 - RNA, 19 nt, Artificial Sequence
  Description of Artificial Sequence: Synthetic oligonucleotide
gaauaaacucugauaaauu

SEQ ID NO: 2641945 - RNA, 19 nt, Artificial Sequence
  Description of Artificial Sequence: Synthetic oligonucleotide
auuuaugaugagguuuguu

SEQ ID NO: 2641946 - RNA, 19 nt, Artificial Sequence
  Description of Artificial Sequence: Synthetic oligonucleotide
agcccaacugacauagcug

SEQ ID NO: 2641947 - RNA, 19 nt, Artificial Sequence
  Description of Artificial Sequence: Synthetic oligonucleotide
aggcauucaucaaaacagu

SEQ ID NO: 2641948 - RNA, 19 nt, Artificial Sequence
  Description of Artificial Sequence: Synthetic oligonucleotide
uccuucuuggaaguuuaua

SEQ ID NO: 2641949 - RNA, 19 nt, Artificial Sequence
  Description of Artificial Sequence: Synthetic oligonucleotide
uaagcccaacugacauagc

SEQ ID NO: 2641950 - RNA, 19 nt, Artificial Sequence
  Description of Artificial Sequence: Synthetic oligonucleotide
uugauggaacaugaucauu

SEQ ID NO: 2641951 - RNA, 19 nt, Artificial Sequence
  Description of Artificial Sequence: Synthetic oligonucleotide
ccccaaucaguauagauaa

SEQ ID NO: 2641952 - RNA, 19 nt, Artificial Sequence
  Description of Artificial Sequence: Synthetic oligonucleotide
caaccucuuugauggaaca

SEQ ID NO: 2641953 - RNA, 19 nt, Artificial Sequence
  Description of Artificial Sequence: Synthetic oligonucleotide
cauucaauagauccaugau

SEQ ID NO: 2641954 - RNA, 19 nt, Artificial Sequence
  Description of Artificial Sequence: Synthetic oligonucleotide
gucaacuggaauuccccua

SEQ ID NO: 2641955 - RNA, 19 nt, Artificial Sequence
  Description of Artificial Sequence: Synthetic oligonucleotide
gcauccuaacuacagcaca

SEQ ID NO: 2641956 - RNA, 19 nt, Artificial Sequence
  Description of Artificial Sequence: Synthetic oligonucleotide
auccuaacuacagcacagu

SEQ ID NO: 2641957 - RNA, 19 nt, Artificial Sequence
  Description of Artificial Sequence: Synthetic oligonucleotide
agcauugagcaaccucuuu

SEQ ID NO: 2641958 - RNA, 19 nt, Artificial Sequence
  Description of Artificial Sequence: Synthetic oligonucleotide
aacuguuauuacggcuuaa

SEQ ID NO: 2641959 - RNA, 19 nt, Artificial Sequence
  Description of Artificial Sequence: Synthetic oligonucleotide
  modified_base (13)..(13): a, c, u, g, unknown or other
ggaauuccccuanauuuuc

SEQ ID NO: 2641960 - RNA, 19 nt, Artificial Sequence
  Description of Artificial Sequence: Synthetic oligonucleotide
agggugccaccaugcuggc

SEQ ID NO: 2641961 - RNA, 19 nt, Artificial Sequence
  Description of Artificial Sequence: Synthetic oligonucleotide
cucaauauggcuggugcua

SEQ ID NO: 2641962 - RNA, 19 nt, Artificial Sequence
  Description of Artificial Sequence: Synthetic oligonucleotide
cuggcauuaucaacuguua

SEQ ID NO: 2641963 - RNA, 19 nt, Artificial Sequence
  Description of Artificial Sequence: Synthetic oligonucleotide
ccaacugacauagcugcag

SEQ ID NO: 2641964 - RNA, 19 nt, Artificial Sequence
  Description of Artificial Sequence: Synthetic oligonucleotide
uuacauuguuuggacuauu

SEQ ID NO: 2641965 - RNA, 19 nt, Artificial Sequence
  Description of Artificial Sequence: Synthetic oligonucleotide
uuuccccaaucaguauaga

SEQ ID NO: 2641966 - RNA, 19 nt, Artificial Sequence
  Description of Artificial Sequence: Synthetic oligonucleotide
  modified_base (6)..(6): a, c, u, g, unknown or other
cccuanauuuuccccaauc

SEQ ID NO: 2641967 - RNA, 19 nt, Artificial Sequence
  Description of Artificial Sequence: Synthetic oligonucleotide
ggcuuaaagcuggaauuug

SEQ ID NO: 2641968 - RNA, 19 nt, Artificial Sequence
  Description of Artificial Sequence: Synthetic oligonucleotide
gguaggcauucaucaaaac

SEQ ID NO: 2641969 - RNA, 19 nt, Artificial Sequence
  Description of Artificial Sequence: Synthetic oligonucleotide
gcagaaaagcauccuaacu

SEQ ID NO: 2641970 - RNA, 19 nt, Artificial Sequence
  Description of Artificial Sequence: Synthetic oligonucleotide
gcuuaaagcuggaauuuga

SEQ ID NO: 2641971 - RNA, 19 nt, Artificial Sequence
  Description of Artificial Sequence: Synthetic oligonucleotide
auuugauauucuaguggua

SEQ ID NO: 2641972 - RNA, 19 nt, Artificial Sequence
  Description of Artificial Sequence: Synthetic oligonucleotide
ccucuuugauggaacauga

SEQ ID NO: 2641973 - RNA, 19 nt, Artificial Sequence
  Description of Artificial Sequence: Synthetic oligonucleotide
caguaggaauaaacucuga

SEQ ID NO: 2641974 - RNA, 19 nt, Artificial Sequence
  Description of Artificial Sequence: Synthetic oligonucleotide
auuacggcuuaaagcugga

SEQ ID NO: 2641975 - RNA, 19 nt, Artificial Sequence
  Description of Artificial Sequence: Synthetic oligonucleotide
uuacggcuuaaagcuggaa

SEQ ID NO: 2641976 - RNA, 19 nt, Artificial Sequence
  Description of Artificial Sequence: Synthetic oligonucleotide
gcaaccucuuugauggaac

SEQ ID NO: 2641977 - RNA, 19 nt, Artificial Sequence
  Description of Artificial Sequence: Synthetic oligonucleotide
gauauucuagugguaucuu

SEQ ID NO: 2641978 - RNA, 19 nt, Artificial Sequence
  Description of Artificial Sequence: Synthetic oligonucleotide
gcuuuaagaaagagggucu

SEQ ID NO: 2641979 - RNA, 19 nt, Artificial Sequence
  Description of Artificial Sequence: Synthetic oligonucleotide
uucucucaauauggcuggu

SEQ ID NO: 2641980 - RNA, 19 nt, Artificial Sequence
  Description of Artificial Sequence: Synthetic oligonucleotide
ugucagcauugagcaaccu

SEQ ID NO: 2641981 - RNA, 19 nt, Artificial Sequence
  Description of Artificial Sequence: Synthetic oligonucleotide
caacuguuauuacggcuua

SEQ ID NO: 2641982 - RNA, 19 nt, Artificial Sequence
  Description of Artificial Sequence: Synthetic oligonucleotide
gguaucuucuuuacauugu

SEQ ID NO: 2641983 - RNA, 19 nt, Artificial Sequence
  Description of Artificial Sequence: Synthetic oligonucleotide
caguauagauaaccaaauu

SEQ ID NO: 2641984 - RNA, 19 nt, Artificial Sequence
  Description of Artificial Sequence: Synthetic oligonucleotide
caaugucagcauugagcaa

SEQ ID NO: 2641985 - RNA, 19 nt, Artificial Sequence
  Description of Artificial Sequence: Synthetic oligonucleotide
caauauggcuggugcuaaa

SEQ ID NO: 2641986 - RNA, 19 nt, Artificial Sequence
  Description of Artificial Sequence: Synthetic oligonucleotide
ucccuuccuuaaugucaac

SEQ ID NO: 2641987 - RNA, 19 nt, Artificial Sequence
  Description of Artificial Sequence: Synthetic oligonucleotide
ggcauucaucaaaacagua

SEQ ID NO: 2641988 - RNA, 19 nt, Artificial Sequence
  Description of Artificial Sequence: Synthetic oligonucleotide
gagcaaccucuuugaugga

SEQ ID NO: 2641989 - RNA, 19 nt, Artificial Sequence
  Description of Artificial Sequence: Synthetic oligonucleotide
gcuggcuauugacagaauu

SEQ ID NO: 2641990 - RNA, 19 nt, Artificial Sequence
  Description of Artificial Sequence: Synthetic oligonucleotide
  modified_base (18)..(18): a, c, u, g, unknown or other
caacuggaauuccccuana

SEQ ID NO: 2641991 - RNA, 19 nt, Artificial Sequence
  Description of Artificial Sequence: Synthetic oligonucleotide
ccuaacuacagcacaguuu

SEQ ID NO: 2641992 - RNA, 19 nt, Artificial Sequence
  Description of Artificial Sequence: Synthetic oligonucleotide
ggcuauugacagaauucua

SEQ ID NO: 2641993 - RNA, 19 nt, Artificial Sequence
  Description of Artificial Sequence: Synthetic oligonucleotide
cauuuaugaugagguuugu

SEQ ID NO: 2641994 - RNA, 19 nt, Artificial Sequence
  Description of Artificial Sequence: Synthetic oligonucleotide
ggguccuuaaagggugcca

SEQ ID NO: 2641995 - RNA, 19 nt, Artificial Sequence
  Description of Artificial Sequence: Synthetic oligonucleotide
augguccuucuuggaaguu

SEQ ID NO: 2641996 - RNA, 19 nt, Artificial Sequence
  Description of Artificial Sequence: Synthetic oligonucleotide
ccuuaaugucaacuggaau

SEQ ID NO: 2641997 - RNA, 19 nt, Artificial Sequence
  Description of Artificial Sequence: Synthetic oligonucleotide
ggcuggugcuaaauuuuaa

SEQ ID NO: 2641998 - RNA, 19 nt, Artificial Sequence
  Description of Artificial Sequence: Synthetic oligonucleotide
cccaacugacauagcugca

SEQ ID NO: 2641999 - RNA, 19 nt, Artificial Sequence
  Description of Artificial Sequence: Synthetic oligonucleotide
cagaucaggcuggggugaa

SEQ ID NO: 2642000 - RNA, 19 nt, Artificial Sequence
  Description of Artificial Sequence: Synthetic oligonucleotide
  modified_base (7)..(7): a, c, u, g, unknown or other
ccccuanauuuuccccaau

SEQ ID NO: 2642001 - RNA, 19 nt, Artificial Sequence
  Description of Artificial Sequence: Synthetic oligonucleotide
cggcuuaaagcuggaauuu

SEQ ID NO: 2642002 - RNA, 19 nt, Artificial Sequence
  Description of Artificial Sequence: Synthetic oligonucleotide
aauagucuggccuagcucc

SEQ ID NO: 2642003 - RNA, 19 nt, Artificial Sequence
  Description of Artificial Sequence: Synthetic oligonucleotide
aaucaguucauccaggagg

SEQ ID NO: 2642004 - RNA, 19 nt, Artificial Sequence
  Description of Artificial Sequence: Synthetic oligonucleotide
uuugauuucugauagagca

SEQ ID NO: 2642005 - RNA, 19 nt, Artificial Sequence
  Description of Artificial Sequence: Synthetic oligonucleotide
uauaucauaguccagugug

SEQ ID NO: 2642006 - RNA, 19 nt, Artificial Sequence
  Description of Artificial Sequence: Synthetic oligonucleotide
acagucaccaucuuggccc

SEQ ID NO: 2642007 - RNA, 19 nt, Artificial Sequence
  Description of Artificial Sequence: Synthetic oligonucleotide
aaaguacuauaucauaguc

SEQ ID NO: 2642008 - RNA, 19 nt, Artificial Sequence
  Description of Artificial Sequence: Synthetic oligonucleotide
uuugucuacauccacagca

SEQ ID NO: 2642009 - RNA, 19 nt, Artificial Sequence
  Description of Artificial Sequence: Synthetic oligonucleotide
aguacuauaucauagucca

SEQ ID NO: 2642010 - RNA, 19 nt, Artificial Sequence
  Description of Artificial Sequence: Synthetic oligonucleotide
uggauaaaguacuauauca

SEQ ID NO: 2642011 - RNA, 19 nt, Artificial Sequence
  Description of Artificial Sequence: Synthetic oligonucleotide
uguuccuccacacacaccc

SEQ ID NO: 2642012 - RNA, 19 nt, Artificial Sequence
  Description of Artificial Sequence: Synthetic oligonucleotide
aaguacuauaucauagucc

SEQ ID NO: 2642013 - RNA, 19 nt, Artificial Sequence
  Description of Artificial Sequence: Synthetic oligonucleotide
acuguguuccuccacacac

SEQ ID NO: 2642014 - RNA, 19 nt, Artificial Sequence
  Description of Artificial Sequence: Synthetic oligonucleotide
uaaguguugggaaucaaac

SEQ ID NO: 2642015 - RNA, 19 nt, Artificial Sequence
  Description of Artificial Sequence: Synthetic oligonucleotide
uucucuuugacaucuggag

SEQ ID NO: 2642016 - RNA, 19 nt, Artificial Sequence
  Description of Artificial Sequence: Synthetic oligonucleotide
ucucuuugacaucuggagg

SEQ ID NO: 2642017 - RNA, 19 nt, Artificial Sequence
  Description of Artificial Sequence: Synthetic oligonucleotide
ugauuucugauagagcagg

SEQ ID NO: 2642018 - RNA, 19 nt, Artificial Sequence
  Description of Artificial Sequence: Synthetic oligonucleotide
uugggaaucaaacccuggg

SEQ ID NO: 2642019 - RNA, 19 nt, Artificial Sequence
  Description of Artificial Sequence: Synthetic oligonucleotide
acacgaaacccucugcugc

SEQ ID NO: 2642020 - RNA, 19 nt, Artificial Sequence
  Description of Artificial Sequence: Synthetic oligonucleotide
uuugacaucuggaggagug

SEQ ID NO: 2642021 - RNA, 19 nt, Artificial Sequence
  Description of Artificial Sequence: Synthetic oligonucleotide
uuucauuucagagcgcagg

SEQ ID NO: 2642022 - RNA, 19 nt, Artificial Sequence
  Description of Artificial Sequence: Synthetic oligonucleotide
ucuggauaaaguacuauau

SEQ ID NO: 2642023 - RNA, 19 nt, Artificial Sequence
  Description of Artificial Sequence: Synthetic oligonucleotide
uaaaguacuauaucauagu

SEQ ID NO: 2642024 - RNA, 19 nt, Artificial Sequence
  Description of Artificial Sequence: Synthetic oligonucleotide
cuuauauuccagugcagcc

SEQ ID NO: 2642025 - RNA, 19 nt, Artificial Sequence
  Description of Artificial Sequence: Synthetic oligonucleotide
ugcaacgugacuccaaugu

SEQ ID NO: 2642026 - RNA, 19 nt, Artificial Sequence
  Description of Artificial Sequence: Synthetic oligonucleotide
auugguacagcuucucaag

SEQ ID NO: 2642027 - RNA, 19 nt, Artificial Sequence
  Description of Artificial Sequence: Synthetic oligonucleotide
ugauagagcagguggaucu

SEQ ID NO: 2642028 - RNA, 19 nt, Artificial Sequence
  Description of Artificial Sequence: Synthetic oligonucleotide
uggccgauggcucagagac

SEQ ID NO: 2642029 - RNA, 19 nt, Artificial Sequence
  Description of Artificial Sequence: Synthetic oligonucleotide
aguccaguguguuuccacc

SEQ ID NO: 2642030 - RNA, 19 nt, Artificial Sequence
  Description of Artificial Sequence: Synthetic oligonucleotide
uuugguuaaguguugggaa

SEQ ID NO: 2642031 - RNA, 19 nt, Artificial Sequence
  Description of Artificial Sequence: Synthetic oligonucleotide
agugcagccuccucuaugg

SEQ ID NO: 2642032 - RNA, 19 nt, Artificial Sequence
  Description of Artificial Sequence: Synthetic oligonucleotide
ucuccaaucaguucaucca

SEQ ID NO: 2642033 - RNA, 19 nt, Artificial Sequence
  Description of Artificial Sequence: Synthetic oligonucleotide
ugagaaguacugcauacuc

SEQ ID NO: 2642034 - RNA, 19 nt, Artificial Sequence
  Description of Artificial Sequence: Synthetic oligonucleotide
ugucauaugucucucggau

SEQ ID NO: 2642035 - RNA, 19 nt, Artificial Sequence
  Description of Artificial Sequence: Synthetic oligonucleotide
uacuauaucauaguccagu

SEQ ID NO: 2642036 - RNA, 19 nt, Artificial Sequence
  Description of Artificial Sequence: Synthetic oligonucleotide
uucuccaaucaguucaucc

SEQ ID NO: 2642037 - RNA, 19 nt, Artificial Sequence
  Description of Artificial Sequence: Synthetic oligonucleotide
uuuugguuaaguguuggga

SEQ ID NO: 2642038 - RNA, 19 nt, Artificial Sequence
  Description of Artificial Sequence: Synthetic oligonucleotide
ugaauguuuucauuucaga

SEQ ID NO: 2642039 - RNA, 19 nt, Artificial Sequence
  Description of Artificial Sequence: Synthetic oligonucleotide
uuaaguguugggaaucaaa

SEQ ID NO: 2642040 - RNA, 19 nt, Artificial Sequence
  Description of Artificial Sequence: Synthetic oligonucleotide
ucugagaaguacugcauac

SEQ ID NO: 2642041 - RNA, 19 nt, Artificial Sequence
  Description of Artificial Sequence: Synthetic oligonucleotide
acuauaucauaguccagug

SEQ ID NO: 2642042 - RNA, 19 nt, Artificial Sequence
  Description of Artificial Sequence: Synthetic oligonucleotide
uccaaucaguucauccagg

SEQ ID NO: 2642043 - RNA, 19 nt, Artificial Sequence
  Description of Artificial Sequence: Synthetic oligonucleotide
acugcauacucuucuccac

SEQ ID NO: 2642044 - RNA, 19 nt, Artificial Sequence
  Description of Artificial Sequence: Synthetic oligonucleotide
caacgugacuccaaugucc

SEQ ID NO: 2642045 - RNA, 19 nt, Artificial Sequence
  Description of Artificial Sequence: Synthetic oligonucleotide
gaucuugccaauagucugg

SEQ ID NO: 2642046 - RNA, 19 nt, Artificial Sequence
  Description of Artificial Sequence: Synthetic oligonucleotide
cauacucuucuccacaaac

SEQ ID NO: 2642047 - RNA, 19 nt, Artificial Sequence
  Description of Artificial Sequence: Synthetic oligonucleotide
cuuugauuucugauagagc

SEQ ID NO: 2642048 - RNA, 19 nt, Artificial Sequence
  Description of Artificial Sequence: Synthetic oligonucleotide
ugggaaucaaacccugggc

SEQ ID NO: 2642049 - RNA, 19 nt, Artificial Sequence
  Description of Artificial Sequence: Synthetic oligonucleotide
ucucaagcugacacgaaac

SEQ ID NO: 2642050 - RNA, 19 nt, Artificial Sequence
  Description of Artificial Sequence: Synthetic oligonucleotide
uauauuccagugcagccuc

SEQ ID NO: 2642051 - RNA, 19 nt, Artificial Sequence
  Description of Artificial Sequence: Synthetic oligonucleotide
ucacaaagaguuucucuug

SEQ ID NO: 2642052 - RNA, 19 nt, Artificial Sequence
  Description of Artificial Sequence: Synthetic oligonucleotide
agaaguacugcauacucuu

SEQ ID NO: 2642053 - RNA, 19 nt, Artificial Sequence
  Description of Artificial Sequence: Synthetic oligonucleotide
uucuggauaaaguacuaua

SEQ ID NO: 2642054 - RNA, 19 nt, Artificial Sequence
  Description of Artificial Sequence: Synthetic oligonucleotide
ucggaucuugccaauaguc

SEQ ID NO: 2642055 - RNA, 19 nt, Artificial Sequence
  Description of Artificial Sequence: Synthetic oligonucleotide
uuauauuccagugcagccu

SEQ ID NO: 2642056 - RNA, 19 nt, Artificial Sequence
  Description of Artificial Sequence: Synthetic oligonucleotide
uuuucauuucagagcgcag

SEQ ID NO: 2642057 - RNA, 19 nt, Artificial Sequence
  Description of Artificial Sequence: Synthetic oligonucleotide
acccucagcucccucaggc

SEQ ID NO: 2642058 - RNA, 19 nt, Artificial Sequence
  Description of Artificial Sequence: Synthetic oligonucleotide
ugcaugagcuuccauucug

SEQ ID NO: 2642059 - RNA, 19 nt, Artificial Sequence
  Description of Artificial Sequence: Synthetic oligonucleotide
aucaguucauccaggaggg

SEQ ID NO: 2642060 - RNA, 19 nt, Artificial Sequence
  Description of Artificial Sequence: Synthetic oligonucleotide
caggaauugguacagcuuc

SEQ ID NO: 2642061 - RNA, 19 nt, Artificial Sequence
  Description of Artificial Sequence: Synthetic oligonucleotide
ucaagcugacacgaaaccc

SEQ ID NO: 2642062 - RNA, 19 nt, Artificial Sequence
  Description of Artificial Sequence: Synthetic oligonucleotide
ugacacgaaacccucugcu

SEQ ID NO: 2642063 - RNA, 19 nt, Artificial Sequence
  Description of Artificial Sequence: Synthetic oligonucleotide
ucauaguccaguguguuuc

SEQ ID NO: 2642064 - RNA, 19 nt, Artificial Sequence
  Description of Artificial Sequence: Synthetic oligonucleotide
uguugggaaucaaacccug

SEQ ID NO: 2642065 - RNA, 19 nt, Artificial Sequence
  Description of Artificial Sequence: Synthetic oligonucleotide
uguguuccuccacacacac

SEQ ID NO: 2642066 - RNA, 19 nt, Artificial Sequence
  Description of Artificial Sequence: Synthetic oligonucleotide
augucucucggaucuugcc

SEQ ID NO: 2642067 - RNA, 19 nt, Artificial Sequence
  Description of Artificial Sequence: Synthetic oligonucleotide
ucuacauccacagcacuga

SEQ ID NO: 2642068 - RNA, 19 nt, Artificial Sequence
  Description of Artificial Sequence: Synthetic oligonucleotide
ugucucucggaucuugcca

SEQ ID NO: 2642069 - RNA, 19 nt, Artificial Sequence
  Description of Artificial Sequence: Synthetic oligonucleotide
aaguucucugucuucuuau

SEQ ID NO: 2642070 - RNA, 19 nt, Artificial Sequence
  Description of Artificial Sequence: Synthetic oligonucleotide
uccaggaauugguacagcu

SEQ ID NO: 2642071 - RNA, 19 nt, Artificial Sequence
  Description of Artificial Sequence: Synthetic oligonucleotide
caaagaguuucucuugcug

SEQ ID NO: 2642072 - RNA, 19 nt, Artificial Sequence
  Description of Artificial Sequence: Synthetic oligonucleotide
agagacagucaccaucuug

SEQ ID NO: 2642073 - RNA, 19 nt, Artificial Sequence
  Description of Artificial Sequence: Synthetic oligonucleotide
agacagucaccaucuuggc

SEQ ID NO: 2642074 - RNA, 19 nt, Artificial Sequence
  Description of Artificial Sequence: Synthetic oligonucleotide
uccucuaugggacguacuc

SEQ ID NO: 2642075 - RNA, 19 nt, Artificial Sequence
  Description of Artificial Sequence: Synthetic oligonucleotide
cuggauaaaguacuauauc

SEQ ID NO: 2642076 - RNA, 19 nt, Artificial Sequence
  Description of Artificial Sequence: Synthetic oligonucleotide
cucaagcugacacgaaacc

SEQ ID NO: 2642077 - RNA, 19 nt, Artificial Sequence
  Description of Artificial Sequence: Synthetic oligonucleotide
ggugucauaugucucucgg

SEQ ID NO: 2642078 - RNA, 19 nt, Artificial Sequence
  Description of Artificial Sequence: Synthetic oligonucleotide
agcuucucaagcugacacg

SEQ ID NO: 2642079 - RNA, 19 nt, Artificial Sequence
  Description of Artificial Sequence: Synthetic oligonucleotide
ggauuugcuccuuauauuc

SEQ ID NO: 2642080 - RNA, 19 nt, Artificial Sequence
  Description of Artificial Sequence: Synthetic oligonucleotide
uaugucucucggaucuugc

SEQ ID NO: 2642081 - RNA, 19 nt, Artificial Sequence
  Description of Artificial Sequence: Synthetic oligonucleotide
uuuugucuacauccacagc

SEQ ID NO: 2642082 - RNA, 19 nt, Artificial Sequence
  Description of Artificial Sequence: Synthetic oligonucleotide
ugggccugugguaugcuag

SEQ ID NO: 2642083 - RNA, 19 nt, Artificial Sequence
  Description of Artificial Sequence: Synthetic oligonucleotide
acaucuggaggaguggccg

SEQ ID NO: 2642084 - RNA, 19 nt, Artificial Sequence
  Description of Artificial Sequence: Synthetic oligonucleotide
uguagccaggucacaaaga

SEQ ID NO: 2642085 - RNA, 19 nt, Artificial Sequence
  Description of Artificial Sequence: Synthetic oligonucleotide
gggaaucaaacccugggcc

SEQ ID NO: 2642086 - RNA, 19 nt, Artificial Sequence
  Description of Artificial Sequence: Synthetic oligonucleotide
gacacgaaacccucugcug

SEQ ID NO: 2642087 - RNA, 19 nt, Artificial Sequence
  Description of Artificial Sequence: Synthetic oligonucleotide
cucagagacagucaccauc

SEQ ID NO: 2642088 - RNA, 19 nt, Artificial Sequence
  Description of Artificial Sequence: Synthetic oligonucleotide
cuccaaucaguucauccag

SEQ ID NO: 2642089 - RNA, 19 nt, Artificial Sequence
  Description of Artificial Sequence: Synthetic oligonucleotide
gauuugcuccuuauauucc

SEQ ID NO: 2642090 - RNA, 19 nt, Artificial Sequence
  Description of Artificial Sequence: Synthetic oligonucleotide
ucauccaggagggcaaucc

SEQ ID NO: 2642091 - RNA, 19 nt, Artificial Sequence
  Description of Artificial Sequence: Synthetic oligonucleotide
ucuggccuagcuccuguag

SEQ ID NO: 2642092 - RNA, 19 nt, Artificial Sequence
  Description of Artificial Sequence: Synthetic oligonucleotide
ugcuaggccagcacucucc

SEQ ID NO: 2642093 - RNA, 19 nt, Artificial Sequence
  Description of Artificial Sequence: Synthetic oligonucleotide
cuccuuauauuccagugca

SEQ ID NO: 2642094 - RNA, 19 nt, Artificial Sequence
  Description of Artificial Sequence: Synthetic oligonucleotide
uccuuauauuccagugcag

SEQ ID NO: 2642095 - RNA, 19 nt, Artificial Sequence
  Description of Artificial Sequence: Synthetic oligonucleotide
uugguuaaguguugggaau

SEQ ID NO: 2642096 - RNA, 19 nt, Artificial Sequence
  Description of Artificial Sequence: Synthetic oligonucleotide
aacuuugauuucugauaga

SEQ ID NO: 2642097 - RNA, 19 nt, Artificial Sequence
  Description of Artificial Sequence: Synthetic oligonucleotide
ugugcaacgugacuccaau

SEQ ID NO: 2642098 - RNA, 19 nt, Artificial Sequence
  Description of Artificial Sequence: Synthetic oligonucleotide
acucuccccacuuuugucu

SEQ ID NO: 2642099 - RNA, 19 nt, Artificial Sequence
  Description of Artificial Sequence: Synthetic oligonucleotide
ggaucuugccaauagucug

SEQ ID NO: 2642100 - RNA, 19 nt, Artificial Sequence
  Description of Artificial Sequence: Synthetic oligonucleotide
guuuucauuucagagcgca

SEQ ID NO: 2642101 - RNA, 19 nt, Artificial Sequence
  Description of Artificial Sequence: Synthetic oligonucleotide
gaaacccucugcugcuggg

SEQ ID NO: 2642102 - RNA, 19 nt, Artificial Sequence
  Description of Artificial Sequence: Synthetic oligonucleotide
ucccuggugucauaugucu

SEQ ID NO: 2642103 - RNA, 19 nt, Artificial Sequence
  Description of Artificial Sequence: Synthetic oligonucleotide
acaaagaguuucucuugcu

SEQ ID NO: 2642104 - RNA, 19 nt, Artificial Sequence
  Description of Artificial Sequence: Synthetic oligonucleotide
gaauugguacagcuucuca

SEQ ID NO: 2642105 - RNA, 19 nt, Artificial Sequence
  Description of Artificial Sequence: Synthetic oligonucleotide
ucuggauuugcuccuuaua

SEQ ID NO: 2642106 - RNA, 19 nt, Artificial Sequence
  Description of Artificial Sequence: Synthetic oligonucleotide
uggugucauaugucucucg

SEQ ID NO: 2642107 - RNA, 19 nt, Artificial Sequence
  Description of Artificial Sequence: Synthetic oligonucleotide
aucuugccaauagucuggc

SEQ ID NO: 2642108 - RNA, 19 nt, Artificial Sequence
  Description of Artificial Sequence: Synthetic oligonucleotide
ucaaacccugggccugugg

SEQ ID NO: 2642109 - RNA, 19 nt, Artificial Sequence
  Description of Artificial Sequence: Synthetic oligonucleotide
uguuuucauuucagagcgc

SEQ ID NO: 2642110 - RNA, 19 nt, Artificial Sequence
  Description of Artificial Sequence: Synthetic oligonucleotide
ugucuacauccacagcacu

SEQ ID NO: 2642111 - RNA, 19 nt, Artificial Sequence
  Description of Artificial Sequence: Synthetic oligonucleotide
guacugcauacucuucucc

SEQ ID NO: 2642112 - RNA, 19 nt, Artificial Sequence
  Description of Artificial Sequence: Synthetic oligonucleotide
ugacaucuggaggaguggc

SEQ ID NO: 2642113 - RNA, 19 nt, Artificial Sequence
  Description of Artificial Sequence: Synthetic oligonucleotide
caaucaguucauccaggag

SEQ ID NO: 2642114 - RNA, 19 nt, Artificial Sequence
  Description of Artificial Sequence: Synthetic oligonucleotide
caugagcuuccauucuggc

SEQ ID NO: 2642115 - RNA, 19 nt, Artificial Sequence
  Description of Artificial Sequence: Synthetic oligonucleotide
uggauuugcuccuuauauu

SEQ ID NO: 2642116 - RNA, 19 nt, Artificial Sequence
  Description of Artificial Sequence: Synthetic oligonucleotide
uuucuguuucuuucaggaa

SEQ ID NO: 2642117 - RNA, 19 nt, Artificial Sequence
  Description of Artificial Sequence: Synthetic oligonucleotide
acagcacugaauguuuuca

SEQ ID NO: 2642118 - RNA, 19 nt, Artificial Sequence
  Description of Artificial Sequence: Synthetic oligonucleotide
gguuucuguuucuuucagg

SEQ ID NO: 2642119 - RNA, 19 nt, Artificial Sequence
  Description of Artificial Sequence: Synthetic oligonucleotide
cauaguccaguguguuucc

SEQ ID NO: 2642120 - RNA, 19 nt, Artificial Sequence
  Description of Artificial Sequence: Synthetic oligonucleotide
agagcgcaggguuucugag

SEQ ID NO: 2642121 - RNA, 19 nt, Artificial Sequence
  Description of Artificial Sequence: Synthetic oligonucleotide
uagagcagguggaucuucu

SEQ ID NO: 2642122 - RNA, 19 nt, Artificial Sequence
  Description of Artificial Sequence: Synthetic oligonucleotide
agcgcaggguuucugagaa

SEQ ID NO: 2642123 - RNA, 19 nt, Artificial Sequence
  Description of Artificial Sequence: Synthetic oligonucleotide
cugcagacuguguuccucc

SEQ ID NO: 2642124 - RNA, 19 nt, Artificial Sequence
  Description of Artificial Sequence: Synthetic oligonucleotide
uuggcccugugcaacguga

SEQ ID NO: 2642125 - RNA, 19 nt, Artificial Sequence
  Description of Artificial Sequence: Synthetic oligonucleotide
cuugccaauagucuggccu

SEQ ID NO: 2642126 - RNA, 19 nt, Artificial Sequence
  Description of Artificial Sequence: Synthetic oligonucleotide
agagcagguggaucuucuc

SEQ ID NO: 2642127 - RNA, 19 nt, Artificial Sequence
  Description of Artificial Sequence: Synthetic oligonucleotide
uugccaauagucuggccua

SEQ ID NO: 2642128 - RNA, 19 nt, Artificial Sequence
  Description of Artificial Sequence: Synthetic oligonucleotide
caauagucuggccuagcuc

SEQ ID NO: 2642129 - RNA, 19 nt, Artificial Sequence
  Description of Artificial Sequence: Synthetic oligonucleotide
cuggaggaguggccgaugg

SEQ ID NO: 2642130 - RNA, 19 nt, Artificial Sequence
  Description of Artificial Sequence: Synthetic oligonucleotide
ugugguaugcuaggccagc

SEQ ID NO: 2642131 - RNA, 19 nt, Artificial Sequence
  Description of Artificial Sequence: Synthetic oligonucleotide
agcacugaauguuuucauu

SEQ ID NO: 2642132 - RNA, 19 nt, Artificial Sequence
  Description of Artificial Sequence: Synthetic oligonucleotide
auacucuucuccacaaacu

SEQ ID NO: 2642133 - RNA, 19 nt, Artificial Sequence
  Description of Artificial Sequence: Synthetic oligonucleotide
cuggccuagcuccuguagc

SEQ ID NO: 2642134 - RNA, 19 nt, Artificial Sequence
  Description of Artificial Sequence: Synthetic oligonucleotide
gucuacauccacagcacug

SEQ ID NO: 2642135 - RNA, 19 nt, Artificial Sequence
  Description of Artificial Sequence: Synthetic oligonucleotide
agguggaucuucucuuuga

SEQ ID NO: 2642136 - RNA, 19 nt, Artificial Sequence
  Description of Artificial Sequence: Synthetic oligonucleotide
ugguuaaguguugggaauc

SEQ ID NO: 2642137 - RNA, 19 nt, Artificial Sequence
  Description of Artificial Sequence: Synthetic oligonucleotide
guugggaaucaaacccugg

SEQ ID NO: 2642138 - RNA, 19 nt, Artificial Sequence
  Description of Artificial Sequence: Synthetic oligonucleotide
ccuuauauuccagugcagc

SEQ ID NO: 2642139 - RNA, 19 nt, Artificial Sequence
  Description of Artificial Sequence: Synthetic oligonucleotide
ucugauagagcagguggau

SEQ ID NO: 2642140 - RNA, 19 nt, Artificial Sequence
  Description of Artificial Sequence: Synthetic oligonucleotide
ugguaugcuaggccagcac

SEQ ID NO: 2642141 - RNA, 19 nt, Artificial Sequence
  Description of Artificial Sequence: Synthetic oligonucleotide
auguccugcaugagcuucc

SEQ ID NO: 2642142 - RNA, 19 nt, Artificial Sequence
  Description of Artificial Sequence: Synthetic oligonucleotide
guuuccaccauucccauuu

SEQ ID NO: 2642143 - RNA, 19 nt, Artificial Sequence
  Description of Artificial Sequence: Synthetic oligonucleotide
uaguccaguguguuuccac

SEQ ID NO: 2642144 - RNA, 19 nt, Artificial Sequence
  Description of Artificial Sequence: Synthetic oligonucleotide
uugcuccuuauauuccagu

SEQ ID NO: 2642145 - RNA, 19 nt, Artificial Sequence
  Description of Artificial Sequence: Synthetic oligonucleotide
uaucauaguccaguguguu

SEQ ID NO: 2642146 - RNA, 19 nt, Artificial Sequence
  Description of Artificial Sequence: Synthetic oligonucleotide
cugacacgaaacccucugc

SEQ ID NO: 2642147 - RNA, 19 nt, Artificial Sequence
  Description of Artificial Sequence: Synthetic oligonucleotide
cauccaggagggcaauccc

SEQ ID NO: 2642148 - RNA, 19 nt, Artificial Sequence
  Description of Artificial Sequence: Synthetic oligonucleotide
auaugucucucggaucuug

SEQ ID NO: 2642149 - RNA, 19 nt, Artificial Sequence
  Description of Artificial Sequence: Synthetic oligonucleotide
auaucauaguccagugugu

SEQ ID NO: 2642150 - RNA, 19 nt, Artificial Sequence
  Description of Artificial Sequence: Synthetic oligonucleotide
agcagguggaucuucucuu

SEQ ID NO: 2642151 - RNA, 19 nt, Artificial Sequence
  Description of Artificial Sequence: Synthetic oligonucleotide
uggcuggucuugcuuggcc

SEQ ID NO: 2642152 - RNA, 19 nt, Artificial Sequence
  Description of Artificial Sequence: Synthetic oligonucleotide
aggguuucugagaaguacu

SEQ ID NO: 2642153 - RNA, 19 nt, Artificial Sequence
  Description of Artificial Sequence: Synthetic oligonucleotide
cugcuccaggaauugguac

SEQ ID NO: 2642154 - RNA, 19 nt, Artificial Sequence
  Description of Artificial Sequence: Synthetic oligonucleotide
cugugguaugcuaggccag

SEQ ID NO: 2642155 - RNA, 19 nt, Artificial Sequence
  Description of Artificial Sequence: Synthetic oligonucleotide
gacaucuggaggaguggcc

SEQ ID NO: 2642156 - RNA, 19 nt, Artificial Sequence
  Description of Artificial Sequence: Synthetic oligonucleotide
uggcucagagacagucacc

SEQ ID NO: 2642157 - RNA, 19 nt, Artificial Sequence
  Description of Artificial Sequence: Synthetic oligonucleotide
aaacccugggccuguggua

SEQ ID NO: 2642158 - RNA, 19 nt, Artificial Sequence
  Description of Artificial Sequence: Synthetic oligonucleotide
aaucaaacccugggccugu

SEQ ID NO: 2642159 - RNA, 19 nt, Artificial Sequence
  Description of Artificial Sequence: Synthetic oligonucleotide
cuuccacuucuggauaaag

SEQ ID NO: 2642160 - RNA, 19 nt, Artificial Sequence
  Description of Artificial Sequence: Synthetic oligonucleotide
aggucacaaagaguuucuc

SEQ ID NO: 2642161 - RNA, 19 nt, Artificial Sequence
  Description of Artificial Sequence: Synthetic oligonucleotide
cacagcacugaauguuuuc

SEQ ID NO: 2642162 - RNA, 19 nt, Artificial Sequence
  Description of Artificial Sequence: Synthetic oligonucleotide
aucauaguccaguguguuu

SEQ ID NO: 2642163 - RNA, 19 nt, Artificial Sequence
  Description of Artificial Sequence: Synthetic oligonucleotide
augcuaggccagcacucuc

SEQ ID NO: 2642164 - RNA, 19 nt, Artificial Sequence
  Description of Artificial Sequence: Synthetic oligonucleotide
uccauucuggcuggucuug

SEQ ID NO: 2642165 - RNA, 19 nt, Artificial Sequence
  Description of Artificial Sequence: Synthetic oligonucleotide
aacccugggccugugguau

SEQ ID NO: 2642166 - RNA, 19 nt, Artificial Sequence
  Description of Artificial Sequence: Synthetic oligonucleotide
cagacuguguuccuccaca

SEQ ID NO: 2642167 - RNA, 19 nt, Artificial Sequence
  Description of Artificial Sequence: Synthetic oligonucleotide
aaacccucugcugcugggu

SEQ ID NO: 2642168 - RNA, 19 nt, Artificial Sequence
  Description of Artificial Sequence: Synthetic oligonucleotide
auauuccagugcagccucc

SEQ ID NO: 2642169 - RNA, 19 nt, Artificial Sequence
  Description of Artificial Sequence: Synthetic oligonucleotide
uggaggaguggccgauggc

SEQ ID NO: 2642170 - RNA, 19 nt, Artificial Sequence
  Description of Artificial Sequence: Synthetic oligonucleotide
gcugacacgaaacccucug

SEQ ID NO: 2642171 - RNA, 19 nt, Artificial Sequence
  Description of Artificial Sequence: Synthetic oligonucleotide
ucuugccaauagucuggcc

SEQ ID NO: 2642172 - RNA, 19 nt, Artificial Sequence
  Description of Artificial Sequence: Synthetic oligonucleotide
ugcagacuguguuccucca

SEQ ID NO: 2642173 - RNA, 19 nt, Artificial Sequence
  Description of Artificial Sequence: Synthetic oligonucleotide
uauuccagugcagccuccu

SEQ ID NO: 2642174 - RNA, 19 nt, Artificial Sequence
  Description of Artificial Sequence: Synthetic oligonucleotide
caucuuggcccugugcaac

SEQ ID NO: 2642175 - RNA, 19 nt, Artificial Sequence
  Description of Artificial Sequence: Synthetic oligonucleotide
uccuguagccaggucacaa

SEQ ID NO: 2642176 - RNA, 19 nt, Artificial Sequence
  Description of Artificial Sequence: Synthetic oligonucleotide
gauggcucagagacaguca

SEQ ID NO: 2642177 - RNA, 19 nt, Artificial Sequence
  Description of Artificial Sequence: Synthetic oligonucleotide
gacuguguuccuccacaca

SEQ ID NO: 2642178 - RNA, 19 nt, Artificial Sequence
  Description of Artificial Sequence: Synthetic oligonucleotide
aacccucugcugcuggguu

SEQ ID NO: 2642179 - RNA, 19 nt, Artificial Sequence
  Description of Artificial Sequence: Synthetic oligonucleotide
gccgauggcucagagacag

SEQ ID NO: 2642180 - RNA, 19 nt, Artificial Sequence
  Description of Artificial Sequence: Synthetic oligonucleotide
gguuucugagaaguacugc

SEQ ID NO: 2642181 - RNA, 19 nt, Artificial Sequence
  Description of Artificial Sequence: Synthetic oligonucleotide
aguucauccaggagggcaa

SEQ ID NO: 2642182 - RNA, 19 nt, Artificial Sequence
  Description of Artificial Sequence: Synthetic oligonucleotide
guaugcuaggccagcacuc

SEQ ID NO: 2642183 - RNA, 19 nt, Artificial Sequence
  Description of Artificial Sequence: Synthetic oligonucleotide
aucccuggugucauauguc

SEQ ID NO: 2642184 - RNA, 19 nt, Artificial Sequence
  Description of Artificial Sequence: Synthetic oligonucleotide
ugccaauagucuggccuag

SEQ ID NO: 2642185 - RNA, 19 nt, Artificial Sequence
  Description of Artificial Sequence: Synthetic oligonucleotide
gugucauaugucucucgga

SEQ ID NO: 2642186 - RNA, 19 nt, Artificial Sequence
  Description of Artificial Sequence: Synthetic oligonucleotide
guacuauaucauaguccag

SEQ ID NO: 2642187 - RNA, 19 nt, Artificial Sequence
  Description of Artificial Sequence: Synthetic oligonucleotide
cugauagagcagguggauc

SEQ ID NO: 2642188 - RNA, 19 nt, Artificial Sequence
  Description of Artificial Sequence: Synthetic oligonucleotide
ggguuucuguuucuuucag

SEQ ID NO: 2642189 - RNA, 19 nt, Artificial Sequence
  Description of Artificial Sequence: Synthetic oligonucleotide
gagggcaaucccugguguc

SEQ ID NO: 2642190 - RNA, 19 nt, Artificial Sequence
  Description of Artificial Sequence: Synthetic oligonucleotide
agggcaaucccugguguca

SEQ ID NO: 2642191 - RNA, 19 nt, Artificial Sequence
  Description of Artificial Sequence: Synthetic oligonucleotide
gcaugagcuuccauucugg

SEQ ID NO: 2642192 - RNA, 19 nt, Artificial Sequence
  Description of Artificial Sequence: Synthetic oligonucleotide
gagcagguggaucuucucu

SEQ ID NO: 2642193 - RNA, 19 nt, Artificial Sequence
  Description of Artificial Sequence: Synthetic oligonucleotide
cagguggaucuucucuuug

SEQ ID NO: 2642194 - RNA, 19 nt, Artificial Sequence
  Description of Artificial Sequence: Synthetic oligonucleotide
cugcauacucuucuccaca

SEQ ID NO: 2642195 - RNA, 19 nt, Artificial Sequence
  Description of Artificial Sequence: Synthetic oligonucleotide
ggcucagagacagucacca

SEQ ID NO: 2642196 - RNA, 19 nt, Artificial Sequence
  Description of Artificial Sequence: Synthetic oligonucleotide
cacucuccccacuuuuguc

SEQ ID NO: 2642197 - RNA, 19 nt, Artificial Sequence
  Description of Artificial Sequence: Synthetic oligonucleotide
aggaauugguacagcuucu

SEQ ID NO: 2642198 - RNA, 19 nt, Artificial Sequence
  Description of Artificial Sequence: Synthetic oligonucleotide
cagugcagccuccucuaug

SEQ ID NO: 2642199 - RNA, 19 nt, Artificial Sequence
  Description of Artificial Sequence: Synthetic oligonucleotide
gagcgcaggguuucugaga

SEQ ID NO: 2642200 - RNA, 19 nt, Artificial Sequence
  Description of Artificial Sequence: Synthetic oligonucleotide
ccugugguaugcuaggcca

SEQ ID NO: 2642201 - RNA, 19 nt, Artificial Sequence
  Description of Artificial Sequence: Synthetic oligonucleotide
ucagagcgcaggguuucug

SEQ ID NO: 2642202 - RNA, 19 nt, Artificial Sequence
  Description of Artificial Sequence: Synthetic oligonucleotide
gugcaacgugacuccaaug

SEQ ID NO: 2642203 - RNA, 19 nt, Artificial Sequence
  Description of Artificial Sequence: Synthetic oligonucleotide
uggcccugugcaacgugac

SEQ ID NO: 2642204 - RNA, 19 nt, Artificial Sequence
  Description of Artificial Sequence: Synthetic oligonucleotide
cacacccucagcucccuca

SEQ ID NO: 2642205 - RNA, 19 nt, Artificial Sequence
  Description of Artificial Sequence: Synthetic oligonucleotide
gcuucucaagcugacacga

SEQ ID NO: 2642206 - RNA, 19 nt, Artificial Sequence
  Description of Artificial Sequence: Synthetic oligonucleotide
gggccugugguaugcuagg

SEQ ID NO: 2642207 - RNA, 19 nt, Artificial Sequence
  Description of Artificial Sequence: Synthetic oligonucleotide
cuaggccagcacucucccc

SEQ ID NO: 2642208 - RNA, 19 nt, Artificial Sequence
  Description of Artificial Sequence: Synthetic oligonucleotide
cuguguuccuccacacaca

SEQ ID NO: 2642209 - RNA, 19 nt, Artificial Sequence
  Description of Artificial Sequence: Synthetic oligonucleotide
ggaaucaaacccugggccu

SEQ ID NO: 2642210 - RNA, 19 nt, Artificial Sequence
  Description of Artificial Sequence: Synthetic oligonucleotide
agcacucuccccacuuuug

SEQ ID NO: 2642211 - RNA, 19 nt, Artificial Sequence
  Description of Artificial Sequence: Synthetic oligonucleotide
cgugacuccaauguccugc

SEQ ID NO: 2642212 - RNA, 19 nt, Artificial Sequence
  Description of Artificial Sequence: Synthetic oligonucleotide
ucuccccacuuuugucuac

SEQ ID NO: 2642213 - RNA, 19 nt, Artificial Sequence
  Description of Artificial Sequence: Synthetic oligonucleotide
ggauaaaguacuauaucau

SEQ ID NO: 2642214 - RNA, 19 nt, Artificial Sequence
  Description of Artificial Sequence: Synthetic oligonucleotide
gguaugcuaggccagcacu

SEQ ID NO: 2642215 - RNA, 19 nt, Artificial Sequence
  Description of Artificial Sequence: Synthetic oligonucleotide
gaggaguggccgauggcuc

SEQ ID NO: 2642216 - RNA, 19 nt, Artificial Sequence
  Description of Artificial Sequence: Synthetic oligonucleotide
gcaacgugacuccaauguc

SEQ ID NO: 2642217 - RNA, 19 nt, Artificial Sequence
  Description of Artificial Sequence: Synthetic oligonucleotide
cuuggcccugugcaacgug

SEQ ID NO: 2642218 - RNA, 19 nt, Artificial Sequence
  Description of Artificial Sequence: Synthetic oligonucleotide
cuggucuugcuuggccucc

SEQ ID NO: 2642219 - RNA, 19 nt, Artificial Sequence
  Description of Artificial Sequence: Synthetic oligonucleotide
gccugugguaugcuaggcc

SEQ ID NO: 2642220 - RNA, 19 nt, Artificial Sequence
  Description of Artificial Sequence: Synthetic oligonucleotide
ccucuaugggacguacucg

SEQ ID NO: 2642221 - RNA, 19 nt, Artificial Sequence
  Description of Artificial Sequence: Synthetic oligonucleotide
cagagcgcaggguuucuga

SEQ ID NO: 2642222 - RNA, 19 nt, Artificial Sequence
  Description of Artificial Sequence: Synthetic oligonucleotide
ccacaaacuuugauuucug

SEQ ID NO: 2642223 - RNA, 19 nt, Artificial Sequence
  Description of Artificial Sequence: Synthetic oligonucleotide
ccaggucacaaagaguuuc

SEQ ID NO: 2642224 - RNA, 19 nt, Artificial Sequence
  Description of Artificial Sequence: Synthetic oligonucleotide
ccaaucaguucauccagga

SEQ ID NO: 2642225 - RNA, 19 nt, Artificial Sequence
  Description of Artificial Sequence: Synthetic oligonucleotide
gcuaggccagcacucuccc

SEQ ID NO: 2642226 - RNA, 19 nt, Artificial Sequence
  Description of Artificial Sequence: Synthetic oligonucleotide
gauuucugauagagcaggu

SEQ ID NO: 2642227 - RNA, 19 nt, Artificial Sequence
  Description of Artificial Sequence: Synthetic oligonucleotide
ucucucggaucuugccaau

SEQ ID NO: 2642228 - RNA, 19 nt, Artificial Sequence
  Description of Artificial Sequence: Synthetic oligonucleotide
acgugacuccaauguccug

SEQ ID NO: 2642229 - RNA, 19 nt, Artificial Sequence
  Description of Artificial Sequence: Synthetic oligonucleotide
guuaaguguugggaaucaa

SEQ ID NO: 2642230 - RNA, 19 nt, Artificial Sequence
  Description of Artificial Sequence: Synthetic oligonucleotide
cuuggccuccaguucucca

SEQ ID NO: 2642231 - RNA, 19 nt, Artificial Sequence
  Description of Artificial Sequence: Synthetic oligonucleotide
acacacccucagcucccuc

SEQ ID NO: 2642232 - RNA, 19 nt, Artificial Sequence
  Description of Artificial Sequence: Synthetic oligonucleotide
cccugugcaacgugacucc

SEQ ID NO: 2642233 - RNA, 19 nt, Artificial Sequence
  Description of Artificial Sequence: Synthetic oligonucleotide
guguugggaaucaaacccu

SEQ ID NO: 2642234 - RNA, 19 nt, Artificial Sequence
  Description of Artificial Sequence: Synthetic oligonucleotide
auagucuggccuagcuccu

SEQ ID NO: 2642235 - RNA, 19 nt, Artificial Sequence
  Description of Artificial Sequence: Synthetic oligonucleotide
ucuuggcccugugcaacgu

SEQ ID NO: 2642236 - RNA, 19 nt, Artificial Sequence
  Description of Artificial Sequence: Synthetic oligonucleotide
caaacccugggccuguggu

SEQ ID NO: 2642237 - RNA, 19 nt, Artificial Sequence
  Description of Artificial Sequence: Synthetic oligonucleotide
uucagagcgcaggguuucu

SEQ ID NO: 2642238 - RNA, 19 nt, Artificial Sequence
  Description of Artificial Sequence: Synthetic oligonucleotide
cuccaggaauugguacagc

SEQ ID NO: 2642239 - RNA, 19 nt, Artificial Sequence
  Description of Artificial Sequence: Synthetic oligonucleotide
caggucacaaagaguuucu

SEQ ID NO: 2642240 - RNA, 19 nt, Artificial Sequence
  Description of Artificial Sequence: Synthetic oligonucleotide
acgaaacccucugcugcug

SEQ ID NO: 2642241 - RNA, 19 nt, Artificial Sequence
  Description of Artificial Sequence: Synthetic oligonucleotide
uccccacuuuugucuacau

SEQ ID NO: 2642242 - RNA, 19 nt, Artificial Sequence
  Description of Artificial Sequence: Synthetic oligonucleotide
ccaguucuccaaucaguuc

SEQ ID NO: 2642243 - RNA, 19 nt, Artificial Sequence
  Description of Artificial Sequence: Synthetic oligonucleotide
cuucucaagcugacacgaa

SEQ ID NO: 2642244 - RNA, 19 nt, Artificial Sequence
  Description of Artificial Sequence: Synthetic oligonucleotide
ugcuggguuucuguuucuu

SEQ ID NO: 2642245 - RNA, 19 nt, Artificial Sequence
  Description of Artificial Sequence: Synthetic oligonucleotide
uggucuugcuuggccucca

SEQ ID NO: 2642246 - RNA, 19 nt, Artificial Sequence
  Description of Artificial Sequence: Synthetic oligonucleotide
cuacauccacagcacugaa

SEQ ID NO: 2642247 - RNA, 19 nt, Artificial Sequence
  Description of Artificial Sequence: Synthetic oligonucleotide
gcccugugcaacgugacuc

SEQ ID NO: 2642248 - RNA, 19 nt, Artificial Sequence
  Description of Artificial Sequence: Synthetic oligonucleotide
cacccucagcucccucagg

SEQ ID NO: 2642249 - RNA, 19 nt, Artificial Sequence
  Description of Artificial Sequence: Synthetic oligonucleotide
cugagaaguacugcauacu

SEQ ID NO: 2642250 - RNA, 19 nt, Artificial Sequence
  Description of Artificial Sequence: Synthetic oligonucleotide
gugguaugcuaggccagca

SEQ ID NO: 2642251 - RNA, 19 nt, Artificial Sequence
  Description of Artificial Sequence: Synthetic oligonucleotide
cacgaaacccucugcugcu

SEQ ID NO: 2642252 - RNA, 19 nt, Artificial Sequence
  Description of Artificial Sequence: Synthetic oligonucleotide
ggaggaguggccgauggcu

SEQ ID NO: 2642253 - RNA, 19 nt, Artificial Sequence
  Description of Artificial Sequence: Synthetic oligonucleotide
cugugcaacgugacuccaa

SEQ ID NO: 2642254 - RNA, 19 nt, Artificial Sequence
  Description of Artificial Sequence: Synthetic oligonucleotide
gcagacuguguuccuccac

SEQ ID NO: 2642255 - RNA, 19 nt, Artificial Sequence
  Description of Artificial Sequence: Synthetic oligonucleotide
acccucugcugcuggguuu

SEQ ID NO: 2642256 - RNA, 19 nt, Artificial Sequence
  Description of Artificial Sequence: Synthetic oligonucleotide
cucggaucuugccaauagu

SEQ ID NO: 2642257 - RNA, 19 nt, Artificial Sequence
  Description of Artificial Sequence: Synthetic oligonucleotide
cucuccccacuuuugucua

SEQ ID NO: 2642258 - RNA, 19 nt, Artificial Sequence
  Description of Artificial Sequence: Synthetic oligonucleotide
agccuccucuaugggacgu

SEQ ID NO: 2642259 - RNA, 19 nt, Artificial Sequence
  Description of Artificial Sequence: Synthetic oligonucleotide
aucaaacccugggccugug

SEQ ID NO: 2642260 - RNA, 19 nt, Artificial Sequence
  Description of Artificial Sequence: Synthetic oligonucleotide
ggucuugcuuggccuccag

SEQ ID NO: 2642261 - RNA, 19 nt, Artificial Sequence
  Description of Artificial Sequence: Synthetic oligonucleotide
cgaaacccucugcugcugg

SEQ ID NO: 2642262 - RNA, 19 nt, Artificial Sequence
  Description of Artificial Sequence: Synthetic oligonucleotide
cuucuggauaaaguacuau

SEQ ID NO: 2642263 - RNA, 19 nt, Artificial Sequence
  Description of Artificial Sequence: Synthetic oligonucleotide
acccugggccugugguaug

SEQ ID NO: 2642264 - RNA, 19 nt, Artificial Sequence
  Description of Artificial Sequence: Synthetic oligonucleotide
cuccccacuuuugucuaca

SEQ ID NO: 2642265 - RNA, 19 nt, Artificial Sequence
  Description of Artificial Sequence: Synthetic oligonucleotide
cgauggcucagagacaguc

SEQ ID NO: 2642266 - RNA, 19 nt, Artificial Sequence
  Description of Artificial Sequence: Synthetic oligonucleotide
gauagagcagguggaucuu

SEQ ID NO: 2642267 - RNA, 19 nt, Artificial Sequence
  Description of Artificial Sequence: Synthetic oligonucleotide
cagcacugaauguuuucau

SEQ ID NO: 2642268 - RNA, 19 nt, Artificial Sequence
  Description of Artificial Sequence: Synthetic oligonucleotide
guguuuccaccauucccau

SEQ ID NO: 2642269 - RNA, 19 nt, Artificial Sequence
  Description of Artificial Sequence: Synthetic oligonucleotide
cccuggugucauaugucuc

SEQ ID NO: 2642270 - RNA, 19 nt, Artificial Sequence
  Description of Artificial Sequence: Synthetic oligonucleotide
gcauacucuucuccacaaa

SEQ ID NO: 2642271 - RNA, 19 nt, Artificial Sequence
  Description of Artificial Sequence: Synthetic oligonucleotide
ggccugugguaugcuaggc

SEQ ID NO: 2642272 - RNA, 19 nt, Artificial Sequence
  Description of Artificial Sequence: Synthetic oligonucleotide
gucuugcuuggccuccagu

SEQ ID NO: 2642273 - RNA, 19 nt, Artificial Sequence
  Description of Artificial Sequence: Synthetic oligonucleotide
cuuugacaucuggaggagu

SEQ ID NO: 2642274 - RNA, 19 nt, Artificial Sequence
  Description of Artificial Sequence: Synthetic oligonucleotide
gccaauagucuggccuagc

SEQ ID NO: 2642275 - RNA, 19 nt, Artificial Sequence
  Description of Artificial Sequence: Synthetic oligonucleotide
ccaauagucuggccuagcu

SEQ ID NO: 2642276 - RNA, 19 nt, Artificial Sequence
  Description of Artificial Sequence: Synthetic oligonucleotide
ccccacuuuugucuacauc

SEQ ID NO: 2642277 - RNA, 19 nt, Artificial Sequence
  Description of Artificial Sequence: Synthetic oligonucleotide
ccuccucuaugggacguac

SEQ ID NO: 2642278 - RNA, 19 nt, Artificial Sequence
  Description of Artificial Sequence: Synthetic oligonucleotide
cugggccugugguaugcua

SEQ ID NO: 2642279 - RNA, 19 nt, Artificial Sequence
  Description of Artificial Sequence: Synthetic oligonucleotide
cuccucuaugggacguacu

SEQ ID NO: 2642280 - RNA, 19 nt, Artificial Sequence
  Description of Artificial Sequence: Synthetic oligonucleotide
cagucaccaucuuggcccu

SEQ ID NO: 2642281 - RNA, 19 nt, Artificial Sequence
  Description of Artificial Sequence: Synthetic oligonucleotide
gucuggccuagcuccugua

SEQ ID NO: 2642282 - RNA, 19 nt, Artificial Sequence
  Description of Artificial Sequence: Synthetic oligonucleotide
cggaucuugccaauagucu

SEQ ID NO: 2642283 - RNA, 19 nt, Artificial Sequence
  Description of Artificial Sequence: Synthetic oligonucleotide
gcgcaggguuucugagaag

SEQ ID NO: 2642284 - RNA, 19 nt, Artificial Sequence
  Description of Artificial Sequence: Synthetic oligonucleotide
gaguggccgauggcucaga

SEQ ID NO: 2642285 - RNA, 19 nt, Artificial Sequence
  Description of Artificial Sequence: Synthetic oligonucleotide
agcuuccauucuggcuggu

SEQ ID NO: 2642286 - RNA, 19 nt, Artificial Sequence
  Description of Artificial Sequence: Synthetic oligonucleotide
gcaaucccuggugucauau

SEQ ID NO: 2642287 - RNA, 19 nt, Artificial Sequence
  Description of Artificial Sequence: Synthetic oligonucleotide
cccugggccugugguaugc

SEQ ID NO: 2642288 - RNA, 19 nt, Artificial Sequence
  Description of Artificial Sequence: Synthetic oligonucleotide
ccaggaauugguacagcuu

SEQ ID NO: 2642289 - RNA, 19 nt, Artificial Sequence
  Description of Artificial Sequence: Synthetic oligonucleotide
cuccuguagccaggucaca

SEQ ID NO: 2642290 - RNA, 19 nt, Artificial Sequence
  Description of Artificial Sequence: Synthetic oligonucleotide
ggcccugugcaacgugacu

SEQ ID NO: 2642291 - RNA, 19 nt, Artificial Sequence
  Description of Artificial Sequence: Synthetic oligonucleotide
ggcaaucccuggugucaua

SEQ ID NO: 2642292 - RNA, 19 nt, Artificial Sequence
  Description of Artificial Sequence: Synthetic oligonucleotide
ccugugcaacgugacucca

SEQ ID NO: 2642293 - RNA, 19 nt, Artificial Sequence
  Description of Artificial Sequence: Synthetic oligonucleotide
ggccgauggcucagagaca

SEQ ID NO: 2642294 - RNA, 19 nt, Artificial Sequence
  Description of Artificial Sequence: Synthetic oligonucleotide
gcucagagacagucaccau

SEQ ID NO: 2642295 - RNA, 19 nt, Artificial Sequence
  Description of Artificial Sequence: Synthetic oligonucleotide
cagagacagucaccaucuu

SEQ ID NO: 2642296 - RNA, 19 nt, Artificial Sequence
  Description of Artificial Sequence: Synthetic oligonucleotide
ccacagcacugaauguuuu

SEQ ID NO: 2642297 - RNA, 19 nt, Artificial Sequence
  Description of Artificial Sequence: Synthetic oligonucleotide
ggccagcacucuccccacu

SEQ ID NO: 2642298 - RNA, 19 nt, Artificial Sequence
  Description of Artificial Sequence: Synthetic oligonucleotide
gccaggucacaaagaguuu

SEQ ID NO: 2642299 - RNA, 19 nt, Artificial Sequence
  Description of Artificial Sequence: Synthetic oligonucleotide
gccuccucuaugggacgua

SEQ ID NO: 2642300 - RNA, 19 nt, Artificial Sequence
  Description of Artificial Sequence: Synthetic oligonucleotide
ccagcacucuccccacuuu

SEQ ID NO: 2642301 - RNA, 19 nt, Artificial Sequence
  Description of Artificial Sequence: Synthetic oligonucleotide
ccgauggcucagagacagu

SEQ ID NO: 2642302 - RNA, 19 nt, Artificial Sequence
  Description of Artificial Sequence: Synthetic oligonucleotide
ccugggccugugguaugcu

SEQ ID NO: 2642303 - RNA, 19 nt, Artificial Sequence
  Description of Artificial Sequence: Synthetic oligonucleotide
agugaugugaaacacaucg

SEQ ID NO: 2642304 - RNA, 19 nt, Artificial Sequence
  Description of Artificial Sequence: Synthetic oligonucleotide
aaugaaaccaucuuugcag

SEQ ID NO: 2642305 - RNA, 19 nt, Artificial Sequence
  Description of Artificial Sequence: Synthetic oligonucleotide
ugagaugguaauuacaggg

SEQ ID NO: 2642306 - RNA, 19 nt, Artificial Sequence
  Description of Artificial Sequence: Synthetic oligonucleotide
aauccauagguccugacuc

SEQ ID NO: 2642307 - RNA, 19 nt, Artificial Sequence
  Description of Artificial Sequence: Synthetic oligonucleotide
uaucuaacaguuuugauca

SEQ ID NO: 2642308 - RNA, 19 nt, Artificial Sequence
  Description of Artificial Sequence: Synthetic oligonucleotide
uacgucauagguuucaugg

SEQ ID NO: 2642309 - RNA, 19 nt, Artificial Sequence
  Description of Artificial Sequence: Synthetic oligonucleotide
aacaucauuccacuggccg

SEQ ID NO: 2642310 - RNA, 19 nt, Artificial Sequence
  Description of Artificial Sequence: Synthetic oligonucleotide
ugauaucuaaucaaggagu

SEQ ID NO: 2642311 - RNA, 19 nt, Artificial Sequence
  Description of Artificial Sequence: Synthetic oligonucleotide
aaggaguugauuucauaac

SEQ ID NO: 2642312 - RNA, 19 nt, Artificial Sequence
  Description of Artificial Sequence: Synthetic oligonucleotide
caaaggugaacuuauuugg

SEQ ID NO: 2642313 - RNA, 19 nt, Artificial Sequence
  Description of Artificial Sequence: Synthetic oligonucleotide
aauauuuguuccucgugag

SEQ ID NO: 2642314 - RNA, 19 nt, Artificial Sequence
  Description of Artificial Sequence: Synthetic oligonucleotide
cuagacaccggauaguugg

SEQ ID NO: 2642315 - RNA, 19 nt, Artificial Sequence
  Description of Artificial Sequence: Synthetic oligonucleotide
guaaucaugacccacacga

SEQ ID NO: 2642316 - RNA, 19 nt, Artificial Sequence
  Description of Artificial Sequence: Synthetic oligonucleotide
cacaucgccauccagaugg

SEQ ID NO: 2642317 - RNA, 19 nt, Artificial Sequence
  Description of Artificial Sequence: Synthetic oligonucleotide
ugaugugaaacacaucgcc

SEQ ID NO: 2642318 - RNA, 19 nt, Artificial Sequence
  Description of Artificial Sequence: Synthetic oligonucleotide
acggaagucauguucaaac

SEQ ID NO: 2642319 - RNA, 19 nt, Artificial Sequence
  Description of Artificial Sequence: Synthetic oligonucleotide
auuacagggaacaucauuc

SEQ ID NO: 2642320 - RNA, 19 nt, Artificial Sequence
  Description of Artificial Sequence: Synthetic oligonucleotide
aggaguugauuucauaacg

SEQ ID NO: 2642321 - RNA, 19 nt, Artificial Sequence
  Description of Artificial Sequence: Synthetic oligonucleotide
uggaaggugacgcugaaug

SEQ ID NO: 2642322 - RNA, 19 nt, Artificial Sequence
  Description of Artificial Sequence: Synthetic oligonucleotide
agugauaucuaaucaagga

SEQ ID NO: 2642323 - RNA, 19 nt, Artificial Sequence
  Description of Artificial Sequence: Synthetic oligonucleotide
gauaguuggaaggugacgc

SEQ ID NO: 2642324 - RNA, 19 nt, Artificial Sequence
  Description of Artificial Sequence: Synthetic oligonucleotide
uaucuaaucaaggaguuga

SEQ ID NO: 2642325 - RNA, 19 nt, Artificial Sequence
  Description of Artificial Sequence: Synthetic oligonucleotide
guaucuaacaguuuugauc

SEQ ID NO: 2642326 - RNA, 19 nt, Artificial Sequence
  Description of Artificial Sequence: Synthetic oligonucleotide
gugauaucuaaucaaggag

SEQ ID NO: 2642327 - RNA, 19 nt, Artificial Sequence
  Description of Artificial Sequence: Synthetic oligonucleotide
uccacugguaaucaugacc

SEQ ID NO: 2642328 - RNA, 19 nt, Artificial Sequence
  Description of Artificial Sequence: Synthetic oligonucleotide
caucaugucuccauaacag

SEQ ID NO: 2642329 - RNA, 19 nt, Artificial Sequence
  Description of Artificial Sequence: Synthetic oligonucleotide
cacauaacaauauacguca

SEQ ID NO: 2642330 - RNA, 19 nt, Artificial Sequence
  Description of Artificial Sequence: Synthetic oligonucleotide
aacgugguuucaucuuucc

SEQ ID NO: 2642331 - RNA, 19 nt, Artificial Sequence
  Description of Artificial Sequence: Synthetic oligonucleotide
ugccaaaugaucacaacac

SEQ ID NO: 2642332 - RNA, 19 nt, Artificial Sequence
  Description of Artificial Sequence: Synthetic oligonucleotide
guaauuacagggaacauca

SEQ ID NO: 2642333 - RNA, 19 nt, Artificial Sequence
  Description of Artificial Sequence: Synthetic oligonucleotide
cacaacacagucuucuccg

SEQ ID NO: 2642334 - RNA, 19 nt, Artificial Sequence
  Description of Artificial Sequence: Synthetic oligonucleotide
uauccacugguaaucauga

SEQ ID NO: 2642335 - RNA, 19 nt, Artificial Sequence
  Description of Artificial Sequence: Synthetic oligonucleotide
auuccuagacaccggauag

SEQ ID NO: 2642336 - RNA, 19 nt, Artificial Sequence
  Description of Artificial Sequence: Synthetic oligonucleotide
aauuacagggaacaucauu

SEQ ID NO: 2642337 - RNA, 19 nt, Artificial Sequence
  Description of Artificial Sequence: Synthetic oligonucleotide
gcaaguguaggugagaugg

SEQ ID NO: 2642338 - RNA, 19 nt, Artificial Sequence
  Description of Artificial Sequence: Synthetic oligonucleotide
uauuuguuccucgugagac

SEQ ID NO: 2642339 - RNA, 19 nt, Artificial Sequence
  Description of Artificial Sequence: Synthetic oligonucleotide
aguugauuucauaacgugg

SEQ ID NO: 2642340 - RNA, 19 nt, Artificial Sequence
  Description of Artificial Sequence: Synthetic oligonucleotide
ugaaugaaaccaucuuugc

SEQ ID NO: 2642341 - RNA, 19 nt, Artificial Sequence
  Description of Artificial Sequence: Synthetic oligonucleotide
cuaacaguuuugaucagac

SEQ ID NO: 2642342 - RNA, 19 nt, Artificial Sequence
  Description of Artificial Sequence: Synthetic oligonucleotide
ggcauuuucuacaacaggg

SEQ ID NO: 2642343 - RNA, 19 nt, Artificial Sequence
  Description of Artificial Sequence: Synthetic oligonucleotide
agagaagaagcugucuggc

SEQ ID NO: 2642344 - RNA, 19 nt, Artificial Sequence
  Description of Artificial Sequence: Synthetic oligonucleotide
cauaacagccuucucuagg

SEQ ID NO: 2642345 - RNA, 19 nt, Artificial Sequence
  Description of Artificial Sequence: Synthetic oligonucleotide
ugugagaugggcacccugc

SEQ ID NO: 2642346 - RNA, 19 nt, Artificial Sequence
  Description of Artificial Sequence: Synthetic oligonucleotide
auagguuucauggggagag

SEQ ID NO: 2642347 - RNA, 19 nt, Artificial Sequence
  Description of Artificial Sequence: Synthetic oligonucleotide
augccaaaugaucacaaca

SEQ ID NO: 2642348 - RNA, 19 nt, Artificial Sequence
  Description of Artificial Sequence: Synthetic oligonucleotide
gaguugauuucauaacgug

SEQ ID NO: 2642349 - RNA, 19 nt, Artificial Sequence
  Description of Artificial Sequence: Synthetic oligonucleotide
gaagcugucuggcugguug

SEQ ID NO: 2642350 - RNA, 19 nt, Artificial Sequence
  Description of Artificial Sequence: Synthetic oligonucleotide
cuuaugggguaucuaacag

SEQ ID NO: 2642351 - RNA, 19 nt, Artificial Sequence
  Description of Artificial Sequence: Synthetic oligonucleotide
cacaaauauuuguuccucg

SEQ ID NO: 2642352 - RNA, 19 nt, Artificial Sequence
  Description of Artificial Sequence: Synthetic oligonucleotide
aacacagucuucuccggca

SEQ ID NO: 2642353 - RNA, 19 nt, Artificial Sequence
  Description of Artificial Sequence: Synthetic oligonucleotide
acaccggauaguuggaagg

SEQ ID NO: 2642354 - RNA, 19 nt, Artificial Sequence
  Description of Artificial Sequence: Synthetic oligonucleotide
acaaauauuuguuccucgu

SEQ ID NO: 2642355 - RNA, 19 nt, Artificial Sequence
  Description of Artificial Sequence: Synthetic oligonucleotide
acgauucacaaauauuugu

SEQ ID NO: 2642356 - RNA, 19 nt, Artificial Sequence
  Description of Artificial Sequence: Synthetic oligonucleotide
uccaacggaagucauguuc

SEQ ID NO: 2642357 - RNA, 19 nt, Artificial Sequence
  Description of Artificial Sequence: Synthetic oligonucleotide
aacuuauuuggggucagug

SEQ ID NO: 2642358 - RNA, 19 nt, Artificial Sequence
  Description of Artificial Sequence: Synthetic oligonucleotide
ugcagugauaucuaaucaa

SEQ ID NO: 2642359 - RNA, 19 nt, Artificial Sequence
  Description of Artificial Sequence: Synthetic oligonucleotide
ucauauugcagugcgcugc

SEQ ID NO: 2642360 - RNA, 19 nt, Artificial Sequence
  Description of Artificial Sequence: Synthetic oligonucleotide
aucgccauccagauggucc

SEQ ID NO: 2642361 - RNA, 19 nt, Artificial Sequence
  Description of Artificial Sequence: Synthetic oligonucleotide
aaugaucacaacacagucu

SEQ ID NO: 2642362 - RNA, 19 nt, Artificial Sequence
  Description of Artificial Sequence: Synthetic oligonucleotide
cagugauaucuaaucaagg

SEQ ID NO: 2642363 - RNA, 19 nt, Artificial Sequence
  Description of Artificial Sequence: Synthetic oligonucleotide
aacacaucgccauccagau

SEQ ID NO: 2642364 - RNA, 19 nt, Artificial Sequence
  Description of Artificial Sequence: Synthetic oligonucleotide
ucauaacgugguuucaucu

SEQ ID NO: 2642365 - RNA, 19 nt, Artificial Sequence
  Description of Artificial Sequence: Synthetic oligonucleotide
ucucauauugcagugcgcu

SEQ ID NO: 2642366 - RNA, 19 nt, Artificial Sequence
  Description of Artificial Sequence: Synthetic oligonucleotide
gaaugaaaccaucuuugca

SEQ ID NO: 2642367 - RNA, 19 nt, Artificial Sequence
  Description of Artificial Sequence: Synthetic oligonucleotide
uugcagugauaucuaauca

SEQ ID NO: 2642368 - RNA, 19 nt, Artificial Sequence
  Description of Artificial Sequence: Synthetic oligonucleotide
ggugagaugguaauuacag

SEQ ID NO: 2642369 - RNA, 19 nt, Artificial Sequence
  Description of Artificial Sequence: Synthetic oligonucleotide
aaacacaucgccauccaga

SEQ ID NO: 2642370 - RNA, 19 nt, Artificial Sequence
  Description of Artificial Sequence: Synthetic oligonucleotide
acagggaacaucauuccac

SEQ ID NO: 2642371 - RNA, 19 nt, Artificial Sequence
  Description of Artificial Sequence: Synthetic oligonucleotide
cuauccacugguaaucaug

SEQ ID NO: 2642372 - RNA, 19 nt, Artificial Sequence
  Description of Artificial Sequence: Synthetic oligonucleotide
uuacagggaacaucauucc

SEQ ID NO: 2642373 - RNA, 19 nt, Artificial Sequence
  Description of Artificial Sequence: Synthetic oligonucleotide
ucuugcaaguguaggugag

SEQ ID NO: 2642374 - RNA, 19 nt, Artificial Sequence
  Description of Artificial Sequence: Synthetic oligonucleotide
ugggguaucuaacaguuuu

SEQ ID NO: 2642375 - RNA, 19 nt, Artificial Sequence
  Description of Artificial Sequence: Synthetic oligonucleotide
ucgugagacaggaugcuug

SEQ ID NO: 2642376 - RNA, 19 nt, Artificial Sequence
  Description of Artificial Sequence: Synthetic oligonucleotide
uuaugggguaucuaacagu

SEQ ID NO: 2642377 - RNA, 19 nt, Artificial Sequence
  Description of Artificial Sequence: Synthetic oligonucleotide
ucauagguuucauggggag

SEQ ID NO: 2642378 - RNA, 19 nt, Artificial Sequence
  Description of Artificial Sequence: Synthetic oligonucleotide
auagguccugacuccuucc

SEQ ID NO: 2642379 - RNA, 19 nt, Artificial Sequence
  Description of Artificial Sequence: Synthetic oligonucleotide
augguaauuacagggaaca

SEQ ID NO: 2642380 - RNA, 19 nt, Artificial Sequence
  Description of Artificial Sequence: Synthetic oligonucleotide
uccucgugagacaggaugc

SEQ ID NO: 2642381 - RNA, 19 nt, Artificial Sequence
  Description of Artificial Sequence: Synthetic oligonucleotide
acccacacgauucacaaau

SEQ ID NO: 2642382 - RNA, 19 nt, Artificial Sequence
  Description of Artificial Sequence: Synthetic oligonucleotide
uccauaacagccuucucua

SEQ ID NO: 2642383 - RNA, 19 nt, Artificial Sequence
  Description of Artificial Sequence: Synthetic oligonucleotide
acugguaaucaugacccac

SEQ ID NO: 2642384 - RNA, 19 nt, Artificial Sequence
  Description of Artificial Sequence: Synthetic oligonucleotide
auugaggccuauccacugg

SEQ ID NO: 2642385 - RNA, 19 nt, Artificial Sequence
  Description of Artificial Sequence: Synthetic oligonucleotide
aagcugucuggcugguugg

SEQ ID NO: 2642386 - RNA, 19 nt, Artificial Sequence
  Description of Artificial Sequence: Synthetic oligonucleotide
cauccugcaaucacacugc

SEQ ID NO: 2642387 - RNA, 19 nt, Artificial Sequence
  Description of Artificial Sequence: Synthetic oligonucleotide
uauuuggggucagugaugu

SEQ ID NO: 2642388 - RNA, 19 nt, Artificial Sequence
  Description of Artificial Sequence: Synthetic oligonucleotide
ccacugguaaucaugaccc

SEQ ID NO: 2642389 - RNA, 19 nt, Artificial Sequence
  Description of Artificial Sequence: Synthetic oligonucleotide
ucauugaggccuauccacu

SEQ ID NO: 2642390 - RNA, 19 nt, Artificial Sequence
  Description of Artificial Sequence: Synthetic oligonucleotide
aaggucuuggcauuuucua

SEQ ID NO: 2642391 - RNA, 19 nt, Artificial Sequence
  Description of Artificial Sequence: Synthetic oligonucleotide
acgucauagguuucauggg

SEQ ID NO: 2642392 - RNA, 19 nt, Artificial Sequence
  Description of Artificial Sequence: Synthetic oligonucleotide
ucuaacaguuuugaucaga

SEQ ID NO: 2642393 - RNA, 19 nt, Artificial Sequence
  Description of Artificial Sequence: Synthetic oligonucleotide
agugcgcugccaucagucc

SEQ ID NO: 2642394 - RNA, 19 nt, Artificial Sequence
  Description of Artificial Sequence: Synthetic oligonucleotide
gacaccggauaguuggaag

SEQ ID NO: 2642395 - RNA, 19 nt, Artificial Sequence
  Description of Artificial Sequence: Synthetic oligonucleotide
gacgacacucuucuucugc

SEQ ID NO: 2642396 - RNA, 19 nt, Artificial Sequence
  Description of Artificial Sequence: Synthetic oligonucleotide
cucuaggaguccuuauggg

SEQ ID NO: 2642397 - RNA, 19 nt, Artificial Sequence
  Description of Artificial Sequence: Synthetic oligonucleotide
gaaacacaucgccauccag

SEQ ID NO: 2642398 - RNA, 19 nt, Artificial Sequence
  Description of Artificial Sequence: Synthetic oligonucleotide
agaugguaauuacagggaa

SEQ ID NO: 2642399 - RNA, 19 nt, Artificial Sequence
  Description of Artificial Sequence: Synthetic oligonucleotide
uucaaacaucuugucauug

SEQ ID NO: 2642400 - RNA, 19 nt, Artificial Sequence
  Description of Artificial Sequence: Synthetic oligonucleotide
aauauacgucauagguuuc

SEQ ID NO: 2642401 - RNA, 19 nt, Artificial Sequence
  Description of Artificial Sequence: Synthetic oligonucleotide
augaaaccaucuuugcagu

SEQ ID NO: 2642402 - RNA, 19 nt, Artificial Sequence
  Description of Artificial Sequence: Synthetic oligonucleotide
uucauaacgugguuucauc

SEQ ID NO: 2642403 - RNA, 19 nt, Artificial Sequence
  Description of Artificial Sequence: Synthetic oligonucleotide
aguccaacggaagucaugu

SEQ ID NO: 2642404 - RNA, 19 nt, Artificial Sequence
  Description of Artificial Sequence: Synthetic oligonucleotide
ucucaugccaaaugaucac

SEQ ID NO: 2642405 - RNA, 19 nt, Artificial Sequence
  Description of Artificial Sequence: Synthetic oligonucleotide
guuuugaucagacagccau

SEQ ID NO: 2642406 - RNA, 19 nt, Artificial Sequence
  Description of Artificial Sequence: Synthetic oligonucleotide
ucaugccaaaugaucacaa

SEQ ID NO: 2642407 - RNA, 19 nt, Artificial Sequence
  Description of Artificial Sequence: Synthetic oligonucleotide
uccuuaugggguaucuaac

SEQ ID NO: 2642408 - RNA, 19 nt, Artificial Sequence
  Description of Artificial Sequence: Synthetic oligonucleotide
cucccauuccuagacaccg

SEQ ID NO: 2642409 - RNA, 19 nt, Artificial Sequence
  Description of Artificial Sequence: Synthetic oligonucleotide
uuuugaucagacagccauc

SEQ ID NO: 2642410 - RNA, 19 nt, Artificial Sequence
  Description of Artificial Sequence: Synthetic oligonucleotide
uguuccucgugagacagga

SEQ ID NO: 2642411 - RNA, 19 nt, Artificial Sequence
  Description of Artificial Sequence: Synthetic oligonucleotide
gaugguaauuacagggaac

SEQ ID NO: 2642412 - RNA, 19 nt, Artificial Sequence
  Description of Artificial Sequence: Synthetic oligonucleotide
ggaacaucauuccacuggc

SEQ ID NO: 2642413 - RNA, 19 nt, Artificial Sequence
  Description of Artificial Sequence: Synthetic oligonucleotide
ugguaaucaugacccacac

SEQ ID NO: 2642414 - RNA, 19 nt, Artificial Sequence
  Description of Artificial Sequence: Synthetic oligonucleotide
ugaaaccaucuuugcagug

SEQ ID NO: 2642415 - RNA, 19 nt, Artificial Sequence
  Description of Artificial Sequence: Synthetic oligonucleotide
auauuuguuccucgugaga

SEQ ID NO: 2642416 - RNA, 19 nt, Artificial Sequence
  Description of Artificial Sequence: Synthetic oligonucleotide
uucuccggcagagaagaag

SEQ ID NO: 2642417 - RNA, 19 nt, Artificial Sequence
  Description of Artificial Sequence: Synthetic oligonucleotide
auaacgugguuucaucuuu

SEQ ID NO: 2642418 - RNA, 19 nt, Artificial Sequence
  Description of Artificial Sequence: Synthetic oligonucleotide
ucacaaauauuuguuccuc

SEQ ID NO: 2642419 - RNA, 19 nt, Artificial Sequence
  Description of Artificial Sequence: Synthetic oligonucleotide
augggcacccugcagacga

SEQ ID NO: 2642420 - RNA, 19 nt, Artificial Sequence
  Description of Artificial Sequence: Synthetic oligonucleotide
uaacaguuuugaucagaca

SEQ ID NO: 2642421 - RNA, 19 nt, Artificial Sequence
  Description of Artificial Sequence: Synthetic oligonucleotide
caauauacgucauagguuu

SEQ ID NO: 2642422 - RNA, 19 nt, Artificial Sequence
  Description of Artificial Sequence: Synthetic oligonucleotide
ugauuucauaacgugguuu

SEQ ID NO: 2642423 - RNA, 19 nt, Artificial Sequence
  Description of Artificial Sequence: Synthetic oligonucleotide
uucucauauugcagugcgc

SEQ ID NO: 2642424 - RNA, 19 nt, Artificial Sequence
  Description of Artificial Sequence: Synthetic oligonucleotide
ccacauaacaauauacguc

SEQ ID NO: 2642425 - RNA, 19 nt, Artificial Sequence
  Description of Artificial Sequence: Synthetic oligonucleotide
cauauugcagugcgcugcc

SEQ ID NO: 2642426 - RNA, 19 nt, Artificial Sequence
  Description of Artificial Sequence: Synthetic oligonucleotide
gagaugguaauuacaggga

SEQ ID NO: 2642427 - RNA, 19 nt, Artificial Sequence
  Description of Artificial Sequence: Synthetic oligonucleotide
guugauuucauaacguggu

SEQ ID NO: 2642428 - RNA, 19 nt, Artificial Sequence
  Description of Artificial Sequence: Synthetic oligonucleotide
auaguuggaaggugacgcu

SEQ ID NO: 2642429 - RNA, 19 nt, Artificial Sequence
  Description of Artificial Sequence: Synthetic oligonucleotide
ccugcaaucacacugcuca

SEQ ID NO: 2642430 - RNA, 19 nt, Artificial Sequence
  Description of Artificial Sequence: Synthetic oligonucleotide
uugaggccuauccacuggu

SEQ ID NO: 2642431 - RNA, 19 nt, Artificial Sequence
  Description of Artificial Sequence: Synthetic oligonucleotide
acaauauacgucauagguu

SEQ ID NO: 2642432 - RNA, 19 nt, Artificial Sequence
  Description of Artificial Sequence: Synthetic oligonucleotide
uucccuucuugcaagugua

SEQ ID NO: 2642433 - RNA, 19 nt, Artificial Sequence
  Description of Artificial Sequence: Synthetic oligonucleotide
gcagugauaucuaaucaag

SEQ ID NO: 2642434 - RNA, 19 nt, Artificial Sequence
  Description of Artificial Sequence: Synthetic oligonucleotide
ugaacuuauuuggggucag

SEQ ID NO: 2642435 - RNA, 19 nt, Artificial Sequence
  Description of Artificial Sequence: Synthetic oligonucleotide
cauugaggccuauccacug

SEQ ID NO: 2642436 - RNA, 19 nt, Artificial Sequence
  Description of Artificial Sequence: Synthetic oligonucleotide
auaucuaaucaaggaguug

SEQ ID NO: 2642437 - RNA, 19 nt, Artificial Sequence
  Description of Artificial Sequence: Synthetic oligonucleotide
ucuuuccaaaggucuuggc

SEQ ID NO: 2642438 - RNA, 19 nt, Artificial Sequence
  Description of Artificial Sequence: Synthetic oligonucleotide
ucccauuccuagacaccgg

SEQ ID NO: 2642439 - RNA, 19 nt, Artificial Sequence
  Description of Artificial Sequence: Synthetic oligonucleotide
gaauccauagguccugacu

SEQ ID NO: 2642440 - RNA, 19 nt, Artificial Sequence
  Description of Artificial Sequence: Synthetic oligonucleotide
auacgucauagguuucaug

SEQ ID NO: 2642441 - RNA, 19 nt, Artificial Sequence
  Description of Artificial Sequence: Synthetic oligonucleotide
cauggggagagcggaaucc

SEQ ID NO: 2642442 - RNA, 19 nt, Artificial Sequence
  Description of Artificial Sequence: Synthetic oligonucleotide
ugcaaguguaggugagaug

SEQ ID NO: 2642443 - RNA, 19 nt, Artificial Sequence
  Description of Artificial Sequence: Synthetic oligonucleotide
uugauuucauaacgugguu

SEQ ID NO: 2642444 - RNA, 19 nt, Artificial Sequence
  Description of Artificial Sequence: Synthetic oligonucleotide
ugacgcugaaugaaaccau

SEQ ID NO: 2642445 - RNA, 19 nt, Artificial Sequence
  Description of Artificial Sequence: Synthetic oligonucleotide
caguucucauauugcagug

SEQ ID NO: 2642446 - RNA, 19 nt, Artificial Sequence
  Description of Artificial Sequence: Synthetic oligonucleotide
ugguugggucuccaguucu

SEQ ID NO: 2642447 - RNA, 19 nt, Artificial Sequence
  Description of Artificial Sequence: Synthetic oligonucleotide
uaacgugguuucaucuuuc

SEQ ID NO: 2642448 - RNA, 19 nt, Artificial Sequence
  Description of Artificial Sequence: Synthetic oligonucleotide
gguaauuacagggaacauc

SEQ ID NO: 2642449 - RNA, 19 nt, Artificial Sequence
  Description of Artificial Sequence: Synthetic oligonucleotide
gugacgcugaaugaaacca

SEQ ID NO: 2642450 - RNA, 19 nt, Artificial Sequence
  Description of Artificial Sequence: Synthetic oligonucleotide
guccuuaugggguaucuaa

SEQ ID NO: 2642451 - RNA, 19 nt, Artificial Sequence
  Description of Artificial Sequence: Synthetic oligonucleotide
gguaaucaugacccacacg

SEQ ID NO: 2642452 - RNA, 19 nt, Artificial Sequence
  Description of Artificial Sequence: Synthetic oligonucleotide
gaaggugacgcugaaugaa

SEQ ID NO: 2642453 - RNA, 19 nt, Artificial Sequence
  Description of Artificial Sequence: Synthetic oligonucleotide
ucccuucuugcaaguguag

SEQ ID NO: 2642454 - RNA, 19 nt, Artificial Sequence
  Description of Artificial Sequence: Synthetic oligonucleotide
cucauauugcagugcgcug

SEQ ID NO: 2642455 - RNA, 19 nt, Artificial Sequence
  Description of Artificial Sequence: Synthetic oligonucleotide
cauagguccugacuccuuc

SEQ ID NO: 2642456 - RNA, 19 nt, Artificial Sequence
  Description of Artificial Sequence: Synthetic oligonucleotide
caacacagucuucuccggc

SEQ ID NO: 2642457 - RNA, 19 nt, Artificial Sequence
  Description of Artificial Sequence: Synthetic oligonucleotide
gguccacauaacaauauac

SEQ ID NO: 2642458 - RNA, 19 nt, Artificial Sequence
  Description of Artificial Sequence: Synthetic oligonucleotide
ggugacgcugaaugaaacc

SEQ ID NO: 2642459 - RNA, 19 nt, Artificial Sequence
  Description of Artificial Sequence: Synthetic oligonucleotide
ggucuuggcauuuucuaca

SEQ ID NO: 2642460 - RNA, 19 nt, Artificial Sequence
  Description of Artificial Sequence: Synthetic oligonucleotide
uuguuccucgugagacagg

SEQ ID NO: 2642461 - RNA, 19 nt, Artificial Sequence
  Description of Artificial Sequence: Synthetic oligonucleotide
ucuaaucaaggaguugauu

SEQ ID NO: 2642462 - RNA, 19 nt, Artificial Sequence
  Description of Artificial Sequence: Synthetic oligonucleotide
agccauccugcaaucacac

SEQ ID NO: 2642463 - RNA, 19 nt, Artificial Sequence
  Description of Artificial Sequence: Synthetic oligonucleotide
aucuaacaguuuugaucag

SEQ ID NO: 2642464 - RNA, 19 nt, Artificial Sequence
  Description of Artificial Sequence: Synthetic oligonucleotide
uccggcagagaagaagcug

SEQ ID NO: 2642465 - RNA, 19 nt, Artificial Sequence
  Description of Artificial Sequence: Synthetic oligonucleotide
aggugacgcugaaugaaac

SEQ ID NO: 2642466 - RNA, 19 nt, Artificial Sequence
  Description of Artificial Sequence: Synthetic oligonucleotide
ggugaacuuauuugggguc

SEQ ID NO: 2642467 - RNA, 19 nt, Artificial Sequence
  Description of Artificial Sequence: Synthetic oligonucleotide
guuucauggggagagcgga

SEQ ID NO: 2642468 - RNA, 19 nt, Artificial Sequence
  Description of Artificial Sequence: Synthetic oligonucleotide
gugaugugaaacacaucgc

SEQ ID NO: 2642469 - RNA, 19 nt, Artificial Sequence
  Description of Artificial Sequence: Synthetic oligonucleotide
gaugguccacauaacaaua

SEQ ID NO: 2642470 - RNA, 19 nt, Artificial Sequence
  Description of Artificial Sequence: Synthetic oligonucleotide
ucauggggagagcggaauc

SEQ ID NO: 2642471 - RNA, 19 nt, Artificial Sequence
  Description of Artificial Sequence: Synthetic oligonucleotide
ugccaucaguccaacggaa

SEQ ID NO: 2642472 - RNA, 19 nt, Artificial Sequence
  Description of Artificial Sequence: Synthetic oligonucleotide
uaauuacagggaacaucau

SEQ ID NO: 2642473 - RNA, 19 nt, Artificial Sequence
  Description of Artificial Sequence: Synthetic oligonucleotide
gacaggaugcuugugagau

SEQ ID NO: 2642474 - RNA, 19 nt, Artificial Sequence
  Description of Artificial Sequence: Synthetic oligonucleotide
aaggugacgcugaaugaaa

SEQ ID NO: 2642475 - RNA, 19 nt, Artificial Sequence
  Description of Artificial Sequence: Synthetic oligonucleotide
caucaguccaacggaaguc

SEQ ID NO: 2642476 - RNA, 19 nt, Artificial Sequence
  Description of Artificial Sequence: Synthetic oligonucleotide
cuccauaacagccuucucu

SEQ ID NO: 2642477 - RNA, 19 nt, Artificial Sequence
  Description of Artificial Sequence: Synthetic oligonucleotide
gaggccuauccacugguaa

SEQ ID NO: 2642478 - RNA, 19 nt, Artificial Sequence
  Description of Artificial Sequence: Synthetic oligonucleotide
gcagacgacacucuucuuc

SEQ ID NO: 2642479 - RNA, 19 nt, Artificial Sequence
  Description of Artificial Sequence: Synthetic oligonucleotide
uugcagugcgcugccauca

SEQ ID NO: 2642480 - RNA, 19 nt, Artificial Sequence
  Description of Artificial Sequence: Synthetic oligonucleotide
cauaacaauauacgucaua

SEQ ID NO: 2642481 - RNA, 19 nt, Artificial Sequence
  Description of Artificial Sequence: Synthetic oligonucleotide
gacgcugaaugaaaccauc

SEQ ID NO: 2642482 - RNA, 19 nt, Artificial Sequence
  Description of Artificial Sequence: Synthetic oligonucleotide
ggauaguuggaaggugacg

SEQ ID NO: 2642483 - RNA, 19 nt, Artificial Sequence
  Description of Artificial Sequence: Synthetic oligonucleotide
gauaucuaaucaaggaguu

SEQ ID NO: 2642484 - RNA, 19 nt, Artificial Sequence
  Description of Artificial Sequence: Synthetic oligonucleotide
ugcagugcgcugccaucag

SEQ ID NO: 2642485 - RNA, 19 nt, Artificial Sequence
  Description of Artificial Sequence: Synthetic oligonucleotide
acgugguuucaucuuucca

SEQ ID NO: 2642486 - RNA, 19 nt, Artificial Sequence
  Description of Artificial Sequence: Synthetic oligonucleotide
aggccuauccacugguaau

SEQ ID NO: 2642487 - RNA, 19 nt, Artificial Sequence
  Description of Artificial Sequence: Synthetic oligonucleotide
cauuccuagacaccggaua

SEQ ID NO: 2642488 - RNA, 19 nt, Artificial Sequence
  Description of Artificial Sequence: Synthetic oligonucleotide
uguaggugagaugguaauu

SEQ ID NO: 2642489 - RNA, 19 nt, Artificial Sequence
  Description of Artificial Sequence: Synthetic oligonucleotide
cugucuggcugguuggguc

SEQ ID NO: 2642490 - RNA, 19 nt, Artificial Sequence
  Description of Artificial Sequence: Synthetic oligonucleotide
gaacaucauuccacuggcc

SEQ ID NO: 2642491 - RNA, 19 nt, Artificial Sequence
  Description of Artificial Sequence: Synthetic oligonucleotide
uuccaaaggucuuggcauu

SEQ ID NO: 2642492 - RNA, 19 nt, Artificial Sequence
  Description of Artificial Sequence: Synthetic oligonucleotide
ucaguccaacggaagucau

SEQ ID NO: 2642493 - RNA, 19 nt, Artificial Sequence
  Description of Artificial Sequence: Synthetic oligonucleotide
uguucccuucuugcaagug

SEQ ID NO: 2642494 - RNA, 19 nt, Artificial Sequence
  Description of Artificial Sequence: Synthetic oligonucleotide
uaggaguccuuauggggua

SEQ ID NO: 2642495 - RNA, 19 nt, Artificial Sequence
  Description of Artificial Sequence: Synthetic oligonucleotide
gucauagguuucaugggga

SEQ ID NO: 2642496 - RNA, 19 nt, Artificial Sequence
  Description of Artificial Sequence: Synthetic oligonucleotide
caguccaacggaagucaug

SEQ ID NO: 2642497 - RNA, 19 nt, Artificial Sequence
  Description of Artificial Sequence: Synthetic oligonucleotide
uucauggggagagcggaau

SEQ ID NO: 2642498 - RNA, 19 nt, Artificial Sequence
  Description of Artificial Sequence: Synthetic oligonucleotide
aggugagaugguaauuaca

SEQ ID NO: 2642499 - RNA, 19 nt, Artificial Sequence
  Description of Artificial Sequence: Synthetic oligonucleotide
ugucuccauaacagccuuc

SEQ ID NO: 2642500 - RNA, 19 nt, Artificial Sequence
  Description of Artificial Sequence: Synthetic oligonucleotide
ccaacggaagucauguuca

SEQ ID NO: 2642501 - RNA, 19 nt, Artificial Sequence
  Description of Artificial Sequence: Synthetic oligonucleotide
gacuccuuccuuccccauc

SEQ ID NO: 2642502 - RNA, 19 nt, Artificial Sequence
  Description of Artificial Sequence: Synthetic oligonucleotide
caugucuccauaacagccu

SEQ ID NO: 2642503 - RNA, 19 nt, Artificial Sequence
  Description of Artificial Sequence: Synthetic oligonucleotide
ggagagcggaauccauagg

SEQ ID NO: 2642504 - RNA, 19 nt, Artificial Sequence
  Description of Artificial Sequence: Synthetic oligonucleotide
gaugggcacccugcagacg

SEQ ID NO: 2642505 - RNA, 19 nt, Artificial Sequence
  Description of Artificial Sequence: Synthetic oligonucleotide
agcggaauccauagguccu

SEQ ID NO: 2642506 - RNA, 19 nt, Artificial Sequence
  Description of Artificial Sequence: Synthetic oligonucleotide
uuccuagacaccggauagu

SEQ ID NO: 2642507 - RNA, 19 nt, Artificial Sequence
  Description of Artificial Sequence: Synthetic oligonucleotide
ugguaauuacagggaacau

SEQ ID NO: 2642508 - RNA, 19 nt, Artificial Sequence
  Description of Artificial Sequence: Synthetic oligonucleotide
uccccaucaugucuccaua

SEQ ID NO: 2642509 - RNA, 19 nt, Artificial Sequence
  Description of Artificial Sequence: Synthetic oligonucleotide
gccgcaagcaacuguuccc

SEQ ID NO: 2642510 - RNA, 19 nt, Artificial Sequence
  Description of Artificial Sequence: Synthetic oligonucleotide
agacgacacucuucuucug

SEQ ID NO: 2642511 - RNA, 19 nt, Artificial Sequence
  Description of Artificial Sequence: Synthetic oligonucleotide
guucccuucuugcaagugu

SEQ ID NO: 2642512 - RNA, 19 nt, Artificial Sequence
  Description of Artificial Sequence: Synthetic oligonucleotide
acuggccguucucaugcca

SEQ ID NO: 2642513 - RNA, 19 nt, Artificial Sequence
  Description of Artificial Sequence: Synthetic oligonucleotide
acgcugaaugaaaccaucu

SEQ ID NO: 2642514 - RNA, 19 nt, Artificial Sequence
  Description of Artificial Sequence: Synthetic oligonucleotide
cuugucauugaggccuauc

SEQ ID NO: 2642515 - RNA, 19 nt, Artificial Sequence
  Description of Artificial Sequence: Synthetic oligonucleotide
cugguugggucuccaguuc

SEQ ID NO: 2642516 - RNA, 19 nt, Artificial Sequence
  Description of Artificial Sequence: Synthetic oligonucleotide
ggucagugaugugaaacac

SEQ ID NO: 2642517 - RNA, 19 nt, Artificial Sequence
  Description of Artificial Sequence: Synthetic oligonucleotide
gucuucuccggcagagaag

SEQ ID NO: 2642518 - RNA, 19 nt, Artificial Sequence
  Description of Artificial Sequence: Synthetic oligonucleotide
ccuuaugggguaucuaaca

SEQ ID NO: 2642519 - RNA, 19 nt, Artificial Sequence
  Description of Artificial Sequence: Synthetic oligonucleotide
acacaucgccauccagaug

SEQ ID NO: 2642520 - RNA, 19 nt, Artificial Sequence
  Description of Artificial Sequence: Synthetic oligonucleotide
ugaggccuauccacuggua

SEQ ID NO: 2642521 - RNA, 19 nt, Artificial Sequence
  Description of Artificial Sequence: Synthetic oligonucleotide
cagacgacacucuucuucu

SEQ ID NO: 2642522 - RNA, 19 nt, Artificial Sequence
  Description of Artificial Sequence: Synthetic oligonucleotide
augguccacauaacaauau

SEQ ID NO: 2642523 - RNA, 19 nt, Artificial Sequence
  Description of Artificial Sequence: Synthetic oligonucleotide
uagguuucauggggagagc

SEQ ID NO: 2642524 - RNA, 19 nt, Artificial Sequence
  Description of Artificial Sequence: Synthetic oligonucleotide
cagccauccugcaaucaca

SEQ ID NO: 2642525 - RNA, 19 nt, Artificial Sequence
  Description of Artificial Sequence: Synthetic oligonucleotide
cagugaugugaaacacauc

SEQ ID NO: 2642526 - RNA, 19 nt, Artificial Sequence
  Description of Artificial Sequence: Synthetic oligonucleotide
cuuugcagugauaucuaau

SEQ ID NO: 2642527 - RNA, 19 nt, Artificial Sequence
  Description of Artificial Sequence: Synthetic oligonucleotide
cauagguuucauggggaga

SEQ ID NO: 2642528 - RNA, 19 nt, Artificial Sequence
  Description of Artificial Sequence: Synthetic oligonucleotide
gcugaaugaaaccaucuuu

SEQ ID NO: 2642529 - RNA, 19 nt, Artificial Sequence
  Description of Artificial Sequence: Synthetic oligonucleotide
auggggagagcggaaucca

SEQ ID NO: 2642530 - RNA, 19 nt, Artificial Sequence
  Description of Artificial Sequence: Synthetic oligonucleotide
uccaaaggucuuggcauuu

SEQ ID NO: 2642531 - RNA, 19 nt, Artificial Sequence
  Description of Artificial Sequence: Synthetic oligonucleotide
cgugguuucaucuuuccaa

SEQ ID NO: 2642532 - RNA, 19 nt, Artificial Sequence
  Description of Artificial Sequence: Synthetic oligonucleotide
gggguaucuaacaguuuug

SEQ ID NO: 2642533 - RNA, 19 nt, Artificial Sequence
  Description of Artificial Sequence: Synthetic oligonucleotide
cauaacgugguuucaucuu

SEQ ID NO: 2642534 - RNA, 19 nt, Artificial Sequence
  Description of Artificial Sequence: Synthetic oligonucleotide
gugcgcugccaucagucca

SEQ ID NO: 2642535 - RNA, 19 nt, Artificial Sequence
  Description of Artificial Sequence: Synthetic oligonucleotide
cuugcaaguguaggugaga

SEQ ID NO: 2642536 - RNA, 19 nt, Artificial Sequence
  Description of Artificial Sequence: Synthetic oligonucleotide
ccauaacagccuucucuag

SEQ ID NO: 2642537 - RNA, 19 nt, Artificial Sequence
  Description of Artificial Sequence: Synthetic oligonucleotide
cccaucaugucuccauaac

SEQ ID NO: 2642538 - RNA, 19 nt, Artificial Sequence
  Description of Artificial Sequence: Synthetic oligonucleotide
uggccguucucaugccaaa

SEQ ID NO: 2642539 - RNA, 19 nt, Artificial Sequence
  Description of Artificial Sequence: Synthetic oligonucleotide
cuggccguucucaugccaa

SEQ ID NO: 2642540 - RNA, 19 nt, Artificial Sequence
  Description of Artificial Sequence: Synthetic oligonucleotide
uggccgcaagcaacuguuc

SEQ ID NO: 2642541 - RNA, 19 nt, Artificial Sequence
  Description of Artificial Sequence: Synthetic oligonucleotide
ccuagacaccggauaguug

SEQ ID NO: 2642542 - RNA, 19 nt, Artificial Sequence
  Description of Artificial Sequence: Synthetic oligonucleotide
ccggauaguuggaagguga

SEQ ID NO: 2642543 - RNA, 19 nt, Artificial Sequence
  Description of Artificial Sequence: Synthetic oligonucleotide
cacuggccguucucaugcc

SEQ ID NO: 2642544 - RNA, 19 nt, Artificial Sequence
  Description of Artificial Sequence: Synthetic oligonucleotide
gacccacacgauucacaaa

SEQ ID NO: 2642545 - RNA, 19 nt, Artificial Sequence
  Description of Artificial Sequence: Synthetic oligonucleotide
ggccuauccacugguaauc

SEQ ID NO: 2642546 - RNA, 19 nt, Artificial Sequence
  Description of Artificial Sequence: Synthetic oligonucleotide
gguaucuaacaguuuugau

SEQ ID NO: 2642547 - RNA, 19 nt, Artificial Sequence
  Description of Artificial Sequence: Synthetic oligonucleotide
gccaucaguccaacggaag

SEQ ID NO: 2642548 - RNA, 19 nt, Artificial Sequence
  Description of Artificial Sequence: Synthetic oligonucleotide
cacugguaaucaugaccca

SEQ ID NO: 2642549 - RNA, 19 nt, Artificial Sequence
  Description of Artificial Sequence: Synthetic oligonucleotide
uggggucagugaugugaaa

SEQ ID NO: 2642550 - RNA, 19 nt, Artificial Sequence
  Description of Artificial Sequence: Synthetic oligonucleotide
cagccuucucuaggagucc

SEQ ID NO: 2642551 - RNA, 19 nt, Artificial Sequence
  Description of Artificial Sequence: Synthetic oligonucleotide
caacggaagucauguucaa

SEQ ID NO: 2642552 - RNA, 19 nt, Artificial Sequence
  Description of Artificial Sequence: Synthetic oligonucleotide
ugggcacccugcagacgac

SEQ ID NO: 2642553 - RNA, 19 nt, Artificial Sequence
  Description of Artificial Sequence: Synthetic oligonucleotide
auauugcagugcgcugcca

SEQ ID NO: 2642554 - RNA, 19 nt, Artificial Sequence
  Description of Artificial Sequence: Synthetic oligonucleotide
ccuucuugcaaguguaggu

SEQ ID NO: 2642555 - RNA, 19 nt, Artificial Sequence
  Description of Artificial Sequence: Synthetic oligonucleotide
ugcagacgacacucuucuu

SEQ ID NO: 2642556 - RNA, 19 nt, Artificial Sequence
  Description of Artificial Sequence: Synthetic oligonucleotide
cggauaguuggaaggugac

SEQ ID NO: 2642557 - RNA, 19 nt, Artificial Sequence
  Description of Artificial Sequence: Synthetic oligonucleotide
cugcaaucacacugcucaa

SEQ ID NO: 2642558 - RNA, 19 nt, Artificial Sequence
  Description of Artificial Sequence: Synthetic oligonucleotide
cuggccgcaagcaacuguu

SEQ ID NO: 2642559 - RNA, 19 nt, Artificial Sequence
  Description of Artificial Sequence: Synthetic oligonucleotide
caaguguaggugagauggu

SEQ ID NO: 2642560 - RNA, 19 nt, Artificial Sequence
  Description of Artificial Sequence: Synthetic oligonucleotide
gaacuuauuuggggucagu

SEQ ID NO: 2642561 - RNA, 19 nt, Artificial Sequence
  Description of Artificial Sequence: Synthetic oligonucleotide
gcggaauccauagguccug

SEQ ID NO: 2642562 - RNA, 19 nt, Artificial Sequence
  Description of Artificial Sequence: Synthetic oligonucleotide
caucgccauccagaugguc

SEQ ID NO: 2642563 - RNA, 19 nt, Artificial Sequence
  Description of Artificial Sequence: Synthetic oligonucleotide
cauccagaugguccacaua

SEQ ID NO: 2642564 - RNA, 19 nt, Artificial Sequence
  Description of Artificial Sequence: Synthetic oligonucleotide
cccauuccuagacaccgga

SEQ ID NO: 2642565 - RNA, 19 nt, Artificial Sequence
  Description of Artificial Sequence: Synthetic oligonucleotide
ccggcagagaagaagcugu

SEQ ID NO: 2642566 - RNA, 19 nt, Artificial Sequence
  Description of Artificial Sequence: Synthetic oligonucleotide
gcugguugggucuccaguu

SEQ ID NO: 2642567 - RNA, 19 nt, Artificial Sequence
  Description of Artificial Sequence: Synthetic oligonucleotide
cgauucacaaauauuuguu

SEQ ID NO: 2642568 - RNA, 19 nt, Artificial Sequence
  Description of Artificial Sequence: Synthetic oligonucleotide
ggcugguugggucuccagu

SEQ ID NO: 2642569 - RNA, 19 nt, Artificial Sequence
  Description of Artificial Sequence: Synthetic oligonucleotide
gccuauccacugguaauca

SEQ ID NO: 2642570 - RNA, 19 nt, Artificial Sequence
  Description of Artificial Sequence: Synthetic oligonucleotide
acaucgccauccagauggu

SEQ ID NO: 2642571 - RNA, 19 nt, Artificial Sequence
  Description of Artificial Sequence: Synthetic oligonucleotide
caccggauaguuggaaggu

SEQ ID NO: 2642572 - RNA, 19 nt, Artificial Sequence
  Description of Artificial Sequence: Synthetic oligonucleotide
ccaucaguccaacggaagu

SEQ ID NO: 2642573 - RNA, 19 nt, Artificial Sequence
  Description of Artificial Sequence: Synthetic oligonucleotide
agaagcugucuggcugguu

SEQ ID NO: 2642574 - RNA, 19 nt, Artificial Sequence
  Description of Artificial Sequence: Synthetic oligonucleotide
cuucuccggcagagaagaa

SEQ ID NO: 2642575 - RNA, 19 nt, Artificial Sequence
  Description of Artificial Sequence: Synthetic oligonucleotide
ggaguccuuaugggguauc

SEQ ID NO: 2642576 - RNA, 19 nt, Artificial Sequence
  Description of Artificial Sequence: Synthetic oligonucleotide
ggcagagaagaagcugucu

SEQ ID NO: 2642577 - RNA, 19 nt, Artificial Sequence
  Description of Artificial Sequence: Synthetic oligonucleotide
ccacacgauucacaaauau

SEQ ID NO: 2642578 - RNA, 19 nt, Artificial Sequence
  Description of Artificial Sequence: Synthetic oligonucleotide
ggggagagcggaauccaua

SEQ ID NO: 2642579 - RNA, 19 nt, Artificial Sequence
  Description of Artificial Sequence: Synthetic oligonucleotide
ccccaucaugucuccauaa

SEQ ID NO: 2642580 - RNA, 19 nt, Artificial Sequence
  Description of Artificial Sequence: Synthetic oligonucleotide
cuugugagaugggcacccu

SEQ ID NO: 2642581 - RNA, 19 nt, Artificial Sequence
  Description of Artificial Sequence: Synthetic oligonucleotide
cgugagacaggaugcuugu

SEQ ID NO: 2642582 - RNA, 19 nt, Artificial Sequence
  Description of Artificial Sequence: Synthetic oligonucleotide
guccaacggaagucauguu

SEQ ID NO: 2642583 - RNA, 19 nt, Artificial Sequence
  Description of Artificial Sequence: Synthetic oligonucleotide
cccacacgauucacaaaua

SEQ ID NO: 2642584 - RNA, 19 nt, Artificial Sequence
  Description of Artificial Sequence: Synthetic oligonucleotide
cguucucaugccaaaugau

SEQ ID NO: 2642585 - RNA, 19 nt, Artificial Sequence
  Description of Artificial Sequence: Synthetic oligonucleotide
gggcacccugcagacgaca

SEQ ID NO: 2642586 - RNA, 19 nt, Artificial Sequence
  Description of Artificial Sequence: Synthetic oligonucleotide
gcagugcgcugccaucagu

SEQ ID NO: 2642587 - RNA, 19 nt, Artificial Sequence
  Description of Artificial Sequence: Synthetic oligonucleotide
ccauccagaugguccacau

SEQ ID NO: 2642588 - RNA, 19 nt, Artificial Sequence
  Description of Artificial Sequence: Synthetic oligonucleotide
ccauuccuagacaccggau

SEQ ID NO: 2642589 - RNA, 19 nt, Artificial Sequence
  Description of Artificial Sequence: Synthetic oligonucleotide
ccgcaagcaacuguucccu

SEQ ID NO: 2642590 - RNA, 19 nt, Artificial Sequence
  Description of Artificial Sequence: Synthetic oligonucleotide
guuccucgugagacaggau

SEQ ID NO: 2642591 - RNA, 19 nt, Artificial Sequence
  Description of Artificial Sequence: Synthetic oligonucleotide
cgcugaaugaaaccaucuu

SEQ ID NO: 2642592 - RNA, 19 nt, Artificial Sequence
  Description of Artificial Sequence: Synthetic oligonucleotide
ccucaaaggugaacuuauu

SEQ ID NO: 2642593 - RNA, 19 nt, Artificial Sequence
  Description of Artificial Sequence: Synthetic oligonucleotide
ggccguucucaugccaaau

SEQ ID NO: 2642594 - RNA, 19 nt, Artificial Sequence
  Description of Artificial Sequence: Synthetic oligonucleotide
cgacacucuucuucugccu

SEQ ID NO: 2642595 - RNA, 19 nt, Artificial Sequence
  Description of Artificial Sequence: Synthetic oligonucleotide
ccucgugagacaggaugcu

SEQ ID NO: 2642596 - RNA, 19 nt, Artificial Sequence
  Description of Artificial Sequence: Synthetic oligonucleotide
cgcaagcaacuguucccuu

SEQ ID NO: 2642597 - RNA, 19 nt, Artificial Sequence
  Description of Artificial Sequence: Synthetic oligonucleotide
acaggugucucauagauac

SEQ ID NO: 2642598 - RNA, 19 nt, Artificial Sequence
  Description of Artificial Sequence: Synthetic oligonucleotide
guugauuacuccuugauag

SEQ ID NO: 2642599 - RNA, 19 nt, Artificial Sequence
  Description of Artificial Sequence: Synthetic oligonucleotide
caugaaagcaucaacauug

SEQ ID NO: 2642600 - RNA, 19 nt, Artificial Sequence
  Description of Artificial Sequence: Synthetic oligonucleotide
ugaaaaguggaacaggugu

SEQ ID NO: 2642601 - RNA, 19 nt, Artificial Sequence
  Description of Artificial Sequence: Synthetic oligonucleotide
aaaguuagcgcacacgaug

SEQ ID NO: 2642602 - RNA, 19 nt, Artificial Sequence
  Description of Artificial Sequence: Synthetic oligonucleotide
aacauugucaauucguccu

SEQ ID NO: 2642603 - RNA, 19 nt, Artificial Sequence
  Description of Artificial Sequence: Synthetic oligonucleotide
ugggauauggacauaucgg

SEQ ID NO: 2642604 - RNA, 19 nt, Artificial Sequence
  Description of Artificial Sequence: Synthetic oligonucleotide
ucucauagauaccagguca

SEQ ID NO: 2642605 - RNA, 19 nt, Artificial Sequence
  Description of Artificial Sequence: Synthetic oligonucleotide
gauaccaggucacugguag

SEQ ID NO: 2642606 - RNA, 19 nt, Artificial Sequence
  Description of Artificial Sequence: Synthetic oligonucleotide
gacauaucggacauuacgg

SEQ ID NO: 2642607 - RNA, 19 nt, Artificial Sequence
  Description of Artificial Sequence: Synthetic oligonucleotide
cauuguuccacauuggcug

SEQ ID NO: 2642608 - RNA, 19 nt, Artificial Sequence
  Description of Artificial Sequence: Synthetic oligonucleotide
uggagggaaacucucgucg

SEQ ID NO: 2642609 - RNA, 19 nt, Artificial Sequence
  Description of Artificial Sequence: Synthetic oligonucleotide
acauaucggacauuacggc

SEQ ID NO: 2642610 - RNA, 19 nt, Artificial Sequence
  Description of Artificial Sequence: Synthetic oligonucleotide
cucucgucgaccuugaccc

SEQ ID NO: 2642611 - RNA, 19 nt, Artificial Sequence
  Description of Artificial Sequence: Synthetic oligonucleotide
aaaagagggauugucaccu

SEQ ID NO: 2642612 - RNA, 19 nt, Artificial Sequence
  Description of Artificial Sequence: Synthetic oligonucleotide
auuacggccugucacaaag

SEQ ID NO: 2642613 - RNA, 19 nt, Artificial Sequence
  Description of Artificial Sequence: Synthetic oligonucleotide
uggaacaggugucucauag

SEQ ID NO: 2642614 - RNA, 19 nt, Artificial Sequence
  Description of Artificial Sequence: Synthetic oligonucleotide
ugucaauucguccucgagc

SEQ ID NO: 2642615 - RNA, 19 nt, Artificial Sequence
  Description of Artificial Sequence: Synthetic oligonucleotide
ucgaaguucaaugaggaca

SEQ ID NO: 2642616 - RNA, 19 nt, Artificial Sequence
  Description of Artificial Sequence: Synthetic oligonucleotide
uacuccuugauagacgugg

SEQ ID NO: 2642617 - RNA, 19 nt, Artificial Sequence
  Description of Artificial Sequence: Synthetic oligonucleotide
ugcucgaaguucaaugagg

SEQ ID NO: 2642618 - RNA, 19 nt, Artificial Sequence
  Description of Artificial Sequence: Synthetic oligonucleotide
uggcucagaacacuggagg

SEQ ID NO: 2642619 - RNA, 19 nt, Artificial Sequence
  Description of Artificial Sequence: Synthetic oligonucleotide
agggaguuggcucagaaca

SEQ ID NO: 2642620 - RNA, 19 nt, Artificial Sequence
  Description of Artificial Sequence: Synthetic oligonucleotide
uuuuggagggaaacucucg

SEQ ID NO: 2642621 - RNA, 19 nt, Artificial Sequence
  Description of Artificial Sequence: Synthetic oligonucleotide
aaguucaaugaggacacgg

SEQ ID NO: 2642622 - RNA, 19 nt, Artificial Sequence
  Description of Artificial Sequence: Synthetic oligonucleotide
aacuugauguccccagcgg

SEQ ID NO: 2642623 - RNA, 19 nt, Artificial Sequence
  Description of Artificial Sequence: Synthetic oligonucleotide
aagagggauugucaccuac

SEQ ID NO: 2642624 - RNA, 19 nt, Artificial Sequence
  Description of Artificial Sequence: Synthetic oligonucleotide
agacagaaggaauucuggg

SEQ ID NO: 2642625 - RNA, 19 nt, Artificial Sequence
  Description of Artificial Sequence: Synthetic oligonucleotide
gucaauucguccucgagcc

SEQ ID NO: 2642626 - RNA, 19 nt, Artificial Sequence
  Description of Artificial Sequence: Synthetic oligonucleotide
gauauggacauaucggaca

SEQ ID NO: 2642627 - RNA, 19 nt, Artificial Sequence
  Description of Artificial Sequence: Synthetic oligonucleotide
guauaggugacauuggcca

SEQ ID NO: 2642628 - RNA, 19 nt, Artificial Sequence
  Description of Artificial Sequence: Synthetic oligonucleotide
uggucaauccauaaaugga

SEQ ID NO: 2642629 - RNA, 19 nt, Artificial Sequence
  Description of Artificial Sequence: Synthetic oligonucleotide
cugggauauggacauaucg

SEQ ID NO: 2642630 - RNA, 19 nt, Artificial Sequence
  Description of Artificial Sequence: Synthetic oligonucleotide
ugucucauagauaccaggu

SEQ ID NO: 2642631 - RNA, 19 nt, Artificial Sequence
  Description of Artificial Sequence: Synthetic oligonucleotide
ucgaccuugacccuugcca

SEQ ID NO: 2642632 - RNA, 19 nt, Artificial Sequence
  Description of Artificial Sequence: Synthetic oligonucleotide
gaugguucgcuccuucacg

SEQ ID NO: 2642633 - RNA, 19 nt, Artificial Sequence
  Description of Artificial Sequence: Synthetic oligonucleotide
ucaacauugucaauucguc

SEQ ID NO: 2642634 - RNA, 19 nt, Artificial Sequence
  Description of Artificial Sequence: Synthetic oligonucleotide
auaaauggagauuccagau

SEQ ID NO: 2642635 - RNA, 19 nt, Artificial Sequence
  Description of Artificial Sequence: Synthetic oligonucleotide
ggacauaucggacauuacg

SEQ ID NO: 2642636 - RNA, 19 nt, Artificial Sequence
  Description of Artificial Sequence: Synthetic oligonucleotide
acgauggaugaucugcagc

SEQ ID NO: 2642637 - RNA, 19 nt, Artificial Sequence
  Description of Artificial Sequence: Synthetic oligonucleotide
ucgccauuguuccacauug

SEQ ID NO: 2642638 - RNA, 19 nt, Artificial Sequence
  Description of Artificial Sequence: Synthetic oligonucleotide
aggaugaccagacuguucu

SEQ ID NO: 2642639 - RNA, 19 nt, Artificial Sequence
  Description of Artificial Sequence: Synthetic oligonucleotide
cauaucggacauuacggcc

SEQ ID NO: 2642640 - RNA, 19 nt, Artificial Sequence
  Description of Artificial Sequence: Synthetic oligonucleotide
aaguuagcgcacacgaugg

SEQ ID NO: 2642641 - RNA, 19 nt, Artificial Sequence
  Description of Artificial Sequence: Synthetic oligonucleotide
auccagcucaacuugaugu

SEQ ID NO: 2642642 - RNA, 19 nt, Artificial Sequence
  Description of Artificial Sequence: Synthetic oligonucleotide
  modified_base (3)..(3): a, c, u, g, unknown or other
uunuuuguuguguguauuc

SEQ ID NO: 2642643 - RNA, 19 nt, Artificial Sequence
  Description of Artificial Sequence: Synthetic oligonucleotide
aguucaaugaggacacggc

SEQ ID NO: 2642644 - RNA, 19 nt, Artificial Sequence
  Description of Artificial Sequence: Synthetic oligonucleotide
ugauagacguggucaaucc

SEQ ID NO: 2642645 - RNA, 19 nt, Artificial Sequence
  Description of Artificial Sequence: Synthetic oligonucleotide
gaccagacuguucucagag

SEQ ID NO: 2642646 - RNA, 19 nt, Artificial Sequence
  Description of Artificial Sequence: Synthetic oligonucleotide
gucgguauaggugacauug

SEQ ID NO: 2642647 - RNA, 19 nt, Artificial Sequence
  Description of Artificial Sequence: Synthetic oligonucleotide
  modified_base (2)..(2): a, c, u, g, unknown or other
unuuuguuguguguauucc

SEQ ID NO: 2642648 - RNA, 19 nt, Artificial Sequence
  Description of Artificial Sequence: Synthetic oligonucleotide
gauuacuccuugauagacg

SEQ ID NO: 2642649 - RNA, 19 nt, Artificial Sequence
  Description of Artificial Sequence: Synthetic oligonucleotide
auuggcuggcugcucacgc

SEQ ID NO: 2642650 - RNA, 19 nt, Artificial Sequence
  Description of Artificial Sequence: Synthetic oligonucleotide
uuagcgcacacgauggaug

SEQ ID NO: 2642651 - RNA, 19 nt, Artificial Sequence
  Description of Artificial Sequence: Synthetic oligonucleotide
gagccgaacucucaucucg

SEQ ID NO: 2642652 - RNA, 19 nt, Artificial Sequence
  Description of Artificial Sequence: Synthetic oligonucleotide
ucaaugaggacacggcuuc

SEQ ID NO: 2642653 - RNA, 19 nt, Artificial Sequence
  Description of Artificial Sequence: Synthetic oligonucleotide
ugaggacacggcuucacag

SEQ ID NO: 2642654 - RNA, 19 nt, Artificial Sequence
  Description of Artificial Sequence: Synthetic oligonucleotide
ucaucucgaagguccaccg

SEQ ID NO: 2642655 - RNA, 19 nt, Artificial Sequence
  Description of Artificial Sequence: Synthetic oligonucleotide
gauagcagggaguuggcuc

SEQ ID NO: 2642656 - RNA, 19 nt, Artificial Sequence
  Description of Artificial Sequence: Synthetic oligonucleotide
uccuugauagacgugguca

SEQ ID NO: 2642657 - RNA, 19 nt, Artificial Sequence
  Description of Artificial Sequence: Synthetic oligonucleotide
acaaagaggucauccagcu

SEQ ID NO: 2642658 - RNA, 19 nt, Artificial Sequence
  Description of Artificial Sequence: Synthetic oligonucleotide
aaaaguggaacaggugucu

SEQ ID NO: 2642659 - RNA, 19 nt, Artificial Sequence
  Description of Artificial Sequence: Synthetic oligonucleotide
agucggauguucaugaaag

SEQ ID NO: 2642660 - RNA, 19 nt, Artificial Sequence
  Description of Artificial Sequence: Synthetic oligonucleotide
aaugaggacacggcuucac

SEQ ID NO: 2642661 - RNA, 19 nt, Artificial Sequence
  Description of Artificial Sequence: Synthetic oligonucleotide
uggugcucgaaguucaaug

SEQ ID NO: 2642662 - RNA, 19 nt, Artificial Sequence
  Description of Artificial Sequence: Synthetic oligonucleotide
agaugguucgcuccuucac

SEQ ID NO: 2642663 - RNA, 19 nt, Artificial Sequence
  Description of Artificial Sequence: Synthetic oligonucleotide
gaugaucugcagcugcugc

SEQ ID NO: 2642664 - RNA, 19 nt, Artificial Sequence
  Description of Artificial Sequence: Synthetic oligonucleotide
ugucugaaaaguggaacag

SEQ ID NO: 2642665 - RNA, 19 nt, Artificial Sequence
  Description of Artificial Sequence: Synthetic oligonucleotide
  modified_base (5)..(5): a, c, u, g, unknown or other
uuuunuuuguuguguguau

SEQ ID NO: 2642666 - RNA, 19 nt, Artificial Sequence
  Description of Artificial Sequence: Synthetic oligonucleotide
gguuaucuggcccuggagg

SEQ ID NO: 2642667 - RNA, 19 nt, Artificial Sequence
  Description of Artificial Sequence: Synthetic oligonucleotide
caacauugucaauucgucc

SEQ ID NO: 2642668 - RNA, 19 nt, Artificial Sequence
  Description of Artificial Sequence: Synthetic oligonucleotide
uaaauggagauuccagaua

SEQ ID NO: 2642669 - RNA, 19 nt, Artificial Sequence
  Description of Artificial Sequence: Synthetic oligonucleotide
uauaggugacauuggccag

SEQ ID NO: 2642670 - RNA, 19 nt, Artificial Sequence
  Description of Artificial Sequence: Synthetic oligonucleotide
agggauugucaccuacccc

SEQ ID NO: 2642671 - RNA, 19 nt, Artificial Sequence
  Description of Artificial Sequence: Synthetic oligonucleotide
augguucgcuccuucacgg

SEQ ID NO: 2642672 - RNA, 19 nt, Artificial Sequence
  Description of Artificial Sequence: Synthetic oligonucleotide
uguuguguguauuccucgc

SEQ ID NO: 2642673 - RNA, 19 nt, Artificial Sequence
  Description of Artificial Sequence: Synthetic oligonucleotide
cacacgauggaugaucugc

SEQ ID NO: 2642674 - RNA, 19 nt, Artificial Sequence
  Description of Artificial Sequence: Synthetic oligonucleotide
ucgguauaggugacauugg

SEQ ID NO: 2642675 - RNA, 19 nt, Artificial Sequence
  Description of Artificial Sequence: Synthetic oligonucleotide
ugauuacuccuugauagac

SEQ ID NO: 2642676 - RNA, 19 nt, Artificial Sequence
  Description of Artificial Sequence: Synthetic oligonucleotide
ucgagccgaacucucaucu

SEQ ID NO: 2642677 - RNA, 19 nt, Artificial Sequence
  Description of Artificial Sequence: Synthetic oligonucleotide
ucaauccauaaauggagau

SEQ ID NO: 2642678 - RNA, 19 nt, Artificial Sequence
  Description of Artificial Sequence: Synthetic oligonucleotide
ucaacuugauguccccagc

SEQ ID NO: 2642679 - RNA, 19 nt, Artificial Sequence
  Description of Artificial Sequence: Synthetic oligonucleotide
gagggauugucaccuaccc

SEQ ID NO: 2642680 - RNA, 19 nt, Artificial Sequence
  Description of Artificial Sequence: Synthetic oligonucleotide
caacuugauguccccagcg

SEQ ID NO: 2642681 - RNA, 19 nt, Artificial Sequence
  Description of Artificial Sequence: Synthetic oligonucleotide
uugauuacuccuugauaga

SEQ ID NO: 2642682 - RNA, 19 nt, Artificial Sequence
  Description of Artificial Sequence: Synthetic oligonucleotide
cacggaguggcucagucgc

SEQ ID NO: 2642683 - RNA, 19 nt, Artificial Sequence
  Description of Artificial Sequence: Synthetic oligonucleotide
cacgucaucugggauaugg

SEQ ID NO: 2642684 - RNA, 19 nt, Artificial Sequence
  Description of Artificial Sequence: Synthetic oligonucleotide
ggucaauccauaaauggag

SEQ ID NO: 2642685 - RNA, 19 nt, Artificial Sequence
  Description of Artificial Sequence: Synthetic oligonucleotide
cucauagauaccaggucac

SEQ ID NO: 2642686 - RNA, 19 nt, Artificial Sequence
  Description of Artificial Sequence: Synthetic oligonucleotide
uucaaugaggacacggcuu

SEQ ID NO: 2642687 - RNA, 19 nt, Artificial Sequence
  Description of Artificial Sequence: Synthetic oligonucleotide
acguggucaauccauaaau

SEQ ID NO: 2642688 - RNA, 19 nt, Artificial Sequence
  Description of Artificial Sequence: Synthetic oligonucleotide
agaaggaauucuggguccc

SEQ ID NO: 2642689 - RNA, 19 nt, Artificial Sequence
  Description of Artificial Sequence: Synthetic oligonucleotide
aucaacauugucaauucgu

SEQ ID NO: 2642690 - RNA, 19 nt, Artificial Sequence
  Description of Artificial Sequence: Synthetic oligonucleotide
gacauuacggccugucaca

SEQ ID NO: 2642691 - RNA, 19 nt, Artificial Sequence
  Description of Artificial Sequence: Synthetic oligonucleotide
guguauuccucgcuggcag

SEQ ID NO: 2642692 - RNA, 19 nt, Artificial Sequence
  Description of Artificial Sequence: Synthetic oligonucleotide
auauggacauaucggacau

SEQ ID NO: 2642693 - RNA, 19 nt, Artificial Sequence
  Description of Artificial Sequence: Synthetic oligonucleotide
agcucaacuugaugucccc

SEQ ID NO: 2642694 - RNA, 19 nt, Artificial Sequence
  Description of Artificial Sequence: Synthetic oligonucleotide
agggaaacucucgucgacc

SEQ ID NO: 2642695 - RNA, 19 nt, Artificial Sequence
  Description of Artificial Sequence: Synthetic oligonucleotide
uugauguccccagcggucg

SEQ ID NO: 2642696 - RNA, 19 nt, Artificial Sequence
  Description of Artificial Sequence: Synthetic oligonucleotide
agagggauugucaccuacc

SEQ ID NO: 2642697 - RNA, 19 nt, Artificial Sequence
  Description of Artificial Sequence: Synthetic oligonucleotide
cgaacucucaucucgaagg

SEQ ID NO: 2642698 - RNA, 19 nt, Artificial Sequence
  Description of Artificial Sequence: Synthetic oligonucleotide
uagauaccaggucacuggu

SEQ ID NO: 2642699 - RNA, 19 nt, Artificial Sequence
  Description of Artificial Sequence: Synthetic oligonucleotide
gugucugaaaaguggaaca

SEQ ID NO: 2642700 - RNA, 19 nt, Artificial Sequence
  Description of Artificial Sequence: Synthetic oligonucleotide
gaaaaguggaacagguguc

SEQ ID NO: 2642701 - RNA, 19 nt, Artificial Sequence
  Description of Artificial Sequence: Synthetic oligonucleotide
cucagaacacuggaggacc

SEQ ID NO: 2642702 - RNA, 19 nt, Artificial Sequence
  Description of Artificial Sequence: Synthetic oligonucleotide
ugccaccaaaguuagcgca

SEQ ID NO: 2642703 - RNA, 19 nt, Artificial Sequence
  Description of Artificial Sequence: Synthetic oligonucleotide
gggauugucaccuacccca

SEQ ID NO: 2642704 - RNA, 19 nt, Artificial Sequence
  Description of Artificial Sequence: Synthetic oligonucleotide
ucaauucguccucgagccg

SEQ ID NO: 2642705 - RNA, 19 nt, Artificial Sequence
  Description of Artificial Sequence: Synthetic oligonucleotide
cacugguagggaaggauag

SEQ ID NO: 2642706 - RNA, 19 nt, Artificial Sequence
  Description of Artificial Sequence: Synthetic oligonucleotide
agggaaggauagcagggag

SEQ ID NO: 2642707 - RNA, 19 nt, Artificial Sequence
  Description of Artificial Sequence: Synthetic oligonucleotide
ucacggaguggcucagucg

SEQ ID NO: 2642708 - RNA, 19 nt, Artificial Sequence
  Description of Artificial Sequence: Synthetic oligonucleotide
uccagauacaaaugaucaa

SEQ ID NO: 2642709 - RNA, 19 nt, Artificial Sequence
  Description of Artificial Sequence: Synthetic oligonucleotide
aguugauuacuccuugaua

SEQ ID NO: 2642710 - RNA, 19 nt, Artificial Sequence
  Description of Artificial Sequence: Synthetic oligonucleotide
  modified_base (4)..(4): a, c, u, g, unknown or other
uuunuuuguuguguguauu

SEQ ID NO: 2642711 - RNA, 19 nt, Artificial Sequence
  Description of Artificial Sequence: Synthetic oligonucleotide
aaggaauucugggucccag

SEQ ID NO: 2642712 - RNA, 19 nt, Artificial Sequence
  Description of Artificial Sequence: Synthetic oligonucleotide
gucugaaaaguggaacagg

SEQ ID NO: 2642713 - RNA, 19 nt, Artificial Sequence
  Description of Artificial Sequence: Synthetic oligonucleotide
augaccagacuguucucag

SEQ ID NO: 2642714 - RNA, 19 nt, Artificial Sequence
  Description of Artificial Sequence: Synthetic oligonucleotide
aacucucaucucgaagguc

SEQ ID NO: 2642715 - RNA, 19 nt, Artificial Sequence
  Description of Artificial Sequence: Synthetic oligonucleotide
ugguuaucuggcccuggag

SEQ ID NO: 2642716 - RNA, 19 nt, Artificial Sequence
  Description of Artificial Sequence: Synthetic oligonucleotide
uugauagacguggucaauc

SEQ ID NO: 2642717 - RNA, 19 nt, Artificial Sequence
  Description of Artificial Sequence: Synthetic oligonucleotide
cauagauaccaggucacug

SEQ ID NO: 2642718 - RNA, 19 nt, Artificial Sequence
  Description of Artificial Sequence: Synthetic oligonucleotide
acugguagggaaggauagc

SEQ ID NO: 2642719 - RNA, 19 nt, Artificial Sequence
  Description of Artificial Sequence: Synthetic oligonucleotide
uugucaccuaccccaaggu

SEQ ID NO: 2642720 - RNA, 19 nt, Artificial Sequence
  Description of Artificial Sequence: Synthetic oligonucleotide
aggugucucauagauacca

SEQ ID NO: 2642721 - RNA, 19 nt, Artificial Sequence
  Description of Artificial Sequence: Synthetic oligonucleotide
ggagauuccagauacaaau

SEQ ID NO: 2642722 - RNA, 19 nt, Artificial Sequence
  Description of Artificial Sequence: Synthetic oligonucleotide
ucaccuaccccaaggucac

SEQ ID NO: 2642723 - RNA, 19 nt, Artificial Sequence
  Description of Artificial Sequence: Synthetic oligonucleotide
ugacccuugccaccaaagu

SEQ ID NO: 2642724 - RNA, 19 nt, Artificial Sequence
  Description of Artificial Sequence: Synthetic oligonucleotide
gacagaaggaauucugggu

SEQ ID NO: 2642725 - RNA, 19 nt, Artificial Sequence
  Description of Artificial Sequence: Synthetic oligonucleotide
auaucggacauuacggccu

SEQ ID NO: 2642726 - RNA, 19 nt, Artificial Sequence
  Description of Artificial Sequence: Synthetic oligonucleotide
cuugauguccccagcgguc

SEQ ID NO: 2642727 - RNA, 19 nt, Artificial Sequence
  Description of Artificial Sequence: Synthetic oligonucleotide
uguguauuccucgcuggca

SEQ ID NO: 2642728 - RNA, 19 nt, Artificial Sequence
  Description of Artificial Sequence: Synthetic oligonucleotide
uaucggacauuacggccug

SEQ ID NO: 2642729 - RNA, 19 nt, Artificial Sequence
  Description of Artificial Sequence: Synthetic oligonucleotide
auccauaaauggagauucc

SEQ ID NO: 2642730 - RNA, 19 nt, Artificial Sequence
  Description of Artificial Sequence: Synthetic oligonucleotide
gauagacguggucaaucca

SEQ ID NO: 2642731 - RNA, 19 nt, Artificial Sequence
  Description of Artificial Sequence: Synthetic oligonucleotide
ucagucgccauuguuccac

SEQ ID NO: 2642732 - RNA, 19 nt, Artificial Sequence
  Description of Artificial Sequence: Synthetic oligonucleotide
auaccaggucacugguagg

SEQ ID NO: 2642733 - RNA, 19 nt, Artificial Sequence
  Description of Artificial Sequence: Synthetic oligonucleotide
uuggcuggcugcucacgcg

SEQ ID NO: 2642734 - RNA, 19 nt, Artificial Sequence
  Description of Artificial Sequence: Synthetic oligonucleotide
uccagcucaacuugauguc

SEQ ID NO: 2642735 - RNA, 19 nt, Artificial Sequence
  Description of Artificial Sequence: Synthetic oligonucleotide
gacccugagguggugcucg

SEQ ID NO: 2642736 - RNA, 19 nt, Artificial Sequence
  Description of Artificial Sequence: Synthetic oligonucleotide
gaacaggugucucauagau

SEQ ID NO: 2642737 - RNA, 19 nt, Artificial Sequence
  Description of Artificial Sequence: Synthetic oligonucleotide
gucaccuaccccaagguca

SEQ ID NO: 2642738 - RNA, 19 nt, Artificial Sequence
  Description of Artificial Sequence: Synthetic oligonucleotide
uucguccucgagccgaacu

SEQ ID NO: 2642739 - RNA, 19 nt, Artificial Sequence
  Description of Artificial Sequence: Synthetic oligonucleotide
uucgcuccuucacggagug

SEQ ID NO: 2642740 - RNA, 19 nt, Artificial Sequence
  Description of Artificial Sequence: Synthetic oligonucleotide
cagaguugauuacuccuug

SEQ ID NO: 2642741 - RNA, 19 nt, Artificial Sequence
  Description of Artificial Sequence: Synthetic oligonucleotide
gugcucgaaguucaaugag

SEQ ID NO: 2642742 - RNA, 19 nt, Artificial Sequence
  Description of Artificial Sequence: Synthetic oligonucleotide
ugucaccuaccccaagguc

SEQ ID NO: 2642743 - RNA, 19 nt, Artificial Sequence
  Description of Artificial Sequence: Synthetic oligonucleotide
uucacgucaucugggauau

SEQ ID NO: 2642744 - RNA, 19 nt, Artificial Sequence
  Description of Artificial Sequence: Synthetic oligonucleotide
auggacauaucggacauua

SEQ ID NO: 2642745 - RNA, 19 nt, Artificial Sequence
  Description of Artificial Sequence: Synthetic oligonucleotide
gucucauagauaccagguc

SEQ ID NO: 2642746 - RNA, 19 nt, Artificial Sequence
  Description of Artificial Sequence: Synthetic oligonucleotide
gguauaggugacauuggcc

SEQ ID NO: 2642747 - RNA, 19 nt, Artificial Sequence
  Description of Artificial Sequence: Synthetic oligonucleotide
auugucaauucguccucga

SEQ ID NO: 2642748 - RNA, 19 nt, Artificial Sequence
  Description of Artificial Sequence: Synthetic oligonucleotide
auagacguggucaauccau

SEQ ID NO: 2642749 - RNA, 19 nt, Artificial Sequence
  Description of Artificial Sequence: Synthetic oligonucleotide
aacucucgucgaccuugac

SEQ ID NO: 2642750 - RNA, 19 nt, Artificial Sequence
  Description of Artificial Sequence: Synthetic oligonucleotide
ucguccucgagccgaacuc

SEQ ID NO: 2642751 - RNA, 19 nt, Artificial Sequence
  Description of Artificial Sequence: Synthetic oligonucleotide
ucugggauauggacauauc

SEQ ID NO: 2642752 - RNA, 19 nt, Artificial Sequence
  Description of Artificial Sequence: Synthetic oligonucleotide
aguggcucagucgccauug

SEQ ID NO: 2642753 - RNA, 19 nt, Artificial Sequence
  Description of Artificial Sequence: Synthetic oligonucleotide
ucauagauaccaggucacu

SEQ ID NO: 2642754 - RNA, 19 nt, Artificial Sequence
  Description of Artificial Sequence: Synthetic oligonucleotide
agagugugucugaaaagug

SEQ ID NO: 2642755 - RNA, 19 nt, Artificial Sequence
  Description of Artificial Sequence: Synthetic oligonucleotide
uuggagggaaacucucguc

SEQ ID NO: 2642756 - RNA, 19 nt, Artificial Sequence
  Description of Artificial Sequence: Synthetic oligonucleotide
uuacuccuugauagacgug

SEQ ID NO: 2642757 - RNA, 19 nt, Artificial Sequence
  Description of Artificial Sequence: Synthetic oligonucleotide
uuaucuggcccuggaggcc

SEQ ID NO: 2642758 - RNA, 19 nt, Artificial Sequence
  Description of Artificial Sequence: Synthetic oligonucleotide
cucgaaguucaaugaggac

SEQ ID NO: 2642759 - RNA, 19 nt, Artificial Sequence
  Description of Artificial Sequence: Synthetic oligonucleotide
guguguauuccucgcuggc

SEQ ID NO: 2642760 - RNA, 19 nt, Artificial Sequence
  Description of Artificial Sequence: Synthetic oligonucleotide
ugauguccccagcggucgg

SEQ ID NO: 2642761 - RNA, 19 nt, Artificial Sequence
  Description of Artificial Sequence: Synthetic oligonucleotide
gagggaaacucucgucgac

SEQ ID NO: 2642762 - RNA, 19 nt, Artificial Sequence
  Description of Artificial Sequence: Synthetic oligonucleotide
aauggagauuccagauaca

SEQ ID NO: 2642763 - RNA, 19 nt, Artificial Sequence
  Description of Artificial Sequence: Synthetic oligonucleotide
uagacguggucaauccaua

SEQ ID NO: 2642764 - RNA, 19 nt, Artificial Sequence
  Description of Artificial Sequence: Synthetic oligonucleotide
gacguggucaauccauaaa

SEQ ID NO: 2642765 - RNA, 19 nt, Artificial Sequence
  Description of Artificial Sequence: Synthetic oligonucleotide
gaguuggcucagaacacug

SEQ ID NO: 2642766 - RNA, 19 nt, Artificial Sequence
  Description of Artificial Sequence: Synthetic oligonucleotide
uggacauaucggacauuac

SEQ ID NO: 2642767 - RNA, 19 nt, Artificial Sequence
  Description of Artificial Sequence: Synthetic oligonucleotide
uuacggccugucacaaaga

SEQ ID NO: 2642768 - RNA, 19 nt, Artificial Sequence
  Description of Artificial Sequence: Synthetic oligonucleotide
ggcagugauguucacguca

SEQ ID NO: 2642769 - RNA, 19 nt, Artificial Sequence
  Description of Artificial Sequence: Synthetic oligonucleotide
ggugcucgaaguucaauga

SEQ ID NO: 2642770 - RNA, 19 nt, Artificial Sequence
  Description of Artificial Sequence: Synthetic oligonucleotide
cacgauggaugaucugcag

SEQ ID NO: 2642771 - RNA, 19 nt, Artificial Sequence
  Description of Artificial Sequence: Synthetic oligonucleotide
ccaaaguuagcgcacacga

SEQ ID NO: 2642772 - RNA, 19 nt, Artificial Sequence
  Description of Artificial Sequence: Synthetic oligonucleotide
aggaauucugggucccaga

SEQ ID NO: 2642773 - RNA, 19 nt, Artificial Sequence
  Description of Artificial Sequence: Synthetic oligonucleotide
augaggacacggcuucaca

SEQ ID NO: 2642774 - RNA, 19 nt, Artificial Sequence
  Description of Artificial Sequence: Synthetic oligonucleotide
auaggugacauuggccagu

SEQ ID NO: 2642775 - RNA, 19 nt, Artificial Sequence
  Description of Artificial Sequence: Synthetic oligonucleotide
aggauagcagggaguuggc

SEQ ID NO: 2642776 - RNA, 19 nt, Artificial Sequence
  Description of Artificial Sequence: Synthetic oligonucleotide
ucgucgaccuugacccuug

SEQ ID NO: 2642777 - RNA, 19 nt, Artificial Sequence
  Description of Artificial Sequence: Synthetic oligonucleotide
caccgugguuaucuggccc

SEQ ID NO: 2642778 - RNA, 19 nt, Artificial Sequence
  Description of Artificial Sequence: Synthetic oligonucleotide
gguucgcuccuucacggag

SEQ ID NO: 2642779 - RNA, 19 nt, Artificial Sequence
  Description of Artificial Sequence: Synthetic oligonucleotide
gagaugguucgcuccuuca

SEQ ID NO: 2642780 - RNA, 19 nt, Artificial Sequence
  Description of Artificial Sequence: Synthetic oligonucleotide
uccucgagccgaacucuca

SEQ ID NO: 2642781 - RNA, 19 nt, Artificial Sequence
  Description of Artificial Sequence: Synthetic oligonucleotide
auuccucgcuggcagaguu

SEQ ID NO: 2642782 - RNA, 19 nt, Artificial Sequence
  Description of Artificial Sequence: Synthetic oligonucleotide
cagcggucgguauagguga

SEQ ID NO: 2642783 - RNA, 19 nt, Artificial Sequence
  Description of Artificial Sequence: Synthetic oligonucleotide
aaagagggauugucaccua

SEQ ID NO: 2642784 - RNA, 19 nt, Artificial Sequence
  Description of Artificial Sequence: Synthetic oligonucleotide
accuaccccaaggucacag

SEQ ID NO: 2642785 - RNA, 19 nt, Artificial Sequence
  Description of Artificial Sequence: Synthetic oligonucleotide
agacguggucaauccauaa

SEQ ID NO: 2642786 - RNA, 19 nt, Artificial Sequence
  Description of Artificial Sequence: Synthetic oligonucleotide
aguuagcgcacacgaugga

SEQ ID NO: 2642787 - RNA, 19 nt, Artificial Sequence
  Description of Artificial Sequence: Synthetic oligonucleotide
ggauauggacauaucggac

SEQ ID NO: 2642788 - RNA, 19 nt, Artificial Sequence
  Description of Artificial Sequence: Synthetic oligonucleotide
gauuccagauacaaaugau

SEQ ID NO: 2642789 - RNA, 19 nt, Artificial Sequence
  Description of Artificial Sequence: Synthetic oligonucleotide
gaacucucaucucgaaggu

SEQ ID NO: 2642790 - RNA, 19 nt, Artificial Sequence
  Description of Artificial Sequence: Synthetic oligonucleotide
caggaugaccagacuguuc

SEQ ID NO: 2642791 - RNA, 19 nt, Artificial Sequence
  Description of Artificial Sequence: Synthetic oligonucleotide
caauucguccucgagccga

SEQ ID NO: 2642792 - RNA, 19 nt, Artificial Sequence
  Description of Artificial Sequence: Synthetic oligonucleotide
aaacucucgucgaccuuga

SEQ ID NO: 2642793 - RNA, 19 nt, Artificial Sequence
  Description of Artificial Sequence: Synthetic oligonucleotide
acacgauggaugaucugca

SEQ ID NO: 2642794 - RNA, 19 nt, Artificial Sequence
  Description of Artificial Sequence: Synthetic oligonucleotide
caaagaggucauccagcuc

SEQ ID NO: 2642795 - RNA, 19 nt, Artificial Sequence
  Description of Artificial Sequence: Synthetic oligonucleotide
aacaggugucucauagaua

SEQ ID NO: 2642796 - RNA, 19 nt, Artificial Sequence
  Description of Artificial Sequence: Synthetic oligonucleotide
ccagcggucgguauaggug

SEQ ID NO: 2642797 - RNA, 19 nt, Artificial Sequence
  Description of Artificial Sequence: Synthetic oligonucleotide
uuguuccacauuggcuggc

SEQ ID NO: 2642798 - RNA, 19 nt, Artificial Sequence
  Description of Artificial Sequence: Synthetic oligonucleotide
guuccacauuggcuggcug

SEQ ID NO: 2642799 - RNA, 19 nt, Artificial Sequence
  Description of Artificial Sequence: Synthetic oligonucleotide
guucucagagaugguucgc

SEQ ID NO: 2642800 - RNA, 19 nt, Artificial Sequence
  Description of Artificial Sequence: Synthetic oligonucleotide
ggcucagucgccauuguuc

SEQ ID NO: 2642801 - RNA, 19 nt, Artificial Sequence
  Description of Artificial Sequence: Synthetic oligonucleotide
ugguucgcuccuucacgga

SEQ ID NO: 2642802 - RNA, 19 nt, Artificial Sequence
  Description of Artificial Sequence: Synthetic oligonucleotide
gugguuaucuggcccugga

SEQ ID NO: 2642803 - RNA, 19 nt, Artificial Sequence
  Description of Artificial Sequence: Synthetic oligonucleotide
gccagucggauguucauga

SEQ ID NO: 2642804 - RNA, 19 nt, Artificial Sequence
  Description of Artificial Sequence: Synthetic oligonucleotide
ggugucucauagauaccag

SEQ ID NO: 2642805 - RNA, 19 nt, Artificial Sequence
  Description of Artificial Sequence: Synthetic oligonucleotide
guuguguguauuccucgcu

SEQ ID NO: 2642806 - RNA, 19 nt, Artificial Sequence
  Description of Artificial Sequence: Synthetic oligonucleotide
gcucgaaguucaaugagga

SEQ ID NO: 2642807 - RNA, 19 nt, Artificial Sequence
  Description of Artificial Sequence: Synthetic oligonucleotide
cucgagccgaacucucauc

SEQ ID NO: 2642808 - RNA, 19 nt, Artificial Sequence
  Description of Artificial Sequence: Synthetic oligonucleotide
caccaaaguuagcgcacac

SEQ ID NO: 2642809 - RNA, 19 nt, Artificial Sequence
  Description of Artificial Sequence: Synthetic oligonucleotide
gucgaccuugacccuugcc

SEQ ID NO: 2642810 - RNA, 19 nt, Artificial Sequence
  Description of Artificial Sequence: Synthetic oligonucleotide
aauucguccucgagccgaa

SEQ ID NO: 2642811 - RNA, 19 nt, Artificial Sequence
  Description of Artificial Sequence: Synthetic oligonucleotide
agguggugcucgaaguuca

SEQ ID NO: 2642812 - RNA, 19 nt, Artificial Sequence
  Description of Artificial Sequence: Synthetic oligonucleotide
acauuacggccugucacaa

SEQ ID NO: 2642813 - RNA, 19 nt, Artificial Sequence
  Description of Artificial Sequence: Synthetic oligonucleotide
uauuccucgcuggcagagu

SEQ ID NO: 2642814 - RNA, 19 nt, Artificial Sequence
  Description of Artificial Sequence: Synthetic oligonucleotide
cguggucaauccauaaaug

SEQ ID NO: 2642815 - RNA, 19 nt, Artificial Sequence
  Description of Artificial Sequence: Synthetic oligonucleotide
cagucggauguucaugaaa

SEQ ID NO: 2642816 - RNA, 19 nt, Artificial Sequence
  Description of Artificial Sequence: Synthetic oligonucleotide
gacacggcuucacagcuuu

SEQ ID NO: 2642817 - RNA, 19 nt, Artificial Sequence
  Description of Artificial Sequence: Synthetic oligonucleotide
cugggucccagaguguguc

SEQ ID NO: 2642818 - RNA, 19 nt, Artificial Sequence
  Description of Artificial Sequence: Synthetic oligonucleotide
acggaguggcucagucgcc

SEQ ID NO: 2642819 - RNA, 19 nt, Artificial Sequence
  Description of Artificial Sequence: Synthetic oligonucleotide
cgucaucugggauauggac

SEQ ID NO: 2642820 - RNA, 19 nt, Artificial Sequence
  Description of Artificial Sequence: Synthetic oligonucleotide
uggcucagucgccauuguu

SEQ ID NO: 2642821 - RNA, 19 nt, Artificial Sequence
  Description of Artificial Sequence: Synthetic oligonucleotide
uggccagucggauguucau

SEQ ID NO: 2642822 - RNA, 19 nt, Artificial Sequence
  Description of Artificial Sequence: Synthetic oligonucleotide
ccagcucaacuugaugucc

SEQ ID NO: 2642823 - RNA, 19 nt, Artificial Sequence
  Description of Artificial Sequence: Synthetic oligonucleotide
ccgaacucucaucucgaag

SEQ ID NO: 2642824 - RNA, 19 nt, Artificial Sequence
  Description of Artificial Sequence: Synthetic oligonucleotide
cgguauaggugacauuggc

SEQ ID NO: 2642825 - RNA, 19 nt, Artificial Sequence
  Description of Artificial Sequence: Synthetic oligonucleotide
gccugucacaaagagguca

SEQ ID NO: 2642826 - RNA, 19 nt, Artificial Sequence
  Description of Artificial Sequence: Synthetic oligonucleotide
gcucagaacacuggaggac

SEQ ID NO: 2642827 - RNA, 19 nt, Artificial Sequence
  Description of Artificial Sequence: Synthetic oligonucleotide
ucucgucgaccuugacccu

SEQ ID NO: 2642828 - RNA, 19 nt, Artificial Sequence
  Description of Artificial Sequence: Synthetic oligonucleotide
cccuugccaccaaaguuag

SEQ ID NO: 2642829 - RNA, 19 nt, Artificial Sequence
  Description of Artificial Sequence: Synthetic oligonucleotide
agcggucgguauaggugac

SEQ ID NO: 2642830 - RNA, 19 nt, Artificial Sequence
  Description of Artificial Sequence: Synthetic oligonucleotide
agucgccauuguuccacau

SEQ ID NO: 2642831 - RNA, 19 nt, Artificial Sequence
  Description of Artificial Sequence: Synthetic oligonucleotide
cugagguggugcucgaagu

SEQ ID NO: 2642832 - RNA, 19 nt, Artificial Sequence
  Description of Artificial Sequence: Synthetic oligonucleotide
agccgaacucucaucucga

SEQ ID NO: 2642833 - RNA, 19 nt, Artificial Sequence
  Description of Artificial Sequence: Synthetic oligonucleotide
cgcuccuucacggaguggc

SEQ ID NO: 2642834 - RNA, 19 nt, Artificial Sequence
  Description of Artificial Sequence: Synthetic oligonucleotide
caaaguuagcgcacacgau

SEQ ID NO: 2642835 - RNA, 19 nt, Artificial Sequence
  Description of Artificial Sequence: Synthetic oligonucleotide
gggaaacucucgucgaccu

SEQ ID NO: 2642836 - RNA, 19 nt, Artificial Sequence
  Description of Artificial Sequence: Synthetic oligonucleotide
gccaccaaaguuagcgcac

SEQ ID NO: 2642837 - RNA, 19 nt, Artificial Sequence
  Description of Artificial Sequence: Synthetic oligonucleotide
guuagcgcacacgauggau

SEQ ID NO: 2642838 - RNA, 19 nt, Artificial Sequence
  Description of Artificial Sequence: Synthetic oligonucleotide
ggaaggauagcagggaguu

SEQ ID NO: 2642839 - RNA, 19 nt, Artificial Sequence
  Description of Artificial Sequence: Synthetic oligonucleotide
cucagucgccauuguucca

SEQ ID NO: 2642840 - RNA, 19 nt, Artificial Sequence
  Description of Artificial Sequence: Synthetic oligonucleotide
gggucccagagugugucug

SEQ ID NO: 2642841 - RNA, 19 nt, Artificial Sequence
  Description of Artificial Sequence: Synthetic oligonucleotide
cauuacggccugucacaaa

SEQ ID NO: 2642842 - RNA, 19 nt, Artificial Sequence
  Description of Artificial Sequence: Synthetic oligonucleotide
ccauuguuccacauuggcu

SEQ ID NO: 2642843 - RNA, 19 nt, Artificial Sequence
  Description of Artificial Sequence: Synthetic oligonucleotide
agauaccaggucacuggua

SEQ ID NO: 2642844 - RNA, 19 nt, Artificial Sequence
  Description of Artificial Sequence: Synthetic oligonucleotide
ggccagucggauguucaug

SEQ ID NO: 2642845 - RNA, 19 nt, Artificial Sequence
  Description of Artificial Sequence: Synthetic oligonucleotide
gguccaccgugguuaucug

SEQ ID NO: 2642846 - RNA, 19 nt, Artificial Sequence
  Description of Artificial Sequence: Synthetic oligonucleotide
ccaccgugguuaucuggcc

SEQ ID NO: 2642847 - RNA, 19 nt, Artificial Sequence
  Description of Artificial Sequence: Synthetic oligonucleotide
gcacacgauggaugaucug

SEQ ID NO: 2642848 - RNA, 19 nt, Artificial Sequence
  Description of Artificial Sequence: Synthetic oligonucleotide
gcgcacacgauggaugauc

SEQ ID NO: 2642849 - RNA, 19 nt, Artificial Sequence
  Description of Artificial Sequence: Synthetic oligonucleotide
cgccauuguuccacauugg

SEQ ID NO: 2642850 - RNA, 19 nt, Artificial Sequence
  Description of Artificial Sequence: Synthetic oligonucleotide
caaugaggacacggcuuca

SEQ ID NO: 2642851 - RNA, 19 nt, Artificial Sequence
  Description of Artificial Sequence: Synthetic oligonucleotide
cagucgccauuguuccaca

SEQ ID NO: 2642852 - RNA, 19 nt, Artificial Sequence
  Description of Artificial Sequence: Synthetic oligonucleotide
gcuggcagaguugauuacu

SEQ ID NO: 2642853 - RNA, 19 nt, Artificial Sequence
  Description of Artificial Sequence: Synthetic oligonucleotide
guucgcuccuucacggagu

SEQ ID NO: 2642854 - RNA, 19 nt, Artificial Sequence
  Description of Artificial Sequence: Synthetic oligonucleotide
ggaguuggcucagaacacu

SEQ ID NO: 2642855 - RNA, 19 nt, Artificial Sequence
  Description of Artificial Sequence: Synthetic oligonucleotide
guccucgagccgaacucuc

SEQ ID NO: 2642856 - RNA, 19 nt, Artificial Sequence
  Description of Artificial Sequence: Synthetic oligonucleotide
guggaacaggugucucaua

SEQ ID NO: 2642857 - RNA, 19 nt, Artificial Sequence
  Description of Artificial Sequence: Synthetic oligonucleotide
gcucaacuugaugucccca

SEQ ID NO: 2642858 - RNA, 19 nt, Artificial Sequence
  Description of Artificial Sequence: Synthetic oligonucleotide
cuugauagacguggucaau

SEQ ID NO: 2642859 - RNA, 19 nt, Artificial Sequence
  Description of Artificial Sequence: Synthetic oligonucleotide
ucacgucaucugggauaug

SEQ ID NO: 2642860 - RNA, 19 nt, Artificial Sequence
  Description of Artificial Sequence: Synthetic oligonucleotide
ccuugccaccaaaguuagc

SEQ ID NO: 2642861 - RNA, 19 nt, Artificial Sequence
  Description of Artificial Sequence: Synthetic oligonucleotide
ggauugucaccuaccccaa

SEQ ID NO: 2642862 - RNA, 19 nt, Artificial Sequence
  Description of Artificial Sequence: Synthetic oligonucleotide
ggcccugcaacaggaugac

SEQ ID NO: 2642863 - RNA, 19 nt, Artificial Sequence
  Description of Artificial Sequence: Synthetic oligonucleotide
gauguccccagcggucggu

SEQ ID NO: 2642864 - RNA, 19 nt, Artificial Sequence
  Description of Artificial Sequence: Synthetic oligonucleotide
caucucgaagguccaccgu

SEQ ID NO: 2642865 - RNA, 19 nt, Artificial Sequence
  Description of Artificial Sequence: Synthetic oligonucleotide
agcgcacacgauggaugau

SEQ ID NO: 2642866 - RNA, 19 nt, Artificial Sequence
  Description of Artificial Sequence: Synthetic oligonucleotide
cucgaagguccaccguggu

SEQ ID NO: 2642867 - RNA, 19 nt, Artificial Sequence
  Description of Artificial Sequence: Synthetic oligonucleotide
cucgcuggcagaguugauu

SEQ ID NO: 2642868 - RNA, 19 nt, Artificial Sequence
  Description of Artificial Sequence: Synthetic oligonucleotide
gcagaguugauuacuccuu

SEQ ID NO: 2642869 - RNA, 19 nt, Artificial Sequence
  Description of Artificial Sequence: Synthetic oligonucleotide
auguccccagcggucggua

SEQ ID NO: 2642870 - RNA, 19 nt, Artificial Sequence
  Description of Artificial Sequence: Synthetic oligonucleotide
ccuaccccaaggucacaga

SEQ ID NO: 2642871 - RNA, 19 nt, Artificial Sequence
  Description of Artificial Sequence: Synthetic oligonucleotide
gccgaacucucaucucgaa

SEQ ID NO: 2642872 - RNA, 19 nt, Artificial Sequence
  Description of Artificial Sequence: Synthetic oligonucleotide
gaguggcucagucgccauu

SEQ ID NO: 2642873 - RNA, 19 nt, Artificial Sequence
  Description of Artificial Sequence: Synthetic oligonucleotide
ccuucacggaguggcucag

SEQ ID NO: 2642874 - RNA, 19 nt, Artificial Sequence
  Description of Artificial Sequence: Synthetic oligonucleotide
cgugguuaucuggcccugg

SEQ ID NO: 2642875 - RNA, 19 nt, Artificial Sequence
  Description of Artificial Sequence: Synthetic oligonucleotide
cgagccgaacucucaucuc

SEQ ID NO: 2642876 - RNA, 19 nt, Artificial Sequence
  Description of Artificial Sequence: Synthetic oligonucleotide
guggcucagucgccauugu

SEQ ID NO: 2642877 - RNA, 19 nt, Artificial Sequence
  Description of Artificial Sequence: Synthetic oligonucleotide
cugcugcucgaugguggca

SEQ ID NO: 2642878 - RNA, 19 nt, Artificial Sequence
  Description of Artificial Sequence: Synthetic oligonucleotide
cgcuggcagaguugauuac

SEQ ID NO: 2642879 - RNA, 19 nt, Artificial Sequence
  Description of Artificial Sequence: Synthetic oligonucleotide
guggugcucgaaguucaau

SEQ ID NO: 2642880 - RNA, 19 nt, Artificial Sequence
  Description of Artificial Sequence: Synthetic oligonucleotide
cggacauuacggccuguca

SEQ ID NO: 2642881 - RNA, 19 nt, Artificial Sequence
  Description of Artificial Sequence: Synthetic oligonucleotide
ccagucggauguucaugaa

SEQ ID NO: 2642882 - RNA, 19 nt, Artificial Sequence
  Description of Artificial Sequence: Synthetic oligonucleotide
gguggugcucgaaguucaa

SEQ ID NO: 2642883 - RNA, 19 nt, Artificial Sequence
  Description of Artificial Sequence: Synthetic oligonucleotide
gcccugcaacaggaugacc

SEQ ID NO: 2642884 - RNA, 19 nt, Artificial Sequence
  Description of Artificial Sequence: Synthetic oligonucleotide
cucgucgaccuugacccuu

SEQ ID NO: 2642885 - RNA, 19 nt, Artificial Sequence
  Description of Artificial Sequence: Synthetic oligonucleotide
ccgugguuaucuggcccug

SEQ ID NO: 2642886 - RNA, 19 nt, Artificial Sequence
  Description of Artificial Sequence: Synthetic oligonucleotide
gcggucgguauaggugaca

SEQ ID NO: 2642887 - RNA, 19 nt, Artificial Sequence
  Description of Artificial Sequence: Synthetic oligonucleotide
acacggcuucacagcuuuu

SEQ ID NO: 2642888 - RNA, 19 nt, Artificial Sequence
  Description of Artificial Sequence: Synthetic oligonucleotide
cccagcggucgguauaggu

SEQ ID NO: 2642889 - RNA, 19 nt, Artificial Sequence
  Description of Artificial Sequence: Synthetic oligonucleotide
ggucgguauaggugacauu

SEQ ID NO: 2642890 - RNA, 19 nt, Artificial Sequence
  Description of Artificial Sequence: Synthetic oligonucleotide
caccuaccccaaggucaca

SEQ ID NO: 2642891 - RNA, 19 nt, Artificial Sequence
  Description of Artificial Sequence: Synthetic oligonucleotide
ccucgagccgaacucucau

SEQ ID NO: 2642892 - RNA, 19 nt, Artificial Sequence
  Description of Artificial Sequence: Synthetic oligonucleotide
cggaguggcucagucgcca

SEQ ID NO: 2642893 - RNA, 19 nt, Artificial Sequence
  Description of Artificial Sequence: Synthetic oligonucleotide
cagagaugguucgcuccuu

SEQ ID NO: 2642894 - RNA, 19 nt, Artificial Sequence
  Description of Artificial Sequence: Synthetic oligonucleotide
ccccagcggucgguauagg

SEQ ID NO: 2642895 - RNA, 19 nt, Artificial Sequence
  Description of Artificial Sequence: Synthetic oligonucleotide
cggucgguauaggugacau

SEQ ID NO: 2642896 - RNA, 19 nt, Artificial Sequence
  Description of Artificial Sequence: Synthetic oligonucleotide
cguccucgagccgaacucu

SEQ ID NO: 2642897 - RNA, 19 nt, Artificial Sequence
  Description of Artificial Sequence: Synthetic oligonucleotide
cccugagguggugcucgaa

SEQ ID NO: 2642898 - RNA, 19 nt, Artificial Sequence
  Description of Artificial Sequence: Synthetic oligonucleotide
ccucgcuggcagaguugau

SEQ ID NO: 2642899 - RNA, 19 nt, Artificial Sequence
  Description of Artificial Sequence: Synthetic oligonucleotide
aauuacccagaccuggucc

SEQ ID NO: 2642900 - RNA, 19 nt, Artificial Sequence
  Description of Artificial Sequence: Synthetic oligonucleotide
uuggcaauuacccagaccu

SEQ ID NO: 2642901 - RNA, 19 nt, Artificial Sequence
  Description of Artificial Sequence: Synthetic oligonucleotide
aauccuucaugguuuguac

SEQ ID NO: 2642902 - RNA, 19 nt, Artificial Sequence
  Description of Artificial Sequence: Synthetic oligonucleotide
ugggaugauggacacaucg

SEQ ID NO: 2642903 - RNA, 19 nt, Artificial Sequence
  Description of Artificial Sequence: Synthetic oligonucleotide
aacaugggccuccuguucc

SEQ ID NO: 2642904 - RNA, 19 nt, Artificial Sequence
  Description of Artificial Sequence: Synthetic oligonucleotide
auauacugaugucuggccc

SEQ ID NO: 2642905 - RNA, 19 nt, Artificial Sequence
  Description of Artificial Sequence: Synthetic oligonucleotide
aaugccauagucccagcuc

SEQ ID NO: 2642906 - RNA, 19 nt, Artificial Sequence
  Description of Artificial Sequence: Synthetic oligonucleotide
acuuuguuggcaauuaccc

SEQ ID NO: 2642907 - RNA, 19 nt, Artificial Sequence
  Description of Artificial Sequence: Synthetic oligonucleotide
aauaggggcuaccucuagc

SEQ ID NO: 2642908 - RNA, 19 nt, Artificial Sequence
  Description of Artificial Sequence: Synthetic oligonucleotide
auaggggcuaccucuagcc

SEQ ID NO: 2642909 - RNA, 19 nt, Artificial Sequence
  Description of Artificial Sequence: Synthetic oligonucleotide
gagagggcgacacagagcc

SEQ ID NO: 2642910 - RNA, 19 nt, Artificial Sequence
  Description of Artificial Sequence: Synthetic oligonucleotide
uguacccaugguaagaggc

SEQ ID NO: 2642911 - RNA, 19 nt, Artificial Sequence
  Description of Artificial Sequence: Synthetic oligonucleotide
guaaacgggaccuugaaca

SEQ ID NO: 2642912 - RNA, 19 nt, Artificial Sequence
  Description of Artificial Sequence: Synthetic oligonucleotide
gauacgugcucccaacugg

SEQ ID NO: 2642913 - RNA, 19 nt, Artificial Sequence
  Description of Artificial Sequence: Synthetic oligonucleotide
ucaugguuuguacccaugg

SEQ ID NO: 2642914 - RNA, 19 nt, Artificial Sequence
  Description of Artificial Sequence: Synthetic oligonucleotide
augucuggcccacagacac

SEQ ID NO: 2642915 - RNA, 19 nt, Artificial Sequence
  Description of Artificial Sequence: Synthetic oligonucleotide
uccucguccauccacaucu

SEQ ID NO: 2642916 - RNA, 19 nt, Artificial Sequence
  Description of Artificial Sequence: Synthetic oligonucleotide
cacauuguuggauacgugc

SEQ ID NO: 2642917 - RNA, 19 nt, Artificial Sequence
  Description of Artificial Sequence: Synthetic oligonucleotide
auggacacaucgcugaggg

SEQ ID NO: 2642918 - RNA, 19 nt, Artificial Sequence
  Description of Artificial Sequence: Synthetic oligonucleotide
uaagaggcagggaacaggc

SEQ ID NO: 2642919 - RNA, 19 nt, Artificial Sequence
  Description of Artificial Sequence: Synthetic oligonucleotide
auuguuggauacgugcucc

SEQ ID NO: 2642920 - RNA, 19 nt, Artificial Sequence
  Description of Artificial Sequence: Synthetic oligonucleotide
acuuugcgcacauuguugg

SEQ ID NO: 2642921 - RNA, 19 nt, Artificial Sequence
  Description of Artificial Sequence: Synthetic oligonucleotide
uuccuggguaccauggugg

SEQ ID NO: 2642922 - RNA, 19 nt, Artificial Sequence
  Description of Artificial Sequence: Synthetic oligonucleotide
gaugggaugugauaccagc

SEQ ID NO: 2642923 - RNA, 19 nt, Artificial Sequence
  Description of Artificial Sequence: Synthetic oligonucleotide
aaggcauauacugaugucu

SEQ ID NO: 2642924 - RNA, 19 nt, Artificial Sequence
  Description of Artificial Sequence: Synthetic oligonucleotide
ugcagagccgcccacagug

SEQ ID NO: 2642925 - RNA, 19 nt, Artificial Sequence
  Description of Artificial Sequence: Synthetic oligonucleotide
uugaacaugggccuccugu

SEQ ID NO: 2642926 - RNA, 19 nt, Artificial Sequence
  Description of Artificial Sequence: Synthetic oligonucleotide
aguaaacgggaccuugaac

SEQ ID NO: 2642927 - RNA, 19 nt, Artificial Sequence
  Description of Artificial Sequence: Synthetic oligonucleotide
agagaugggaugugauacc

SEQ ID NO: 2642928 - RNA, 19 nt, Artificial Sequence
  Description of Artificial Sequence: Synthetic oligonucleotide
aacgggaccuugaacaugg

SEQ ID NO: 2642929 - RNA, 19 nt, Artificial Sequence
  Description of Artificial Sequence: Synthetic oligonucleotide
uccuucaugguuuguaccc

SEQ ID NO: 2642930 - RNA, 19 nt, Artificial Sequence
  Description of Artificial Sequence: Synthetic oligonucleotide
uguucccuggacauguucc

SEQ ID NO: 2642931 - RNA, 19 nt, Artificial Sequence
  Description of Artificial Sequence: Synthetic oligonucleotide
ugucccacggcucaggcca

SEQ ID NO: 2642932 - RNA, 19 nt, Artificial Sequence
  Description of Artificial Sequence: Synthetic oligonucleotide
agacacuuugcgcacauug

SEQ ID NO: 2642933 - RNA, 19 nt, Artificial Sequence
  Description of Artificial Sequence: Synthetic oligonucleotide
ugcgacgacacacuguccc

SEQ ID NO: 2642934 - RNA, 19 nt, Artificial Sequence
  Description of Artificial Sequence: Synthetic oligonucleotide
ugggaugugauaccagcag

SEQ ID NO: 2642935 - RNA, 19 nt, Artificial Sequence
  Description of Artificial Sequence: Synthetic oligonucleotide
aaugugguguccucgucca

SEQ ID NO: 2642936 - RNA, 19 nt, Artificial Sequence
  Description of Artificial Sequence: Synthetic oligonucleotide
uuuguacccaugguaagag

SEQ ID NO: 2642937 - RNA, 19 nt, Artificial Sequence
  Description of Artificial Sequence: Synthetic oligonucleotide
uauacugaugucuggccca

SEQ ID NO: 2642938 - RNA, 19 nt, Artificial Sequence
  Description of Artificial Sequence: Synthetic oligonucleotide
ugguuuguacccaugguaa

SEQ ID NO: 2642939 - RNA, 19 nt, Artificial Sequence
  Description of Artificial Sequence: Synthetic oligonucleotide
auccuucaugguuuguacc

SEQ ID NO: 2642940 - RNA, 19 nt, Artificial Sequence
  Description of Artificial Sequence: Synthetic oligonucleotide
uucagcaguaaacgggacc

SEQ ID NO: 2642941 - RNA, 19 nt, Artificial Sequence
  Description of Artificial Sequence: Synthetic oligonucleotide
ucuccugacaaaauccuuc

SEQ ID NO: 2642942 - RNA, 19 nt, Artificial Sequence
  Description of Artificial Sequence: Synthetic oligonucleotide
cauauacugaugucuggcc

SEQ ID NO: 2642943 - RNA, 19 nt, Artificial Sequence
  Description of Artificial Sequence: Synthetic oligonucleotide
aucgcugagggcaauaggg

SEQ ID NO: 2642944 - RNA, 19 nt, Artificial Sequence
  Description of Artificial Sequence: Synthetic oligonucleotide
augugauaccagcagucac

SEQ ID NO: 2642945 - RNA, 19 nt, Artificial Sequence
  Description of Artificial Sequence: Synthetic oligonucleotide
gagagaugggaugugauac

SEQ ID NO: 2642946 - RNA, 19 nt, Artificial Sequence
  Description of Artificial Sequence: Synthetic oligonucleotide
accuucuccugacaaaauc

SEQ ID NO: 2642947 - RNA, 19 nt, Artificial Sequence
  Description of Artificial Sequence: Synthetic oligonucleotide
ugugucagcuucuguuugg

SEQ ID NO: 2642948 - RNA, 19 nt, Artificial Sequence
  Description of Artificial Sequence: Synthetic oligonucleotide
ucagcaguaaacgggaccu

SEQ ID NO: 2642949 - RNA, 19 nt, Artificial Sequence
  Description of Artificial Sequence: Synthetic oligonucleotide
gagccuugcggguagcugg

SEQ ID NO: 2642950 - RNA, 19 nt, Artificial Sequence
  Description of Artificial Sequence: Synthetic oligonucleotide
ucuguuugggagagauggg

SEQ ID NO: 2642951 - RNA, 19 nt, Artificial Sequence
  Description of Artificial Sequence: Synthetic oligonucleotide
gacuuuguuggcaauuacc

SEQ ID NO: 2642952 - RNA, 19 nt, Artificial Sequence
  Description of Artificial Sequence: Synthetic oligonucleotide
augauggacacaucgcuga

SEQ ID NO: 2642953 - RNA, 19 nt, Artificial Sequence
  Description of Artificial Sequence: Synthetic oligonucleotide
caugcgacgacacacuguc

SEQ ID NO: 2642954 - RNA, 19 nt, Artificial Sequence
  Description of Artificial Sequence: Synthetic oligonucleotide
ucgcugagggcaauagggg

SEQ ID NO: 2642955 - RNA, 19 nt, Artificial Sequence
  Description of Artificial Sequence: Synthetic oligonucleotide
aggggcuaccucuagccac

SEQ ID NO: 2642956 - RNA, 19 nt, Artificial Sequence
  Description of Artificial Sequence: Synthetic oligonucleotide
acgugcucccaacuggagc

SEQ ID NO: 2642957 - RNA, 19 nt, Artificial Sequence
  Description of Artificial Sequence: Synthetic oligonucleotide
acugaugucuggcccacag

SEQ ID NO: 2642958 - RNA, 19 nt, Artificial Sequence
  Description of Artificial Sequence: Synthetic oligonucleotide
guggcauuggcccggacag

SEQ ID NO: 2642959 - RNA, 19 nt, Artificial Sequence
  Description of Artificial Sequence: Synthetic oligonucleotide
cauagucccagcucugccc

SEQ ID NO: 2642960 - RNA, 19 nt, Artificial Sequence
  Description of Artificial Sequence: Synthetic oligonucleotide
ucguccauccacaucugca

SEQ ID NO: 2642961 - RNA, 19 nt, Artificial Sequence
  Description of Artificial Sequence: Synthetic oligonucleotide
ucccuggacauguuccugg

SEQ ID NO: 2642962 - RNA, 19 nt, Artificial Sequence
  Description of Artificial Sequence: Synthetic oligonucleotide
agcuugcauuuucuggccc

SEQ ID NO: 2642963 - RNA, 19 nt, Artificial Sequence
  Description of Artificial Sequence: Synthetic oligonucleotide
caaugugguguccucgucc

SEQ ID NO: 2642964 - RNA, 19 nt, Artificial Sequence
  Description of Artificial Sequence: Synthetic oligonucleotide
gaugauggacacaucgcug

SEQ ID NO: 2642965 - RNA, 19 nt, Artificial Sequence
  Description of Artificial Sequence: Synthetic oligonucleotide
agagauguggucccagccu

SEQ ID NO: 2642966 - RNA, 19 nt, Artificial Sequence
  Description of Artificial Sequence: Synthetic oligonucleotide
agugcaaugugguguccuc

SEQ ID NO: 2642967 - RNA, 19 nt, Artificial Sequence
  Description of Artificial Sequence: Synthetic oligonucleotide
caggccauggcuucccugg

SEQ ID NO: 2642968 - RNA, 19 nt, Artificial Sequence
  Description of Artificial Sequence: Synthetic oligonucleotide
uagaaugcagagccgccca

SEQ ID NO: 2642969 - RNA, 19 nt, Artificial Sequence
  Description of Artificial Sequence: Synthetic oligonucleotide
uaccaugguggcauuggcc

SEQ ID NO: 2642970 - RNA, 19 nt, Artificial Sequence
  Description of Artificial Sequence: Synthetic oligonucleotide
auuacccagaccuggucca

SEQ ID NO: 2642971 - RNA, 19 nt, Artificial Sequence
  Description of Artificial Sequence: Synthetic oligonucleotide
augguuuguacccauggua

SEQ ID NO: 2642972 - RNA, 19 nt, Artificial Sequence
  Description of Artificial Sequence: Synthetic oligonucleotide
augccauagucccagcucu

SEQ ID NO: 2642973 - RNA, 19 nt, Artificial Sequence
  Description of Artificial Sequence: Synthetic oligonucleotide
ucccguuuucauccaaggc

SEQ ID NO: 2642974 - RNA, 19 nt, Artificial Sequence
  Description of Artificial Sequence: Synthetic oligonucleotide
uguuugggagagaugggau

SEQ ID NO: 2642975 - RNA, 19 nt, Artificial Sequence
  Description of Artificial Sequence: Synthetic oligonucleotide
uuguacccaugguaagagg

SEQ ID NO: 2642976 - RNA, 19 nt, Artificial Sequence
  Description of Artificial Sequence: Synthetic oligonucleotide
acugucccacggcucaggc

SEQ ID NO: 2642977 - RNA, 19 nt, Artificial Sequence
  Description of Artificial Sequence: Synthetic oligonucleotide
ugacaaaauccuucauggu

SEQ ID NO: 2642978 - RNA, 19 nt, Artificial Sequence
  Description of Artificial Sequence: Synthetic oligonucleotide
cuaccucuagccacggccc

SEQ ID NO: 2642979 - RNA, 19 nt, Artificial Sequence
  Description of Artificial Sequence: Synthetic oligonucleotide
ugagagggcgacacagagc

SEQ ID NO: 2642980 - RNA, 19 nt, Artificial Sequence
  Description of Artificial Sequence: Synthetic oligonucleotide
cccgguagaaugcagagcc

SEQ ID NO: 2642981 - RNA, 19 nt, Artificial Sequence
  Description of Artificial Sequence: Synthetic oligonucleotide
cacuuugcgcacauuguug

SEQ ID NO: 2642982 - RNA, 19 nt, Artificial Sequence
  Description of Artificial Sequence: Synthetic oligonucleotide
acagagccccgguagaaug

SEQ ID NO: 2642983 - RNA, 19 nt, Artificial Sequence
  Description of Artificial Sequence: Synthetic oligonucleotide
ccaacuggagccuugcggg

SEQ ID NO: 2642984 - RNA, 19 nt, Artificial Sequence
  Description of Artificial Sequence: Synthetic oligonucleotide
ucuagccacggcccacugg

SEQ ID NO: 2642985 - RNA, 19 nt, Artificial Sequence
  Description of Artificial Sequence: Synthetic oligonucleotide
gauggacacaucgcugagg

SEQ ID NO: 2642986 - RNA, 19 nt, Artificial Sequence
  Description of Artificial Sequence: Synthetic oligonucleotide
cugagagggcgacacagag

SEQ ID NO: 2642987 - RNA, 19 nt, Artificial Sequence
  Description of Artificial Sequence: Synthetic oligonucleotide
ccagcuugcauuuucuggc

SEQ ID NO: 2642988 - RNA, 19 nt, Artificial Sequence
  Description of Artificial Sequence: Synthetic oligonucleotide
gacgacacacugucccacg

SEQ ID NO: 2642989 - RNA, 19 nt, Artificial Sequence
  Description of Artificial Sequence: Synthetic oligonucleotide
acaugggccuccuguuccc

SEQ ID NO: 2642990 - RNA, 19 nt, Artificial Sequence
  Description of Artificial Sequence: Synthetic oligonucleotide
caaaauccuucaugguuug

SEQ ID NO: 2642991 - RNA, 19 nt, Artificial Sequence
  Description of Artificial Sequence: Synthetic oligonucleotide
uucaugguuuguacccaug

SEQ ID NO: 2642992 - RNA, 19 nt, Artificial Sequence
  Description of Artificial Sequence: Synthetic oligonucleotide
gcuaccucuagccacggcc

SEQ ID NO: 2642993 - RNA, 19 nt, Artificial Sequence
  Description of Artificial Sequence: Synthetic oligonucleotide
uuggauacgugcucccaac

SEQ ID NO: 2642994 - RNA, 19 nt, Artificial Sequence
  Description of Artificial Sequence: Synthetic oligonucleotide
uaaacgggaccuugaacau

SEQ ID NO: 2642995 - RNA, 19 nt, Artificial Sequence
  Description of Artificial Sequence: Synthetic oligonucleotide
ugcaaugugguguccucgu

SEQ ID NO: 2642996 - RNA, 19 nt, Artificial Sequence
  Description of Artificial Sequence: Synthetic oligonucleotide
auagucccagcucugcccu

SEQ ID NO: 2642997 - RNA, 19 nt, Artificial Sequence
  Description of Artificial Sequence: Synthetic oligonucleotide
uuggcccggacagagaugu

SEQ ID NO: 2642998 - RNA, 19 nt, Artificial Sequence
  Description of Artificial Sequence: Synthetic oligonucleotide
gagauguggucccagccuc

SEQ ID NO: 2642999 - RNA, 19 nt, Artificial Sequence
  Description of Artificial Sequence: Synthetic oligonucleotide
gagggcgacacagagcccc

SEQ ID NO: 2643000 - RNA, 19 nt, Artificial Sequence
  Description of Artificial Sequence: Synthetic oligonucleotide
uggacauguuccuggguac

SEQ ID NO: 2643001 - RNA, 19 nt, Artificial Sequence
  Description of Artificial Sequence: Synthetic oligonucleotide
ugguaagaggcagggaaca

SEQ ID NO: 2643002 - RNA, 19 nt, Artificial Sequence
  Description of Artificial Sequence: Synthetic oligonucleotide
caccagcuggcugagaggg

SEQ ID NO: 2643003 - RNA, 19 nt, Artificial Sequence
  Description of Artificial Sequence: Synthetic oligonucleotide
guuccuggguaccauggug

SEQ ID NO: 2643004 - RNA, 19 nt, Artificial Sequence
  Description of Artificial Sequence: Synthetic oligonucleotide
agaccugguccaguggccc

SEQ ID NO: 2643005 - RNA, 19 nt, Artificial Sequence
  Description of Artificial Sequence: Synthetic oligonucleotide
uacccaugguaagaggcag

SEQ ID NO: 2643006 - RNA, 19 nt, Artificial Sequence
  Description of Artificial Sequence: Synthetic oligonucleotide
gaugugauaccagcaguca

SEQ ID NO: 2643007 - RNA, 19 nt, Artificial Sequence
  Description of Artificial Sequence: Synthetic oligonucleotide
guuggcaauuacccagacc

SEQ ID NO: 2643008 - RNA, 19 nt, Artificial Sequence
  Description of Artificial Sequence: Synthetic oligonucleotide
acgacacacugucccacgg

SEQ ID NO: 2643009 - RNA, 19 nt, Artificial Sequence
  Description of Artificial Sequence: Synthetic oligonucleotide
ugcccuuugggcucccgag

SEQ ID NO: 2643010 - RNA, 19 nt, Artificial Sequence
  Description of Artificial Sequence: Synthetic oligonucleotide
cauuguuggauacgugcuc

SEQ ID NO: 2643011 - RNA, 19 nt, Artificial Sequence
  Description of Artificial Sequence: Synthetic oligonucleotide
aaacgggaccuugaacaug

SEQ ID NO: 2643012 - RNA, 19 nt, Artificial Sequence
  Description of Artificial Sequence: Synthetic oligonucleotide
cuuuguuggcaauuaccca

SEQ ID NO: 2643013 - RNA, 19 nt, Artificial Sequence
  Description of Artificial Sequence: Synthetic oligonucleotide
acauuguuggauacgugcu

SEQ ID NO: 2643014 - RNA, 19 nt, Artificial Sequence
  Description of Artificial Sequence: Synthetic oligonucleotide
aggcuggacacccaugcga

SEQ ID NO: 2643015 - RNA, 19 nt, Artificial Sequence
  Description of Artificial Sequence: Synthetic oligonucleotide
ugaacaugggccuccuguu

SEQ ID NO: 2643016 - RNA, 19 nt, Artificial Sequence
  Description of Artificial Sequence: Synthetic oligonucleotide
uggauacgugcucccaacu

SEQ ID NO: 2643017 - RNA, 19 nt, Artificial Sequence
  Description of Artificial Sequence: Synthetic oligonucleotide
acacuuugcgcacauuguu

SEQ ID NO: 2643018 - RNA, 19 nt, Artificial Sequence
  Description of Artificial Sequence: Synthetic oligonucleotide
caaggcauauacugauguc

SEQ ID NO: 2643019 - RNA, 19 nt, Artificial Sequence
  Description of Artificial Sequence: Synthetic oligonucleotide
uuguuggauacgugcuccc

SEQ ID NO: 2643020 - RNA, 19 nt, Artificial Sequence
  Description of Artificial Sequence: Synthetic oligonucleotide
cacagugcaaugugguguc

SEQ ID NO: 2643021 - RNA, 19 nt, Artificial Sequence
  Description of Artificial Sequence: Synthetic oligonucleotide
uguuggcaauuacccagac

SEQ ID NO: 2643022 - RNA, 19 nt, Artificial Sequence
  Description of Artificial Sequence: Synthetic oligonucleotide
uggcaauuacccagaccug

SEQ ID NO: 2643023 - RNA, 19 nt, Artificial Sequence
  Description of Artificial Sequence: Synthetic oligonucleotide
uuugcgcacauuguuggau

SEQ ID NO: 2643024 - RNA, 19 nt, Artificial Sequence
  Description of Artificial Sequence: Synthetic oligonucleotide
acuggagccuugcggguag

SEQ ID NO: 2643025 - RNA, 19 nt, Artificial Sequence
  Description of Artificial Sequence: Synthetic oligonucleotide
gagaugggaugugauacca

SEQ ID NO: 2643026 - RNA, 19 nt, Artificial Sequence
  Description of Artificial Sequence: Synthetic oligonucleotide
agcaguaaacgggaccuug

SEQ ID NO: 2643027 - RNA, 19 nt, Artificial Sequence
  Description of Artificial Sequence: Synthetic oligonucleotide
aggcauauacugaugucug

SEQ ID NO: 2643028 - RNA, 19 nt, Artificial Sequence
  Description of Artificial Sequence: Synthetic oligonucleotide
caucgcugagggcaauagg

SEQ ID NO: 2643029 - RNA, 19 nt, Artificial Sequence
  Description of Artificial Sequence: Synthetic oligonucleotide
cauguuccuggguaccaug

SEQ ID NO: 2643030 - RNA, 19 nt, Artificial Sequence
  Description of Artificial Sequence: Synthetic oligonucleotide
ugcgcacauuguuggauac

SEQ ID NO: 2643031 - RNA, 19 nt, Artificial Sequence
  Description of Artificial Sequence: Synthetic oligonucleotide
gguuuguacccaugguaag

SEQ ID NO: 2643032 - RNA, 19 nt, Artificial Sequence
  Description of Artificial Sequence: Synthetic oligonucleotide
uacgugcucccaacuggag

SEQ ID NO: 2643033 - RNA, 19 nt, Artificial Sequence
  Description of Artificial Sequence: Synthetic oligonucleotide
ucugcacccucugggauga

SEQ ID NO: 2643034 - RNA, 19 nt, Artificial Sequence
  Description of Artificial Sequence: Synthetic oligonucleotide
guuuguacccaugguaaga

SEQ ID NO: 2643035 - RNA, 19 nt, Artificial Sequence
  Description of Artificial Sequence: Synthetic oligonucleotide
gcauauacugaugucuggc

SEQ ID NO: 2643036 - RNA, 19 nt, Artificial Sequence
  Description of Artificial Sequence: Synthetic oligonucleotide
ggacacaucgcugagggca

SEQ ID NO: 2643037 - RNA, 19 nt, Artificial Sequence
  Description of Artificial Sequence: Synthetic oligonucleotide
gaacaugggccuccuguuc

SEQ ID NO: 2643038 - RNA, 19 nt, Artificial Sequence
  Description of Artificial Sequence: Synthetic oligonucleotide
gguaccaugguggcauugg

SEQ ID NO: 2643039 - RNA, 19 nt, Artificial Sequence
  Description of Artificial Sequence: Synthetic oligonucleotide
uccuggguaccaugguggc

SEQ ID NO: 2643040 - RNA, 19 nt, Artificial Sequence
  Description of Artificial Sequence: Synthetic oligonucleotide
uaggggcuaccucuagcca

SEQ ID NO: 2643041 - RNA, 19 nt, Artificial Sequence
  Description of Artificial Sequence: Synthetic oligonucleotide
ucccaacuggagccuugcg

SEQ ID NO: 2643042 - RNA, 19 nt, Artificial Sequence
  Description of Artificial Sequence: Synthetic oligonucleotide
guaccaugguggcauuggc

SEQ ID NO: 2643043 - RNA, 19 nt, Artificial Sequence
  Description of Artificial Sequence: Synthetic oligonucleotide
cuccugacaaaauccuuca

SEQ ID NO: 2643044 - RNA, 19 nt, Artificial Sequence
  Description of Artificial Sequence: Synthetic oligonucleotide
uguuggauacgugcuccca

SEQ ID NO: 2643045 - RNA, 19 nt, Artificial Sequence
  Description of Artificial Sequence: Synthetic oligonucleotide
cugugucagcuucuguuug

SEQ ID NO: 2643046 - RNA, 19 nt, Artificial Sequence
  Description of Artificial Sequence: Synthetic oligonucleotide
aaaauccuucaugguuugu

SEQ ID NO: 2643047 - RNA, 19 nt, Artificial Sequence
  Description of Artificial Sequence: Synthetic oligonucleotide
auaccagcagucaccagcu

SEQ ID NO: 2643048 - RNA, 19 nt, Artificial Sequence
  Description of Artificial Sequence: Synthetic oligonucleotide
agggaacaggcuccuucuc

SEQ ID NO: 2643049 - RNA, 19 nt, Artificial Sequence
  Description of Artificial Sequence: Synthetic oligonucleotide
agauguggucccagccucc

SEQ ID NO: 2643050 - RNA, 19 nt, Artificial Sequence
  Description of Artificial Sequence: Synthetic oligonucleotide
accacagguucccguuuuc

SEQ ID NO: 2643051 - RNA, 19 nt, Artificial Sequence
  Description of Artificial Sequence: Synthetic oligonucleotide
gacagagauguggucccag

SEQ ID NO: 2643052 - RNA, 19 nt, Artificial Sequence
  Description of Artificial Sequence: Synthetic oligonucleotide
ggauacgugcucccaacug

SEQ ID NO: 2643053 - RNA, 19 nt, Artificial Sequence
  Description of Artificial Sequence: Synthetic oligonucleotide
gugcaaugugguguccucg

SEQ ID NO: 2643054 - RNA, 19 nt, Artificial Sequence
  Description of Artificial Sequence: Synthetic oligonucleotide
gugucagcuucuguuuggg

SEQ ID NO: 2643055 - RNA, 19 nt, Artificial Sequence
  Description of Artificial Sequence: Synthetic oligonucleotide
uugcgcacauuguuggaua

SEQ ID NO: 2643056 - RNA, 19 nt, Artificial Sequence
  Description of Artificial Sequence: Synthetic oligonucleotide
cacccaugcgacgacacac

SEQ ID NO: 2643057 - RNA, 19 nt, Artificial Sequence
  Description of Artificial Sequence: Synthetic oligonucleotide
ugccauagucccagcucug

SEQ ID NO: 2643058 - RNA, 19 nt, Artificial Sequence
  Description of Artificial Sequence: Synthetic oligonucleotide
gacacagagccccgguaga

SEQ ID NO: 2643059 - RNA, 19 nt, Artificial Sequence
  Description of Artificial Sequence: Synthetic oligonucleotide
ugggagagaugggauguga

SEQ ID NO: 2643060 - RNA, 19 nt, Artificial Sequence
  Description of Artificial Sequence: Synthetic oligonucleotide
guucccguuuucauccaag

SEQ ID NO: 2643061 - RNA, 19 nt, Artificial Sequence
  Description of Artificial Sequence: Synthetic oligonucleotide
gucccagccuccuccaaug

SEQ ID NO: 2643062 - RNA, 19 nt, Artificial Sequence
  Description of Artificial Sequence: Synthetic oligonucleotide
cagaccugguccaguggcc

SEQ ID NO: 2643063 - RNA, 19 nt, Artificial Sequence
  Description of Artificial Sequence: Synthetic oligonucleotide
cccguuuucauccaaggca

SEQ ID NO: 2643064 - RNA, 19 nt, Artificial Sequence
  Description of Artificial Sequence: Synthetic oligonucleotide
cccacagacacuuugcgca

SEQ ID NO: 2643065 - RNA, 19 nt, Artificial Sequence
  Description of Artificial Sequence: Synthetic oligonucleotide
ggcaauaggggcuaccucu

SEQ ID NO: 2643066 - RNA, 19 nt, Artificial Sequence
  Description of Artificial Sequence: Synthetic oligonucleotide
cccaacuggagccuugcgg

SEQ ID NO: 2643067 - RNA, 19 nt, Artificial Sequence
  Description of Artificial Sequence: Synthetic oligonucleotide
gacacacugucccacggcu

SEQ ID NO: 2643068 - RNA, 19 nt, Artificial Sequence
  Description of Artificial Sequence: Synthetic oligonucleotide
cuucagcaguaaacgggac

SEQ ID NO: 2643069 - RNA, 19 nt, Artificial Sequence
  Description of Artificial Sequence: Synthetic oligonucleotide
acagugcaauguggugucc

SEQ ID NO: 2643070 - RNA, 19 nt, Artificial Sequence
  Description of Artificial Sequence: Synthetic oligonucleotide
agggcaauaggggcuaccu

SEQ ID NO: 2643071 - RNA, 19 nt, Artificial Sequence
  Description of Artificial Sequence: Synthetic oligonucleotide
uccugacaaaauccuucau

SEQ ID NO: 2643072 - RNA, 19 nt, Artificial Sequence
  Description of Artificial Sequence: Synthetic oligonucleotide
cuuugggcucccgaggcug

SEQ ID NO: 2643073 - RNA, 19 nt, Artificial Sequence
  Description of Artificial Sequence: Synthetic oligonucleotide
auggcuucccuggacuuug

SEQ ID NO: 2643074 - RNA, 19 nt, Artificial Sequence
  Description of Artificial Sequence: Synthetic oligonucleotide
guuggauacgugcucccaa

SEQ ID NO: 2643075 - RNA, 19 nt, Artificial Sequence
  Description of Artificial Sequence: Synthetic oligonucleotide
caauaggggcuaccucuag

SEQ ID NO: 2643076 - RNA, 19 nt, Artificial Sequence
  Description of Artificial Sequence: Synthetic oligonucleotide
acccagaccugguccagug

SEQ ID NO: 2643077 - RNA, 19 nt, Artificial Sequence
  Description of Artificial Sequence: Synthetic oligonucleotide
agcaccuucuccugacaaa

SEQ ID NO: 2643078 - RNA, 19 nt, Artificial Sequence
  Description of Artificial Sequence: Synthetic oligonucleotide
acagacacuuugcgcacau

SEQ ID NO: 2643079 - RNA, 19 nt, Artificial Sequence
  Description of Artificial Sequence: Synthetic oligonucleotide
uggucaccagcuugcauuu

SEQ ID NO: 2643080 - RNA, 19 nt, Artificial Sequence
  Description of Artificial Sequence: Synthetic oligonucleotide
cucguccauccacaucugc

SEQ ID NO: 2643081 - RNA, 19 nt, Artificial Sequence
  Description of Artificial Sequence: Synthetic oligonucleotide
cuguuugggagagauggga

SEQ ID NO: 2643082 - RNA, 19 nt, Artificial Sequence
  Description of Artificial Sequence: Synthetic oligonucleotide
augggaugugauaccagca

SEQ ID NO: 2643083 - RNA, 19 nt, Artificial Sequence
  Description of Artificial Sequence: Synthetic oligonucleotide
cacacugucccacggcuca

SEQ ID NO: 2643084 - RNA, 19 nt, Artificial Sequence
  Description of Artificial Sequence: Synthetic oligonucleotide
ggaugugauaccagcaguc

SEQ ID NO: 2643085 - RNA, 19 nt, Artificial Sequence
  Description of Artificial Sequence: Synthetic oligonucleotide
agaugggaugugauaccag

SEQ ID NO: 2643086 - RNA, 19 nt, Artificial Sequence
  Description of Artificial Sequence: Synthetic oligonucleotide
uuacccagaccugguccag

SEQ ID NO: 2643087 - RNA, 19 nt, Artificial Sequence
  Description of Artificial Sequence: Synthetic oligonucleotide
ggcugagagggcgacacag

SEQ ID NO: 2643088 - RNA, 19 nt, Artificial Sequence
  Description of Artificial Sequence: Synthetic oligonucleotide
uaccacagguucccguuuu

SEQ ID NO: 2643089 - RNA, 19 nt, Artificial Sequence
  Description of Artificial Sequence: Synthetic oligonucleotide
ucccagccuccuccaaugc

SEQ ID NO: 2643090 - RNA, 19 nt, Artificial Sequence
  Description of Artificial Sequence: Synthetic oligonucleotide
ggaugauggacacaucgcu

SEQ ID NO: 2643091 - RNA, 19 nt, Artificial Sequence
  Description of Artificial Sequence: Synthetic oligonucleotide
gacauguuccuggguacca

SEQ ID NO: 2643092 - RNA, 19 nt, Artificial Sequence
  Description of Artificial Sequence: Synthetic oligonucleotide
ggugaucccugcucgguac

SEQ ID NO: 2643093 - RNA, 19 nt, Artificial Sequence
  Description of Artificial Sequence: Synthetic oligonucleotide
ggcauuggcccggacagag

SEQ ID NO: 2643094 - RNA, 19 nt, Artificial Sequence
  Description of Artificial Sequence: Synthetic oligonucleotide
uggacacccaugcgacgac

SEQ ID NO: 2643095 - RNA, 19 nt, Artificial Sequence
  Description of Artificial Sequence: Synthetic oligonucleotide
auacgugcucccaacugga

SEQ ID NO: 2643096 - RNA, 19 nt, Artificial Sequence
  Description of Artificial Sequence: Synthetic oligonucleotide
gggaugauggacacaucgc

SEQ ID NO: 2643097 - RNA, 19 nt, Artificial Sequence
  Description of Artificial Sequence: Synthetic oligonucleotide
gguguccucguccauccac

SEQ ID NO: 2643098 - RNA, 19 nt, Artificial Sequence
  Description of Artificial Sequence: Synthetic oligonucleotide
gacacccaugcgacgacac

SEQ ID NO: 2643099 - RNA, 19 nt, Artificial Sequence
  Description of Artificial Sequence: Synthetic oligonucleotide
guacccaugguaagaggca

SEQ ID NO: 2643100 - RNA, 19 nt, Artificial Sequence
  Description of Artificial Sequence: Synthetic oligonucleotide
gaccugguccaguggcccc

SEQ ID NO: 2643101 - RNA, 19 nt, Artificial Sequence
  Description of Artificial Sequence: Synthetic oligonucleotide
cuccuccaaugccauaguc

SEQ ID NO: 2643102 - RNA, 19 nt, Artificial Sequence
  Description of Artificial Sequence: Synthetic oligonucleotide
gguggcauuggcccggaca

SEQ ID NO: 2643103 - RNA, 19 nt, Artificial Sequence
  Description of Artificial Sequence: Synthetic oligonucleotide
ggcccggacagagaugugg

SEQ ID NO: 2643104 - RNA, 19 nt, Artificial Sequence
  Description of Artificial Sequence: Synthetic oligonucleotide
cuagccacggcccacuggu

SEQ ID NO: 2643105 - RNA, 19 nt, Artificial Sequence
  Description of Artificial Sequence: Synthetic oligonucleotide
acacccaugcgacgacaca

SEQ ID NO: 2643106 - RNA, 19 nt, Artificial Sequence
  Description of Artificial Sequence: Synthetic oligonucleotide
gugaucccugcucgguacc

SEQ ID NO: 2643107 - RNA, 19 nt, Artificial Sequence
  Description of Artificial Sequence: Synthetic oligonucleotide
cugucccacggcucaggcc

SEQ ID NO: 2643108 - RNA, 19 nt, Artificial Sequence
  Description of Artificial Sequence: Synthetic oligonucleotide
cucccgaggcuggacaccc

SEQ ID NO: 2643109 - RNA, 19 nt, Artificial Sequence
  Description of Artificial Sequence: Synthetic oligonucleotide
cuguucccuggacauguuc

SEQ ID NO: 2643110 - RNA, 19 nt, Artificial Sequence
  Description of Artificial Sequence: Synthetic oligonucleotide
ucccuggacuuuguuggca

SEQ ID NO: 2643111 - RNA, 19 nt, Artificial Sequence
  Description of Artificial Sequence: Synthetic oligonucleotide
ugaucccugcucgguacca

SEQ ID NO: 2643112 - RNA, 19 nt, Artificial Sequence
  Description of Artificial Sequence: Synthetic oligonucleotide
acccaugguaagaggcagg

SEQ ID NO: 2643113 - RNA, 19 nt, Artificial Sequence
  Description of Artificial Sequence: Synthetic oligonucleotide
gacacuuugcgcacauugu

SEQ ID NO: 2643114 - RNA, 19 nt, Artificial Sequence
  Description of Artificial Sequence: Synthetic oligonucleotide
accucuagccacggcccac

SEQ ID NO: 2643115 - RNA, 19 nt, Artificial Sequence
  Description of Artificial Sequence: Synthetic oligonucleotide
auguggucccagccuccuc

SEQ ID NO: 2643116 - RNA, 19 nt, Artificial Sequence
  Description of Artificial Sequence: Synthetic oligonucleotide
ggacuuuguuggcaauuac

SEQ ID NO: 2643117 - RNA, 19 nt, Artificial Sequence
  Description of Artificial Sequence: Synthetic oligonucleotide
gcagggaacaggcuccuuc

SEQ ID NO: 2643118 - RNA, 19 nt, Artificial Sequence
  Description of Artificial Sequence: Synthetic oligonucleotide
cuggucaccagcuugcauu

SEQ ID NO: 2643119 - RNA, 19 nt, Artificial Sequence
  Description of Artificial Sequence: Synthetic oligonucleotide
aacuggagccuugcgggua

SEQ ID NO: 2643120 - RNA, 19 nt, Artificial Sequence
  Description of Artificial Sequence: Synthetic oligonucleotide
uguccucguccauccacau

SEQ ID NO: 2643121 - RNA, 19 nt, Artificial Sequence
  Description of Artificial Sequence: Synthetic oligonucleotide
ucgguaccacagguucccg

SEQ ID NO: 2643122 - RNA, 19 nt, Artificial Sequence
  Description of Artificial Sequence: Synthetic oligonucleotide
auccacaucugcacccucu

SEQ ID NO: 2643123 - RNA, 19 nt, Artificial Sequence
  Description of Artificial Sequence: Synthetic oligonucleotide
cuuugcgcacauuguugga

SEQ ID NO: 2643124 - RNA, 19 nt, Artificial Sequence
  Description of Artificial Sequence: Synthetic oligonucleotide
ggggcuaccucuagccacg

SEQ ID NO: 2643125 - RNA, 19 nt, Artificial Sequence
  Description of Artificial Sequence: Synthetic oligonucleotide
gagggcaauaggggcuacc

SEQ ID NO: 2643126 - RNA, 19 nt, Artificial Sequence
  Description of Artificial Sequence: Synthetic oligonucleotide
ggagagaugggaugugaua

SEQ ID NO: 2643127 - RNA, 19 nt, Artificial Sequence
  Description of Artificial Sequence: Synthetic oligonucleotide
ggaccuugaacaugggccu

SEQ ID NO: 2643128 - RNA, 19 nt, Artificial Sequence
  Description of Artificial Sequence: Synthetic oligonucleotide
agccuugcggguagcuggg

SEQ ID NO: 2643129 - RNA, 19 nt, Artificial Sequence
  Description of Artificial Sequence: Synthetic oligonucleotide
augcgacgacacacugucc

SEQ ID NO: 2643130 - RNA, 19 nt, Artificial Sequence
  Description of Artificial Sequence: Synthetic oligonucleotide
gccccgguagaaugcagag

SEQ ID NO: 2643131 - RNA, 19 nt, Artificial Sequence
  Description of Artificial Sequence: Synthetic oligonucleotide
gcccuuugggcucccgagg

SEQ ID NO: 2643132 - RNA, 19 nt, Artificial Sequence
  Description of Artificial Sequence: Synthetic oligonucleotide
caugguuuguacccauggu

SEQ ID NO: 2643133 - RNA, 19 nt, Artificial Sequence
  Description of Artificial Sequence: Synthetic oligonucleotide
ggacauguuccuggguacc

SEQ ID NO: 2643134 - RNA, 19 nt, Artificial Sequence
  Description of Artificial Sequence: Synthetic oligonucleotide
gacacaucgcugagggcaa

SEQ ID NO: 2643135 - RNA, 19 nt, Artificial Sequence
  Description of Artificial Sequence: Synthetic oligonucleotide
cguccauccacaucugcac

SEQ ID NO: 2643136 - RNA, 19 nt, Artificial Sequence
  Description of Artificial Sequence: Synthetic oligonucleotide
gaucccugcucgguaccac

SEQ ID NO: 2643137 - RNA, 19 nt, Artificial Sequence
  Description of Artificial Sequence: Synthetic oligonucleotide
acauguuccuggguaccau

SEQ ID NO: 2643138 - RNA, 19 nt, Artificial Sequence
  Description of Artificial Sequence: Synthetic oligonucleotide
agagggcgacacagagccc

SEQ ID NO: 2643139 - RNA, 19 nt, Artificial Sequence
  Description of Artificial Sequence: Synthetic oligonucleotide
ccccacagacacuuugcgc

SEQ ID NO: 2643140 - RNA, 19 nt, Artificial Sequence
  Description of Artificial Sequence: Synthetic oligonucleotide
cauuggcccggacagagau

SEQ ID NO: 2643141 - RNA, 19 nt, Artificial Sequence
  Description of Artificial Sequence: Synthetic oligonucleotide
guguccucguccauccaca

SEQ ID NO: 2643142 - RNA, 19 nt, Artificial Sequence
  Description of Artificial Sequence: Synthetic oligonucleotide
ccacagacaccugugucag

SEQ ID NO: 2643143 - RNA, 19 nt, Artificial Sequence
  Description of Artificial Sequence: Synthetic oligonucleotide
ugguguccucguccaucca

SEQ ID NO: 2643144 - RNA, 19 nt, Artificial Sequence
  Description of Artificial Sequence: Synthetic oligonucleotide
agguucccguuuucaucca

SEQ ID NO: 2643145 - RNA, 19 nt, Artificial Sequence
  Description of Artificial Sequence: Synthetic oligonucleotide
cacugucccacggcucagg

SEQ ID NO: 2643146 - RNA, 19 nt, Artificial Sequence
  Description of Artificial Sequence: Synthetic oligonucleotide
cggacagagaugugguccc

SEQ ID NO: 2643147 - RNA, 19 nt, Artificial Sequence
  Description of Artificial Sequence: Synthetic oligonucleotide
ucugcccuuugggcucccg

SEQ ID NO: 2643148 - RNA, 19 nt, Artificial Sequence
  Description of Artificial Sequence: Synthetic oligonucleotide
cgcugagggcaauaggggc

SEQ ID NO: 2643149 - RNA, 19 nt, Artificial Sequence
  Description of Artificial Sequence: Synthetic oligonucleotide
gaccuugaacaugggccuc

SEQ ID NO: 2643150 - RNA, 19 nt, Artificial Sequence
  Description of Artificial Sequence: Synthetic oligonucleotide
cgacacagagccccgguag

SEQ ID NO: 2643151 - RNA, 19 nt, Artificial Sequence
  Description of Artificial Sequence: Synthetic oligonucleotide
acccaugcgacgacacacu

SEQ ID NO: 2643152 - RNA, 19 nt, Artificial Sequence
  Description of Artificial Sequence: Synthetic oligonucleotide
cuccaaugccauaguccca

SEQ ID NO: 2643153 - RNA, 19 nt, Artificial Sequence
  Description of Artificial Sequence: Synthetic oligonucleotide
auuggcccggacagagaug

SEQ ID NO: 2643154 - RNA, 19 nt, Artificial Sequence
  Description of Artificial Sequence: Synthetic oligonucleotide
cugggaugauggacacauc

SEQ ID NO: 2643155 - RNA, 19 nt, Artificial Sequence
  Description of Artificial Sequence: Synthetic oligonucleotide
gggaugugauaccagcagu

SEQ ID NO: 2643156 - RNA, 19 nt, Artificial Sequence
  Description of Artificial Sequence: Synthetic oligonucleotide
aggccauggcuucccugga

SEQ ID NO: 2643157 - RNA, 19 nt, Artificial Sequence
  Description of Artificial Sequence: Synthetic oligonucleotide
ccgguagaaugcagagccg

SEQ ID NO: 2643158 - RNA, 19 nt, Artificial Sequence
  Description of Artificial Sequence: Synthetic oligonucleotide
uggagccuugcggguagcu

SEQ ID NO: 2643159 - RNA, 19 nt, Artificial Sequence
  Description of Artificial Sequence: Synthetic oligonucleotide
caaugccauagucccagcu

SEQ ID NO: 2643160 - RNA, 19 nt, Artificial Sequence
  Description of Artificial Sequence: Synthetic oligonucleotide
cgguagaaugcagagccgc

SEQ ID NO: 2643161 - RNA, 19 nt, Artificial Sequence
  Description of Artificial Sequence: Synthetic oligonucleotide
gucuggcccacagacaccu

SEQ ID NO: 2643162 - RNA, 19 nt, Artificial Sequence
  Description of Artificial Sequence: Synthetic oligonucleotide
cagagccgcccacagugca

SEQ ID NO: 2643163 - RNA, 19 nt, Artificial Sequence
  Description of Artificial Sequence: Synthetic oligonucleotide
gcaguaaacgggaccuuga

SEQ ID NO: 2643164 - RNA, 19 nt, Artificial Sequence
  Description of Artificial Sequence: Synthetic oligonucleotide
guccucguccauccacauc

SEQ ID NO: 2643165 - RNA, 19 nt, Artificial Sequence
  Description of Artificial Sequence: Synthetic oligonucleotide
acacugucccacggcucag

SEQ ID NO: 2643166 - RNA, 19 nt, Artificial Sequence
  Description of Artificial Sequence: Synthetic oligonucleotide
gcgcacauuguuggauacg

SEQ ID NO: 2643167 - RNA, 19 nt, Artificial Sequence
  Description of Artificial Sequence: Synthetic oligonucleotide
gagccccgguagaaugcag

SEQ ID NO: 2643168 - RNA, 19 nt, Artificial Sequence
  Description of Artificial Sequence: Synthetic oligonucleotide
cacggcucaggccauggcu

SEQ ID NO: 2643169 - RNA, 19 nt, Artificial Sequence
  Description of Artificial Sequence: Synthetic oligonucleotide
ggagccuugcggguagcug

SEQ ID NO: 2643170 - RNA, 19 nt, Artificial Sequence
  Description of Artificial Sequence: Synthetic oligonucleotide
cucuagccacggcccacug

SEQ ID NO: 2643171 - RNA, 19 nt, Artificial Sequence
  Description of Artificial Sequence: Synthetic oligonucleotide
cuucaugguuuguacccau

SEQ ID NO: 2643172 - RNA, 19 nt, Artificial Sequence
  Description of Artificial Sequence: Synthetic oligonucleotide
uggcauuggcccggacaga

SEQ ID NO: 2643173 - RNA, 19 nt, Artificial Sequence
  Description of Artificial Sequence: Synthetic oligonucleotide
gauguggucccagccuccu

SEQ ID NO: 2643174 - RNA, 19 nt, Artificial Sequence
  Description of Artificial Sequence: Synthetic oligonucleotide
ucccgaggcuggacaccca

SEQ ID NO: 2643175 - RNA, 19 nt, Artificial Sequence
  Description of Artificial Sequence: Synthetic oligonucleotide
gcccacagacaccuguguc

SEQ ID NO: 2643176 - RNA, 19 nt, Artificial Sequence
  Description of Artificial Sequence: Synthetic oligonucleotide
gccuccuguucccuggaca

SEQ ID NO: 2643177 - RNA, 19 nt, Artificial Sequence
  Description of Artificial Sequence: Synthetic oligonucleotide
cagucaccagcuggcugag

SEQ ID NO: 2643178 - RNA, 19 nt, Artificial Sequence
  Description of Artificial Sequence: Synthetic oligonucleotide
uagccacggcccacugguc

SEQ ID NO: 2643179 - RNA, 19 nt, Artificial Sequence
  Description of Artificial Sequence: Synthetic oligonucleotide
gcaaugugguguccucguc

SEQ ID NO: 2643180 - RNA, 19 nt, Artificial Sequence
  Description of Artificial Sequence: Synthetic oligonucleotide
ugagggcaauaggggcuac

SEQ ID NO: 2643181 - RNA, 19 nt, Artificial Sequence
  Description of Artificial Sequence: Synthetic oligonucleotide
gggcaauaggggcuaccuc

SEQ ID NO: 2643182 - RNA, 19 nt, Artificial Sequence
  Description of Artificial Sequence: Synthetic oligonucleotide
gguaccacagguucccguu

SEQ ID NO: 2643183 - RNA, 19 nt, Artificial Sequence
  Description of Artificial Sequence: Synthetic oligonucleotide
gcacauuguuggauacgug

SEQ ID NO: 2643184 - RNA, 19 nt, Artificial Sequence
  Description of Artificial Sequence: Synthetic oligonucleotide
augugguguccucguccau

SEQ ID NO: 2643185 - RNA, 19 nt, Artificial Sequence
  Description of Artificial Sequence: Synthetic oligonucleotide
uggcccggacagagaugug

SEQ ID NO: 2643186 - RNA, 19 nt, Artificial Sequence
  Description of Artificial Sequence: Synthetic oligonucleotide
cuggcccacagacaccugu

SEQ ID NO: 2643187 - RNA, 19 nt, Artificial Sequence
  Description of Artificial Sequence: Synthetic oligonucleotide
cccagaccugguccagugg

SEQ ID NO: 2643188 - RNA, 19 nt, Artificial Sequence
  Description of Artificial Sequence: Synthetic oligonucleotide
agccgcccacagugcaaug

SEQ ID NO: 2643189 - RNA, 19 nt, Artificial Sequence
  Description of Artificial Sequence: Synthetic oligonucleotide
cccaugcgacgacacacug

SEQ ID NO: 2643190 - RNA, 19 nt, Artificial Sequence
  Description of Artificial Sequence: Synthetic oligonucleotide
acggcccacuggucaccag

SEQ ID NO: 2643191 - RNA, 19 nt, Artificial Sequence
  Description of Artificial Sequence: Synthetic oligonucleotide
cacccucugggaugaugga

SEQ ID NO: 2643192 - RNA, 19 nt, Artificial Sequence
  Description of Artificial Sequence: Synthetic oligonucleotide
ccguuuucauccaaggcau

SEQ ID NO: 2643193 - RNA, 19 nt, Artificial Sequence
  Description of Artificial Sequence: Synthetic oligonucleotide
cugcccuuugggcucccga

SEQ ID NO: 2643194 - RNA, 19 nt, Artificial Sequence
  Description of Artificial Sequence: Synthetic oligonucleotide
cacagacacuuugcgcaca

SEQ ID NO: 2643195 - RNA, 19 nt, Artificial Sequence
  Description of Artificial Sequence: Synthetic oligonucleotide
cugagggcaauaggggcua

SEQ ID NO: 2643196 - RNA, 19 nt, Artificial Sequence
  Description of Artificial Sequence: Synthetic oligonucleotide
uggguaccaugguggcauu

SEQ ID NO: 2643197 - RNA, 19 nt, Artificial Sequence
  Description of Artificial Sequence: Synthetic oligonucleotide
agagccgcccacagugcaa

SEQ ID NO: 2643198 - RNA, 19 nt, Artificial Sequence
  Description of Artificial Sequence: Synthetic oligonucleotide
gccacggcccacuggucac

SEQ ID NO: 2643199 - RNA, 19 nt, Artificial Sequence
  Description of Artificial Sequence: Synthetic oligonucleotide
ugcucccaacuggagccuu

SEQ ID NO: 2643200 - RNA, 19 nt, Artificial Sequence
  Description of Artificial Sequence: Synthetic oligonucleotide
ugguggcauuggcccggac

SEQ ID NO: 2643201 - RNA, 19 nt, Artificial Sequence
  Description of Artificial Sequence: Synthetic oligonucleotide
caucugcacccucugggau

SEQ ID NO: 2643202 - RNA, 19 nt, Artificial Sequence
  Description of Artificial Sequence: Synthetic oligonucleotide
ggguaccaugguggcauug

SEQ ID NO: 2643203 - RNA, 19 nt, Artificial Sequence
  Description of Artificial Sequence: Synthetic oligonucleotide
ggcuaccucuagccacggc

SEQ ID NO: 2643204 - RNA, 19 nt, Artificial Sequence
  Description of Artificial Sequence: Synthetic oligonucleotide
ccuucaugguuuguaccca

SEQ ID NO: 2643205 - RNA, 19 nt, Artificial Sequence
  Description of Artificial Sequence: Synthetic oligonucleotide
cagugcaaugugguguccu

SEQ ID NO: 2643206 - RNA, 19 nt, Artificial Sequence
  Description of Artificial Sequence: Synthetic oligonucleotide
cuggagccuugcggguagc

SEQ ID NO: 2643207 - RNA, 19 nt, Artificial Sequence
  Description of Artificial Sequence: Synthetic oligonucleotide
cagcuggcugagagggcga

SEQ ID NO: 2643208 - RNA, 19 nt, Artificial Sequence
  Description of Artificial Sequence: Synthetic oligonucleotide
gcaauaggggcuaccucua

SEQ ID NO: 2643209 - RNA, 19 nt, Artificial Sequence
  Description of Artificial Sequence: Synthetic oligonucleotide
agcuucuguuugggagaga

SEQ ID NO: 2643210 - RNA, 19 nt, Artificial Sequence
  Description of Artificial Sequence: Synthetic oligonucleotide
ccccgguagaaugcagagc

SEQ ID NO: 2643211 - RNA, 19 nt, Artificial Sequence
  Description of Artificial Sequence: Synthetic oligonucleotide
guaccacagguucccguuu

SEQ ID NO: 2643212 - RNA, 19 nt, Artificial Sequence
  Description of Artificial Sequence: Synthetic oligonucleotide
gggugaucccugcucggua

SEQ ID NO: 2643213 - RNA, 19 nt, Artificial Sequence
  Description of Artificial Sequence: Synthetic oligonucleotide
cuggacuuuguuggcaauu

SEQ ID NO: 2643214 - RNA, 19 nt, Artificial Sequence
  Description of Artificial Sequence: Synthetic oligonucleotide
cccggacagagaugugguc

SEQ ID NO: 2643215 - RNA, 19 nt, Artificial Sequence
  Description of Artificial Sequence: Synthetic oligonucleotide
ccucguccauccacaucug

SEQ ID NO: 2643216 - RNA, 19 nt, Artificial Sequence
  Description of Artificial Sequence: Synthetic oligonucleotide
agucaccagcuggcugaga

SEQ ID NO: 2643217 - RNA, 19 nt, Artificial Sequence
  Description of Artificial Sequence: Synthetic oligonucleotide
cccuggacuuuguuggcaa

SEQ ID NO: 2643218 - RNA, 19 nt, Artificial Sequence
  Description of Artificial Sequence: Synthetic oligonucleotide
gggcuaccucuagccacgg

SEQ ID NO: 2643219 - RNA, 19 nt, Artificial Sequence
  Description of Artificial Sequence: Synthetic oligonucleotide
ggacacccaugcgacgaca

SEQ ID NO: 2643220 - RNA, 19 nt, Artificial Sequence
  Description of Artificial Sequence: Synthetic oligonucleotide
gagccgcccacagugcaau

SEQ ID NO: 2643221 - RNA, 19 nt, Artificial Sequence
  Description of Artificial Sequence: Synthetic oligonucleotide
ccgaggcuggacacccaug

SEQ ID NO: 2643222 - RNA, 19 nt, Artificial Sequence
  Description of Artificial Sequence: Synthetic oligonucleotide
ggacagagaugugguccca

SEQ ID NO: 2643223 - RNA, 19 nt, Artificial Sequence
  Description of Artificial Sequence: Synthetic oligonucleotide
gggcgacacagagccccgg

SEQ ID NO: 2643224 - RNA, 19 nt, Artificial Sequence
  Description of Artificial Sequence: Synthetic oligonucleotide
ggucccagccuccuccaau

SEQ ID NO: 2643225 - RNA, 19 nt, Artificial Sequence
  Description of Artificial Sequence: Synthetic oligonucleotide
gcgacacagagccccggua

SEQ ID NO: 2643226 - RNA, 19 nt, Artificial Sequence
  Description of Artificial Sequence: Synthetic oligonucleotide
ccacagguucccguuuuca

SEQ ID NO: 2643227 - RNA, 19 nt, Artificial Sequence
  Description of Artificial Sequence: Synthetic oligonucleotide
cgacgacacacugucccac

SEQ ID NO: 2643228 - RNA, 19 nt, Artificial Sequence
  Description of Artificial Sequence: Synthetic oligonucleotide
cacggcccacuggucacca

SEQ ID NO: 2643229 - RNA, 19 nt, Artificial Sequence
  Description of Artificial Sequence: Synthetic oligonucleotide
gcccacagugcaauguggu

SEQ ID NO: 2643230 - RNA, 19 nt, Artificial Sequence
  Description of Artificial Sequence: Synthetic oligonucleotide
gggagagaugggaugugau

SEQ ID NO: 2643231 - RNA, 19 nt, Artificial Sequence
  Description of Artificial Sequence: Synthetic oligonucleotide
gcucugcccuuugggcucc

SEQ ID NO: 2643232 - RNA, 19 nt, Artificial Sequence
  Description of Artificial Sequence: Synthetic oligonucleotide
ggcgacacagagccccggu

SEQ ID NO: 2643233 - RNA, 19 nt, Artificial Sequence
  Description of Artificial Sequence: Synthetic oligonucleotide
gccuugcggguagcugggg

SEQ ID NO: 2643234 - RNA, 19 nt, Artificial Sequence
  Description of Artificial Sequence: Synthetic oligonucleotide
cacagagccccgguagaau

SEQ ID NO: 2643235 - RNA, 19 nt, Artificial Sequence
  Description of Artificial Sequence: Synthetic oligonucleotide
ccaugcgacgacacacugu

SEQ ID NO: 2643236 - RNA, 19 nt, Artificial Sequence
  Description of Artificial Sequence: Synthetic oligonucleotide
gcauuggcccggacagaga

SEQ ID NO: 2643237 - RNA, 19 nt, Artificial Sequence
  Description of Artificial Sequence: Synthetic oligonucleotide
cucugcccuuugggcuccc

SEQ ID NO: 2643238 - RNA, 19 nt, Artificial Sequence
  Description of Artificial Sequence: Synthetic oligonucleotide
gggccuccuguucccugga

SEQ ID NO: 2643239 - RNA, 19 nt, Artificial Sequence
  Description of Artificial Sequence: Synthetic oligonucleotide
ggggugaucccugcucggu

SEQ ID NO: 2643240 - RNA, 19 nt, Artificial Sequence
  Description of Artificial Sequence: Synthetic oligonucleotide
ccacggcccacuggucacc

SEQ ID NO: 2643241 - RNA, 19 nt, Artificial Sequence
  Description of Artificial Sequence: Synthetic oligonucleotide
gcuggcugagagggcgaca

SEQ ID NO: 2643242 - RNA, 19 nt, Artificial Sequence
  Description of Artificial Sequence: Synthetic oligonucleotide
gcccggacagagauguggu

SEQ ID NO: 2643243 - RNA, 19 nt, Artificial Sequence
  Description of Artificial Sequence: Synthetic oligonucleotide
ccuggguaccaugguggca

SEQ ID NO: 2643244 - RNA, 19 nt, Artificial Sequence
  Description of Artificial Sequence: Synthetic oligonucleotide
caugggccuccuguucccu

SEQ ID NO: 2643245 - RNA, 19 nt, Artificial Sequence
  Description of Artificial Sequence: Synthetic oligonucleotide
gccgcccacagugcaaugu

SEQ ID NO: 2643246 - RNA, 19 nt, Artificial Sequence
  Description of Artificial Sequence: Synthetic oligonucleotide
ccuggacauguuccugggu

SEQ ID NO: 2643247 - RNA, 19 nt, Artificial Sequence
  Description of Artificial Sequence: Synthetic oligonucleotide
ccuggacuuuguuggcaau

SEQ ID NO: 2643248 - RNA, 19 nt, Artificial Sequence
  Description of Artificial Sequence: Synthetic oligonucleotide
ccuuugggcucccgaggcu

SEQ ID NO: 2643249 - RNA, 19 nt, Artificial Sequence
  Description of Artificial Sequence: Synthetic oligonucleotide
ggcuucccuggacuuuguu

SEQ ID NO: 2643250 - RNA, 19 nt, Artificial Sequence
  Description of Artificial Sequence: Synthetic oligonucleotide
cagcaguaaacgggaccuu

SEQ ID NO: 2643251 - RNA, 19 nt, Artificial Sequence
  Description of Artificial Sequence: Synthetic oligonucleotide
ccuugaacaugggccuccu

SEQ ID NO: 2643252 - RNA, 19 nt, Artificial Sequence
  Description of Artificial Sequence: Synthetic oligonucleotide
cagacacuuugcgcacauu

SEQ ID NO: 2643253 - RNA, 19 nt, Artificial Sequence
  Description of Artificial Sequence: Synthetic oligonucleotide
cccgaggcuggacacccau

SEQ ID NO: 2643254 - RNA, 19 nt, Artificial Sequence
  Description of Artificial Sequence: Synthetic oligonucleotide
gcccacuggucaccagcuu

SEQ ID NO: 2643255 - RNA, 19 nt, Artificial Sequence
  Description of Artificial Sequence: Synthetic oligonucleotide
ggucaccagcuugcauuuu

SEQ ID NO: 2643256 - RNA, 19 nt, Artificial Sequence
  Description of Artificial Sequence: Synthetic oligonucleotide
cugcacccucugggaugau

SEQ ID NO: 2643257 - RNA, 19 nt, Artificial Sequence
  Description of Artificial Sequence: Synthetic oligonucleotide
uauuauauuaaaauguaag

SEQ ID NO: 2643258 - RNA, 19 nt, Artificial Sequence
  Description of Artificial Sequence: Synthetic oligonucleotide
agaaccaaaagcuucauac

SEQ ID NO: 2643259 - RNA, 19 nt, Artificial Sequence
  Description of Artificial Sequence: Synthetic oligonucleotide
uuaaaauguaagaaauugg

SEQ ID NO: 2643260 - RNA, 19 nt, Artificial Sequence
  Description of Artificial Sequence: Synthetic oligonucleotide
uauuauauaggacgcaggg

SEQ ID NO: 2643261 - RNA, 19 nt, Artificial Sequence
  Description of Artificial Sequence: Synthetic oligonucleotide
uaaaauguaagaaauugga

SEQ ID NO: 2643262 - RNA, 19 nt, Artificial Sequence
  Description of Artificial Sequence: Synthetic oligonucleotide
aaagauaaaagaguucugg

SEQ ID NO: 2643263 - RNA, 19 nt, Artificial Sequence
  Description of Artificial Sequence: Synthetic oligonucleotide
aaauguaagaaauuggaaa

SEQ ID NO: 2643264 - RNA, 19 nt, Artificial Sequence
  Description of Artificial Sequence: Synthetic oligonucleotide
aaaucauuaagaucauguc

SEQ ID NO: 2643265 - RNA, 19 nt, Artificial Sequence
  Description of Artificial Sequence: Synthetic oligonucleotide
aauguaagaaauuggaaau

SEQ ID NO: 2643266 - RNA, 19 nt, Artificial Sequence
  Description of Artificial Sequence: Synthetic oligonucleotide
aaucauuaagaucauguca

SEQ ID NO: 2643267 - RNA, 19 nt, Artificial Sequence
  Description of Artificial Sequence: Synthetic oligonucleotide
gugaaaaucauuaagauca

SEQ ID NO: 2643268 - RNA, 19 nt, Artificial Sequence
  Description of Artificial Sequence: Synthetic oligonucleotide
gaugacaaagauaaaagag

SEQ ID NO: 2643269 - RNA, 19 nt, Artificial Sequence
  Description of Artificial Sequence: Synthetic oligonucleotide
auuauauuaaaauguaaga

SEQ ID NO: 2643270 - RNA, 19 nt, Artificial Sequence
  Description of Artificial Sequence: Synthetic oligonucleotide
ugaaauacucagaaggugc

SEQ ID NO: 2643271 - RNA, 19 nt, Artificial Sequence
  Description of Artificial Sequence: Synthetic oligonucleotide
aaaaucauuaagaucaugu

SEQ ID NO: 2643272 - RNA, 19 nt, Artificial Sequence
  Description of Artificial Sequence: Synthetic oligonucleotide
uuauauaggacgcaggguc

SEQ ID NO: 2643273 - RNA, 19 nt, Artificial Sequence
  Description of Artificial Sequence: Synthetic oligonucleotide
ucugcauagaucaggacag

SEQ ID NO: 2643274 - RNA, 19 nt, Artificial Sequence
  Description of Artificial Sequence: Synthetic oligonucleotide
guaacuguuuccuuaauag

SEQ ID NO: 2643275 - RNA, 19 nt, Artificial Sequence
  Description of Artificial Sequence: Synthetic oligonucleotide
ucaugucaaauucucauag

SEQ ID NO: 2643276 - RNA, 19 nt, Artificial Sequence
  Description of Artificial Sequence: Synthetic oligonucleotide
ucugguuuuauuuuggggu

SEQ ID NO: 2643277 - RNA, 19 nt, Artificial Sequence
  Description of Artificial Sequence: Synthetic oligonucleotide
cauagaucaggacagaggc

SEQ ID NO: 2643278 - RNA, 19 nt, Artificial Sequence
  Description of Artificial Sequence: Synthetic oligonucleotide
uccuuaauaguuauugcag

SEQ ID NO: 2643279 - RNA, 19 nt, Artificial Sequence
  Description of Artificial Sequence: Synthetic oligonucleotide
uuaagaucaugucaaauuc

SEQ ID NO: 2643280 - RNA, 19 nt, Artificial Sequence
  Description of Artificial Sequence: Synthetic oligonucleotide
aaugagccaggucagggcg

SEQ ID NO: 2643281 - RNA, 19 nt, Artificial Sequence
  Description of Artificial Sequence: Synthetic oligonucleotide
uucucauagauuacugugg

SEQ ID NO: 2643282 - RNA, 19 nt, Artificial Sequence
  Description of Artificial Sequence: Synthetic oligonucleotide
uuauauuaaaauguaagaa

SEQ ID NO: 2643283 - RNA, 19 nt, Artificial Sequence
  Description of Artificial Sequence: Synthetic oligonucleotide
cuugacuugaaauacucag

SEQ ID NO: 2643284 - RNA, 19 nt, Artificial Sequence
  Description of Artificial Sequence: Synthetic oligonucleotide
aacaugaguccauauguag

SEQ ID NO: 2643285 - RNA, 19 nt, Artificial Sequence
  Description of Artificial Sequence: Synthetic oligonucleotide
uaggaaauggugaugaccu

SEQ ID NO: 2643286 - RNA, 19 nt, Artificial Sequence
  Description of Artificial Sequence: Synthetic oligonucleotide
guuaacuauacaugguugg

SEQ ID NO: 2643287 - RNA, 19 nt, Artificial Sequence
  Description of Artificial Sequence: Synthetic oligonucleotide
aaaagcuucauacaugcua

SEQ ID NO: 2643288 - RNA, 19 nt, Artificial Sequence
  Description of Artificial Sequence: Synthetic oligonucleotide
acaaagauaaaagaguucu

SEQ ID NO: 2643289 - RNA, 19 nt, Artificial Sequence
  Description of Artificial Sequence: Synthetic oligonucleotide
aauuccagguauuccaucu

SEQ ID NO: 2643290 - RNA, 19 nt, Artificial Sequence
  Description of Artificial Sequence: Synthetic oligonucleotide
aagauaaaagaguucuggu

SEQ ID NO: 2643291 - RNA, 19 nt, Artificial Sequence
  Description of Artificial Sequence: Synthetic oligonucleotide
uguuaacuauacaugguug

SEQ ID NO: 2643292 - RNA, 19 nt, Artificial Sequence
  Description of Artificial Sequence: Synthetic oligonucleotide
agauaaaagaguucuggug

SEQ ID NO: 2643293 - RNA, 19 nt, Artificial Sequence
  Description of Artificial Sequence: Synthetic oligonucleotide
auucucauagauuacugug

SEQ ID NO: 2643294 - RNA, 19 nt, Artificial Sequence
  Description of Artificial Sequence: Synthetic oligonucleotide
aaucugguuuuauuuuggg

SEQ ID NO: 2643295 - RNA, 19 nt, Artificial Sequence
  Description of Artificial Sequence: Synthetic oligonucleotide
uuccuuaauaguuauugca

SEQ ID NO: 2643296 - RNA, 19 nt, Artificial Sequence
  Description of Artificial Sequence: Synthetic oligonucleotide
uguaucugcauagaucagg

SEQ ID NO: 2643297 - RNA, 19 nt, Artificial Sequence
  Description of Artificial Sequence: Synthetic oligonucleotide
ucugaucugagcauaguac

SEQ ID NO: 2643298 - RNA, 19 nt, Artificial Sequence
  Description of Artificial Sequence: Synthetic oligonucleotide
uccaucuugcucaucaacc

SEQ ID NO: 2643299 - RNA, 19 nt, Artificial Sequence
  Description of Artificial Sequence: Synthetic oligonucleotide
aagaucaugucaaauucuc

SEQ ID NO: 2643300 - RNA, 19 nt, Artificial Sequence
  Description of Artificial Sequence: Synthetic oligonucleotide
uaauaguuauugcaggagu

SEQ ID NO: 2643301 - RNA, 19 nt, Artificial Sequence
  Description of Artificial Sequence: Synthetic oligonucleotide
uacaugcuaaaacaugccc

SEQ ID NO: 2643302 - RNA, 19 nt, Artificial Sequence
  Description of Artificial Sequence: Synthetic oligonucleotide
ugacuugaaauacucagaa

SEQ ID NO: 2643303 - RNA, 19 nt, Artificial Sequence
  Description of Artificial Sequence: Synthetic oligonucleotide
ggcccuauuauauaggacg

SEQ ID NO: 2643304 - RNA, 19 nt, Artificial Sequence
  Description of Artificial Sequence: Synthetic oligonucleotide
cugaucugagcauaguacg

SEQ ID NO: 2643305 - RNA, 19 nt, Artificial Sequence
  Description of Artificial Sequence: Synthetic oligonucleotide
ucaaacuggucucuggggc

SEQ ID NO: 2643306 - RNA, 19 nt, Artificial Sequence
  Description of Artificial Sequence: Synthetic oligonucleotide
aaccaaaagcuucauacau

SEQ ID NO: 2643307 - RNA, 19 nt, Artificial Sequence
  Description of Artificial Sequence: Synthetic oligonucleotide
ugaucugagcauaguacgg

SEQ ID NO: 2643308 - RNA, 19 nt, Artificial Sequence
  Description of Artificial Sequence: Synthetic oligonucleotide
aauggugaugaccuugacu

SEQ ID NO: 2643309 - RNA, 19 nt, Artificial Sequence
  Description of Artificial Sequence: Synthetic oligonucleotide
uuaauaguuauugcaggag

SEQ ID NO: 2643310 - RNA, 19 nt, Artificial Sequence
  Description of Artificial Sequence: Synthetic oligonucleotide
guuuccuuaauaguuauug

SEQ ID NO: 2643311 - RNA, 19 nt, Artificial Sequence
  Description of Artificial Sequence: Synthetic oligonucleotide
acaugcuaaaacaugcccc

SEQ ID NO: 2643312 - RNA, 19 nt, Artificial Sequence
  Description of Artificial Sequence: Synthetic oligonucleotide
ugacaaagauaaaagaguu

SEQ ID NO: 2643313 - RNA, 19 nt, Artificial Sequence
  Description of Artificial Sequence: Synthetic oligonucleotide
uuuauuuugggguguguga

SEQ ID NO: 2643314 - RNA, 19 nt, Artificial Sequence
  Description of Artificial Sequence: Synthetic oligonucleotide
uagaucaggacagaggcag

SEQ ID NO: 2643315 - RNA, 19 nt, Artificial Sequence
  Description of Artificial Sequence: Synthetic oligonucleotide
aaauuccagguauuccauc

SEQ ID NO: 2643316 - RNA, 19 nt, Artificial Sequence
  Description of Artificial Sequence: Synthetic oligonucleotide
agaagauggauucugcagu

SEQ ID NO: 2643317 - RNA, 19 nt, Artificial Sequence
  Description of Artificial Sequence: Synthetic oligonucleotide
uuuguuaacuauacauggu

SEQ ID NO: 2643318 - RNA, 19 nt, Artificial Sequence
  Description of Artificial Sequence: Synthetic oligonucleotide
agauuacugugguuaaaac

SEQ ID NO: 2643319 - RNA, 19 nt, Artificial Sequence
  Description of Artificial Sequence: Synthetic oligonucleotide
uugguuuuguuaacuauac

SEQ ID NO: 2643320 - RNA, 19 nt, Artificial Sequence
  Description of Artificial Sequence: Synthetic oligonucleotide
uaauacacucccuuguaga

SEQ ID NO: 2643321 - RNA, 19 nt, Artificial Sequence
  Description of Artificial Sequence: Synthetic oligonucleotide
aaaucugguuuuauuuugg

SEQ ID NO: 2643322 - RNA, 19 nt, Artificial Sequence
  Description of Artificial Sequence: Synthetic oligonucleotide
cuucauacaugcuaaaaca

SEQ ID NO: 2643323 - RNA, 19 nt, Artificial Sequence
  Description of Artificial Sequence: Synthetic oligonucleotide
auacucagaaggugcaugg

SEQ ID NO: 2643324 - RNA, 19 nt, Artificial Sequence
  Description of Artificial Sequence: Synthetic oligonucleotide
ugcuaaaacaugccccagg

SEQ ID NO: 2643325 - RNA, 19 nt, Artificial Sequence
  Description of Artificial Sequence: Synthetic oligonucleotide
ucauagauuacugugguua

SEQ ID NO: 2643326 - RNA, 19 nt, Artificial Sequence
  Description of Artificial Sequence: Synthetic oligonucleotide
cauaguacggcuuuccauc

SEQ ID NO: 2643327 - RNA, 19 nt, Artificial Sequence
  Description of Artificial Sequence: Synthetic oligonucleotide
uauuccaucuuccuuggaa

SEQ ID NO: 2643328 - RNA, 19 nt, Artificial Sequence
  Description of Artificial Sequence: Synthetic oligonucleotide
uacugguccugaaugaacc

SEQ ID NO: 2643329 - RNA, 19 nt, Artificial Sequence
  Description of Artificial Sequence: Synthetic oligonucleotide
cuauuauauaggacgcagg

SEQ ID NO: 2643330 - RNA, 19 nt, Artificial Sequence
  Description of Artificial Sequence: Synthetic oligonucleotide
uuuccuuaauaguuauugc

SEQ ID NO: 2643331 - RNA, 19 nt, Artificial Sequence
  Description of Artificial Sequence: Synthetic oligonucleotide
aauacacucccuuguagaa

SEQ ID NO: 2643332 - RNA, 19 nt, Artificial Sequence
  Description of Artificial Sequence: Synthetic oligonucleotide
augguugguaacuguuucc

SEQ ID NO: 2643333 - RNA, 19 nt, Artificial Sequence
  Description of Artificial Sequence: Synthetic oligonucleotide
ggggauuagaaccaaaagc

SEQ ID NO: 2643334 - RNA, 19 nt, Artificial Sequence
  Description of Artificial Sequence: Synthetic oligonucleotide
uuugguaauacacucccuu

SEQ ID NO: 2643335 - RNA, 19 nt, Artificial Sequence
  Description of Artificial Sequence: Synthetic oligonucleotide
aauacucagaaggugcaug

SEQ ID NO: 2643336 - RNA, 19 nt, Artificial Sequence
  Description of Artificial Sequence: Synthetic oligonucleotide
uggggauuagaaccaaaag

SEQ ID NO: 2643337 - RNA, 19 nt, Artificial Sequence
  Description of Artificial Sequence: Synthetic oligonucleotide
uugacuugaaauacucaga

SEQ ID NO: 2643338 - RNA, 19 nt, Artificial Sequence
  Description of Artificial Sequence: Synthetic oligonucleotide
aagaaauuggaaaucuggu

SEQ ID NO: 2643339 - RNA, 19 nt, Artificial Sequence
  Description of Artificial Sequence: Synthetic oligonucleotide
aaauuggaaaucugguuuu

SEQ ID NO: 2643340 - RNA, 19 nt, Artificial Sequence
  Description of Artificial Sequence: Synthetic oligonucleotide
uuguuaacuauacaugguu

SEQ ID NO: 2643341 - RNA, 19 nt, Artificial Sequence
  Description of Artificial Sequence: Synthetic oligonucleotide
ugugaguaugguucugggg

SEQ ID NO: 2643342 - RNA, 19 nt, Artificial Sequence
  Description of Artificial Sequence: Synthetic oligonucleotide
ucucauagauuacuguggu

SEQ ID NO: 2643343 - RNA, 19 nt, Artificial Sequence
  Description of Artificial Sequence: Synthetic oligonucleotide
aucugguuuuauuuugggg

SEQ ID NO: 2643344 - RNA, 19 nt, Artificial Sequence
  Description of Artificial Sequence: Synthetic oligonucleotide
gauuagaaccaaaagcuuc

SEQ ID NO: 2643345 - RNA, 19 nt, Artificial Sequence
  Description of Artificial Sequence: Synthetic oligonucleotide
auuacugugguuaaaacuu

SEQ ID NO: 2643346 - RNA, 19 nt, Artificial Sequence
  Description of Artificial Sequence: Synthetic oligonucleotide
acaugaguccauauguagc

SEQ ID NO: 2643347 - RNA, 19 nt, Artificial Sequence
  Description of Artificial Sequence: Synthetic oligonucleotide
caccaauuugguaauacac

SEQ ID NO: 2643348 - RNA, 19 nt, Artificial Sequence
  Description of Artificial Sequence: Synthetic oligonucleotide
augacaaagauaaaagagu

SEQ ID NO: 2643349 - RNA, 19 nt, Artificial Sequence
  Description of Artificial Sequence: Synthetic oligonucleotide
aacuguaggaaauggugau

SEQ ID NO: 2643350 - RNA, 19 nt, Artificial Sequence
  Description of Artificial Sequence: Synthetic oligonucleotide
aaaauguaagaaauuggaa

SEQ ID NO: 2643351 - RNA, 19 nt, Artificial Sequence
  Description of Artificial Sequence: Synthetic oligonucleotide
caauuugguaauacacucc

SEQ ID NO: 2643352 - RNA, 19 nt, Artificial Sequence
  Description of Artificial Sequence: Synthetic oligonucleotide
uauugcaggaguaggucca

SEQ ID NO: 2643353 - RNA, 19 nt, Artificial Sequence
  Description of Artificial Sequence: Synthetic oligonucleotide
gugaguaugguucugggga

SEQ ID NO: 2643354 - RNA, 19 nt, Artificial Sequence
  Description of Artificial Sequence: Synthetic oligonucleotide
uugaaauacucagaaggug

SEQ ID NO: 2643355 - RNA, 19 nt, Artificial Sequence
  Description of Artificial Sequence: Synthetic oligonucleotide
uauauaggacgcaggguca

SEQ ID NO: 2643356 - RNA, 19 nt, Artificial Sequence
  Description of Artificial Sequence: Synthetic oligonucleotide
cuggugaaaaucauuaaga

SEQ ID NO: 2643357 - RNA, 19 nt, Artificial Sequence
  Description of Artificial Sequence: Synthetic oligonucleotide
aucauuaagaucaugucaa

SEQ ID NO: 2643358 - RNA, 19 nt, Artificial Sequence
  Description of Artificial Sequence: Synthetic oligonucleotide
uggugaaaaucauuaagau

SEQ ID NO: 2643359 - RNA, 19 nt, Artificial Sequence
  Description of Artificial Sequence: Synthetic oligonucleotide
uaguuauugcaggaguagg

SEQ ID NO: 2643360 - RNA, 19 nt, Artificial Sequence
  Description of Artificial Sequence: Synthetic oligonucleotide
ugguaauacacucccuugu

SEQ ID NO: 2643361 - RNA, 19 nt, Artificial Sequence
  Description of Artificial Sequence: Synthetic oligonucleotide
gaagaugcuucuuuccaac

SEQ ID NO: 2643362 - RNA, 19 nt, Artificial Sequence
  Description of Artificial Sequence: Synthetic oligonucleotide
aacuguuuccuuaauaguu

SEQ ID NO: 2643363 - RNA, 19 nt, Artificial Sequence
  Description of Artificial Sequence: Synthetic oligonucleotide
aaaagaguucuggugaaaa

SEQ ID NO: 2643364 - RNA, 19 nt, Artificial Sequence
  Description of Artificial Sequence: Synthetic oligonucleotide
ugugugaguaugguucugg

SEQ ID NO: 2643365 - RNA, 19 nt, Artificial Sequence
  Description of Artificial Sequence: Synthetic oligonucleotide
cuuaauaguuauugcagga

SEQ ID NO: 2643366 - RNA, 19 nt, Artificial Sequence
  Description of Artificial Sequence: Synthetic oligonucleotide
guaauacacucccuuguag

SEQ ID NO: 2643367 - RNA, 19 nt, Artificial Sequence
  Description of Artificial Sequence: Synthetic oligonucleotide
aaagaguucuggugaaaau

SEQ ID NO: 2643368 - RNA, 19 nt, Artificial Sequence
  Description of Artificial Sequence: Synthetic oligonucleotide
uugguaauacacucccuug

SEQ ID NO: 2643369 - RNA, 19 nt, Artificial Sequence
  Description of Artificial Sequence: Synthetic oligonucleotide
gauuacugugguuaaaacu

SEQ ID NO: 2643370 - RNA, 19 nt, Artificial Sequence
  Description of Artificial Sequence: Synthetic oligonucleotide
cuuggaagaucuuccuccg

SEQ ID NO: 2643371 - RNA, 19 nt, Artificial Sequence
  Description of Artificial Sequence: Synthetic oligonucleotide
auacaugcuaaaacaugcc

SEQ ID NO: 2643372 - RNA, 19 nt, Artificial Sequence
  Description of Artificial Sequence: Synthetic oligonucleotide
agaaauuggaaaucugguu

SEQ ID NO: 2643373 - RNA, 19 nt, Artificial Sequence
  Description of Artificial Sequence: Synthetic oligonucleotide
uauacaugguugguaacug

SEQ ID NO: 2643374 - RNA, 19 nt, Artificial Sequence
  Description of Artificial Sequence: Synthetic oligonucleotide
cucagaaggugcauggcag

SEQ ID NO: 2643375 - RNA, 19 nt, Artificial Sequence
  Description of Artificial Sequence: Synthetic oligonucleotide
auaguuauugcaggaguag

SEQ ID NO: 2643376 - RNA, 19 nt, Artificial Sequence
  Description of Artificial Sequence: Synthetic oligonucleotide
auguaagaaauuggaaauc

SEQ ID NO: 2643377 - RNA, 19 nt, Artificial Sequence
  Description of Artificial Sequence: Synthetic oligonucleotide
gacuugaaauacucagaag

SEQ ID NO: 2643378 - RNA, 19 nt, Artificial Sequence
  Description of Artificial Sequence: Synthetic oligonucleotide
uaacuguuuccuuaauagu

SEQ ID NO: 2643379 - RNA, 19 nt, Artificial Sequence
  Description of Artificial Sequence: Synthetic oligonucleotide
ucaccaauuugguaauaca

SEQ ID NO: 2643380 - RNA, 19 nt, Artificial Sequence
  Description of Artificial Sequence: Synthetic oligonucleotide
aacuuguaucugcauagau

SEQ ID NO: 2643381 - RNA, 19 nt, Artificial Sequence
  Description of Artificial Sequence: Synthetic oligonucleotide
uauguagcccuucucuggu

SEQ ID NO: 2643382 - RNA, 19 nt, Artificial Sequence
  Description of Artificial Sequence: Synthetic oligonucleotide
ugucaaauucucauagauu

SEQ ID NO: 2643383 - RNA, 19 nt, Artificial Sequence
  Description of Artificial Sequence: Synthetic oligonucleotide
auuagaaccaaaagcuuca

SEQ ID NO: 2643384 - RNA, 19 nt, Artificial Sequence
  Description of Artificial Sequence: Synthetic oligonucleotide
ugcuucuuuccaacuuugg

SEQ ID NO: 2643385 - RNA, 19 nt, Artificial Sequence
  Description of Artificial Sequence: Synthetic oligonucleotide
gaaccaaaagcuucauaca

SEQ ID NO: 2643386 - RNA, 19 nt, Artificial Sequence
  Description of Artificial Sequence: Synthetic oligonucleotide
guaggaaauggugaugacc

SEQ ID NO: 2643387 - RNA, 19 nt, Artificial Sequence
  Description of Artificial Sequence: Synthetic oligonucleotide
gaaugagccaggucagggc

SEQ ID NO: 2643388 - RNA, 19 nt, Artificial Sequence
  Description of Artificial Sequence: Synthetic oligonucleotide
cugguuuuauuuuggggug

SEQ ID NO: 2643389 - RNA, 19 nt, Artificial Sequence
  Description of Artificial Sequence: Synthetic oligonucleotide
aagaugcuucuuuccaacu

SEQ ID NO: 2643390 - RNA, 19 nt, Artificial Sequence
  Description of Artificial Sequence: Synthetic oligonucleotide
caaagauaaaagaguucug

SEQ ID NO: 2643391 - RNA, 19 nt, Artificial Sequence
  Description of Artificial Sequence: Synthetic oligonucleotide
aauaguuauugcaggagua

SEQ ID NO: 2643392 - RNA, 19 nt, Artificial Sequence
  Description of Artificial Sequence: Synthetic oligonucleotide
uagauuacugugguuaaaa

SEQ ID NO: 2643393 - RNA, 19 nt, Artificial Sequence
  Description of Artificial Sequence: Synthetic oligonucleotide
ugggaacuguaggaaaugg

SEQ ID NO: 2643394 - RNA, 19 nt, Artificial Sequence
  Description of Artificial Sequence: Synthetic oligonucleotide
ccuuaauaguuauugcagg

SEQ ID NO: 2643395 - RNA, 19 nt, Artificial Sequence
  Description of Artificial Sequence: Synthetic oligonucleotide
aguacggcuuuccaucuug

SEQ ID NO: 2643396 - RNA, 19 nt, Artificial Sequence
  Description of Artificial Sequence: Synthetic oligonucleotide
gaagaucuuccuccggccc

SEQ ID NO: 2643397 - RNA, 19 nt, Artificial Sequence
  Description of Artificial Sequence: Synthetic oligonucleotide
aaugaacccucugaucuga

SEQ ID NO: 2643398 - RNA, 19 nt, Artificial Sequence
  Description of Artificial Sequence: Synthetic oligonucleotide
auaaaagaguucuggugaa

SEQ ID NO: 2643399 - RNA, 19 nt, Artificial Sequence
  Description of Artificial Sequence: Synthetic oligonucleotide
aggaguagguccaacauga

SEQ ID NO: 2643400 - RNA, 19 nt, Artificial Sequence
  Description of Artificial Sequence: Synthetic oligonucleotide
agaaacaacaucaccaauu

SEQ ID NO: 2643401 - RNA, 19 nt, Artificial Sequence
  Description of Artificial Sequence: Synthetic oligonucleotide
ggugaaaaucauuaagauc

SEQ ID NO: 2643402 - RNA, 19 nt, Artificial Sequence
  Description of Artificial Sequence: Synthetic oligonucleotide
ugcauagaucaggacagag

SEQ ID NO: 2643403 - RNA, 19 nt, Artificial Sequence
  Description of Artificial Sequence: Synthetic oligonucleotide
caugcuaaaacaugcccca

SEQ ID NO: 2643404 - RNA, 19 nt, Artificial Sequence
  Description of Artificial Sequence: Synthetic oligonucleotide
gaaugaacccucugaucug

SEQ ID NO: 2643405 - RNA, 19 nt, Artificial Sequence
  Description of Artificial Sequence: Synthetic oligonucleotide
acucagaaggugcauggca

SEQ ID NO: 2643406 - RNA, 19 nt, Artificial Sequence
  Description of Artificial Sequence: Synthetic oligonucleotide
uguagcccuucucuggucu

SEQ ID NO: 2643407 - RNA, 19 nt, Artificial Sequence
  Description of Artificial Sequence: Synthetic oligonucleotide
agaguucuggugaaaauca

SEQ ID NO: 2643408 - RNA, 19 nt, Artificial Sequence
  Description of Artificial Sequence: Synthetic oligonucleotide
gaucaugucaaauucucau

SEQ ID NO: 2643409 - RNA, 19 nt, Artificial Sequence
  Description of Artificial Sequence: Synthetic oligonucleotide
aucaaccacagaaacaaca

SEQ ID NO: 2643410 - RNA, 19 nt, Artificial Sequence
  Description of Artificial Sequence: Synthetic oligonucleotide
uuccaucuugcucaucaac

SEQ ID NO: 2643411 - RNA, 19 nt, Artificial Sequence
  Description of Artificial Sequence: Synthetic oligonucleotide
gaaaaucauuaagaucaug

SEQ ID NO: 2643412 - RNA, 19 nt, Artificial Sequence
  Description of Artificial Sequence: Synthetic oligonucleotide
ucuuccuuggaagaucuuc

SEQ ID NO: 2643413 - RNA, 19 nt, Artificial Sequence
  Description of Artificial Sequence: Synthetic oligonucleotide
guagguccaacaugagucc

SEQ ID NO: 2643414 - RNA, 19 nt, Artificial Sequence
  Description of Artificial Sequence: Synthetic oligonucleotide
gguuuuguuaacuauacau

SEQ ID NO: 2643415 - RNA, 19 nt, Artificial Sequence
  Description of Artificial Sequence: Synthetic oligonucleotide
gaacuguaggaaaugguga

SEQ ID NO: 2643416 - RNA, 19 nt, Artificial Sequence
  Description of Artificial Sequence: Synthetic oligonucleotide
uccggcccuauuauauagg

SEQ ID NO: 2643417 - RNA, 19 nt, Artificial Sequence
  Description of Artificial Sequence: Synthetic oligonucleotide
aacuuugggaugacaaaga

SEQ ID NO: 2643418 - RNA, 19 nt, Artificial Sequence
  Description of Artificial Sequence: Synthetic oligonucleotide
aaacaugccccagguuugg

SEQ ID NO: 2643419 - RNA, 19 nt, Artificial Sequence
  Description of Artificial Sequence: Synthetic oligonucleotide
ucagaaggugcauggcagc

SEQ ID NO: 2643420 - RNA, 19 nt, Artificial Sequence
  Description of Artificial Sequence: Synthetic oligonucleotide
ugcaggaguagguccaaca

SEQ ID NO: 2643421 - RNA, 19 nt, Artificial Sequence
  Description of Artificial Sequence: Synthetic oligonucleotide
gcaaauuccagguauucca

SEQ ID NO: 2643422 - RNA, 19 nt, Artificial Sequence
  Description of Artificial Sequence: Synthetic oligonucleotide
ugguuuuguuaacuauaca

SEQ ID NO: 2643423 - RNA, 19 nt, Artificial Sequence
  Description of Artificial Sequence: Synthetic oligonucleotide
gaaauacucagaaggugca

SEQ ID NO: 2643424 - RNA, 19 nt, Artificial Sequence
  Description of Artificial Sequence: Synthetic oligonucleotide
caugguugguaacuguuuc

SEQ ID NO: 2643425 - RNA, 19 nt, Artificial Sequence
  Description of Artificial Sequence: Synthetic oligonucleotide
agcaagugggugccugccc

SEQ ID NO: 2643426 - RNA, 19 nt, Artificial Sequence
  Description of Artificial Sequence: Synthetic oligonucleotide
accuugacuugaaauacuc

SEQ ID NO: 2643427 - RNA, 19 nt, Artificial Sequence
  Description of Artificial Sequence: Synthetic oligonucleotide
ucuuccuccggcccuauua

SEQ ID NO: 2643428 - RNA, 19 nt, Artificial Sequence
  Description of Artificial Sequence: Synthetic oligonucleotide
aggaagaagaugcuucuuu

SEQ ID NO: 2643429 - RNA, 19 nt, Artificial Sequence
  Description of Artificial Sequence: Synthetic oligonucleotide
ggaugacaaagauaaaaga

SEQ ID NO: 2643430 - RNA, 19 nt, Artificial Sequence
  Description of Artificial Sequence: Synthetic oligonucleotide
ccuuguagaagauggauuc

SEQ ID NO: 2643431 - RNA, 19 nt, Artificial Sequence
  Description of Artificial Sequence: Synthetic oligonucleotide
agaagaugcuucuuuccaa

SEQ ID NO: 2643432 - RNA, 19 nt, Artificial Sequence
  Description of Artificial Sequence: Synthetic oligonucleotide
auaggacgcagggucaaac

SEQ ID NO: 2643433 - RNA, 19 nt, Artificial Sequence
  Description of Artificial Sequence: Synthetic oligonucleotide
guagaagauggauucugca

SEQ ID NO: 2643434 - RNA, 19 nt, Artificial Sequence
  Description of Artificial Sequence: Synthetic oligonucleotide
ccaauuugguaauacacuc

SEQ ID NO: 2643435 - RNA, 19 nt, Artificial Sequence
  Description of Artificial Sequence: Synthetic oligonucleotide
aggacgcagggucaaacug

SEQ ID NO: 2643436 - RNA, 19 nt, Artificial Sequence
  Description of Artificial Sequence: Synthetic oligonucleotide
auaguacggcuuuccaucu

SEQ ID NO: 2643437 - RNA, 19 nt, Artificial Sequence
  Description of Artificial Sequence: Synthetic oligonucleotide
ucauuaagaucaugucaaa

SEQ ID NO: 2643438 - RNA, 19 nt, Artificial Sequence
  Description of Artificial Sequence: Synthetic oligonucleotide
gguauuccaucuuccuugg

SEQ ID NO: 2643439 - RNA, 19 nt, Artificial Sequence
  Description of Artificial Sequence: Synthetic oligonucleotide
aguuauugcaggaguaggu

SEQ ID NO: 2643440 - RNA, 19 nt, Artificial Sequence
  Description of Artificial Sequence: Synthetic oligonucleotide
aaacuuguaucugcauaga

SEQ ID NO: 2643441 - RNA, 19 nt, Artificial Sequence
  Description of Artificial Sequence: Synthetic oligonucleotide
aucaugucaaauucucaua

SEQ ID NO: 2643442 - RNA, 19 nt, Artificial Sequence
  Description of Artificial Sequence: Synthetic oligonucleotide
ugguugguaacuguuuccu

SEQ ID NO: 2643443 - RNA, 19 nt, Artificial Sequence
  Description of Artificial Sequence: Synthetic oligonucleotide
uucuggugaaaaucauuaa

SEQ ID NO: 2643444 - RNA, 19 nt, Artificial Sequence
  Description of Artificial Sequence: Synthetic oligonucleotide
uaugguucuggggauuaga

SEQ ID NO: 2643445 - RNA, 19 nt, Artificial Sequence
  Description of Artificial Sequence: Synthetic oligonucleotide
uccuccggcccuauuauau

SEQ ID NO: 2643446 - RNA, 19 nt, Artificial Sequence
  Description of Artificial Sequence: Synthetic oligonucleotide
guuauugcaggaguagguc

SEQ ID NO: 2643447 - RNA, 19 nt, Artificial Sequence
  Description of Artificial Sequence: Synthetic oligonucleotide
auacaugguugguaacugu

SEQ ID NO: 2643448 - RNA, 19 nt, Artificial Sequence
  Description of Artificial Sequence: Synthetic oligonucleotide
uguaggaaauggugaugac

SEQ ID NO: 2643449 - RNA, 19 nt, Artificial Sequence
  Description of Artificial Sequence: Synthetic oligonucleotide
cucaucaaccacagaaaca

SEQ ID NO: 2643450 - RNA, 19 nt, Artificial Sequence
  Description of Artificial Sequence: Synthetic oligonucleotide
accaaaagcuucauacaug

SEQ ID NO: 2643451 - RNA, 19 nt, Artificial Sequence
  Description of Artificial Sequence: Synthetic oligonucleotide
cuccggcccuauuauauag

SEQ ID NO: 2643452 - RNA, 19 nt, Artificial Sequence
  Description of Artificial Sequence: Synthetic oligonucleotide
uccuuggaagaucuuccuc

SEQ ID NO: 2643453 - RNA, 19 nt, Artificial Sequence
  Description of Artificial Sequence: Synthetic oligonucleotide
caggaguagguccaacaug
